United States Patent Application Publication US 2019/0348154 A1 - sequence listing, part 133

SEQ ID NO: 505519 - DNA, 1827 bp, Stenotrophomonas maltophilia
atgctcattccaggcttcatggcaggcgcgcaggcgccggacgagctgcatacccgatggtcgccgtggcgtacgctgcttggcgtgctggcgccgcagcaacgcaccggcacagcgaaggcgatgaccgaccgcaccgagctggaggcgcaggtggccgcgctgcatcgcgtgcaggccgtcatcgagttcgcgctcgacggaaccatcctgcaggccaatgacaatttcctgcaggcgatggggtaccggctggaggagatccagggcaggcatcattccctgttcgtcgaccccgagcaggcgtgcagcgccgagtaccgcgacttctgggcgcgcttggggcgcggcgaatatgacgccgggcagtaccgccggttcggcaagggccagcgcgagatctggatccaggcctcgtacaacccggtgctggatcggcaggggcggccctacaaggtggtcaagttcgcgaccgacatcacccagcagaagctgcaggcggccgactcggcggggcaactggccgcgatcgccaagtcgcaggcggtgatcgagttcagcatggatggccgcatcctgtcggccaacgacaatttcctcgccgccaccggctacagcctggacgaggtgcgcgggcagcaccattcgttgtttgtcgagcccgggcatcgcagcagcgtggaatatcgccagttctgggagaaacttgggcgcggcgaatatgatgcgggccagtatcggcgcctgggcaaggacgggcgcgaggtctggatccaggcttcctacaaccccatcctggacctcaacggaaagccgttcaaggtcgtgaagtatgccgccgacatcaccgcgcaggtgcacgagaaccaggtcatgcagcgcgccgtggcgcagacccgagaggtggtggctgccgccaagctgggtgacttgacccagcgcgtagccaccgccgacaagagcgggccgattgccgagttgtgcgaaggcgtgaattcgctggtcgaggcgatggccgcgatcatcggccagatcaagttcgcggccgacaccatcgccgtgggtgcgactgaaatcgcgcagggcaacagcgacctgtcgcagcgcaccgagcagcaggcggcctcgctggaggagactgcggtgtcgatgaaaggtcttgccgagacggtgcagcgcaccgcaaccaatgcccgccaggccagccagctggccggtggggcagccgatgtcgccgcgcggggcggcaatgtggtgcatgaggtggtcgagacgatggcggtgatcaatgcctcatcgcggcgcatcgtcgacatcatcggggtgatcgacggcatcgccttccagaccaacattcttgcgctgaacgcagcggtggaggccgcgcgcgccggtgaacatggtcgtggcttcgccgtggttgccaccgagatccgtgagctgtcgcagcgttcggccagcgcagccaaggagatcaagcacctgatcgatgcgtcggtggccaatgtcggcgccggtaccgcgcaggtcgagagcgcgggccgcaccatggatgagattgtgacaaacgtgcgccgggtcagtgacctgatgagcgaaatcagcacggccgcgcagcagcagagcgacgatatccagcagatgaaccaggccgtcgatctgattgaccagggcacccagcagaatgccgcgttggtcgaggaggcatcggcggcggcacgcagcatggaagaacagtcggcgcagctgctgcagaccgtggccagcttccgcgtgcagggcgcggcagggcagcggcagggagcggcggcgctgcacgccgtctag

SEQ ID NO: 505520 - DNA, 231 bp, Stenotrophomonas maltophilia
atgaatgtctgcaacccggtgacgctgcgtgcctacgccccggcaatggtcggctggtgcctggccctggccgcctgcctgcgtgcggaacagctgcgcggcgacctgcacgcgcaggccctgctgccggtgctgcagggcggcgcggtcgccttgctggtgttcacgctgtcctgcatcggtgccgccagcatcatgctgtggcgggcgggcaggaacgcggtggagtga

SEQ ID NO: 505521 - DNA, 1158 bp, Stenotrophomonas maltophilia
atggatcaatccgacatcaatctgctggtcgcctttgttaactcggaagaagctgcgcttgctgaggaatgtcaaggcgacatttacccgagctatcactaccaactcggagcacttgcaccgaaagcaggtcgccacttgtctggggatctgctgcaacgtttctacttccactggctgcgcgtgggtgactggaaggtcgccggactccctgagagagactttcccacccttgttgcagcctatctggaactcacaaagctcccggtgggctactacacgcgccaagccagccgcagcctcgagcacctgttctgcttcggcttcaacgagcatggcgagctgccaagtggcacggttgcaaatgcagcggatctgaaacagcgcacccgtctggtggagcattgcaggaagtaccaatcgttccatgcccagcgagagaaggtcgaaaaattccttccattccgctcgtcggccccgatcattctcgaagccggccgatccctgcaacacgatatcaaggaaatggggccaatcctctattggggcatggcactcattgcacaactcaatgaggacacgcgcatccagatggcacatgacctgatggtcaggaagtggtctggagacggcgatcgaagccacgcgctctccgtgctttacctgactgccgaagccgcccgaccacactgcgcggagaacagcgagtacgtcgctctttgtgaaaatctggcgcaactgcatgacatgcggatcatggcgggggacgctgtccggctggtgcagcgccagggttggcgcgtgcagaacatccgagactggagcgccagaatcaccctctatcaggacggcgagtacagcagcgagagcgggcatcctcggatcagcctgaccctcaacagttggcctgacagcccttggtcaatcaacctgacctcgggtgatggctcctacgtcgcctaccgggacagacccaccagcaacgacttccagttgccgccaatcatcggcgccacgcttgatcactttcccgaatgggtcaagcagataaatacaagcctgggtatcaatttggttccaggcacggattcggttgcgtctgcccacaagaatcgcacgctggccagacaactagacgcttggatgcgcggaaaatag

SEQ ID NO: 505522 - DNA, 462 bp, Stenotrophomonas maltophilia
atgaaatccgcgaccgtcttcagcaagtgcgccaggaagaccggctatgccgggaccacgaccacccgctaccgcttgctggatgacgccctgcttgtcgtgaatcaccaacgcgccagcgaaagccgcggtttctatgtgaatgccggactctactttccagagttgctcgtgcaccccctcacgcccgacgatcttgaaacggctttcaggtaccgctccagcatccccacgccgcatgtcgactggcgtatcgaagagacgccaggcctgcgccgggctttcacccagcaggatcttcatgacctgctcgatgctggcgatcgcaacgcgatgaagcgcctgctgctcaatgcccttgccgacgtggcgggcttcgcagcgacccatggaaatcgcgcctcggtacggcggatgcagcaggagggacgcttccgcgcgatcatccgcaaagaggtctga

SEQ ID NO: 505523 - DNA, 402 bp, Stenotrophomonas maltophilia
atgctcgatcatcttggtttgaccagcgccgacctggcgcgcagcaaggctttcttcctgcaggcactggcgccactgcagatcggcgtggtgatggaagtgagcgccgaactgaccggcgaccacgaccacgtcggcttcggcagcgacggcaagccgttcttctggctcggcaatggcggcaccgccagccacggcgtgcacgtggccttcgcctgcgccagccgcgcgcaggtggacgccttccacgccgccgccctcaccgccggtggccgcgacaacggcgcgccgggcctgcgcccgtggtaccacccggattactacgccgccttcgtgctcgacccggacggcaacaacatcgaagcggtctgccatcgcccagtcggcgaggtggctgcatga

SEQ ID NO: 505524 - DNA, 1227 bp, Stenotrophomonas maltophilia
atggatgggggcagcaggccggagggcatcggtgatgcccggcccggcacggagcatcttgcagtggtggcgctgacgctgctgctggggggcaatgtggtcgcgctgatcggccagcacacggcggccgaggctgggccggccatcgtgctgagcctgttgctggccgcactgggtacgatgccactgctgtattgcctgcacgccctcaaccagcagctgccggctgtcgatggcctgcagggagtgttgcgtgcgtgctggggccgggcatccgccggagtgctcggcggcgcgctgttgttggaactggtggcgaccatgggtggcgtggcgcaatcgctggcccgtcatctgcgtgcactgctggcctattgtggcgtcgaggccgactacgcggtgccgggtccgctgatggccagcctggcggtgcttctgattggtgtggtcgggttgctgccgtggcgacgaatggttctggtggcgtgtgcgctgttgacgatgaagatcgggaccggcctgctgctggtggcactggcagcccgttacatgcactacgcgcactggattccctggctgccggaggcgacggctccctatcgctttgggcttggtggtgtattggcggcgagcgtgccgctgctgggtgcgttcgccagcgtgggcctggcggttggatttcccggcttgggcgggcaggtgaaggcgcgccagtcgcggctgctggcgggcatgctgctgctggccatgctgttgctgatcgtggtcgctgcattgcaggccgggctggtcgagttccctgcattggacagcacgcgaccgctggcggtagccctgcaaccgcacccgcagctgcagtggctgatgccgttgctgccgctggccggcgcggccggattggccgcgctgctgctggtgctgctgcgggtgggcctgtgcttggcgatgcagctgtggccggcacggcatgacgaagcaatcggcatgcatgtgcgggcggtgccggtcgcgttgattctgtcagcggcggtgctggctttcggcgtgcccgcgggcatcctgccggtgctgcccggcccggtcgtgctggtggtgatggccgccctgtgcctggccgtactgcgcgggcagtcaccgttggcacgtggccttgcgctgctggcgcctgtggccgccggactgtgcatgctggccgccatcgggtggctgcgggcctggcccggctga

SEQ ID NO: 505525 - DNA, 3162 bp, Stenotrophomonas maltophilia
gtgcgccgcttcaatctttccgagtgggcgctggccaaccgcccgctggtgctgttcgcgatgctggccttcgcgctgatcggcgcgtggtcgtacaagcacctgggccagtccgaggatccaccattcaccttcaaggcgatggtggtgcgcacgctgtggccgggcgccaccgccgagcaggtctcgcgccaggtgaccgagccgatcgagaaggcgctgatgaacaccggcgagtacgagttcatccgctcctattcgcgccccggcgaatcgcaggtcatcttcatggcgcgcgacagcctgcgttccaggcagatcccggacctgtggtaccaggtgcgcaagcgcgtgggtgacatccgtccgacgctgccgcgcgagatcgtcggcccgttcttcaacgatgagttcggcgacacctacggcaacatctacgccttgaccggcaagggcttcgactacgcggtgatgcgcgactacgccgaccgcatccagctggaactgcagcgcgtgcccgatgtcggcaagatcgacctggtcggcctgcaggacgagaaggtctggatcgagctgtccaacacccgcctggccacgctgggtgtgtcgatgcagcaggtacagcaggcgctggccgaccagaatgcggtcaccggcaccagcttcttcgagaccgccaccgatcgcgtgcagctgcgcgtgaccggccagttcaacgacatcgaagcaatccgccagttcccgatccgtgctggcgaccgcaccgtgcacctgggtgacatcgccgaggtcaagcgcggcttcgccgatccggcgtcgccgaagatgcgcttcatgggcgaagaggcgatcggcctggcggtggcgatgaaggatggcggtgacatcctcaagctcggtgccaaccttgatgccgagttccaacggctgcagaagaccctgccggccggcatgcagctgcgcaaggtgtccgaccagccgcaatcggtggaagagtcggtcggcgagttcgtgcaggtgctgaccgaggcggtggtgatcgtgctgctggtcagcttcttctcgctgggcctgcgcaccggcctggtggtgggcgtcaccattccgctggtgctggcgatgaccttcttcgtcatgcactacttcgacatcggcctgcacaagatctcgctgggcgcgctggtgctggcgctgggcctgctggtggacgatgcgatcatcgcggtggagatgatggccaccaagatggagcagggctacgaccgcctgcgcgcggccagtttcgcttgggaatcgactgcgttcccgatgctgaccggtacgttgatcaccgcagccggcttcctgccgatcgccacggcggcatcgagcaccggtgaatatacgcgttcgctgttccaggtggtgaccatcgcgctggtggtgtcgtggatcgcggccgtactgttcattccctacctgggtgacaagatgctgccggacctgttcaatccgcagccgcccaagccgggcagcctgtccgcgcgctggcatgccaagcgccagcagtgggccgaccgctacccggcgctggccaacctgattgcgccgccgcagcacgggcacgaccatgatccgtaccagcgcccgttctatcgcagcttccgccgcttcctcgatacctgcctgcgccatcgctggtgggtgatcgccgcgaccatcgccctgttcgtgttctcgctgatgatgttccgcttcgtgccccagcagttcttcccggactcgacccggccggagctgatggtggacatcgagctggccgagggcgcctcgctgcgctcgacccaggcccaggccgagaagctggaaaagctgctgtcccgccgcgagggcattgccaactacgtgtcctatgtgggcaccggttcgccgcgcttctatctgccgctggaccagcagctgccggcgaccaacttcgcccagttcgtggtgttggccaaggacatcaaggcgcgcgagagcacccgcgactggctgctgcacgaggtgatcccgaagttcccggacgtgcagatgcgcgtgacccgcctggagaacggaccgccggtcggctatccggtgcagatgcgcatctccggcgagcacatcgagaaggtgcaggcgatcgcgcgccaggtcgaggccaaggtgcgggagaacccgcacgtgatgaacgtcaacctggactggagcgagccgagcaaggtggtgcgcctggtggtcgaccaggagcgcgcccgtgcgctgggcgttagcagcgcccaggtcagccagttcctgtccagttcgttggccgggcagtcggtgagcgtgtatcgcgaaggcaatcgccagatcgagatgctgctgcgcgggccggccgatgagcgcaaccagctggagctgctgtccagcctgtcgatgcccaccgccaacggtggcagcatcacgctgtcgcaggtggcgacgatggagtacggcttcgaggacggcatcatctggcaccgcaaccggttgccgacggtgaccgtgcgcgccgacatcagtgatggcatgcaggcgctggacgtggttcatcagatcctgcccacactggatggcatccgtgccgagctgcccagtggttacctgctggaaaccggcggtaccgtggaggattcggcacgtggccagaactcgatcaaggccggcatgccgctgttcctggtggtggtggccacgctgctgatgctgcagctgcgcagcttctcgcgtgcagcgatggtgctggtgaccgcgccgctgggcatcatcggcgcgaccctgttcctgctgctgttccgggcgccgttcggcttcgtcgcgctgctgggcacgatcgcgctggccggcatgatcatgcgcaactcggtgatcctgatcgaccagatccagcaggacatcgatgccgggcatgaccgctggcattcgatcatcgatgccacggtgcgccgcttccgcccgatcgtgctgaccgcgctggcggcggtgctggcgatgattccgctgtcgcgcagcgcgttctacggctcgatggcgatctcgatcatgggcggcctgatcgtcggtacggtgctgacgctggtgttcctgccggcgctgtatgcggcgtggttccgggtgaagccggacgaatccggggcgtaa

SEQ ID NO: 505526 - DNA, 393 bp, Stenotrophomonas maltophilia
atgaccctcgtcctgcagattgaaggcgccgccattgatgacatcgccagcctttacacggagatcaaccgcgtgttcatggccggcgaggcatggcagctcgggccgagcctggacgcactggacgacctgctgcatggcggctatggcgcgttggccgggcaggcgcaggccacgctgatctggcgcgatatcgcccacagccgtgcggccctgggcgtggaggcgacctgccagtggctgcaggccaagctggacgcaccaggcagcttcaacgcgcgggcgatcgcccgccggctgcaggcggtgcgacagggcgagggcccgacctacttcgagatcgtcatgcagatcttcgacagccatcggcagatcaccctggtcccggcctga

SEQ ID NO: 505527 - DNA, 1035 bp, Stenotrophomonas maltophilia
atgcgatttcttttttccgaactctgcaatctcctgggacaacgaatcgatagcgatccggtcctttccattgccgaacgcatcggagcgaaggcaccaaaaccaacctccttcgcggactccaactctattggcgagatgtctcaccgccccacgggtctggaaatcagctggagtcacgaggttctcgcacccgagtattacccgccccggaaatcgggccgccacttcgtctgctgggtagactcgatctggtttgatccggcaacagtagacaacctgcctttgcagttgtctccgacctccctcgctgaggatttggttggggcggctcctcagctcattgtcgaggatatgcccaagagaacagccgcgatgctcacaactcgtccagactgcgtgcttgccctccccagcacgcctaggcgctggcagatcaagctagcacagatgcaccgctactccttgccaagttacgctgcggctggaaatgatcttccagagcagaatgtcaattcagacaggtgggattattgggatcaggctaccgccttctttctctactggtgcattctcagaggcttcgcaagcgaacgacatacttctgatcacggcgcagaaatccagaacctacatcagcagcgcatgcccgtgatggactacatccgtgcgaactgttttgaaggcgagctgtggagctgggatatccgcgagcccgtgcgccattttacctacatctactttcatgctctctgcaatcgcaactcagcacatcctagaattggaagaccggacaggtgccatcccaacgacgatctgagcgcggtggtgaaccacctgtcgaagtgcggggtaccaaccgtagatgacgaatggcggctgttccgccatttctcaacgatgctggacgcacgctggaaggactatcttctgacaggacttcagacagaagtaagccgccgccagaccgtccagctcacggcaatgtatcggaagatggtggacaacctctccgcagcctctgaactgccatag

SEQ ID NO: 505528 - DNA, 1923 bp, Stenotrophomonas maltophilia
atgagcgcagttgccttgttccgcagcaccttcgttgcggccagcctgtgcacggccctggctgcctgcacgatgggtccggacttcgtacgtcctcaggcggaattgcccagtcactggcagggcgaggccgtcgcgggcaacgcgatcgatccggacgccgcctggtgggccggcttcgacgacccgctgctgggacagctggccagccaggtgctggaggctaacctggacctgcagctggcggccaaccgcgtgcagcagagccgcgccgcgcgtggcatcagcgccgccgaccgtctgcccagcgtcagcgcaaccgccagcggcgcacgcgcacgcaacagcgaggtgggcttgaacgatccgtccggcaacggcggtcgtgatgactatgggctgttccaggccggcatcggcctgagctgggaactggatctgtggggacgcgtgcgccgccaggtggaagccgccgatgcacgcgtgcagatggctgaggaggatgcacatgcagtgcgcatcgcgctgctggcggaaaccgcgcgtgactacctgcagctgcgtgcaacgcggcagttgctcgcgatcaccgaggacaacctcagcatcgccctcgacatcaagcgcctgaccgaggcacgccagcagcagggcgtggccagcacgctgcaggtgtccagcgcgtcagcgcaggtagcatcgctgcaggcacgcatcgcgccgctgcggcatcgtgaatcgcagctgcgcaatgcactggcgttcctgctggcacagcctccgcaggcgctggatgcgcggctgcagaatgcacgccgtgactggcccgcactgccggccgtggcggtggggctgcccagcgaactggccgagcgtcgcccggacatccgtcgtgccgaagcggcgttgcatgccgcaacggccggcatcggcgtggccaaggccagtttcctgccgcgcatcaccttgaatggcgacgctggcttccaggccaagcagctggatgatctggatggctggaacgcacaccgcttcagcatcgggccgtcgatcagcctgccgatcttccagggcggccggctgaaggccaacctcgcgttgagcaagctgcagcagcaacagtcgtcgctgcagttccagcgcacggtgctgcaggcctggcatgaagtggacgacgccatcgatggctacgccgccgaacagcagcgcaccgtgcagctgcacgtggcggtggacgaaagcgagaccgcgctcggtgcggcgcgccggcagtaccaggccggcgtggtcgacatgctggacgtgctgaccacccagcgcatcgcactggacaaccaggccgcactggccaacagccaggctacggcggcaatcgcgcgggtggagctgtaccgcgcgctgggggtggctggtagggcaatggaaacgccgggcatggcccggcgctacccatcgcggcgggcgcctcaacgcacgtcgcgcagttcccagtggctgccggccagcaggcgcaggcgctgcttgaacacgtcgctgtcgatgcgggtggtggcgaccaggttgatgcgcagatccttctgttcgccggtcacggtggcatccggatcggtcacgccccactgcggttccaccgcgtccgggtcgggctgcttggccttccagcgctcgaacagcgtgccgctgcgcagggcatcctgcagctcttcggcgaaaccggcggcgccctgcgaatggaaggacaggtcagggtcattgccacgggccttggacgggtcgggtaggctgatgtggtactgcgcaggcatgaagttctccttgaagtgcggcaagactggcacaaccgcagtggaatcgatgtgcagattccggccgtggccagcgctcattcgaaccgatgcggcccatcggcgaagcctacggtga

SEQ ID NO: 505529 - DNA, 1170 bp, Stenotrophomonas maltophilia
atgtcgcgcgcggcagtactggttggtctggcggtcgtgtgcctgatggtcatcgcgaccgcagccgaatggacatcgcgtgtccgcgcaggcatcgcctcgctgcgccgcagcagcacgctgcggacgctgggcgcggacgaacacatggcactggcaccggtgcgcgcgttgaccggctgcgaccatgacgaccagataaagcggctgagtggcgccttcacaggcggggcgtggcggaacagcttcccggtcggtgacggctttctggctggcattcccgtgctggtgccaagacaggcatggccctacctctcggaagacaatgaagctgacgtggtactgggtgatcacgtggccatggtggtgcgtctcaatggcttcaccatcgctgctgcacggccggatgcagccaccagccgcgtctgtggcgagcgcctggagacacccgaagaagtctcgatgcgacggggtcccggcctgcgcccgtccccgctgctgattgccgcactggcgctgtgggccgccaccggcgtcccgggcctgctcgccatgccgttgctcgccatcgccggtcttgcggcctggctgggcttccctcgccgcaacggccctgcgacagcgcagcgcgtgctgcgggtccgcgggcgcctgcgcgcgtaccagcgtactgcccagacatcacgggtgtggttgctgggcaatgaccggcgtgtgcagcttccagcggaatgggagcacgctgcggcattctcccgcaggcgctcgatgctgctggatgtgcgcgcctgtgacggcgcagtgctgggcgctggcacggcgtggtgcctggccagcgaccgacgccgctatccgcccccgggagggtcctggcaactggcgtggctgggcctgctgctgtgcgtgctggtcttcggcgccgcctggatgccgtggtcgcagcgcctggagctgggctggccgcttgcgtctggctggggggcggtggcattgctggcgttgggctggcacgcgatgcggattgtgatctgcatggtgcagttcttccgccgcaacgaggcgcttgaagcggacatcgcgcagcgtccggacccgtccgtggcaatgaacggttcacgcccctcgcgcgcgatgtctcacatcctgagacgtggatgtggtgccatgtga

SEQ ID NO: 505530 - DNA, 1122 bp, Stenotrophomonas maltophilia
atgaccctgctgttcccgctcggcctggccgctctcgccgcagggctgctgccgctgctgatccacctggcccgccgccatccgtatacgccactggatttcgccgcgctgcgctggctgcgtgcacagatacggccgcgccagcgcatccgcttcgatgactggccgttgctgctggtgcggctgttgctactggcagccttggcgctgctgctggcgcggcccgcgctgacgggcccggcagcgccccccgctgcatggaccgtggtagcgccgggactggatgctacggcactgcgtggagcggccgaggatggcaactggcactggctggcacctggcttccccgccatcaatcaggcaccaccggcatccagcgcatccctgcccagcctgttgcgcgaactggacgcacagctgcctgcgggcaccgcgttgaccgtgcacgttcccgatcccctgcccggcctggatggcgcccgcctgcagctgtcgcgcgacgtgcaatggcacacgcagccgatgccggtcacaccgccgcagactgcagcggcattgccgcagctgcgcgcgcacggcgaggcatccgccactgcccagcactggttgaacgcactgcggcgcgcgtggggcgtgcaggcaacgctcgctccgctgtcggtggatgccctgcccgaacgcggcgagatcggcgtgtggagccgcagcgatgcactgccggcgaactggcaggcgtggctgcgcgacggcggtcgtgtcatcaccgccggcatgcccgctgccgacgcccgcatcctgctgcgcgacgcggagggcgcaccgctgctgtggcaacaacgcgtcggccacggctatctgctggcgctgccgggcgactggaataccacgagcaacgccgcgctgcgcgatccgaacttgccgcgtgccctgctgctggcgctgcagccacccacggctccgcgcctgggcgatgcacgtgaccaggcaccgcagcgggccgcattgcctgctgcaacaccaccgctgcgtgagccgacgccttggctgttgctggctatcgtgctgctgttcgccctggaacgctggatggccagcagcgcccgccgcagggtggccgcatga

SEQ ID NO: 505531 - DNA, 2070 bp, Stenotrophomonas maltophilia
atgcaagaccagatcatccaagcgttgcgccagaaccaggccgaccaggccgtgcagctggcccaggcgtggacccgtgacgaacccggccaggccggggcccaccgctggctggcgcttgcgctgcagcagcagggcaaggccgaagatgccatggaagccctgcagcaggcgttgcagctggcaccggacgacgcccagctgcacctgcagcatgctggcctgctgctggccctgcgccagtacgaaggcgccgacgaagcgctggcgcgcaccaccgggctcgacccgaactccttctccgcctacctgatgcaggcgcacctggcggttggccgcaatgacttcgacgaggcacaacgcctgtccaccctggcctcgcgcgtggagccggaccaccccgagctgctgaccatcgacggcatgatcgcgctgcgccgcgatgacccggaccgtgcgctggtgctgctgtcggcagccaacaaggcccagccgaatgacacccgcgtgctctatgcgctgggctttgcctaccttggcaaggacatgctggcattcgccgagcaggcgttccgccgcgtgctggaactgaacccggccatcagctcgctgcatggcctggtggtgcagctggcgctgcgccagggcaacgtgccggcggcggccgaagccatggaggtggccctgcggcagccggagctggacgtgccggcgatgcggcgcctggccggtgagctggcgttgcgcaacggccagccgctgcaggcgctggaccatctgctgcccttgctggaagcgatccccgatgaccgccagctgctgcagctgctgctgatgtcctggcagcgccttggccgcgaagacgaggcgcgtgcacgcctcgacgctgccctggagcagcacccgcagctgcatgatctgtggctggcgcgcctggccgtggaagaagttggcagccccgctgccgcggcgaccgttgaacgctggatggacgccatgccgggccacctgccggcgctggaagcacgcctgcgcctgcacgacatggtgggcgagcacgagcaggccgaagccattgccgagcgtatcgtcagcattgaaccggggcgtgtcagtggcgaaacccgcctggttgaagggttgctgcagcgtgatccgcctgctgcggtggcccgcgtgcaggcgctggtcgagcaggcgccggaagcgcatcgcgccgatctgcgcacctggatgggcgagatccaggaccgtgccggccagccgcaggaggccctgcgtacctggctgtcgctgcaggccgaccaggccccgcaacgcctgccgctgccaccgcaggccaagtctccgccaagctggccggagaagggtgagattgacggcaacaccagttccgcgccgatcttcctctggggcgcgccgggctcgggcgtggagcgcgtggcgaccggcctggcggccgccagcccggtgctgcgcagcgaccgctacaccagcaacccgcccgacgatgcgttccagaactacaacacgctgcaggatctcgcttcgggcgtactgacgccggagcggctggtgcagcgttggcgcgaacagctgccggcgcgtggcctgcagagcgataccgtcatcgactggctgctgtggtgggacaacgccctgctgtgggcgttgcgcccgcagctgccgcaggggcgactggtgctggtgctgcgtgatccgcgcgacatgctgctggactgggtggcctacggtgccgccgcgccgctggcgatgacctcgctggccgaagccagtgaatggctgacccgcgcgctgaaccagattgccacgctgcatgaggacgacctgtacccccacgtgctgctgcgcatcgaccaggtcggcaacgatccgcaggcgatggccgaactgctgggccgcctgttcgagcggccgatgccgccggcggcgcagttgggcgcgccgcgcttcccgcccggccactggcgcaactaccgcgacgtgatgagcgccgccttcgcccagctcaccccggttgcggtgcgcctgggttacccggaagagtga

SEQ ID NO: 505532 - DNA, 678 bp, Stenotrophomonas maltophilia
atgccgcaccaagatcaatccaaccgtcaccgggaaactgtcaaaggtggggcggtgtgggctggcaggaccgttggcgccatggatggcgccatcgagcccccaggggtgagggcgctttgcttgcgaagcactgcttcgcaagcgcccgaacgcccagccgccagcggctgggccggaccgcggagcggggtttacggcgtgtcctgccagcccacaccgccccgccaagccacagacaacccagagccgctttggctttggctttggctttggctttggctttggcgttggctttggctgttgccggccagcggccggcactaccgcaggtgcagggcgcagccctgccgacccacccttcccctgcgcacgaaaacgatttcactgatttcagcaaaccgtcatcccttcgccacgccagtaccatattgcgcagcagcatgcgcccacgggcgacccgtgctaaaaatcgcccgcccatcgcttagatcgatccaagaacgacattgcgatggccgggagttgggggagcagcaacaggacgtaccaggccacacgcgcggtgctctgccacccacatggcgacagccgcaaagtcacttcaaattagatcgattcaagttgtccgtgccacgtcaccggatcaatccaggagagagggagagatgggaatga

SEQ ID NO: 505533 - DNA, 1662 bp, Stenotrophomonas maltophilia
atggaacaaagtgatgaaggcaggacaatcgatctgcttgcatttccgatagatgtcgatagcgttctgcagcacttgcatagggacatgagagatgattggtttgaagacgccctccagcaccgagatctgttctcaaataaatcctctctgagagaggttctttccgaggttctgcttggtggaaatgggcgctatgttccatcgcaaagcaatgtttgtgacatcccaaagaaggggctgggtgttagatatgcgttggaaacggatttctatgatcgatttatatatcaggcaatctgctcattcctgatcccgtactatgatccgcttctatcgcaccgtgtcctcgggcacaggtacgacaaaaggaggcgcgcagataaagatctgttcaaaggcagaattgaactctggaagacattcgaaggggtgacaaaaaccgccctaaggaatggccaggctctcttttcaactgatctcattaattattttgagaacatatcgattgatagtattcgctctgcttttgaggggatgctacctcgcgtaaaagcgagcgggcctgaaaaggttcttatccggaacgcaatcaatacgctctgcgaactgatggttcgctggtgcttcaatgagcggcatggattgccgcaaaatagagacgcatcatccttcattgcaaacgttgttctcgactctgtcgatcaaagcatggtgcggaaggggtttgattactacaggtatgttgatgacattagaatagtatgtaatacgccgcgaggtgctcggcgggcagcaactattctcatcggtgagcttagatctgtcgggatgaatataaactcgtcgaagacaaagataattacgtccgacagttcgcaggatgatatagatgaattctttcctgggggtgacgatagaagtatagctatcgacaacatgtggcgctcaaaaagtcgtcgtttgatcattcgatcagttaagtatgtattccagatgctttccgattgcattgaatcgaagcagactcagtcgcggcagtttagatttgccgtgaataggttgattcggcttgtagagtcgggaatcttcgacgtgcagggtgagatgtcatcccagcttaagtccttgctgattgattcgttggaggagcatgccgcatctacagatcaatactgtaggttgctaatctctttaagtctgactgacgaagagttgaacagggtcgagcactatctttgtgacaatgagcttgcaattcactcttggcaaaacttccatttgtggatgatttttgctcgggttgggcgcaattctcctgtgctagtgaagttggcggaggagaggattaacgaagacatacttaggtccgaggttcctgcgatatttatatatcttagatgcgtgggggaggtcggcttgcttcaagagtgtgttgatagattcaaatccacttggccctactaccatcagaggagctatctcctgtccattagtgaattggacagagatgtgattaagcctttggtcccagaattgggtccgaagctgagaggaacggtggggcgcgccaagagtcattttattaataatgttcccctggtggagcgcgagcggacaccgattctgcgcctttatgaggagctggatccttatgattaa

SEQ ID NO: 505534 - DNA, 1551 bp, Stenotrophomonas maltophilia
atgattaacaataaggttgtattgctctttattaatgatttttcggggcggggtggcgagaagctctatctttactcgaatgacgttttaacggcggttgctgcaagggacgtgctggaggttgactgcgagataatttgccatgactactggctgctagcaccgacgatattttccgcagcaggtgggcttccttctctagtcacagacgtggaggagttacggatatcgacttcggggatgcgtagcgacagagaggctcgtgacaaggtagacgtgtgtgcccagctcctagagcttggctacgaagaggaagaggtgctgggtcggtataggaatatagtattcaaaaactctgatttcgatgctgaaatattctccagggttgccattgcgctacttaagtactctgcccatgttgaggaaaaggctaaagagcatggggagtgggataggtactgtcagatcgagcggccggtaattagctatcttatccgctctgctgctgacggcatctcgataaataagcctgtgcttaaggtacataagcagaacgtcgatttctcatactacatggcgctcaaggagttttctgccacttttgatttgcctcttgaagttcctacggacgaggaggttatcgagcatcttgagcctcaagggtacgatttttcgggtgtcggactagagtacgttctgaatttcgttcccatggcgaacggtttttcagaaaaattgattgagttgcggaagatcgctgcaagcagaatggttttggcgtcaatctcgctgagtcaagatcggatctatcccgttgttgatggctttggctcaataacatctagaatttattacaaagacccgtcacttcagaatctttcaaaacgatttcgggatgtcatctctcccgcaagggggaaatgcctatcctatgttgattttgggcagtttgaggctggaattatggcagcgctttcgggtgacgagaccatgctgactttgtataggcagggggatgtttatgaggcggttgccgttgaggtctttggtgatcctgcgtttcgtaagcaagggaagagattgtttttgtcctatgcgtatggaatgaagaggaggaatttaatagatgccgcagtggggtatggcgcctgccgcgatagagccaaggaattcttcaataaatttgtcagatttgagaggtggaaatcggaaattcactccgagttccacgactctggaaagatcggcacggcgtttgggaattttgttcgccgctcgtccacgactcctttgagtgagaaggaaaagcgttctgcggtaagccaggttgttcagggaaccgcctcccttatatttaagaaggcgcttatcagaatgagccttgatgatcgggtcgctttaagaattcctatgcacgacgctgtcttgtttgagcattcgcctgaattcaatcccattgagatcgttaatctgttctctagggtcatgaccgagcatttcggtggggccatcgagggaaaggctgagatcgctgcctttgtgcagaattga

SEQ ID NO: 505535 - DNA, 342 bp, Stenotrophomonas maltophilia
atgcctcagccccttcccccggtaccggcaaagctccttgaattgctcaaggactatccggatcatatccagcaactgcagaaggctctcaattcgataaagaatagaagaatcaagtccaccccacccttcgaggccgcagtctgggagttggaggactgtcttagcgccttcaagattgaagcgcgcgctgaaattgacgccgctgtggcatcaggcgatccgcaagcgatcgaacgagccaaagaaaaggaacgagtgatgtcatttgccaggtccagcaacattggcctagcgaatctcagcgagctgcgtgcccactttgacgccagtatggagtaa

SEQ ID NO: 505536 - DNA, 348 bp, Stenotrophomonas maltophilia
atggcttttgcttcccctcctgtcccggcgaacctccgggaaatgctcaaggactatccggagcttatcgagaggctgcgggaagcgctcatttccgtcaacaccagaagcacggggtctttaccgccgtttgaggatgcagtgtggaagctcgaggattgtctcgacagctttatcaatgacgcccaggctgagctgacggcagctaaggcatcaggtgatgctgaattgatttcagcgaccgacggcaaattcaagctgatgttccgagcgcgatccggcaatggcggaatgaaaggtctccatgaacttcgcgattatttcaaggaatcggagaagcggcgctag

SEQ ID NO: 505537 - DNA, 207 bp, Stenotrophomonas maltophilia
atgggccggcaggtgccgcccttgagtggactatatgcaggtaactacctgcatgtcaaaaccggccacgaacgcccggatgcggtagtgccggccggtggccggcatcccggtggagttgggtgcgtgcagttgccggccagcggccggcactaccagatgctgccgacctcgcagcggggagttgacagtgggtcaacctactag

SEQ ID NO: 505538 - DNA, 444 bp, Stenotrophomonas maltophilia
atgctccacgcatttgcctactccagccacatgtcggctgggctttccgatgaaatcctccggcagatcgtctcctgctctgccacgttcaaccgtcgcgtggacgttaccggagcgctgctcgtcgacggtcagcggttcttccagtacgtcgaaggtcctcccgacgggctggaggcggtcaagcgccgcatccatgacagtcgctcgcatgctgccgtcgttccggtactggacatggccatcagcgcgcgtgctgttccctattgggccatgacccgcatcgacaccgggcagatcatggtgtccggcctggtcaatgcgcgatgggacgaatttggccatgccgttccgggcatggatcagctcgtcggcctgctgcgtccgcactttccgcgcatcggcccgctcagtgcgcaccatgcgcccgtcggatccagctga

SEQ ID NO: 505539 - DNA, 321 bp, Stenotrophomonas maltophilia
atggacggcaccgctgaatacctgtggctgccgccgggcgccacaccgcccgaacgggcctgctccccttgccgggccattgttgctgtcgaagccgccgtggaggcggattggcaggcgccgatgagcgattggctggtgcgcagcggttgccgctacatgatggcctggggcatcgagtgcagcggttgggatgatgcggtggacatggcatcgccggaggtcgagtgcgccgacttcgtgatgaccacctggcatgatcgcgacaccctggcggaggtgtcggcgttctgcgccattgcccagcactctacgctttag

SEQ ID NO: 505540 - DNA, 969 bp, Stenotrophomonas maltophilia
atggaagcaagcacttttgacatcggccttgatggaaaaagcccttacccggagcactcacgcgaccagatactggagctccagagaaactctgatggccgaatgctgcttcgcgatgaactggatgcattcaaggcggtgctggtcgagcagggctggcccacctatcgcacctcggggccagccctgattgatgcggccggcaagctgctggggcgctctggcctggattgcgagttccagaagtacatgcttcgcgttcttgatcagcaagtcggcgatgacatccgtcctgcaatctatgcacggcttgcggatcgcatccatgcttcccacaattccagccaactgtacggcaccctgcagcagcggctcgatgatgtggctacggttgatccgccagtagcctcgttgggctccttgctgttcttccgtgacttctacggtctgcccagcctggaggaggacctggcctcgggcggcatcgattacgaagtgaccttgtcacagccaccggcgacgtacacctggcccgacatccggacgctgctcggtgagctgatccagcccgatcaatccttgcgggcagcgctgagcgctgcccgcagcaagggcgtttcagcaaaggtcgagctgctcaaggaggagatcgctgcctccgatcgagaaggcctgcgaaggatcaagcaggtattcgaaggcgtaggctttccgacgcgggacatggcgggcattgatggtgtctctagggccttcctcctggtccagcacgcggatgaggatccagcgttacagaggcgtgcgttggggctggccaaaccattgatggagtcacgcggcatgtcgcggcgccagtatgcaatgctggctgaccaggtttcccctggcagaaggcgagccgcaactgtacggcacgcagatgacccttcagaacggcgtgtacgtgctgcagcctacgtccgatcttga

SEQ ID NO: 505541 - DNA, 1263 bp, Stenotrophomonas maltophilia
atgtcacgacatctttttcgcagggaagtgatgcaggcgaagggaaatcgttggctgggccgcatcaacatggtgcagccgattccgctttggctgtttaccgccttcgctgcctgctcagctgtttccgtcattctcttcattgcacttggcagttatacaaagcgtgcccgggccatgggacagcttgtccctgtcgaaggcatgtccactgtcatggcacccgcaagcggtgtcgtctctcttctcaaggtcagtgagggagagaatgtgcgtgcaggtcaggtggttgccgtgctcaccgtgccaagggcaacggttggcgaaggtgatacctccgccgcattggagaagcgcatccgcgagcgggtccagggattgaaggatgtgcaggctgcggatcaatcccagctcgatgcacaaagtgacggtctcattgcgcaggtggctgcggcgcaacgcgagctggcgcagttcaaggaggaaatccagacaagaagcaggcaggtcgtactggccgaagagacactctcgcggctggagagactgcgcgaaggcagttacgtaagcgaactgcagatcaagcagcagcagacactggcgcttgaacagcatgccagtgtgcaggccctgcagcgccaggcaatcacaacacaacgactcatagcgcagttgcaggaggccatgcgctcgctgccgcaaaagcgtgaagccaccagagccggtctgcggggcgcattggcccaacttgaacaggaacacgtcgagctgctcgcacgaggtgagctggtgcttaccgcgccggtggatggaacggttgtcacgcaggtgctgaagccgggccagtcggtgaccatgggccaacctctgctgagtatcctgccgcaagacggccgtctggaagctggcctgctggtgcccagtcgtgtcatcggcttcattgatcccggcgatcgcgtactgctgcgttaccaggcgtacccctatcagaaattcggtcaccatgagggaacagtgcagcgcgtcagccgcagcgcgcttactgggacagagctggaaatgctgatgcccggctcgacgatccaaggcgaaccgatgtacagggtcaccgtcgcactctccagtcaggagatggacgcttacggtcgcatcgagcgactcaagcccggcatgacacttgaagctgacatccttggcgagcgcagcagcttggccgaatggatctttgcgccactggtcgcacgaagcaaacggatcttctag

SEQ ID NO: 505542 - DNA, 609 bp, Stenotrophomonas maltophilia
atggaactagagcagcgggaaaggcttgggagcgtaccggatctgggcgacgtcgatgttgtcgatgacctggtaccagacgaacttcggcgcgacatcctgcgactggtccgtaaacccatctgggcgtatggatggaagtcggtcaagtctgaagaccgcttcagcttctggcatgcgcattttgccggaggcgacaaggaaagccgtcaggggtgcctggccgaacttgctgcaaacgaagctgcacgaccgatccacgagctgtgggagtgcctgtcgcagacggtgctggccggccatgaaccccttcgtgtgtacgccaatgcccatacctacggcgtggagggctatgttcatacagacaatgcagacaaggaaaattacttcactgtcgtctactacgcccacggaatctggcatcccaactggtcgggcgagacagctttcgtggtgccggagacgggtgacatcacccatgctgtctacccgcgacctgggcgcctggtggtgttccggggcgccacgccacacgttgcacgttcacccagccgggactgtcccgagctgcgcatcaccgtcgtgttcaagacccagctcgcacaatga

SEQ ID NO: 505543 - DNA, 600 bp, Stenotrophomonas maltophilia
atgaccttgcccgtcgccaacatgccggagcggccctccctgcagatgctgcaggagtacctgtcactcctgcgcgctgaccaggtgccgcactcggggcgaacgctgaaggatcatctggaaggaacgggccgcattctgcgggagtggggatgcgacgaggcggtatgcatcgctggcatgttccacagcatctacggaacgaacgtgttcggattcaagcgtcttgggtggagtgatcggccgctggtgggtcggatgctgggcgaacgtgccgagcatttggtgtatctgttctgcgtcagtgatcggcccggtgcgttcctcgaagcgctgggtaccggcatcattcgccacagaacaagcggcgaaagcttcagtgcgggcgtggatgtctgtgcggcgttgcttgagatcgaatccgccaacctcatcgagcagggatgcggcgagcagttcctgaagcgactgtccgcatgggtgagcgcatatccagaccttccgctgagcgttggcctgcgctcgctccttgctgggcacgcggcggctggaaaggcgcccgccgcccctggcaggccgacagcggaggaactccattga

SEQ ID NO: 505544 - DNA, 588 bp, Stenotrophomonas maltophilia
ttgaacgcttcatccatccgtcagaaatttgcagttgaccgttttgcgcggcttgagcagctggtggcggcagaagtgatggatctctacttccagtatgcgaagagctatgcgcgcatgccgaagtactatgagctggaaacagaaaccgcgtcgctggggcgatatgccgacgccatgggcgaggtgctgctggccaaactgttgcctgaggtggaagactgtgtaggaaagcggctgcatgccacttactcgttcctgcgcttctacacacctgaatcgaggctgcgcagacacactgaccgcacatcctgcgaatacacgctgaccttgaccgttggcagcgaaggtacacgggcgccctggccgatcatgattgagacccaggagggtgtgcaggcgttcgacctggctccaggtgatgggctcctgttctccggacgtgagctgccccactggcgcgaatgcctgccagtgggaacctggctccagctcttcctgcattacgtcgatgcagacgggccgcatgcagcgaaccggttcgatggacggaaatttctcggaccgacgaggcgatcagtagcatga

SEQ ID NO: 505545 - DNA, 1044 bp, Stenotrophomonas maltophilia
atgactgttctcatcaatgctggaacgcacgatacacacgccaaggccgtcgtttggggcttgcggcgcaaaggaacgaccgtgtttcatctggcgagcgacaggttctgccagacaacggccttcagcatccgcgtaggggctgcgcaaagtggtgccacgctcgcgatcgacggagaaaccgtagcccttgatcagctgtcggcagtgtggcatcgccgcccgtttgaggcgctgcagaacgctggcgttcaaccagaggatgaggtgttcgcccgaggcgaatcgcaactgatgcgcgaggggttgtatcgatccctggagcttgtcccggcagtgaatccattggatgcccttgtccgggccgaaaacaagatccatcagctgaagcacgcggccgagcttggcttccagcttccggccacattgataagcggctcacctgaggatgtccgaggtttccttgcccaacacgcggagtgcatttacaagccgctacgcggccatgtctggaagtccgattctgctcgacgcgcgacctacaccgccaaggtcagcgaagcagatctcccggcggattcactgctgcgcgccgccccaggcatctatcaggcccgcgtggaatatgctttcgaagtcagggcgcagtttttcggccgccagtgcgcggcgatccgtatcgagcagccgacggatggcagtctcgactggcggcgcagccagggcacgattgacacctgcgaagtggtggatgtcccgctcgacctgcagcaacgctgccatcgtctgatggaagcgctcggcctcgtggcggcggggttcgattttctcgttacggacgatgggcgctggatcttccttgagatcaatcaggccggacagttccttttcgtcgaacagtggtgccctggattgccgatgctggacatgttctgtgagttcatccgtgcaccgtcgctgcagtggcgatacgacatgggacatgcgcatcgccggatctcctattcggaattcatcgagagcacttcagtgattacgtcctga

SEQ ID NO: 505546 - DNA, 174 bp, Stenotrophomonas maltophilia
atgaagaacgaagatatcaagaaggacctggagtcgcgcgtgcttggtcacattctttcccaggaagaaatggagcaggtaggcggcggcgatggcgatggaattccgacgctcccgccggtgaagacgacgccggccagtgacaacggaaccacgcatccggtccttgagtaa

SEQ ID NO: 505547 - DNA, 996 bp, Stenotrophomonas maltophilia
atgcagctggagcattccatcctgaagggccattgcccgcacctggcaatcatcgacgttgccgctcggctcgcggggtgctcagtgcagtcttctgacgtcgcgctgctgggcgcaccccgcaggtacacggaaactttctccctgcagcgagctgcaggcatccttggtgatctgggcatcgtcagtgtcgcggttcgcaccgacctcggcggattggcacaactgcgatttcccgccctggcccaagtgcggtccggtacgcgccaggagttcgtcgtagtgagccgcatcgacgatcatgcgatcgtctactacagcggccgcctgggatggcagttggacggcctgagttcgttttccaagcgctggacaggcgtagctctcacccttgaggctgctgtccgtgggccttgccgcgtaggtagggacgcagcgctgctttcagatcttgagattcaactcatccaggatttcatgacggtggacgaatgcgaggaactcatggccagcgcgtcacctgcgttccgcaagagcatggtcagtgcggatggcagcttgcagagtgaggtcatgtccagcggccgcacaagtgaatcggcggcctgctcgggggacctgtgtgcccgcatcaccgatcgcgcggcggagctgcttggctgtgcgagcacgttgttcgagccgatccagtgcgtcaggtatgagatgggacagaagttcgccccacactatgatgttcccctggatgcaggactgccagatcagtccacgcgcgcatggacacttcttgcgtacctcaacgatgggttcgaaggcggggaaaccctctttcctgccttcgacctgagtgtgcgccctcttcgtggcgccctcctcatgttccgtaaccgtggccgacaacagcgaagcgtcaatccgggtgcgctgcatgcgggccaaccggtgacccgcgggagcaagtatgcctgcaatatctggtgttcagatgccaattag

SEQ ID NO: 505548 - DNA, 1056 bp, Stenotrophomonas maltophilia
atggtgctcccgaaggccacggaactgcctgtcggccccgcgggcacctggcggtctccagtgtctaacggcgtggatcggcagatcgcggtactgagtgcgcccgccggcggattcaaagtggtgtatgcgcagtatctccgcggcgacatggactcatcacggctgatgcagatccggtcctctgatggtcgcctcatggaccagcctgagccgctgtcgtttggttcagtgctggaggatgctccggtgctcgttcacatcgataacgatgcgtggctctactttgcaggcagtgacgctgatttcagcaatatcacgctttggcgcgcgcgggccacgccgcaggggtttggggcgccacagcggctgccggatgtcccgggactgacccagctggtccaggcacctcgatgggtgcaggcagaaggcgatctctatctgacattccgtggaatgggaaccggtcctcgctggatgtcgatgcgcaatgcccgatcaccatcggagtttcagggggcggcatcgacacccgtggcgtatccgcgcgtggtgccgctgggccagcatggctgcttcatgagttatcagaaggcgcccgaaggtggctacatgacaacgctgtacagcgtcagccccgactgcagaacctggtccggccctgtggagctttcgccagcaaagtctccgaacaagccggatgtccacgacgggttcgcgctgcctcgacaggacggcggcgtggacatctactatgtctacccttcctacaagggcgccacagcgcggtttcccgtcagtttcgatctgtacaggcgcgcagtggatgtgcagggcagggcaggtcccgagcagctcctgacggaacggcttgcctacaatccattcgctccttccgcgcatcgaatgccggatgggtctgtcctggtctcgttctcggacatcgaggcgcgcggcgatgctggtgtgaccaagggacgactgacgctcttccggatttccggagatgcgccgatggagcctgagcgccctgggcaccgcgacagtgacagctga

SEQ ID NO: 505549 - DNA, 2127 bp, Stenotrophomonas maltophilia
atgaaggtcatcctgcagtctgaaagcgccgaatgcgggttggccgcattggcgatggtggctgaccaccatggccagcacggtgggctggccgtgctgcgccagcggtttaatctttcgctgaaagggctgcgtctggatcggctggttcagatctcccagcagattggcttttcggcgcgcgcgattcgagtcgaactcgaagaactggggaagctgacgactccgtgcatactgcactgggacatgaaccatttcgtggttctgaaaacggtgcgtgcatcagggatcgtcatttgtgatcccgccgtcggtgagcggaaactcagctaccgcgaggcatcggagcactttaccggagttgtgctggagctgacaccgacggccgagctcaagcccgtgaagcgcgcaccggcgatcagcctgcagcaattgactggcgcggtgcgcggcatgtggcgctcgttggcccaggttctgattctgtcgctggcgttgcaggttttcgtcgtgctggcgccattcctgctgcaatgggtggtggatcaggcacttgtctcggcggatcgtgacatgctcaccgtcctcgggattggatttggcatcgccctgcttctgcaggttgcaatcaacctgctgcgtggctggtctgtggtctatctttccacgcatttcggattgcagtggacgaacaatattttcgcccacctgatgcgtctgccgttggcattcttcgagaaacgtcaccttggtgacatcacctcacgccttggctccatccgtgagatcaggacggtcatcaccaccagtttcgtggagggcatcattgacggtctcatggcgatcatgaccttcgcgctgatgctcatctactcatgggaactggcgatggtgacgctgtgtgccgtggccgtctatgcgggtgcccgatctctgtcctaccgtgagttccgtaatcggaccgagcagcagctgatggtcggtgcccggcagcagacgcatctgctcgagtcactccgcggtatacagagcctgaaggtagcgggtcaggagccgcagcggcgtgctgcccacgagaatctgatggttgacaccgtcaacgaagagttgaggttggcccagatgggcctgggctttacgagcatcaaccagctggtgttcggcattgagcggatcgccgtgatctggatcggtgcgttgcttgcgatgtcaaatgtgttcaccgtcggcatgctgatcgcttacctcgcataccgggagcagttttcgcagcgtgtcggcaatctcgtcgacaagtgggttgagttccggatgctgcgcctgcatggtgaacgtctatcggacatcgtactgtccgagcccgaggattgcggagagggaatcgccccggccttgcccggtgagatgggcgtggaggttgagaatctttccttccgctatggcaacggtgagccctggatattccgcaactgcagttttgttgtgaagccaggggaatcgttggcgctcatcggtggatcaggatgcggcaagacaacgctcatgaagctcatgctcggtcttcttgagcctacggagggaagtatccgcattggtggacagacgctgcgcggcgctggcgctcggcgcctgcgtgaagccatcggcgcggtaatgcaggatgaccagcttttcgccggcagcattgcagagaacatatccttctttcagggagctgccgaacaggagcgtgtggagcacgcggcgcggctggcggcgatccatgacgatataatgggcatgcccatgggctatcacagcctgataggcgacatgggaagcacattgtccggcgggcagaagcagcggcttattcttgccagggcgctttaccgtgagcccagcgttctgtttctggacgaagcgacaagccatcttgatgtcgccaatgagcgtctggtaaatgatgctgtcgatagacttcgtctgacgcggatcattgtcgcccatcgccccgagacaatagagcgggcagatcgggtgatggtggttgaaaacgccgacgtcgtgctggcgacccgagtgcgagcgagcaatttgaggctgaaggctgcgcaatcatccggacaggtaccggagagccactga

SEQ ID NO: 505550 - DNA, 759 bp, Stenotrophomonas maltophilia
atgggttgggacatcacctaccatccagtcgcggactcggaaatccgtgacatctatttccgtgcgctggacgacgtgacgctggtcgaggcgctgcaacagcggttccggatcgagccgttctacatggagcagctgcaggaacgcatcgacgaggctcgctcgatcagcgcagacgtgcccttcgagaaggggcatgctttgtacctggcgatcgtggccggtcacctgcgccggtatcactatcttcgcgggagcgccctttcgttcttcatcgacgatccggtggttgcccgctatttcgcggactggcggcacctggtgccgccacagtgggcggacgccgctgcaggcaaccacctgcgcgaaaactacggtggtggtgtgttcatcacgcatgaccggctgaagcagatgcgcgcggactacgccggggacaatgacctgcgcgcgcgtctgcacgagctgttctccgatggtcgactggccgtgttctggagcgttgtcgatgatgccatcggcaagggatgcggattgctggaagcaagcgaggtggtcgagccgaatccgatggacctcaacgcatcgaccagcatgagcaatctgctcaactgcgcccccgatggcgcgttgctgtacgcagaggccgtcgcggcgcagctggcgcagttcgtgccggaaaccctggatacggatacggatacggctccggcggcaaacacgcagaaacgatggtgggaacgattgttccggcgatga

SEQ ID NO: 505551 - DNA, 480 bp, Stenotrophomonas maltophilia
atgatcagcgcctacgatttcagtttccgtgacctcgacggccagccgcatgcgttggcccgttatcagggccacccgttgctgctggtgaacgtcgccagccgctgtggcttcaccccgcagtacaccggcctggaacagttgtggcaggactaccgcgagcgcggcctggtggtgatcggcttcccgtgcaaccagttcggtgcgcaggagccgggggacgcggcgcagatccgccagttctgttcgctggactatccggtcagctttccgctgtcggagaagatcgaggtcaacggcgagggggctgatccgttgtgggcctggctgtcacgcgagaagcgcggcctgcttggcagtgcccgtatcaagtggaatttcagcaaattcctggtcgatcgccaggggcgggtggtgtcgcggcatgcgcccaccaccaggccggaacagctgcgcggcgcgattgaagcgctgctgtag

SEQ ID NO: 505552 - DNA, 666 bp, Stenotrophomonas maltophilia
gtgtcaaccgtgcgcctagctagcagtccactggccctggatatcgccacaatcgatcgtttcctggcgcacagccacaggcggcgataccccacccgtaccgacgtcttccggcccggggacccggcgggaaccctgtattacgtcatcagcggctcggtttcgatcatggccgaggaagatgacgatcgcgagctggtgctgggctactttggtgccggcgaattcgtcggcgagatgggcctgttcgtcgaatcggaccgccgcgaggtgatcctgcggacccgcaccgcctgcgagctggctgaaatcagctacgagcgcctgcatcagctgttcctcggcccgctgtcggccgatgccccgcgcctgctgtatgcgctgggccagcagatttccaagcgcctgctcgacaccagccgcaaggccagccgcctggcgttcctggacgtgaccgaccggatcgtgcgcaccctgcacgacttggcgcaggaaccggaggcgatgagccatccgcaaggcagccagctgcgtgtatcgcgccaggagctggcgcgcctggtcggctgctcgcgcgagatggccggccgcgtgctgaagaaactgcagaccgacggcctgctgcatgcccgcggcaagaccgtggtgctgtacggcacccgttga

SEQ ID NO: 505553 - DNA, 762 bp, Stenotrophomonas maltophilia
atggagctgagcagcgaattctggtggttcatcctcatcggcctgggcgcacagctggtcgacggcgcgctgggcatggcgttcggcctggtgtcctcgtcggtgatgctgagcatgggcctgccgccggcgcaggtcagcgccagcatccacaccgctgaagtgttcaccacgggcgcctcgggggtgtcgcacctcgcagccggaaatgtcgataaacgcctgttcctgcgcctggccctgcccggcgcagtgggcggcgccctgggcgcgtacgtgctcacgcagctcccgggcgagatcattcggccactgatctacctgtacctgctggtgctggcgatcatcatcctggcccgcgccgctgggcgctggatgcccaagggcgagatccgccgggtgccggtgctgggcttcttcgccggcctgctcgacgccagcggcggcggtggctgggggcccatcgccacgtccaccctgctcgcccgcggcggccaggcgcgcaccaccatcggaacagtcaacgcagccgagttcgtggtcacgttgacggtgtcagcgaccttcctgttgtcgatgggcgtgcagcacctgcagatcgtcgccggcctgctgatcggcggcatgatggccgcgccggtggcggcgatcctggtcaagcgggtgaaggagcgctgggtgctggtggccgtgggcgtgctggtgctgggcatcagcctgttccagatcggccacgcggtatacgggcacctggggcgctga

SEQ ID NO: 505554 - DNA, 540 bp, Stenotrophomonas maltophilia
atgcaaccgcgcaagaccgatctcgcccgaaccgcgctgcaggcccaccgcgcgccgctggacatgcgccagcgccggctgctgatcctgtgcgacggccagcgtaccgtcgccgacctgaccggtctgcttggacaggatgcgccggcgatggtcatccagctggtgcaggcgggctatctggcgaccggcacggcaacggcggcggccccccctcacgccgctgccgaaccggtcaatgcggcgctggtgaaggtgccaacgaacgccagcgccacgccggtcgaacgtcgccgttcgctggtggcagcgcgcatctacctgctgggtatccttgaaatgcagcggcatccgcaggcagcggcgctgttccgcgatctgcagcgggcgcgtgcggaggatgaggtgctgcagcggctgcagtcggcgatgcagctgctgcccgcgctgacttcggatggctattgccagcgcgtgcgccagcgcctgctggaggcgttgccgctggagcattgcgacgccttcgccgaggtggcgtaa

SEQ ID NO: 505555 - DNA, 444 bp, Stenotrophomonas maltophilia
atggtccgaattctcggctgcgcgctgatggtctcgttctccgtgatggcccacgcggcgccggatgcgctggagcagctgaattttccggtgaccgcgctgggtgaaacggcggaacttcgcttgcggctggcaccgcatccaggtgggctggtcacgtactcgatccacaccaatgtctatgccagtgaggagaacagtggttaccgggtgctggatgtgcgctgcccgccgggctttctctccaacgtctaccggggaaacaccggtgcggtgtgctatcgcgtagaagaaacgccgcaccctgccggtgagatgtcggtggtggtgttcaacgagaatgcgccggacgggcatcttgagtgggcggaaggtctttggtcgctggacgccagtggccctccagtgaagacgtcgtggcacctgtttggtgtgcggccgtga

SEQ ID NO: 505556 - DNA, 2592 bp, Stenotrophomonas maltophilia
atgttggaagcctaccgccaccacgtcgccgagcgcgctgcgcttggcatcccgccgctgccgctgagcgcgcagcagacggccgatgtcatcgaactgctgaagaacccgccgcagggcgaggccgagttcctgctcgacctgctgacccatcgcgtgccggccggtgtcgatgacgcggccaaggtcaaggcgtcgtacctggcggcgatcgccctgggcagcgagcagaacccgctgatcagccgtgagcgcgccaccgagctgctgggcaccatgctcggcggttacaacgtcgccccgctggtgcagctgctggacgacgccagcgtcggcaccatcgccgccaacggcctgaagaagaccctgctggtgttcgatgcgttccatgacgtgcaggaaaaggccaaggccggcaacgccaacgcccaggccgtgctgcagagctgggccgatgccgagtggttcaccagcaatccggaagtgccgcagagcctgaccgtcaccgtgttcaaggtgccgggcgagaccaacaccgacgacctgtcgccggcaccggacgcgaccacccgcccggacattccgatgcacgccctggcgatgctgaagaacaagcgcgacgacgcgccgttcaccccggaagaagacggcaaacgcggcccgatccagcagatcctgtcgctgaaggacaagggccacctggtggcctacgtcggcgacgtggtcggcaccggctcctcgcgcaagtcggccaccaacagcgtgctgtggtggaccggcgatgacattccgtacatcccgaacaagcgtgccggtggcgtgtgcctgggcggcaagatcgccccgatcttctacaacaccatggaagatgccggtgcgctgccgatcgagctggacgtgtcgaagatggagcacggcgacgtcatcgagctgcgcccgtacgaaggcaaggcgctgaagaacggcgaggtgatcgccgaattccaggtcaagtccgacgtgctgttcgacgaagtgcgtgccggtggccgcatcccgctgatcatcggccgtggcctgaccggcaaggcgcgcgaagcgctgggcctggccccgaccgacctgttccgcctgccggtgcagccggccgataccggcaagggcttctcgctggcgcagaagatggtcggccgcgcctgtggcctgccggaaggccagggcatgcgcccgggcacgtactgcgaaccgaagatgacctcggtcggctcgcaggacaccacgggcccgatgacccgtgacgagctgaaggacctggcctgcctgggcttctcggccgacctggtgatgcagtcgttctgccacaccgccgcctacccgaagccggtggacgtgaagacccaccacaccctgccggagttcatctccacccgtggcggcgtctcgctgcgcccgggcgacggcgtgatccacagctggctcaaccgcatgctgctgccggacaccgtcggtaccggtggtgactcgcacacccgtttcccggtgggcatttcgttcccggccggctcgggcctggtcgccttcgctgcggccaccggcgtgatgccgctggacatgccggagtcggtgctggtgcgcttcaagggcaagatgcagccgggcgtgaccctgcgtgacctggtcaacgcgatcccgctgtacgcgatcaagtcgggcctgctgaccgtggccaaggccggcaagaagaacatcttctccggccgcatcctggaaatcgaaggcctgccggagctgaaggtcgaacaggcgttcgaactgtccgacgcctcggccgagcgttcggcggccggttgctcggtgcgcctgaacaaggaaccgatcatcgagtacctgaccagcaacatcacgctgctgaagtggatgatcgccgagggttaccaggatccgcgttcgttgcagcgccgtatcgagaagatggaagcgtggctggccaacccggagctgctggagccggatgccgatgccgaatacgctgccgtcatcgagatcgacctggccgacatccacgagccgatcgtggcctgcccgaacgatccggacgacgtgaagaccctgtccgaagtcgctggcgccaagatcgacgaagtgttcatcggttcgtgcatgaccaacatcggtcacttccgtgccgctgcgaagctgctggaaggcaagcgtgacctgccgacccgcctgtgggtggccccgccgaccaagatggatgcctcggagctgaccaaggaaggcgtgtacggcaccttcggtgccaccggcgcacgcatggaaatgccgggctgctcgctgtgcatgggcaaccaggcgcagatccgcgagggttccaccgcgatgtcgacctcgacccgcaacttcccgaaccgcctgggccgcaacaccaacgtgtacctgggctcggccgaactggccgcgatctgctcgcgtctgggccgcatcccgaccaaggaggagtacatggcggacatcggcgtgatcaacgccaatggtgcggagatctaccgctacatgaacttcgaccagatcgaggaatatcaggacgtggccaagacggtcgctgcctga

SEQ ID NO: 505557 - DNA, 651 bp, Stenotrophomonas maltophilia
atggtctctgccgctgcccgcttctgtcgcatctgtggtcccggcccgatcctgctggcgctgcaggtggtggcgctgctggcggtaggccttgcagccggcttcttccactaccgtgtgggactgctgctggagccggtggatgacgcatgcggtgggcccgacgcggccgcacgcatacaggtggccgaacagctgctggcgcgatccactgcgcttgcaccgtggcaaccgttgcagtggattccgatggcgggcgtggtgctcgcgctgctgggcgcgatgtcgatcagcgtctatcggctggggcggttgtccggacggctgcggcgggccaaccgggtcttgatgatgctgcatggcgcggtactggtgctggcggtgcgggcattgcatctgtacgacatggcatggaccagtgtggccaagctggcgccgacaacctgcctgatggaactgggcagtttgccgctggcacaggcgcaggaggtggtgttcgagatcctcacccacgagcatgccccgctgctgcgcaatcccgatgatctggccctggtgctggtcgcagtgatgctgatggcgatggctgcaggattgatgttgtggcgggcgatcgtgcgcgagcgggaggtgcagtcgcccagcccatag

SEQ ID NO: 505558 - DNA, 1065 bp, Stenotrophomonas maltophilia
atggataagccgcgctacaccgtagaaatagtcattgccgcacctggtacgccgttggtggacgagagaggtgtacagaaagttgtggacggggttccgcagacatccgggcccggacacatgttctacgtgctccatgggccggacaagaccacgcggagtttcggcttcgcgcctacggagcatggaagcatgaacgggccgggcgaggtcatgaagaccgatgcggtcgagtacaggaacccgcattacagccgcacgctcgagatcagcgagcaacagtacagaaagcttgaggccttcggtgcgcacccggataagtacggcttcgatcttcaatacaaggacgtgcgcaacaactgcgtggacttcacctgggaagccttgaaccacgcgggcatccagcggaaaagcagcatcgacgtgaacgcgttgggaggtcccgctggccagcttcttccggatgttcgcattcctcttgacatcaagggggcgggcaaggacgcattccgaccgctgcgcaacatccacggtgtggacagcattgatccgccgtttccggacagcgagctcaaccagaggaaaaccaatcccatgccggagcgcagtctcaagcaacacatgctgagtgatgctgagggcatgggcgaacgaagcggtgatcgtctggcctggcacagcaacgatccgctgctttcacagatccaccagggcgtggcccggctcgatgcagagcggggccgcgacttcgatgccaccagcgagaacatcagtgccagcctgtacgcgctggccaaagccaatggcctgacccaggttgaccatgtgctgttgagcgatcgcaccgcgcagcccgacgctgcgcagaacatcttcatcgtgcagggcgagcgcaacgatccggcacagctgcgcgccagcatgccaacagcggtggctgcgcagacaccggcagaaacttcgttcgagcgtgccgagcagctgtcgcagtctgcacaggtgcgcacgcaggatgagctgcagcagcgccaggtgcaggagcagtccggtccgcgcatggcctag

SEQ ID NO: 505559 - DNA, 261 bp, Stenotrophomonas maltophilia
atgaagaagcgcatttccgaagaacagatcatgggcttcccacacgaggcagaggccggcatggcggtgaaggacctgtgccgtcgacatggcttcagcgaggcctcgtaccaactgtggcgcagcaagttcggtggcatgagcgtgcccgacgccaagcggttgaaggacctggaagccgagaacgtccggctgaagaagttgctggccgagcagctgttcgagaacgatctgatcaaggacgcgctgcgagaaaggtag

SEQ ID NO: 505560 - DNA, 249 bp, Stenotrophomonas maltophilia
atggcaagaaagaccgtggatataatcttcggcggcaaggatgccgtcatcgaagtcgccactatcgacaacctgcacgccgacgacttcatgcagctggacactatgaggaagtacaactcatacagccggaatgaagtggagcaaatgattgacttgtttcgcgagcagcaggagcggctgggtgtgtacgaaattcttaggcaagggaccaatcgcctaatctatgaagtgcttcagcacatctaa

SEQ ID NO: 505561 - DNA, 465 bp, Stenotrophomonas maltophilia
atgaacaagatctttgaggaacacgtttcagacgctcaggcgagcatggttcgactcgcgctcgattatgccggtgcgacggctgacgaagtattcatcttcgttgcgagtgaagatgggatttcaatgtttgatttcttctacagactcaacggttctgtggtggagaaggaacagctgaatgacgtccgaaaatctggaggtgggatgtatgactcgttgaatgagagcttggcttgggtgcttgatgctgggctggatgaaatagatgcgcttgaagaaaagtgcaatcagttcggcgctgagatgcctactgagatccgcattcactacgttgtggggagcaatgagatgcgggcgaaaatgtcgtatgaaccaaagttctcacacagtgacgatctgacaccggggagtttgttcgatagctgggttggcgatgttcgtggaggctcgtaccctctgtaa

SEQ ID NO: 505562 - DNA, 390 bp, Stenotrophomonas maltophilia
atgatcgcgagcgcatgggaattcaaacggttgtgtgaaaacgagtcggatacctcgttcgctttgcggcacgctgacgatcagacgtggcgcgatatcctgtcgacctatccggagctggcgcgttgcgttgccggaaacaaaacgattcccctagccatcatcgagcagttggctgccagcgatgacgtagatgtccgctggaaaattgcgagcaagcgccggctggatccagcattgatgtcacgccttgcaagggattccgatgcaagcgtccgtcaccgaatcgcctgcaatccaaaggtatccagggaggtcctggagctgctaacgggtgaccctgacgagatggtggcggcatcagcccagcgaaggctgcagcaggtgtga

SEQ ID NO: 505563 - DNA, 300 bp, Stenotrophomonas maltophilia
atgaacgacgtgatgggaatcgctctcggcgggatgcgcgcggcccaccagggcgtgcaggtggccgcgcacaacgtggccaacctggcgactcctgatgcccgacgcctgcaactgctgcgcagtgaggcggagcagggcggggtgcaggccgcgatgacccctgccgacgccgatgctggcgcgccattgggggacctgctggcggcgaaagccgaggtggtggccttcgccgccaatgccacggtgatacggcgccaggaccagatgctgggttcgctgctggatcgggaggtctga

SEQ ID NO: 505564 - DNA, 291 bp, Stenotrophomonas maltophilia
atgaagatcatctactggctgggcatcgcgttcctgtggatgctcccattgaactttcttctactgacagcggccaaattgctgtcagcggatccgctaggcagcgaagagctgatcggcctcggcactgccatatttggtggggcagcgggagggatcctgtatcgccgtcgtcctcgcaagcccctcgctccgtcgagcatccatgatccggtgcacggggcaaagacgactgaggccttgcgggattcaagttgcgacgaacaacgacagtcggggaatgggccttga

SEQ ID NO: 505565 - DNA, 3021 bp, Stenotrophomonas maltophilia
atggacaatggcggcggcggcggtgcaattccgaccgaaaccgcgaaggagcagccgaccgatgacaaggagaaggactgcaatggccgtaagggcaatcccgtcgtgctctacagcggcaacaaggttgaaccagaacttgatttcgccagtcagggtgaaatgggcctgtttctgcagcgcaactacaatcactactggagcgcaaccggactgttcggcaatcactggctgagcaacttcgactattcgctcgcattcaccgatgcagatcagttggcgtgggtgcaacggcccgacggccgccgcatcaagtacctcaaggatccgaccagcggtcgctggtatgaggacaaggcgcagcccatcgcgtacctttccgcgaacggcgatggcacgtttacgcttcgaaacgaaaaaaacggtacggagacctacaacgctgagggctatatcacccgactcagcaatgagcagggcgtgagctggacgttctcctatgctgaccgctatctgcagaaggtgacccactcctcgggacgcagcgtcagctttggctgggccaacggacaggtcagccaggtgaccgatccggccggcaatatctatcgctacgcctatacccccaatgtgttcgggaacggacgtggccggcttgccagctcgacgctgccaggcacaccagcgacgacgatcagctaccactacgaagatgcccgcttcccgggtgccctgactggcaagtcttttaatggcgtgcgctattccacgtttgcgtacgacgcggagcgccgcgccatcagcacagagcacaacggtggcattgagcggttccgcttcagctacgccgaacgcagcaccgaaccggtgcttccgccccccgctccgactcgacccggcggtgtccgtgccgatgaagagcgtggatggtgcgaacagcgccccggaggctcacgcatctgctaccagccgcgctcgctgcctgtcgattcgctgccgatggagagcgcactcggtatgacggctgccgctgcgcctagccttacgcggcccgtcgatattgatgtcactgtgatcaaccctcttggccgtagcaccacttacacgttcaaggacggaaagatggtatcgaccaagggtgatccgtcgccgaactgccctgccagctacaaggagcagagttatgacgccaatggatacccggatctgttccatgacttccaagacaatctgaccaacttcgactacagcgctcagggttacctgttgaagcgggtggaagctgttggcagctcggccgaacgtacgacgttgcaggagtgggataccgcgcgtaaccgactgctcaagacgacagtggtgggggagctcgaagtcgcctacacctatgacgatcgcggaaacgtggccagcgtaaccgagcgcaatctgacggcacgtggggtgccaagccagacgcgggtcacccgcacaacctatacctatcatgccaatggtctgaaggcctcggtcaaggtcgacggccctcttgcgcaggatgacgtcacctccgtctttaatagtcagggcgatgtgaccagcgtcaccaacgcacttggtcatacgatcacttattccaactacaacggactggggctgccgggacgcatcgtcaacgcgaacggtggcgtgcgagagctgacgtatgacggccgtggccgcgttgtgtccgacagaaccagttcgggaaccggctgggcaactaccgccattggctacaccgctgcaggtgacatcgcctcgcttacccagcctgatggcgtgacagtccgctacggctacgatgcagggcgccgcctgatacaggaagtccgttccatgggtgacggtaagtgggcgtggacccgtcatagctacaacaacgcctccaatcgcacgcgcaccgaggtttcacaaaccgactatccgatggattcagtggtgagcggcgtgattgacgaaatcactcatgatgcgcagtggaactggttcgtacgtggctgggcctgttccactggctcggctgggtcaatccaggtggacggttacgccgacggcaacgtctacctaggtagcactcaagcaaaccttgccagcgagccaggagttgcagcggcttgccaagcatcagggagtgcctataggtatcaattgccgatatcgctagcccagaggcaacagttgggcggtcgcaggttctccgtctacggccaatctccgcagggccgcggccaggatcgaccgctcgcgaactcaggcgtgtttgccattccaacggcaaacatcgttggtgacatcggcggcgtgacccaggacggcaactggaacttcttcattgaaggctgggcctgctcagttggcgtggatgcctcgatcgacgtacacgtctatgccggcggggcagctggcggcggcacattcgtagcttcgggacgcgccaacatggcgaccgacggaaacgtcgccaacgcgtgccaggcacgtggaaatgcctattggttcaagattcctcttgacggcaacgtacgatcgaatcacgggggaaaagcactatacgtgcacggaatctcgcctgttggcggtccgaacctgaccatcaatcgctcgggtacgttcacggtccccgcagtggtgcgcaatgcagaactcgtcagcgcttcggcatcaccccgccagatattcaatggtggctcatcggagctgacgttccagttccgtaataccgggaacgtcgtgtggaatcctggcgacacctatctcgcattcggaattcttcagctcaatgaaagcatgggcctagctggaccggtgccgcccggggcggttgcaacctttaccaagagcgttggtccgaagaacaccgggaatggcaacgtcagcttcatctacaaggcgcagatggcctctggcggtgctgcgtggggcatggaggggaggacgacattgtctgttgagaacaacatgggaagctgtggtcgcgtcacctgcgaacggcctcggtaa

SEQ ID NO: 505566 - DNA, 456 bp, Stenotrophomonas maltophilia
atgaactggatgcgccccctgtcacttggcctgttgctgtgcctgtcatccggcgccaacgcggcgtccgccatcgtctacgacgacgatggccgctacggctacgccatgaaccacagcacgctgtcggctgcgatgcagcgcgcactgcagcactgcgccgttcggtcccgcaactgcgcgcagactgccacgactaccgcagtgggatattcggcgatcgctaccggcaccgtcgccatgggctttgcacttggggaaaagacggcggacgccgcacaacgcaaagcggaaagaatgtgcaggcaacgtgccaaggactgcacactggcaattctctggcgcgaaacgccaagtggcattgcgccgcccgctcatccgggtcatgcggtgccggagcccaagctctattcctcgcccgaagtcgggcaggacgcggctggccccacccactag

SEQ ID NO: 505567 - DNA, 207 bp, Stenotrophomonas maltophilia
atggatctgaatgacgacgttgtgtccggctggctcaatggctcggacgatgtggatgggtgcgccaaccctgcgggttcgctgttcatctacggtgcggcagccaccgaagcggccctcaccggggcttcggacaccatgatcaccggtggcaccaacgagtgcaccaccacggtatcggtgatcaaccactgcctgtgttgctga

SEQ ID NO: 505568 - DNA, 996 bp, Stenotrophomonas maltophilia
gtgacccccgacgactaccacgcgtcctgcagccgcctgctgcaggactacctgcacaccgcttcgcccgagcaacgccacatctacgttgcacggcgcaactacgatgacagccccgacgtgctggcctggctggcagagcaacgcgatctggaccgtgccacggcactgctgatgcacgcatcactgggcgcaggccggttcgcccagtacgcagacgccagcgaggtgcccggccacgagcaggcggcgtacgcgctggtccgtcgcatcgagcagcggtgcctcgatggcttctacgccgaccatgggctggacttcgatccgtttgccgaggcggtcgatgatgcgtacgacgatggcctgccgttcccgatcgcgcagcagttgcacgatctggccgcggcctttgaacccgaacgcggcccggcactcggtgatgccaccgcaggtgatgtcgatatctgggcggaggtcgtgcccccagcactctcacccgtagcaaccgcgtcggatccgggctggccgctgctcgtctcgttcctgcagcaggccacgccgcagcagcgccatcagctgatgctgttcgccgacacccacaccctgtccgatgcgctgcaatggctgcttgaacagccgtcgttggccgcatccagcgcactggcgctgtactggaacctgggggcgtcctggtacgtgccgtttgccacggtcgacgatgtgcctgcatcgcaccgccacaccgccgcggtgctgcgtggcatcgaacaacggctggccgagggcggctacgctgaccagggcctgggcttcgacctggcgcagaaccggccacgcttcccggcccgttggcccggccggccggtgctgcgcgcggttcccgaggcgatgtggttgccgcgcgacggccagatcgtggaggagtccgacgaggtggatttcatctccggcctgccggaggaggtggctggcgcactcgcgcaggcgcgcggatag

SEQ ID NO: 505569 - DNA, 1116 bp, Stenotrophomonas maltophilia
gtggatacagggttgcaggagcgggttaccggcctgcttcacgaagccggggtccgcatcggcggtacccagccgcaggacatccaggtgcatgacccgcgctttttcgcgcgggtcatggcccacggctcgctcggcctgggcgagagctacatggacggctggtgggatgccaacgtcctggatgaattccttgtccatctgatgcaggcgcacctggatgaacgggtgcacggctggcgcgaagtggccgatgcgctgaaggcgcgcctgttcaacctgcaggccgggcagggcagctacgaggtcggccgccgccactacgacctcggcaacgatctctaccaggccatgctgggccagcgtctggtctacagctgcggctactggcgcaatgccgatgatctcgatgccgcgcaggaagccaagctggacctggtctgccgcaagctgggcctgcgcccgggccagcgtgtgctggacatcggctgtggttggggcgaggcactgaagtttgctgccgaacgctatggcgtcagtggcgtgggtgtgaccatttcgcaggagcaggccgggttcgcgcgcgaactgtgcgccggccttccgatcgagatccgcctgcaggattaccgggaactggacgaaccgttcgatgcgatcttctcgatcggcatgttcgagcacgtcggtgacaagaactacgccagcttcttcgaggtggccaaacgctgcctgtcgccgcgtggcctgctgctgttgcacagcatcggcaccaacgtctcccggcatcgcaccgacccgtggatcgcgcgctacatctttcccaactcgatgctgccgtcggcggcgcagatcacccgggcgttcgaaggccgtttcgtgctggaagactggcacaacttcggcaccgactacgacctgaccctgcaggcatggcggcgcaacgtggaagcagcgtggccacggctggatgcgcgctatgacgagcatttccgccgcatgtggcgcttctacctggccgggtcgatggccaccttccgctgccggcacgcgcagctgtggcagctggtgctgtcgccggaaggcgtgccgggcgggtacgtggcgccacgctaa

SEQ ID NO: 505570 - DNA, 765 bp, Stenotrophomonas maltophilia
atgcatgcgcacggtcaggtcaccctgcgacagtgcggcgagcaggccggagatctgttcgatgctgccggcgttggcgtccagcaggccgttgatctgctgggccagctgcaggaagaagccttccttgtcggtggcgtcaatgcggccagacaggtcgccggcggcggcctgggcgatcacgcgggccacttccgcttcaacctgcgcttcctgggtacggtcgcgccattccaccacgtagccgacagtgtcaccgtcctcattgcggatggtcgagacgacctgggcaaactgggcgtcgccatactgcatcgggcggcgggcgacaccgtgcgccttcaggttgcccagcagggtctggtccatttcgccacggtgctcaagcacggtgaccggcttgccgatcagcgaggcctgggcatcgaagtccggcaggtcgcggcgcacgtcgtcctggtactggctcagggtctgctgcagggcgcgattggtgtaaacgatggtgttgctggtatcagtcaggtacacgccggtggagctgtaatccagcgcggtgcggatgcgcaggttctcgcgggcgaccgcctggtcggtctcgatgcgttcgcgcaggtcgcgctgcatgcgctgcatggcctgcatcagttcgcctacctcgtcctggcggctgacgtcgatatggccatcgagcttgccaccggcgacgtcgttggcgaccgagacggcgccgcgcacgctgccgaccagtgcgcgggcgaatag

SEQ ID NO: 505571 - DNA, 366 bp, Stenotrophomonas maltophilia
atgttcagcatgtcatccaccgcatcacaattgattgaagtgacggccagcgaactggatatggccatcgatgacgatgagctcactttcctttttgtccgttggggccagacgggacagtatctggacatcacacgcgagtgtggagaaggcggaacctatctcgagttctgcgaccaaggcgccggtttctatccggatagcatcgagatgacttttgccgacggcatcctcgccgtgcagctgggccccacccaaacccttgggcctaacgtgcaggaaagtcgcattcatatcagcttgagcaaggtctcacctgacattgagtcgctgcacgcctgcatctcctttctgagctccagatag

SEQ ID NO: 505572 - DNA, 963 bp, Stenotrophomonas maltophilia
atgtcagatcatttggccgtcggcatcgatgccgactcaaagagccttgtggtggcacgccatggcaccaagggcagcactcgaatccccaattcagcgtctgccatcggtaagtggctgtccactctgccggtcgggtctcgcattggagtggaagcaaccaatcgctaccacgagcttgtggttcaagctgcccagaaggccggccacgtcgtctttgtgctcaatccgcgcgacatcaaacattacgccaagggcgtggcctgccgcggcaaaaccgactcaggtgacgcgcaggtcattgcgcgttacatcgccaaggaggccgacaatctgcatgagcatgtcgcccgatcgcctgcgcaggagcagctgcatgtgctgctccagcaacgtgacagcctggtccggagcaaggcgaagttgaatctctcgctaggcgcgggggcgtcggagtcggccatctttgggcgcatcttcgatggtctgaaagaggccattgccctgctcgaccaacagattcagcaactgtgccgcagtggcgaacagcgcgacctgtatcggcggatcatgaccattccgggggttgggccgacggtagcggccttcgtcacccatcacatcacacgatggcccttgaccagctcggacgcctggatcgcctgtaccggcctggatccgcgccccaacgaatccggcgcccggatcggtaggcggcgcctgtccaagcgcggcaacgccagcctgcgccagatcctctacatggcggccatgggactgacccgttccaaaaatggcaaagccctttacaacgccatccgcgaacgcggccacagcagtactgccagtttcaacatcctggccagaaagctggccaggatcgcttggggcgtcttcaagagcggccgggactttgacccggccatgctgaaagtgggtcaagcctgcttccagcaggcttga

SEQ ID NO: 505573 - DNA, 864 bp, Stenotrophomonas maltophilia
atgctcgtgctcttcccagcacaccgaggtacggtcgctgccagagttggtgatcatgaagagcagcggctcgcgccggaacttgaatccgcgctccagcatttcgatgattcgccggtcgggaagttcatgcacctcatcgaccagcacgaagaacggtcgcggaccggagcctgtgcgtcccgtatcgcgcgacaccggccggaagaagctcgcgctggcgtggtgcgccatgctgaactcccgcccctcaccgccggcgaactcgatgcgcttggccaggagcggcgacttcttgaccatcttcaccgcgtcggcgaacaggatgcccgcttggtccttctttgctgccgccgagtagatctgcgcgccagcctcgcctgcggccgtcatccccagcaggcccagcccgccggccagcgggctctttccgttgccctttccctgctcgatgtacgcgcgacggaacctgcgaagcccgtctgcgcccttccagccaaagagcgagccgatgatgaacgcctgcgaagggtgcagctcgaacttccggccctcgaactgaccctcggagagcatcaggacgttctcgaagtagcggaacgcgtactcggcagccccgtggtcaaagtaaaggccccgttcggggccttcgatcagatcctgcaggtggcgccggcaggcgtttcggacatgggggccggcaactatccggccagccaccacatccagcgcatacgccttagtgcggtcggccggagctgggaccaccgaagaactcttcgccctggtcgtcttcgtcaccgccatgcgagaccttcgattcatccacaggtgtggcacccagcttcgagaggatcgagctga

SEQ ID NO: 505574 - DNA, 405 bp, Stenotrophomonas maltophilia
atgccaaggccccgattgcccgtcgcaaaggctgcgacaagcggcgccgccatcaagaacccaggccggcatgccgggaggaagaggccgaagggtacgcgcgcgctgggcgagccgttcaaaaccatgacagcagccgaaaagcgtgcgtggaaggaattcgcatcggaaatgccatggctcaattccagccaccgtgtgcttctccgcctggcatgcctctggacggcgcggatggaagatccaaaagccgaattcggcgtttcagcaacccaggcgctcagctcgatcctctcgaagctgggtgccacacctgtggatgaatcgaaggtctcgcatggcggtgacgaagacgaccagggcgaagagttcttcggtggtcccagctccggccgaccgcactaa

SEQ ID NO: 505575 - DNA, 168 bp, Stenotrophomonas maltophilia
atgcacgcgaccgtgaccgcgtctgtccgcatgcgttggtggctgcggtggtatctggctgctgttgtgtggttcgcccgggcaacgggcatggaaccgaactgggaccgggtggagtggtggatacgccgtggcctggtgatccgggctgcagaggctggccagtga

SEQ ID NO: 505576 - DNA, 366 bp, Stenotrophomonas maltophilia
gtgacggccgggcgcggagctgttcagcgccgcatcctggcccttggccggttgaagacgggtgagatgaacaagaccgagtccgcgtatgccgagcggctgcgcgcgctgcaggctgccggccaggtccagtggcaccggttcgagggcatgaagctgcgcttggccgacaacacgttctacaccccggactttgcagtcgtggctgccgacggcgtcatggagtgccacgaagtaaaggggcactggcaggacgatgcacgggccaagatcaagattgcagcggccatgtacccattccgcttcatcgcagtgaaggtcaggcgtaagcgggatggtggtggctgggaagtggaggagttctga

SEQ ID NO: 505577 - DNA, 144 bp, Stenotrophomonas maltophilia
atgtatgacggtatgggcaatgcctttcttgccggcctgctgctggccgcggctgctggtgcagcgctgatggcaattctgttctgggtgatcccctggatctgggagctggtgaagccatggctgcacacggtgaccggatga

SEQ ID NO: 505578 - DNA, 270 bp, Stenotrophomonas maltophilia
atgcgcgccaccgtcgttacaaccgctgcgctgctggccgcctgccaggccgcgccggtccagccgaacccgccgcctgcagccatcatcactatgccggtggccacctacgtcccgatcgattcccagctgcgtaagcgctgcaggtgggtgaaggaggcggcgccgtcagccgtattcgaggtgagcaacggccggaagcgttgcctggagcagtacgaggcgcagctcgacggcatcgaccaggtgcagggcaaacctgttccgtag

SEQ ID NO: 505579 - DNA, 717 bp, Stenotrophomonas maltophilia
atggaaatgagcaaggcacgtgaactgctggcaagtcgcatggggccaaccacgcagaggttcgacgcatgcggcggcggtggacgccccgagctgacgacgcaggacattgccgctgccatggcgtatgtgcaggacgggcttggccgggagctgatggaggcgctgtggtggccagagagcgcttctcgccgccgcgagcatctgcgcaaagcggtaatcgggctggtggccccggagttcatccggcagatgcatggcttggccaacgcacggactgaattcggcatcgccaaggcgtgcatggggtggggcggcacccaggtgacggatgcgcagcggcgcgaactgctgagggccgagagcgcgttggatgaggcgcgcgctgcggcctggccgaacaacaccatggagcagcttggggtgctggccggcgcagtcattgcggagatggccagctgtggccggtgcaagtcctgcgagggaacgcgggtgcaggccgcgccggcggggagcggtgtcgttgaatgcgaggcatgcggcggcatggggttggagcagctcagcgggcgcaagcgcggggtggcgatcggcgctgacgatgcggcttatcgacggttctggcgcccggtgtacgaatggatgcttgagcgcatgcgtagtgcggagcatgttgctgccgagcagttctcccgcgcgctaaatcgcgctgcgtag

SEQ ID NO: 505580 - DNA, 204 bp, Stenotrophomonas maltophilia
atgaagaagacgaaggccatggcgccgaggatcaacccccagcgtgcgccccgcgagcggcggatggatcacaacacggtatctcggccgaagcgggttaagcccggctcgatcgccaagggccaggccgagacggtggagcagttcgaggcccgcggcgggcaggtgcagcgcctgacggccagctgggagcagcgagcatga

SEQ ID NO: 505581 - DNA, 459 bp, Stenotrophomonas maltophilia
atggacaaaccttgggcttccatcattggtgacctgcagtcggcgggcatgacttatgcccagatcggcgaggcaattggcgcagctggttccaccgtcggtgatctcgcatccgggcgatcacaatcgcctcgcgcgactacagcgtttgcgctgttgaggcttcacgcgagtcgcctcaacgagaatcactcgggaacctcggacgctgtccgcatcctgatcgatagccgcatgagtaagcgcgcgctgcgcgcccgactcggtctcgcaagcgacaagcacctggcgaccttgctgcagctccccacagcgcaggtcgagggctggccggaggagggcgtcttgcctgctctcccgcagatccagcgcctgctcggcggcgattcgaagccgccccatcccgtagcacccaccgatttcgaccacgaccgcattgtcccggtcgatgcggcctga

SEQ ID NO: 505582 - DNA, 534 bp, Stenotrophomonas maltophilia
atggccctgattgattgtgccgagtgcaagcgagagatcagcgatcaagcgagcgcgtgcccaggttgcggagcgccccagcgccgaccggtagtctcttcttcgccgacgaaggcgaagacgttcacgcccctttcggtggcagcgatcatcgtggcagtcctcgttacccttcttgccttggcgttcacagtccgcaagaagccgaaccaacagcaggtcgtcgccaccggcatggcaatcattaggggacaggtggcttccgacatacaagttgaaatggaaccgttctcctttagagcctttgatgatggcgcgcactatcacgtctgtggcaaggccaccctcaaccggccaggcgacggtcccttggcgttaaacaacgtcacgcaagcggttgtagtcagcttcaaccgagatggacgagggcttgcaacattcaacggcagcgatgacccggctatacaggccaagttccaggcttcgtttgctgaaaagtgcaaaacagttggtgggcgaaccatccccgattga

SEQ ID NO: 505583 - DNA, 192 bp, Stenotrophomonas maltophilia
atggctaccctttctcttggcgtcagcaaggcgccgcccaccgtcgtcgcgatcccctccctcggcgtggtcgccatcaaggtgggcgctgccagcctctacgttgaactcgcagaggccgaccgtctctcggtggaaatccagcatgccgcgcatcagctgcgcggcgatagccaggacgccgccgcatga

SEQ ID NO: 505584 - DNA, 243 bp, Stenotrophomonas maltophilia
atgcgccacctggccctgcccttctactgcgccgtcgtcgtcggcctgctgctggcgctgctcgcgcgcgccatctacaccggcgccgcctctttcctcctgccattcgccgcaggcgtcgtcttcttcgcctggtgcggcgtgcgcgacctggtgcggaactggccagcgttccgcgaggaaatgcggcagcgcgcggcagagcgacagcgcgcgccgatgcccgcagacgacacccgctga

SEQ ID NO: 505585 - DNA, 384 bp, Stenotrophomonas maltophilia
atgaccgcttccgtcgttgtcgatttctccaaagaacccaagttccccaagaagcccaccggcgaagcgccgaaagtcgagctggtgcgcgaacagttggccacctacgtcgagggctaccagctggctcggaagaccgcaccggctcgcatcgtgctgcaggccagcgacttcaagcactgcctgcgccggatcctcgcccgcatgcagaagccgcaccgcgacaaggctaaggccgcatggcaggaacgtcgcaaggccggctcgcaggagaaatggcgcgacgccaagcccgagccaatcaccgccgctgacctgacctgggccggcatccccatcgaaagcgtcggctacagccgtcaccgcgccgtcgacaagtcctga

SEQ ID NO: 505586 - DNA, 906 bp, Stenotrophomonas maltophilia
atgttctttcgcaacctgaccatgttccgcttccccgtcgccaccgacttctccgagatcgcgaccctgctgccggctgccgcgctcaagccggttggcgccctcgaactgtcctcgcgtggtttcatctcccccttcggccgcgaagagacggaacagctgttccacggcatcggcgactggctgtggctcaccgtcggcggccaggacaagatcctgccagcctcggtcatcgccgaccgactggaggagaagttggcatccattgaggccgccgaaggtcgcaggcccggtgcgcgcgagcgcaagcggatcaaggacgacctgatccacgaactgctgccgtctgccatggtgaagtcgagccgcagtgatgtgtttctggacaccgttcgcggggtcgcgttcgtggacaccagcagtcgcaaggccggcgaatacgtcatgtccgacattcgcggcctcttgggcagcttcccggccatgccactgaacgcggagcgggcgccgcgctcgatcttgacgggctgggttgccggtgagccactgccgacaggcatctccttgggggaagaatgcaagctggaggaccccattgcgggcggcgccatcggacgcttccagcatcaggaactgcgctgcgacgagatcgacaagcacctggacgccggtaagcaggccacccaactggcgctgatcctcgaagactcggtttccttcgtcctgggcgacgacatggtcgtccgcaagctgcgcttcctcgacggtgctctcgacaagctcgatggatccgacgatgacggtcgccgcgccgaattcgatgctcgatttgcgctgcagatcggcgagctgggccgcgtgttcgacgtgatcgccgacgcattccacatcagctctgccgactga

SEQ ID NO: 505587 - DNA, 771 bp, Stenotrophomonas maltophilia
atggccgcgaccatgaccaccgacaacacccccgccaccctggcgaccgcgaagcacggcggatgcgtgcagttgggagatgggctgcccgatctgcctgatccttggtacaggccacacagtagcaatgcaccgtttgatcagattctgtactccgagggacagatgcgggactacgcacgcgctgccctctccgcccagccctccccgggtggtcagggggatgcggacgaggatgcttatgtcatcgacaggctggcgggcttgctggctgaaatcgcggtgatcgtcaacgggccggagcctgcgggtactcgatggagctaccacgatctacccgagaaggtgaaatcactcgccgcccgccagccggtggggcagatccccgctggattcgtcctggtgccggagaagttcggaatcccggctgacgtatgggaaggcgtcgagttcgtcatcggcgggccagggaccggtaagggagaagcctatctcgacagcaccgcgtgggtcggcaacctgattcaggacgatggaagcgccgtctatggcttgcacctgtcctgcgacgagtgccccgaagaaggcagcgtgacgctggccgagttcgccgccccgcccgcgcaggccgtggacctggacgcgatgcacgcagctgcatgtgccgcgtgggacaagcaccagcaggcttgccggatcaccactgtgagcggttccctgcgcaaggtgtgcgaggccctgatcgacggcaaggcggtgggcaatggctaa

SEQ ID NO: 505588 - DNA, 228 bp, Stenotrophomonas maltophilia
atggctaagccaaccatccgcacgtccacatccgccctggtgcaagtcaccgtcgaggtccgcgccggttcatggggcgaaggttgccggcttgaccaggtgtatcggcaggcggccgaaagcgcgctcggcgagctgcatagcgccttggacaagcgcgggattcgcatcgtgggcgtggcgtgcatcaaggcgatcaccaccgacacagaggtgcgcaatggctga

SEQ ID NO: 505589 - DNA, 333 bp, Stenotrophomonas maltophilia
atggctccgggcgctgaccggtcgctggccgatctgttggatgcgctggccaggcaggttcaccacggtgagcacctggagggagatgcggcgcaacagcttctggagccgggcgcgacgctgctcactgtgttcggccctcggctcgcgaatgggcagaggaatgctcgccaccatgtagttttggaagcggcaaacctggtgcttcggacgcgagcgaaggaatggctcaatgcgggaaagcccggggagacccggcatgatcgagctattgccagcaatcgcggcttggctgccgtgctgggcgagcttgaggccgagcggaagcgctag

SEQ ID NO: 505590 - DNA, 1200 bp, Stenotrophomonas maltophilia
atggctcttacagacttcaagattcgaggcgcaaagccggcagagaagccctatcgactgagcgatggcggtgggctgttcctcgagatccggcccaacggatcgaagctgtggcggtacgcctatcggctcgattccaagcagcggctgctagccatcggtagcctgcaggacgtgagcttggcggacgcgcgcgctgcgatgcgccaggccaagtcgcaggtgaagcttgggcaggatccagtgctgcaacggaagatcgccaaggcccgcagcgaagagaacgcgctcaacacggtcgctgagaacgccgaggaatggtattcgagcgcggagaagggttggtcggcctcgcacagaggccgggcaaggcgctacctggaccagcggatcctgccagacatcgggaagtggcccatccgcgaggtgaccccagctgatgtgctgaagctgctgcgcaaggccgagaaggccggtccccacgtggccatcgtcacccggcagacgctgtcgtccgtgttcgagcacgcgatcgtcaacctgcgcgccgacgcagatccgacacaccccgtacgccgcgcgatcaagaagccgcccgtgatgcacgctgtggcgcactccgccgcgacaatgggcaagctgctggctggcctggacacataccccgggaaccgcgagacggccattgcgatcgaactgctggcgctcacgttcgtgcgcaccaaggagctgcggaccgccaagtgggtgaacattgactgggaagctgagtcgccgctgttgaagatcgatgccggcgagatgaagaagcgccgcaagcattgggtccctctggccccgcgcgctgtcgcgctccttcgtgaactgcaggagatcaccggcgccggaacctatctgttccccaatcagcgggatccgaagaagcccatgtcacgcgaggcggtgaacatgggcctgaagtacctcggtatgaatgagatctctggccacgacttccgcgcgaccgcgtcgacctggcttcatgaggcgggctacccgtcggccgtggtggacatgcagttggcgcatgccaagacgaacaagaccggcgcggcctacaaccacgccgagtttctggccgatcggatcaagatgatggaccagtgggctgatcacttggcgaagcagaagcagcgccagtcccggcaacccaagccctga

SEQ ID NO: 505591 - DNA, 687 bp, Stenotrophomonas maltophilia
atgggcgttacttttctttgtacgcaaagaaaagtaaccaaaagaagcgttccgccggccgcgagccggtgctgcgcaccggtgccctgcgctcctcggcccgtcgagggtcggcgcgggaactcgctgcgctcagacacccgcgcctctgcgccctcgccggacctgcggtgctcggctcgctcaaggcggatcccagatcaaaggcagaagcggtcgcttcgctcgcagggcccggcccggcccggcactaccaagcatcgtcgtgcagctgtggctcttgaccttgggtccgccttgagcgagccgagcatcgcaggggaatcaggggcgaagaggtgccaatgtcttgtagagccgactgttagtcggctgacctctgcacaccgtcccctgattcaccgagaagcgcaggggaccgacgtgcgaagcacggcggctcgcggctcggcggcgtgtttctttggttactttctttgcacgagcaaagaaagtgacacctctccgcaggcacggaaaagacctgccgggcagcggccggcactaccagcgcttcggcgccctcagctcttctggcttaccgccacgctacccagaatcaacacccccgcaatcaacatctgcacagtcaccgcctcacccaggaacaaccacgcgaaggccgcgccgaacagcggaatcaggtag

SEQ ID NO: 505592 - DNA, 903 bp, Stenotrophomonas maltophilia
atgccgcaccgtcgtcgccttgccctgaccgccctcgccctggcctgcctgctgcccgccctggccagcgcagccacgccctaccgcagcccgcagcagatcctcgacgcctcggcggccagcgactggcgcaccccggacccggccaacctgctgtacatggacctgccggccgggcgcgtgatcatcgagctggcgccgcagttcgccccccaccatgtcgccaacatccagaccttcgcccacgagcacttctgggacggcaccagcatctaccgctcgcaggacaacttcgtggtgcagttcggcgatgccgacgccgatgacgcggccaaggccagaccgttcggcagcgccgcgcgcaagctgccggccgagttcgaacgcgccagcgccggcctgaaggtcagcgtgctgccggatcgcgatggctgggccgcgcagacaggtttcgtcgacggcttcccggtcggccaggacccgcaagccggcaaggcctggctggcgcactgctacggcatgctcggtgccggccgcagcaacgaggaagacagcagcatcggcgccgaactgtacgtggtgaccggtcagtcgccgcgccagctggaccgcaacatcactctggtcggtcgcgtgctgaagggcatggagctgctcagcgcaacgccgcgcggaccggcgccgatggggttctacaccgacccgaagctgcgtacgccgatcctgtcgatccgccgtgccagcgacgtgccgacggccgagcgcacgccgatccaggtactgcgtaccgactcgaagaccttcgccgatacggtggaggcgcggcgcaaccgcgtggatgatttctacaagcgcccggcggggcatatcgatctgtgcaatattccggtgccggtgaagtaa

SEQ ID NO: 505593 - DNA, 2328 bp, Stenotrophomonas maltophilia
atgcgacgtacatggcgttgggtgctgggcgtagtgatcgccatcgtcctggtcaccgccctggtgctgtggctgctgctgcgcggcagcctggccgacctggacggcgagcatgcgttgccgggactggccaggccggtcaccctcgagcgcgatgcgctgggcgtggtcaccatcacggccggcagccaggccgacgcgatgcgcgcactcggccgcgtacacgcgcaggaacgttatttcgagatggatctgatgcgccgcagcgccgccggcgaactgtccgcactgttcggaccgaaggccatcgacgccgacaagcgcatgcgcgtgcaccgtttgcgcgcccgcaccgaggcacacatggacgctgcattgggcgacaacggcgatgccgtgcgcgcctacgtggacggcgtcaacgaaggccttgccgacctctccgtgcggccgtgggcatacctgctgctgcggcagtcaccgcagccttggcaggccagcgacagcgtgctgaccgggctggccatgtacgccgacctgcaggatcccggcaaccagaccgagcttgcgctgagccgcatccgtgcagcggtgccgccggcgctgtacgcactgatcgcccacgacggcactgaatgggatgcaccgctgttcggcgaaccgaccggcaacgccatgctgcccgatgccagccagctggacctgcgcacgctggagggaaagccgggcaccgggcaggaagaagccgacgccgtcggcagcaacaacttcgcggtggccggtgcgctcaccgccgacggccgcgccattgttgccgacgacatgcacctgggcctgcgcgcacccggcctgtggttccgcgtgcgcctgcgctacccggacccgcaggccgctggcggccaggtcgacgtcaccggcttctcgctgccgggccttccggccgtgatcgtcggcagcaacaggcacatcgcctggggtttcaccaacagctacatcgacaccgcggactaccgcaccgaaccggccaatgccgcagtgacggtgcatgaagaacggatcgcggtggccggccaggcggatgtgctgttcccggtacgcgaaaccgcctggggaccgatcctgcacacgcatgccgatggcagcggcgacgcgctgcgctgggtcgcccagctgcccggtgcggtgcgcctggacttcggtgatctggcccgcgccggtgatctggacgctgcgctgcagttcgccgaccacgccggcattcccgcacagaacctggtggtcggcgaccgcaccggacgcatcgcctggcgcctgatcggcgcccgcccggatcgcggtccgggctgcgcgccggccggcttcaacgccgcccacaaccaggactgcgccccctggccgatccgcagcgatgcctcgccggcattgatcgatccccccaaccatcgcctgtggaccgccaacggccgcgtcctcgacggcgaggcactggcccaggccggcaacggcggctatgaccttggcgcccgcgggcggcagatccgcgacctgctggcgatccaggagcgcttcgatgaacacgacctgctggcgatccagctcgacgatcgcgcggtgttcctgcagcgctggtgggcgctgctgcacgacgtcatcgaacgcagtgacgaccctgcactgaagcgcttgaaggaggccagccatcaatgggacggccgtgcctcggccagctcggtcagctaccgggtggtgcgcgagttccgtacgcaggtgatgacaacactgtccgatgcactgctggcaccggccaatgcgcagctgggcgatgactatctggagccgcgcctggcgcagctggaaggcgtggcctggccaatgctgcagcagcggccggccaatctgctgccaccggccttcgacagctgggatgcgctgctgatcgacgccgcacgccgcaccgagagcgagctggccaggcagggcccactggccaagcgcagctggggcgaacgcaatacggcggcgatctgccaccccatcgcacgggcgctgccggacatcgccaaacactggctgtgcatgccggccgaccgcctgcccggcgaccgcgacatgccgcgcgtgcagacgccgggcttcggtgcttccgagcgcatggtggtttcgcccggccacgaggccgacggcatcgtgcatatgcccggcggccagagcgggcacccgctgtcgccgtactggggcgccggccacgaagactgggtgcatgggcggccgacgccgttcctgccgggcaagccgcagcacacgatgacgctggtgccggcgcggtag

SEQ ID NO: 505594 - DNA, 450 bp, Stenotrophomonas maltophilia
atgattgatgccaacacaaaccaccagatgattccttcaaccattcacgttcagggccttggcgaactgcacatcgttggggatcgcgataccggctggttcgcccaaggacacctgcctgccggggacggcactttcttctcgatccagatgtcagaagacggtcagctgatggctggagtcggcttcgtgatggaacagctctctaaactcccagtgctgcaacagtacgcattggatcatctcgccgcacacttcccagtcgaagcttcatcaggggaaggccctctggcctctgagccagagattacgttctgggagctggaaaggtggtcgatgctctttgcagagggacggctacccatctgctacccctacggagttctggtcgacttcattggactgactcccgtgggataccaggatctctccgatgcagaggagatatga

SEQ ID NO: 505595 - DNA, 348 bp, Stenotrophomonas maltophilia
atgacccggtttaaaacgtataagaagaaccctagtgtcaactatcgcggcttggagattgatcgagatatcgttcaggagttccttaacgacgtcacgaacacccccccatgccctgaatgcggacacgatctctggcgcgtgatcatatcgccagggaaaggcatgatcatggggatacccgctttctcaacttcggaagatgaagacgaagatgaacgtggcaacttcctggctatagccgtcgtcaactgtgatcactgcggctacgtgaagaatttcacacttcgtgcagttcagaactggatcaacaagcggaaggctcaagcggaggctgacgatgactaa

SEQ ID NO: 505596 - DNA, 846 bp, Stenotrophomonas maltophilia
atgatcggcgttggcttgtcgccagccgcaattgcccagacgacggtcacgtacatccataccgatgccctcggttgggttgttgccgagagcgatgccaatggcaacgtgatcaagcgctatgactacgagccttatgggcctgtcgttggcggacaggtcacggacgggcctggctataccgggcaggtgagcgactcggccaccgggctgagctacatgcggcagctgtatatggatccccagttgggggtgttcctgtcagtggatccggtgacggcgtatctgaaaccggttgggcagttcaatcggtacaggtatgccaacgggaatccgtacaagttcactgatcctgatgggcggcaggcgatcccggtgccggctccttgcatccttcccatcccggttcccaatcctggtggaaacatccagcgcagtgaggatacatccggggggaatcgcgagagcgggccaagtggaaggccaacttcgagacccactgaacgtcccgcaggtcgggatacagttcggcgggggcgagacgggcagccaatacccaatcgtttccccgaccgaccactacccacgaagcccaatggtgagcctgcaccagaaccggatgcggctggcccgcatacgcaactggggcagcgagatggtagaaatggaaagtacgaccaggcgagagaattcgacggtcacgggaggccggtaaagactattgattttactgaccacgggcggccgggcagtcatacgaacccgcacgaacatccttatgagccgagtgctaccgggggcactccttcacgcggacccgcgcggccgcttaacggaggcggatag

SEQ ID NO: 505597 - DNA, 921 bp, Stenotrophomonas maltophilia
gtgaattcagcctctcaggctgccgccgagatcatcgcaatactgggttccgaacagtgcaacctggtcaatgcgctcatcaaagcccgcatcctcgccagccagataggtcaggatcagctcaacgagtgggttggctgggagctgacgggatatcccgcagaagtcgagttgccaccgtatcggcgcgttaagttgacgccgaaggcaaacctgttcaacggtgtgtacagcctccagaatcagacgctacccacgctccggctctccggtaagcgtagggagcgcatcattttctcaaagcttcgccagtcggtcgttgctattgaacgctgtactgaccaggaggtcgctgcaacgtacccgccagaattcgcggcgttcttccaaggggctctcggtcctgactgggagatcgtgagcatgtggggcgagcctggtgtgggcgcacatgatcaggtgctagtcgaaatccggtcgcgactcctgggttacatgttagacctccaaaagacgctgccgaaagacggcgacaccaacgaacctgagctaacttcgatgaaggacaagcgcgacagcatgtttcagggcgcgatattcggccacaacacgacgattcagatcggcaatgccaacacggccaatgtgacgaatacggtgacgcagggtgacctgacttcactcgtggagcacctgcgcagcagcggagtggcagaggacgaccttcgcgcattggagcttgcgattggagaggatggtgatcgtccttcaaagaccaaaaagttaggcccggcggtggccaagtggctcggaggagcggtcgcgaaggcggcgagcggtgcatgggatattgccgtatcagccgcagggaccctggtcgctggagcgctctccggctactacggattccctgtggcgtaa

SEQ ID NO: 505598 - DNA, 1167 bp, Stenotrophomonas maltophilia
atgtggccgcagacgccttggtcgtttgggatgagcggtcgggattgcaatgcgggtagcgaattggcgcgagctcaggaagcactcgcgctgcatcgggcttctcccgaagtgtccacgactgagtacttcaatcgaatcagtcgagagctagcgaaagaggcctcatcatctatcaagatctatcttgatacatgctactgggttcggcttcgggacgctcaatttggccgggccaagtcatccgctgatacggaagttctggaactgatccgggccttagtcgagtctgggcgagccatatgtccggtcagtgacgctgcgttcatagaattgatgcagcagactgatgccgagagccgttcgcaaaccgcgattctcatggacgcacttagtcggggagtttgccttcgcacagagcaagagcgcgtcttcctgcagttgcagcggtttatggctgctcctcatgaaagtggccgcattgatttgaacctcagttgggttcggccagcgtttgtcttgggcgttcgattgccgcatcacgttggtgtacctcatgcggtcgatcatcttttgcagaaggtaaccattgaccttgggtcacgtctcagtttcgctgaaattgcacagggcggcccagtggagggtctcgccgatgcgatgactcgatccgccaacgaagtgaattccaagttggtagagtacgcgagctcgattaccagctttgagcaggcattcagggctgaaatatcaggagcggtaaagctctatgacgctgatttggcgcggtcgttcttgactgaaaagcaggtggcgataacgggtgagaacattgagaagttcaaggcgtccacacaaacaatgctcttcaatctgtttcgactgcgcccggagctaatggtagagcgcttgcctacgctcttcgtacatgctagttgtcatgcggcaatcaggtgggataagaagcgacggttgaatgggcatgatgtagtagatattcaccatgcatgcgctgctgcaggctactgtgatgtgatgctgaccgaaaagccgttaaaagctctgatgacgagtgggaagttgaatctccataagaggctaaacttggcgatcgcggcgaatgcagttgaggctgtcgagtttatcgagtcggctgtgcaggattaa

SEQ ID NO: 505599 - DNA, 225 bp, Stenotrophomonas maltophilia
atggctgatcaattgcccatcgctgttcccgtccgcgcggtggtcaatgcgaagttcatcgcgagccccggcgtgtccgtgcttgagggtcgctttcagtgcgtactggattgcggccacatcgtgatccgcccaggggagcacgtgcgtggcaccaggttctccattcgggcaccccacagtgccccgtgcaaccaatgcaagaaggagcccatccatggctga

SEQ ID NO: 505600 - DNA, 255 bp, Stenotrophomonas maltophilia
atggctgaccacatcactgagacaccggatggcctgcggttcgtgaaagctaagggcggcacaaagattcatctcttgccgcagggcacgatgcgctcgctgtgcggatacgagccgaaaggccatgcgtcacaccacatgaccgatcgatctggttactggctggttcgcatcgacaaagtgcaccggcctgtttggtgcgaaaagtgccagcaggcgcgcccgtcgagcggcagccaggcggtgggcaaatga

SEQ ID NO: 505601 - DNA, 189 bp, Stenotrophomonas maltophilia
atgactgacaacgaaacccgcgtgttccgattcattgaacgagagtcaggaaaggaggtaacggtaggcatcactgtggactgggacgaactggcaaaggaactgggcttccgagccctccgggctaagggtggcaaggccgtatcgctccacggcgcagtggaaggcaaggtggtgcgcaatggctga

SEQ ID NO: 505602 - DNA, 372 bp, Stenotrophomonas maltophilia
atggatgacgtcgatgatgcgcgcaagaacgccgcagccgctgccttgcttgccgccactggatggacgtgggtggacgatggcgcaggccactggaaggccccgcgcgcgcaggccgtggacctgggcccggccgcgatcccggacacgcccgaggtgcgcgacattctcggccgtccgaacttctggtgcagtccgtgggccaacatcctccgcaggcgaggcgacgtgattccgtgcaaggccgaagaggagcaggcagcagtgattcggttcatgctgaatcactacctcgctcatggcgaaggatgggctgaagctgccgaagctgagcttcaggcgatccgctaccaggtgacgcgcaatgactga

SEQ ID NO: 505603 - DNA, 753 bp, Stenotrophomonas maltophilia
atgagcaacgacaacaagaccctagcggatgtgcagcccggtgggagggtgaggctgggggatgcccttctgccctgcccgttctgcggtgcacccgctgaacgcatcgacttcggtatcgggtcgcgggaaaacgagggcggttcgtgtatcgcgtgcaccggctgccaatccagcggccccgttgagttcggctacaaggagaacttcatctccaactggaaccgccgcgccctctccgcccagccctccccgggtggtcatggggatgcgcttttggaatcgctggtcgcccggtggcgcaaccacgccgaggagatcggagtcagcgacaacctgctgtgccagaagatcgcgaactgcacgatgcgacacgcggccgaactgcaggccgtcctcgccgcccgcaagccggtgggggagccggtgggctatgcctgcaccaactgcgaccgcacgggcgaggtggtcatctgccagacctgcgcagggctggcatgggacaacggccgtctgcatgagttccacgaagtccgcgagctgagcaccagcctcggtgagggcgttctggatcatctgctgccggacgaatggcatgagaagccgctgctccgcttccagggcgcattcgacgaaggcgaccgcagcgtggggattggcgaacgatgcggaaacgtcttggctgcggaccaatccggcacggtgctgggcgactatctcgccgcgcgcgcggccaaggaaggtggccagtga

SEQ ID NO: 505604 - DNA, 240 bp, Stenotrophomonas maltophilia; identical to SEQ ID NO: 502433

SEQ ID NO: 505605 - DNA, 321 bp, Stenotrophomonas maltophilia; identical to SEQ ID NO: 502625

SEQ ID NO: 505606 - DNA, 3606 bp, Stenotrophomonas maltophilia
atgaccatttctgcgatcgacatcaaactgcggcagtcgcaacgcctgacggataaccccgacggtggcggccgtatggtgcaggctgagattgtcgacggaaccatgaacaatctctttcccgacatcggtgatgaagagcgcacgacgggccgagccacgctccgcaagatgttcgtccatgtcgataccgccaacaccgacgtgctgaaggatgcgatcggcgtgctgattgatccgccggctgatccccgcgtgacggtgagcatgttcgcaactggcgcatacgccgatgtgcgtgccgacgcaaaaaatcgagtggagagctacatcactcgcggtaccgagtcccgcttcatcctgatgggcaaccatttcgtcggccagatgacgatgctcgtgtatacgacggctgatgcgccaagtcccgacatcaatgacaatctctcgctgcttacgcttgccagttcgggtcacgacgaaggtgagcagtacgtgcgcgtcaagtccgttctttcgcgcaccacccgtacattcaccgacgatcagggcgcgtttgagcgggacgtgctggtcattgagctggtgaatgccctcctgcgcaacttctatggtcaggaggttgtccggtacaccgcgacgaagccggccacgcgggtatacgagacgaatgtcgttgacgcgacgagctaccacagcgtcaagcgcctgaccgcaccaggcaagccgggggacctttcagtccagatcgattcgccgtacgttcccattgttcctacatccacggccgagacgcccgtaagtgatgtgctggctggtatggggaccatgagccacgtgccctccggctctgcgggtagcctcggccagcagttcactgccagcttccaggccggggtgcctgtgacccgatacctcggtaccggtatcgccgtgggcagtgtcaaggtgatggcgggaagcgtggagctgactgacgatggaagcggtagcctcgcttcggccgctgcgacaccctggggcgggacggtcgactaccaggccggagtggtggctatcacccatgctacgggtaacggcggtgtgagcatgagcatcaccgccaccccagccggttcgatcccgatgcagggattcacggacgagatcgcggttacccagaacaatcagggcatggtgtggctgctgcaggcggccccacttccggcgcccggcaccgttaccgtggactatcgtgccctgggccgctggattcggctctccgacaacggcaagggtcagctcgtcggcaagcctggtcaagggagcggcacggtcaattacatgaccggttccattgttctcactgccggtgcgctgccagatctgaagagcagcatcatcggcgcgtggggcactcccgtgatcgctgagtcgcgcaccggcgatgtggcaattcaggctccctcgctgcagttcgtcctgggtgaaggcgcggccgtacctggaagcgtccgcatgacgctccgcgttggcggtgctgacgtgctggtaacggataacggtgccggcgggctgctgatttcaggccaggttcgtggttcgatttcctactcgaccggtgaagtctccctccggcccgtgacactgccggacgccgacagccagctggcggtcacgtacgacacagggcgtccgctgaacgcagccccgcagcccgttccggacggttccggcatcgtgtcgttcacgcttccccaggggcctgtccgggccgggtctgtccagttggactgggtcatcagcgttctgcgtgatcgagacgatattggctcggcaccgcagccaatgcgcgtgattgccaaggatgatgggaagggcagcctcattgctgtctcggtgggtgacaccgtcaccaacactgtgcttggggcggtcaactacagcaccggcgcggtcacgctacaggccggtaagttcatggtgcgccaggtgtcctacccgcagtacgagattcgttcgggccgcctcaaggtggtggggtatgggcgcatcgatgtgcttgctcagttctccgccggaaccatcgtgtcggtgagctggctgctcgccggcgatacggcgccggaagctcaagagagtctgccgctgccggcgatgcagctgcagctcacgccaacgatcagcgacagcgtcgtgccgggcagcgttcggtttacgttccgtggcaggacctacgtcgatcgcagcggcggcctgtatcacagcatcgacccgggcacgggggctggtatctacgccggcaccatcgactacacgtccggtgtggtcaacatgacgcagtgggtgcccggcggaaacaacaccgttcaggtcctctcgttgctgacccgaatcgctgatcctggtgtggcgttcacctttttccgggcgccggggtccccgttgcgtccgggcatgttcacgctgagggcgaatcgactggacggcgagctgatcactgccacggccgacatcaacggggacatctccagccctcaaatgcggggcaaggtcgattgggaaagtggtgtcgccaaggttcagttcggccagctggtgcctgtggcgggcaatgaagggcagccgtggtttgacccaaccctggtggaaggtgaccaggtatggcatccagcgctggtgctgccaggttccatctacatgggcgctgtggtctatcggtccattccgctgtccgaggttgtgatcgggctttcttcagtccgcctgcccagcgacgggcgcgttcccgcattcaaggctgggcagactgtgctcattcaccatacggccaagcacacaatcgcggcgccacaggccagtcaggtggtcgtgttcgggcgtaccagaatcgcagctgtcgaggtgcgtgattcgaagggtgtgcccatcgatagcgcttggtactcgatcgatgtgagcgccgggaggctggttttcagcgacccgcttaacctggccgcgtatcaactcccagtcgtgatcagcgagcgcgttgaggatcgccgactggttgttcagccccagattaccggcgagatcgagatcaacaccggactgtcgcacgactacccggcgggggaggcaatgatcagctcggcactccgcctgggcgaggcaaacgggtcgctggacctgcaggcgcgggtggtaaacctcttcgatcaggcggcctggacaggtgtctggagcgacgtgctcatcggaagcgcggcaccaggcacattcaacgacaccgacttcccgctggtggtcgcgaacagcgatgcgatcaccgagcggtgggcgattcggttcacaaacgcaacagccttcgaggtgatcggtgagacagtcggcaccatcgtgaccgggagtatcagcgctgattgtgcgcccgtgaaccctcgcacgggcaggccgtacttcaccattccacgggccggctggggctcaggctggtcgaccaacaacgtggtgcggttcaacaccgtgggtggcctggcaccagtctggatggttcgcaccacgctgccgggcacaccagagagcgtcacggattcgactcgttttcaagtcatcggcaatgtcgcaggagttcaagcatga

SEQ ID NO: 505607 - DNA, 999 bp, Stenotrophomonas maltophilia
atgagcctcaccccaaccatctatcgaagcaccgatccaggtgcgccacttctgtccggcactgctggggctctgctcacggttctggatgcaatccttgttgacggctatggcctgggagaaagccggaaggccggtatgggctggaccaaggcattctcgggctccgggctgagggcgtaccggggctcgccgactacggggtctggctactacctccgtgtggatgacactgctgctcggtcgtctctgcttcgcgggtattcgagcatgagcgacatcaataccgggacggacccggttccgtccgacgctatgaaatccatcgggtcacgttgggacaagtcaaacaacgccagcgcggaggcgcgccattggctggcggtaggcaacgagaggttcttctacctgttcctggacacggccggaaacttcgcgacgcagggaacacagggcacatttggtcactacgctggcgacatgatctcgatgcgaccaggggatagacacaatttctgtgtttcctacaagggcagcgacacagaggcgagtagctccattggctacgccttcaaggcgcagtcagggtgggccagcagcggcgggagtgattcaacgacagcatcattcatcgcgcgatcgttcaccggtgcgccgggttcggtgcgcgccttccttagtgcgccgggccaggcgagtggtggccttatgggcagtctatcgagcttcccggcctatccctatccggggaatggtggactgttatatgggtccgtcgatgtactcgaggcggcctatctgccccgtggtcggttgccgggcatctatgcgcctattcatcggcggccattccccgaccaggggctgctgactgatgtcgaaggcctcccgcctggtacggaactgatggcaaagaacgtcgcgggtgagaccatgagcggctaccacgactcctacacagggcagattctcattgatatgacgaacgcgtgggagtga

SEQ ID NO: 505608 - DNA, 690 bp, Stenotrophomonas maltophilia
atggcgcagcttgtggcggaggaactggtggataccggctttaccagccactacgagacggtcgactggatcgttcccccgggtgcttggttctatgacggtagtgcgccgttggatgctatcagcgcgctggcagaggcaagcggcgctgttgttcagtctgatccgaagaatcttgcgctgcacgttcgggcgagctatccggtaagcccttggctctggcgcgacacggagccgaatcacgtgttgcaggaggacatcgtgctgacggagagtctccagatgcggagcgcgccgctgtacgacgccgttgtcgtgactggcgagctggccggcaagggcgtgacctgcaaggtcaagaaggctggcgaagccggacagctctttgcgcagcaggtaagcagcccgctcatcagcgtggcggctgcgggtgcggagcgaggtcggaacgttctgagcgatcgtggtgagcaggcagcagtggacctgacggtgccgctgttcccgaagccactgaagccgggtgaggtcggggcaatctttcctctggacctggtggaggtcgtaggggctgaaggcacctggcacgggcagtgtgagtcgctgcgcattgaggttgtgatcgatcagcaggccgttgtgattgaacagaccgccactctggaaaggcactacaccgatgcggactga

SEQ ID NO: 505609 - DNA, 726 bp, Stenotrophomonas maltophilia
atggagcggacgagattgcggcgctggggccgaatcatcacttggtccctgaccctgatattgatttccatgtggatcatcaagcctggccggggaccgtgggacgccctcttagcccttctggcgttcatgggagccatcggcaatgagggcctaagcagactgaagccagccgcgacggagcgctttgcttctaatgctgcgcgggtacgacaccgcgaggctatgcgaaagacgctgcaagaagagatctatcgcttacgcgcagaacgcctgcgccaggatgtcatcgtgcgcgatgtggaccgagccgatcactaccctgacctcgacccaacccccggcatttcgccatggttccgcattggattactggacacatacagcaggggcatagtcgtcgggctacgctacgggggcctcaagaagtgcgagggcggctatagattcgtcgattgggtcaatgatgaagccagcgatgagacggtaatgctactaggcgatatccctttcgactccatcgcagaggtcaaccttgacggcgacgggcactacccatacgcacacatctactgccacttcgacgcaagtggacaaccatacgagcgactatggttcgggaagcgtgtcgataccaccgaaatccactactacttcgaacatatagccgactacgttgacgtagagcgcaacaatcctccggatggcaccctgaccttcgcgtag

SEQ ID NO: 505610 - DNA, 408 bp, Stenotrophomonas maltophilia
atgaccaaccgcaccaccgtccatccccgcctgcacgctctgataggcgacatcgccgccaacatgcccgacgatctcgcacgcgagatcgagtgcgccctgaacgagcagagcctgcctgcgcagtcgcccacgttcttcacctgcctcaatgccatcaaccatgccgacggcgatgacggacagccgtgcggcagcctcaccctgtgtgccagcgatcacgcctcgctccgccgctcgatgtccgggctcggcgcattgctcgatctgttgcaggccgccgaccgtgcgcgcaacgaaggcggcccggaccagcagttgggcgctttccataccgacgggctgatcgtggccgcgcgacagctggtgcgccaggcacatcactgcctctccggcggcgacgcctga

SEQ ID NO: 505611 - DNA, 2625 bp, Stenotrophomonas maltophilia
atggcgagcattcgttccgagtaccaccgcttcctggcacacttggcgcagcgacaagtgcacgacgatgtgcgccggcttgcgcacctgattttggatcacttgcagccgctggctgaggttggcgcggcgggccgcaggcgatcggtccgcctagcgccgctggccatagccaacttggcgcagactccggtggcgtaccaaggagacggccacggtcccgacgctgggccggcgcttgggcgcctgcttcagctcgaggtgggcccgttccgcgggtttatgaggcaagaaacgttcgacctcagccatgacatcacgttggtctatggcgccaatggcacgggcaaaagcagcttctgcgaggcgctggaagttgcgatgctcgggtctatcagcgaagcccaggccaagcgagtcgaccagcgtacttactgtaacaacgcccggctgcgccgccatgtcgcgcccgttctctcttccggggcggcagagcgggcccaagccgtgcagcccgacgaggcggagtaccgcttctgcttcatcgagaaaaatcgcctcgatgatttcgcgcgcatcgcggcccgtacaccgggcgaccagcgacagctaattgccaccttgtttggcgtggatcaattcagtgacttcgtgcgcggattcaaccccacgctcgaccaagacctgatgcttgtcggaatccaggccgcccaactcgcccagcggcgcttgcagttggcaaattccgaacagacgattgccggccatccacaaaagatcgcagcgattgagggcatggaacaggcgctggcgcgacgcatgttgcccgacgcgacgtaccagggctgcgtcgactggctacttggcacgccgcagctacaagggcggtttccgtacgtgcaggcgcaactcgtcgccctccctccagcgattcatgaagtgacacgtgcacgtctgcagggtttgctagacgaggtgtaccgccttcaaggccagtggcaggccgccaccgggcagttggccgcgcgtgccggtgacgtgtcatatgccaagctgtacgaggcggtactggccctggccgatgacgcaaccgcctgtcccgcatgcggaaccgggttagctgcggtggcccaggaccccttcgccaaggcacgagcgggcctggagcagctcgcacagttggccgccctccaacagcaagaggcgggcttgcgcacgcaactgagcgaggcggtgcgggcgttgtgggaagagatgcgtcgcgtagccgtggcggcggcggccgtgtgtcctgcccaactgcaggcggcggcgttgcctctattgcctccagccgccacaggtgcctggctaggagcatgggtcgatggcgaccgccgcgggtggactgcgctgctgcgggtcgccgagttcatcgaacatgccgacgcgcagtctcgcgaggcacatgccttgcgtggagcgctggctcaggaacgagatgtcttggaccagcaccggctggaaatcgagcggctgaagactctgcgcacgaccgcagaccaagagctggctaccgcccggcagactgtggcccagttcgatgaggccaaccgtggcctgatcgacgctaccgcggccgaagtgccggtcatcgcgcaccaccagcgcatccaggccgcctacaacggctacctgcccgagatccaggcctacctggcggccttgccgggccgactgctccagggccttggagagcaggcttgcaatctctacaacgccttcaaccgcgccgatccacctggcgacctgctgcacgcgttgtggctgccggtcgccgagaacggaaagatcgaagtcgagttcgccggcgaacctggcgtgcgctatgacgccttggtcgtcttcagtgaagggcacattaagtgccttggactggcgattctactggccaagaacatcgcgcaagaatgcccagtggtcatcttcgacgacgtggtcaacgcgatcgatgatgaccaccgtgatggcatctggcgcaccttcttcgaggatgggttgctgaacgacaagcaggtcatcctcacctcgcatgcggaggagtttcttcaccggattcagcaggaacttggtgcacgccgcgccggagcgatcaagcgctacaagttcctcccgcaccatggcgaacacgagctgcgcgtcgacagcgacccgccgacgaagaactatgtgctgttagcccagcaggcgctggcgaacgatgagaagcgcgaggccttgcgacaggcacggcccgcgctagaaagcttgactgaccgcctctggacatggcttagccggcggggagatgggcgcattgagatcaagctcggcggacctcgctcgccttgggagttgaacaacaaatgcagcaagctgaaatcagcggtagctcgcgttgcggcgcagtatcccgctgcacagcaatcggtcgacgcactcactactttgcttagcctcaacggggcaagcattgaatggggatacctgaacagcggtgtgcacgactcgcagcgcgatcacgaattcgaccgagctactgtgcgaacagtagtggatgcagtcactgccttggatgacgcgctggaagcactgcagaatccctga

SEQ ID NO: 505612 - DNA, 2916 bp, Stenotrophomonas maltophilia
atggtcttcgcccgttgctgcaccctgttcctgcttggcctgatggccatgcccgcgtcggcgcagtcggcgcggcgtccgcccgtgccgactggctctaccccgttactgattgccccggctgccgagcaggcggtccaactgcgacacgcccgcatcgaaggcgaggtccaggccggcgttgcccagacccggatcaccttggaattccacaacccgaaccgtcgtgtgctggagggtgagctgcagttcccgctggctgatggccagcagatcaccggcttcgcgctggatatcaacggcgagatgcgtgacgcggtgccggtggccaaggaccgcggccgccaggtgttcgaggaaatcgcccgccggggtgtcgatccgggcctgctggaacagaccgccggcaaccagttccgcctgcgcgtctacccgctgccgcccggtggcagtcggcgtgtgcagctggtgatccgcgaaccgctggccttcgccggccaaagctggcagtggacgctgccgctgcagttcgccgccggtgcagcctcggttgaactgaaggtgcatgctcccgacgcggccaccgcaggtactgcgccattccgcatcagcgcgggccagctgcagtggcagggcaagggtgcgcagctgccgaagcaactccagtggaacctgccggcagcccgccacgcacaggtgcaggtggcgccctggcaggatgggcactacctgttggcacagctgccggtggcggccagcagtacaccccgcacgttgcccagcgagatcggcctgctgtgggacggctccggttcggcggggcagcgcgatcgcacacgtgagttcgccctgctggatcgctatttcgccgcgctgggtgacggcaccgtggccttgaccgtactgcgcgatcgcgccgagccggtgcgtcgattccgtatccgcgccggcaactggaacgagctgcgcgcagcgttgcaggcggtgcgccctgacggtgccagcgcgctggcgcagtggcagccgcagccgggcgtgaaggaatacctgctggtcagcgatggactgttgacctacgggccggaacagctgccggcgatggcgccggatcaacgcttgtttgcggtcagcagcgccggtgcgcgcaccgatgccgtgcgactgcgtggttggagcgaagcgcgtggcggccgcttcgttgcgctgggcgaggatgtcgattcggcggcgcgcgagctgctgtcgtcgccgctggacgtgcaggttgatgcgggtcgtggcgttcaggacgtggtgatcgatcgtcgcagtgaggcccagggctggctgtggctgcacgcacgactggccgccgacggcgtgccgatgcgggtgcgcgtgggtggtggcgaatggcaggcgctgcccgccacgcagaagagcaacgacggagaactgctggcgggcttgtgggcgcaggcgcgcctgcagcagctggccgccgaccgtcgcggcaaccgcgaggccatgcagcgcctgtcccagcagtttggcctggtggggccggatacctcgctgatcgtgctggagaccctggaggactacctgcgctatgcgatccgtccgtccggcaggctgcgcgccgagtacgaagccaggtttgcagtgcaggtaagggatcgcgccgcagccgatcgccagcgcctggatgaagtggccgcccgctggaaggagcgccagcagtggtggaaccgtagctggccgaaggatgcgccgccgcaggccaaggaaatggtgctgtcggttgcatccgcagactctgcagccgagtccgcccccgtggcgatgctggcagcccctgcgcccgcggcaccgcccgcgcctgcaccgatggccgcagcggcagaacagcgcatgcaggccagcagcgcacgcgcgcgtcgtccggcgcccgcgtcggagaacgcactggatgcgattgtggtcaccggcggcacagtcgatgccgctgcggccgccaacgacggccagctcggcatccagctggcggcctggcagccggactcggccatcgcccggcgcctgcgccaggggccgccgtcgcagctctatggccgctatctggccgagcgcgatgcccatgccgacagcagcgcgttcttcctcgatgttgccgacctgctgctggagcagggccagcgcgagctggcactgcgcgtgttgtcgaatctggccgagatggatctggacaaccgccacctgctgcgcgtgctcggttaccggctgatgcaggccgacgcgcccgcactggcggtgccggtattcgagcaggtgctggcgatgggccaggaagaaccgcagagcttccgcgacctgggcctggcgctggcagcggcaggcaagccacagcaggcgctggcgccgctgtaccaggtggtggtgcggccgtgggacagccgcttcgatggcatcgccctgattgcactggatgagctgaccaacctggtggccggcagcacgccccggctggataccaccggcatcgacccgcgcctgctgcagccgatgccgctggacctgcgcgtggtgctgtcgtgggacgccgacaacagcgacatggacctgtgggtgaccgacccgaacggcgagcgcgcgtactacggcaaccggctgacctaccagggcgggcagatgtcgcaggacttcaccggcggctacggccccgagcagttctcgctgcgcaacgccaagcccggcaagtacaaggtggaggcaaactatttcggcagccgccagcagctggtgaccggtgctacgaccctgatgctgcgcctgaccacccattggggcacggccaagcagaaggaccagatggtgacgatgcggctgaaggaccgcgcggaaaccgtgcttgtgggcgagttcgaggtgcgttga

SEQ ID NO: 505613 - DNA, 231 bp, Stenotrophomonas maltophilia
atgcaggcattggtgccgatcaaggtcggcacccatcagggcggggttacgccgagcgcaagcattcgtgccgaccaaggtcggcacctaccagagcacgtgcctgccagcgcagactgtcagcgcaccagcaccgcttcgctgctggcgtcggtgcgcatcggcaacgggcgctgctggcgcagccactgcgccaggtcgcgcgggctgagcgggcgcgagtacaggtaa

SEQ ID NO: 505614 - DNA, 1119 bp, Stenotrophomonas maltophilia
atgcgcctggctgattttatcgaacggaatgcgcgggaaatcctcgaagacgcggtggcattcgccgaaacgcaggcgcccgataacgtcgagttcagcgcaaagcaacttcggaatcatattccccagattcttcaggcggtcatagacgatctcagatcgccgcagacagactcccagcagctcgcaaagtcccacgggcttgcaccgttgaaacccggccccgagtccgccgcgtcctatcatggccgaacccgcgccatcgctggctttggcctcaaccagatggtggctgagtatcgagcactccgggcttcggtacttcggcgatgggcatccgaccagcagctggccacttcatcgatcgatgacatccttcgtttcaatgaggccatcgaccaggcggtggccgaatcccttgctcagttctctgccgaggtcgaatcctggcggcagatcttcctggcagcgctcgggcatgatctccgaggtcctttggcagcggtcatgttctcggcggacactctggccagtgggctgcaggacccagctttggccaagcaggccgagcggatcatcaacggcagcatgcgcatgaacaagctgctcgacgacctgctggcttacagtcgcagcaagctgggcgatgggatggccattcatccggtggactgcgatcttgcccaatcgcttggcgaggaagtcgaattgcttcgcgctgccctcccccacgtccccatcacgtatgaggttgaaggcgatgcccgcggttgcttcgatgcctcttcgttgcgcgaggcggttcacaacctcacgaccaacgctgcaaagtacggcgaacacggcaccgatgtgcggatcagccttgagggcctcgttgaccagatcatgatcacggtgagcaacaccggggccgaactgccggacgaagcgttcaacagtctgttcgatcccttgcgccgaggctcgcacaacgcgtcacagggggaacacgcgagccttggcctcggcctgttcctggtgcgggaaatctgccacgcgcaccgcggcactgtccatggacgatggcgggatggccgcacctcattcgtcattacgctcccgaagaatgctgattga

SEQ ID NO: 505615 - DNA, 744 bp, Stenotrophomonas maltophilia
atgagtacaagttcacggattgagtggactgagcgaacttggaaccccgccgtcgggtgcaccaaggtgtcggcaggctgcaaacattgttatgccgagacgctagccaagcgcttgcaggcaatgggcttggatgcctataagcatggctttcgtctaaagacgctaccagagcgcttggatgagccgcggcaacggaagaagccaacgatgtactttgtcaattccatgagcgatctctttcatgagcgcattactgatggatttctcgactcggtaatggaggtgatttccgatacgccgcagcatcgctaccagattctcactaagcgtcatgagcgcctcggcacctatttcgccggacggaatgtgcctagcaatgtctggctgggtgtttccgtagagaacaagcgccacggcgtgccccgcattgacgtgctgcgaagaatccccgccaagattcgctttctgtcatgtgagcctctactagaggatcttggctcgctagatctcactggtattcattgggtgattgttggtggcgagtcggggccaggtgcgcgccctatgcagccggactgggctcgggcaatccggacccagtgcgaagcacaggatgccaccttcttcttcaagcagtggggcggctggggggcggacggaaagcgccgttccaaaaaagctaacggccgggagctcgacggtcgtcaatggaacggcatgcctggccccgtaaatctgtaa

SEQ ID NO: 505616 - DNA, 1179 bp, Stenotrophomonas maltophilia
atgaatggagtcataagccgggcattggagcgctatgaagaccgagagcactctctggtcaaacaccacattctggcgtcgtaccttgaacggtgcctcatgattattggtcaaaagtggagcaagatcgcatacatcgactgcttcgctgggccatggaagtcttcgtccaatgatctttctgatacatcgcctggcattgctattcgtcatatggcggcgtgccaaactgagctgagagagagattccagcatcatgttcagatccgctcggttttcatggagactgatacggagcgagccaatctgctggatagccacgctcaacttgcaccaaggaacatcgtccgcccggacgtctggcgcaagccgttcggggaagctatccccgacttgctgcactggctacagccggatgagttcgctttcgtgttcgtggacccattcggttggaagggcatcatcgagccaacggtgctcgcaccgctactcaagcggcggaacaccgagcttctgattaatttcatgtggaatttcatcaatcttgcaacaggactggccgagcaagacacgaacctgactggtgtgttcggtgatgattggcgagaggctgcgggatccgccggagaggccaagcggcgcgagctgatgcggcgataccggggaaagcttgctgcggaatgcggcgagcatgctcggcaacgcttgcgcaccgctgtattgccagtcgagtacatcaataagaagaaggtaattttcaacttggtgtatgccacccaccatgccgctggattagtggtcttttgggaggaggcagagaagacatcgcggcagcaggatcgtctcaaattgcaacacaagttagatcaggtggctagaagcgatgggcagtccgacctattcagtgccgacgatcattcggaggaacgaaagggccccatgcaagaccttaagaaggcctggctccgacgcatcccaaaagttggtgacgctttgacggtcgacatggtcgtcatggcagacctcatcgaagaaacggatggcttgctctcagacctgcagtctgcacttggtgaactaatcaaggaaggcatgatcgaaaattcaaacgcgaagcgcttccgcccaaagaatcctgtgatttttcgaaagaacgaagtcctattgcgcttgaagtga

SEQ ID NO: 505617 - DNA, 585 bp, Stenotrophomonas maltophilia
atgagagagctgtacattcccaaagaacttggtgtccggttctacttcgacggagagctcccgaagtccgcatcctcagagggccgattcgagaaaaatatcgcaacgattgaaaagaaccgctcggagctgattactgcgaccgtgctcctcgaggaccgaatggttgaggcagttggcattcttctctttcgcacgcacgcctcaggcgatctcgaacgagagttcttcactaaagaaatcatggggacctcagatttctcctttgccttcaaacgacgtgtgttcaccaggcttcttgagcagaccaaagcgctagatgctacgaagatcaaggcgatcaaggctgcactcagcaatgttatggcttggcgcaacgcattcgcccacggaaaggttctacatgagctaaatggcgatttcctccttcagtaccacagtggcggccaccaagagctagtgctcgacgacgtgttcttcgaaaaggttgaagcgacagttcgacactgcctttacacgtgcaatgacgtaatcttgcgagcacgactggagcctgaagaaatccgtccaaagaaatcgacctga

SEQ ID NO: 505618 - DNA, 204 bp, Stenotrophomonas maltophilia
atgcaaacatggtcagacggcactgcgttcaagagcatgctcgtcttctccgactacatgcggaataagtgggcctacgaattcttgatcgaagacctcatatgcatcttcagcgtatttgcgaatgaatcgtctgcggtcaacggtatcagctttgagtggaacgataaaaagcaggactccgtgacagactacgctcgctga

SEQ ID NO: 505619 - DNA, 1740 bp, Stenotrophomonas maltophilia
gtgtcattgcattcgaaagtcatcagcactgtcctcaatctacttttgctggcactcgccgccgctgctcaagcacagactggcgcaccactgacctcatcgcaggcgggtgttttctacgaagacaagctcaagggcctgagcgaactcacggcgttaggtaatgacctgttcggtgacaaggtcagcctctatacgggcggcatccagttcacccaggttgacgttgatctacctggaaacaacgcgttgccaatgaagttctcgcgcacattgagaatgggcgggcgccgggacaccctcaaatcgatgagagactgggattttgacctcccctacatctcaggcatgtttgggaagagtggctgggtgtccatggtgccgggcgagccactgcgtcgttgttcgatcccactgaattcaccacagcaggccagcgctccatccgagtatgtgagtagcgggcaaggagacgtaggcttctcctttgaccctcacttcttctggggcgggctctccctgagtcttcccgggagcgacagcaagcccatgatcatcatggctgcgggtgccaagcaaccaaccgacggtcgtgcctatcactggacgaccgccgatcactgggtgttttcctgtctcccgagcaccagtaacggcgagagcggggaggccttcatggcccatgctcccaatggggacaggtactggtttgaccgcattgtagctatcccccgcgggaccatgaccgcgaactacggtaatggcttcttcaattacacgagcacgatggggctacgtgagttccgcgcgttgccgacccgtatcgaagacaggaacgggaatttcattacattcacctactccccaagccaggtcgtgatgagcgcgagcgacggccgctccattacagtgaactcaggcgctgacggggtagagagtgtcgtcgccaacggccgcacttggaactatgagtacgccggcagcactgtcgatcgcaagctcacccgtgtggttcttccggatggctcaagttggtcatttgatgccggagctgcgttcgatagccccattggcggctggaggaactgtgctgactttgtacccttcataccaggcccaagctcatccgcaacggtgttcatgactcatccttcaggagccaggggcacatttgagatgagctaccgacttcatggcagaaccaatgcgccgaacacctgccggcccttcacgcagatcttctatccggtggagtcgcacctcctgaccgtgctggcactgaatcgcaaggtcatctcagggcccgggcttgcgacaatgacatggaattaccagtacacgccgcttgctgcgagtctggacactggacagcatatctactgctcaactacgccgtgccctgagacccgcgcactcaccgtgactcgcgaggacggcagctgggatcgcttcactttcagtcaaaagtacggcgatctcgaaggcaagttgctgagcgaggagcgcggcaatacgcagggcgtgctgcggcgcatcgacatccagtaccggcgtagctcgaacggcagctacgcccgaattggcaacaatccctgttggtcatgctcgaaggaagaagagctacccaagccgctggagtcacgcaccaccacgcaggatggacatacatttctctatcgcgtggaccagtttgacgcttatgcgagaccgctgaaggtcacgcgatccagttcgccgtga

SEQ ID NO: 505620 - DNA, 3849 bp, Stenotrophomonas maltophilia
atggcacgtaaatcgcctcgtagtaacacatatccgaacaagacgctgctcgcagctgctctgatcgccacggcctgccttccagaagcccgggccgccactaccttggaaaccctgagctaccatgacaacgaaagctcatggattctgggccaagttgctactcgtgcgatcaacggcgtcctggccgatcagacgatgttcgatcctgtcacctctcgacccacgcagttcttggcgttcgggaagttgacccaatcgcttggctacaacgccgacggcaccatcgcatatgtacgcgatggaaatgggaacactatcgcgctgagttcttggaagcgcggtgttccgcagctgatcagcttccctgacggcacaacgcaaagcgctatcgtggatgatcacggctggatcagccaggtcaccgatcagaacgggttttcgaccggatatcgctatgacgcgatgggacgggtggcgggcattgactacccgagcggagatagcaccgcttggagcccgatgaaccagagctttgttcaggtcatgggcgacgagtacggccttgcggccggccattggcgaagaaccaccattactggaaaccgagtttccatcgcgtactacgacgcactgtggcgtccgttgattgtctcggagtacgacgccgccgacccaggcaccatcagattcaccggcaaggagtacgacaacgaaggcaggacggtgttttcctcctatccggcggcaacagccaatagtgaccgtggcacttggaccgtctatgacgcactgggtcgtaccacctctgttacccagaactccgagttgggtgaccttaccacctcgctcagctatctccgagacgcgtcaggcgtgttcacccttgcccgcaatcccaggggcgccgagacccggacgtggtatcgcatgctggatcagccctccttcgacagtcctacgcggatccttcaaccggaaggcgggctgacagtcattgatcgcgacgccttcggaaagccgctgagcattcgccgcagcagcgcagatggcagcttggaggttacgcgagcctattcgtacaacgcggcccaagagttgtgccggacagtcgagcctgagacaggagcaacacttgccggctacgacggcgttgggaacgtcgcctggtctgcgtccggcctcccgagtagtaccggctgcgagccagatggcagctcggcgtcggttgctccgcgacgcgtttccagatcgtacgatgcgcgaaatcgcctgctcgccttgtcgttcccggacggcaatggtgaccagatatggagctacaccgccgacggaaaagttgcccaggtcaccacgcgtaatgatgctggtagtagccaggtggtgaatacctacaactacaacaagcgtcgccttgttaccggagagtcgatcgaacagacgggaatgcctgcacggtcggctgggtacgtctacgacccgcaggcttccttggccggtgttcagtatccaagtgggcttaacgtagagtacgccccgaacgcgctgggtcagccaacgcgcgcgggcaccttcgtgtccagcgtctcgtacttccctaatggtggcatgagccggtttgtgtacggcaacgggatagtgcacacaatgcaacagaacggaaggcagcttccagccagtgtttccgatgcgggggttctcaacaacacctatggctacgatgccgcaggcaacgtagcgcagatcgccgacggcttgaacgcagcgcgcactcgctcgatgacgtatgactcgcagaatcgcctgctgtccacccattcaaccgccttcggtggcaatgggcagctaacctacagctatgacgccttggacaacatccgcgcggtcagacttgaaggcctcaaggatctttcctactggtatgacgccaacaatcgcctgaccaacatcatcgacagtagcggctcgacggtagcggggctcgccttcgacgtgcagggaaatctttctgttaagaacggtcaaggatttcagttcgactacggcaaccgacttcgcacagcagtggggaaggaaagctatcgatacgacggtagcggacgaagagtcctgtcatcagccgacactggcacgatcgcatccttctacggaatcgacggggtgcttcgccgacaagacaatgatcgtaccgcgagcagcgtggagtacgtctacctgaacggaagcctggtcgcgaaggccgccacatcgacggcacccgccaccccggtgatcagcgtgcctgcccagagctccagcggaaactacacggtctcctggtcagaggtagcccaagccagccggtacgatctgcaggagcaagccggcgctggcgcgtggtccaacatgtattccgggcctgaccggacaagagaagtgaccggccgcgctggcgggtcctacggctaccgtgtgcgagcctgtcgtgctacggcctgcggtggctggagcgccactgcaatcacttcggtccaatcgctccctacagctgggccctccgtaaacgcgcctgggctctcaatagacggcaactacagcgtctcgtggccagcaatagccggcgcccaaacttacaggttggaggagtccggcgcaggaagtggatgggccgagatccagagtggcaccatcctctcccgctcctttgtcggcaagcccgatggcacatttgcctaccgtgcacgtgcctgcaatgccgccggctgcggtgagtacggctcaacggcgtcggtgcaggtgctgcgcatcccaggatcacccgccgaactgagcgctccggcactgtccgcgaacggcgcctacaccgtctcctggtctccagtagccggctcgagcgcctaccacttggaggaaagcagcggcggttccgcctggatcgtggcagcaacaggcgcagcgacggcgaaggaattctcacagaagccagacggaagctacgcctaccgtgtgtccgcctgcaacagcagcgggtgcgggccgagcactgtccccgcgactgtccgggtcgttcgtgctccgacaggcagctccaatctgtccggtccggcgctgtcaaatgatggaagtgtcgctctgaactggtcgccggttcccctagcgacgacataccggctcttcgaaagcgtatccggcggcgggtggaatgccatcctcaatagcggcagcaccagtgcgacattgaccggacgcccaaatggaaacctcagctacagcgttgccgcttgcaacgacgggggctgcgggccgcagggaccggcgtttaacgtggtggtgatgcgacctccgtcgtcgccggcgctatccgggccgggtagctccggcactggcagttacacgatcagttggaatgcggttgatcgagccagtagctatgtagttgaagaaagcgcgaatggtggagggtggacggcggtctataacggcgggagtacttctgcggtcatctccggtcgcggcgatggcagctatgcatatcgggtcgccgcatgcaatcaggggggatgcagcggctacagcggctcagttgtggtggcagtgaatgttccgcccgtaacgccaaccggactgatcgcgcgcttcgtagtcaccaatgcattcccaccgtggcaggtgcgctacttcgtcagctggaatgcagtggccggtgctgcctggtacgaagtcacaggaaggggaacctattcgggacctgccacgtcggtgcagatcgactacacgggcgtccctgcaggtgccacgttccaagtgagagcatgcaagcccatagggtgctcggcttggacccccgctgtttctgcaactggagggtag

SEQ ID NO: 505621 - DNA, 669 bp, Stenotrophomonas maltophilia
atgttcttggatcaacgacgcgagacgtatatgactattgccctcaaccgagttgcagcaactagattcttggtgtgtgtcgcggcagttcttggatccgggtgtgtagattcgccaacttcatatcgcgtggaaggtgcgaagaccgatttttgtgtccctagcgatctggatgcgacgccgtcccggcggggtcacgaggatcctgtggtcggcggctttacgctgcatggctgttactccgcccatagcgaagcttgtatcggccccgataatttggtctcgatagcggtggtggccaaatcgtactttcctgggagaaggtttggcgacctccccgagggatcccatctgcgtacgagcgctattgaaggctggcaagaagcgaagatgctggagaagggactgcttgccgttcccgacggtggcgacaagagccactttttcgtatggcgtccgagtgctcgtgcagccacacaaccgttggatgacgacgaactaatggcatcctgtgacacgttgggcaatgtttcctgcagtcgcgtacttcacggggacgactttgctgtcacctattccttcgtcacagagaaggaatttccgaacgacttcggttcattagacaagcaagtcatgaatgaggtcgagcggatgagatgtagaagatag

SEQ ID NO: 505622 - DNA, 264 bp, Stenotrophomonas maltophilia
atggtttttacgcagaagatcggaacgtcacagttcagcggaagcgctggtaagaaggtccgcgcggtcgacgtccgtgtcgcctcggtagagattcaggaccttcggctggagcaccccaaggtgtccttcaccattgatgaagacggctcaactggcgacggcacggtcggcagtgaggtccttcggaatttcaacatcctattggacacgaagaccgggggcgtctatctgtgcccgaacgggattctcggcaggagctga

SEQ ID NO: 505623 - DNA, 192 bp, Stenotrophomonas maltophilia
atggccgaggacgcaggctttcaaagcgatcccaagggcaccacgcttacatgcccagcttgtggagccacagggttgatggacgaaatggagatctggcaccactggcttgaacagtgccgccgcgagcgattgctggctctcttcgatcccaagccggatgatccactcgacatcgaggacccgaaatga

SEQ ID NO: 505624 - DNA, 219 bp, Stenotrophomonas maltophilia
atgaacaacacttcccagaaccagagcgacagtcgcaactcagatgccgacaagaagcatccgggtcagcagggccaaacagacgggaaggatctcggcggtgaggatttggccggaaagcaagggcagcaacagcagcagccgaacggcactgagcctgggcagccaggccctggtcaggcccaaaaggtcagtgtcgatcgcgacgatcgtcgttga

SEQ ID NO: 505625 - DNA, 465 bp, Stenotrophomonas maltophilia
atgggcgccccgacgtttgggcatatcgccgctgcaaccgcacgcgcatccggcagcttgggggcattcgtagcagcgttaggcattgttttggtttgggcaaccagcggaccgctgttccacttcaacgacacttggcagttggtgatcaacacaggcacgacgattgtgacgttcctgatggtctttctgatccagcacacgcagaacgccgacacggcagccctccatatcaagctcgatgagctgatccgcgtaagcaagggcgcgaaccaagagttgctcaatctggagtcgatggaccccgctcatctggaggagattcggcaacggtatgaggccctcgccagaactgccgcagacatcaaatccaagaaggagcggtgcatgccagatagccggtcggctagttcagagccaagcgacaaagtcgcggcagagtcaggcaacccttctagagaatga

SEQ ID NO: 505626 - DNA, 387 bp, Stenotrophomonas maltophilia
atgacctatccccgcgcatttcctgcagtgcagggctctatccttgttctcgaggacgacagcgacctcgcctctttgcttagggacgtcttgactatgacgggttacgatgtgcggctagcgcgaaccgtcatcgacgcggcacgggcgctggaggaagtgtccatcgccgctgctgttctggactggcatgttgatcgaagcacagcagaggagatcgccacctcgctccgagacttacacgtgccctatgtgtttgcctctggcaccgaccagtccgctgttccacacgagcaccgctgggcgccgttcttctctaagccgttccctatcaccgcattgatcgatgctttggaatcggttaggtgcagcggagttcccagctag

SEQ ID NO: 505627 - DNA, 498 bp, Stenotrophomonas maltophilia
atggcgatcaagaccgcggaagaactgttcgtccacgaactctcggacatctacagcgccgagaagcagttgaccaaagccctgccccgccttgcccgggctgcagccaatcccgacctcgccgccgcgtttgaaacacacttggaagaaacacaaggtcagatcgagcgcatcgaccaagtggttgacgtcctggggatccgtctcaaacgcatcaagtgtgctgccatggagggcctggtcgaagaaagcaaggaagtcatcgattccatcgagaaaggcccggtacgggacgcggcgcttattggcggcgcgcagaaggtcgagcattacgagatcgcctcttacggcaccatcgctgccttggccaagcagctgggctacaaggatgcgctgccgtatctgctggagacgttggaagaggaacgatccaccgatgagaagctgaccctcttggccgaacaaggtggcaatcaagatgcggcagaggctgcctaa

SEQ ID NO: 505628 - DNA, 639 bp, Stenotrophomonas maltophilia
atgtggcgtcgaaacggattgtctctggtgttacttgcattgatggccgtcttcttggtcgcccaggcgttgaccggatggcaggttcataacgaggagctcgctcagcacggagcccacgctctaggtttcttttcctacttgggcaccggccacttcagcagcgccaccttcgagaactgggaaagtgagttcctccagatgggcatgtatgtgctgctcacggtccgtttgcgacagtggggctcggcagagtcccggcccttggaaccatcccaagaacgcaaccgcgtcgaagacgggcccagcccttggccggtgcgtcgcggtggcgtttggaagcggctgtatgagcattcgcttgcgatcgccttctttaccctttttgcggtgtcctttggactgcatgggttgggcagctggctcgccaagtgcgatgaggaccggctccagggcgcgttaccgccctccttcctagaccatctcttcagcagcgacttatggtttgaatcaatgcagaactggcaaagcgaattcttggcggtgcttgccttggtcgtgctcacgatcttcctgcgacagaagaactcgcctcagtcaaaggcggttgaggcgccccacgcgcaaaccggtgattga

SEQ ID NO: 505629 - DNA, 555 bp, Stenotrophomonas maltophilia
atgcgcagccctgccctattgatcatcgacctgttcagccgcttcgattttccagatggagagcaactgggcccactggcggtcgaggcagcccgcgctgttcgtcccatccgagatgcttttgacgagcggggatggccggtcatctatgccaatgacaactttggcaactggaagtgcgggttccgcgaactggccgaggaatgcatgcagacgccaggagcgccgcaggagattgcccggacgctcttcccctcgccgactcattactcggttctcaaacccaagcattcagcctttctctccacacctctccaaatcttgcttgagaaactgggcgctgcgcctctggtgctgaccggaatggcgctcgactcgtgtgtgcttgccaccgccatcaatgctaactcgcgggaacacgaatgcctggtcgtggaccaggcaaccgcctgtttgccggagcgccgtagtgccgccctggatgtgctcagccagtcgggcgctgcccgggtggtgaccgatcgtcagcttcgacaacgcctgatgtccgcctga

SEQ ID NO: 505630 - DNA, 177 bp, Stenotrophomonas maltophilia
atgagcgacgacaagaagaacactggcagcccagaccgcgaccgcatcaatgtcaacgaggattacgagctgcagtattggaccaaggctttgggtgtgcccgccgacgagctccgggccgcagtcaaagccgtgggtcctacctccgcagcggttcgcaagcacctgggcaagtaa

SEQ ID NO: 505631 - DNA, 945 bp, Stenotrophomonas maltophilia
atgcccaggcccatctggagcggatccctgtcgttcggtctgctcaatgtcccagtttcattgatgtccggcgagcgacgcatggacctcagtttccgaatgttggacgctcgcaacaagaagcccattcgatacgagcgcgtcaatgctgagaccggcgaagaggtgccgtggaaggacatcgtcaaagccttcgaatatgacaagggaagctacgtagtcatagaaaaggaagacatcgctgccgccgcacccgagacgcacgaatccatcgacgtcgaggcgtttgtcgacgccaagagcattggcctgcggttcttcgaaaagccctacgtcctggtgcccggaaagaaggcggaaaaaggctatgtgcttctgcgagagaccctgaaggaaacgggcaaggtcggcatcgctagggtggtcatccgcacccgcgaatacatctgtgccgtgatgcctgaggacgatgcgctggtgatgattctgctgcgctatccgcaggagctggtgtcgccggacgaatacaagttgcctcaaggccaagcatccgactaccgggtggctcccaaagaactggagatggccaagcagctcattgagagcatgacgtcggaatggcaaccggacagctaccaggacgagttccgcgagcgcctgtcagacatcatcaaaaagcgggtgaagcaggccggcgccacgaccacctttgaggagcccgagcaccgcgacgattcggcgaccaacgtggtggacttcatggccttgctccagaagagcctggaaaccaacaagcgcaccccggcgaaggcaaccccggtgaagaccgcctccaagccgtctgccaaagacagcaagtctgccaagaaggccacccccagaaaggccccgacgaaaaaagcggcgaagaagactcccaccaagaaggctcgaaagagcgcctga

SEQ ID NO: 505632 - DNA, 510 bp, Stenotrophomonas maltophilia
atggcagagctcaaagaaaacctgttggattggctgcgcgacgcgcacgcgatggagcagcaggcggaaaccatgctcaagggccaggcttcccgaatcgagcactaccctgtgctgaaggctcgcattgaagaacacatccaagagaccatcggccaacgcgaactgctggaaggctgcatcaagcggctgggcggttccccgtcgaccctgaaggatgtgatgggcaagatggccgccttcggtcaggccgtcggcggcatgacggcttctgatgagatcgtcaaaggcgccatggccggctacgtcttcgagcactttgaaatcgcgtcctacacggcgcttatcgctgctgccaagaccgtcggtgacgcggaaaccgtgagggtctgtgaagagattctggttcaggaagaggccatggccgactggctggcggcccatctgcccgaggtcaccgaagaattcatggtccgcgacgccacccctggcgttgaagcaaagaagtaa

SEQ ID NO: 505633 - DNA, 918 bp, Stenotrophomonas maltophilia
atgacaaacgacgccgttgctcccaatcctgtagacgccgtcgtgatcggtggaagctacgctggcatgtccgccgcgcttcagcttgctcgggcctgtcgatcagtggtgatcattgatcatgggctgccaaggaaccgcaccgccagccgagcccatggctgcctcggttgggatggctgcgccccggccgatcttttgacaaccgctcggcggcaacttcaagcctacagccacgtgcgctggatcgccgccgaggcggtgggtgcgcagggctctgcccggaccgggttcaaggtcacctgtgcctctgggagcacagtgtccgcacatcgattggtgctggcccatggggtcgcggaccagctccccgaagtccccggcttggaagagcgctgggggaaaagtgtcctccattgcccttactgccacggctacgagatctgcggaggatcgcttgggcttctgctcgccgcggacgatgatgcgttggcgcatgccaaggcattgcagcaatgggggaaaatcatgatcttccaccggggagatcggacggagcaggcattgaatgctctggagaatcagcttgacggcattgatgcggccttggagcgaacaccgttggtcggcgtttctgaagaagccacggcggacttggccgacggacgccggctagagctacgggccctctttttacaccccgaaacgaaactatgctccccgatcgcacaccaactgaggtgtgaaaccgaatctgttggctgcatttcaacggactcggcgaagcagaccaccgtggaaggagtgttcgcctgcggggatgcagcccggttcgcaggcaacatcgccctggccatcggagaaggcgcgctcgctggtgtggctgtgcatcgctcgttgttggggctgcttgactaa

SEQ ID NO: 505634 - DNA, 237 bp, Stenotrophomonas maltophilia
atgagtacccgtctcgaaattgatttgatgatcgctcagcttgaggaaaagctaccggaatgggcagcgctctactccgaggagcagtttctccggatgctcgctgaagcattgagctacatcgcggtcagcgcagaccccgacgctcggacgcactgcgtgatgcgcacggggtgcttggacccaagtagtagcgaagcatactggggacggcaatacggtcgacacgagtcctga

SEQ ID NO: 505635 - DNA, 1143 bp, Stenotrophomonas maltophilia
atgatcagccagcaacgctctacagatgctcttagcgatgagtccaggcagttcagccttctggtgaactcggtcacggactacgcgatttatatgctggacaccgcgggcttcatccggacgtggaacaccggagggcagcggatcaagggctataccgcagcagatgtcgtagggtcccacttctccaggttctatcttccagaggaggcggaagcgggatttccccaacgcaatttgcgcgttgccgctgaagaaggacgatacgtctgcgaaggctggcgcttgcgccaagatggaacgccgttccgcgcgagtgtggtcattgaccctatttgggtcgacggtgatctcgtcggattcgccaagatcacgcgtgacattaccgaactccatcaggctcaagagcaactgcttgatgcgcagcgcgaactgtttcaagcgcaaaagatggaagcgattggcaagttcacgctggggttggcgcacgacttcaacaacctactcacgatcatcgccaactgtctggacatggtcagtatccacgtggataaccctgcagccgcggcgctcattgacaccgcccagcgtgcgggcgaacggggaacactattgacgcgtcagctgctgacctttggcaaggggcagaccctggtcccggagaaggtccggctgggagggcttttgcatgagttcgagggaatgcttaaacgcgcggctggcgaccacgttgacgtggccatccaattgcccgacgaagatgtggagattgagcttgataaggcccagctggaggccgccatcctgaacttggtatgcaacagccgcgatgccatgcctcagggtggacagatcactgtgtcagcggcaattcgctctctgcagagcccatccacccccatgaatggcccgctagattacgcctgcatcacggtctgcgacgatggcgagggcattcccaaggaagtgcaggaacgggttttcgagccgttcttcactactaagtcaatcggcaaaggaagtgggttgggactaagccaagtatttggcttcacgagccaatcgggggggcacaccgaattgatcagcgaagtcgggaaaggaacccgggttagtctttttttccctattcgagtccattga

SEQ ID NO: 505636 - DNA, 450 bp, Stenotrophomonas maltophilia
atgcccattagggcggtggtgtatgtcagcgaagcttcgaatgctctgatgggagacaagctcgggttgcgggggagcaagctggacgatctcgtggacgacgcagcccgcttcaatcgagacgccggcgtcagcggcattcttctttttgacggcgagcgcttccttcaatacttggaagggccgtcagacgggctagatgttgcatattcgcgcgtccttggagcctctagccaccatcatgtcctggagctgcagagaagcgcggtctccgatcgccggcttccgttctggccgatgaaatggctccccgtagagccaagcgagctgacttcaaccgcgctcggcgattgggccggattcaagaggcgaggcgacggcgaggccatgaacgcgacagcgatggatcggttgctcctgttggtctctcgcggcgctgcgcttgactga

SEQ ID NO: 505637 - DNA, 3195 bp, Stenotrophomonas maltophilia
atgctcacgcaaggcaacttgcctgatctcatcagcgccctcggcttcgaaaagaaaggtggggcatatcgaaaggaatttggtgctgctgccctcgaggtgaatttcaccaagaaggaaataatctatccagaagacgcagggctgattgtcaacgaacgccaaacgtgcaacttcgatgccaacgaaaatttcgttgtgctcgagtgcgtacatcgcctgctggaaaagggctataggcctgagcacatcgaacttgagccaaagtggaaagtggggcgcggtgccagcggcgggcgagccgacatcctgatcaaggataacaatggccggccccagctgatcatcgaatgcaagacggccggagccgagttcaaacgcgcttggaggaaaaccttgcaggatggtgatcagttgttcagctatgcacagcagatcagcgaaactcagtttctatgtctgtacacctctgacatggatgccacctcgattcgttatatcagtcatataattgcgcatcgtgataatgaaaaatatctgattgataatccgttgtttaggggtttcaggacagccactgatgtgaaagagcgttacgccgtttggcgtgatacctacaagctcgattacacaaccaagggaatttttgaagataatatccagccgtatcacattggcaaagacaaatattctttggccgatttgcatgccatctcagccagcgatcagcagaagaagtatcacgcgttcgccaccatactgcgccagcataacgtatcaggtcgtgaaaatgcgttcgacaagctggtcaatttgtttctctgcaagctggtggatgaaattgagaactcttccgatctaaagttttactggaagggcgtcgcctatgacacccatttcgaccttatggatcgcctgcaacagctgtatcaggccggtatggcgaagttcctcggagaagacatcacctacatcaatcaaggtgacgtcaataatgcgcttcgattcataaagcagaatccggatgctacgcagcgagcgatttggaatcttttcattcagcagaaattcttcaccaataacgatttctcgttcatcgatgttcataatgaaaagttgttctaccagaacgccgaagttctgctaaagattctgcaaatgtggcaggacatccgcttgaccgatccgcacggtcataatcagtttctgggcgatatgttcgaaggcttcctcgaccagggtgtcaagcagagcgaggggcagttcttcacccctatgcccatctgccgcttcatcatgatgagcttgccgctggcttcactcgttaagcggagtgccatgccgcccaaggccatcgattacgcttgcggcgcaggccattttctcactgagttggctttgcaacttaagcccttggtggaaactcaccagcccaaagtggagcttgccgcgtatcacaaggcgctgtatggcatcgagaaagaataccgcctctccaaggtcgccaaggtgtcggcctttatgtatggtcagcaggggatcaatatctgttacggcgacggtttaataagccggcatgaggcatttccagatattaaagatggtagttttgacctcttggttgccaatccgccctatagtgtgcgcggttttctggaaacgctgcccgaggaagagcgtaaagcctacacccttaccgagagcatcaatgacctcgagaccttcaatagcatcgaggcctttttcatcgagcgtgccaagcagttgcttcgcgccaacggcgtagccgcgattatcttgccgtctagcattctctccaatggcggaagtgcctacatccgtacccgcgaaatcctgatccagtctttcgacattgtcgccattgctgaattcggcagcggcacctttggcaaaaccggcaccaataccgtcactttgttcttgcgtcgtaagaaaaccacgccggataccgccgcgcactaccgcgagcgagtggacgagtggttcaagggttgtgacgccagcaagcgcaagcaggtcatctataaggatgagcatctgattgtccgctacgccgcacacatcaatataccgctggagagttacaaatccctgcttaagggtgatccaaagggctcgtgggctgtgcaattggatgcggtctatcgtgagaaattcaacggtagcgccgaagtcgccaatctcaacaagaccagatggttcaaggatctggccgcagcagagcaagatgccgaagtcagcaaacgctatctggcctttgtccaggcgattgagcgcgacaagctctatcactacgtcatggcctccgatcagccaaaccaagtgctgatcattcgaagcccgacggataccaagtctatcaaacagtttcttggctacgactggagctccgcgaagggtgacgagggaatcaagctcatcaaggatgcaaatggacgacatctcacgccgctgtacgacgagacaaatcgagataactcgaataaactaaatcaatgcatttctgcgaatttcgatggttcacttgcatccattccgagtgatttgcagaaattcgcccatacggtcgcgcttgtggatatgcttgatttctctcggtcaagttttgaaaagcagatttccgaaaaatcaaaaaaatcttctgagataaaaacaaagtggccaaaggtaaggctcggaagcattttctctcttgagtatggaaaagctcttccggagagtaaaagggtttttggttcctatccagtcatggggtcaaatggacaggttggggtccacaatgaatatctcgtggaagggccggtcatcgtcgtggggcgcaaaggctcggctggtgctgttacctggcaagataagaattgctatccgatagacacgacgttttatgtgtcagttaaggatgggtcttttagtctcagatttatatatgaattactggtttggctgaatttgcctaatttcatagttggaattggtgttcctggactgaacagaaatgatgttcatgatttaatgattccgaattttgacccggcgacccgtaaggctatacttaaagagtgcgataggatagataagtcggcatccaagttggttggcggtggtgttcccgtcgaaatggtcaaatatgagatgcagcgagagaagaatttagtatttgctaggtatctttga

SEQ ID NO: 505638 - DNA, 594 bp, Stenotrophomonas maltophilia
atgaagcagagccctgaactgctgcgacgcctgctgcgtgccaaggaccggatggaccatgccagccacgaggactggccggtggcccgcctggccgaagtgagtgccgtatccgcggcgcatttcgcgcgttcgttcaagcaggcattcgggctgccgccgcaccgctacctgctgagccgccgcattgaacgggccgtggcgctgttgcgtgacaccgacatgccggtcaccgagatcgccgcgcagaccggctggagcagcctgggcaccttcggccgcatcttccgtgacatcaccggcgacagccccggcaacgtgcgcgcacgcgaacgccggcacccaccgctgcgcggcgccgtgcccgaatgccacgcgcgcgccgcgcagcggccctgcctcgacacgtccgtgctggaacaacgccgccgtggcgcgccgccggtggcgctcgccgaagggggtcaggccggcacggcgggagcgccacgggaactgcctgcatcggccgcagtggcgtccccggcgatcacactttcaagacctgaaacgtcggtatcttgcaggcaggtcgcgaacaccaggaagcggtag

SEQ ID NO: 505639 - DNA, 516 bp, Stenotrophomonas maltophilia
atggctcagccagcagttttcgcccggaacaaagtcgtgttcaacgattcgtcgccaccggtgccgatcgatctgattgcagtgatggtgccgggcagatttcccggcagagatgcctttatcgaattctattcgaagcacaatggtggctacttcgacggcggcgcggtgttctatcgggacacgttctacgaagttaccgcagaagatcgaaatcggcttgagctggaggcattccattgcatcgaggtgccgggcgtgcctcccaatcctcggcttgtgtcaatcggtgatgtgatggaatggagggcagaccgccatcatgacgctctggcgttctttgaatctcacatcccctttggggttgactgcggcgacaacgactattggcttgatacgcggacaggtagtgtgaaattcacaattgcgggggagcatatccgtgcggacgacgcgattcttgtcgccccggacttcctctcgttttgcgagaatattcaggccatgcagcgatag

SEQ ID NO: 505640 - DNA, 588 bp, Stenotrophomonas maltophilia
atgtatagagaacttgtattcgaaagctatggtcaagctctgggctgcgctttcctgggaggcgccccgtacctgcctgccgataccccctggccgcgcgacgcaaatgggaagccaatgctccatcttgcgagcctgcctgccgctttcattcaaacgcatgccccgaaggtcgccatcaaaacgcatctctgcgtgtcgatcttcacgccttatgacgttcttgatgatagctacatcgaaaccgctctactgactggcggacgtgtcatcgcttacgcgccccacgaacccggcgcagacagcgcaacactcccttttgaaccgcgcctggtcaccaccgccgcagcctccatcccggatgacgccgagaacggaatcgccaagattggcggaattcccgcttggcttcaggacgattgcactgatggacgggaattcatcctccagatcaacggctcccgattgaaccgggcagcacccacccaccgaggaattctggtcggcggaatgggttatctgttgcttgatcgcaacattccttcaccttcgatggactgcggtcgattcgtcatccagaccacttga

SEQ ID NO: 505641 - DNA, 780 bp, Stenotrophomonas maltophilia
atgagtataacggcgcgaatgttccacgggcgggatgaccggctcggagcgcgcttgaaatgggtccagatgtcgctttgcgcctggggcgacggatttccaagccaccgatcaaatcgcaagtcattgatatttattgattgttggaccgattcacagccctgcacatcagaagccgtgcaggatggggggatgcatcgaccgcttttatttacccccgcccacgacgcgatgaccgctcccgtgctcggcgggaccgcttggctggatgcccgtaccccttggccaaccagcatccatggacacgcactgcttcacctggccagttttccagccgcattcattcgaagccacgtcgccggactgtacatcgcgcctgggctgagcatttcggtcttcacgccatacatcccctcgggcgagcagagattcgaagaagccatggaccagggcggtcgcgtggtcgttcactggtctgggcatgaaccaagagactctccctgcgcgccgattgggccactccgcatttgtgccgggatggtgctgagtgagggcgaaacacctcacggaacttcgaaaattggtggacggccttactggctgcaggatgacgaatcgggagaccaggcgttcgtccttcagttcgacgacttcgatcttgataaggcagccccgacacatcaaggaatcctggtcggcggaatgggctatctgttgcttgatcgcaacattcaaacagcttcgacaaactgcaggcgattcgtcatccagacgacttga

SEQ ID NO: 505642 - DNA, 345 bp, Stenotrophomonas maltophilia
atgccatggcagaagatcagggaacttcctgaccagcgattcgtcggcccctacggcacggaattctggcgaatccacgaaggccaggtcttccaccagggtcggttgctgcgcaaggccgacgcggccagtttcgagttcatccccgaacactatttcatcgcgcgcgattcgcacgccatctaccacgcctggacccgcctgcctgcgattgaccgcgacagcttccgccagtgcggcgattactggctggacaagcgcaatgtctacttcgagtacgagacttcgctgaaagccttggccgaagccaattgcaccactttccgcagtatgggcggcggctag

SEQ ID NO: 505643 - DNA, 339 bp, Stenotrophomonas maltophilia
atgaaagctgacgaatttgtatccgctatccagcgctatgtgcttgaatcatccgtgggtagtacgatctcgaacctggcgtatccaccgggccgtcgggtggccccagacctgttggcacggtccgaatggttcaacagcttgtccgctgtagaagccgacatgttgcgagccgttgccggtgaagctgcccgttcggcggtcttcgggtttctggcggtgcttgatggcacccgtgtcatcgattcagagaaaggcaccttcgagcttcaccatgtgggtcgcgagaagcgcctggtgaatccgtctggcatcgatctacacgacctgctcgaatag

SEQ ID NO: 505644 - DNA, 441 bp, Stenotrophomonas maltophilia
atgaaactgaacttcgtggcggactgcgactgggagtcgcatgttggcaggataaaaagtcattacgtagagcgctccgccacattcgagtccaggagctacgggaacgaagtggcttctgtggcattgcttttcgtgtgtcgagatcccgagctggatttcaagcgaagagtgcagtttcgacgaaagaaggcggagttctataccgatgtgatgcttgacctgccgaccatcgttccgctctcgatgaaggagaaaatgcggtatgtctcccgcgaattgcttgagcagttggcggagcaactgggcagggtgaagttcaaggacttcgaccatgcaaggtttctgatggatctgaaggtatggctggaggacatcgatagccgttacaacggccaatcgtcgggtgcatggcactatgcctcgggcgaggcgtcctag

SEQ ID NO: 505645 - DNA, 465 bp, Stenotrophomonas maltophilia
atggcactatgcctcgggcgaggcgtcctagtcgctccggaagtcaccgatgctcacttgctggtcaattttctcaacggaatgagggatccattgcagcgctatctttgtgatctggatgtaacaggcaatctttcggcgggccgcgatgtcgagcagctgctccccgatcgatatgagttggatcagcgtgtgattcgctttgtctccattgagcaggccaatctgaacgcctggagggttcgtctttgcgaagtatttgacaatggagcgcctggcttcatcgatgtgtacgagttcgaggcggtggatccggatcatccctttggtaccgagtggacgtttgattcggttgacggcgccttgaggttcgcgcgggacgtgctgaggaccagtcaggggcgctatgtgaaccaaggactgattcaagacgagtacaaggaccgctattatccggaatggtga

SEQ ID NO: 505646 - DNA, 606 bp, Stenotrophomonas maltophilia
atgaatgcttcacccaagcccatcattcttatcccgctgctatgtgcggtttcgagcctcggcgtggtgatcgtcctgggtcgatcgtcactgtttgtgccgcacgcctggttgaactcggctcgaccactggtatggctgggagtctcggtcctgatgattgcagcaatcgccgtgcgcatgcatttcattaaagatccacagaactccttctcgaagcattttctgctttttaccgttgtttccctggggatgggatttctggcacaagaagtggcgtccggcgctgcgtcgttgttgaacaggttcggcgcggaccagcgctcacagtgctttgtacttgtgaaagtcagcagtaacgcaagtggaaacgttcagcgggtgatgaatgctgatgtccggcttccgggagatgacgcacgggctctgcgccatctgcagtacaccccggaatctgccgacctttcccagctcaagggtggggacagtttcgaaatgcgcgtattggacggggccttcggttacacggcattgcgtgggcaacgcccgagcgcaggctgcagcgaccgctctcctgtcgcggatgggcagtcccaatctttgtga

SEQ ID NO: 505647 - DNA, 990 bp, Stenotrophomonas maltophilia
gtggaaggattcgaactgctcaaccaaatggatttccacttgggtttccatagcgcgtacccgttctggctgggacaacgcgtcaacatctatgatcccgaacagaatcaatgccttctcggcatcattccggaagtgaaggcgtgcctgcaaaccgaacgattcaatgcggcaatttgcgtcaacggtttgatgctgctgaatgtgcgacacctttcgcagaccgcgccagacatgggcatttcaggtgattttgatcagtctgcaatatggatggatcgacacttggattacgccaatgcacttcagctgtgcttggaatcggagtcaataaagcatcctgactcctacgaagtctccgccactgcaacccgggcgaaggagatatgcaaggtcggattcctcgacggccgccccgtaaacgtcagctttggcacggctcgcaccttgaccacggtcatgcatgcgctgtccggatgggtagctggaggcgcccttgcgccttctcccctggaagcacccggatggagaattccccacgaagtagttcatgtcgaagctgctcggtttgcgctgcagaaattcgcgctcatagcacgcaacgaacatcacgtcacatggctctcctatctactcaaggccaaaaccgcatacgccgacaacgactacaggatgtcattcgtcctctcatggttcatcatcgagtcctccctccggtggcactggatgatcgagaacgagaagaacgttagatctcccgaaacctggaaaatcatcgacgatctttgtgcagggaaactgatctgcgaccaacacaagcgcgccctcacgtctttgcggacgctgagaaacgaactcatgcacaatcccgccgacaccgtctgccagccaattcaatgttacgaggctggacagatcgcatgtgaccttgcgctgctcggcaccgacgtggacctcgtaacatcgtggcgcaccaaggtgcagttctga

SEQ ID NO: 505648 - DNA, 1749 bp, Stenotrophomonas maltophilia
atggccacgacagaacagctggcagctgacccagttactcttctccagctattttcagccgataacgttctacgctgcccgcttttccagcgaccttatgtctggaaaaatgagaatataaataagctctggactgacatcgattccgtgttagatggagaatgtgatgtgcgatttctgggagctttagtctttgacaacgagtccgcatccacctccagctcccctggatcatactgggtcatcgacggccaacagcgtctcaccaccctgtacctaagcttgtgtgcgcttgccctcgtcgcgcgtgaggctggcgacgatgatgcttcagattcactgactgaggagtatcttctgtcccgcaaatcgacttctcgcatgaggcccaagctgtcacctacgttgcgcgatacacgacagttcaatcagatcgttctgggagcactggctgggaaggcaaaaatttcgcaatcacgagaggccggcgagagctcgggcgcgatgtcagatgcctacgagttgatcaagaggcaggttcggaaccgctgccttagcgctgacggaaaggtcggtagcggagaggttaatagattgcgtgaggttctcctagagaagctcgagttcgttgagattaggcttggacagcgccatgacgccaacgaggtctttgacagattaaacaaggaaggcgcgagacttggcattgtcgaccttgttcggaatgaagttttgaagagacttcgtgacgacccgcaatctgcagaagagatatatcacagcacatggaagccctttgaagatgggtttgaatctctcgattctatggaagggtacttcttcccgcatgcgcttagtcgcgacagctctatcacaaaatccagaactttcaactccctcgcagaccgctggcttgctgcgcatggagtcagtgccagtcctgaagaacaggtcaaagcaatcatggccgatgtcatggagcatgtcggtgtctacagacacctaaaggatggggttgcactccctggcgccgaagggaactacaaagaagctatggaggcgctttctcgcatgcgcccaccttcggtagtattcccttactttttctcccttcatttagcggtaatctctaaagaagtatcgcttgagaacgcgacgcgaatcgtcgcaatgatcgagtcgttcttgttcagacgtgccatgtttggactagagccgaccggacttcatgcagtcttcaaggtgctttggaacaacgccggcgccgacccagggcaagtccgagcatcactggaaaccaaaacaataaagtttccgacagatgcagagtttgaagaggcagtgagaaccgccccgatgtattcacgtaaagtgcgaaattatggaatgctggagttagaacgtcgctacaccagaggcgatctacttagcactttcccacctatgactgcagaccatattcttcctcagtctgcaaaagagccgtggcgagatcacttcacccaagcggagatggaccgctggaaggacacgtgggctaatcttgtccccctatcaggcaaagctaattcagagaaagggaccagatcgtggaccgagactcagaaaatgttgcgacttgaaactattttttccacgacaaaacacgtactcgacaaatatgacgtatggaacgcgagttctctgcaacaacgttcgaatgagctggttgactgggctctgaagcgctggccagatgcaagctcctaa

SEQ ID NO: 505649 - DNA, 3552 bp, Stenotrophomonas maltophilia
atgagtaagcttgggcagatcctcaaacacccagatgccgttatttttgtaggctccgggatttctctgtgggcaggactgccgagctggccgggtttgctccaggaactgcgggcgtacttggaaaggctcgaactgaatacggaccttctttcagaagagcttggccgaggatctttacttcaagcggcaagctatggtttcgataagttgagtaagtcgcaaatcggtgacttcgttagatccgcatgtcgattaggagtggcggagcctcacgatattcaccgcaagatcgtcgcgcttgggccccgctgcttcatcaccacaaactatgacgatcttttagagcaggcgcttcgggcgactctccccaagagaaatctccgaatagtcacaaatcgccagttgaccgaaatggcggacattgtccatgcgcgagcgagcgacttcttgttcaagctccatggcgatgctggagatagtgacagcataatcctgacgaaggagcagtatcgccagttgctcccccacggtgaaagaagtgctgcgctagaggcattaaagacaatcttggtcagtaggcccgtgctgtacctgggattcggcttgcgcgatcccgattttggctatgtaaaagatattatatcgaatacataccgcggtggagagcgggagcattatgcagtgctgcctgatgtgtccggcgaagaggtggactactggcgacgaaattacggcctaaacttagttggatacaagaccacaattaatgccagtggaggtcgcgatcatagtgctttgctgaagctaattgacgaatcgataaatgagcacgaggctgcgcacgagggggcagcctttaatcctcgatctccatctgtcgtgctggcgctggctcgccatgcattgaatatgtcacgctctcccaagattgaaccggaaataccaattcttgcagttcaaaggaatgaagaaaatcgctgggctcattatggtaggccgctgaatagaattctccaagagccccgcccaagagcgattgtgtgtgggcttcccggtgctggaaagacatatgcgcttaaacgttctgcagcagaacttgcagaggcattgcatacttccagcatggaggttgattttgatccattggccgcgataattccggtctttgttgacctaaagctgtatagaggtagtctcgctgatctgatatcggatgcattgcctccggtcatacagttcccggctgctgcaaattcaatgagattttgcatataccttgattcatttaatgaaatgccacgggaataccttgacgacggtgcatttttggccgattttctggaaagaataggttctgtttcaggtgtttctgtagtgattgggtcaagaactttggatggtctcgagaaatttgaatgtccggtattcgatctcgacgatatagaccgggattacgttacatcagccctgcaagaaatggatgttgaccctgagggtggattctttgaagagcttcttcagctctttagaaagccattctattttcagcttctcagtgcaggagagatcgaaattcccgagtctgcgcgccctaaggacatctacgagtccctacttcgcgacgttgaagttagtgtcgagactaggtttgagataacaataaatctgcgagcagcgctctccttggttgcgtatgacgctgtcgacgaggggttggaggcgtttgagtcgagaagactcgaagtagcgatttctcgcgagatgcgtagaagtggggagtcgaaaatagaccctgttgatgttgttaattggcttgtatcaaagtctctaataattccgcatccaaaaggactaatttcattcgtccaccagtcggttacggagtacctggcggcatttgagttggcgcgaatcttttctgtcacgccgagcgttctggatgcaaaacttgaattccatcgatgggatcaggccctgttcttaaccttgggaatgctcgattccgacgctgccagggattttacttcaaaagtatttttaacagattttgttctcgctataaatgcttcgaagtatgttgagtatgggaaagtggagctaatctccaagctcctacaggagcttattgatcgtgatgtgaaaaactttgatgaagtgcacgctattgcatatgcatttgagcgaggaattgtagcgtcggatgctcatcttcccttgcttcgaagaatcatgcaaaaaggtgattcgattgggggcgtggcggcttcaaaaattctgcaaatactcggatcagcagcgaagcatgaagttcttgagcaggtttactgccggcccggtgactataatttttgcgccaatggagttaatgacgagtttctccgggtggcaaccgagggcgatgtccgagatatccttaattttatagaaaattcaggcgaaatggatgatgatgaggatgagatatctggtgttatgagattgggaagtgcattgctcgaagagatggagatatctgcgatcaggcgtttcatgggggatgtgggcgagtttgttaagcgtcatccgaattcatctagaattgtttgcgaagccctgtggagctcgaaaacaactgatgcgttggcgttggccggggagatgctcttgcttggtgcaaatggagcagtcgtagcgctttcatttgttgttggtccagatgagaatcgtgtggatcttgactggagtagcctaggtacgccacatgcagaaattctttggggccatgtactccttggggatcactgggcgttgcgtgttcttcgatgccagtgtgccgctcgtcttgacgtgcgaaaccatgttatctcattggcagacacctccaaggcatccgtaaaagctgcccttgcgtatgtatgcagcgatgatgatgtgatatttgaagtttttgaaagtctaattgcaggtgaaaatttggatgatcggatggtttctctagtccagggaatgcatctggattggaaggggagagagagcactcttcttgggctgctgaggctgcggaatcatagctttgcgatgaacataatagattcactgcgcatcggtccgggttattctggtatgaatgtcgacattggtgatgttaagtggtggctgatatggatgtcggaggtggatgattttatgttcagagataggttgggcggatttctagccaattgcgggtcgaaggaaagcttggatctgtttctggatgagttgagtgtggcgaattccgatttcaagaatattataataaataacatactcgtcggaatttttgatctaacaacggatcagttctctcgcgatgcgatagattatttaatcgaggatgtgcaggtgaatagatcgtggcgagggcacctgctgggcgcgatcgctaccgaacggtttgtggaggggcgaatgctcccgctcctggcgggctccactggaagaagggccgagcttctgaggatggcaattaggcaagcgggagatcgccttggccgtagatacgatttggatggagttccgtggtcttaa

SEQ ID NO: 505650 - DNA, 555 bp, Stenotrophomonas maltophilia
atggaaaagcacgcattctggacgctgatcgaggaagcccgctctgtcgctgaagattctagcaatatcgccgggcaccttgccgaaagtcttcttagctacagccccgaacagattctgcgttggcacggaattctcgattgctatcactccctctctcgaaagaacaaattgtgggcagcggcatacgtcatcaacggcgggtgcagcgatgatggattcgagtactttcgaggctggctgattgcgcaggggaaggagacgttcctgagggcactgcaggatcctgacagtctggccggagtggatgtggaagccgacgaggctgaagacgaagagatcctgtcggccggtatgacggcatattttcagcggatgggactgcaggagcccgactacgatgcattcgacgcggctttcgccccttatgcattgagtgagaccgatgtcgcccagcttcaggcagacctccggtatgcacctgacatcgataatgtctgggacgaagcgtcgctggagaccgtgcttccgaggctgacagctcggttctattga

SEQ ID NO: 505651 - DNA, 186 bp, Stenotrophomonas maltophilia
atgccgccgctggtgctggcggtggacgattgcagggcgcgctatgtggaatggcaggccaagggcgtggaattcatccaggaacccatcgagcgttatggcgcggtcgatgccggattccgtgacccatccggcaacggctggaagatgatcgaagcacgatctgacgcgaggcgccggcaatga

SEQ ID NO: 505652 - DNA, 408 bp, Stenotrophomonas maltophilia
atgcgcaaaattcgaggtttcacattgattgagttgatgatcgtagttgcgatcatcgcggtcttgggggcgatcgctttgccgatgtatcaggactacgcggcaaagtcgcaattgacggccgcccttgccgaaatcaggccaggcaaaaccacgattgaaacggtcgttcaagacagtcgcgacgccagcttgattactgctgactacattgggttaagggtttcggagcgctgcaccgctcttgatgccgaggttgcatcttcaggggtgggcaacgtgacttgcacagtaggtggggctccgccgatcaacggcaaagacctcatcctccgccgcgcagccgacggcacctggacctgcgacggcagcgccttcgaagcgcgctatcgcccaaccggctgttga

SEQ ID NO: 505653 - DNA, 408 bp, Stenotrophomonas maltophilia
atgaagaaccagaagggcttcacccttatcgaactgatgatcgtcgttgcgatcatcgccatcctggccgccatcgccctgccgatgtaccaggactacgtggccaagtcgcaggtgactgctggcctggctgaaatcaccccgggcaagacccagttcgaagttgccatcaacgaaggcaaggccatcgctgatgctgctgcaatcggtctgaaggtttcggagcgttgcaccgccattgaagtgaccgatggcgctgatggcagcatcgcttgcacgctggcgggcagcccgaagatcaaggatgaaaccatcaccttgaagcgcgctgatactgacggcacttggacctgcaccacctcgatcacggaagcgaagtacattccgagcggctgcaagagcgcctaa

SEQ ID NO: 505654 - DNA, 645 bp, Stenotrophomonas maltophilia
atgcctgctgagattcgtgtggcattgagggtttcggtccccggaagttcgggttatgacgtgatggcgcagctgtcgcgtgaggtgaatgaaatagctacggcggatgaattaatcagcattattgttgatgatcaatcggcagtaggtttgtttgagttgattggtagggcccctgagatcatcgtgcgagttcgggcaggcgagggagatagggcgtgtctaaatctttcttccgcaacccttgaaaagatggcatctatatctgcctcattgaattttgatcccgagttgactggggacggcggtgcagatgaattggaattggaggaggaaagtgctctatcgacgcgacctgagctggttgtcgttctcgttggtgaatctccagtaagtgatgaagaagtcatccttttcagagtcgagcgccagcaatacagaactggcgacatccaggggggagttcatgaagcgttgcagcgcggccttgaaaaggtggagggagaggcaaagctgtgggcgctgcaggtgggagtacgcctatcgagtcagcgcggggtgtggccgggctttaatctttcttgtgacgtgatcagactgatggcgtctggtggagtctcattggatttcgatccgtatgtctag

SEQ ID NO: 505655 - DNA, 348 bp, Stenotrophomonas maltophilia
gtgatcgagcacaaacgccgacgaccagttgatcggcaccggcggcggctggcccgctacggcggcgaggagttcatcgcggccctgcccgcgcccgacgccgcccaagccctgggcctgggcggcgtcgagcgccgccatggaagccgccgcctgcccgccgcagaggcccatgtgaccatcagcgtcggcgtagcctggcaggccgcgcatgagcaggccgacccacgaggcctggtcgagcgggccgaccaggccctgtaccgggcaaagcatgccggccgcaactgcgtgcatgctgccccggcgctcgaggccggggaacagcactccgaccgccgggcctag

SEQ ID NO: 505656 - DNA, 210 bp, Stenotrophomonas maltophilia
ttgctgcggcgcctgcgctacgtcgatacgttcgatgtgatcagccatgccctgcaggtgctggccgccggcggcttcggcgtggtcgccggattggccttccatgcggtgttccggctgtcactggaaggccatccctgcgcggtccccggcggggcaggcgggcgagggcgcctgaacggccttcagcgtcctgccgcagccccctga

SEQ ID NO: 505657 - DNA, 390 bp, Stenotrophomonas maltophilia
atggccgatgtgggtctgcgggtgaggagcgagggcgggtatgtggagaccacggtcaccacacgcctgaccaagatcatcgggtcgtacaccttcccgctctacagcccggtcaactccaacaacaagtgggtggccccgcccgaggcgaatggagggctcatcgtcaacgacttttccggcggtgagcccttctactacttcacctgcgaagggcagcggtcggcctacggcatgctggtgccatcggtgaccatctccgggaacagcatcaactggagctgggatcctgacgtggtgaactaccacgtcaggatggagatgtttccgagccagccgaccacgaacaccgtcggcggtatcacccttcactacgggatctacagctga

SEQ ID NO: 505658 - DNA, 288 bp, Stenotrophomonas maltophilia
gtggccggcaactcccatatgtggcttgcctatgccgcagcgctggggcacccgattgcacagtacaacgtgttcttcatgttgagggacaaacaggactgtgagtcatccagtgaggcatacgcatggctcaagagtgccgcgctgaagggagtgaaggccgcgcattccgaacttgagcaggcggctcgcatggcgtctctgcgatgtgccagcaagcgagaggaagagagaagccatctacctgcgagtgaagcgagcgtggcaactcagtcaagcccgccgtag

SEQ ID NO: 505659 - DNA, 486 bp, Stenotrophomonas maltophilia
atgaagatcaaggccgaatggggcttccgcggcgacgccccgaagctcaacgccgcgtccgccgatgtgaaggctggcgacgtgttcgacggcgtggatccggaatacggacacgcgctggtgggcaagggcctggtggtacaggtccacgaaggtgctgcaccccaggagacgaagcctgccaagcccagcgaactgaaggcgggcgagggcgacggcgcggttggatccacgagtaccgacgaagcgacaggcgccgcgggagcgcaggtcaccggtggtggtgcgcctgacggtgctgcagtgcccgcggtcgctcccgagtccgccgcaggtacgccgaccagttctgaccagagcggtgccgacaagaaggcgctcctgatccagcagctcgaggccgccggcgtcgagttcgaccgccgatggggtgctgatcgcctggcagccgttctggccgaatcccagaagaaggatcccgcgtaa

SEQ ID NO: 505660 - DNA, 309 bp, Stenotrophomonas maltophilia
atggccgtcaccctcgacctggagctggtgcgcaagcagtgcaacatcgttgctgacgtggacgacgcgctgctgcagcagtacgtggcggccgcgctggcgcacatcgagcagcactgcgaccggaagctggtcgagggtgagcctgccagctcggaggagatgaagctggcgcctgacctggtgcaggcggcactactgctggtggggcactgggtcgccaaccgtgaggcggttgtggtcggtgaggtatccactgaagtgcagttcggcgtcgagcgactgctctggtacaggaaggcattctga

SEQ ID NO: 505661 - DNA, 351 bp, Stenotrophomonas maltophilia
atgcgtgcagggttgctcaatcgaaaggttcgcgtcgagcggccagcctccggaacggatgactgggggcaacctgcccagggatgggagctggtcgacgagatcatggtcagcattgcgggtgaaaccggcctgggggccatcagagccggccttcagggcggcgtccctgcatcgatctcccgatacagcttcatggccaggtatgcgacggtgcaggcgcttggaatcgacgcgaccatgcggctgctctatgaggggctcgtgttcgaggtgaagggtgtcacccgcgacctcaagcacaaggaccgtgcctacatcgtcaccgagcagggaggaaacagcggatga

SEQ ID NO: 505662 - DNA, 504 bp, Stenotrophomonas maltophilia
atgagcatcaaagccaacgttgacttctccgacgcggtgaaagggctggaggcgctacttgactatcgggtcagccttgcgcgctccatgggtgtggccggtggccaggtcatccgtgatgaggtgaagctccgcgcaccggtaggcacggaggaaggcggaagcctacggcccggcagtctccgagatgcgatctacctggcgtaccgcgacggccgctcaaccgaaacccaacaggcgtactcgatctcgtggaacgccaagaaggcgccgcacgggcatctggttgaattcggccactggcagacgcacgcggtctacaaggacgaggacggttcctggacgcttggtgcgccgctggcgcagccaaagtgggtgccggccaagcccttcgtgcggccggggtatgaggcatccttggctcgcgcacaggcagcgatgctggaaagagggcgggagaggcttcccgaactgctgcgcgaagcgcgagggggcggtccatga

SEQ ID NO: 505663 - DNA, 357 bp, Stenotrophomonas maltophilia
atgagctacgaaccgtccctgcatgcgctgatcgcaccgattgtccaagggcgcttctaccccgatgtgccgccggaccagccgatcttcccattcgcgctttaccagcaggttggcggccaggccctttggttccttgaaggatcgatgcctgatcacaagcatgcaagggtgcagatcactgtgtggtccaagtcccggcccgaggccaatacgctgatccgccgcatagaggacgccatctgttccggggtgccacattccgagccctacggcgcagcagtctccatgtacgaaccgtccatcaagggatacggcgctaggctggacttcgggctctggttccctgacccgtaa

SEQ ID NO: 505664 - DNA, 660 bp, Stenotrophomonas maltophilia
atggcactcaagcttccgaagggcacccagttcggtttcgcgcaggtggtggccaccaagatcgcaaccacgggcatttccaaggctgcgccggcactggcgagcatcgccgccgatgcattcgacaccgacgatgtggtggtgctggaaattcccggctggccggcactgaacaaccggaccactcgtgccggcgccgagtctgcaggcgcgatcgaactgcttggcaccgacaccaccgacaccaccctgtaccccggcaccagcggcgcgggcttcctgcgaaaggccggcgccttcatcgacctggaccagcagggcgaccccaccaccgccggtggcgagcagcagtactggagcggcaccctgctggaggacccgaccgggcgccagatccagatcccgaccttcaagaacgccaagaccatcaccatcccgctctactacgatcccaccaagccctggtatccggcgctgaagacggtcgacgccaagggcgaaccggtggtgctgcgagccaagctcgccggcggcgacgttctgtactggtacggctacctgagctacgacggtgacccgaccatgaccgcgaacaccccgatgggcaccacggcgacgttcacggccttggccgattcgatcctggtggagggcgcctga

SEQ ID NO: 505665 - DNA, 309 bp, Stenotrophomonas maltophilia
atgttcaaggtaaaggcccccgagaccttcaaggcatcgttgaccatcgtcggccatggtcgcgagcagaagctcaacctgagctaccggcacatgacacaggaggcatacacggcgctcctgcagcgacttgcggcacaggagaccacacctacccaggcgattctcgacatggtcgctgagtgggatgccgatgtgtcgctggatacggccggcgtggatgaggccctgcagcagcagatcggcctggacgcggtgatcatcaccggctatgcgcaagcaatccaggtggcccgcaagggaaactga

SEQ ID NO: 505666 - DNA, 300 bp, Stenotrophomonas maltophilia
gtgggggcgctgtactggcgcgcccccaccgaggccgagctcgcacaagtcggcctcaaagcgaagcactaccagccacccgaggtgcagctgtggccagagtgctcgctgcctatcgaaatcttctcccgggtctccacccagtggcgcgcaagcgccggaggaccgtttggcctggactacaacgtcgtgttccaagagctggaccgcgaagggttgaccggtgatcgccgggccgaggtgatggccgcgatccgcatcattgagggcgccgccctaaccgaaatcagcaagggctga

SEQ ID NO: 505667 - DNA, 2790 bp, Stenotrophomonas maltophilia
atgaccgaccaaacaattggcgcggctcgcatcgacctggttgtcgatacgcagcagttcgacagtgcgatcaccgcagcaaagcgcggtgtcgccgacatgtcgggcagcgcacagcagcagtatcagcagctgtcgcgcgctgagcgctcgcgcgtcgatacgctggtgcgccaggccgataccctgggcatgacccggtcccagcagctggcctacaacgccgcattgcgcaccagcgggccggtgttggatgaaatcgtgcagaagctcgcccgcgcggaagcggcggccaagcgctcgggcaaggagctgaactcctatggcgtcagtgccgcccagcaggctgcggcgatgcgcggtgtacccgcgcagatcacagacattgctgtgagcctgcagggcggccagaacccgttgactgtattcctgcagcagggcgggcagcttaaggacatgttcggcggcatccggccggcggccgccgcccttgcgtcgcagctgctgtcgatgatcaacccgctgacggctgcggccgctgcgactgcagcgcttggcgtggcctggtatcaggtcggagaggcacagcggcaggcagaactggcgctgatcacgaccgggaactatgccgggaccagtgccgagcagattgcggcgctcgctcggcagatggacaacttgggcggtgtaacgcggggaaaggctctggctgcgctgacacaggtggccgcgtctggccggttcacgggcgagcagttccgcctggtgtctgaatccgccgcccagatggaaggtgcgacaggccaaagcatcgacaccaccatcgacaagttcaaagagctggcaaaggatccggttgaaggactgctcaagctgaacgaggcagagcacttcctcactcgcgcacagctggatcgggtgaccgcgctgcaggaagaggggaggcagcaggatgctgtcactgaagcaatccggatctatcacgcaagccttggagatgtttcagagaaggcgcgtgagtcgctttccggcgtcagccagtggtggaaggcagtaaaggacgacacttcgtctgcattcaatgagctagggcgctacatcgatctcaccgaccgcctcctcacacgcgccacgggtgtgaagcgaggtacggtggcggagacggcttcgttcttcaccccgatagcaggccaggcgaagctggcgggcgggttgcttggcgcggcgaacgatttcgccgagcggtactggggccttggtcccaagcccaccgtcaccatggcagggatctacggcaacggcgcagaggaatcgattgacagcgccggcgagcgaaagcgcctggagcagcggaagaaggatcagcaggaatgggaccgcttggcggggcagaacctgtctaagcggcagaagcagctcgcggaacaagcgcagatcgttgcccttggcaagaagctcggcaaggatcaggccgatattgaccgggaggtcgctgcgtcgcggaagcagttcgctgaggcagaatctcgccgcggtggtggctccaaaaccaacccggccacgtcgatcgtggcaaggatccagcagcaggtagctctgaacaaggaacagtcgggcagcgaggaaaagctcaccgtcagtcagcgtctgcgggtgcaggtgctggaggagctggaccggttggggtccaagatccccgaggccgatcgcaagcgcatcaggacgatgctggaggagctgaagacgaccggcgacctcgtggaggcaaaggacaagcaaaagaagaccctggaggcgctcacccgccagcaggcaatcttcgatcagcaggcggagtcgcggcgccggggcaacgagctggacctgatgagctacggtcgcggccaagacaccgtagcgcagctacgccggcagatggacgtgcagcgggagtacgaggacgagctgaagcggctgggcgaccgacaggtggccactgaccaagaccagtgggaccagctcgctgcaaacgcggccaggcacagggatgagcagctgcaactggagaaggactaccaagcccgtcggctgtcggcgatgggggactggcgcaatggcacccgcgcagccttcgaggactacgccatggaggccaacaacgcggccggccaggcgcacgcggcgctgacgaacgcgttccagggtgcagaggacgcactggttcagttcgcgatgaccggcaagctgtcgttccgcgacctggccaactcgatcatcgccgacctcgctcgcattgccgcgaagcaggcgatcgtcggcattgccggaatgatcgccagtgcctggggcggcggggtctctgctgcggggaacgcggcagctaccagtggaacgcagcagatcaactccgaccttctcgcgaacattggccgtaatgcaaacgggggtgtctacacatcgccgagcctgtcggcctactccggcggtgtctacaactcgccgcagctgtttgcgttcgcgaagggtgcgggtgttttcggtgaggcgggaccggaggcaatcatgccgctccagcgtggtccggacggtcgcttgggtgttgccgctcatggaggtggctccggagcgtctcgggtgaatgtcaatgtggtggtgaataccgatggttccaccgacgtttctgcggacacacctgtgtggcagcgattcggcaaggaaatcggccagctcatcgacatgaagatcaatgatgcgcagatccgatcaatgaaggatggcggtgcaatgagggtgatggggaacggccgatga

SEQ ID NO: 505668 - DNA, 330 bp, Stenotrophomonas maltophilia
atgaccgacacattccactggaaagccaccagtcagagcagcggctctgccactgcatcggtcaggcgcgcaaagttcggtgacggctactcgcagcaggtggcggagggcatcaactccgtttccaggaagtaccaactgagctttgtcgcgtccaaggcagtgatcgccgagattgtcgcgttcctcgattcacacgtgggcgtctcctttctgtgggccagcccgtggggaacgggtctgtactactgcgatacctacaccgattcccaccttggtggcctgacctacagcgtcacggccaccttcgaacagacgttccagccgtaa

SEQ ID NO: 505669 - DNA, 966 bp, Stenotrophomonas maltophilia
atggcacttcagccaatcgacattgacacgccgcagccgaacggcaagcgcggtgatcctgcccgcgtgatggctcagaagatcaacgccaacgatgagtatctggatggcctcgccagcggcgctgtgaagaagaccggagacaccatgactgggctgcttcgcatcaacaatgccttggcggtacaagcaggtgcgaaccactcactcctgcgggcgatcagcaacggcgccggtactaccgtgtttcagtcggttaccgccaatgagcaggctttcgcgccgctgggtctacgtggatcgtcagtggaagtggttggacctacgtcggtgaccaatgggcggctaacggccactcaggacatcatgatcacaggtgcaggcgcggcatactggttctatgaccggacggtcggccgcgactgggcgtggtacgcagccgatgcggtatgcaggctggcatcgggcgcgcggggtggcgcgacagccgatctcatgtcgatcaatgcggcgggcgctgtgtcggcgacgtcattcaaccccacatcttctgcagacgtgaaggactacctggagggctatgacggagatgcggacgatgagctggaccgcctggtagtcattcgctataagtaccggcccgaattcgttgacagcaataagaccttcatcggcctgttggcagagaacgtgcacgacgtgcttcctgacgcgaccggcggcggtgaggagtacgacattgcggttgcaggcggcagcggctctgatggcggagatgtggggagtgatgaacccctgccggaaacgaagatcgttaccgcgcggcagcccatgaacatcgacatgatgcagatcttggcgctgagcgtcagaggtcaccaacagaagaatcgccggatcaaagcgctcgaagctgcgatggaggcgcttacctcgcgtgttcaggcactggagagtgcccagtga

SEQ ID NO: 505670 - DNA, 693 bp, Stenotrophomonas maltophilia
gtgatcaccgccgacacccagcaactcgaacccggagggcgcgtcaccgtctacgagctggactgcaccagcttcggtgccgaccagctcttcttccacgcccacctgcagtcaggtccgatctggtggcaagggcaggagtacgggccgtggccgatcatcgccacgggctttgaacgcacgagcgagcagcagccgaacccgcggttgaaggtgagcaacatcaacggcgtgatcggcgcgctgtgtcgcatgttccaggacctggccggcgcgagggtcatccgccggcagacactggtgaagtacctggacgctgccaacttccccgaggggaacccgctggccgacccgggcgagcacttcccggatgagatctggtacatcgagcgcaaggtaggcgaggacgacgaaacggtcgagttcgagctgaccaccgtcgctgacttcaacgggcgggagctgcccgcgcggcagtgcaccaggatctgcagcgcgctgctgcatggcggctaccgcggtccctactgcggctacaccggctcggcgtacttcgatatcaacgaccagccggtggacgacccggccagggacgtgtgcgccggactggtgcgcagctgccaactgcggttcggccaggacaagcctctgccacacggtgggttcccggccgctggcctgctgcggacctga

SEQ ID NO: 505671 - DNA, 618 bp, Stenotrophomonas maltophilia
atgactgagcgcctgcgcactgtccggctgtacggccgcctcggcgcccgcttcggccgcaagttccagctggcggtgaatagcccggccgaggccattttcgcgctgggcatcctgctgcccggcttcaggcagttcctgaccggctgcagggaccagggcatcgagttcgccgtgttcatcggccgcgagaacctgagcaaggcgcagctgcatgatccgccgggtgccgacgagatccgcatcgcaccggtgctggtcggctccaagcgcggcggcgccctgcagaccatcgtcggcgtggccctgatcgtagtggcctccatctacggcggtccgggcgccggcgccgcagcggccaagttctggggcgctgtcggcgctgccggctggagccttgccatcggcggcgtggcgcagatgctgtcgccccagccgcgtggcttggggacgaaggagagcgccgagaacacgccgaactacagcatgaacgggcctgtgaacgtgcaggcccagggcaaccccgtgcccgtcgcctacggcggccacgacacgaaggggatggtcgtcggatccgttgtgatcagcggcggcatctacgcggaggaccaacagtga

SEQ ID NO: 505672 - DNA, 3513 bp, Stenotrophomonas maltophilia
gtgaaccgagccgtcagctatcagcacgatccgctggccctggcgtgcgctgatgtgatcggcgcaggcggcaagagcagcaccaacgcccgcacgacggtggagaccccggacagcctgcactcgatctcctacgccaaggtcctggacctgatcagcgagggtgagatccggggcttggtggccggcaaccagtccatctacctcaatgaagtgccgatccagaacagcgacggcaccttcaacttcaacggcgtgaaggtcgagacgcgctcgggtacgcaggaccaggagtacatcccgggcttcccgtccgtcgagaacgagatcggcgttggcgtcgagctgcgcgacacgccggtggtgcgtgcggcctccgggcaggacctgtctgcggtgcgtatccgtttcggtgtgcccgccctgcagcggcaaaacaccgagaacggcgacaccgagggctacgccgtcgagtacgccatcgatctgtccaccgacggcggtgccttcagcacggtgctgagcaacgccttccgcggcaagaccaccactgagtaccagcgcagccatcgcatcgacctgccgccgggcaatcagtggcaggcgcggatccgccgcctcacgcccaacgcgaacagctccaccgtagccgacaccgtgaacgtgatctcgatgaccgagatcatcgacgtgaagctgcgctatcccaactgcgcactggccgcgatccagatcgacggcagccaattccagggcaagccgaccaccgcataccgcatctggggccggatcatccgtgtgcccagcaactatgacccgatcgcgcgcacctacaccgggctgtgggatggcaccttcaagtcggcctggacgaacaaccccgcatgggtgttcttcgacatggtcaccaacgatcgtttcggcctgggcgaccgcatcccgctggactgggtgaacaagtggcgcctgtacgagatcgcgcagtactgcgatcagctggtcagcgacggcctgggcggcatggagccgcgcttcacctgcagcctgtacctgcaaacccgggcgtcggcccacaaggtgctgcaggacatggccagtatgttccgcggcatcagcttctacgcggcagggcagatcatggcctcggcggacatgccgaaggacccggtctatacctacagccaggccaacgtggtcgatgggaagttcacctacaccggcagcggcggcaaggcgcggcacaccgtggcgctggtgtcgtggtccgatcccgacgactttggccggcagaaggtcgagccggtccagctgcaggaaggcatcgcgcgctacggcgtgaatcagatcgaggtgacggccttcggctgccactccaagtcgcaggcccagcgcgtggggctgcacatcctgtacagcgaaaacctggagacggaaacggtcagcttcgccgtgggcctcgatgccctgaactgcatgccgggggatgtgatccaggtggccaacgccaagcgcgctggccggcgcaattccggccgcatcagcgcggccacggcgagcagcctgaccttggacgtggtgccgccctccatgcaggtcggggacgtcctgcgcgcaacgctgccgagcggcaagacccaggcccgcaccatcaacggggtcaacccggagacgcgcgtggtgacggtctcagcgccttggggcgaggtgccggtggcacagtcgatctgggcgacggaatcgaccgacctggtgatggagcagttccgggtgatcagcatcaccgaggaagacgggctgacctaccgcatcacggggctgacccatcgcccggacaagttcggcgcgatcgatgacggcacgcggctggagccgccgctggtcagcatcgtgccgcccagcgtgcagcccccgccggccaacgtccgcatgtcctcgcatgtggtcatcgaccagggcatcgccacgcccgtgctgaccatcgagtgggatgccgccgccaaggcgattgcctacgacgtggaatggcgtagggacgacctgaactgggtgcgtgtcgggcgcgtgggcacggccagcgcggaggtgcgggggatctacgcgggcaaatacctggcccgggtgcgtgcggtgaatgccctcaatgccgtgtcgcagccggcccttagcgccctcaccgacattcagggcaagaccgagccgccgccgtcgctgacctcgctgacggccgcgtcggtggtgttcggcatccagctggcctgggcgttcccgcccggggcaacggacaccgaacgcaccgagatctggcgcagcactggtccgaacctggagaacgcaactaagctgggcgacttcgcctatccccagaaccggcaccggctcgatggcctggccgccggcgcgaagttctacttctggggccgtctggtggatcgcagcggcaacatcgggccgtggtatccggccggtgcaggcgtggtgggcgagtcgagcaccgacgtgaccgagtacgacgcgtacttctccggcctcatcaacaagagcgcgctggggcaggagctgctgtcggagatcgagagcatcagcagcatcgtcccgttgatctgggtcgcagatgccacgtatgagccgggccagacggtggtgcacaacggcaagatctggctgtggaccgatgccgaccccggcaacgaggagccgcccggcacgaagtggaagagcgtgggcgatgccgtggccgaggccggtgcgttggtcgggcggatcgaccagcttgagctggacgttacggagatcgacggcaaggtcaccgcggtgggcaaccgggtggacggcctggtcgcgcagtacagcgccgagcatgcgggcgatgaggactggaacgcaggcgatgaggactcatttgccggcacggtcaccacgctgacggtcatcgccagtggcgactatgcgctgggccggcgcgtagataccaccgaggcggcggtgggcgaaacccgttcgatggtgcaggcgaccagccaagccctggtggacgtgaatggcaagatcagcgcctcctacagcctgaaattgcagatcgccgcaaacgggcagtactacgcggccggcatgggtatcggcatcgagaaccagccggatggcagctatcaaagccaggtgctgttcacggccgatcgctttgcgttcgtcaacctggtcaacgggcaactgacctcgccattcgtgatccagggcggccagaccttcatcaaccaggcgctgatcggcaccgcgtggatcaccagcgccaagatcgccgatgcggcaatcaccaacgcgaagatcagcggcgcgatccagtccgacgactacgtcgctggccagaccggctggaggatcgacaaggccgccggcggcgggttccagttcaacggcatggtggccggcgggtatcgcctcaacatcaccaaccagggcgtctacatctactacccgaacggcaatccggccgtcgaacttggagtgctgctgtaa

SEQ ID NO: 505673 - DNA, 933 bp, Stenotrophomonas maltophilia
atgtgctattccgcccagatcaccgccgcctatcagaagctggtccgcatgaccggcgccaccctgtcgctgcaggagttcgccgcgctttacgctcatgacccggggaagaagcggccgaagactccgaaggccatggatgacgccttccggtccggcgctagcccggcggagcttgcggtgtgggccgaggtcgagcaatggaacagggccgaggccaccgtcctggagcaggagctgttcgccaatcgcaagcggctggccgacgccgagcgcgcgctgcaggtgaaggagacgaagaaggctcgggaggatgtgcggatcgccggcaacaaaatcgagcgggccaaggcgcggctggcggatctgcagcgcgttgagccgaaggaccgcgacagccgcatcttccccggcgtctacgctccggtgatcgtctccgagggcgggaagctggtcatcaagccgatgcgctaccagtgccgcttggccgggaagccggccaactacgaccagcgcttccccggcacctacaacgcccgccgcgacagtctggagaagttctgggcgccggcattcggccacacgcacggcctgatggtggtcgacaccttctacgagaacgtcgagggcccggacggcaagaaccaggtggtgcagttcaccccgcgaacgggcgagccgatgctcgtggcgtgcctgtggtcgcactggaaggacccggccggcaaagagccggatctgctgtcgttcgctgccatcaccgacgaccccgagcccgaggtggccgccgccggccacgaccggaccatcgtcaacatcaagcccgagcaccttgacgcttggctcaatccggatccggccgacctggccgcgctctacaggatcttcgacgacaagcggcacccgttctacgagcaccggctggcagcgtag

SEQ ID NO: 505674 - DNA, 357 bp, Stenotrophomonas maltophilia
atgctgccggccatgacgctgccccctgactttcgctggacgacccggtctgccagcctcccggatgacccgttgacggtgatcgcctgccacagcgtgtgggtggtggccatgatccgtcgggtgaacgacggcatctggattgcctcgctggaccggcaccggcatggcccgggcggtccgttccgcgtgtgcagcagctacgagcagggccgcgcgggcgccgagctgtgggtgaccaggcacgaggccaggctgcgggaggatgtggccaccatcctggcctggcaggagagggtccgcggcaaccggctggccaaggccgacctgaaaccgccgttcggctggatggggtag

SEQ ID NO: 505675 - DNA, 699 bp, Stenotrophomonas maltophilia
gtgggtaagaggtacgcgctgctattggatgcggggttcgtcaagcgcaagatcaagcgagatcttggcggagtgacggcttcgaacattgagcggttggtcgcctctattcgcaagcatgaagctgtatcgggatttgaacttcaccgcatctactactacgacgcagcccccttgggtcgatcagtcgatcacccgctcacgggagaatcaatcgagtacggcagtacagatgtgttcaacgagaacgcagcgctgctcaaagaggtagcgaagctaccgcactttgctctccgcaaaggagagtgtacgcacgacggctggagcgcccagttcaaaaagttgaagcgttcagcggcgaggttcgattctgaaaacagcacgctgcaagttcgcccaaccgacttgaagccggtgatccgtcagaagggcgtcgacatgcgaatcggcatggatatcgccgccttgaccctgaagaagcatgtcgacgtgatcgcgatggttacggcagacagcgatttcgtgccggctatgaagtttgctagacgcgagggcgcgcagctccacctcttcaccctcgcgcatggggtgaaggaagagatgtccgagaattgcgaccttttgattccggccagtgcacgatcgttggtggatctgctacccgttgatccttcggcgacaaccccacaggcttgctga

SEQ ID NO: 505676 - DNA, 537 bp, Stenotrophomonas maltophilia
gtgaacgccctgccgacaagcacgcccttcagccgcctgctggtgggttacgcgtccgagtcgggcaatgcccgcgacctggcccagcgcctgggcgcgggcctgcagccgcatgggccgcaggtactcccgttcaacgacatcgacgtggccagtctcggccacggcgacgtgctgctggcgatttccagctcgttcggcgatggcgaaccgccggccaatggcgagcggttcttcgaaaccctgcgccggaccccgaccttgagcggcctgcgctatgcggtgttcggcctcggtgacaccggctacccgagcttctgcggcttcaccaaggcgttggatgcctcgctgagcgagcgccaggcgcagccgctgttgcgccgcgtggatgcggacctgggctacgagccgtttttccagcaatggcagccggtgctcggccaggtgctggatggcgacctcagcgctggccaggacctgcacctgcaggtcaccgcctatggcgaagacaacgcctttgccgcgcgcatcctctag

SEQ ID NO: 505677 - DNA, 636 bp, Stenotrophomonas maltophilia
atggattgtagagtcgagccatgctcgactggctttcggacggaccgcacggaacaccagtcgagcatggctcgactctacagaaacccgtggccgcgcttattcgcagcgagtggcggtgatgatgttgtccttgtccacgtacacgcgcaggcgatcgtggcggatgtccttggtggtgatggtgttggggccgatcgggttgaccaggccggcaccgctttcactggacaggcggcggatgttgggttcattggcaggctggccgattgcccagcccagcccagctggctggcgtcgcagtggccggtacccttgacctgcggaccgggggtgctgacgcaggccgacagcagcagggccgacgcgggcagcaacagggacagacggaaggcggacatgcagcgctcctgcgcagggaagatgggcggaacgatagcacccagcgtgcgaaaggcgtcagcgccccggtcattgccggcacagcgtgatcactgcatagtgagcggaatgactggcagcacgccagcgggcaggccgggccattccggtgcgggtgctggagaggtatgtcggcaggcagtttccgtgacaaaagcagggcaatggtactggcgttgtccgcatggggcctga

SEQ ID NO: 505678 - DNA, 582 bp, Stenotrophomonas maltophilia
gtgcgcattgcatcggtgatggtggtgttgaccatttggcttggagcgtgtggtgaggcactggcgcaggccggttcaattccgcccgccggaaccaaacagggttgggagcgccagcatctgggcgaccatgtcagcgaacccggcgaggctttaccggatttcctccgacgcactgggcgagtgctccacgactacacccgccagagcgggaacgaggcctgtggcgcgattgccagcgacggccagcgtttttccctgcgcctctacacagatggcgtgccacacggctgtgtcatacggaccagcgaggtgatggaaggttctgctttcactggcgaaaccatccacagccatccttggcagaaggtgctgacgatgacgccggccgccagggcgtggagccatttctacaaggacggcaatgccggggccccgaccctgcgcaacgacggagcagtagggttcagcaaggccgaccgcgctaacggagatggttggctgattgctggcgggcagttgctgcacctggtcaacggaaagaccgagcgccttggcccggtagccctctccacggagtga

SEQ ID NO: 505679 - DNA, 1779 bp, Stenotrophomonas maltophilia
atgaagccttcacaactaaatcatgcggttctctgtgaactgagacaccaacatcggcaacgtggcatctcattgatcgaggtgatgctggcagtaggcgctatgacactactttccggtgcggctttcgctatctatcagtcatcggcaaacaacgcagatgttcgcgcggaacaagcgaatattcacaccattgctcgaaatgcagacatgacgtatggagcgctcggctcctatgcgggactgacaaccgctcaggctattgccgaccgcgttccacccgtttcaatgaactctggcgttggcctaatgagccgatgggcgcaacccgttattcttgagcctgccaccattgatggtcgccccaacgcagggttgaagattgtttaccacgcggttccaacgcgtgcgtgcctaaagctagctgctgcagcaagtgaaggcatgtatgacctggaaataggcgatacatccgtcttccatcgaagcaacaatggtcgtccgactgtattggacatccaagccgcgactcaacaatgcaggaatccagcgcagctcgcgttcacatactacggcggcgctactggcctgtcagcgcaagttctcacacccgttgcactgccaacgccccctccaacatcagctccgccaccaccggcgccggtggtggcgccaccgcccgtagctgttactccaccggctccatctcctggctgcgcagcggctcccacggctccagccacaggaacgacacctgcgggtcaaacgtgttcgtttatttggaattcggtagcggctcctgcttgctgggctccgctggcgttatgcgtgccaatcgccgctcaacctccaattccaaccgcaccaccggcaccacccgccgtcactcctcctattgtccctcccgtcatcacacccgtctgctcagcgcctttaccgttgagcgaaagcgcggcgcaaacgggcgtttgtccttcaggcactctcaccatcagtggcgccaattcttttccgcagacccgcacccgcactacgacgtattcatgccccgacccgttcgcaagcccaacagcactgacgggaccatggtcagcctggttaccggcagcagcaagtatgtgtgctcccgaatgcacgtctgcgccgccaaccagcgttgcaatcacgcgcgccgcgccagcagagagccagaacgtgggttgcccggccgggcaggcaggtcagcactggcgacaacgcaaccgcgttgagaacggcacgcgcaccacgtcctggtcctgcccggccgcgaccggatccccggtgtcgagcacctcggagagctggagcggcacctacacggcatccagtggttgggttaccacctccaacacctgcacgcccccggcacctccggcaagaacctatccgacctacaccgggaaatcgtggatttcctggggcgacggtgggctttacggctggggcgtgttctgctcggtgtcgcagttcctcgctgacggatttcactgcacgcagagcgttaataccaacgatgacgcgacgttttcgggtggcctcgcgaggcctcaagaacaggcattgacgccagagcgccggacctgcgtcgccgcacttaaacagaagctgacaccaatgcctggatttggctccccaagcaccgggccagttagttggccgacagagtgcgcctgtgaggtggtcggagctggctcggcgttctactggcagaccgtgggcgcatcggactggtcagccttcgagttccaatgccagtaa

SEQ ID NO: 505680 - DNA, 1782 bp, Stenotrophomonas maltophilia
atgctagccccctcgggggcgtcgccaaaaacaagagcaggagcaaggacaaaaatcgaaatggccatttatcacgccaccgtcaaagccttttcgcgcggcaagggtcattcctctactgccgctgcggcgtatcgtgcgggcattgtgattaatgacgaattgaccggtatcaaacacgactacacaaggcgcagtggcgttgcctcggttgatatgttggccccgcaaaatgcccccgaatgggcgcgagatccggtcgcctgtttcaatcgctcggaaatggccgagacccggctaaacgccaggacggcgcgagagcttgaagttgctctgcctgcagaactgaacgaagcgcagcgtcgtgcgctcgcgtgcgacttgggtcagatgttggttgaccgctatcaggttgcggtgcttgttgcagtccatgagcccgataagaaaggggatgagcgcaatcaccatgtgcatctccttatgacgcctcgtcagatcggtcctgatggcctgggtgaacgtgcatgtgctgaatttgatgcgcgtggtggcgcaggaccggaggctatccgcattcttcgtgaggcggtggctgaccgtatcaattcgcatctggaacgagcacaggtcgctgaacgtgttgatcatcgcagcctagctaagcaagcacatgccgccgaagctgatggctatatcgggttcgcagccatgctggctcgcgaagccacccagcacgagggtaaggcagcaaccgcgatgcgtaggaggggtgaagatagcgagcgggccacggtaaataaccagatccaaaacgccaatcgcattgaactgcgtgactacctggaacgcttggagcaagagggaagggtgatggcgacgccacgctcccatacgcaagaagcagctcaacgtgagcggcttgcagctgttggcaaagaagagcggcaaccgcacctcgggcaggtcgcgctggcgccgccacgagcacgaaaaaggccagcatcagtagagcagcgagctgcacgagtggggtctgccgcatcgcgctttccgccaagtctcaagccagtattgatgaaggcggctaggcgtcttcgtagcaagattgcgaacaagcaagcagacgaggccatggctcgttacgacgctgaaatagagcagctggagatggaagcgagacgggtttggctggaggatatagatgctgccgttcggcaaagtctttcgacggtcgccaagctctttgacatgtcgagcagggcgggcgcctacccccacagggcgtcatatcgaaacgatatgcgcgagcttcacagttcattgaagcaggtggctcgtgacgccactcgatgggagcgcaggctacaagccgaagttaaggcaaacatttcactcacggaagcccaaatgaaattggtgacatgggagaggaaaaatcccaagccgtcgctctggagcggtagcaggcgcgattgggcgcagcggcgtcggagtggcgaagagcgcattgagcggcgcaggacgcggcacgatgctgcgcgtctagctacaggcccggaagcacaggtgaagtatgcggcgcaggcagctacgagtgtagaagctttggataggctcgcagcatcaatgctgaagcgctatccaatcactgctgatacagcacagccgcacaaatcgcagtgttctggaactaccccaacgcgcacgcttacggaacaactgaacgatagcgagttggagaaaaaggaccaaagaagatgtcgcggacctcgcgtttga

SEQ ID NO: 505681 - DNA, 411 bp, Stenotrophomonas maltophilia
atgacaagcctcgcctacgacctcctgatggcattgattcccggcacggccgctggatactactcgggcttgctgatggccaagctctcaaagttcaatgcgctgaaatacgaggcacttcgagctattcgatcaatcaactacatgggcgatgccagtaacacacagatcatcagttcagataagagtgaagaacttcacctgatagcatccgagctcttccttctcaagcacaagggcgccggaatttccttgatgcaagttagcaatgagcttctaaattccatagcagcatgtaagcactcggcgcatcccgtcgatagcttcataaaacagatcagtgactggcaagctcgaattcgcggcctaaaggtaggacgacgcttcttccttccttggggtcaaatctga

SEQ ID NO: 505682 - DNA, 537 bp, Stenotrophomonas maltophilia
atgtggaccttgttcaaggtagtccgctggatcatcaccggtcttgcactttggtggctgtgcggtgtggtgttcgaaaagggcacgacggctgagggtgccgtgttcgggttgatgctgttcgggcagctggtcttctggccccttgcgctgctgtggggcttgccgtggctgttccgtcgccgcgcgcccaaactgaagaagcataggcctgaagagtttgagcccactgtttgccatgaccatatcgccttggacctgggcagggacactatctggatccgggagcccgtgaagggcgagcgctacctgcggcgggctgaagtgctcgccatccgcactggggaatacagctacaaaggagtcatcacccatcgtctggaagtccaggtgcgggacgttgttcacccgctctggctggttcctttcgtgcgccactccgaccgttggctcaagagcacagctgtcaatgagactgagagggatgaatggttcgctaggatgaaagcttggcttactgaaacgcgcaccatctaa

SEQ ID NO: 505683 - DNA, 1416 bp, Stenotrophomonas maltophilia
atgaccgagaaggatcgggacgccctgctgagagcgttggccggaaccattgaccgctggaccgggaacattgagctgcctaacggcgcgagattgaccgacctacaggtgaatggacgcgaggacgccaaagctctgctggacaccatcaagggactcgcgagctcaggctttgcccaaagttcaccgctgcccggagccggggacaccctgacaaagcgtgttggtctctacctggaagaccttaggaacgctaagacatcgccaggcaatctgctcgacagtgaaaacacgctcaccatcttccgcgaaatagcagggctcgacctgctcatgtcgcaagtgggggagacccaagtgcgcgccttcctaaatgggcttcatgactggccgagcaatgcgcgcaagaaggcagaatacaaagaactgagcgccgcgcaaatcatcgccaaggtcaagcaacaacgcgccaaagggctcgttatcgcgggcctgtctgatcggactctaggcaaacatcgtgaccgactggccagcttcctcaatgcacaagtagccggtgggctgctcacacgttcgccgctcgatggaatcaagcgccagagctcggccaccgcaatcgccacgctcccccgtcgccccttcagcattgaggaaatcaaccaactcttcgatatggagaagttccttccctggtcagaggagcggcctgatcgatactggggagtcctgctagcagcgggcactggggcgcgggtcaacgagcttgggcaactctatgccgacgatgtggccgaggtgaatggcatttggggaatccacattcgtgcggggcggcgggatcaaaagctgaaaaacgcaaactccttgcgcttcatcccactccacccacgcttgttggaggcgggcttcttaacttacgtcgaagatgtagcgcagtcgggccatgagcgcctgtttccccacctgccttggcataagaaggcaggctacggggacgccctcggagatcagttccgcgcctatcttgttggcttgggcatgatgcagcccggcatgggcttccactcgttccgacatactgcgagcacccggcttctctatgcgggggtgcttagctctattgccgctgccattacggggcacaaggcgcatatgcccggcgagctcggaacctatgtagatgtgcccacgctccaatcgcgcgcagacgcggtagcgcttctccccgttcccgaaggtctgccggcctatcagcctggagaggcagcgcagtctctcaagcaagcgcaactcagagcgaagcggagggtggtgaatgcagctgcacgtgaacgaaaagcggtcgctcttgccaaaagcgcgcactccacgacgccagcaagtcggatgaggaagccatcgaaggcgtcgtag

SEQ ID NO: 505684 - DNA, 345 bp, Stenotrophomonas maltophilia
atgatggctaatctcggaatcaccaacacgccgctcgcctcgctcgagaaggccctgcatgaacagctgtccaagggcaagaccaagctcgagcaggacttcagggaggcgtactcggtgttggagcagcatatcgcaaagaagatgcgcaagaagatcttggtggagcagttcaatgctgcttacaagcatgatctgaacctgattcaattccgcaagctgctcaatgaggagcgtgctcgtcgccatgcggagggcgatgctgctcggtgccagagctgtggccatctgttggtcgaggctgaagagcagaccgcgtttggcgcggcagaggaggatgcatga

SEQ ID NO: 505685 - DNA, 306 bp, Stenotrophomonas maltophilia
atgacgcacatcaagaacagtctgcgtgagagcctggacaagagaacgactttgcccagtttggatctgaagcggaaccagatcggctggcccgatagccccacgctgcggttgaaggagctgatcgtattgcttcgcgtcagtaggagcaaggcatacgagctgatgaagaccgatccggacttcccgaagggcattccgctctatgacagtgaactgtctccgaagttctactggacgcatgaagccatggcatgggctgaaggtcgtgcagcgaagttccgtcgtgcgaagggagcgaagtga

SEQ ID NO: 505686 - DNA, 240 bp, Stenotrophomonas maltophilia
atgagcgcccaagcaacattgcgcggcggagggtttggaaccttctggctgttgttcggccagttcggaccgaccatgaccgtcgagcagctgcgcgatgcgtacttcccgggtagcaagatcaagaccatggccaacaagcacagcgcggggctcctgccggcgcggaccggagaggtctacgacacgcgcgacgtggccagttggtgggacgctcagcgacaagaacgcgcctcatga

SEQ ID NO: 505687 - DNA, 273 bp, Stenotrophomonas maltophilia
atgacgcagcgtgaatttacgccgccccgggcgcttccgaagtgcaaggagggccaccacccacgctatatggtcgacgggcgccgtttggaggcaaagggcggacacttcgttgaatgccgctgtgcgcgaaccccgaagtgcgccaccttcgacctggcttgggcacactggcacaaaattcacggtacccaccccttctccgccccgcatgtagcccaggacgccgtaccgcagttgcagttgcggctggttggagggacgcagcgatga

SEQ ID NO: 505688 - DNA, 225 bp, Stenotrophomonas maltophilia
gtgaaccttgaccgtgtgatcaacgtggcgttgtatgccaagcgccgaggcaacaccgggccgctttcgacgggcgaggccctgacggctgctctggtactgaatcggcacgactggttaaaggagatggactacaccatcgcccaggctctcgaccgcatcgatcaggacaccatcctgcacctggccgatgctgcacgtagcgtggcggaggcgtctgcatga

SEQ ID NO: 505689 - DNA, 177 bp, Stenotrophomonas maltophilia
atggctgagctgctcctgatcctgctggcccccgccgccggcggtgccttgctgcaccacctctggatcaaccgccccgcgccccggcgccacagtggcttggcggtcgggcagatcccgcagcggctgcgccgccgcccgcagatggcagtgcgccgcgtagggggtgccgcgtga

SEQ ID NO: 505690 - DNA, 273 bp, Stenotrophomonas maltophilia
atggctaagtcggtcgtcgtctacgggccgcagggcagcgggaagacccttcatggccgtgccatcgccgagaagcacggcctgggccgggtgatcgatctggaggacgtgcagctcatgggggaacgcctgcagcggcaggggttcctttacctgtcctgcagccagagctacgcggagcgcgccgccgggctgctcggcaccgaggtcattcacattgaccaggcactggcgagcatcggaggtggccagtcgggggtgtcccatggctga

SEQ ID NO: 505691 - DNA, 426 bp, Stenotrophomonas maltophilia
atgcaaaagatgaacggcgaagccgcaaccacccccacatctctgctggattccagcaccggacacggggcggaggctaccacgggtgtggggaatgtggggattgaaagggaaacggccgaagagtgcagcgccacgctggtgctgcatgtcacccataacaaggtgatcgccacggcgaccctgaacatggggaccacgaaaactgcccagcgggtgctggagcgccgcaaggggaacaggagcggctgggtgctgaccaagggcagcgaagagtttgaccaggaccgcgcgtggatctcggccgagctggctgagctggctgatcgcctgccgttcccgtttgagctggccaacatgctgcccgggcgcagggcctccacaggctcggtcgcccaggctacgcaggaggtggccaatggctaa

SEQ ID NO: 505692 - DNA, 2703 bp, Stenotrophomonas maltophilia
atgcaagaagacatccgccagcaagtcctgcagcgcgtggagcgggattacggcctgaagcaccgcaccagcaccgactacatgcgtgggggcaagtgccctcactgcggcaagaaggagctgtacaccagctattccaagccgtgggtgctgcgctgtggccggcaggccaagtgcggacaggaggtgttcgtcaaagatctctacgacgacctctttgacgactactccaagcgccatgtgcagaccgaggccaagccgaacgctgcggccgacgcatacctgcagacggcccgtgggttcgatctgcgccccctgcagggcctttatacgcaggacaactactacgaccgccggatctccgccggtactgccaccgtgcgcttcccgctggccaaggggggctggtgggagcgcctgattgaccgcccgcaccggttcggaaagcagaaggcccgctttgcgccggggcagagctacgccggcgtgtggtgggcggcaccggcggcgctgtccgccatgcgcgacgcccgcgaggtatggatcgtggagggcatcttcgacgccattgcccacctccagcgcggcagctgcgcggtgtcggccatgtcgagcaacgcctatccggaagcctcgttgcgcgagctggcggcgtcacgccctggcaacctccccaccctgatctgggcactggacaatgagcccggcgcacgcacctacatccagcggcacgccaagcgcgccgagaagcttggcttcaagtgcaaagcggcccagatcgtccagcgcgacgggaagaagaccgactggaacgaccttcacctgcgcgcactggcggcagacgaccagcaggcccaatgggacgcagacctggccgaggcccgctaccagggcgacctgctcatggcacgtacggccatggacaagggcctgatcatctacggccacgacaagcagtcggaattccatctggaacaccattcgcgcctgtactggttcgagttcgacgcattgcgtttcgagaagctctgccgcgagcggtccagcgaccgtgacgtggccgaagacgaggcgttggaagacgaggagatcgccaagatccagcgcgcttctgcctccgtgcgccagatcgccaactgctaccccgaagcactgtacttccagcgccatgaagccaccgacgaaagctggtacttcttccgcgtggatttcccccacgatgcgccctcggtcaagggcacctttaccggcccacaggtcgccagttcaaccgagttcaagaagcgcatcatcagcctggcccaaggcgcggtgttcagcggatcgggccaccagctggaccgcatgatggaagaccagctgttcaacatcaaaaccgtcgatacggtcgatttcgtgggctacagccctgaccacggcgcctacatctttggcgacatcgcggtccgcaatggtgagatcagcctggccaacgccgaggactatttcgagttcagcaagctgcggctcaagaccacgcagaagtccatccggatggacattcagcgcgacccagaggccttccgcaccgagtggatggaatggctgtggctgtgctttggcacgcacggcatgatcgcgctgatcttctggttcggctcgctgttcgcaaaccagatccgcagcgcccataaatccttccccttcctcgaagccaccggcgaagccggcgccggcaagaccacgctgctgacgttcctgtggaagctcctggcccgcagcgactacgaaggctttgaccctgccaagtcgtccaaggccggccgtgcgcgcgccatgggccagatttcgggcatgcccgttgtgctgctcgaggccgaccgtgacacgccggacaaggcgcattccaagtcgttcgagtgggatgaactgaaggactacttcggcggcggcacgctggcaacgcgtggcgtgcgcaacggcggcaatgacacctacgagccgcccttccggggcaccatcgtgatcagccagaacgcagccgtggacgccagcgaggcgatcctgacccgtatcgtcaagctgcacttccgcaagcctgttgtaacccctgagagccgcattgcggccgacaacctcaacgccctgcaggtggaagacctgagccacttcctgatcaaggctgtgcgctcggaaggccaggtgctggccaagttcaaagagcgcgtgagctacttcgaggcccggctacgcgaaaagacggatttgcgactggagcgtgtcatcaagaaccacgcgcagatgctgtcgctgctcgactgcctgcgcctggtgatcgaggtgcccgagcacatggtggtggccacccgtgacgcgctggtcgctgcagccatggaacgccagatggccatcagcgcggaccacaagatcgtcaacgagttctgggagacgtacgagtatctcgaaggcctgaacaacggcgagcgtccactgctcaaccactcgcgcgatcccaacaagatcgccatcaacctcaacgagttcgtagcgaaggccggccagcatggccaagcggttcctgacctggtcgacctgcgaaagcatctgcccgattcgcggcgctacaagctcatcagcgccaacacggcggtcaacagcaacatccgcaacaccatgctcggcagcagcttcacggtgaagtgctgggtattcaaagcgaagtaa

SEQ ID NO: 505693 - DNA, 264 bp, Stenotrophomonas maltophilia
atgccgaaccgaaacagccacctgccacccgagcgcaatcccgggcctccaacggcggccgatgacaggggcgcgcaactgatcgccggtgccgactatcagcgcctctggcgcgccgcgttcgcatgccggctgcttgcaacgatcaccgaagaggtggccaaggaacacggcatcgaccctaacgacaccgccgccgtcgccgaatacatccgcgacgacatgtatctgattctcagccgctccaagcccgtcgacgaataa

SEQ ID NO: 505694 - DNA, 294 bp, Stenotrophomonas maltophilia
atgggaaagcaccaatcagcctccaacctccgcccggtaatcgacctggcctcagccagccccggcatcgtcgtccgcgcatcaaccgataagaacttcgtgttcgtctcctgcgtacacgccgagtcgaatgtagttgtgtccatggtggcggcttattcccatgtgatccgccctgccgcagaacatgccctgcaggttggccaatcgatcttcctgctcgcccacggcgaagcccagcgcttcttcgcatggctgcatggcgactgcgacagcgcaccgggggttcactga

SEQ ID NO: 505695 - DNA, 240 bp, Stenotrophomonas maltophilia
atgagtaatgacgccccaactgcgtccagcgacagccccctgcggcagctcgccttcgttatcggatttatcgctgacaccaccgagtggcgccacgacgagtatcaggccctcaccgcccgactgctcgccaacggcaagcccgtcctcgcgctcactctgggcgacgtgctcgacgccatcaccgccaccattgcagccgggcgcacgccgcccaccgacagcatgggggcgcagtga

SEQ ID NO: 505696 - DNA, 207 bp, Stenotrophomonas maltophilia
gtgaccattcagaaaacacaccgcgacggctgggcgacggcaatggcccccgtgctcgttgcgacgcctgccagggaaaagcacgtctcgttcgccgagaagcagcgcgaggccgctgagctgcgggcggacgttgacgcgcacatcgccgccggtggtgccttcgaggttttggctggctacgcctccgccgtggtgcgcgcatga

SEQ ID NO: 505697 - DNA, 342 bp, Stenotrophomonas maltophilia
gtgagttcgccgctgggaggccgtgccgttttctcctgcgaggcctgcgggagccgtctcatcaagcgcaccagctcgctggcgcacaagttcctgcgcaacgacgcctacgtgtgtgagaaccctctctgtggtgccagctacagcggccattccgagctgacagggattgccagcccgagcggcgtgcccagggcgctgcccagcgagctgccgcccacgccgggcttcctgcgcgcccagctgcaccaggcatggaagcaagacaggggatgcaaccagctcgacctgctggatgcggtcgaggccgcgaccgaacacggcgcgcaacaccacgcctaa

SEQ ID NO: 505698 - DNA, 258 bp, Stenotrophomonas maltophilia
atgaaggccaaacggaccgccaaaccggagctgcgtacgccggacgaagcccggcagtggctgcgcgataacggcatcacggtcatcgcgtttgccaagcagaagaatctctgccggcatgcggtgaatgacgccctgcgcggtattggcaaggggaactatgggaagtcccacgctgctgctgttgcgcttggcatcaagcccgaccccaattcttgcacaaatcccagcaaacccgcgcgtaggaaaagcccgtga

SEQ ID NO: 505699 - DNA, 369 bp, Stenotrophomonas maltophilia
atggcagcggcctgcggagtggccaagcggacccagatcctgttcgagcaggacgcgcacctgcccggcggcgcctacttcgttgaaagcgacaagctaggcgtggacgtgacctacctgctggtcgggcggcgcgagcgcatgagcgaagccgacgcagagctacttcaaatctggcgagaagcgacaccgcacgcgcggggcgcggcgatggccgcgctgtacgtccagggcaaagacgccggtgcggcgcctcgcacaagtttccccaacgccacgattggccagcagttgagtggcgacgttgacctgcgcggacagaagatcgtggtcaagcccgccaaggcagcgaaaaagccgcacgcatag

SEQ ID NO: 505700 - DNA, 900 bp, Stenotrophomonas maltophilia
atgatcagtcgtgccacggctctggcccttgcgacggcctatacgggtcggttcacatccagtgccacaagagatcggtcggccatcgtgcacagagacgctgtctacgatttcctttttgaaaatgagtacgaggcgtggttctgcaacctggcgaaggctcacacgtatgtcagaaactttaaagagttctggttaagaattcacactggagaatccatcgttcctgtaacgaaggattggtcctgggagcagcggcgaaaaaagggtcagcagctgttgcgtgaattggctaaagatcacctaaagtggttcgatggagccaaattaaggagttgggtccctgaatcctacgctcccaatgcgagagagttgttgcgtcgacttgagctcgatgggtatgtgtaccgggagggtcttcttctccagcagcaggccgacgtcctcaatgtggaggaagagactggggtgttgaaccttctctattctcgggcaggtctagtgcgtgcccaggatgcgtttgagttcctcagactggcggaagagcacttcgtcgcaagccgttggtccgatagcatttcgaatgttcgcaagttcttcgagctgacacttcaggagggcgctagaaagctctctaccttcaaggctgaaccaatgagtgaagccgacattggccggcctgtcgaggttcgcaagtaccttgaacagactggtatcttcgagaagaaggagcgcgaggccgtcgacaagttgtacggcttgcttagtgaaaccggcgcgcatccttacatggccgagtctgaccaagcccgactgctccgtcagctctcattgaccatggttcagttcgttctgcttaggctcgaggcggcgattgcgcgacctgcgaatagcccttga

SEQ ID NO: 505701 - DNA, 996 bp, Stenotrophomonas maltophilia
gtgaccggcgccccctatccgcaggtcgcgtggcgcgtggtgcttgatggcctagacctcaccgaccgcatcgctccccgcctgctggacctcaccttgaccgaaagccggggtgatgaggccgaccaggtggatctacgcgtgcatgaccatgacggtcgtgttgccctgccgcgccgtggggtcaccctgcagctggccatcggatggcgcgacagcgggctgttcgataagggcacgtttgtcgttgacgacgtggagcacagcggcgcgcctgacattctcacgatccgtgcccgctcggccgacctcaccggcgctgtccgccgccggcgcgaacgcagctggcacgacacgaccttgggcgcgatcctgggcaccatcgccggcgaacactcgctgcgcgcatccatcgcagaggatctggccaaggtgcgtgtgccccaccttgaccaggccaacgagagcgacatcaacctgctgacgcgcctgggcaaacgcttcgacgctgtagccacggtcaaggctgggacgttggtattcgcccccatcggtgcgggtaccacggccagcggtcagccgctgcctgccgtaaccatcgtgcgtgcatcgggcgaccagcaccgattctcggtatctgaccgcgatacctacaccggcgtgcgcgcctactggggcgaccgcagtgcggcacggcgcaaagcggtgctggtcggtacagacaagaacgagaagaagctgcagccgacctacgccacagaaagcgaggcccggcagcaggcgcaggcggagttccagcgcttggggcgcggcaccgcgcaactgagttaccgactggcgctggggcgcgcagacatctatccagagcagaccgtcaacgtgagcgggttcaagccggagatcgacggcaccgactggctggtggtcaaggcgacccacaccatcgacggcggcagcgggttcgtcacagcgttggacctcgaacgcggaggttag

SEQ ID NO: 505702 - DNA, 399 bp, Stenotrophomonas maltophilia
atgatgatgacctacggcaccttcgttttttccctgtccacagtggcctacgagcagctgcagcggcagatgacgtggaaacacgcttccagcgagcgcgtgggcgctcgccctgctcggcagtacgtcggcccgggcgacgacacgatcagcctgcagggcagcatcagcgccgaactgacagacaacctactggtgctggacgaactgcgcgagttgggcgatgaaggtcgaccacacgccttggtggagggcactggtcgcgtctatggcgcctatctgctggtgagcctcaacgaaacgcgcaaggaattgttcagcgatggcgtgccgcgcttaatcgagttccagctccagctggagcgagtggacgacagcgccgccgaggccagtacgtga

SEQ ID NO: 505703 - DNA, 2865 bp, Stenotrophomonas maltophilia
atgagcggtggcaaccttcgcctgcaggtggtcctgcaggccctcgaccaggccactggcccatttcgcaaagtgcttgccggtagcaaggggctgtcggcggccctgcagcagcaacaggccacgctgcgccggctcaatgccgcccagcgcgacgtcagcgccttccgccagcagcaagaggccacgcgcagcactgccttggcccaccgcgaggcgcaggagcgggtgcggcagctggccatgcagctcgctgctaccgctgcgcccacgcgcaagctcaacaacgaattcaagcaggccaaggccgccgccggcctgctcaagacccagcaccaacagcaggccgtggagctccaacgcctgcgcggtggcttggaacgtgccggcatcagcacccgacagctgggcacccatgagcgtaagctgcgcggcgatatcgccgccgccaccacccagatggaacagcagcgcgcccgcctggcgtcgctggacgcggctatggcgcgtagccggaaggtccacagcgccggcatgaacgccgccgcccacggagcaggcatcgcgtttgcctccatggccgcgctgcgcgtgcagggcttccccatcgcccaggccatgacgttcgagtcggcgatggccgacgtgaagaaggtggtcaacttcgacacgcctgagcagttccagcagatgagccaggacgtggaggatctctcgcgtcgtctgcccatggtgccggccgatatcgccaagatcgttgctgccgctggccaggcgtcgatcccgcgcgaagagctggtgcgcttcgccgaggacgcggcgaagatgggcgtggccttcgacaccagcgctgaagaggcgggccagaccatggccacctggcgcaccgccttcaaaatgggccaggacgacgtggtcgtgctggccgacaagatcaactacctgggcaacaccggccccgccagcgtccagaagatcagcgaggtggtgaaccggatcggcgcgctgggtgaggtggctggcctgggcagtggcccgctggccgcgctcggtgccaccgtggccggcatgggtatcgagtccgaggtctcggccaccggcatcaagaacatgctgctcacgctgtcctcgggcgatgctgccaccaagagccagctcacggccttcgagaagctcgggctcaatgccaagaccatggcccagtccatgcagaaggatgccggcggcgccatcgtgggcgtgctggagaagctgaaaaagctacccaaggccgagcaggccgcgaccatgacccagctgtttgggcgtgagtccatcggcgcgatcgcgcctctgctgaccaacctggacctgctgaagggcaacttcgacaaggtcaccgacgcacagaagtacggcggctccatgggcgccgagtacgccgcgcgtgtggccacctccgagaatgcgctgcagctgctcaagaacagcgcgctggtggtggcccagtccatcggcaagacgctgctgccggacttcaaggcgctggtggaccgcaccgcgcaggtcatcggcaaggtaaccgagtgggtgcgtgccaatccgcagctggtggccactatcgccaaggtcgcggtggtgggcaccgcgctcgccaccgtcttgggcggcctgctggttgctggcggcgtgggtgctatggcgctgacccagatccacaaggccgtggcgctgctgagcggcggcggcggcatcggccgcctggttggccaggtcgtatcgctgggtgggcgcgccttccccatgcttctcaacgtgggccgcatgctgctgccgctgctcggcggcgtcagcgcgccggtgctggccatcggcctggccatcggcgtggtggcggcgctggtgtggaaatactgggggccgatcaaggccttcatggttggcgtgtggcagggcgtgatggacgttgtcggcccgatcatggcggagttgatgaccgcgctcgcaccgctggcaccggtgtgggacatggtgtccagcgcgatggggcaggcgtgggcgtgggtgcagaagctgttcgcccccttcgccgccaccagcgagcagttgcacggtgcaaccgacgccggccgcggattcggccagatcctgggcaccgtgctgacggtgaacctgcgtatggcggtgaccgcgctgggttggctggtgtcagcctttactacgatcctgccgatcatccagaacgcggtgggtggcgcttggcagtacctgcagggcgcgtggaacctgatcgtgagcctgttcaccggcaacggcgagcgtctgcgcaccggtctgaccatgatgtggcagggcatcaatcaggtgctgatgggctggccggcgatgatgacgcaggcaggcatcgacatgatcgccgggctggttggcggcatcacctccatgggcggcgccgcgctcgatgcggtagcgggcgttgcttccggtgtggtcggaaagttcaaggggatgctgggcattcacagcccctcgcgcgtgttcgcccagttcggcgacttcaccatgcagggcctggccggcggtctggatcgcagccaaggcgagccgctgcagcaagtgaccagcctgggcgaccgcatgaagcaaatgggcgccggaatcgcgctgggagccgcctccatgccggtcctggccggcggcgcgcccgtactcgccccgagcgcaggagcagccgcagcgggcgcctccgggcctcctgtctacaacatcaacgtcacggcaccggccggcagcgacgcccaagggctcgctcagctgatccggcaggccattgacgaccacgaacgcagcaaggccacgcgccaaggctcgcggctgagcgactga

SEQ ID NO: 505704 - DNA, 138 bp, Stenotrophomonas maltophilia
atggccacccttatcgccaccatctttgccctttgcctgctggctgcggtcggcgtgttgctggtgtgggcactgagcgcgctgtgtcgcttcctggccgcgctgttgcccgatcccagcgagaagccctcgccgtag

SEQ ID NO: 505705 - DNA, 432 bp, Stenotrophomonas maltophilia
gtgaacgatcaacccaccaccagcgtcgctgaagacgccttgtaccgttcggagaacgcattgcgcgagggcatcaccgtgcgcgccaatgagagccattccggccccctctccgccggcatcggcaccggcaccctgacgcagccgcagccgggttccattctgctggagacgccgattcgtcgcggcgaccaggtgatcagcagcctgaccctgcgtaagccggacgccggcacgctgcgcggcatcaagctggctgatctgctgcagatggacgtgggcgccctgaccacgctgctgccgcgcatcagcacgccgacgctgaccgccgccgacgccgccaagctcgacccggtcgacttggtggccatcgccaccgaagtgggcaattttttcttgacgaaggcgcagcgggagttcccgtctgcgtag

SEQ ID NO: 505706 - DNA, 510 bp, Stenotrophomonas maltophilia
atgtccctgccccgcaaactgaagaacctcaacctgttcaacgatggcgagagctatctcggccaagtcaccgagttcaagctgccgaccctgacccgcaagatggaggaataccgcgccggcggcatgctcggccccatcgacgtagatatgggccaggagaagatcgaagccgagtggaagtgcggcggcctgatgctgcaggtgctgcgccagtatggcgcgatccgacacaacgccgtccagctgcgctttgctggcgcgtatcaaagtgaagacagcgagaccgtggactcggtcgaaatcgtgctgcgcggtcgccacagcgaggtcgatgccggtaccggcaaggtgggcgatgacaccgagttcagcgtcaagacctcgatcagctactacaagctggtgatcaacgaccgcaccgagatcgagatcgatctggtcggcatggtcttcctggtcaacggcgtggacctgcaggccgcccagcgccgcgccatcggctactga

SEQ ID NO: 505707 - DNA, 1170 bp, Stenotrophomonas maltophilia
atggccaacgaatatcaccacggcgtacgcgtcgtcgaaatcaacggcggaacgcgcccgattcgcaccgtcgccaccgccatcatcggcatcgtctgcaccggcgaggatgccgacgccacggtatttccgctcaaccgtccggtgctgctgaccgacgtcctgggcgccattggcaaggccggcaccagcggcacgctgcgctcgacgctgcaggccatcgccgaccaggccaatgcgatcacggtggtcgttcgcgttgccgaaggcgacgacgacagcaccacgaccgccaacgtcgtcggcaagaaggatggggccacctacaccggtctgcaggcgctgcttgtttccgaagcgcaggtgggtgtgcgaccacgcatcctcggcgccccgggcctggacacccagcccgtcgccgccgcgctgggcatcatcgccaaaaagctgcgggccatggcctacgtcagctgcgcggccagcgcatcggtgcccgaggcggttgcctaccgcgcgcagttcagcgagcgcgagttgatgctgatctaccctgattttgtcgccttcgacaccagcacggccaccagcgggatggcctttgccaccgcgcgtgcgctcggcctgcgggcgctgatcgatcagcagcagggctggcacaagtcgctgtccaatgtcgccgtttccggcgtcaccggcatcagccgcgatatccactgggatctgcaggatccggccaccgacgccggtgtgctcaacgcggccgacatcaccaccctcatcaattccaacggctacaaattctggggctcgcgcacctgcagcgacgatccgctgttcgccttcgagacctccacccgggcggctcagatcctggccgacaccatcgccgaggcccagatggtctacgtggacaagcctctgcatccctcgctggtgcgggacatgatcgagagcatcaacgccaagttccgcgagctggtcaatgccggttacctgctgggcgctaccgcctggtatgacccggccgcgaacctgcccacgcagctgtccaccggccggctcgccatcgacttcgactacagcccggtgccgccgctggagaacctggtgctcaaccagcgcatcactgatcgctacttcgccgacttccccgcccgtatcagcggctaa

SEQ ID NO: 505708 - DNA, 351 bp, Stenotrophomonas maltophilia
atggacgcccgcttcggtgccttcagcgacgacacggcgcacctgcgccagtccatcgccgacatcctcaccacacccatcggctcgcgcatcgggcgtcgtgagtatggctccttgcttccagagctgatcgaccagcccttcaacgacgcaacccgcttaaagctgttcggcgccgccgccacagcgctgctgcgctgggagccgcggatccgcctcacccggatcagcctcacccggtccgccgatcctggcgcgttcgtgctggatctggacggtcagcgcgccgtccccaccggtgcctcccgcaccacccgcctctccgtcccgctccgcttccgcaccccctaa

SEQ ID NO: 505709 - DNA, 567 bp, Stenotrophomonas maltophilia
atggatagcgctctgccccaacaggtcaacaaccttctgcgcgacggcgtggtgaccgaggtcaaccacgcgcgtcagctgtgccgaatcagcagcggcgagacccacaccgacttcattccctggctcgtcagtgcggcgggagagactatcgcctgggcagctcccagcatcggcgaacaggtcaagctgctctgtggcgacggcgacttggcgaacgcggtggtgctgcgcgggctgtacagctctcaataccccgccccgtccaccgatccagatgtcgtgctgagccagttcaaggatggcgcggtgatcggctacaacgcggccacgcacgccttgacggcagtgctgcccgctggcggcacggtcgctgtgcaggcggacgggggcgtcaccatcaccggaccggtcaccatcgttggggataccgagatcaccggccaggtcaaggttaacggcaaggccgtggtgtctgaagacgtggttggcggcggcatcagcctcaaacagcacaagcacagcgccgtgcagcccggcggcggctcctctggggcgcctctgtga

SEQ ID NO: 505710 - DNA, 651 bp, Stenotrophomonas maltophilia
atggcgaagggctaccgtttccaatctgtcgacttcgatgacctcttcgacccggacatcatgggcaatgggccctccgtcgcgaaccttcgcagcggcggcgccctgcggtacgcggccatcgcctacggcagcaaacggcctgacgtgggttatcgtcagggtggcgtcgacgtatcgaacctgtgggcggcgaaggggaccgccacctacacgctgccgatcaacggccaggcattcagcgcgcacaaccagtctcgcaccaattccaccggctcggctgtggcaacggtgacgtttgtcatcgacagcaatggaacttaccgaatccttcagagcacaacaggcggcggcaacaacaatacctccgaccccatcagcggaacctggctgccggcgggcgccacggtcggcgagtacgacgtgcagtttgaagcgacgaacgtgggcgccgcatccatcagcaatggcgcggcttcatactcttcctgcagcgcctcgcgctcggtcgcggcgtcggtatccgtgccggccgcgtcgctggataacgtttatgcggaggtcaccctgatcatccgcctgcgcaggtccaatggcgccatctccaccacccaaatcctggccaaggtgggcgcagcgggctggcactga

SEQ ID NO: 505711 - DNA, 1950 bp, Stenotrophomonas maltophilia
atgcccgttccccagatcaccatcactccggccggcttcgcggctatcgtcaacgcagagcactccggtaccgcgccggtaaagctgacccacgtcgggctgaccgcgcagcactttgacgtggccacggtcggcgcatcggtgccgggcgaggccaaacgcctgaccaccttcggcggccaagcggtcgctgtcgataccttgcacctgaacgtgcgcgacgacacggctgacgcctacacgctgcgtggcttcgggctgtacctgcaggacggcacgctgtttgccgtctactcccagccggcgccgatcatggagaaggcatccgcggcggtcatgctgctggccaccgacattcggttcgccaaggtcgatgccaccagcatcgaagtgggcgacatcgacttcatcaacccgccggccaccacctcgcgggtgggcgtggtacgtctggccaccgacgtggaagccgaggctggatccgaccccacgctcgtgctcacacccttcgggctggcccgctacatcaacaagcgcttcggtgacggtgcccccagcgcgttcgtaaaaagcttgcttggcctggccaccgccgcactgttccgcactgaactgggcctgcgcggcgctgctctgcgtgatgagggtcacggcaacgggttggacgcggacctgctagacggcaaccatggagactactaccgcgactggcgcaacctgaccggggtgccgtcgcagttcccaccctctccgcatggccacgcatgggcgtcgatcaccggccagcccgacaccgccctgcgttggcccacctggggcgaggtcagcagcaagccggcaacgtatccgccgagcgggcactcgcacccgtggtcggatattacgggcgcgcccgacccagcgacccgctggccgacgtggaatgaggtgaccaacaagccggcgacctacgcacccgccgcgcatacgcacggcgagtacgtgcagaagaccggcgacaccatgaccggtccactcaacatcaacggcaatgcgctgcgaatctacggatggggtgggaacgcgcagtccggcgtcttgtatctaggcaccggcgagagctacatcttcaagaacggcgcgaatttcgatatccggaacgaaaccggcggctacaccgcgaccatcgtacggggcggcaacattctgacgtcgagtggcgaccagtcgatcaacgtcggaacgctgcgcatcatgccgactgctggcggtgaccaactcttcttccgcgcgaatggcgcgcttggcgtgggcatcgacgcggtcaacaacagcaacggctcttacgcggcgctgtcgcttcgcggcacctccatcgccctgaacggcccgaccgtcgtcaaccacaacctgagcgttacgggcgatttctccaacggtgggtcgtgcgttctctccaacggcggtattcgtacaaccgagggatcgctgaccaactgcggctatgtttcattccataccactaacgggacccgtcgcggatacatcggctggaatgacggcagcagccgccttcagtacagcgccgagggtggcttcgttggacattcgttcgtaggcaacgtagtcgcctccggcggcttcgatttcggctcatctcgcaagctgaagaacattgaaggcccgattccgtacggcctggccgaggttcgccgcgtcgccaccctgatcggtcgatacaaaccggagttcaacagcgacgaccgtaggcgcctgttcttcgacgcggaacagctcatggagctgatgccggaagtcgtggacgccgagggtgttgcgttcaacggagagttggttccgtccatcaagatcgaccaggcgttgccgccggtctaccgggctgttgcggaactggctgaaatggtggactcgctgaccgctgaacttgccgaaatgaaggccggacgctga

SEQ ID NO: 505712 - DNA, 558 bp, Stenotrophomonas maltophilia
atgactgagccgcgctccctgttgccgcccaacagcacacggctggagcgtgccgtggagggcgccgacgcccagctggccagcatacccatggtgcaccacaccctatggaacccatggacgtgcccagccgagtttctgccgttcctggcgtggaccgtgtcggtcgacacgtggagcagcgactggccagaacacattcagcgctcccgcatcgccagctccttccagatccagcggcacaagggcaccgcgcagagcatcgccgacgtagtggccaggtttggcggtcaagtccagatccgcgagtggtgggagctggatccgcccgggccgccgcacacgttcgagctgctgctgaccctgagcggccagagcggtcaggaagccacggccgcgttcattgaccaggtcatggcggcggtgaaccgcgccaagcctgtgcgctcgcatttcaccttcacccagggcatcaacgtagaaggcgccatcggcgtcctcggcgtcgcccgcgtgctcacctccacccgccttcagctggcggcgagcgaaccgtag

SEQ ID NO: 505713 - DNA, 891 bp, Stenotrophomonas maltophilia
gtgtctacgtttaccgccatcgaagtcgacaagctgccggcaccggacatcttcgagcagcgcaccttcgagtcgatttatgccgagcgtttggctgagttccgccggctctgcccggacttttcggccattgtcgaatccgatccggtgatcaagatcctgcaggccagcgcgtaccgcgaaatgctgctgcgcgagcagttcaaccagcgcgcacgcggcgtgatgctgccgttcgcccaaggcggcgacctggacaacctcgccgtgccctacggcgtgcagcgcaagttggtgattcccgccgaccccgaggccggcacgcccgcgcgctatgagagcgatgaggacttccgccgccggatccagcttgcgccagagggcctgtcggtggctggccccgaaggcgcctacatcttccacaccctgtcggcccacgccgatgtccttgacgcgagcgtgcacagcccggcgccggccgaggtggtggtgaccgttctgtctcgccttggcgatggcacgcccgatgcgacgctgctggcgtcggtggaagccgccctgctcaacggcaacgtccgacccctcaccgaccatgtcaccgttgccggcgcccaggtgcacccgtacgaaatccgcgcggaggtgaccaccttcaatggcccggatagtgggctggtactggcggaggcgaaccggcgcgtggagcagttccgcagccagtcccagcgccttgaccgcgatgtgcccctgtcggccctgtacgcggtcctccacgttgaaggcgtgcagcgagtgaaattgatcagccctgccgccgacatcatcgtcaacgcgcagtcagccgccttctgcacggccgcagtgatcacccacgtgggcaccgatgactga

SEQ ID NO: 505714 - DNA, 462 bp, Stenotrophomonas maltophilia
atgagcgaggacctgcagcggctggaggcgtgggtcgcacccctgctgcaacgcttgcagccggccgaacgcagccgcctggcacgcaaggtgggcatggggctgcgccgcgctcagcagaagcgcatcgccgcccagcagaacccggatggctccccttacgccccacgtcgcacgcccacgccgcgccgggcgaaggccggccggatcaagcgcggcgccatgttcgccaagatccggcaggcgcggcatctgcgcgtccgcaccagcgcccaggaagtgaccgtgggcttcacggggcgcgtctcacgcatcgcccgcattcatcaggaagggcgctcggatacggtgggctcaaacggactgagggtcacctatcagcgccgcctgctgctgggctttacccaagccgatgagcagttggtacgcgagctcatccttgaccatctggccgggcaatag

SEQ ID NO: 505715 - DNA, 486 bp, Stenotrophomonas maltophilia
gtgaagaagccgcagcagcttcgcgatcacctggtcgccgcaattccggcgctggccaataaccccgaccgcctgctgatcttcgtggaaggcggcgggttgaatggcacctacaagccggggctgtgcttcgagtaccggtacacgttggagctggtgctgaccgacttcgccggcgcgccggaggctgtgatgctgccgttgctgcagtggctcacccgccaccaatccgaactgctggccaacccctccaaccgggaaaagctcagctttgaagtcgatgtgctgtccgaggacctggtggatctggccatcaagctgccgctgaccgagcggatgaaggtctaccgcgatgagcagggcaacctgcagctgcaacacctggctgaaccggtcaccgaaggcgaacacgccgacacgctcgccggcggagcgctgttcgatgccggcgtgctggtggccacgctgcccgccatcaccgcatga

SEQ ID NO: 505716 - DNA, 522 bp, Stenotrophomonas maltophilia
atgctcaaccgagccatcgtcctggtcgtcctgctgctggccgtcgccggcctggccacctgccagcagcagcgcatcggccacgcaaacagcgagcgcgatgaggctaaggctgacctggcaagcgccaacgccaccaacgccgccctgaagcgcaagctggagcttgcccaaggcactacccgcaccgtgaccgagtacgtcgaccgcgtgcaggtggtccgcgagcgcggcaccaccatcgtcaaagaggttcccgtctatgtcactgcgaatgctgatgctgcctgcactgtgcctgctggtttcgtgcacctccacgacgccgccgcgagcggcgaccccctcgccggaattgccggagatcctgatgcgcccgccgccggcgttacgctctctgtcgtcgccgaaaccctcgccgacaactacaccatccaccacgccaccgtcgcccaggtaacgggcctgcaggcgttggcgcggcagctgcataccgccctgcagcagtgtgacgcgccgtga

SEQ ID NO: 505717 - DNA, 636 bp, Stenotrophomonas maltophilia
atgatcaccgccgcccagctcgcccaggcgatgcagtgcccgcttacccgcgcccagcgctgggtggagccgctgaacgccgccatgaagcgattcgggatctccaccccgttgcgcgcggcgcactttctggcccagctgggccatgagagcctgagcttgggccgcgtggaggaaggcctgagctacagccgcgaccgcctgctggaggtgttcggcaagtacgtgacccctgccgaggcggccgcgttcgtccaccagccggtcaaactcggtaaccgggtctacgccaagcgcaacggcaacggcgtcgagtccagtggtgatggccatcggtaccgtgggcgcgggcccatgatgcacaccgggcgcggcaactatcgccgcatcggggagctgatcggacagccgctggaagaactgcctgcgctgctgcttgagccggagaccggcgccatggcggctgcggccttttgggccgacaacggcctgaacgcccatgccgatcagcgcgacgtgctggccgtcagccgcgtcgtgaacctgggcaacgcccgctctcgtgccacccctaatgggtttgccgaccgcacagcgcgcctgcagcgctgcatggcggcgctgggggtgcgctga

SEQ ID NO: 505718 - DNA, 276 bp, Stenotrophomonas maltophilia
atggctgagttcctgagtaccggcaccctgttgtgctgcctggccatctgcgtgcgcctgctcacctaccgcccggcggagggcgcccgccaccgccacggcgttgcctggtgcgcctggctgctgatcgcggccacgggcgggcaggccctgcagatcatcctgcagggtgccaaggcgcccaccagcggttggcagctgatgttgctggttgtcctgctggttaccacctaccgggcgcgcggcaacgtcgcccacctgttcggagtggattga

SEQ ID NO: 505719 - DNA, 216 bp, Stenotrophomonas maltophilia
atgcgtgtggtggcgatgcaaggcgacaccatcgacgcgctgtgccaccggcatctgggcaccaccgccggcatggtcgaacaggtgctggccttgaactacgggatcagcctgcatgggccggtcctgccacaggggaccgtggtggtcctccccgatgtacccaccccttccgccggcgccgtgacgcgccccttgatccagctctgggactga

SEQ ID NO: 505720 - DNA, 468 bp, Stenotrophomonas maltophilia
atgagcagcttcaccgccaacgcatcccccagcccgcaacagcatccgatcaccgccggcccgttctggccggagattgatgtggcggcggtgcgggaggctatccgcattaccggcgatgtgacgccggcgcggatgcgcagtgtggtggttggcgccgtgatgtccgtcacccgtgagctggtcgactaccgggtcgcccaggaaaaggccgggcacgcgcagctgtcggacgttccatccgaccaagtcgatggcgtgtcccagctggtacagctctaccggcaggctgtgtactgcgccaccgcagttgtgctgcatgagcggtaccgctcgtacgacgcgaccgcacagggcaaccagcgcgccgatgacctgacgccaaccattgatgagatccggcgcgaccagcgcaatgccatcagcgacctgctggggcagcggcgggtaacggtggagctgatctga

SEQ ID NO: 505721 - DNA, 708 bp, Stenotrophomonas maltophilia
atggccagcagccccgccaagcgtcatctgcagcgcgtcctggccgaacaggcggccgttgctgccgccggctccagcctgatggctggcaccaccatctaccagcagatgcagctgcagctggccaacgaccgcgcccgactgaaacagatccagtcgggcgagggcaaagccaagctcaaggccgtgctgctgccggagtactccgactacgtagatggcgtattggcggccgatcagggcggtccggacgacgtagtggccacggtcatgctgtggaacatcgacgccggcaacttcgaccgtggcttggacatcgctgcctacgtcctggcacaccgtatgccgatgccggaccagttcagccgtaccaccggctgcctcgttgccgaggaagtggcggtggccgcactcaacgcgcagaagaccggcggtgagttcgaccaaggcgtgctggaccgtgcggtggcgctgaccgagggccacgacatgcccgatcaggtccgcgccaagctgctgctggcccgtgcacgtggcctgctgcagaccgacagcgagcaactgccgctgacggccgaggcggtcgatctggccgttgctgacctggtccgcgccatccagctgcacgattcgtgcggcggcaagaaggatctggaaggcgcccagcgcctgcagaagaaattcgcgggcaaccagtccaacgactga

SEQ ID NO: 505722 - DNA, 1011 bp, Stenotrophomonas maltophilia
atgcgcacccagacccgcgtccagttcgatcagttcaccagccgcgtcgcgcagctgaacggcgtcaccagcgccgcccacaccttcgccgtcgagcccaccgtccagcagacgatggaagggcgaattcaggagagcagtgctttcctgaccgccatcaacatgcccggcgtggtcgacctcaagggcgagaagatcggcgtgggcgtgaatagcaccatcgccggccgcaccgacaccagcggcagcggcgagcgccagccggcagatgtcaccgcgctggacagcaacggctacgagtgcgtgcagacggattacgacaccgccattccctactcgcgcctcgacgcctgggcgcgccagcccaacttccagaccatcctgcgcgacgccatcatccagcggcaggcgctggaccgcatcatggtcggcttcaacggcaccagcatcgccaagaccaccgaccgcgccctgaacccgctgctgcaggacgtcaacaagggctggttccagaagtaccgcgagcacgccccggcccgtgtcatgaccggcggtgctactccgggcgcggtgaagatcggcgccggcgcggacttcgccaacctcgacgcgctggtgatggacgtggtgtccaacctgatcgagccgtggcatcagaatgatccgaacttggtcgtgatcctgggccgcagcctggtattcgacaagtacttcccgatcatcaacaaggacctggccccgaccgagcagctggccgcggatctggtgctgggcaccaagcgcatcggcggcttgcagccggtgatcgtgccgttcgtcccggccaatgcgctgatggtcacctcgctggacaacctgtcgatctactggcagatcgaaggccgccgccgctacatcatcgagcagccccacaagaaccgggtggcgaacttcgagtcgtccaacgacgactacgtggtcgaagactacggccgtggcgccctggtcgaaaacatcgtggttcaggactga

SEQ ID NO: 505723 - DNA, 870 bp, Stenotrophomonas maltophilia
atggccagcaagaccgacaagaagcgttcccagttcttccgtgtggctgtcgaaggcgccaccaccgatggccgcgtcatcgaacgccagcagatcctggacatcgccgaaacctacagcccggacgtatacggcgcccgcatctgggtggaacacctgcgcagtgcgctgccggacagcccgttccgcgcgtacggcgatgtggttgcagtcaaggccgaggaagtcgagatcgccggcaaaaagaagatggcgctgttcgctcaggtcgagccgactgacgacctggtcgacatggtgaacgtccgcaagcagaagctcttcaccagcatcgagatcgccccggaatttgccgacagcggcaaggcgtatctgtacggcctggccgtcaccgattcgccggcgagcatcggcaccaacatgctggcgttctcggccaagttccccgacgacagcccgctgaaggaccgcaagcaggccccgggcaatgtcttctccgaggcggccgaaaccgagatcaccttcaccgatgtggagcagccggaagtgcggcagggaccggtttcagccctgctgtccagcctcggcctgggcgccaagccgaagcccgcgcccgagccgacgcgcgagtcgttggacttcgacgttgcccagttcgccacccagctgctcggcgcggtcggcgagcaggatgcggccatggccaagctggcgcaggagaaccgcaacctcgccgcccaggtacagaacctgtcggcgcaggttgccggcttccacaagaagctggacgaaaccgcgcagccgaatacgccccgtcccgtggtcgctggcttcagcggcgccaaggccagcgaagcaaccgactgctga

SEQ ID NO: 505724 - DNA, 1416 bp, Stenotrophomonas maltophilia
atgatctacgtgggtttttcactgtcgcgcgcgcgaggcgacaggcaacctatagaggtgcaaagcgtagccgaaaaactcaacgtagatccccgtcgccaggcaaagtttttgtactggatgggctggcgcatctgcgatatctgccagttgatcggtgagaaggaaaagaccgttcacagctggaaggcgcgcgacgaatgggaccgtgccgataccgtggagcgtgttggcggcgccttggaggcgcggctcgcaatcctgatccataaggaaggcaagaccggcggcgacttcaaagagatcgacttgctccaccggcagctggagcggcaggcccgcatccagcgctaccagggcggtggcaacgagacggacctgaacccagcggtcgccaaccgcaacgctggcccgaagaagaaggtccgcaagaacgagttcagcgaagaggaagtggaacggctgcagcaggcgttcctcgacgggtgcttcgattaccagcgcgattggtaccgcgccggcagcgagcgcacgcgggtcatcctcaagtcgcggcagatcggcgccacctactactttgcccgcgaggcgctgatcgacgcgctgataagcggtcgcaatcagatcttcctgagcgcatccaagagtcaggcgcacatcttcctgggctacatgcgtagtttcgtgcgcgaggtgctggaccgggacctcaccggcgatcccatcgttctggccaatggcgctgagctgttcttcctgggcaccaacgcacgaaccgcgcagggctaccacgggaacttctacttcgacgaattcttctggacttacggcttcaatcagctaaacaaggtcgccagcggcatggcgatgcacaagaagtggcgaaagacctacttcagcacgccatccaccatggcgcacgaagcctacgatttctggacgggcgagcgtttcaacaagggcaagccgacctcccagcaggtatcgatcgatgtcagccacgggcggctgggcagtggccggcagtgcgaggacgccatctggcgccagatcgtcacagtcctcgacgcagccgaccgagggtgcgatctgttcgatgtggccgagctgcggcgcgattacagcgccgaggaattcgccaacctgctgatgtgcgaattcgtcgacgacagcgccagcgtgttcccactcaccatgctgcagccgtgccaggtcgacagctgggtggaatgggccggcgacttcagccccttcgccattcgtccctacggggatcggccagtgtggatcggctacgacccggccgagacgggcgacagcgccggcatcgtggtggtggccccgccacaggtgcccggcggcaagttccgcgtgctggaacgccaccagttcaagggcatggacttcgccgactag

SEQ ID NO: 505725 - DNA, 381 bp, Stenotrophomonas maltophilia
gtgacccaccgctattgggtcacctacatcggcatcgacgccactggcatgggcaccggtgtggcccagctggtccgtcagttcttcccgggcctgaccaccttcagctactcgcccgaagtgaagacgcggctggtgctcaaggcattcgatgtcatcaagaacgagcgtctggaatacgacgccggttggaccgacatgacccagtcgctgctggccatccagaagaccagcacggccagcggccgacagaccacctacacggcggggcgctcgcgcacgaccggccacgccgatctggcgtgggcgctgctgcatgccctgcagaacgaaccgctcgaaggcggcgccgccgcccgcagcaccatggagattttctga

SEQ ID NO: 505726 - DNA, 1014 bp, Stenotrophomonas maltophilia
atgatcgacaccgaccagagcgctgtcaccgcgccggcagggcccatcgaagcgttcacgttcggggagcccacgccggtgctggaatcgcgcggcatcctcgactacctcgaatgctggcgcaacgggcgctactacgagccgccggtgaacctgcaggggctgtcgaggaccacgcgggcaaacccctacctgcagagcggcctgacctttaagcgcaacatgctggtcagcacgttcgtcccccacaagctgatgagccgcgccaccttcgcgcagctggcgttggactacaccaccttcggcatggcctacgtggagcgccgcaaggcgctttccggagccgcgcatagcctgtccgtgccgttggcgcagtacgtgcgccgtggcgtggtggagggcgagttctttcaggtgcgggcgggcggcatggagcatgagttccccgccgggcaggtgtaccagctgcgggagtccgatgcagaccaggaggtgtacggcctgcccgagtggatgccggccgtgcaggccgcgctgctcaacgagtcggccacgctgttccgccgcaagtactacaacaatggctcgcacgccggcttcatcctgtacctgaccgactcccaggcggaatcgtcggacgtaaccggccttcgcgaggcgctcaaggcggcgcgtggcccgggcaacttccggaacctgttcgtgcactcgcccaacggcaagaaggacggtctgcagatcatcccggtgagcgaggtcgcggccaaggatgagttcgccaacatcaagggcgtgacgcgcgatgacatgctggctgcgctccgggtgccgccgcagctgctcggcatcgtgccgcagaatagcggcggcttcggatccatccgcgacgcggcgacggtgtgggctgcgatggagcttgctccgctgcaaacacgcattgccgcgatcaacgactggctaggccaagaggtgatccgcttcgctccatttgaacttgcaccggcggtggcatga

SEQ ID NO: 505727 - DNA, 843 bp, Stenotrophomonas maltophilia
atgtcccaaggaatgcaatccgcatggctgcgaacccccgacgaccttctcgccgaattagtcatggtatccaccaatcacagcggacctgtggttatcgtcgagggaagcacggacgagcgttttctgtgtttgcgcacggatccctccgtgtatttcaccattacgaacggaagagctgtttgcattgcgctcatacatctactcaacagcgagcctaggccgttctgctacttggcgatcatcgacgaggattaccagtggcttgcccccgagacagccgacaacatggtgcataccgacacgagggatctggagtcgatccttattcgatctcctgccctagatgcggcactggttgaacttgccgattcgggactggttcacgagttcaaagccactacaggcacctcgatctgcgaagcgctcctggaccgtgcaagttttttcggaagagttcggacgctcggttttctaaagggaagcgtatctctagacacaatgaagccggcccgatttgcaaggccagactggacctatgaccatgatgcatgcgccgattactgcgtgcagatagggcttgctgattcccgtgaaaaattgctgcatgaagcgtcggatctctcggcaccgtctgagtggcatttcgctcgaggtcacgacttggttgacattctcctgggcggcctcgcccatcgccttggcggaagtgggtgcaagaaacctgccctggaggcgattcttcgccaaagccttcagcacgccgacttcgagacaacaaacttgtacagacgcgtcgccgattggcaggccgcacgttccagcagaatttggaagcactag

SEQ ID NO: 505728 - DNA, 621 bp, Stenotrophomonas maltophilia
atggacgccttgaagcaagccatcaagaagctggacaacacgcagaaggagctctcggagttcgggcttctagagaagccgtcgacaattccccttgccgatgacgagcccgacattgagtattcaaagcgggttgcgcttacgctgttcaccagcgatattcgcgaaaaactctccgtacttgagccaattgctaatcgaatcaatatcttcctcggcagcatcaacagcaagctgaggaacaagcaaattcatataagcaaagaaagtggacttcttgcaaaggatctgcttggaacgatacttccactcgaccagctatcctcgggtgagcagcacgagatagtcttggccttcgagctcatcttcaacatgccgaagaactccctcgtgctcctggacgagccagagctgtcgcttcacgtcacgtggcagcgcatgttccttccagagctgatggcgatatgtaaggccgtcgagttcgactgcatcatcgccacgcactccccgttcatcgtcggaccccgcacggatttgctgacccttctggatgcagaccccgatgtggatctacctacagatatcgctggcaacggcatcctggcagccgcgagagattga

SEQ ID NO: 505729 - DNA, 177 bp, Stenotrophomonas maltophilia
atgttcgcttggtcgctggttgttgaggcttatccaccacgtctcctccccaacgcgccgaaaaagccgcgccacctctaccgcgtcgagcagcacgagttggggcgttcgaaggtggcgccgccgacggcgtcgccccggaccaacgccgaagagctgctgcagccggttgcatga

SEQ ID NO: 505730 - DNA, 1068 bp, Stenotrophomonas maltophilia
atggcaacgctgcagaaccgcaacggccgctggcgcgcaatggtgcgccggaagggccacaaagaccaataccgcaccttccccaccaagaccgccgcgagagcctgggccgaacgcatcgagcgcgaacaggcagactacgaggcccgaggggggacaccaggtgaggacatcacgataggcgagctgatcgactggcggaccaacgagctggccaccgtaagggccgtctccaaaacccataccggcaacatgacgcggatccgtgaaagcctcggcgacatcgtggccaggcacctgaccgccaacgacgtgatcgagcatgcccgccggcggatcggcggcgaccacatgatggcgaacggggtcattatcccagcctgcgcgcccgcaaccatgaacgtggagttggggtacctctccgagctgctgaaactcgccggcccgatgaagggcgtgaggctggccagcgacccggtggccgaagcccgtcctgtcctgcgtctgctacggctggtgggaaagtcgaagcgccgcgacagacggcctaccgccggcgagctgcagcgactgcgcgagcatttccgggccgccgcatggcggtcgcgcattcccatggtggacatcatggacttcgccatcctgacggccaagcgcgagagcgaaatcacccggttgctgtggtccgacgtcgaccaggtgaaccggacagccctgctcagggatgccaaacaccctcgcaagaaggcagggaatcacaagagattccccctgctaggcgatgcctgggaaatcgtgcagcggcaggccagaggcgatgcagacggaccgatttttccctacaacgccaattctgtgggaaccgcattcacccgcgcttgcacgaagctgcagatcgaggatctctgcttccacgatctccgccatgaagctacatcgcggctattcgaacagggatacgatatcccggaggtcgcggcggttacgctccatgagtcatggaatgagctgaagcggtacacccagctgcggcccgagtctcttcatcgagccgtaccgactcagtag

SEQ ID NO: 505731 - DNA, 933 bp, Stenotrophomonas maltophilia
atgaccgccgaccccagcatccacaccgtcgataccggcttccagcgccccgacttcgacgcggcctacctgatcgttgaaaacggccgcgccgcgttcgtcgactgcggcaccgggctgtcagtgccggccatgctgcaggcgctggccgacgccggcctgggcgtggatgcggtggactggctgctgctcacgcacgtgcacctggaccacgccggcggtgcgggcctgctgatgcagcagctgccgaacgcgaaagcggtgctgcacccgcgcggtgcgccgcacatgatcgacccgacccggctgattgccggtgccacggcggtctatggcgccgaggaaatcgcgcgcagctatggccgcatcgaaccgattcccgcgcagcgcgtcgtggtggctgaagatggccaccgcatcgacctggccggccgcgagctggtgctgctgcacacgccggggcacgcgctgcaccactactgcgtatgggatgcgcgcagcggcagctggttcaccggcgatacgtttggcatctcctaccgcgagctggacagcgtgcagggcgctttcatcttccccacctcctcgccggtgcagttcgacccggaggcgatgaaggcctcgatccggcgcatgctgggctacgcgccgcaggcgatgtacctgacccactacgggcgggtgcagcaggtggagaaactggccgaggacctgttcgagcagatcgatgcgatggcggccatcggccgccagtgcgacggccggcctgaccgccaccgctgcctgctggcggcgttgcaggcactgtacctggaacgtgcacagctgcatggctgtgcgctggacgatgcggcggtgactgcggtgctggcgatggacatcgaactcaacgcgcagggcctggcctgctggctggaccgcatccgctcgtag

SEQ ID NO: 505732 - DNA, 360 bp, Stenotrophomonas maltophilia
atgagcacacccgacacccgcaaagcgctgtggcagatccacttctgtgtcctgctgtggggcgtcaccgccatcctcggcaagctgatcaccctgcccgcactgccgctggtgtggtggcgcatgctgctggtgacggcgatgctggcgttgctgccgcgggtctggcgaggattgcgcacgctgccgctgcggttggtggccggctacgccggcatcggtgcgctggtggccctgcactggctgacgttctacggcgcggtgaagctggccaatgcctcggtggcggccacctgcatcgcgctggcgccggtgttcacctccatcatcgaaccctgggtcgccaagcggccgttctag

SEQ ID NO: 505733 - DNA, 276 bp, Stenotrophomonas maltophilia
atgcccatctgccgcgtgaagtcggctgctgtcgacgaacagcacaacgccaagaccaactccatcatccgctcccagatggtcggcctcgacctcggcaacggcttcgagttgccgttccgtgtcggcctcggccagcgtccgccgtatccggctggggagtacgacattgatcccaagtcgttcgcgctgtcgccctatggcgaccttgtcctgaagcgctacgtggacttggtgcccatcggcttcaaggccgctccggcggcgaaggcgtaa

SEQ ID NO: 505734 - DNA, 192 bp, Stenotrophomonas maltophilia
atgggtgagtgcctgatcgttactgccgagcaatggggcgagctgatgcgcgccattgggctgatgttcctcattgtggtcggcatcggccttttcgctcgattcgatctgagcctgtgggaatggcgcgtacgtcgctacatgcgtcggcgtcgcattgcgcgcatcagggaggtcgctcatggccgttga

SEQ ID NO: 505735 - DNA, 4551 bp, Stenotrophomonas maltophilia
atggcatttgcaatacccctgcgcagccacaaggctgccgcaattctctccttctgcctggcattaggcggtgcatcgactgcaagtgcagccacctactacggccctccctacacggttcagtcgtttcgcggggttggttcgtttgagagcgtcggcgctgcggtcaacttcctggtcgggaagatccaagccccttgccaacaggaccccaagtgcaccaagccgcccgttgtcacggtgcgatacggcaccgacggctgggctgcgacgatctacgttaatggaagtgttagtgacaacgtttttgcttccgagatattgattggacagccccagaagaatttcggcgggtgccagaagcgttgttcggctgggcttggctccgctaccgatggaactggggcccgaggtgctgctgacagtgcttcaaaggccaatgcccgtgatccaggaagcccgtttgagggtgatccgatcaatgcctccactggcaacttctatcggcaggaaacggacttcgagtctccgtcaggcctgatgttccggcggttctacaacagttctgctcgtgccccgggttcttctttgggtcgtcagtggcgccatctttttgatcggcgactcgaagtgcttgcacccaccacgggagcggccggagaccgcacgttcattcgtgccattcggccagatggcagttcagagctgttcactcgaaccccaagcggctggatcgtcgatgccgatgtcgcagacgtgctcgtcgatcgagaggcgggtaccggctatgcattgcagttggcggccaaccgccaaaccgaagtctacgatgcaacaggcttgttgaaggaggtctatgactctgcaggcaggaagcttctgtatttgcagtattcggacgcaaccacgccggcagatgtggcgccagccgctggactcttgttgaccgttggcgacgccagcgggcgcacgttgagcttcaagtatgatgcctcattgcgattgaccacgatgatgttgccagacggtgcatcgcaaacgtttggctacaaccccgcaggacagcttgcctcggtgacctatcccgacgccacaagcaagggttacatctacaacgaaacagccaacagccccactgtctcagggacgtccttcctcacagggattgtggatgagaaaggcgttcgttacgagaccattaaattcgactacaaccatcgcgcctatcacgcagagttcgctggcggagttgataccacaaccttggactacgccgcttccacctggaagggaacgctgccagtaaccgtcaaggggccactcggagccacttccaagttgggcttcgtggatacaggaaaggggcgtctgatgcccgcgggcggttcggccgcctgcggtgaccaatgcaaccaaccctacaaggccatgacctatgacgtgaacggctacccggcgtcggtcacggacttcaagggaatcactacaaggaccacttacacggcagacgggttgctggccgaacaggttgacgccatcgacaccccccagcagcgcaccacgacgaccacctgggatagcgcactgcgtttgcccctgagtcgggtggtaaagaactctgcgggcgtggccgtttccagcagttcatggaagtacaacgcgttgggcctggaggtcgcgcggtgcgaggtggatcctgccaattcggctgcggtcgggtatgcgtgcggagctgcgaccaatgcgcccgctggggttcgtcaatggaccaccgcctactgctcggcggtggatgccacccaatgcccgcaagtcggtcttgtccttgccgaagacgggccgcggtccgatgttcaggacgttaccaggtacagctactacctgaccgcggatgagtcgggttgcggcgttctcgggggctcctgccaccgcgctggtgaccttcagtccgagatcaatgctctcggtcaagtgacgacacggctggcctacgaccgaaatggacgtgtcagccgccttcgagacgcgaccggcacgatccatgattttggctattccactcgaggcaagctcacctcgataactgagcggaacagcgtggacggagctgcgtctaccaacgatcgagtgacctccctttcctatgatgcgacaggcaatgtcgcatcggttgttgaccccgacggaatatccctcagctacacgtacgatgatgcgcaccgtctcgtccagatcaatgacggggccgggaacagcattcgctacaccctcgatgtggcaggcaatcgcaccaaagaggaggtgttcgacgcaggtggtggactgaagcgttcgctctctcgcgtttacaacaaattggggcaactggtgtcccagaagacggcagcggggaattcaaccgactttacttatgacctggcgaacaacgtccagctcatcaccgatgccctgaaacgcaagacgcagtttgagtacgatgcccttggccagctaagtcggacgttgcaggatgtcggcggattggccgttcagacccgatatgagtatgacgccgaaggccggacaaccagcgtcattgatccaaaggggctcgcgacgacctatcattactccggtctcggtgatctcatctcccagcaaagtcctgacactggactgacccttggtacgtacaacagtgcagggcagcctgccagtcgtgtcgatgcgaatgggaagacggtcgcctatggctttgatgccttggggcgcgtcacacgcaaggtctatggcgaccaggagattgtggtcacttactcctacgacatcgcggacagtgtatgtaatgcgaacgagagcttcgcatcaggtcgtttggccgcacgtcaggaccaaagcggcatgacgaagtactgctacgaccaagcgggtaacgtaaccagaaaggtccaggctttggaaggcaaggtgctatccgttcaatacagctataccaaagcaggccgtctgagtgggcttacttatcctgatggaagtcgcgtcgactacgtgcgtgacactacaggctctgtcattgaggtcggggttacccgccctggagcttcgcgccagatccttgtctctggagcgaagcgctatccgtttggtccctccgctggctgggtctacggcaatggccgcaccttgctgcgagagttggaccaggactatcgtccccttgaattgcgcggaagcggggtaggtggactcagtgttggctatacgttcaatgccgctggagatctcatcgccttgagcggctctgcgaccggggagccgtccattgcgcttgcttacgactcgttgggacgcctcacggcgttcacggatgcggccacaggggtccctatcgagagctatgcgtacgacgcaacgggcaatcgcctctcagcaaaggtcaatggcttggagcagacctacgtttacccggcagagagccatcgtctgcaaagcatttccggtgcggcacggagctatgattctgtggggaacatggtgtcgaatgccggaaatggaagagactattcctacagcgcagcgaaccgcatgagcatcgtgcgtctgaacggagtgcccgctgcagagtatcgttacaacgagctggggcagcaaagcagccgggtcgcgggaggggaagtcagccattccctctatgacgaacaagggcgatggcttggtgactacggcttggacaccggtagcgttcagcagctgatttggctcgatgacctgccggtaggtgtaatgaagggggatgcccttttctacgttcaggcggatcatctgggggcacctcgagtgatcatcgatcctgtgcgagacgccgttgtctggacctgggacttgaagagcgaggcgtttggctcaactttgccgaatgaagatcccgatctggacggggccaacttcgagttcagtctccgtctccctggtcaaaggtacgatgcgatttctgctctgagtcagaacatgcatcgtgattatgatccggctgctggacggtatgtgcagagcgatccaatcggactggcggcaggggtttcaacgtacgcctacgtcaatgggaatcccatgtcgggtgttgaccccgatgggctggactctatcgtgacgtatcagaatcttggtattaccacatactatgatgatggcggcaatgttgttaaatcctggcagtcgctaagcgctgtcgcaggcaatgcgcttcccggtgcggctggtccctaccagtctgcaaatgtgtatcccgtaaggggcccctacaagatgaacgacagggcttatggccccaacgacattctgaagaccgatgacccgcgtggcaggtggatccatggtggtgggtcaaggctccgcaatccgctgtcgccgagacagggctggaccccggctgtggggtgcacccggatgcagaacgaagacatccaggaactggttgatatggttcgcgaggcaaaggctcgcaatccttcaaaaccgatctcctatcagcggatgaactacgaacgcccggtgatcatcccattcttctga

SEQ ID NO: 505736 - DNA, 393 bp, Stenotrophomonas maltophilia
atggatattgggagtgccaagttgctgctggagtcgggcgacgtggatggtgctcgtcagcaactgttggagatcgttgaacgtgattcctcttccgagcgcgcttggctattgctggtcggcctcggttttcgaacaaatgacgcgaatctatcgctgcaagcgttgcgccagcttgaaaaaaaccgaccgcgtgacgcgttcgttgtttctggtttggtggactgtttgattcagctggagcgctatggcgaggcgaaggaggtcattagcgcattctcggatgtagccgttcctggaactcctgctcacgataccgtgctgcaagaacatcgcagagcacttcagttcatcaacgatagacttgaggctgcaggtgacgaagacgaatag

SEQ ID NO: 505737 - DNA, 918 bp, Stenotrophomonas maltophilia
atgggtgaccatacgcgcgagattctcgccaccgtaatcggtccaggtaccattcacctgctgaatatcggtcggaatcagctgccctgcagcggttcgctcgctaccgacttcagactgtccgttctgatgttcgaggttaacgataacaacaaccgaggagccgtccttaaacacgaccttcataatgatgcgcgcctggtcgcgcagacctgtttagttcgtaacgtgctggagcaggccggccattgccgtgaaaacgtcggttccgaccactttgggaataacatccgtgctccccgtcgcagtttcgaccactgcacggaggttgtagtccgatgcgtactcgtaggccgtcatgccactcgcgctcggattgaggccaagggtcgctataggcacgatgaacgaggggcgcagtgtgccaccaccaacgacctgcacgcgatgagcgcgattcacctcttcaactgcgcccgccggtggcgtctgccgcataaccacaggtccggcggatctcggctcaataccgccaccgccaccggagcttgtaccaacgtagtactgctgaatctgattgtcagtgacattgaaaatcaggtaagtcccgggcccgaggagcagattgcctacgcgctcaagcaagtcgagctcggggtggcggtcggtggggtgtgccgcaagctgggcattgcggaggcgacgttctacgtgtggcgcaggaagtgcggcgggttgggtccgcccgaactcgagcggctgcggttgctggaggaggaaaacagcaagctcaagctgttggtggccagcctcagcctaaacaaagcatgctgcaggatgtggtcacaagaaagctctgagtcctgcccagaagcgtgcctgagtggagcggttgcaggagcgatttggcagcagtga

SEQ ID NO: 505738 - DNA, 312 bp, Stenotrophomonas maltophilia
atgttctccgcaacggcatgggagcccgcctccgttcagatgaaggcctctgacgtgaggagcttcagccatcccgaaaagcaactgaagaagaccttctgtgccgtttgcggcgaggttgtgttcggcaccaatcggctcggcatgcatgtagttcccaatgccatgctccaccgcatcagcggtgagggctctcattccagctgggctcctaccatgcacctgttctaccgccagcgggtggtggatgttgtggatgatctgcccaagtacctcgacggctgggatggccctctctactcaccggaatga

SEQ ID NO: 505739 - DNA, 1965 bp, Stenotrophomonas maltophilia
gtgaaacaccgtcatctcctgctggcctcggcaatcgccgttgccacgctggccctggctgcctgcaagaaggaagctgccccaggcaccgataccgccggcagcagcgccccggccggcgaaaccgccgaccagttcgtggcccgcatcaatgccgagttcaaggccgcctacccggagatgacctcggcgcagtggttgtcctccacctacatcaacagtgattccgagcgcatcgcggccaaggccaacgagcgctcgctgacccagctcaacagctggatcgaacaggctgcgaagttcgacggccagccgatgagcgaggacagcaagcgcgcgatccacctgctgaagctgatgtcctcgatgccggcgccgcgcgatccggccaagctggccgagctaacccagatcgccacccgcatggaaggcagctacggtgcgggcaagtactgcaccgacgccaacgatcccaactcctgccgccagctgggcgagctggagcaggtgctggcccgcagccgcgactacgacaagcagctcgacgcctggcagggctggcacagcaccaccaagggcatgcgcggcgactaccagaagttcgtcggcctggtgaacgaaggcgccaagggtatgggcttcaccgatgccggccagatgtggcgcagcggctatgacatgccaccggagcagatcggcccggaaaccgatcgcctgtgggaacaggtcaagccgatgtacgagcagctgcactgctacgcgcgcggcaagctggacaagacctatggcaaggacaaggccgaagtgggcaacggcctgatcgccgcgcacctgctgggcaacatgtggcagcaggactggtcgaacctgtgggaccagctggaaccgtaccccggcgccggcagcctggacatcaccgcggcactggaaaagcagtaccagaccaacctgagcgcggcgctggccaaggccggcaaggacgccaacgtcgccgcgcagtacaaggcgcagcgcgaggccgaactgcgtaccgccaagcagatgaccgaacgcgcgcaggacttctacgtgtcgctgggcatgccgtcgctgccgcagtcgtactgggagcgcacccagttcatcaagcccgatgaccgcgacgtggtctgccacgccagcgcctgggacatgaacatggaaggtgacgtgcgcaccaagatgtgcatcaagccgaacgaagagaacttcaccaccatctaccacgagctgggccacatctattacgacctggcctacaacccgctgccgccgctgttccagggcggtgccaacgatggcttccacgaagcgatcggcgacaccatcgtgctggcgatgacacccaagtacctcagctcgatcggcctggtcgatgcgccgaccgaaagccgcgaagcggtcatcaacaaccagatgcgcatggcgctgtcgggcgtgtcgttcctgccgttcgggctgatgatcgatcgctggcgctggggcgtgttcgacggttcgatcaccgccgacaactacaacaaggcgtggtgggacctgaaggccaagtaccagggcgtggccccggccagcacccgtggcgaagaattcttcgacccgggcgcgaagtaccacgtgccgggcaacaccccctacacccgctacttcctggcgcgcatcctgcagttccagttctacaagggcctgtgcgacgcggccggctacaagggcccgctgcatgagtgcaccttctacggcaacaaggaagccggccagaagtactgggcgatgctgagcaagggtgccagccagccgtggcaggccacgctgaaggaactgaccggcaccgacaagctcgatgccggcccgatgatcgagtacttcaccccggtcaacgagtggctgaagcagcagaacgaaggccagatgtgcggctggcaggccaacgcggccccggcagcgaaatga

SEQ ID NO: 505740 - DNA, 762 bp, Stenotrophomonas maltophilia
atgcctgacgtcaaactctcccagctcgccgccgccagcgcggcctccgtcgccgccggggccggcctttggacgatggctggtcacatccttggcctgcatatggagtacgtcgggccggcttccatccgcgtgtccagcggtagcgcttggattccctctttgcagcgagcgatcgaagtgccgagtgcactgaccctgagcggcctcacgcttgcagctaacacctggtaccacctctacctgtacctcaatggcacgacgcccactattgaggccgtgacgatcgcgccggctgccccgtatagcgggaccgctcgcgccaagacaggcgatccctcgcgtcgctacattgggagcttccgttcgagcccatctgctcaggtcgtcgcgtttcggcaagccggcagtctggtgaagtaccaagatacgttcgccaactcagccgggatcgtgcttaacggtggcgccagcaaggttcccgaagacgtttcaacatcagcttgcgtcccgctcacttcaactaccgcgctgatgaatttctccagctcggcaaaccaaaacagcgtgatcggcaataaggactgcagtttcacgctggctccgtctggcggtggttggctgttcgcactgaacccgtccagtaggctttccggtctgattccgctggccagtgatcaaaccttcaactaccgcctcgccgatgaagtgacttcgggaagtctgctgggcatcgtcattggctaccaatatgagcgctga

SEQ ID NO: 505741 - DNA, 984 bp, Stenotrophomonas maltophilia
atggcctacgccgagttcaccaacgtttcgaacgtccagaccctgatcgacctggtcgtccagtttgcacaggccaacggctggaccgtcgagcgcaacagcctctcaggcgccaatcgcaccgccacactccgcattcctggtgtgtccgactacgtacatctgttcaactacgatcagcaaagtctgctctcgcggatctcaattggttacgacggcggccagccgccgagtacgcagcccttggtttcgcctcgcgatgtgagcacctaccagcttgttgggccgtttccgcgcctgaagctgtttgcaaatggcaacgcgatccacgttgcgatcgctcaggcggttgccggtgagtaccgccaccatgcgttcggtgtcctggataaggccggtgactatgccggcggcacctacgtggagggaacgtactgggcgcggacaggttcctggagcggcatgatcacctccagcgcgcccaacgtggttctgttcggacacaccacccagacaaccggcggcggtcatgttcgtgcggattcaatcgaggaaggtcgcgccaactgctaccacctgatttgcggctactacggctggtcgctgggtgccgaaggccaagcgggaagtggggtcggaacaatcgatcaggcaaatgggattaccggcaattcgagctacgacagcctgtggcttggatacgcgctgcgtggcaccgacgacaacaccttctccggtcgcagtgttctccaccccatccagttgaccgtgcgacgcgttggctcaaccccctaccattccgccatcggccaagtcgtgggcctgcgcgcctgttacatggagaagctggagccggagcaggagatcactgtcggcgatgaaacctgggtggtgtttccgtggctacgcaagctggccatgagcaataacaccaacgctccgccagcaagcggcaactatggttgggcggtgaagaagtcctga

SEQ ID NO: 505742 - DNA, 975 bp, Stenotrophomonas maltophilia
atggtctgggcaaccgacaccgcatccaacatcaccgacctcatgacccggctgcgggacttcctgacctccaacgccgccttggtggctgccaatcagcactggcaggttgtgggcggcgtcgccagcggcccgatcgcggccaacgatttcgtgtcactgaagggtcgcgggctcgccggtgaagatgaaatctacctgtcattgcaggcttgggtagtgccggcgagcaactactacaacatgtgcatgcgcggccacaccgcatacaaccccgcattgccgggcatgacccaggcgggggcaaactccgagtacgtatcgatccttggcgtcaattcgccgatcaagtactggttcattgccaacggccgttgcttcaaggtcatcgcccgcaccaacggccgctacgatgccctgtatggcggcttcatcctgccagagcaccttccgagtgactggagctatccgctgttcatcggcggggcacaccttggcagggacgcggttgcgtccttggatacctacgagcattccaacttctggaacgcccatgccagtggccgtgccaacaatgcgtacagccaggcctacctgttcacgccgatgcaagcgtggctgccgattcgcaacaggtacaccggctccaaactggccactggccggctcgtcgtgccgtgggcgtcgtacatctccaatacgaatgttcgcaactgcctggacggccagcgctggctgaagcgtggacagctgatgggtatcggctggaggtccgagggtagtgagcccagctcgcgcgtggacgagatgcctgaaggcgggcagttctacggcagcttcgacggggtgttctacacgccatcctttggcgccacggccgagcagatcgtcacgctgggcggcgtggaccacctgctcatccccaatgtgtatcgaactggcgacggcgaatacgccgcatttgctctggagtaa

SEQ ID NO: 505743 - DNA, 162 bp, Stenotrophomonas maltophilia
atgaaggcattgctcaacagcatcaagcgggacgcccgcctcattcagaagcgcgatggctttggctactgccaggcgctggagatcgcttcgaaaaaggctggcttcaacacttatgccgcagcgaagtctgccctgcaggaacggggggcacgccaatga

SEQ ID NO: 505744 - DNA, 1176 bp, Stenotrophomonas maltophilia
atgacgcttcgcctgaaacgcttgctcaccgatgccggcatcaagcagggcgtactggccgctgctgccggcctgagccgaccggccctcaatgccctgatcaatcacgaccagctgcccaccagctgcgatccggcagcggtgcgcgctgccatcagttcctgcctgacccagcacggcgtaaccgacgccgcctggcatgaacaggaggggccgacgtgctccaacacgccggccccggtttccccaccgcaagacaccgataacgacaacgacattcacgacgaggaagatcccatgctactgcgttttcaggcattgaccccacaggccaagcgccacttcggcctgaccaccaatcccttcgccgatccggccagcgccgaagacgtgttcctctctccggatatccgctacgtccgcgagagcatgtaccaggtggcccgtcacggcggctttgccgcagtgatcggcgagagcggtgcaggcaagagcacgctgtgcgaggacctggttgatcggatccagcgcgaggaacaggccgtcatagtgatcaagccctacgtgctggccagcgaaggcagcgacgcggtgggcaagaccttgcgtagccaccatatcgccgaggcgatcatggccgccatagcaccgctggccaagccgaagagcagcccggaagcccgcttccgccagttgcacgaatcgctgcgtgacagcgcccgcgccggtcacagccacgtcctggtgatcgaagaggcccacagcctgccgctgccgaccctgaagcacctcaagcgcttccgcgagctgaaggacggccttcgcccgctgctgtcggtgatcctgatcggtcagcccgagctgggcgtgaagctctccgagcacaacccggaggtacgcgaggtcgtacagcgcatcgagatcatcacgctgccgccgctggacaacgagctgggcgcctacctggcgcaccgcttcaagcgtgcccaggtgccgctggacaaggtggtggaacagagtgccatcgacgcgctgcgggccaagctggttccctcgcgaggtgcgggctcgctgctctacccgctggctgtccagaacgcgctcaccgccgcgatgaaccgcgccgccgacctgggcgtgccgactgtcaccgctgacgtcgtgcggagggtctga

SEQ ID NO: 505745 - DNA, 237 bp, Stenotrophomonas maltophilia
atggcgattcaaaccgaaggctggccggtcgtcgaaggaatggtgagggcgccacagggggaaccgtggccgttcgccacgcatctcatcctgcttcccttcgaaattcaggacaagcctgagccgatcaacgtggacattctccaagtggtgatcgtgccgcgtgccaactgggagcgcatcgtcgcccatgtcccgatcactgtgctgcagcgcgaaggggtggctcatggctga

SEQ ID NO: 505746 - DNA, 303 bp, Stenotrophomonas maltophilia
atggccgttccgaccctcaagcgctgccgtggccagatgcgcaaccggaagagccacagcgctcatctcaagcgccgcaggccagtcggtgtggtcgcgagcaaacccccgttcctcgaagacgctgccgtggccacgctgtacatcctggatccggtgacccactgcgagtacggcatcgatttgttgcctggctatggcattcaggtcaccacctccagtaccagcaaccgctggtatctggatgcagacgggatcgtcgacctggcgatcgccgccggcattgaccggagggccgactga

SEQ ID NO: 505747 - DNA, 222 bp, Stenotrophomonas maltophilia
atggctgagcatgcgcgttacctgatcgtgcccgccgaatgggccagcggcgaaggcttcgccgacctggaggaagtgctgggtgccgcggcactgaagaccaagggcgacggcaagcatcgtgctgtggttcgggtggtggcacgcgtggatccggagccgaccccgctggtggtggtcactcgattcgaagaaggcgagggccaggcggtggcaccgtga

SEQ ID NO: 505748 - DNA, 480 bp, Stenotrophomonas maltophilia
gtgagcgctatccccagcatcgcactgcagcacgccatcgccctgtccctgggtgccagcgtggttcgatctgcggatctgatcgaccgggtgatggagcacggattccagtaccgcgactatgtggccaacgcggtcgccaaggcggtgcggtgcgggatgatccagctcgttggcgaagggttggcccgcgactaccgcctcaatccagactggaagatcgatcaggcggcactggcggccgcagacgcacaacgcgtacgcggcacccggccgggcaccaccggtgtgcagaaggctgcccctgctgccggcggttacatcggccctgcattcgaccaaggcccgctgacaccatccatcggcacggtgtgcggttcacaggaggagctggagggtgagctgccgccctacctcggtggccgcctggtcgactcgctgcacaaccacttcaatcgcatcttcggtggggtggagtga

SEQ ID NO: 505749 - DNA, 255 bp, Stenotrophomonas maltophilia
atggcacgcaccggccgcccacggcacgaccggatccgtgcgatccgtttcgccttgtgggctcagacgcaagatccgcgtcaactcactccccagcggatctccggcctgctcaacgtcacgttgaacacggcacgcatctggcgggctgactggttttccgccgtcagtccccgtccggtcgaaggcatccccgaccttcttcttcccacccaaccctatgccagcactgccgcccaaggaggcgcccaatga

SEQ ID NO: 505750 - DNA, 519 bp, Stenotrophomonas maltophilia
atgccgaggatccgagacacctgcaccttccgcttcggcggcgttcgcggtgcactgaatgccagcaccctggccttggccgtggagatcgccgaccgggcagcacgggccgacgtggagatccacgcgcccgccgtgaagctggacgggctgcgcttcttcgatgccacctgcggcaacatccagggcgaagacgcgaccgctgctcgctatgccatccgtcaggcagtgcggtacatcgaggcgcgcggggacgcattgccctggcgcctgaagcgtcacatctcccagccggcgctgctgcacttcgaagaacgcaccgaccctgaggtggccaccaccgggccacgccatgcgtgtgtcaactgcgacatgcccaccggtgcgcccgagtcgcccatgtgcggcccctgcgcccagcaggcagtgactgagatggccgccgctctggctgccgccaaccaacgtttggatctgatccatgaggttcagaaatccatctgcgaggtgcaatcgtga

SEQ ID NO: 505751 - DNA, 246 bp, Stenotrophomonas maltophilia
atgggacagatccagctaactcgccccaactgcgaggcactcctgcaggacgccggtaccgagcccggaatgcgggcagtggcggcacttggagtggccttcttcgaagtcaacgatcaggccgggaagctcgacggaactcatcgaggcatctgcctgaagctgatctacatgtgccaagaggccatccataccgccgagcgagacgcggatgaagatgaggaggacgacgatgctgatgcgtaa

SEQ ID NO: 505752 - DNA, 762 bp, Stenotrophomonas maltophilia; identical to SEQ ID NO: 498324

SEQ ID NO: 505753 - DNA, 792 bp, Stenotrophomonas maltophilia
atgtcgacgcctgacctgccgctgcgcatgcagcagctcaagctgcacggcatggccagccagtggcccgaactgctggccaagatgcgcctgcacaccatggagcccgaacactggatggccgaactgctgcaggccgagtccgccgaacggcaggttcgtgcccaggccaaccagatgaaggccgcacgtttccccgtccatcgtgacctgctcgggttcgacttcgcggccagtcccgttgatcgcgcactggtcgaacgactccaccagggtgacttcatccacacccccgagaacgtcgtccttgtcggtggaccgggcaccggcaagacccacctggccaccgccatcggcatccaggccgtgcgccagcatcgcctgcgcgtgcgcttcttctccaccatcgaactggtcaatgcgctggagaaggaacaggcccagggcaaggccgggcagatcgccctgcgcctgacctatgccgacctggtcatcctcgatgaactgggctacctgccgttcaccccctcaggcggcgcgctgctgttccacctgatcagcaagctctacgagcgcaccagcctcgccatcaccaccaacttggccttctccgaatggggtcaggtgttcggcgacgccaagatgaccaccgcgctgctggatcgcatcacccaccactgccacatcctggagaccggcaacgactcctggcggctgcgcaacagcaccgccgccaacaagaccaaagccagaatcagggcaaaggaggccaccacccagaccaccaactga

SEQ ID NO: 505754 - DNA, 1500 bp, Stenotrophomonas maltophilia
atggtcatgttggccaagatccggcggatgcatttccgcgatggcctgccgctgcgcgagatcgccaagcgcacgggcctatcccgcaataccatccggcgatggctgcgcagcggccagtccgagccggtctatcccaggcgagcctcgccctcccggctcgatccctaccggtcccagttggagacgtggctgcgtgccgacagccatcgtccccggcgggaacaacgcaccgccaaggtgctgttctcgcagttgcaggcgatcggctatccgggcacctacacccgggtgacggccttcatccgccagtggaaggcggccggcggcgccagccgccgcccggccttcgtgccgttgcactttcctccgggtgaagccttccagttcgactggagccgcgagtacgccttcgtcggcagccacgccaagatgccgctggatctcgcccacgtgaagctggcctgcagccgcgccttctggttggtggcctatcccacccagagccacgagatgctgttcgatgctcatacccaggcgtttaccgccttcggtggcgtgccgcgccgcggcatctacgacaacatgaagacggcggtggacgggatcggccagcaccgggaacggcgggtcaacgcccgcttccacgccatgaccagccactacctgttcgccgcggagttctgcaaccgcgccgcgggttgggagaaggggcgggtcgagaagaacgtgcaggaccggcgccgacagatctggatcgaggccggggcccgccactggccagatctggacaccctcaatgcctggctcgccagcgagtgccgcgccgcttggccgatgcaggcgcatccggatgcctccgacatcaccgtggccgaagctctggaggacgaacagccccacctgatgccgatgcccgcgcccttcgacggctacatcgagcggccggtgcgggtcagttcgaccgcgctggtcagcttccagcgcaaccgctacagcgtgctgtgcgaacacgcccacgccgtcgccagcctgcgcgtgtatcccttcgaactggccgtggtggtcggcgaggccgaggtcgcccgccaccggcgcagcttcgagcgtgatcgggtccactacgactggcagcactacatcgccctggtccagcgcaagccgggggcactgcgtgacggcgcgccgttcctgtccatgcccgatccgctgcgcaagctgcagcaggtgttgctgcgccagcctcacggcgaccgcgccatggcccaggtgctggccgccgtacccgtgcacgggctcgaagcggtactggtggcggtggaactggcactcgagtccggcctggtgcgcgccgaccacgtgctcaacgtgctggggcgattgcagcatccggaccgcacgatcgagacggtcgcctcgcgagtgacgctgcgtcatccgccggtgtccgatccggcccgctacgacgccctgcgggaggcagatcatgtcgacgcctga

SEQ ID NO: 505755 - DNA, 684 bp, Stenotrophomonas maltophilia
atgcgcgtactgattgctgaagacgacccggacatcgcctccggcctgtgcgcctcgctgcgccggcaggggcacgtggtcgaccacgtcgacaatggcgcgcacgccgacgccgcgctgggctcgacccagtacgcactgctggtgctggacctgggcctgccgcaactggatggccgcgacgtgctgcaacgcctgcgccagcgcggcgatggcctggcagtgctggtggtgaccgcccgcgacggcctggccgagcgcgtgcgcgtgctcgacctcggcgccgacgactacctggtcaagccgtttgcactggacgaattcgaagcacgcgtgcgcgcacagctgcgccgggtcaccagcaacggcaccccggacctgcgcatcggccgcctgcgcctggacctggccgggcaccgggtgtggatcgacgaccagtcactggaactgaccgcacgcgagttcgggctgctgtcggcgctggcggtacgcgccgagcgcattgtgtcgcgcgcgcagctggtggaagccctgtgcgactggggacaggacctgaccgacaacggcctggacatcgccctgcaccgcctgcgccgcaagctgcagcccggcggcatgggcatccgcaccgtgcgtgggctgggctacatgctggaagacgcacaggacgacagcgccccgtga

SEQ ID NO: 505756 - DNA, 681 bp, Stenotrophomonas maltophilia
atggagaactataacaagcgcggcaagtcggtcctgggactggctgtttttaggggtaatttggatctgcttgaaaaaagattgaagcttggggttgacccgaattcaaagctgttcaaagaaggtgattgccgcagtcttgtggggctggctttcaaatccaaagaaatggagtcgttggagcttttggttcgatatggggcaaacgcaaatattgttttttcctgcggctacacaatggtccattattgcacccgcaatgatcagtggcagcttgaagacattctcaaaatgggggtggatccaaatacgtgcgcgtcactgagtgacatggattacccaggtcacgccgctttgcacatggcagtgaggcagcgggatatcaagacaatgaagttgctaatgtcgtacggcgctgatgtcaacttgcattgcgaatatctcggttataccccgttgcatgctgcgttcttgtttcctgacagcgagacaatcaactttcttttggacaatggcgcggatttgcatgcgctggatgactacgagcgcatgccggagcagattgctgactcgtactacacaaatggcgcgcaaaaaatcttgagcgagcgaatggagcggaaaatcatggagcaggttgaaatgaaagatgcagaaagcgcaaagcagcggcggatgtga

SEQ ID NO: 505757 - DNA, 741 bp, Stenotrophomonas maltophilia
atgagtgctgtgacacttaagcgtgacgctgatggctaccaagcattgcgtgcgagcgaattggaggccgagattgaacgcgccaaatccggggcaattcagtccgtggggcgcgaagcagcgtcctattatttggggatccacacacgcacgttgtcgcgatacaacgcacaaggcatggggccaaagtcaaccagtctgagcagcagcggtggcctgggccaaacggcgaaagtgttctataagctctccgatctggacgaatggcgcgagcagttgtcggcatcaagctacaaagaacgcaagatcaaatcgtccgtggccgcaaagaagacggaattggcattgctggaactggagcttgagaacaaggggctgcaatttgagattgcacgtctcaagcgtctgttagataaaaagggcatgggttttgctgggatccacgacgctacgtctactttgccttggatctttgacgaccagtctcgcgtgctgggcacggcctacgatttgaacgacgcggacgtaatttcggcactgatgcaagcccgcattgaacacctgtccgcactggacgcattggagcttcagtgggccgacatcaatgtgttcgtgcagtgggcagacgccgttcgtacagccctttcctctggaattcaggatctggacgagttgcgcgcggcaagggtccaacggcacgaactgatgagtcacgttggaggcggcgatggccaaagttga

SEQ ID NO: 505758 - DNA, 414 bp, Stenotrophomonas maltophilia
atgagtaaaggattgcttttcgttgacgaatacacggaaaaaagaaaggtgcgtgagcattccgtggaggaattgagagtgctgtaccgtgatgtgcgcgacttcaaaagaatgattgaagtcgcagcgcgcatggatcaacgcaccgctgaaaccacgtacacccaatttgggcacaggcgctttcaagagttgaggcgcttgtttcatcccatcaacgaacggttggcagcgctggacagcgatgagatacgtcgaagccgaaattggatcctagaaaatttttcaaacgctctaactgttcagcgcaaagatcggttgcaagggaagatgggttcaacgattgcaagtctgagttgtatcttggatgaaattcaggctattggcgtggacatacagatcaaagaggtttga

SEQ ID NO: 505759 - DNA, 1857 bp, Stenotrophomonas maltophilia
atgagcaagcagcgatacaaattgagtgatcggcagttgcgtgcgttgaccatcaatgagcgtccggcattggacgccaacggcaagaccgtcattgaagccaaccccgatcctaagccctaccgctttgtggacgacacccacggagcgcccaccgggtttggtgtgtacgttggcaccagcggcaattcatttgaggtgcgcaagcgggtgggggagcgtgttgtacgcgtgtcactggggtccgtggacgacatgtcgattgtccaggcgcacgaaaaggcccgattggaaattgcgtacatcgtacagtcgggtggagaaagcccccggcgcagggacgcacaagagcgcagaacgacgagcgccaagcacattacggtgcgtgcgtgtatggagcgctatatcgaacgactggacgctcaagttgaggccggcaaacgcaaggccaacagcaccaaggccgtgcaaaacagtttggcgcgactggcgcgcaatgaggtggggcttgcggacatccaagtccgggatctgacccacgatcaaattgtgaaggcgtggaacgccttgcgcacgtcggcaatgctcaaatccaaccggatccccgcagaggtcaagccactgttggccgcaaacgacaaatggtgggcgttgccaatggacgagtacgcggccatgggcttgtcgggcaagtacattcaacgcgctaagtctgctggcattgaggccgttgaacacacatttgccgatttgaaccgggccattgaaattgttctgcgccaagaacgactggacgcgcacagggaaggacgtgaggtcgccattcagttcaaccccgtcgagtctctttttgatttggaactgtggcgcggggctaaagagaagcgcgaacactaccgcaaagcccaggtgcgcaatccgctgggcaaagaggacggtacactgtccacggtgctaaagacgttggtgttccgccgaaatttgcagaacaaacacaacgctgttgccgtggactatctgttgttgacgttgctttggggtgcacgacgcaacgaggccactcaattgcagtggtacgacaaggtgtccaaagacgaccttgctaatgagcgtgtgtcgtgggtgtggcttgcgcccaacgctggtgatatcaatcccagcaccaagcgtccaggatcacaagtgttctttcacgacacaaaaaatggtgaagtccgttttttgccggttgcctactttgcagaaaaaatcctcatccaacgcttgaatgatgcgaaggatgtcgaagcgcaattgcccagtgaaatggaccgggccaagcgtggggtggaagaggttaaaaagaccacatccgatttcatgacaattgccaaagcgcaacgtgaggtgtatcgagttgagcaaaaggccgatcgcatgaagtgggtgttcccggcccgctccacgcgctcaaaggaaggccattacagtgacagcaaatccattattaaaaatgtgcgtgtggacgcaggcatgttggatttgcgacaggagattgacatcggcttgacgccacacgatttgcgccgaaccttggggcgatttgccgaagctcttatgtccggccgtattgtctccgacatgctcaatcacaaagtcaacaatgggtcagccaatgtcacggacctgtacaatgagcaggaatggggggcgttgcgggaggcattctcaaaagtggaagaggtcatgatttcgaccagtccccgcgtatggaatgttttgaaggggccggataagccatttttggacgaattgaacgacaagatgcccgtcattcattcgggcttgcggcccgttaaaggcggcgaggaagaatga

SEQ ID NO: 505760 - DNA, 1167 bp, Stenotrophomonas maltophilia
atgctagcctggctgctcgatccccgcgagggacatggacagggtgaccagatcctacgtgacctactgatcgctgcaactacgtatgctcgctcaaccgctgtccttgatggaagaggtagaacttcccgattcttctctgcttggcccccctctcgaattcgtacagcgacctttggctcggcgttcgttgcccgggaactgggaattaacgcaagagagcgggtggacctcttcgtaattgacccacagaatcatttcattctggttgttgagaacaaggctggaatgaatcactcagaccaacagctcgacagctataagacaaaattcgatgaaattgcatcatccaactcaaatctaaaggattatgattgcgcgttcatcgccctagaccgctacttccaaggggatgatgaaaaggagctcccgagcgctagcacgtggcttcatatcggctacgagtggctccaggtgtctgccaatcgcgcgttgatgcacatggaacgggggaacaatgcagcgaggcttgttgtgagttactgcaatagacagaccgactgggacagccctcagagcaaaagaagcatagaactagcttcggcgttgcaccatgatcacagcgatgccatcaagcgtttgctttccatgtcaataaaacgcatcgagactgaatggctgtcaagtcgtgcgccgcctgctgaactcgaattcatgctccagaatcgttcacttggagacctgctccgcgaaacacagggcatggcgtcagtagcctcatcgttgctggcacgtgttccaggcttgacaaccgattctctagagcatgggcgtgtatggatggacatatgccctactggctgggaaaagtacttcaatggtgattggtggcctgtctatctaagcatcacctactcaaacaaggacagaacccaattcagagtttcgctggtgtggaactcacatcacgcccgctctgaagctgaagcgaagcagcttcgagggttgcttgcagagtacgaccaacgattttcaacacacagtgacgccagccgcagatggattgtgttggataaaaatctaggtcttcaggaactctttcatcgcgtgcccgaggtgtttgcgcatctgaagaagttgctagaagtccgcagcgtcaacgcctga

SEQ ID NO: 505761 - DNA, 228 bp, Stenotrophomonas maltophilia
atgagccgtttcaagaacgagatcacccacctgcaggcgcacatcaagacgctgcgcctcggcgcgggtgcgctggtcatcgtcgccctggtcatgggcggcggctggtggagcgcaccgcgcgatctgaccatccacgtcccgcctgacctacgctccggcagtacccgcaagtggtgggaagtgatctggccccccgtcagcggacgccaagaagcgatactttga

SEQ ID NO: 505762 - DNA, 1998 bp, Stenotrophomonas maltophilia
atgacgcagcctacccgtcgccagttggccaacgccatccgcttccttgccgccgatgcggttgaaaccgcaaagtccggccaccccggcatgcccatgggcatggccgacatcgccgaagtcctctggaacgactacctccgccataacccgagcaacccgcactggttcaaccgcgaccgtttcgtgctgtccaacggccacggttcgatgctgcagtacgcgctgctgcacctgagcggttatgacctgccgatcgagcagctgaagctgttccgccagctgggcagccacaccgccggccacccggagcgtcatgagaccccgggcgtggaaaccaccaccggtccgctgggccagggttttgccaatgccgtgggcttcgccctggccgagaagctgctggctcagcgcttcaaccgcccggagctggaagtggtcgaccaccgcacctgggtgttcatgggcgatggctgcctgatggaaggcgtgtcgcacgaagccgcgtcgctggccggtacctggggcctgcacaagctggtctgcttctgggacaacaaccacatctccatcgacggcaacgtcgagggctggttcaccgacaataccccggagcgtttcgaggcctatggctggaacgtggtccgcgacgtcgatggccacgacccggagagcatcaaggccggcatcgaggccgcgctgtcgcagagcgacaagccgaccctgatctgctgccgcaccaccatcgggtttggttcgccgaacaaggcgggcaaggaatccagccacggcgcaccgctgggcaaggacgagctggaagccacccgcaagcagctgggctgggaatacggcccgttcgagatcccgcaggcgatctacgacggttggcgtgccaacggcgccggcaccctgcgccaggccgagtgggagcagctgttcgacaagtacgccagccagtatccggcggaagcggccgagctgacccgtcgctcgcacggcgaactgccggccgacttcgttgccaaggccgatgcctacatcgcccaggtggccgctgaaggcccgacgatcgcttcgcgcaaggcctcgcagctggccatcgaagccttcgccccgctgctgccggaaatcgtcggcggctcggccgacctggcgcactccaacctgaccctgtggaagggcagcaaatcggttgccagcgacgacgccaacgccaactacgtgtattacggcgtgcgcgagttcggcatgaccgccatcgccaacggcctggccctgcacggtggcttcattccgttcgacgccaccttcctggtcttcagcgattacgcccgcaatggcgtgcgcatgagcgcgctgatcccggcccacgccatccacgtctacacccacgactcgatcggcctgggcgaagacggcccgacccaccagccggtggagcacctggcctcgctgcgctacatcccgaacaacgacgtgtggcgtccgtgcgatgcggtcgagtcggcggtgagctggaaggccgcgatcacccgccaggatggcccgagctgcctcgtgttcagccgccagaacctgccgcaccagccgcgcagcgccgagcagatcaagcagatcgagcgcggcggctacgtgctggccgatgccgccggtaccccggacgtgatcctgatcgccaccggttcggaagtctcgctggccaccgaagccaaggcccagctggatgcggccggtatcaagacccgcgtggtctcgattccgtctaccgatgtgttcctgcgccaggatgcggcctaccgtgaagcggtgctgccgaatgcagtgcgcaagcgcgtggcggtggaagccggcgtcaccggtttctggcgccagttcgtcggcctggacggtgcggtgatcggtatcgacaccttcggtgcctcggctccggcagaccagctgtacaagcacttcggcatcaccaccgcccacgtggtggaagcggccaagtcgctgtaa

SEQ ID NO: 505763 - DNA, 147 bp, Stenotrophomonas maltophilia
atgcgcatcaatcgagtaatggccggagccgtggcctctgtgctggcgctcggcgcggtggcccccgccttcgccgacaacgaccaccgtgaccgccgcgaatggcgggaagatcgccgcgagtggcgccaggaccgccgtgactga

SEQ ID NO: 505764 - DNA, 177 bp, Stenotrophomonas maltophilia
atgcacaagatgatgactccgctgacccgctatgcgcagttcagcgggcgcgccagccgcagtgagttctggtggttccagttgttcatcgtgatcgtttcgatcccgttgtacatcctgagcttctacgccggttacagtggttcgcagggctggccatggtatcgaccggactga

SEQ ID NO: 505765 - DNA, 249 bp, Stenotrophomonas maltophilia
atgaaccgcgaaagcggcacctggaaagggcgacggagcatcaccggtgggcgcgccgttgtacgtgaagcgctctacatggcggcgctgaccgccaaacgctatgagcccaggctcaaggaattctttgaatccctcgtcaagcaaggtaaaccgggcaaggtggctttggtcgcggtaatgcgcaagatgctggtgatcctcaacgcccgcaaacgggatgcggaggcccagatggcctccgcctga

SEQ ID NO: 505766 - DNA, 225 bp, Stenotrophomonas maltophilia
atgtacgaccaggatttcagcaatctccacgagactctccgcgatcacctgcatatccaaatgaatcgctcccgcagtctcatcatcgctaccgacgataaaccaggttggtacactgaaacttccgttgggcagaagatggaaattccgaacgaccgtctttttctctggagccgggtgctcttggaagtttcgaagagcggcaattttggctatgaactctga

SEQ ID NO: 505767 - DNA, 684 bp, Stenotrophomonas maltophilia
atgagccagcagaacactcccggaaacgacccgaacaacggacgcgacgagagccagagcccgtatggcgcacaggctgccgcggacgcgccgtcgaatccctacttcggcacggcccaggccgagccggcgccggatctggacgcggccgcgccgcagctgcgctcggccgaagagcagcggctgaaccggaaggcgctgttgttcctcggtggcatcgtgctgctgttggtggccatgggcttcctgctgttccgcaagggccaggatgacaaggacgccgcacagaaggtgccggaagtcgcgcgtgtgtccacgccgacgctgccggacgctgtgcagacggatccggttccgtcccagccgatgcagcccgttgacccgattccgatgctgccgccgctgccgccgcaggaaagcaacgccatttcgccggggatgctgggctcgcgtcaggaacgtgaaatcgagcgtggcccgtcgctgctcgatcgccgcattgccggctctggtggcggcgtgggcggcatgagtgaagggcagggccaggctggggggggctccttcatcctacgagcaggccatgctcgccacgctgcaggcgcagaacggcaacaccgcacccgcaaaggttcgccgcggcccggacgtcgaagatgtctccagcgccagctacatccgtag

SEQ ID NO: 505768 - DNA, 939 bp, Stenotrophomonas maltophilia
atgcgtctgatcgtcagcctgcttgccgccctgctgccctgcgcagccctgtccgccccatcccaggtcgtcactgacgacatcacccgcttctgggccacctatgacgcggtgcgcgccgaacccgatgccgaacgccgggtggcgctggtccagcagcgctacatcgatccgggcagtcccggcctgcatgcgctgatgcaggtgcgccactacactgcccgcgaatacgctgaggccatgcagtcatggccacgcttctggacgtcggtacggccgttgaccgcaaatgcacagcaggccagcgccacgctggagcgcgatctggccgcctcccgggcgctttacccggcgctgcgcccggccaccatcacgtatgcagtgggcgtgctgcgcacgggcggcaccacgctgggcgacaaggtattgatcggtgcggagatggcgctgggcgatgagcgcgtggacgtgagcgagctgcccgcgccgatgcgcagccggctgcggatcttctacgacagccgtccgggtgcgaacaacgcgcagaacaacctgcacgagtacgtgcctacccagcagcgcgaaaccaccggcagcctggcccagtacacagtgcgtgagggcgtggccgaatacgtggcggagcgcatcagcgggcgtcgtccggcactgccgctgtacacctatgggcccgcgcacgaggcagaaatccgcgcgcgcttccttgccgagatgcacggggacaacctcgacaactggctgtacaacacggcgcgcaatccgttcggtgtgagcgatctgggctactacgccggctaccgcatcgcgcaggagtacatgcgccggcaggccgatgagaaggccggcatcgcgcggatgatcgagctggactatgccgatccgaaggcggtggccgacttcatcgaggcatcgggatag

SEQ ID NO: 505769 - DNA, 825 bp, Stenotrophomonas maltophilia
atgccgcaccgcacgaccttgttccgctgcctgctggcagcggcgctggccgcaggccccgcgacggccgccgccgatgtccctgccctgctcttccacgtcgatgcccgccacggcctgcaggccgtgaccgcgcagggtgaagccgtaccgaacttccgcgacagggtggcggtggtcgacgatggtgccggtggcaaggccatccagtgggaagacgacggcgtactggcctgggacgcaccgggcaacatcctggcccagcgcggcaccctcgccttcgactggcgtccgcgctatgcggtgggcgaagccccgttcgtgatcttccgcgtcggctacgccgaccacagcagctgggacatggcctggctgcgcgtcgactggaacgggcacggtttcgatgccttcgtcaccgatgccaaccttgcacgcacccgcgtgtcgttccgcatggacacgccaccgcgccccgagcagtggctgcacctggccttcgcgtgggatgaagaccagggcgtgcgcctgtttgtcgacgggcgcgaagtggcgcgcgcgcagaccacgggcgactacgatgcggcgctggaccagctcggccttgccgggcgggtgatggcaccgtaccaggtgcagagtcgctacaacttcctgcgtgggagtgatttccagcacatccgggtctacgaccgcatgctggatgcgccggcgatggcacgcgcgcctggcgccaccgcttcggctgggaaggggctgcaccccccgcgttggcggccggcggcacccgcatccgcaagatcgaattcgccgacacccgcgacctga

SEQ ID NO: 505770 - DNA, 1158 bp, Stenotrophomonas maltophilia
atgagtccaatttcgcgcgcccgaggcctgtcgctgatcgaactgatgattgccatggtcatcggcctggtcctgatgctgggcgtcacccagatcttcatcgcttcgcgtgcggcatcgcgcctgtccgaaggcgcggcccgcacgcaggagaacgcgcgtttcgcactggatttcctgcagcgtgacctgcgcatggccggccatttcggttgcgtcaacgaccaggcgcacctggtcaagaacaccggcgatgtcggctaccacctgggtatcagctccggcagtggcgacccactggacttctcggtgccggtgcagggttacgaggcagcaggtactgcgccgggcaccacgctgacgctggggcgtgcgtggagcgcggcacagtcggttccgaagagcatcgccaatctcaagccggcaccgttgccgggcagcgacatcctggtgttgcgcctgatgagtccggaaggggccgtggtgaccggcatctccgtggccgcgggcgcgaccacgctgaccgtctccagcgatggcatggcccgactgaaggccaacgccgcaggcacgccgacggtcttcggcgtggccgactgcacccgtgcggacgtgttcccggcgaccatcagcggttcgaccgtgaaggtcgacaaggtcgacctgagcaactattcgatcaacaacgcaatgaccatgctgtatcgcgccgatggcatggcgtactacatcgcgagcaaccccaatggcgagccggcgctttaccgggcacgtgccaatggcgccggtggctatgccgacggcgaggagctggtggaaggcatcgagaacatgcagttcctgtacggcctggatgccaccaccaacatctccctgcccacgccgccgaccgggcgcatcgtggaccagcgcgtggccagtgcggtgagcaccggcaccgacgctgccgccgcggcgcaatggcgacgcgtcggcatggtgcaggtcggcctgctggcgcgcagtccgcagcgtgcgtcggccgaagcaccgggcagcgcggccacttatccagccatcctgggagtgggtttcgctccggccgatccttacgaccagcgccaccgtggcgcctatgaagcgtccgttgcgctgcgcaaccgcttgttcgggaactga

SEQ ID NO: 505771 - DNA, 252 bp, Stenotrophomonas maltophilia
atgatcgacctgaatcaaatcgatgacctcgcccgtcgcctcagcgacctggtgccgccgggcctgcgcgaatcgcgcgaggaactgcaggccaccttcaagagcgcgctgcaggcggggctggccaagctggacctggtgacgcgcgaagagtttgaggtgcagcgtgcggtgttgttgaagacccgcgaaaagctggatgcgctggaaacggccgtgcgcgagctggaaggacgctcgacatcaggttga

SEQ ID NO: 505772 - DNA, 339 bp, Stenotrophomonas maltophilia
atgaagatggtcatggcggtgatcaagccgttcaagctcgacgacgtgcgcgaagcgctggccgagcgtggggtcaccgggatcacggtgacggaagttaaaggctttggtcgccagaaggggcataccgagctgtaccgtggcgcggagtatgtggtcgatttcctgccgaaggtgaagctggaagtggcggtgaccgatgaccaggtggaggccgtggtcgaggccatcgtgaaggccgccggcaccggcaagattggggacggcaaggtgttcgtgtacgacctgggcagcgtggtgcgcatccgtaccggtgagctggacgcggacgcgttgtaa

SEQ ID NO: 505773 - DNA, 1509 bp, Stenotrophomonas maltophilia
  misc_feature (1300)..(1300): n is a, c, g, or t
atgagcgcgccgccgcgcctgcgactgcgaaggatccgccgtcatttcattgccgcctgtgcggtgggcctggtcgggcttgcactgctggtgggcacgctcagccagctgctgccgctggccgagcgccacccggagaagattgccgcctggctgagcgagcgtgccggccagccggtgcgcttcgaccagctgcagaccgcctggacccgtcgtggccccctgctgcagctgaagggcctgcgcatcggcgccgggcagggcctgccgatcggcgaggccgaagtcctggtgtcgatgtacagcgggctgctgcccgggcattcgttgaccgagctgcgcctgcgcggcctggcgctggacctgcagcaggatgaacacggccgctggtcggtacgcgggctgccgcagtccgacaatggcggtgatcccctcgatgcactgcgccggctgggcgagctgcaggtgatcggtggccgcctgagcgtgcacgcgccggcgctgggcatcgacagcacgctgccgcgcatcgatctgcgcctgcgggtcaatggggatcggctgcgcgtgggcgtgcgcgcctgggcgcagcccgaagcgctgccgctgaccgcggtgctggacgtggaccgcgcgcgcggcaacggcgaggcctggctgggcgccgacccggtcgatttccacgcctgggcgcccttgctggcggctggcggcgtgcgcctgcgcgagggcaagggtgagttgaacctgtggttgaccctgcgcgatttcgcgccggtggcgctgaccacggattcggacctgcgcgacgtgcgcatcgatggcgcaccgatacccggcatggcggcgccgcagctgcagctgcagcgactgcaggcccgcctgcgctggcagcgccaggccgagggctgggcgctgcaggtaccgcggctgcggctgaagaatgaagacggcgagcagcgcctcgatggcctgcagctgcaggtcggcaaacagctgcgggtccgttccggcgacgtgcaggccggcatcgcactgcgtgcgctggccctgagtgatcgccttgagccgggcctgcgccgctggctgttcctgtccaggccgcagctggacgtgcgcgcgttgcagctgtcgggcgaacgcgatggcccctgtgggcgcagggtgaactgcagtcgctgggtttcgccagcgtgggcaactcgcccggcctgcgcggcctgggcgggcgctttgaaggcgacgccgacggcttcagcctgcagctgcaaccgcaacggcagctgcagttcgattggcngaccggcttcggcgtgcgccatgacctgcacctggctggccagatcgtgggctggcgcgacgagggcggcggttggcggatcggaacgccggcgatgcgtgtggaaggtaccgactacgcggccgacgtgcgcggcggggtctggttccagggcgacggcacgcggccgtggctgcagctggccgcgaagctggacgacgtgccgatga

SEQ ID NO: 505774 - DNA, 615 bp, Stenotrophomonas maltophilia
atgaacggcgataatgagcagtatttttccgaaccgcccccattcatgagccagaccgccgaaacccttgccgcgcttgacgatcgcctgcgcggcctgctccgcgactacgcgcgccgcgaacccgcccacgacgccctggctgccgaattcggcacattgctggatgatccgcaggatccgttccggcgtgagcggctggctggccacttcaccgccagctgctggctggtcagcgccgacggccagcgcctgctgctgacccaccatcgcaagctgcagcgttggctgcagctgggtggccacgccgacggtgaccgcgacctggcccgggtggcgctgaaggaggccgaggaggagtccggcctgagcgggctggtactggaagacccggccatcttcgatctggacaagcactggattcccgagcgcaaggacgtgccggggcactggcactacgacgtgcgtttcgtgatccgggcgctgggtggcgaggcattcgtgctcagcgaggaatcgctggacctggcctggcggccggtaaccgaggtcgcggccgacccggcgtcggatgaatccatgcagcgcatggcgcgccgctggctggcacgttga

SEQ ID NO: 505775 - DNA, 1809 bp, Stenotrophomonas maltophilia; identical to SEQ ID NO: 502429

SEQ ID NO: 505776 - DNA, 129 bp, Stenotrophomonas maltophilia
atgagtacggtgagacggacaatagccaacgcggcaatccgcgtagggcaaggactgttttttgcatccgtggtcggggccatcgtgaccctggcggtgatgctggtactgccgttcttaaagcactga

SEQ ID NO: 505777 - DNA, 138 bp, Stenotrophomonas maltophilia
atgagggccggtctcctgttccgctggggcagcgcgtggattggcgcgcactggtcgccctacaaccgccgctggtgcatcaacgtcctgccgtgcgtgaccttgtgggtcgcgctgtcgggagggcgcgcaccgtga

SEQ ID NO: 505778 - DNA, 189 bp, Stenotrophomonas maltophilia
atgaccaccgaaatcaccgtgacgccgagttggcgtgaggttctgatgcccctgctggccgtagtccagcatggcaccgccgaaggtcgccacctcgccatcaaggagctggaacgcatggcgactgcggccgacaggtggagcgactactgccgcgtgcggcccttggaaccgagggctgtgcgatga

SEQ ID NO: 505779 - DNA, 579 bp, Stenotrophomonas maltophilia
atggcacgcaagcctgccgcactgctgacccgcgaggaactgatggcgatgctgaccgctttcgtcaatcagcgccccggcttcgacccgtgcaactacggcgacgcatcgagctaccgcagcgaccagcgcaccgcccagcggcagcgcagcgacgcactggaaatgctggccgcgattggctggcgcgagtcgatcaccgcgcacgacatccgcaaggcgctgcaaagctcggggcggctgcaactgcgcgacgacggccgcctggactactgcaccggccagtattggccgaccgagttccgcgcgggcgtctgccgcgtgctctcgcaactgctgtgggactactggcgcgagaactcgcccgccgagctgcgcgagcggcacgacgggagctggggcaatcacaacccaaccgactacagcgattcctgctggggcgtggaggacaacggcgaccatgccaacgtcatcgctaatgacctggccctgaccatcggcgctcgcgtcaattgggacgacgtgatcgaggtgcccgcgcgcaccatcgtcctgcgcgctccgaaggtggccgcatga

SEQ ID NO: 505780 - DNA, 441 bp, Stenotrophomonas maltophilia
atggaactgcgcacctacggaacccgcaacgtgttcctggcacagccggggcgctatcacgaacaactggcggcgaccgcgatgacgccgcagcaagccgaggagttcgccaccgtggtcaaccgcgcaatcagggataccgacttcgaccccatcgacctcgcgcagttggcgagcgggtggacgtggcccgagccgatgagcaccgcgccgctgggcattgaggactccgaatttcttgtcgaggtggcgcgcatgctgcaccgcctctggcaggaggtcggcgagcagtggagcggcgtttgggcctacgacatcgccgacccgctgggcgggtggctgtcgaggaacggcatcaaccacgagaccaccgatggcgtggcccgcgccgaacagcaggcccgcgcatggatcgccgagggcatgggagccgcgcgatga

SEQ ID NO: 505781 - DNA, 171 bp, Stenotrophomonas maltophilia
atgagcgacaacaacccgatggaggacttgcagatgcgcaagctcgccgccgagattcgcaagatcaaccgcgaaagcgaaaagctgatgacggagacccgctggtatccgctcgcggtcgctacggcgctggtcacggccatcatcacgattaccaagctgttcctgtaa

SEQ ID NO: 505782 - DNA, 411 bp, Stenotrophomonas maltophilia
atgaagtcggagggtctgcgcctggtggcctacctgtgccccgcagacaagtggaccatcggctacggccacaccggcagcgacgtgaggcccggcctccgcatcaccgaggaacgcgctgtggagctgctggaggctgacctctccaaggccgctacggtcgtccgtcgatacgtgcgcgtgcccctcagcgcgccgcaggaagccgctctgatcgacttcgtgttcaacctcggcgagggcaacttcgccagctccaccctgctccgcgtgctcaacgcgggcgactacgcggcggtgcccgcacagctccgccgatggaccaagggtcgcgtcaagggcgtgctgacggacctgcccggcctcatcgaccgccgcgaggcggaagtcaaactctggaactccaagtga

SEQ ID NO: 505783 - DNA, 714 bp, Stenotrophomonas maltophilia
atgaaccttcgcgcatgcgcggtgatgctggcactggccggcgcttccgcagtacttccggcctctgctgcagtaaccctgcagggcacgcgggtgatctatgacggcagcaagggcgcggtgacggtgaacgccaacaaccgtggcgacaaggtcgccctggcccaggtgtggctggacgatggcgatgccagcgccaaagccggcagccagaagctgccgttcgtgctgacgccaaccacgcgccgcattgatgccgggcatgcgcaggcgttccggctgacctatgcaccgatggccggcgcggcgctgccagcggaccgcgaatcgctgctgtacttcaacctgctggatattccgcccaagccggagaatgtggaaggcaagaacctgctgcagtttgcggtgcgcacgcgggtgaagctgttctaccggcccgccggcttgccgggccatgcgcgcgatgcggcagcggcgctggaatggcgtgttgaaggcggggcactgcaactgcacaacccgagcgcgtaccacgtgacactggccaacctggtgctgcccggtggcaagaccatcgaagtggacatggtgccgccgggtgagcgcatcagcttggccgttccggctggcgcaacggtgccggccacgctgaaattccagtggctggatgactacggtacggcgcgcgaggccgaggcgaagatcgcccgttga

SEQ ID NO: 505784 - DNA, 510 bp, Stenotrophomonas maltophilia
atgaagaacctgaagaccccgatggcgctggccatcctgctggccgctgccccggccgtgaatgctgctgatctgaccatcagcggtgagattgttgaaaccacctgcaccgccaccatcaacggcggcgtggcggtgaccatgggcaagatggatcttgaagacctgaagggcagcgatcgcattggccgtcgcgatctggacgtagaagtggcctgcccgggcgccagtggctcgcacgatgtggcggtgaagttcagcggcccgactactgccgacggtgcgctggagctgacggccggtggtgccgcaggcgtggcgtacaagatctttgatagcactgatacccagctgaagatcaacactgcgccgacccagttcgtcaacgtcaccgatacggcaccgaataccgtcaagcacagcgtctggtacaccaagacgggcgctgctgatgatgtggtggccggcgcggccaacgccaccgcgcagatggacatcgtctacaagtaa

SEQ ID NO: 505785 - DNA, 2556 bp, Stenotrophomonas maltophilia
atgcgcctgtcttcctctccccctcaaagcgccacgcagtgttccctgcgccataccgcgctggctgtagccatcagcaccacgctggtgcttgcggctgcgctgccggcgcacgcgcgaccgggcggcgaagtggaattcagcgagggcttcgccagtggcttcgtcggcgaagacctggcgcgtttcagcatgggcaacccggtcgagccgggccgctacaacgtcgatatccacctcaacggcgagttcgtccgccgcgatgacatcgacctggtggcctcggatacaccgcatatcgcgcagccctgcgtgccagcacacctgctgctggcgttgggcctcagcgataccgcccggcaggccgtggaagcgtcagaaaccccggagtgcgtcgatgtagaggccgcaattgaaggcgcgcgcgtgcgctacgacgacagccagctgcggctggacatctcgctgccgcaggtggcactgcagcgccaggcgcgcggcttcgtcgcaccggaactgcgtgaccacggcatcaccgccgccttcctcggctacagcgtcaaccacaaccgcagccaaggccagcagaacacctacgcgggcatcactaccggcctcaacctgggggcatggcggctgcgccaccgcagctcgctcagccacagctcgcagggcacgcacttcaccacgctcaacagcacgttgcagcgcgatctgccgcgctggaacagccagctcacgctgggccaggccaacaccggtggcgaactgttcgacagcgttggcttcaccggcgtgcgcgtagccaccgatgaacgcatgctgcccgattcgctgcgcggctatgcaccggtggtgcgcggcgtggcgcagagcaacgcgcgcgtcaccatccgccagaatggcgcggtgctgtacgaaaccacggtggcaccgggtccgttcgccatcgacgatctctaccccaacgccggcagcggcgatctggaagtagcggttaccgaagccgatggccgcgaagagcgcttcaccgtcgcgttctctgccgtgccgcaggcgctgcgcgaaggcagccagcgtttcagcgtcaccgccggcgagctgcgcaataccgggctggcgcagaacgcgctgcgcttcaccgagggcacctacgcgcatggcgtcagcaaccgcgtgaccctgctgggcggcgtgcaggtagccgagcactaccaggccggcctggccggcgcggcgttcaacacaccgttcggcgccatcggtgccgatatcacccatgcccgcgccaacgtgccgggcctgccggcgcagagcggtcgcagctatcgcctgaattaccagcgcagcgtggcgcgcaccggcaccaacctgggcctggccgcgtaccgctacagcaccgaaggtttccttaccctcaccgatgtgtcgcagctgtcgttcgaccgcccgcaggcggccgatgcgttcgtcatgcgcacccgccagcgcttccaggtgaacttctcgcagcgtatcggccagcgcagccagctgtatgtcagcggcggccacgtggcctactggaaccgccccggcaagcagaacgatctgcagctgggtttccacagcagctaccgcagcgccaactacacgctgtctgccacgcgctaccgcatggccaacggcgcacccgatacgcgcctgtcattcatgctgagcgtgccgctgggtcgtagtggcaacgcaccgcgtgccaccgccacctacagcgacagccgcctgggcagccagcagcagctgggcgtcaacggcaacctgggcgaagaccgcgcgctgtcctacagcctgtccggcaaccgcggccaaggcagcagcgggtacaacgcctacgccagctaccagggcagccatgccgatctcagcgccggttacagccacgccagcggcggcagcagcttcaatgccggggccaccggcagcgtggtgttgcatcggggcggcatcaacctcggcccgtcgctgggcgaaagcttcgcgctggtggaagcgcagggcgcgcagggcgcgaaggtaggcagcggccgcaccgttaccgtggccggcaacggttatgccgtgctgccctacaccagcccctaccgctggaaccacgtgcagctggataccaccgatctgccgctggaagtggacgtgcaggccagctcgcagcgcgtggcgcccagcgccggcagcatcgtcaaggtccgcttcgaggccagcaacgcgcagctgtggctgattgacgcgcgcgatgccgagggcgagccgctgccctacggcgcaacgatcaccagtacgcaggggcgcgcgctgggtcaggtcgggcagggcggtgtcatcgcgctgcgcggcgaaccggccagcggccaggtgcaggtgcggctggcgcctggcgggtcgtgccaactgcaataccgcatgcccgatgcacccgacagccatggccagtactggtcgagcgcgcgttgcatcaaccccgcgccgggcgcattggccgaccaggtttccccttcatccccaggagtatccccatga

SEQ ID NO: 505786 - DNA, 507 bp, Stenotrophomonas maltophilia
atgaatcttccgcgcctgatggccgcgctgctgttgctgggcaccgccgccaacgcccacgccgatacggccaccatcaccatcaccggtaacgtgctgcccggcacctgcaccatggccaatgcggttgttgcgctggacgatatcgatgccaccgatctcacaccgggccatgacaacaagctcacccccactacgctggagttcaccggctgcgtaggtgtcaccagcattgcgctgggctttgcaggcgtcgacgaccccgaccacgatggccattggaagaacggtgccggtaccggcgctgctagcggcgtggccgtggccctgctggatggccgcagcggcagcacatatctgaagaagggagcgagcaagactgtcgccgtcaatggtgccgctaccgccacgctggatctgcgggccgggtacttccgcaccaccggcaccgtgttgaaggccggcacggtcagcacgcagatcaccgtcacggcggattaccggtga

SEQ ID NO: 505787 - DNA, 876 bp, Stenotrophomonas maltophilia
atggtggatctgacggtgaacatcaccgccgccgacgggccgggtgcagtgcgcgtggtcagtggaaggccaagctggatcagcggttgcgatgtccgcctcgtgcaaccggtgaccgtcgcgctggaaagcacgaacctgaccccggccggcacggtggattaccgcggcaagacctatgtaacctacgaacaggggccgagctcgccgctgttcttcttcccggtgaacgtgaaaacgtccgaccccggcaatagcggcggctacgaactggtgcccgccgtgcagggaaccggtacgccggtcgacgccgtggtcggaaccaacgaccaggtgatgacctacccctatgtgggcgtggtggtacgcatgggcatgcagtcgcttccggcaaccctggtgggcaccgaggtggtgcagcacacccgctttccgcacgccatccgccaccagctgaacgttacggtgaacgtcacgccggcaacctgcgcgctgctcgatgccgccgtgcgcctggacgatgtctcggctgatcggctgcctgctgcgggacaggcaacgcccgagcaggactttgccgtcaccctgcagtgcaccgcagcgggcattccggtaaccctggcactgaccgatgccaacgaccctgccgccacgggcagcctgctgcagccgacgtccaacgccaccgcgcgcggggtacaggtggagctgctgcgggccggcgtgccggtggtgctggggcagccgtggaaccacggcgtttcgcgcaatggtgcgcagtccatcggcctgcaggcacgctatgcgcgggtggcgggtggattccagcccggcgccgtggaagggcaggcgatcctcacggccacctaccgctga

SEQ ID NO: 505788 - DNA, 1035 bp, Stenotrophomonas maltophilia
atggcctccacctgggatgtccacatgatccgcttcgcttcttcctatccccgttgctatgcgttgccgctggccatgggcctgctgctcggcacgctgtcactgcacgcgcaggcctgtgcggggtttggccaacgggccaatctggtcatcaatgaagaagtggtcgacgaccaccggcccggcatcgtgctgagcaactggatcggcttctactcggccaacatcgcccaggtgcgcggctgcactgaagatgcgctgcccatggagatcagtcccagcttcgccggcctgactgcggtgggttccgtggaatatcaaggcgtgacctacgtgacctaccaggtgagtgccacctcgccgctgctgatcttccgccacttgggctaccccggcggtggcagcggcggttccggcttccactacacgccgattaccgtaggcacccgcgccgccatcgaggggctgcgccggggcagcaacattgccatcaactcaacgttcaacgtcgccatcgtgtcccgtggcggcagcatgcagagcgccagcgcagacctgggcatggccaccacgtggctgcgcgaccacccgggcttcgtcatgcagcaccccgccagcgtcacgctgacggtgaaggcatcgacctgcgatctgtctgacgcaagcgccaaactggccgatgtaaacgccgcagacctggcagtgccgggcgatttcagcgccgtgcgccaggtgcgcgtggcgatggcctgcccgcatgcgggcgtgccggtgaagctgacgctgaccgatgccaacgacccatcgaaccgcggcagccagctggcgcccaccgccaatgccacggccagcgcggtacgcgtgcaacttctgcgtgatgacctgccggtggagttcggccagcagtgggaccacgggctgtccgcctctacccagcatgacgtaacgctgcaggcgcggtacatccgcaccaccggcacgtttgcggcgggcgtggtcgaaggccaggcgatcctgaccgccacgtaccgctga

SEQ ID NO: 505789 - DNA, 411 bp, Stenotrophomonas maltophilia
atgagcgcccatcgctacccctttctgttcgccaccctgggcgaagccgccacaggcctgcccgacgaactggcccgcaccctggaaaccacattggccagcctgcaggccgaatccgcccacggcgggccaacgctgctcagcacgctgcgggatatccacgaagtggatgcggccgatggccagccttggccggtgcagggccgcacgcagagccagcgctgggcgttggcccgaattgatcgtgcaagcgcaggactgacgttcctgctggaactgctgcaggccagcgaacgtgtgcgcgtggatggcgaggagggccagtacctgggcgacaacggccgcgaggcgctgctgctggcgtgtcgcggcttgtgcgaatacgtgggcttgcaggtgcacgcggcctga

SEQ ID NO: 505790 - DNA, 630 bp, Stenotrophomonas maltophilia
atgcgtatgtcagcagcctcccttgccctcgctccctgcctgctgctggccgcccaggccagcgcccaatccaccgaccgtgacggactgtatggtttcgtcggcgtgggctcgcacagcgtcagcattccggcaagcaacgtgaaaccgcaatacaagaacagcgaatggaagcagagcaagatcgggttccacactggcgccggctatcggttcgacgaccacttcgcgctggaagcggccgtgttcggccagggcggcggcagcaaggctcgcaagcccacccaggccggtgatacccacgtgcgcagcagcagccgtggggtgacgttttcaggcctgggcctccttccgctgggcgagcgcttcgaactgtttggccgcgtaggcgtcggcgcgatgcgcagctcactcacggccaccactgttgatttcgatcacaaggcccaatcaggcacgttcgcactgcagtacggtctcggtgcaaatctccggctgggagatcgcagtttcgttcgcacggaatggacggtactgcgcccgactggcaagagcccctcggcggccacgctgggcggcgaacgagtgatgacctcgcagttcaacgtggcctatggcctgcacttctga

SEQ ID NO: 505791 - DNA, 687 bp, Stenotrophomonas maltophilia
atgacccgactgcttctggtcgaagatgatgatcgccttgccagcctggtgatgcgctacctgcgggggcacggcttcgagctgcagcgggtatgcgatggcgcaagcgcgctggatgccatcatcgccgatccaacggatatagtgctgctggacctgggcctgcccgacatggacggtctggatctgtgccgtgccatccgccccggttacaaaggcctgctgtgcattctcagcgcccgcgccgacgacatccaccaagtgctggggctggaactgggtgccgacgactatatttccaagcccgtggaaccgcggctgctgctggcacggctgcgcgcgcatctgcggcgctcgcagagcagtggcgaagggaatgtgctgctgtttgggcagctgcgtatcgatctgtcctcgcgcgatgtcctgttggggcaggagccggtactgctgaccacctctgagttcgatctgctatccatcctggccagcaatgcgggccgcgtcctcagccgcgaccatctgttcaagcagctgcgtggcatcggttttgacggtatggaccgctccattgatgcgcgcatttcccgcctgcgccgcaagctgggcgataccgatctggaggccacgcggatcaaaacggtacgcgggcagggctatctcttcagtcagtccggctggcaatga

SEQ ID NO: 505792 - DNA, 1296 bp, Stenotrophomonas maltophilia
atgaagctgcacagcccagggccgcttcggctttacgcacgctactgtgcggtgttcctgctggcgcaggtggcgctgttgtacgcgggcaccgggatgtgggcgcggtgggcgcagaacgcacatgagcagtccgagcatgcggaagcgcgccgggtgcatgcgatgctggccgagcgtctgctggcccacccggacggcgacccacgtgcattgctccgggccatagaaaacgagacgggctacccgctgcagttgcttgcgctgaatgagcttccaggaacgatggcgccggatgaccgccgtcgtctgcagcggctgccgggtaccgtggtgctggagaagggcaggagctaccgcagattgggtacaggcgactacgtgctggccgtgggcgattggaccgacggaccggtggaggtggaagggcagttcacgtggatcgggttgtggctggccctggccactgccgtggccgtaccgctctacttcctcatccaccggctttggcacgacatccgtacgttgcagcgggcggtagggtacctgcgtgccaactgcttcgaccatccggtgccaccgatgcgcactgcgctgctgaagccgctggcggtggcgttgcaggacatggccgagcagatgcgcctgctgctggatgggcagcggttgatgggccaggcgatggcgcatgagctgcgcacgccgctggcacgcatccggttcaccgccagcctgttgcaggccgcacgcgaggatgcgcaggagcatgacgtgttgctgcgcgaggtggacaccgatatccagcacttggatagattgagcaccgcgggtatcgagtacatccgctttggtcggatgccgctggttgatcgcagtgaggtggcgttgcccgcattgatggacgcggtagtggcgcatgtgcaggctcgcacagaggtggtgattcgccaccgctgtgctcccgggctggtggtgaatgctcattccgccgcgttggagctggctttgcgcaatgtgctggccaacgcagtgcggcacgcccgtgcgctggtgagcgttcatgcccagattgagagcgcgggagtgtgcatccgggtggaggatgatggtgcgggtattcccgtcgctgaccgcgagcgcgtattcaagccctatgtgcggctgggtacagccggtggaggattcgggttgggcctggcgatggtcaagaccatcgtggagcgccacagtggtacggtggatattgccgattcaggcataggtggagccatggtggtactgcggcttccgctgtag

SEQ ID NO: 505793 - DNA, 2760 bp, Stenotrophomonas maltophilia
atgaaccttcatcccgtccatcccctgtcgcttcgcccgcttgcacgcggcctgctgctggcactttcggcagtgtccaccggcaagaccatgactattcatttccaaccacgccctctgacgcggcgcacgcttgtccagggcctattgcctatcctcattaccctttccatgtcacccgtggcggcgttggccggcacggttgcgccgggcacctcgcacaccgtcaatgaaggtgatgccgctgagaagtggagtgtggaaccaggtgccactctcactctggcacggggggcaataagtggatctgtgaccgcaagaggcgcgacactgatcgccgatggtgcaagcatcaccgatggacttggcctctggctccaggattcctcccaagccacgctggcaaacagcagcatcatcgcgtcagggatgcgcgaaccgcatgcgggcatcattcggtcaggcagtagcctttcgatgcagaacatgacggttgagtcggactacacaggcttcagccagtacgattctgacacgcacgtggatatgaccaacagtactattactgtggcaacccgagcgttcagcaacgagggcggcacgctcgaactacgcaacgtggatgtgatcgcccacggagggggggccagtccggtcggcgtgcaaggaatcctgcagatcggcggcaacctctccgccgaggatctacgcgtgacgtctgccggcgtcggcgtcgagatccgtgcgggtgatgcacaaatgcgtcgatcgacgatcaacagcgatgggataggactttacataggctccggacctggaaatgcccccggcggcgtcatccagctgtccgacagtacgatctccgccggcggtctggcggcatgggtgcacaatggtgcgacgctggagatatccaactcgacccttgttggaggcacgtcctccaacagcagcgccctgcagatcaacgacgccgccgcagcggttcgtggatcatcactgtccggcgctgacgaaggcgtcgctgttctcgctgcatcatcggacagcaccctgcagttacaaggttcgtccgtcagcgcgggaacagggccgggcctctacgcgggcggcaatcgtggaacaacagcattcatcgacctgtccgatggctcactcgtcaccggtgcggttgcgctgaacgcgcgtggcggcggtaccgttgcgctgacagcttccgagtcccatctcatcggcaacctcgttgctgagcagaggacgagcgtttccgcgctgcttgagaacaacagtgcattggttggagcagccagcaatatcgacgatatcaggatcaacgattcccgctggagaatgaccggagacagcgcggtgggacgcctgtcaatgcgcggctcgaccattctcgaactgggcgatggcagcaccttcaacaccttgaccgtcgatgagttcaacgccgatggcacattggtggtcttcaacacggcattgggcgacgacacgtcggcgaccgacaagttggtgattaacggcgatgccaacggccaagccaacgtgcgtgtgctcaatgccggcggcgccggtgccaagaccgaccgcggcatcgagctgatcgacatcggcggcgcgtccaacgcgcagttcgatctggtcggccgtgccgtgggtggccagtacgagtacttcctggtgaaggacgccaacggcaactggtacctgcgttcggaactgaccaccacaccggacccgtgcaagatcgacccgacgctgccggactgcaccccgatcacgccgatcgacccgatcgacccgatcgacccgatcgatcccatcgacccgatcgagccggtgctgcgcccggaagccggtgcttacctggccaaccagttcgcgctggaccagatgctgcgccatcagtatcgcgaccgccagagcggcgcggcggcaacggatggcattcgtggctgggcccgcgtggatgcaacccagagcaagctgggcgccgtgaatgaccagctcgacctgcgcgtggatcgctcgcgcctgcagctgggtgcggacatcggcgtattcgacgatggtcgtggccgcgtgggcgtgatgggtacgctggcgcagtccagtgcctcctcgcgttcgcagctgaccggctacagtgcacgcggcaaggtggaaggcggagcgctgggcgtgtatggcaactgggccaccgatgcgctgtatgtggatgccagcgtgcagcgcggccagttccgcaaccgcgtgcagggcgagggcctggccgaggaacgctatgactcggatatctggcagagctcggtggaagccggctaccgcttcggcatcggccagatcggcaacaccgcgttgagcctgcagccggaattgcagctgatctacaccgatgccaagaccgacgtgcataccgagaccaacggcaccgtggtgcgtgccgccggcaacagcggcctgtccggccgtgccggcctgcgcctgcagggtgaatcgcgctcggcagcgggtgcctcggtcagcccgtacctggcggccaactggtaccgcgatggcgcgggcaacggcatcgccttcgacgacgaagtgctgaaggctggcattccgcgcaaccgctatgaactgagtgcgggggcgcgcgtggaattccgttccggcttcagtgcgtggggtggcttcggtgtgatgcgcggtgaccagggctaccgcgaagccacgggcaacctgggcgttgcctacacgtggtga

SEQ ID NO: 505794 - DNA, 327 bp, Stenotrophomonas maltophilia
ttgaccagctcggacgcgtggatcgcctgtaccggcctggacccgcgtcccaatgaatccggcgcccggatcggcaggcggcgcctgtccaagcgtggcaacgccagcttgcgccagatcctctacatggcggccatggggctgacccgctctaaaaatggcaaaccgctctacaacgccatccgcgaacgcggtcacagcagtactgccagcttcaacatcctggccagaaagctcgcccagatcgcttggggcgtcttcaagagcggccgggactttgatccggccatgctgaaagtgggtcaagcctgcttccagcaggcttga

SEQ ID NO: 505795 - DNA, 633 bp, Stenotrophomonas maltophilia
atgtcagatcatttggccgtcggcatcgatgccgattcaaagtccctggtggcggcctgccacggcaccaagggcagcgcccgcatcaccaattcagtcccggccatcaccaagtggctgtccgctctacctgccaggtctcgcattggggtggaggcaaccaatcgctatcacgagcttgtggttcaagctgcccagaaggccggtcacgttgtttttgtgctcaatccgcgcgatatcaaacattacgccaagggcgtggcctgccgcggcaagaccgactctggcgacgcgcaggtcattgcgcgttacatcgccaaggaggccgacaatctgcacgagcatgtcgcccgttcgcctgcgcaggagcgagtgcatgtgctgcttcagcaacgtgacagcctggtccggagcaagacgaagttgaatctctcgctaggcgcgggggcgtcggagttggccatctttgggggcatcttcgatagcctgaaagaggccattgccctgctcgaccaacagattcagcaactgtgccgcagtggcgaacagcgcgacctgtatcggcggatcatgaccattccggggatcggaccgacggtagcggccttcgtcacccatcacatcacacgatag

SEQ ID NO: 505796 - DNA, 765 bp, Stenotrophomonas maltophilia
atgcgtgcttcagacgaagattccctgcacaccaaagtggcggcggtcaccctcggtttctgggtgatgaagatcgccgccaccaccctcggcgagaccgccggcgacctgctgtcgatgacgctcaacctgggctacgtggccagctcggccatcctgctggcgatcttcgccggcctgctgggcatgcagttgtcggcacggcgcttccacccggtgctgttctggtcggtggtgctggccaccagtaccgccggcaccactctgtcggacctgatcgaccgcacgctcggcctgggctacgccaccggcgccggcctgctggccggttgcctggcgctggtgctgctggcctggcgcatgtcggaaaaatcgatctcggtcagcaacatcgcatcgcgccgcgccgaaggcttctactggaccgccgtgctgttctccaacaccctcggcaccgcgctgggtgatttcctcgccgacgattccgggctgggcttcaccggcggcgcgctgctgatcggcagcctcatcgcactcaccgcactggccagccgcatcaagggcatcaaccgggtcatcctgttctggatcgccttcgtgcttacccgcccgttcggcgccaccttcggcgacctgctcaccaagccgctggaaaagggcggcctgggcttcggcacggtcggctcgtcgctggtgttgttcaccatactcgccacactggtggcactgccgatgctgcagcgtaaggcgcagccagccagctag

SEQ ID NO: 505797 - DNA, 585 bp, Stenotrophomonas maltophilia
atgggaatacagccctcctcatttccccaggcggcagactggaagatcatccatggtctttttgtagccctcaaccaaagcgcatggttcgtggagtatatgccactgaaacgcatcgcagtggcgctgatgatcgtaacgctcccacttgttatcgccggagcacccgcaaagcagagtccccgcttacggcatttgctgatgcgaattccctattgggtccgccaaccgttcgtcgtgtacttcttcttggtggccatcctcgccagtgcggcggcttttggctcactgctcctgctcggcgccacgatgccaggtgttgtgggcgagcgattcggcacttcggaggcgaccaaacacgtcgagcgcctaaaacgtggcgaattcaaagccatttcagagctgtggaaggacgaccagcgacagatgcgaggcgagatcattgttaccggtgcagatctcatcgccctctacgacatggacagcaaggtcatgcgcaccatttccagggacagcattgagattcgcgcgctgcttggactggcggcagacgcgggtgctgactcgacgtcaggctcgcagtaa

SEQ ID NO: 505798 - DNA, 1935 bp, Stenotrophomonas maltophilia
gtggctctgcctgttctggttggcaaatccggaccggtccgcctaggaaagcagctgggcaaaggcggtgaaggaacagtcttcgaggtcgaaggcaagcccgattcggcagccaagatctattcgacggcgatcagcagtgagagagcggacaagctgctggccatggccgctctccggaccacagcactggatcaactcacggcctggcccatcgaggtgctgcgacaatccgatggcaaggtctgcggctttgtcatggccaaccttcgcgcatcgaaggacatccataagctctacagtcccaagagccggttggcggacttcccgcaagccgactggcggctggtggtccgcgcagcgctgaacacggccagggcgttttccgttcttcaccaggccggccatttggttggggacgtcaaccatggtggcgtacgggtgtcgcctgatgcgacggtcaagctgatcgataccgacagcttccagatcacgcatcaagggcggactttcctttgcgaggttggtgtccaggatttcactccccctgagctccacgggaaggcgttcaagcaagttgcgcgaacggccaatcatgacaacttcggattggccgtcctgatttttcagatgctcatgaacggtcgtcacccgtttgctggacgctacagtggtccgggagacatgccaatcgaaaaggcaatcccggagttccgctacgcttacggcaaagacattgcacggtcccgaatgagcccgccgccgctgagcgcccacccggctgcagcgtcgccttgggttgcagacctgtgggaaaaagcgttcggcactgagggggctaggccgaatgggcgtcccaaggcaggagattgggttcaagccctggccaagctagagcagaacttcaaaaggtgtacttcgaggccttcccatttccatttcaatgggctggccgagtgcccttggtgtccgattgagcgcgccggtattgcgctatttggtggtgctgcagtagttattcccaagctcgcctctggtccgttcaaccttgaagctgtttggcgagatatcacgacggcgacgctgcccccgatacaggccatccctcagctgaaggtcgtgccggccgccccccagatgcaagcgtggggccgacgtcgcgctttgtggcaaacctcggggtggcttgtgggcttggcaatctcggtgctgggtattgcgctctcggcggtgctcgcgcctctgtgggcttgcatcgggtgggcaatgggggcgtgggttaacagccgtggacggccggactcggcgcccttggctgtcagctaccagaaggccaaggcccactacgacggcctcgcggcgcgatgggctcaagagcaagccgacacacagttgcgggcgaagcaaaaccaccttcgcccattgcgcgacgagcatgccggtctgcccgcagagcgagaaaagcgttaccgctcgcttttcaacaaccgccatcagagcgcgctgaagcaattcttggataaattcgagatcgagcgcgcctccatacctggaatcggcgcaaccaagaaggccatgctggagtccttcggcatcgaaacggcagcggatgtcagtcgtcatgcagtcctgaacgttccggggtttgggcccgcgttgacggatcgcttgatgaagtggcggcaggacatagaggcgcgattccgctttgatccgaactcggcgatcgatccccggcaggtcgcagatctggatcgaaccattcaaggacgacgggctcaaatcgagtctgatctgatggctggccgattggccattctacaaatgcgacaggccgcgatggctcgccgcagatccttggaggaggctatgcgcgctgcagttgatgttctgtcgcagaaaaccgccgatgccaaggcggctggaattctctag

SEQ ID NO: 505799 - DNA, 810 bp, Stenotrophomonas maltophilia
atggagttgcaggactggcgcgtcgccgcagcgtcctccattggaacgtcccacatcaagcttgggacggattgtcaggacgcctgtgagcaggaggtcttccaagagcacggtgccgtgctccttgtggcgtcggacggtgccggcagcgctttgcgatccgcgacaggagcaaagctggcgaccgcggagattcgggactgcgtacgcagtcattttgacgacggccaaggcattgaacaggtcacccgggacgtcgtactgaactggcttgccggcgtagccgcccgcattgcccacagggcagcttccgatgggctggaggtcagagagtatgcgtgcaccgtggtggccgctatcgtgtccccaacccatgcttgtttcttccaagtgggcgacggcgccattgttatccgcccccgtggcgacgattgggcctacgtgttttggccccaacacggggaatacatcaacaccacagtctttgtcacggatccagtggccgtcttgaacgccgagttttcttgtagtgcaggcctcgtagatgaggtcgctgtgttcactgacggtattgaagcgctagtgcttcatcaagccacccaaagcgtgcattcgccttttttcgacaagatattctcaccggtgcgagcgctaacgagtctgggttacagtgaagagttatcttccaagctggaggcatacctcgattcccccctgatctgcgagcggacggacgacgacaagacgctcctgcttgccagtcgactggggaaggtgccggaggtatcggcgtcaccagaggaggcctaa

SEQ ID NO: 505800 - DNA, 675 bp, Stenotrophomonas maltophilia
atgaatgattttgatcaagtgcctttcggggccagcgattttgccgagaacccggaaaaccgctgtgcttgtttgcttctgttagatacctctgggtcgatgggaggcaagccgattgaagagctcaacgccggactgctgcagttccaggaagagctgaactccgactcgctcgcagccaagcgggttgaggtggccatcgtcacgttcgggcccgttcaaacggtcacagacttcgttacggctgatagcttctatccgccggtcctgtcatgcacgggagacaccccgatgggcgcggcgatcgagcagggcctggagatggttcggcagcgcaaggaagtctacaaagccaatggtgtctcctactatcggccttgggtgtttctgatcaccgatggagcgccgacggactcctggcagcgtgcagctgctttggttcgagaaggggaggcgaccaagaacttccagttcttcgcagttggcgtgaaaggcgcggacatggatatcctcagccagatctccacgcgtgcgccgctcaacctcaagggtcttcagttcagggagttgttcaagtggctctctaactccatgggcgcggtttcccattcgaccccaggtgacaatgtgactttggtaaaccccacggcgccagatggctgggccagcgtgtaa

SEQ ID NO: 505801 - DNA, 681 bp, Stenotrophomonas maltophilia
atggtcacgcccccctcccccgcttcattaccagtttgggcgccgcgaggattcgcggattgggcccctttggccgtttctgccgccgtgatcctgattttggtgacctctttgctcgcgcgcaccgcaagtgatgcaaagtccatgccaaattatgcgatccggaaagaaagcgcagtagaagcatcggcaccgccgacgttgaatggggcaacacccgccctctcgacggttcgggtgggcaccctgcgcttggtgcccgccgctcaactgccgtcgccaaagcagccaactcaagcagacacgcagtgccctcgccccgcattgggcacgctctcgcctcaagccaatgcagcgaacgcagcgggctggcatgtaagtgcggacgagacggtcaacggctttcagtttgtcatggtagacgcaggcgccgagcagaagccaaccggttgcgcggccatcggagccagtgcactggtgttcaatgcccacggcctgattgccatcgcctatgatcgaaacactaagccatcgtcgaggctgggttcgcttaccgtcgaccaatcaagttctgtgcgtctcgggtcgctcagaggggctctcgccgcaatcatggtcagcgatcaggagatcggccttaagcccctggcaacgagcaagcagcgcaggtcatcgaagtga

SEQ ID NO: 505802 - DNA, 210 bp, Stenotrophomonas maltophilia
gtgaagttgccggatgctgcggcgcttgcggagaaggggaagctggcgcaaccgatcaatgcgcgggcgcagcggatcctgccggagagggaggacaagccgggtgtgggctcggcggcgggcaaggtgctgggcgcggcgttgatccctgtggcggttccggtgtttgtgttgagcctgccgttcctggggccggatcactggaagtga

SEQ ID NO: 505803 - DNA, 288 bp, Stenotrophomonas maltophilia
atgtacttccatgaggattggcgcgacccggccaacaaggccaaggtgcatggcagctatgcgctgctgctgcggccggagcaggtaacggcggagcaggccgcacagttcaagctggagcggattgaggtccccccgcgtgaggccaaggccgtggaggagcggtcgcgctactaccttccgatggaccggacccgctacgcgctggcgtttgacccgcctgcaatctttcaaagaagggcggcatctactacagcgcgctgttcgagggcgagggcgagcgggtga

SEQ ID NO: 505804 - DNA, 729 bp, Stenotrophomonas maltophilia
atgaaaagctactacgaatcgatcgtcgaaagaacaacaatctccttgcgcaccggcactgacatcgatattccctcccattttaccgacctaagctcttccgtcatccagtcatgcacattactgcaacatcttcttcagaagataatttacgtgacacatgggtccgagcttcttgcagcaaagcgtacgcttaaggaattccctagcccaaaggccagaatagacttcttgtgctcgttcccctatagcgagcatgatccaattgtactatcggcattcaattatgcgaggtcattatttcgcgggatatacgaactcagaaacgtactttcgcacgaaatatgggcatccagcgaagattatagcgacagcgtcatcttttccagcttggacgaacaggcgagactattaatggccactgggcggatttggcacgtggcagaggcaacaccccaagaagttcatgacgccgcaatccgatttattcggagcgtaaagctgatcaccaacgccaaccttcgtaccgcaatggacgacgccagattgtgcacatggattcttatgcacattgaaggaattctcgaggagccggatcctgcgagaagggaagaagcgcgccagctcttcatccagtacaaaggcacttcacacctcttcgaaggcgtgcaggtcaccaatggaatcctgaattacaattctacaaagagaaaaaccatccatcgttga

SEQ ID NO: 505805 - DNA, 1191 bp, Stenotrophomonas maltophilia
atgagtaactccgatcttgacgacctggcggcagagctggccgagttcgcaccgcctgagaagaaaaatggacgccccgccagcgaggagcgtgtcatcgctggcttcgaagaaatccaacgcttcaccgagcagcacgggcgtgcgccgcagcatggcgaagaccgcgacatattcgagcgcctatatgcagtgcggctcgaccgtctacgggcactcccggattgccgcgccttgcttgagccgctggaccatcagggcttgcttgctggggcgccgaccgtcaccgcttcggcggacgaaactatcgacatcgatggcctggctgccgagctggctgacattccccatgcggacgacatcacggtcctgcgtcatgtccgcaccagcgtcgagaagcgcgctgctgaggagattgagcatcgcgaaaaatgcgaggactttgatcgctatgaacacctgttcaagacgataaagcaggacctcaagagcggtgtccgcagcaccaggagctttctgagccaggcaaaggcaatggaagctatccagcaaggagcctactacatcctcaatgggcagatcgcgtatatcgccgaggttggcgaggacttcaccacgcaatacgatcgacgtgacagtcggctgcgggtgatcttcgacaacggaaccgaaagcaaaatactcttgcggtcgttccagcgcgcgctccatcgtgatgaggccgcgcgcgttatctccgatccggatgcggggcctctattcaatgacagcctagaggaaggcgacatccagagcggcacgatctatgtcctgcgctcgctgtcggaccacccctacatcgcccagcaccgcgacctcatccataaggtgggtgttaccggcggcagggtggaggcgcgcatcgccaacgccgaacacgactccacctacctattggcgaaggtcgaagtggtggcgacctacaagctcgcaggcatcaaccgcacccggatggagaacctgttccataggctgttcgcgcctgcacggttgaacatcactatcaatgatcgcttcggccatcctgtgcagcccgaggagtggtttctcgttccgctgttcgtcatcgacgaagccgtggcgcgcatcaaggatggcagcatcaccggatacatctacgatcccaaggctgcgaagctggtgaaggcatag

SEQ ID NO: 505806 - DNA, 2889 bp, Stenotrophomonas maltophilia
atggtcttcgcccgttgctgcaccgtgttgttgctggcccttgcggtctggcccgctggcgcgcagtcgccaccgatctcccggccgcaggctgccacgccgctgctgatcgcgccggcggctgagcagccggttcaattgcgacaagcccgcatcgaaggaggggtgcaggccggcatcgcccagacccggatcacgctggaattccacaaccccaaccggcgggtactggagggcgtactgcagttcccgctggccgatggccagcagatcagcggcttcgcgctggatatcaacggcgagatgcgtgacgcggtgccggtgcccaaggaccgcggccgccaggtgttcgaggagatcgcccgtcgtggcgtcgacccggggctgctggaacagaccgccggcaaccagttccggctgcgcatctatccgctgccggccggcggcagccggcgcgtgcagctggtgatccgcgagccgttggccttcgccggccaaggctggcagtggacactgccgctgcagttcgccgccggtgcagcctcggttgagctgaaactgcaggcccccggcgcgactactgcgggcacggcacccttccgcatcagcgcgggccagctgcagtggcagggcaggggtgcgcagctgccggcagcccgccaggcacaggtgcaggtggcgccctggcaggacggccattacctgctggcgcagctgccggtggcggccagcagcacgccgcgcacgttgcccagtgagatcgggttgctgtgggacggctccggctcggcgggccagcgcgatcgcacacgtgagttcgccctgctggaccgctatttcgctgcgctgggtgacggcaccgtggcgttgaccgtgctgcgggatcgcgccgaaccggtgcgtcgattccgtatccgcgccggtaactggagcgagctgcgcgcagccctgcaggccgtgcgcccggacggtgccagcgcgctggcgcagtggcagccgcaatcgagcgtgaaggaatacctgctgttcagcgatggcctgctgacctatgggccggaacagctgcaggcgatggcgccggatcaacgcctgtttgcggtcagcagcgccggcgcgcgcaccgatgccgtgcgactgcggggttggagtgaggcgcatggcggccgtttcgtcgcgctgggcaaggatgtcgacgcggccgcgcatgcgctgctggcgtcgccgttggatgtgcaggtcgatgcggggcgcggcgtgcaggacgtggtcatcgaccgtcgcagtgaagcccagggttggctgtggctgcatgcacgactggcagccgacggcgtgccgatgcgggtgcgcgtgggtggcggcgaatggcaggcgctgccggccacgcagaaaagcgatgacggcgaactgctggccggcctgtgggcgcaggcgcgcctgcagcaactggccgtcgaccgccgcggcaaccgcgaggccatgcagcgcctgtcgcagcagtttggcctggtcgggccggatacctcgttgatcgtgctggagacgctggaggattacctgcgctatgccatccgtccgtccggcaagctgcgcgcggactacgatgcgcggttcgcacggcaggtgactgaccgcgctgctgcagatcgcgagcgcctggaccaggtggctgcgcgctggaaggagcgccagcagtggtggagccgcagctggccgaagggtgcgccgccgcgggccaaggaaacagcgctggacgttgctgctgccgactatcctgccgagtcagcgccgatggcgatgctcgtcgcaccggcgcccgcggcaccgcccgcgcctgcaccgatggccgcagcggcagaacagcgcatgcaggccagcagcgcacgcgcgcgtcgtccggcgcccgcgtcggagaatgcactggattcgattgtggtcaccggcggctcggtggatgccgctgcagccgccaacgatggccagctcggcatccggctggcggcctggcagccggactcggccgtcgcccggcgcccgcgccaggggccgccgtcgcagctctatgaccgctatctggccgagcgcgatgcccacgccgacagcagcgcgttcttccttgatgtggccgacctgctgctggagcagggccagcgcgagctggcgctgcgggtgctgtcgaacctggccgagatggagctggacaaccgccacctgctgcgcgtgctcggttaccggctgatgcaggccgacgcgcccgcactggcggtgccggtattcgagcaggtgctggcgatgggccaggaggagccgcagagcttccgcgacctgggcctggcactggcagcggccggccagccgcagcaggccctggcgccgctgtaccaggtggtggtgcgtccgtgggacagccgcttcgacggcatcgcgctggttgccctggatgagctgaccaacctggtggcacgcagcacgccacggctggatacctcgggcgtcgacccgcgcctgctgcaggcaatgccgctggacctgcgcgtggtgctgtcctgggatgccgacaacagcgacatggacctgtgggtgaccgacccgaacggcgagcgcgcgtactacggcaatcgcctgacctaccagggcgggcagatgtcggaggacttcaccggtggctatggacccgagcagttctcgctgcgcaacgccaagccgggcaggtacaaggtggaggccaactacttcggcagtcgccagcagctggtcaccggcgccaccacgctcatgctgcgcctgaccacccactggggtacggccaagcagaaggaccagatggtgacgatgcgccttaaggatcgtgccgaaaccgtgcttgtgggcgagttcgaggttcgttga

SEQ ID NO: 505807 - DNA, 4746 bp, Stenotrophomonas maltophilia
atgttggaacgactgaagaccatttcgtgtgccgcactggcgatgatcgcgctggggagcctggctccttgggctgcgcaggcgcaggaggtgcagaagaagtgggagagctacctgtcgatgggccagccgcgagccaccgaagcggcggtgcagaaggacatcaagtcgctcttttcccagtacgagaaggacaaacccttcgattggcatgtcaaacgccaacgcgtccttggaaagaaggtcatctacgattaccgggtgagacccgagaagatcgttactaccgactgggtctacatccactcagggcaggagtactcatccgaagatcagattcgtagcgtgatcctcgctacccgcgtcagcgacccgcagtgcccggcgacttcactcacggaggatccttgggtggagctccttggacttggaaggggcgacgacggtagcgtcaccaacgaggagaaggatttccattacaccttgaacttctatcatcagagcacccaagaatgctcgtcgatagtggggtgggagcgtgtgcgccgggccagaacggcgctttgtccgaatcgaccgtccctgacgtggaatgaggctctgcagatgtgctcactggtccagcaggacgagccgcacatgtcgcccatactctcctacacaagcgcgccgctgccgccgcagcagtgtcctgttggtaacccgtgtgatccgaccactggcgataaatcccagcctgagccagatttcaaccttggatgggtgagcttccaacgccactatcactccctgacaagcacggcgggcggcgcgttgggcacgggctggacccattcccacaatctgcgccttaccgcaggcgtagacgattccaccttccctcccagccccgaactgaaagttgggctgatcggcgccgatggcgggcagaccgcattccagaaagtgggagccagctacgaagccatggacggaagcggcgatcgcgcggtccagcagggcaccaactggcaactttcacgtgccggagagcgcattcattttgatgcctctggcttgatgcagcgccgcgaatttgaagacggaacgtcgctgacctatgcacacgacagccgtggccgcctgctcagcatcacccattcaaccggtcggcgcgtggacgtccagtatctcgcgccgggtgacgattcgctgatctcggccctggtgatcgccggccagcctgtggtgagctacgcctactccccggccggggaattgatcactgcgacatatgcagacggtgccagccgtacgtaccactatgaggacgcccgcttcccgggttacctgacgggcattaccgccgaagacaaccagcgctacagctggtacggctatgacacgcaagggcgggtcacctgcagccgccattccggtgattgcagccaagccgacgtgggcattgatggcgtgcgcctggagtacaccccggcgggcactaccatcgtcaccgatgcactgggcaagcagagcacctacgcattgaccgccagcggcgccagcggccttccgcgcaaggtcaatggcatcaccgagagcaacggcagcatcagtcgcacctacctgcccgagggcaccgatttccggcgtcggctgcagtcggtaaccgatcgccgtggtgttgtcaccagctacgcctatgccgaggccagcgatgctgccgcaggcgccgtcagcgtgaccaccaccaccgaagcagccggtactccagaccagcgcgtcagcgaaacgcgcgtggccatggacagcaatcggctgatccagcagaacgtcggcaaccgtgagatccgcatcgcgcgcaatgcgcgcctccagccaaccaccatcaccgtgcgcgacatggtgaccggtgacacccgcgtcaccacgcagacctactgtgaggccgaagggccggagtgcccgctggtgggactgctgcgcagtgtggatggcccgcgaagcgatgtggcggatgcctccacctatgcctactacgctgcggacgacgcgggatgcgcgaccagcggtgcctgcagctatcgcaagggcgacctgcgcagcgtgaccaatgcgctgggccagacggtcgagaccctggcctacgacgcactcggaaggccgctgtcgataaaggacgccaacggcgtggtcaccgattacacctaccatgcccgtggctggccgacctcggtcaccgtgcgcggtgccaccacagccgaggaccgggtgacccagatcagctactggccgaccggccaggtgcaacaggtcatcgagcctgacggcagcagcgttacctatgtctatgacgccgcccagcggctgacggatatcgccgacaacgcaggcaacaccatccactacacgctggacaacgccggcaaccgcctcaaggaggacacgctggatactggcggcaccctgcgccggaccctggcacggaccttcaacacgcttggccagctgaccgcattgaaggacgcaggcaatcacgccaccggcttcgcctacgatgccaacggcaacccgcagaccgtgaccgacgccctgcagcgcgtgaccagccagcagtacgatccgctcaaccgactggcgcagaccctgcaggatgtcggcggcgtggcggcggagatccgcagccagtacaacgcgctggaccaggtcacccaggtcaccgacccgaaaggcctgcatacgacctatgcctacaacgggttcggtgacctgaccggtcaggtcagcccggacagtggcgccagcagcttcaccgtggacgccgccggcaaccgcaagacggccaccgatgcgcgtggcgtcaccgccacctatcactacgatgcacttaaccgcctgatcggcatcgcctacccggaccccaatctggacgtgggctacagctatgacgtcgcgccagcggtctgtgccgccgacgagcgctttgccaagggacgcctggggcaggtgctgcatgccaatggcagcacccagtactgccatgaccgcttcggccaggtcacccgcaaggtgcagaccgtcaatggtgtggccagcacactgcgctatgcctacagcaagtcgggtcgcctgaccgcgctgacctaccccgatggcagcgtggctgactacgtgcgcgatacccaagggcgcatcagccagatcggcctgacccgccccggccaggtgcgccagatcgtggtgaacaacgtgacctatgcggccttcggcccggccactggctggacctacggcaatggccgccagctgcagcgtccgctggacctggactatcgcccgcaggcggtgcatgacccggccgcaggcggcctgtcgctgggctatggctacgatcccgtcggttcgatcaccgaactgaagaacggcacaggctcgacggtgctggccaggtacgcttacgacacgctgggccgcctgacccagacccaggacggcgcgaccggcacgccgatcgaaacctatgcctatgacggcaccggcaatcgcaccgcgctgaccacctccgcaggcaccgccagctacacctatcccgcaaccagccatcggctgaccgccgtggacggcgaagcgcgcaaccatgacgcggtgggcaacaccaccagcatcggtagcaaggtgttcacctacaacgatgccaaccgcatgaacgcggtgaagcagggcaacgccacactggaaagctacggttacaaccaccgcggcgagcgcgtgctgcgcaccccggctggtggcgctgcacagatcacgttgtacgacgaggctgggcagtggctgggcaactactcggccacgggccaggcgcagcagcaggccatttggctggacaactacccggtggcgctgattaacgcgccaagcgctggagtgccggagctggcctacgtgcagccggatcatctgggtacgccgcgcgtggtgatcgatccggtgcgtgatgtggcgatctgggagtggagcaacaagagcgaggtattcggcaaccagattccgagtgctgacccggatggggatggtgtggcgttcgagctggcgctgcgcttcccgggccagcaggcgacggatgcgagtgggttgttctacaactaccagcgcgattacgacccggcggtggggcggtattcgcagagtgatccgattgggttgatgggtggggtgtccacattctcctatgttgccggagctcccattaccggtatcgatacgcttggattacagcgctccgctgtcaggtacgctcccaatccggtgggcggagtttctcctggtaacgatggatatctcattcatggagacggttatgccagtgggagtgccacctctgagatacctcttttgcctggtcctaggttgttgactgatgcgctagtagcatcattcgtaatctcggcatctcccgggatttggaaggagatgctcggccagttctctcagcggcaggatgactgtcccattcctgggacaactcctgaaggcacgacgaaaggaaacacgaggattgagaagaagcctggtgacttcggaactgcaaatggggattttgataatcagtggccgggcggagtttcggacaaggggggcggcatcagggttgggacgctggaagatgggaggaccatcatcgtgcgacccaattccaaggaaggttcacctacaattgagatccagtctggcggcaggacacgagtgaagattcgctatgtcaaataa

SEQ ID NO: 505808 - DNA, 450 bp, Stenotrophomonas maltophilia
gtgaagcgcctgactgccttctgcctcgtggttgcactggcatcctgtgcggtgcatccgaaccgcaccacgaagtgtccgcgggccgatctcacctacgtcggcaccgagagagtcgacggactgacctacgggcgcttccaggtcacccacaacgctggtcagccgcttcagctgtgggtggatgagagacgcaggttgtacccaaggaccgctcgcgcagagatgaggcgcaccggcgaggatgcctggcggccttacaacgtgatccttgaggaaatcacaccgggagcgatcgggctgtcgatcgggcagggtgaacaacggagcgtcttgttcgacggtgatggcctgttcttacccgggcgatccagcgcgggtgaggagtactccatggtggtacgggatgcagccggttgcgagcatcgctcggtaacgttcattccctga

SEQ ID NO: 505809 - DNA, 894 bp, Stenotrophomonas maltophilia
atggctgatacccccctcacttcgccgcagtcgccggcgacgccgcgttggcggcattactggagtctgatgcgcgctgatcgcccgatcggcacgctgctgctgctgtggcccacttggtgggcgttgtggctggccgcgggcggcctgccgccgctgtggaccctgttcgtgttcaccgccggcgtatggctgacccgctcggccggttgcgtcatcaacgactacgccgaccgctggctcgacccgcatgtggagcgcaccaaggcgcgcccgctggccaccggtgcgatcagcggccgcgccgcgctggcgctgttcgccgtgctgatgctggtggcgttcggcctggtgctgaccctgaacgggctgaccatcggtctgagcttcatcggcgtgttcctggccgccagctatccgtacctgaagcgctacacccatctgccgcaggtctacctgggcatgtcgttcggctggggcatcccgatggcgttcgccgccgtgcagggcgaggtgccgatgctgggctggctgctgtatgccggcaacatcctgtggtccaccgcctacgacacctggtacgccatggtcgaccgcgaggacgacctgaagatgggctcgcactccaccgcgatcctgttcggtgatctcgacctggtcatccagggcgtgctgtacgcgctgttcctggccaccatggcgctggtcggcgtgcgtggcgggctgggcgggtactacctggccggcgtggccgtggccaccgcgctggtggtgtacgagttctggatctgccgcaatcgcgagcgcggtccctgcttcaaggcgttcctgcacaacaactgggtaggcgccgcgctgtttgccggcatcgccgtggacctggcgctgcgctga

SEQ ID NO: 505810 - DNA, 276 bp, Stenotrophomonas maltophilia
atgagttccgcaaagttctacgtaatccacatcattccaaagcccgaagtgtcaagtgacgatataaaggctgtgatgaataaggcgcttgattggtatcaggcgagttctagtttctgggtcgtatacagcacgagtgatgcgaaaaagtggtatgcgcgtctcacggaaagtgttaaagatgaggggttcgtcttcatctgtgagctagacatcggaaatcgcgctgggtggatgaagaagactttttgggagtggctcaacaaggagcgctga

SEQ ID NO: 505811 - DNA, 333 bp, Stenotrophomonas maltophilia
atgctggagcaactccccaccctccattgccgcaacgtatgggtgggcatgagcaaaatcaaaagacctcttcaaagcataaaaaacgagaagcatgagcggcaggacgagaaccagagcaacccagggcaccgacatcttataggcaacgacgcaaacacccacaaccagcactgccagaagcagcgtagttttaccgaaaatacccccatgcaacttaattttcttaatgctatctatagccttatctacagacataaccaatccttgggcaagcaggagtgcacggattatctaaaaattcagctcagcgtttctgcgcttagcggatag

SEQ ID NO: 505812 - DNA, 183 bp, Stenotrophomonas maltophilia
atgtcagctgacaagaccaacatcgtctttgagaactgctcgggagcaccgggagcatccatcaactcgcgctggattctggcggacatgaaccaaaagaagcctgaaagcagcgaaccgcatgaagcgaagaagatcatcagcttccagataaccttcttcaacgcccgtcctccgatttag

SEQ ID NO: 505813 - DNA, 756 bp, Stenotrophomonas maltophilia
atggccgccgccctggcggccgcgctgttgctgagtggccagagcgcatcggcccaggaagccaaccagtcctcccagcaggcggaacagcctggcttcttcaggcagctcgggaagagcttgaaagatgctggcggccagatgattggagtgaagcccaccggcgctaccgcccgccaagcctctgtcaaccagccgatctacaccccggtcagcggggctggaaagattcaaggactcttcaagggtgacaaccaccagctggcccagcagggccgattggagtggccccgggtcgctttgacctaccttgagtggggcacaacgttgccgtgttggacgatcgaggctcggatttggaccagcccctccgcgtcgaccacggagaccttccggagctgctctaacgccgcactgactgaagtcgacgacctgggcgacatggccgagctcaacacggcggcgctctggaaaggccgcgacagcctcaccggcgttcgggtgccgtccaacaaggccaataccggggccagccggtctaccggtcctaacccgcccgcccaaccgtttgtcgtcaacgtcagccgccctggcgtttcggacaaggcggtcgacgtggccctgagggtggcgtgggtttccggattcatccagaccgctgacctgcacccgggcgcgtcggggatgctgacccccttcaaggacagccggatgtggatcgcgggatttaagccggaaggcaaccgggacaggtaa

SEQ ID NO: 505814 - DNA, 486 bp, Stenotrophomonas maltophilia
atggagatggacatccaagaatctctgttgcgcctcttgcgtcccctgggcctccaacgagcggaggccttggcgggcgcgctcgcgcgcgaagccggcgcgtccaaaggccttcacgattcgcaagtgttggcgcgtgcccacgccctgagcgttgcccctgtcgagggtcgattgggcgatctggtttggcaggtgcgccagcgggagcacgatggggcaccgcaagtggacctgcgttggggcttgcatcggctggggttggacgcaccctcacgggcctccacccgggacctggtgcgtgcttacgagaggcgcttggcagaccgtaacgaaccgatggtttacagcaccctggcagagagggtggctgggtccatggctgagcacacctcgctcttccaaggcatggcgatggcggtagaggaggcgcgggctcggcggtcggatgcaaaccggttgcgggagaatgatctggccccctga

SEQ ID NO: 505815 - DNA, 858 bp, Stenotrophomonas maltophilia
atgctctgccaccagaatgcgctcgcctgcagtgctcacatcaaagtcttcaagcttgtgggcacccacggcagcccacgagaaagcggcatcgcgggatgcgacaaacagcttgcgaagggcctctcgatcggcatcgacaaactcgcgaacgatgacctgccccttattaacgtgacgcatcacggccaacgatctcgcggcgaaagaacccagccaccatctgcagccatctgcctgtggggctttccggcgaagcactggacagcgctgttagggatgtcgccacatcgagagcccggtaggctctcccagccactcagcggcctcgatggatcgccgcacacatccaaaacgctcactccaggcactgttggtgcggccgagcgtaagtacgccgatggttgtaagactcaccagagtcaaaaatcgggtgatcagccatgggaaattccaacgcttccgctcaatcggcggaacgtactcatgcgcgcccacgcgtcgctctcggcgaattctgagcgcttcgaccagatgaatgacgctggatttcgtcgaatcagaaaccggcccaaggggcggctaggtcgattcgatcatgcatggggctcgatcttgctcattctgcgatctcatccttgtcggggaagccaccagggaagcaagggccggagccattgccaggcaaagcccacggaccggatcagaccagacacatcatttcgcaatcttggtacaagtatttgccgttgcgcgcccttaagtgctgcgatcacggtcttgagcgcgtggatgagcgaaatgactgttgcctggatctcaagcgtccgactgttgcgacagcctgatagcgtttga

SEQ ID NO: 505816 - DNA, 282 bp, Stenotrophomonas maltophilia
atggctgtgttcgtcgtcacctggaatctcaatcgagagggggcaaactacgacacccgaagggccgcactaattaagcaaattgaaaagtacgcaaacaagagcgatgcgggccttgaaagcgttcgctgggttcaggcaactacagcggaggaactttccaacgatcttctgcagcgcctcgataaaaatgatcgactctttgtaactcagttgcatcgagggtactactacggatatctggacaacgctgtctggaattggatcagtccaaagctgtag

SEQ ID NO: 505817 - DNA, 1128 bp, Stenotrophomonas maltophilia
gtggagaaggaagtttctagagttacgcgtattatttatgaggacttccttcggaaagatgcggacaacaaagttgcgcagtacgaggaggatggctacttcccttcgtacgcaggactctcgcagatcgacgcaagctggcgcttgaacaatgtcaaggagttgatcaagaacatctacattgcggatcccgcgctcttttcgcttggaaagaggcagaccaaggtgctgattcgtctcttggatcgactcgcagtctccaatgagaatgatgcgctttgggaaatcctgaacggagtgcttgatctggaccaggattccgcgagtcggctcgcggcacaacttcaacagacgacgctagagaacatagtcaatacgattgagctcctccagaggcgccttcaaacgatccatgagcttcggcatctgatggacaactactatgcggaagtactcgagactcctgatcttcagaagatcatcgagaatcacacttggctttttgggcctcagtacgaattgctcggcgcagaggaggccaccttcaccaagttggccaaatcaatgagggattccctcagaggagtgggcgacgttgatgctgacgatatcgagggtggggcaacgattcagggcgccaatcgacagcccgacctcttcttggcccgaaaggtgccatcgttcgacaactatggaagaatggtgtatcggtgcgttgtggttgagatcaagaggcccagtgtctcgctaaatgtgaagcacctgcggcaactcgacgattatgcagcgctaataaagaaatatccgtcgttcactagcgaaaacatgcgcttcgaacttcttctcgttggccgcaagatctctgacgcggattcggaaatagcggatcgcctgaagagcatggccgcccgcggcgagcggggattggtgcttgatgatggcaagacgaagcgatatgcactcaactggtacacgttgcttgacggacatgagttggccaaccaagcattaatcgaatccctgcgcctcaagcgcgaagatctaacgggtacccccaaagaggccttgctcggcagcctgcaaggggcctcggctcctcaggtgcaggggggcaatctggcgcactaa

SEQ ID NO: 505818 - DNA, 477 bp, Stenotrophomonas maltophilia
atggcaacgatcaccgtgccgatttggaagccagtcgccaaatacgctgtgaaggcagccttgacctcgcgttttcgggaggagctggacgaggtggccaacaatcgaaagggctccaccagtcggatttttactttggtcgtcctgtatcccgataacaccaacacggcggaccaaaacgcggtggccgtcatgacacaacaggcgccacccaggatgcttgggtatttgccacgggaggtggccgcagaatatcggcagcgcatggctcaggccggctacgaacacatggtgtctgcgtgtgaggcggttctgtccggcgggctggtgaccacggacaaggtttacgactacatcttggaagtggacctggacatgtccatcgacccgcatccggatcacctcctcactcatcccgagatggtccgccataccgctgacccggagttcaagaaggacaccgatggggcatattga

SEQ ID NO: 505819 - DNA, 1875 bp, Stenotrophomonas maltophilia
  misc_feature (1002)..(1002): n is a, c, g, or t
atgagcaaacccaagccctttgacgcgctgggcgacgtgcccggcagcgttgcgccttcccagccggtccgatactggcaccgcgccgttcttgccggtgcattcgtttttggcttggcctacgtggggagcatgggcgttgcctggctcatcccgaatcccgatggctcgctcatccgcttcgccgatgctttgaaaggcggtctggtgaccgcctaccacttcctgaccgtcggcatctcggctcgcgccccggcacgggagttcatcgaactggtgtcctaccatcacccagtggcgacgtggtcccggatcggggtgtcgcttctgctggcggcgggcctcggtctgcgggtgttcctcaaggcgaccgagccggtgagcaacacctggcacctgtccggaccgcggttgttggaaggaaaggaggccgtggacgaagcccggcaccgctcggtaacccctaaagacgccgaggcggatcccttcgccctgtccctccaccccgatctgttgctgtctaaaaagcattgggcgcgccacgtcctgatcaccggctcggtggggtcgggcaagagcgtcatcctcaagcacatcctggaacaactgacgcgaaagagggacgcaaagctgttcctttacgacatcaagggtgatttcacgtcgattttcaaaaggcccatcatcgtgtcgcccttcgatgcgcgctcccacgtgtgggacgtcgccgccgacgtgcggaccccgacccaagcggcggcgttcgccgcctctctcatcccagagggcgacgggaacgccaaattttggagcatggccgcccaggacttgttgattgggtgcgtgcgcgagctccaaaacacccggcctggcgagtgggaatggcccgatctggcggccttggtgcgccgcccggccgcggagatggccgcaggcatgcgcccgcattacccccgcggcgccgcactggtgcgtgacccggagagccaaaccacgtccagngtgctgtcttccctggggggcttcacccgccttatcgacgatctggccaccgcatggcccaaggttggcaagcgccgtttctcgatgaccgagtggatacgggacgactacaacgggcgcaagcaggtcattgttcaatccggaccggacccaaccctgacgaaggcctacatcgccgccatgatcaacgtggccgtcccggatctcattgggccgggcttgccggacgacgagggcgggcgtgggctctacttcgtgttcgacgagctgaccagcgccgggcgcttgaacatcgatcccttgctggcgttggggcgcagcaaaggcgtggtggccatcatggcggtccaggatcactcccaggttgagctggtctacggggacaagaccgcgcaggccttctcgtccctggtgggcacccacgtggtgtgccaagtgcagatgggagccaccagggacaagctggccagccagctcggcaagcggaaaatcgcgtggcgcgggcacgagaacaaggcccaggtccacgaagaaagccgcgcgttggtttccagcggtgagctcaccgaccggctgggtttccgcaaaggcaatcgctacggtcccgagaagtggggcatcgaggcgatcgtgcagatgggcggggacgtgctgttgctgacatggcccgggaagagccatccaacggttcgcgaggggcaggtggccgctgcgtggaccaccaagccagccggacctgaagggccgtcgccggcaacgtccccttcaaacgctggcgcgtcggccttcccaaccaccgccgaaggcatcgatgcggtgcagcgggtgttgaccatgacacccgaggaagtcgacgcgctattctcccgttga

SEQ ID NO: 505820 - DNA, 996 bp, Stenotrophomonas maltophilia
atgcgcgtgatcgccgccgccctgcttgcctgccttccgctgcctgccctggccgcgcccacctacgggccgcggctggagggcttcgactatggctatccgctaaagaccttcgcgctggaatcgcagcgccagccactggagatggcctacctcgacatcgcgccgaagaaggcaccgattggcgtggtggtgctgctgcacggcaagaatttctgcgcggccacctggaaggaatcgatcaagccgctggtcgccgccggctaccgggtgatcgccccggaccaggtgggcttctgcaaatccagcaagcccgagcgctaccagtactcgttcgcgcaactggccgccaacacccatgccctgctgcagcagttgcagctgggcgaggtaccggtgcatctggtgggccactcgatgggcggcatgctggcggtacgctacgcgctgatgttcccgcaggacctgcgcagcctgtcgctggtcaacccgatcgggctggaggactggaaggcgctgggcgttccgtggcgcagcgtggacgcgtggtacgccggcgaaatgaacatcagctatgacagcatccgccgctaccagctggaggtgtactacgacggcaagtggaagccggcctacgaaccgtgggcgcggatgcagtcaggcatgtacgaagggccgggcaagcaggctgttgcatggagccaggcgctggcctcggacatggtgttcaaccaaccggtggtttacgagctgaagcacctgcaggtgccgaccacgctgttcatcggccagaaggaccgcaccgcgatcgggcgcgacctagcgccgccggcggtgaaggcgacgctgggcaactatccggcgctcggcaaggcggcggccgcggcaattcccggggcgaccctggtcgagttcgccgaactgggccattcgccgcaggtgcaggatccgaagcagttcagcaccgcgttgctgaagtccttgaagtcacgctga

SEQ ID NO: 505821 - DNA, 693 bp, Stenotrophomonas maltophilia
atgggcgtccagccggcacctatacaccggctgctccttcaaagcaggattccgtcaatccggaggccagtaattcagctggatatggcaggctcactgttccgcaggggagcgtgctgtctccacaggaatcagggctcagggctgcgaataagatcagcggcaattgatgaagaggtaattatgtctttggcttcgcgcgtgattcttctgatgattacgttggcagctgctggtcacgcatttgcagaagggcgttgcccaccaggccagtatccaatcggtggcccgggtgtcggggggtgtgccccgattccagccgggggggagagtggctcatctgcgcccaggcccaatggccgttggatcaagacgtggggtgccatctctctgtcccccgcgtccggtgacatgggcgcgtccaaggggcatcaggagaagtcggcagccgaggcagaagcccaagagcgttgtgcgcagcatggtgcgaccgactgcaaagtcctgacaacttacaagaaccagtgcgtcgcctacgcgaccgcgcaggaggggcggagggtaaggacgaacacgggggcatcgagcgaaggtgcaacccagaatgtgctggcaacgtgcaataaggagcgcatcggacaatgcaaggtgctttataccgactgcaccgagccgctcttcaaatcttattga

SEQ ID NO: 505822 - DNA, 225 bp, Stenotrophomonas maltophilia
atgcacgaggccgcacttctcaaagctctagggtccgcaatccggctcaggcgaattcagcttggcaagagtcaggagagcttcgccgaccagatcggtatgcaccgggcttactacagcgcgatagagagaggcgagaagaacatcacgctgaccactctggagcggctcgcacatgggctcgatgcggccctgtcagacctctttatcgaagcagatcgatag

SEQ ID NO: 505823 - DNA, 255 bp, Stenotrophomonas maltophilia
atggcctacccccgatcgccccgctggaagctgcacgcccgcagtacgcccttcgtgttcgccttcttcatggccagcctgatggcgctgctgatgtgcctggtcatcaccgccgccaatgccggggtgggcagcggctacctggcgcgggtgctggcggcctaccagatggccatgccggtcgcgttctgtggtgtgctgctggtgcgcccgctggtggtacggctggtggccttgaccgtgcatccgcactga

SEQ ID NO: 505824 - DNA, 636 bp, Stenotrophomonas maltophilia
atgcccgccgcttccgacctgctcgcgttcgccctgctgtcgctgggcatggtcctcaccccaggcccgaacatggtctatctggtctcgcgctcgatctgccagggccgccgtgccgggctggtgtcgctgggcggcgtggcggcgggcttcgtcttctacatgctatgcgcggcgctgggcatcactgcgctgctgatgaccattccgctggcgtatgacgcgctgcgcctaggcggtgcactctacctgctgtatctggcgtggcaggcggtgaagccgggcgggcgctcgccgttcgcggtgcacgcgctgcccgccgacagcccgcgcaggctgttcacgatgggctttctgaccaatctgctgaacccgaagatcgcggtaatgtacctgtccctgctgccgcagttcctgcacccggacggccacggcagcgtgctggcacagtcggtggtgctgggcttcacccagatcgcggtcagcctggcggtgaacacggtgatcgtgctgatggccggcagcattgcggcgttcctggccgcacggccgagctggcaggccgcgcagcgctggctgatggggacggtgctggccgggctggcggtacgcatggcggtggaagggcggcgttag

SEQ ID NO: 505825 - DNA, 261 bp, Stenotrophomonas maltophilia
atgagccaggacatcgacaagcacgtggcgcgggccatcgttgaacttgcaatctttttcgagttttcgccggatgatgtattggatccggatgccgccatgcgtgcgctcgagcaattggcctcgacactgcaaatgatgggcgcggagtccagatcttctttgtgctcacagttcaagagcatctcaacggcgtattcaggtgagcgggcacagtttgtagaaagtctgggcgatgccctggggttgatcgaggagtag

SEQ ID NO: 505826 - DNA, 615 bp, Stenotrophomonas maltophilia
ttgagtatcctgaacgtcctgcttagccctgaacggatgctggttgcagttgacactctcgccgaggatgcactcaccggcgccaaatcgtccggcgcgaagttcttattgattccacaacacaacgtggtgcttgcctgccgcggtagcactcaattcttccttcggatctacgcacttatgctgcaggccagctttcgggcggacttcacaatggagcagctagccaaggaactgacattggtgatcgaccagctttggcctgagtacgagaaggcagcccttgaagcaggcctgtcgaggcaaaccctaggcaccgaactggtacttggagggtggtgcccacgcgccggacgaatgatagccaccgcctacgccaagtccaacagcaccgcagcaacggtggtgcaacccttggtcggaggtctggcgtcacccggcgagcccttgcgggccatgcctgacagctttgcggcggatgcggtaattgaggcgggcaggattcaagcggcatggttaaacagcgccgctggccggcaggtcgcaggtggtcgcctgctggcaatcgacctgcgccaagggcgatcggtcgtccaagatcttggacagctctga

SEQ ID NO: 505827 - DNA, 726 bp, Stenotrophomonas maltophilia
atgaagatcacctcagggtctggccgtgtgcatgctggggagatggacgcggtgatctcgccagacgaatactgtggaggcagctatgcctgcatcctcgtacacggcgtggagtctactggcggcgcgctggactggatgacggcgagcccctaccgatggcccatagtcaggactgtggttgaccagtgtgggctatacaccatcagcgccgatatggggggaagcgctacttggggtaactccacgcttctatcccggatggacgaggcatttgcctacacgcagaccttcaaccaggtaaagaaagggaaggtgattcttgtcgggcagtcgatgggtggcctggcaatgctcaattgggccaaggcaaacctggggaaagtggctgcgatggttggcgtgatcccagtaaccaacatgaactcagcgatagccgatgcgttcagatcgcagatcaacgcggcgtacggcggctcctacagcgatgcggcccatggcgccaaccacaacccgcaaatctttgcctccgcgcttgcgggcattcctggacagctctgggttgggagaaccgacgtcatcgcaaggcttgatgatgccaatgtcgtcgcttctggggctccgtccatccaggtgatggagctgaacggagcgcatgacgaatcaaccctagggctgattgatctggcggagatggagaggttccttaacgctcacaaggcctga

SEQ ID NO: 505828 - DNA, 1323 bp, Stenotrophomonas maltophilia
atggccaagaagcgcgtcccgctgcaccagaatccccgcggcttcgttgatgtcgaccccgacgctaccaacggcgcccaggttggggtgaatcttcgcgggcctgatggccagctcctgaccgcggcgcaggtgatcaacccgaccaccggtggcagcggtggccctggcagcatcgcgtcgaccatctggaagctgatcaaggaaatcccgctcaacatccagaagctggccgcactgatcggcgccgggttcgccgttcggaagaacgatggcgaatgggcgctccggactctgcaggaggggactggcatcgacatcgccaaccccgacggcgatgcgggcaacccgacgatcgggctggaggatgtgcctgactctggcgctgggacgctgctggcgatcaccaaggacagcaagggcagggtgaacggaacacggccggccacaatcaccggcaccgcgcagcagatcagcgtggccaacggcaatgcgtcggcagggttgccgaccatttcactgtcggacctacccgattccggcgtcggagccgcgttggtaaagatcacacgggatgccaagggacgcgtctcggggacacaggcggcatcaacgaccgaccttgccgagggaaccaacctctactacaccaacgcgcgcgccgatgctcggattgcggcccagaagggccaacccaatgggatagccgacctggacgccagtgggaaaatccctgccgcccggcttccagctatcgaccacaacaacctgtcaggcctgcagggcggtacaaccggcgagcgctaccacctcacgaatgcccaggttggcgaggtcaacacgtcgcttcaagctgtggtagctggctctggcattctggtgaacaatgccgatccacggcgcccggttgtcagtgccgtagcggaaaagtccggggtgttcgtaggcggtgtagagctgacgtccagctttgtttccacgactccgaccgggaccattaccccgatcaccggaatgaacctatcgtttgtcatgcccgacaggcctgtgcttatctccttcggaaccaccgcgttctatgactcatcgacctcgagcaatctggcggcagtgattcttcgcgttaacgggtcggacgcagcacagctgttcttctctgcagctatcacgaacttctggtcgcaggggaagcagtatcttctctcaggggtggcagcgggtacaactgtgaacctgtcgtggtggctgaacatgggcccaggcacgttcaccgtcttcgggaatccatcggacaagccctacatctacgtggtgaccgtatga

SEQ ID NO: 505829 - DNA, 237 bp, Stenotrophomonas maltophilia
atgaagaagatcgtgccgcggccccggccgttgctgatgctgttgtggctggtgtgcgtgctggctatctccggctgcgcgacgggtgggcgagctgcgagacccagcgtctgtccgacgccgtcgccgccgccagcgaacgtgatgcggccgccgagcgccgagcagagtttgcgggcgctgttgttcgagtcgggcgagacgccgacgaccaactcgcggcctgccaagccgtag

SEQ ID NO: 505830 - DNA, 318 bp, Stenotrophomonas maltophilia
atggcaaagactacagcaaggccgctttgtgtcaacttcccgaagtcgcacccaatctgtgactgctgcgacaaagtcgtttcgtggtccaggatggaggcggttcgcggcgagcttggaacggtcgcgggtggcttcaagtaccagatctgccgggcatgcgccgaggatattcaagctcttccagcagaggagcaggtgatccagtacgcctacgctgccatcagccacgccgagctgtactcgggtgcctacgccaagttcatcgcggactggtttggcttcaaagaccggggcagggcgaaaaaggccgcatga

SEQ ID NO: 505831 - DNA, 258 bp, Stenotrophomonas maltophilia
atgagccggatagtccaatttccgacagcgaaatccctcacgccttgcgactacgtccccaaggagtacatcgaggcagctgttcggggtgaagaggctgggattgccgcagcagacgcgattcgcgctggcgctgatcctgatgtcttctgggtcaacaacgttgatgcggtctttggcgagctggataagcatcccgagtgggggcgcgggttcctcaacggcttcatccagagccttcttgaagaaatcaagtaa

SEQ ID NO: 505832 - DNA, 744 bp, Stenotrophomonas maltophilia
atgaacggcctcatgattgcaggaacctcaattcgtcgcgatgcgcagggtcgttacagtctgaacgaccttcacaaggctgctggcggggagaagcgccatggtccgagctactggctcgacacggagcaagcttcttcgctcatcgccgcaatgagcgataccggaaatccggtatcggtccagcgaggtggagttgagcaggggacctatgttgctgagcagttggtggtcgcctacgcctcgtggatacgggctgatttccatctggaagtcatcaataccttccttgccgccaaaaagagcgtgaggaggcaggatgtcggtatcgctggggaggtggcgcgggagttccgagcgcttacagcgatctccaagcttgcagggctgaagggcaatcaggccctcattgctgcagcgcagggcactgagcgcctcaccggcacaaatcccctggcgctgattgggcagacgcatctgctggctgaggagcaggttcgatacttaaccccgaccgatctcggcaaggtgttcggggagtccgcccaagcgttcaaccggcggctcgaaaaagcaggcttccagagcaaggacatccacggcaattgggtccccacagatgccggtaaggcacacgcggtcctaagcgatacggggaagaggcacgggaatggaacgccgattcagcagcttcgctggctcgtgagtctgcttgatgtaatgcaagagacggagtccgcatga

SEQ ID NO: 505833 - DNA, 159 bp, Stenotrophomonas maltophilia
atgagtgaagcccagatccgcagccagtttcgtatcccggccaaagtctacgactggctgaaggaacaggcggcgcgcgaacatcgctccatcaatggccagctgaatgcggaactggccgaacgcatgaaagctaccgcaacccaggaggctgcatga

SEQ ID NO: 505834 - DNA, 519 bp, Stenotrophomonas maltophilia
atggcccgtaaagttacccaagccgatttcgtcaagaccgctctccggctgccgccagagcttcacgcgaaggtgcatgagttcgctcaggcgtctggccgcacctacaacgcgcagctcatcaccatgctccaggactacatcgaaagggagcaggaagcagccgaagcgattgagcacgggatcgaacaggagaacgctgtgggcgtcagctacggtctgaccgatccgctcgaccgggccgccgtgttgaaggcgctgttgtctccagagcgtacagtcctgcgtcagcgagtcgctgaccttggcggcaaggacgccgtgctgcagttggacgatgcggagatcaagcgccgcgtgactgggccgcggatcaccggaactgatgccgagaagcggtcgtacatgtccaaggcgcttgagacatacccgctaacgagcttgctcaacgacgacgagctggagaagctcgccgagcgcgtcatcacgatccagaaggccatggggcagctgaaatga

SEQ ID NO: 505835 - DNA, 525 bp, Stenotrophomonas maltophilia
atgagcgacgaccaaggatggcgagggaagctggaccgggatgcgcaacggcggatccttgaacgcttggccgaggactatccagagactgtggccgccgatttcttgtacgagcacattgaggcccacaagctgaccgcaaatgtctcctacctgcaggagcatggactgattgaggccaactactacggctcaaagtcgatgggtaacccggtgctgaccgccgccattacccacaaggggatggacttccttcttggcgacggcggcctcaccgcgatattgggcgtcgtcaccatcagaatccacgaggactcgatcaaggatctgatctctcagaaggtcatggcctctgatctgcctgctgccgataagaagcaatacctcgatcagcttcgagagctgcctggcgaagccaccaaacaccttgcgctgaagatggttgatgcgggcctagagaactggcatcgagcacttccactgctgaaaagcattctggcttggactcgagacgccggaacttga

SEQ ID NO: 505836 - DNA, 384 bp, Stenotrophomonas maltophilia
atgagcgacgaccgattcaaaggcaccggagagtttcacccggaaaagtcttgggctcggattcaacaggagaactgggagaggaaggcaagcgcgcctcagccaccgtccctaccgacggccagacgaactgggcctagcaccttctggttatatgttcggtacatcagctatgtgctcggcgcgttgatcgccctgatcgctgtattggccttccatgctcttttccccaaggcccttccagctctggggaccgcggtcctatggttcggtgggatctacgtggtgacgtgcatcatcaccaccaacaagaagctcgacgccctgcacgctgagctgaaagacattcgctacgatctcaatgacctgaagaacagactatga

SEQ ID NO: 505837 - DNA, 231 bp, Stenotrophomonas maltophilia
atgaccgatgacaagttcccctggaacaacggcccagtgagtgcagaggccaagaagttggttgcgaaggccgaagctcacgcaactctggagcggcttgagcgtaaaaacccaatgcgcctcagagactatctgattgttgcattaggagcattgggaatcatcgcgctccccctactcctcttgtctttggccttcgacctgagtggattcctgcgcagcatcttctag

SEQ ID NO: 505838 - DNA, 2211 bp, Stenotrophomonas maltophilia
atggccggtccgttgccgtgggaggagtaccagcagctacaggccaagccagctccacgcgcggcgcagcctgcggaggaggttgggccatggacggagtaccaggacatcccgaccctcggggccgtccaggccctaccgcctgacttctccgaggtcacgagcagcgtggacagcactgctgacggtcgacaggccgatggttggatggccgggccgctgcgcgacgccgccttcagcgcaaggtctgtcctgcagggtgccggaagcctgctgggggcacttggcggcgacgcattcaacagctatgtggtgaacccagtcgcgcgcgccgttggcgtccaagaggctcgcccgtaccgtgacgagctcggcgcactggccgacacgatcggtctcccaaaagcgcagacaagcggcgaccgggtgctgggtgacatcggtgaagcactgaccggtaccggtctgacgctgggcagtggtgcagctctcaatctggggcggccggcagcgtcattggcgtctggccaggccgcactgatcaaccctgcgcgtgctgccggtggaggcgtgctggaacaggtcgctgggaacgcccccaccttgggccagcgtgctgccgacgtgctgaccgcgcagccggtgctgcagacgttgagcgcggcgaccggagctggcgccagtagcgctacgcgtgagtctggtggcggtgcaggcgcacagatcgcagccggggtgctgggcggtctgggcccctctgcgattacttcgggcatcccttctgccgcgcgagggattgtgcgtggcggggaaagcaaccgggtcaacctggaggctgccatccgagacttcgacactctcggaggtgcgtcgcccactgttgggcagggtactggcagccgcttcaggcagggcttcgagaaccttctcggctccagcccgacggctggcggcgtgatggctcgcgcgggtgagaaacagggtgagcagattggtaagggcctgaacgatctggcgcggagcatgtccagcaacccaactgcggagggcgccggccggtccattcgtgctggcgtcgatacgttcgccaagaacacgaaggcgatgcgccggggactgtactggcaggttgatcagcgagttccgtccgatgcgccggtcgagttgtcacgcactcagcaggccttggccgcgatgacagcgcccacgcctggcgctgaagcgacgactggcgccctgatcaatccggagctcggccggatcgccgagaacctcgccaccgaccttgctgccggaaacggcaaggctctcccctacgaagccgtgaagggcttgcgcactcgcctgggtgaggaagcgttcggcttcagcctgacgccggacaagccgaccgcccagcttcagcagctctaccatgcgctttccaatgacatcgctgtggcagcaaagaatgctgggccagaggccgagcgcgccttgaagcgagcgaacacgtactacagcaagtcacagaagcggttggagctgcttgaaagcgtcgtggatcgcaacggtgggcctgagcgcatcttccagtccgcaatgtcggggacgcgcgagggatctactgtgctgaggtcggtgatgcgctccctcccagaggacgcacagaaagatgtgaccgctgcagttatccggaggatggggcttgctaacccgggcggccaagataggggcagcgaggtgttctcggcagccaatttcctgaccaactggaacaagatcagtccggaggctcgtgcgaccttgttcaatcgctatggcgggaaggtttctgatgacatcgacacgctggccaaggtcgccgagagcatcaaggatggatctggcgtgctacgcaacccatctggaactgcggcccaggtcacctctgccggctactggggctccctcgccctgtcgatcctatctggcaacattcctgtgttcgccaagcttgcagccgctggcgctagcgccaatgttgccgcacgcttcatgaccaatccacgtgcagtgaggtggcttgctcgcactgcggaccttccggtcggagcattgcctgctcaactcaatgtactgaagaggatgggacaggagagcggcgatgaagaggttcagcagtttgccgaagctctagaagatgctgcgcaggaatccactcaggtcgaaggccaaagacaagaggagtag

SEQ ID NO: 505839 - DNA, 1158 bp, Stenotrophomonas maltophilia
atggcgaacggatacatgcgcgcaggcgcggcactcggcgatgcactgttcgggaacggccgggcggcctacaacgatcagctggggctggagtacaagcacgctctggcgctggagcaggccaggcaggcccgcaatgaccgagtgatcggtgacaggaatgtggcctcgtttcaggctgttacgcctgatctagtgggccgcgctcgggcgggtgatgttgcagcgctgaacgagctcgccgcactcgggctcacggcaaacaaaaccatgaacttcgatgctcttggaaaaactcaagagttcgggttccggcaggctgcccgcgacaaggcggtcctgggcgatcctctcaacccaaactctgagctcttcggcattgccaatggcccagtcgaaacaacgaagatcgctgacggggttgcgtatagccccttgggctcgtcatcccagacggtcaacgtgacgccgctcggcgaggccgccatcggccagcgcagggcatcggctgcatcaagctacgcgacggccgcgcgcacgcggcaggcgatggggttggacgccgccaagtatgcagatcagaggagcggcggaacgctcggggatcccccgcgcgcgtcaaccaaaccgccgagcgctgctgagatgaaggcacagcaggccaacgcaacaaagactgcccagctcggcaacgtcaatcgtggtctcgctcgaatcgagtcggccctgagcaatctgggtggttcgttcgtagacactggcccgatcgatcagtacctggtccgcaacaccgaggccgggcaagaactggacgccgcagttggcgcgatccagaactcgatgctggcgttgacccgtgttcctggcgtcggctcgcagtcggacctcgaggcacgcatcgccgcgctgcagtatccgtctctggcgaacgcacctggcgtgaatgcgaggacgctgaagcagctcaaggacttcgtgcaggaactgcaggggatcagcgctgaggcttcgggaacactgggcgatgcgcctcggccagctgctccgcgcggtccaggcctgccggcggcggatggccctgcacctggcaccattcgtaatggctaccgattccgtggcggcaaccccgccgaccgcaatgcgtgggagaggatctga

SEQ ID NO: 505840 - DNA, 693 bp, Stenotrophomonas maltophilia
atgggtcagttcattccaatcgccttggctgtcgccggcactgcaatgcagcaggccgagactgaccgtgttgcgcgcaaacaggaccaggccacggcccagagcctgctcaaccagtcgcgtcgccagcaggaggcggacaccaaggtcaacgatcagatcgccaagacggaggccagcaactctgcggacgagcgggctcaggcgctgtcgcagttcacccagcagctgcagcgcagccgcaagcaggccgtcgcgggtctcgagtcgccaatcggtggccaggcgttccaagccgacagcaccgcagcacgcgccgggtccgattccgcagccgctcgcacggcggacctgatggcgcggatcgaagcgccacgcctgcagcggcaggatgaggctttcgactacggccgattggccacggacatcgatggcctctctcgtgaggcggcagggcagagcttcatcgaccagttgcggctgcggaacatccgccgccggcctggcatggacctgctgtccggtggcctgatggctgcgggtggggcgatggccggcggcggtgctggggctgctgcggctccgaatgcgatggccagtttcggcaacaacgcggatgcgctctacgagatgcccggcgcgcgaccgcgctacgggtacggcatcccccgcggcagcgtcttggggtactga

SEQ ID NO: 505841 - DNA, 714 bp, Stenotrophomonas maltophilia
atggccggcggcggcaatatcggcaagggcaattgggcagacccgacgggcctgatccagaagtccggggccagcaagttcctcgatcccctgggcctgaccaagacggccaagcagggtgagtcggctgcggacgtggctgcgcgcatggagatggagcgcctggagcgaatccgcgaggctcagggccgcatcaaccaggtgtacgacaaccctcgccgcgcgcgcgacattgccgattttgtatcggccacgcgcacgaagttgatggacgacctcaatcggcagaacaccgatgcggcccgggagctgaagttctcgctggctcgcggtggcctctcgggtggcagtgtcgctgtcgaccagaaccgtcgaatgagcgacgactacaaccgcggtgcgctgacggtcgagagccgcgctcagggcgccggtgcgcagttggaagcggccgaccaggacaatcgggcgcgcctgatccagctggccacgtccgggctcgacgccaataccggggctcagcaagcggctgccggcctgcggtccaacctggaagccgctcgttccactgcgttcggcgaggatctggccgaccagttcggcggcatcggagcgttcatcaagcagcgcagggacgaggccaacaggcgtgaggcgacccgtatttcgcaggtcaacttgtacggcggcggctacggcggctacggaggataa

SEQ ID NO: 505842 - DNA, 576 bp, Stenotrophomonas maltophilia
atgatcccgaccggcggcctctccagcactccgcagccggccccgttctccgagcgggttaactcaacgctgcagccgctcatcgactacgagatgggcggccgtgcgatcaacgacacctcagctggcctgcagtaccagctgtggcgcgtgcgtgtggatgaggacgtggtgtatctgggaccggacggcggcaacgagcaaccggccttcatccggcctggcatcaccgaggttgcgctggcgttcgaccagaacatgcagccggtcattgccttcacgcaaggtggtcaggcgtggctctggtggttcgacggcacggtgccgggcatggtcttcaccagcatcctcggggcggtcaacccgcgcgtgacgctggacgacaagcgccgcggccagacggccagctccgatgtgatcctggcctacctgcgcgcgggctcgctgtactaccggcagcagcgcgaccgctaccttaccgagtacctgctgaccgccaatccgccctgcggcggcttggccacgttgtgcatgtccaccggcggccggctgcagtttggcttcggaggtgcgtga

SEQ ID NO: 505843 - DNA, 966 bp, Stenotrophomonas maltophilia
atgagcagcaacactctcaacgccagcagcggtttcgccggttggttcaagatcgaggcgttccgcacggacgaggatggccaagagatccccggcagccgccgcatcgccgccgactggttcccgaacctgatcaccaacgctggactggacctgctcggtaccaccgacgacacctacgtctataccttctgccgcattggatcggggaacaccgccccggctgtaaccgacacggtgctggtgtcccaggtggcttcaagctcgacgcagcaggccatcaacaatggcgtagatcgctctggagcgttctatgcctgggtgcggcgcacgacccgattcaccaccggtaccgctgccggcaccttggccgaggttggggtttccccgacaaccagcgggccgcttttcagccgcgccctgattctggattcgggcggcaatccgaccacgatcaccgtgctgtcggacgagacgctggatgtcacctacgagctgcggctgtatccgacgctgacggatgcgacaggcactgtggacatcgccggcgtcacctacaactggactgctcgcgccctcattccggtgagctacgatctgtattggtatctctacgtgggcaggggcatcgggccgcgacgcaccgcaggcaatgcgtctacaggtcccgctgttgatgcagccttgcctgcgcagaacagtgccgtcgcgaatcctatcggatcgggcactatcacagcgcttgcctacacggctggcagctatcagcgctcgttccgattcgactgcgacctcaatgacgccaacgttgcgggcggcattgggtgcttcttcgcgtcgtcggggaacaccggtgaccgtgccttcggcgcctgggcatggggcctgtccccgaagctgcctaagacctcgtccttcaaggcgacgtttaccatccgcatgagctggggccgctacacgccatga

SEQ ID NO: 505844 - DNA, 1995 bp, Stenotrophomonas maltophilia
atggccgctcctgtttggcagcccggaaccctgtacctgccgggtgatctggtccagccgatcacccagccggcgccgaacaacccgcaggttgcaaatggcgacttctccgccggcaatacgggctggaccttcagcggtgatggcgcctatagcccgtcaggcggctacggtggcggcggtccttccatgatcctgcctggcaacaagccggacggcctgggcatcaacaacacgatgctggtcgtcccggttggcggccagctggttgcaacctcgatgatcaaccagggcgcctcgtccgctggcaagactgccggctggaccgaggtgcggtggtacgactcgctgaacacgttgctgcagaccgacaagggcaacgtcgtggacagcggttcgggcggcgcgtggcaccagtcgaaggtgaccagcactgcgccggcgtcggccgcctacgccaaggctgcgattcacctgacttcggtggccgatcacaacagcccgatctggggcgacaacctcgcggtgagcggtgcgaccgctgggctgccggaaggcctggtctacaaggcggtccagaccgaatcgggcacgtcgggcagcagtgagccggcatggccgggcatcctcggtcagcaggtgatcgacaacgaggtgatctgggaggcggtcacgacgagccgcgttacctggacggcctcgccgcggtatgtgagcggtgctgttgagccggtgtggccgaccgacatcggcgctatggtgaaggatgggaccatcaactggcgcgccgtctcgcgccgggtgaccgacgagaagtgcccacagtccaaggtcgtggccattgtcgcgagcaaggtgttcgcggccgacaaggacatcgtgcgctacagcgccacggccaacccgttggattggtcgacggccgatgatgccggctacttgccgaccggcttgcagcaggccaacgcgaacaacatggcggtgctgcagcagtaccgcgccaacctggtcgcgctgaacgccagcagcttccagaactggcaggtggacccggatccggcgtccatggcgatcctcgaccagatggacggtatcggctcgatttggcagaaggccgctgcgccggttgccaacgacctgatctacctgtcccagcagggcgtgcgctcggtaggcatcgccaatgctgccgagaacctggccgccggcgatattggcgcgccgatcgacgttcttgtgcagcaggccatgctctacgcggaccgcaacaacacgccgccgctggccacctactacccgggcgccgggcagtacctgctggcgttcccgaactacccgccgccggtgctgggcgtctacggatcgctgcccaaggccgcatgtggagacacggtcgactacagctatgtgatcgccggtggcctgccgccctacagcgtggagatctccgccggcgcgctgcccgatggcctggccatggacgccagtggtcacgtcaccggagagatggcgcgcggtggcgatgccgagtggacggttcgtgccacggactcgctcggcgacgtggcggagaaggttgagacccgcactggtgcggatggcttcttcaagtacctgaccacgcgcctgtatccggtggagatcccggccgattcgctctccctggcatcggtggtggaagcggccacgttccgtgatgtctaccacgagtacaccgtcccggccgatgccttcgcgctgtcgtcggtggctacggccggcactctgcgcccgatcctgcagaactacgccctgcacgacagggttgcgctggcctccgccgttgaagccgggacgctgcgaaatatcctccgaagctatgtgattccggccgaatccatgagcctttccagcggggtggtggccggcacgctgctccagaagctgatcgtttccaacatggcgcccgagggcatcgggctgtcttccagtgtcgtaggaggcacgctcacatga

SEQ ID NO: 505845 - DNA, 546 bp, Stenotrophomonas maltophilia
atgagcaaggacaccatcatcgtcccggtagtgcaggcgacgatccatcgcagcgagtacgtcacgatctccgactcattcccgaagcatgagttgccgatcctggagctgatccatggcgaggacaacgtcgtcgtgatcgaccccgattacttcgcgttcgagctgcccaacaacgccacgcaggaactgcagcgcctctacaccaagtacaccgacaagtaccggcctgtcgtggaccaggtgttcccgcgaggcgctcgcgatgtcgcctccgagctgggcatggatgttggcaaggacagcttcaccaagcagtccgaggctgtgatcgaaagccgactgccgccgcgcccgaccgccgcagccaccctgagtcggccggcgccggaagatgaaggcgacgatcagcccgaactgacccatgccgagctgcgcgaggaactgacccgcctgggcatcgagcacaagggcaacgcgccgaaggccgagctgcaggcgctgtacgacgccgcgcaggccggcgccggcacactgggcggctga

SEQ ID NO: 505846 - DNA, 1152 bp, Stenotrophomonas maltophilia
atgcacgtcgaaggcgataacccggcgaccgcgccggacacgaccccgacagaccagccagccgacgtgatggctgcgctggatgccggcatcgcagctgctgatgctgaaacggcgcctgccgctgagcctgcgccggtcgaaactcctccggccgatgccggcacgcccccggcagacgacccgagcgcagctccgcccgctgacggccaggccccggccgagccgcaggaaggtgcaccgccggccgatggtcagccgcctgctgccgctgagggtgagcagcagcccgatgtcgacaccgaggcggagatcaccgcgcttggcctgaaggagaagtccgcagaacggttccgcggcatggccgccgagatcagggagctggcgccgctgcgcgaggcgatgaaggccgctggcattgaggacgtggcccgccttccggagctggtccagcgctcgaaggtcggcgaggacatggtgcagatggtcatggagaccggcgccaactccgatcagtatggaatggcgctggattatctgacgctgatctccaaggccagccaaggtgacatggtggcagccgagaaggcttacaccaccatgaccggcgagctggcggcactagccaagctgctcggcaaagaggtgccgggcgtgcatgacccgctcgccaaccaccaggacctgcgcgccgaggtcgaggcaggcgatctgccccgtgcccgtgccgtcgagatcgccggccagcgcgaccgcaccgcctacacgggcagcgtcgagcgccagcgcaccgagagccagcaggcggcagagcaggccgaacagcagggcgtccagtggctgaacaccttcgacgcgcagatgagccgcgaagacccggcctacgccgccaagcgaccggcgttggacgaggccgtgcgccagatccgccagcagtaccacccaagcgaatgggcacagcgcaccgctctggcctatgcccgcatccaggcgccggtggctgcggcagctccggccgcgcccgcggctcccgcccaaccgcgccccggcccgatgcgaccgagtggcccgcgcccggcgatggatccgaccaccttcgccagtccgatggacgcgctggagtacggcatccagcaggcgaacaacggctga

SEQ ID NO: 505847 - DNA, 2325 bp, Stenotrophomonas maltophilia
atggcagaccaacccatcgcagcactcgaaaccgggatcgcggccgccgctgaccctgatccggcgcgcgccaagcagctgagccagatccaggcggacgtgaggcgctggtcgggccggttcgaggaggcgcggaagtacgacgaggaggcccggctgcagtatgcgaaggaccggcgccaggctcgcggcgactctggcttcctggtcgacgccaacatcatcgggaccaacatcgacaacctggaagcgttcctctacgcgcgcaatccggacttcgacgtgtcgcccggcccggcgcaccggatgcccacgcccgagcagctgcgggacatcgtggagtcggacgaagggctgatggccggtctgcagcagcaggccgagcaggatgcgatggaggtcggccggcagatcgctgtgcagcagaccgccatgggcgtgagtccggaggaggcattccagcagggccagcaggcgcagcagggctacctggccaccggcgcggttgacaagctggtcaccgacgaggtgttgaagctgcgcaagcaatacgccaagcgctcgcgcgagatgaagcagttcgccgagaccatggaagcggtcggcacccagatgtggaaggacgcgcagctgaagcgccgcggccggccgtgggttcgttcgtcgctgaccatcggcatcggagtgatcaaggcgtcgtggcaggagcgcaccgagatctcgcccgagacgcagacggccatcaacgacctgcagcagaacattgcccgcgccaaggcgctgcagcaggagctggccgatggcaccgccggctacggcgcgcgcgcctgggacgcgatcaagggtgtcgtcggcaatgaccaggaggcgactgtcgccgagctggagcgccagctggccaccatccggaacggcgccgaacgggttgtggcccgcggctatgtgatcgacaacgtggctggcgagaacttccaggtggcgccgggcttcacgatctccaaccacgtcgatgcgccgtggaacgccgagatttcctacatgcgctacgacgatgcgctggccgagttcggcccgtatctggcgcagtacgatcccaagggcgacgccgccagcatcatgtgcaaagccgcccggtacgcaccgcgcaagccgtgcatgggcaagaacgagagcgtcaacgtcacggccggcagcgccacggcggaggacgccgacgagttcaccaccaacggcgacaccactgccggctgctacgtgcgtctggtcgagatctgggacgccgagagcaacaccgtcctgaccatgattactggcgtgccgtactgggtgaagccgggcttcaacccgccggccacgacccggttctatccctatttcgtgttccccacctccgaagtggatggccagcgccacccgcagagcctggtcagccgctcgatcaagctgacggacgagtacaaccgcagcctgtcggccgagaccgagcatcgccgccgcatcatcccgaagatggcattccatgcgggtgccatggaagaggaggaggcgacgaagatcaccaaggcgaagaccggtgagctcgtcccgatcaaggccacctctccgcaggccgacctgcgcgcgctgctggtgccgattgcctatccgcagatggatatggccgcctacgaccgcagcaagatcgaggcggcgctggagcgcatctggggcgtgcaggaggcgctgtccgggtcgatcaacacggccaagacggccaccgaggccgacatccagcaacagggcttccaggcgcgcagtagcagccgtcgcgacagcatggaaatgcgcctgagcgagctggccgaatacacctgccagatcgcccgcgtgtacctgagcgacgaggacgtgcgtttcatcgccggaccgaccgccttctggccgccgtatcagggcccggatgacctggccgagttcatgcgcatcgagatccgcgctggctcgtcgggcaagccgaacaccgcactggagcgccagtcgtgggccaaccttctgccgctgctccagaccggcattacccagatcggccagctgcgtggtgcgtcgcctgagtccatcgctgattcactggagcagctgatgcgcctgaccgccgaacgcagcggcgagcgcttcgacattgaccagctcatcccccagaacgacggcacgcagccggcgctgcccgcacagggcgtgcccggcagtgcgccgcctccccagggtggaaatggcggccagcagccgcccgttccgcccgcacctcccggtggctctccggccgccgatcccctcgcagcagcctga

SEQ ID NO: 505848 - DNA, 489 bp, Stenotrophomonas maltophilia
atggccggtaagaagcccaaggccagtacggccaagaagccgggcaagcctatcggccgccccagcaagtacacgcaggacctggccgagcgtgtgtgcgtcctgatcgcccaaggggacagcatcgccaagatcggcgagaccgagggcatgcctgacgcccggaccatcttccgctggctggcagccaacgctggcggggaggaggatgaccccgcctccttccgacagcagtacatgcgcgcgcgcgcgagccgggccgatgctcggttcgaacggctggacgagatcatgcagaaggtcgaggacggccggctggatcctgccgctgcccgcgtgatgatggacgccatcaagtggcagtccggcaaggagaacgccaaacggtacggcgagaaggtccagctggccgatgctgacggcgagaagctgccggcgccgccgccgttctacgtgatgggcgtggtcccggccaagcagggcgagtga

SEQ ID NO: 505849 - DNA, 312 bp, Stenotrophomonas maltophilia
atggctgattggctgtcagatgctgagaagatgcagctggtcaaggacgtaactgaacgagttcgcgccggtggcaatgtcgaagacgttatccaccactggtatgacgggtatggtccccgcgaccagcaggtcagggaaggcgcccgctgcatcgccaaggtagtggcggagcaggtcgagaaggagaaggccgagaaggctgcccgagacgcgttgctggctgacgacatcgccatggtggaggagctgatccagcgcctgcccaaggtgttggagcggctgagggcggcggaggtggccagtgagtag

SEQ ID NO: 505850 - DNA, 171 bp, Stenotrophomonas maltophilia
atgaccgcgtacatgcgcccgtctaccgagggatgtatcggtagccccagctggcaggtgggtaacagccagcgccgagggagcgggttgccgcgttgcggcggcggggaaggggtgcagcccggagccgtgtcactcatcgcccgtgggaccgaggaggccctgccgtga

SEQ ID NO: 505851 - DNA, 282 bp, Stenotrophomonas maltophilia
atgaggacgaagaacgccaaggccttcaccgccgccgagcgcgcgcacctgcaggcggtcaaggggctgccgtgcagcgtgtgcgatgcgccggcgccgtcggatgcccaccacatcaaccagggacagcacttcaccactgtggcgctgtgcaaggactgccaccagggcagcttcaacgggatccacgggcagaagcgcatgtggaccatcatgaagatggacgagctggccgccttgaacgtgacactgcagcggcttgggcagaggagcgcggcatga

SEQ ID NO: 505852 - DNA, 222 bp, Stenotrophomonas maltophilia
atggcgaacatcgaacgctcactgacgtaccgatgcagcgatgactgcgagatgagcggctgccccggtcacaccggcatcctgttctaccaaagcgcatcggacgcctacagcttcagcctgaacgggcggatcctgcacttcgagcgcggtgagctgcaggcgctggtggatctgctgcgatcactggatcgcatcgatgttgtgcaggtggggccatga

SEQ ID NO: 505853 - DNA, 303 bp, Stenotrophomonas maltophilia
atggacgccatcgagaagcgggcgcgggagctgttggctgtcgtgcttcatgagatgtacccagatgacgcaggaaagcgctacgtgatcgacaagttgctcgtggatgagttggaccttgtcagcgctcgaggtgccatccgagccattgtggccgccctcacgccgcccgagggctacgtggcagcaccggaagacccgagcctcgccatgactgccgctggcaagttgttcggccttaccgccaaccaggcatgtgccgtctaccaatcgatgctagccgcccgcacggaggtgccgtga

SEQ ID NO: 505854 - DNA, 258 bp, Stenotrophomonas maltophilia
atggacaaggttctcgatgttctaacgatcgcggcgttcccgctgatcttcttcggcgtgttgatcccgtgcttcagggggctgctgtgggtggttgatcgaatcctcgacggtcgcaatccattcgacaacttcaaggattggcaggcctgggtggcgtggcttctctacttcaccggcgcgttctggagcctgggcctggccatcctggcctgctccctgttcggtggaatggtgtttgaccgaggagcagcctga

SEQ ID NO: 505855 - DNA, 198 bp, Stenotrophomonas maltophilia
atgaagacagtgatgtgggcgatctccagccggggcgagccgatgttggacaccatttcggagtcggcagacgccgctatcaaggtcgtggctgacaggattgattccgatacctacgaggagctcactaggctcggcttccgccttgaacgagtctcggtcgaactgaggattgtgagtcaggagccggacgcatga

SEQ ID NO: 505856 - DNA, 741 bp, Stenotrophomonas maltophilia
atggccaacacctggttccgcatgtacgccgagttcgcatctgacgcgaaggtgcagatgatgagcgaggcgatgcagcgccgtctgctgatggtgttctgcctccgttgcagtgacgtcacagtgacgctcagtgacgacgagatcgcgtttcagatgcgcatcagcgccgacgaactggccgagaccaaggcgctgttcgtgcgcaagggattcatcgattcggcctggaatgtcctcaactgggagaagcgccaattcgcctcagactcaagcgccgcaaggactcgcgcctatcgtgacaggaagcgcgacaagcctgtgacgtcacatgtgacggagcgtgactccctagaacagaacagaacagatacagaacagaagagagaagagcaggccgcgccggtcgtgaaccgcgatatcgggaatccggcatcggccaccccgatcagctcgcggtcgcctaccggctcccgcctgccgagtgattggcagccgagtacggacctcgtggcctgggcgctggagaacggcaacgggatcgacgtcgcccgggaggcggagaagttccgcgatttctggacggccaaggccggcaaggatggccgcaagctggactggccggccacgtggcgcaactggatccgtcgggcagccgagggccgtggcggcaacggcggcggcgcactgttcgcccagcagcagccccaggctgccggcggcggaaggagggcgctgtga

SEQ ID NO: 505857 - DNA, 780 bp, Stenotrophomonas maltophilia
atggataaactaaagcaccgctttagttcaaagtcaagcgctgccttattacggactccggtagcccgccgctaccatcaacccatgcttgataacgatgaaatggcgcggcgcgtccgctacgcgttcgacaatgccggccgaggcacacaggccgccgttgcgcgcgaactgggcatcagcgcacaggcggttaccggctgggtgaagacggggaagatcgagaagtcgaacctaccggccctggcccgtgtgactggccgccgcgtggactacttccttgattcctcagtgtctgacgaagaatcgggtgcaggggtcgcacaggctgcgaacgatgacgacaccgtggacattcttggctacagccaggccgctggccttggggatgggatggaggctattgagtacgcggagactcaccggctgaagttcagagcgtcgtccctagctcgtaagcggctgatcccggctcggctcgcggttttctacgggaaaggcgactcgatgctcccccggatccagtccggcgacgcgatcctgttcgacaccagcgacacgcgccctgcggacgacaaactgttcgtcatcatggcggctggcatcgcgggaagcgaatacagcgtgaagcgctgtagggtgttcggcgacgacatctacttcgatgccctgaacgaaaagggcgaccacaactggcgcaagccgcggaaaatggacgacccgcgccaccccatcaccatcataggaagagtgcgatggatcggaagctgggaggactga

SEQ ID NO: 505858 - DNA, 468 bp, Stenotrophomonas maltophilia
atggatcggaagctgggaggactgatcctgctggcgctggctacgccggcagtagcctgggcacaggacgggtatagacgggctggcgccgctcttgggcaggcaatcttcgggagcagccaagaggcctatgaccgcgagtacgagcgacgcgtccttctggagggcgcgcgccaagacgcgatacgcgctcggcaagaggccgatgctgcagagttgcaggtgaaggcagtccagcggctacagtcgatctggatacagttggggctgcccgatgaggaggcccgctctgttgcctccgccttcacctggggcgcccagatggaagcgattcgccagcgcgcagcccgcgacgggtacaagacaacgatggacgccgggatcaaggcctacagggactatcagtacccgctggccaaccagcttgtcctcgccgcctatctcctgccggttgaacccacgccctaa

SEQ ID NO: 505859 - DNA, 306 bp, Stenotrophomonas maltophilia
atgggtctgcacactgcaaccgacatcgaacggaacgcccagcggagctttgatggcctgctgccggcggataccgaagaggcgttccaggacgcctgcaacgccctggcacgcacctacgaccgtgagggaagcaccgccgagctgatctcggtgttggtgacctccgagcgcgcactggaccacctggtttccgaggccgacgttccggcgcacctgctgcacgacctgcgggagctgctggaccggcaggcactgatcgtccgacaggttgagcgcgaaatgtgcgcaggcggtgcggcatga

SEQ ID NO: 505860 - DNA, 168 bp, Stenotrophomonas maltophilia
atgagcggccctgtcgattcccaggaaatgagggacggcgatgttgttgggatcgacaccgacggttgttcgatcctttggaacgccgacgcgcagcggggggaaaacagcggcgagcctccgactgagtacgagcttgccgtcctcggcaaaggcggtgccgcatga

SEQ ID NO: 505861 - DNA, 231 bp, Stenotrophomonas maltophilia
gtgagccgcgtcgacgtactggcggtgatggatcaggcggtagagcgcgagaaggacgcagggcagccctatgccgcgcaggtggcagcacgcgcgtcggtcgccgccgtcttcgacgcagcccgcgccgtgctgagcgccagcgacttcaccgacctgctccacgccgaagagtgcctgcgcgccgcgctggccgcgtgcgagccggagacgccgcatgaacccgtttga

SEQ ID NO: 505862 - DNA, 903 bp, Stenotrophomonas maltophilia
atgaaccagatgactacccgcgccgctggcggcaaactgattaccgaagaacaggccggagcaatccgcaccgcgctgaagacgagcctgtaccccggcgccagcgatgcgtcggtggacctggttctggcctactgcaaggccgctggcttggacccgatgaagaagccggtacacatcgtgccaatgtgggacaacaaggcccgcacgatgcgtgacgtggttatgcccggcatcggcctgtaccgcactgacgcggcccgcaccggcgagttcgctggcatgtccaagccggtgttcgggccgatggtgaccgagaacgtcggcggccgcgaggtgaccttccccgaatggtgcgaggtcaccgtctaccgccagctgcgcagcggccatatcgccgagtacaccgcaaccgaatactggatcgagaactacgcgatcaagggcggcaaggaccaggaccagtcgccgaacgcgatgtggaccaagcgcgcgcgcggccagctggcaaagtgcaccgaggctcaggcgctgcgtaaggcgttcccggaagcagtcggctcgcagcccaccgccgaggaaatggaaggcaaggccatcatcgacggcgagctggtgcgcgacgagcgccgctcctccaccgctggcgcgatcacccgccagcagcagaccgagccgcaggacaccccggagcggcaggcgctctatgccagcctgcaggagttcgccgaatgcggcatggaggaataccaaggcgcgtggggccgtctgtccaaggagcagcgccagctgatcggcagcgccggccacgaaacgctgaagggaatcgccgaacgcgccagcgccactgtgatcgaagaaggcggccagcagtcggcagccgatgaagaggtgccgctgtga

SEQ ID NO: 505863 - DNA, 321 bp, Stenotrophomonas maltophilia
atgagcactgtcgcacagaccaaggaagacatgcaggaagagatcgcccgcctgcgcgctgagctacagaacgccgccaaggccgcgctagatgccgtagcactgtcctgtgcaaaggagcgcgaggctgatgcgctgcgcgctgaggcggaggcgctgcggaaggatgcggagcgttggcagcacgcgcgcaagctgcttagcgtggatgacattgccgagcgccagcgcacgattgaggagtggaacttcctgattagcgaggatgagtgtaagcgcgctgatgaggccatcgacgccgcaatgggagcatccgcatga

SEQ ID NO: 505864 - DNA, 309 bp, Stenotrophomonas maltophilia
atgaccaccggcaacaagaccctggctgttgatgtgctggaagtgcttcgtagccagctttcatggatcggcccgtgtaggcctgacggcgacgagatcgactgcgagcgctgggaccgaatcgaagctgccattgcagccgctgccgacctgatcgatgcggctcgtgcaatgagcgcggtgctgcacaagaacgggcaatacgacgacggctgtttctactacttcggcctttcgtcgcccgagcttgaacgcccgttgtctgtgatcgactcggccatcgcccgcgtcaaaggagaatcagcatga

SEQ ID NO: 505865 - DNA, 507 bp, Stenotrophomonas maltophilia
atgagcactgacaagaccctggcggacgtgcagcccggtgggagggtgaggctgggggatcaggcagagcgggcgcagtggcgctcgatggacacctgcccgcgcgatggaactgtggttcgtctgcggtggggtgaagaccatgtatcgcccggctggtggtctgcgccggtgtcgccggtgcagaacgacgatggaacctggccgtccgatacaggtggattcccgtgggcattcattgatttcaacaacggctctgcgttcgtcaaccatgccgtagacaccgagtatgggccgacgcattgggctccctatgccgccctctccgcccagccctccccggctgcagcagtgcctgctggctggaagcttgtgcctattgagccgacctggagcatgcgcaacgacggccgggagttcctcatcgacggcattgagaaggagccggagcgactggcctatttcctgtggaagaccatgatcaacgccgcaccggaggtgccgtga

SEQ ID NO: 505866 - DNA, 645 bp, Stenotrophomonas maltophilia
atgggaccgagtactgaatcgctggcactggccgactttctgatttcgaagctcgggttgcaggttgatcggatcagccttgcctacgcgataatggatcacgttgagatcgagtattccgaagagctttcgtacgaggatcgcatcgctgagctggaagccgccctcgccgcccgccagccggtgggggagccgacggttgttgtgcatcgctacatccagcgacaccaatcggcggagcattcggtttggctcaacggcgatgcggacgagatttacgtcgaggcggagcggcagggcttgggccgaatcgagcgcgcctacgccgccccgcccgcgcaggccgtggacctgccctactcgctcgatgccgacccggcaggtatccgcgcccgcgtgtgcgacgtgatcaccggcacgctgatggttggagcgcagggccacacgccaccgccggttgggcactgggcagagccgttctggcaggcagcacgagccgatgcgaaagcgcaggccgtggacctggagcagttccggccgctggccagctacgtcatcgaacaggctgcaggtacacgcggagacatgcacatgctcgcttgtcagctgctggccctgatcgacagccaggcggtgggcaaatga

SEQ ID NO: 505867 - DNA, 201 bp, Stenotrophomonas maltophilia
atgagcgccgacagcgagaaggatccgccccgctacgttgtgctgaaggcatccggcagtcggtacgcctacgtcaacgacacccacgaacgccgcacggtgacgcgctgggacattttccgcaagaacggatggtcaaaagctgatctgcaatgcaagcggctcaacgaagagcatgagcgagggcagccccatgcctga

SEQ ID NO: 505868 - DNA, 720 bp, Stenotrophomonas maltophilia
atgttcaaccctcagacctcgccggataccggcaatgccatttcttcgccggcatcgccggctggtcccttgcagctcgacttgctgggtggcccgacgaccgcgagctctggaccggcagcgccccgtgccagccgttctccgtcgcgggtaaaggcaaagcccaggatgacgatcggcacctgtggccccacttccttcgcctcatccgtgcccgacggcccgctgtcgtcatgggagaacaggttgcggcggcggttggcaagaactggctcgacggagtgtctgctgacctggaaggaatcgactacgcctgccgggcggccgttgtcccggcttgtgccgtcgacgcgccccaccagcgtgatcgcctttggtttgtggcccaccatgacctcgaacgctccggccaagaacggcaacaacgaggccggcaacagcgcggggcaagtggccatccggaaaatcatgctcggcctatggtcgaagttacgcgcctcggatggggagaagggtggacccaaccagagtttcggggccggcggctgtccgcttccgtcgcaagtgtttcaggtcggcagttcatcgaatgcgccgacggaaagtggcgccggctccctccaccccgagttcggtggctgggaactcggattcccgcccgagtgggacgcctgcgcgcctacggcaatgcaatcgtcccggcgctcgccgcggaagtga

SEQ ID NO: 505869 - DNA, 747 bp, Stenotrophomonas maltophilia; identical to SEQ ID NO: 329697

SEQ ID NO: 505870 - DNA, 876 bp, Stenotrophomonas maltophilia
atgcaggtcgtatccatcatttcaacgaaaggtggcgtcggcaagacgaccacggccgccaacctcggcgggctcgccgcggacgcggggctgcgcgtgctgctgctcgatctcgacgtgcagcccaccttgtcctcctactacgatctggctcaccgcgcgcccggcggcatctatgagctgctggcgttcaacgagcgcggtctcgaccagctcgtgtcccgcaccatcatcgcgggcctggacctggtgctctcgaacgaccaccggggtgaactgaacaccttgctgctgcacgcgccagacgggcgcctgcggttgcgccacctgctgccggcgctggcgccgctctatgacctggtgctaatcgacacccaaggcgcgcgctcggtgctgttggagatggcggtgctcgcctccggcctggcgctgtcacccgtgaccccggaaatccttgcggcccgcgaactgcggcgcggcaccatgcagttgctggaggacatcgcgccgtatcggcaccttggcatcgaaccgccaccgctgcacctactcatcaatcgtgtccaccccgtgtccgccaacgcacgcatgatccagcaggcgctgcacgacctatttcaggatcacacgggcatccgcgtgctgggcaccgacgtgccggccatcgaagcctatccgcgcgctgcaacccgcggcatgccggtgcatcgcgtcgagtatcgacagccaccaggcagagttgcgcccgctgcgctcgacaccatgcgcacgctcgccggcgaactgttcccgcagtggcaagacagattcgcccgcgtgtccggccgtcctccacgttctattgaaaccgggaggtcccgtggcgagcgcacatga

SEQ ID NO: 505871 - DNA, 261 bp, Stenotrophomonas maltophilia
gtggcgagcgcacatgaactgtcccgtggccacaagcgactgcgcgccctgatcgagtttgcggtgagcgaaggctggcacgtcaaacgtactcggggtggacacctcaaattcaccaagaccggctgcgccgccatctacaccagctcgacagcgagcgattaccgggcagacctcaatgcccgtgcgcagatccgccgagccgagcgcgaggcccgcatggcccggcccgccaacgccgagggatgcggccatggctga

SEQ ID NO: 505872 - DNA, 1665 bp, Stenotrophomonas maltophilia; identical to SEQ ID NO: 329699

SEQ ID NO: 505873 - DNA, 918 bp, Stenotrophomonas maltophilia
atgccctgcgccggacaggcctctcacgagaccgtggcacgggcgctgacgctgttgcgcctgactcgctggttgagtctcgtgcgccgcaggcgtgaccccaagaccgggcgcatcctcggcaacctctacgtcctgcacgatgagcccctgacgcctttcgaggcgatgcagctcgacccggactacttggagctcgtcagccaagccctgggccattcggccaaggccgtccaggtcgtgggcttgcacaccctcaaggaaatcgccgaagacccgttgttgtctggccgcacgttgccctcgcggctgcaggtccttgccgaacgcctcgcgagccagggcattgggtcgcaggagagttatccacagaaggatagggttcacgattccgaagaaggggcgccgagccttcttcggaattctgatgacccctcttcggattccgaagcagggccgaaacccgcgtcagacggcgctcttcggaatccgaagcaggaccgtactgtacgtagtagtcgtatgaatgaagtacgtactaccgcgcgtgagcgtgggcaggcgcgtgcgatgccaggagttcgcctgcctgatcgctttctcggcttgaaggaagagcagcaggccgccgccatcgtggcattgcagcaggtcgatgctccgctacgccaggccgtgctggacgaatgggcggatcgctgtcgcggcagcaccatccgcaacccggcaggctacctgttcggcatcatccagcgcgccatccgtggcgagttcaacgcctgggccaagcaagccgggtcagcaccgccacctgcccctgcacgagatgcaccgcctgaaccaccgcgcaatgtggttccacccgaggtggcccggcagcacattgaccggctgcgcgaccttctgcgcagtagctga

SEQ ID NO: 505874 - DNA, 687 bp, Stenotrophomonas maltophilia; identical to SEQ ID NO: 333145

SEQ ID NO: 505875 - DNA, 738 bp, Stenotrophomonas maltophilia; identical to SEQ ID NO: 422643

SEQ ID NO: 505876 - DNA, 825 bp, Stenotrophomonas maltophilia; identical to SEQ ID NO: 422641

SEQ ID NO: 505877 - DNA, 189 bp, Stenotrophomonas maltophilia; identical to SEQ ID NO: 422640

SEQ ID NO: 505878 - DNA, 408 bp, Stenotrophomonas maltophilia; identical to SEQ ID NO: 330038

SEQ ID NO: 505879 - DNA, 351 bp, Stenotrophomonas maltophilia; identical to SEQ ID NO: 422638

SEQ ID NO: 505880 - DNA, 288 bp, Stenotrophomonas maltophilia; identical to SEQ ID NO: 422637

SEQ ID NO: 505881 - DNA, 642 bp, Stenotrophomonas maltophilia; identical to SEQ ID NO: 330042

SEQ ID NO: 505882 - DNA, 261 bp, Stenotrophomonas maltophilia; identical to SEQ ID NO: 330043

SEQ ID NO: 505883 - DNA, 765 bp, Stenotrophomonas maltophilia; identical to SEQ ID NO: 330044

SEQ ID NO: 505884 - DNA, 828 bp, Stenotrophomonas maltophilia
atgtctctggtatcccgctttgctccgcaatccccgatcctgcgctctgatcgcccactctcggacgaccgcattcgtgccgtcgttccgtcgatcttcgccgacgctccacatgggagccggtccgatcggtatgcctacataccgacctcgaccgtgctgaccaagctgcgccaggagggcttcgagcccttcatggtgtgtcagacgcgcgtgcgcaacgaagaccggcgcgagtacacgaagcacctcatccgacttcgccatgcaagccagatcaacggcgacgaggcgaacgagatcatcctgctcaacagccatgacggcacgagcagctatcagatgctcgccggcatgttccggttcgtctgccacaacggcctggtttgcggtgacaccaccgcagacatccgcgttccccacaagggcgacgtggccagccaggtgatcgaaggtgcctacggagtcctcgaaggtttcgagcgcgtgcagaacgcgcgcgatgcgatgcgcaccatcaccctcgatgagggcgaagcggaggtctttgcgaactctgcgctcgcactcaagtacgacgatccggccaagtccacgcctgtcaccgagagccaactgctggcccctcggcgatgggacgaccgcaagaacgacctgtgggccgtcttcaaccgcgtccaggagaacctagtcaaagggggcctgaacggacgcacggccaacggccgcaatcagcgcacccgtccggtgcaaggcatcgaccagaacctgcgcctgaaccgggcgttgtggctgctggccgaaggcatgcgccagctcaaggcgtga

SEQ ID NO: 505885 - DNA, 690 bp, Stenotrophomonas maltophilia; identical to SEQ ID NO: 345971

SEQ ID NO: 505886 - DNA, 342 bp, Stenotrophomonas maltophilia; identical to SEQ ID NO: 422629

SEQ ID NO: 505887 - DNA, 408 bp, Stenotrophomonas maltophilia
atgggctggtatttctcaaaccaatcgcggtccgaactgatcgcggaactgatcgcaccgcaagagaccgagcgcgccagcgtcaaggtcatcgctcacaccctgcgcggcaacgtgctgtggtccgtcgccgaagtgaccgccaaggtcgaaggcgtgcatcgtgatctcgcaccgggccagtccctgcgctacatccgctgcgatctgcttgaacgaagcggcggccagtggggctacaagtccttggacgagtccatgcacccgtactactacacgtgcccgctgtcctatctggacctcgcaccggagcagtccgccgactggcgtgcaggcgttcgcgcctaccacgcccggcggcgcacacccacggcatccgcggcatccgccgcggcgtcgatggcctga

SEQ ID NO: 505888 - DNA, 261 bp, Stenotrophomonas maltophilia; identical to SEQ ID NO: 333146

SEQ ID NO: 505889 - DNA, 2280 bp, Stenotrophomonas maltophilia
atgtccctcgatctcgaaaccactgccgctgaatccgcgcccgtacagggcgaactgctcgacgcggaatcttcccctctgaccctgagccttcaggattttgtcggcgagttcggcgacgaactactcgacgccctcaacagcgctaatccgccggtctataccggccaaccgcaggcgcaccggcaactggtggtcgccagcctcaagcgcaagctgttcccagcccaggccgaagtcgtccacgccgccgccgagctgctgatcgaccgtggcgaacgtgctgcgatcgtcaatggcgagatgggctgcggcaagacgaccgtcggcattgccacggccgccgtgctcaacgccgaaggctatcgccgcactctggtgctgtcgccgccccacctggtttacaagtggcggcgcgagatccaggagacggtggccggtgccaaggtgtgggtactcaacgggccggatacgctcgtcaagctcatcaagctgcgcgagcagttgggcgtgcagcccacgggccaggagttcttcgtcctggggcgcgtcaggatgcggatgggctttcactggaagcctgtcttcaccacgcggcgcacccgccacggcgacgtggcggcctgcccggactgcggcacggtcatcaccgacctcgacggcgagccggtcaacccgatcgcgctccaagccgaggagtgccgcaggaagtgcggccactgcgccgcgcccctgtggacactgatccgcccgcgcagtctgtccggcagcgaccagtcctcggccgtgctcaaagccttaaagcgcataccgaccatcggagaggtcaccgcgcagaagctgatgcaaaagttcggtgacgggttcctggcgtcgatgctcggcgacaacatccatgagttcatcaacctcatggatggcaacggcgagctggtgttttccgaccgtcaggccacgcgcatggaacgtgcgatggccaacatggagttcggctttggcgagggcggctatcagccgtccgagttcatcaaacgctacctgccgcaaggcacgttcgacctgctcatcgccgatgaggcacatgagtacaagaacgggggcagtgcccagggccaggccatgggcgtgctggcggcgaaggctcgcaagaccttgctgctgaccggcacgttgatgggcggctacggggacgacctgttccacctgctgttccgagcccttccggggcggatgatcgaagacggctaccgcccgaccacgagcggcagcatgacctcggctgcgatggcgttcatgcgcgatcacggggtgttgaaggacatctactccgagagcaccggcacggcgcacaagacggccaagggcaccaaggtatcggtgcgcacggtcaaggccccggggtttggccccaagggcgtgctgcgctgcatcctgccgttcacgatctttctcaagctcaaggacatcggtggcaacgtcctgccgccgtatgacgaggagttccgtgaagtcgcgatggacacggcgcaagccgcggcctaccgcgatctggcgggtcggctgaccgcggagctgaaacaggctctggcgcgacgcgatacgaccttgctgggtgtggtcctcaacgtgctgctggcctggccggattgctgcttccggtcggagaccgtggtgcatccgcgcacgcgcaacaccttggcgtttgtcccggctcagttcaacgagttcgagatcagccccaaggagcgtgagctgatcgacatctgcaaagcggagaaggcgcagggccgcaaggttctggcctacacggtctataccggcacgcgggacaccacgtcgcgcctgaaggtgctgctggagcaagaaggcttcaaggtggcggtgctgcgcgcaagcgtggatgccagccgccgcgaagactggatcgctgagcaactggatcgtggcatcgacgtgctcatcaccaatcccgagctggtcaagacgggattggacttgctggagtttccgacgatcgtgttcatgcagtcgggctacaacgtgtactcgctccagcaggcggcacgccgctcctggcgcatcgggcagaagttgccggtgcgcgtgatctacctcggctacgccggttcttcgcagatgacctgcctggaactgatggccaagaagatcatggtctcgcagtccacctcgggcgacgtgcccgaatcggggctggatgtcctgaaccaggatggtgattccgtcgaggtcgcactggcccggcaactggtcgccgcctga

SEQ ID NO: 505890 - DNA, 723 bp, Stenotrophomonas maltophilia; identical to SEQ ID NO: 457495

SEQ ID NO: 505891 - DNA, 423 bp, Stenotrophomonas maltophilia; identical to SEQ ID NO: 457496

SEQ ID NO: 505892 - DNA, 1077 bp, Stenotrophomonas maltophilia
atgagcgcaaccgatactgccggccccgcgccagcaaactccgccatgagcggctttgagcgttacctgacgctatgggtggcggtgtgcatcatcgcggggatcgctctgggccagttcgcgcccgccgcattccaggccatcggccgcatggagattgccaaggtcaacctgccggtcggcctgctgatctgggtaatgatcatccccatgctgctgaaggtggacttcgccgcgcttggccaggtgcgccagcattggcggggcatgggggtcacgctgttcatcaattgggccgtcaagccgttctcaatggcgttgctggcgtggatcttcatccgccacgtctttgccgactggctgcccgccgatcagctcgacagctatatcgccggcctgatcctgctggctgctgcaccgtgtaccgcaatggttttcgtttggagtcggctgactggcggtgatccggtatttacgctgtcgcaagtggccttgaacgacaccatcatggtgttcgccttcgcacccatcgtcggcctgctgctgggcctgtcgtcgatcacggtgccgtgggacaccttgctggtgtcggtgggtttgtacatcgtcattccggtcatcctggcccagctctggcgccgggcgctgctgcgcaaggggcaggccgtgttcgacagggcactggaacgcatcggcccattgtccatcgccgcgctgttgctgacgctggtgctgctgttcgccttccagggcgaggccatcatccggcagccgctggtgatcgccatgctggcggtgccgatcctgatccaggtgttcttcaattccggtctggcgtactggctcaaccgccaggtgggcgaaaagcactgcgtcgctgggccatccgcgttgattggtgccagcaacttcttcgagctggccgtggccgccgccatcagcctgttcggcttccattccggcgcagcactcgcaacagtggtcggcgtgctcatcgaggtgccggtcatgctgctggtggtgcgcgtggtcaatcgctcacgcggctggtacgaacgccgcgcgaccacttcgtaa

SEQ ID NO: 505893 - DNA, 531 bp, Stenotrophomonas maltophilia; identical to SEQ ID NO: 457497

SEQ ID NO: 505894 - DNA, 321 bp, Stenotrophomonas maltophilia; identical to SEQ ID NO: 457498

SEQ ID NO: 505895 - DNA, 567 bp, Stenotrophomonas maltophilia; identical to SEQ ID NO: 340572

SEQ ID NO: 505896 - DNA, 645 bp, Stenotrophomonas maltophilia; identical to SEQ ID NO: 340571

SEQ ID NO: 505897 - DNA, 591 bp, Stenotrophomonas maltophilia
atggcaacgccagccgtaacggcgctgctgcgcgcactggcgctcactgcgggcctgttcgcctgcgccgcccatgcccaggaggttccgccaccggcctaccagcttgccgcacagcgcgcgggcattccctcgacggtgctctacgccgtggccttgcaggagagcggcatgcgacgcaatggacgcatcgtcccatggccgtggaccctgaatgtcgccggccagtcgcggcgcttcgccacccgtgccgatgcctgcgccggtttgcagcaggcgatgcgatctacgccacccacgcgcatcgacgcgggcctgggccagatcaacctgggctaccacccgcaccgctacacccatgcctgcgacttgttggacccgtaccgcaatctcgccagcgccgccgagatcctcaaggagcagtacacccccggtgaagactggctgctggccatgggccgctaccaccggcccgcgggcggtgagcctgccgcccgctatcgacgcagcgtatcccgacacctcgcccgcgtgcagggcacgcactcaatcgccacggcgcgagccgtgcgtcaggagtcgaccccatga

SEQ ID NO: 505898 - DNA, 540 bp, Stenotrophomonas maltophilia; identical to SEQ ID NO: 340568

SEQ ID NO: 505899 - DNA, 384 bp, Stenotrophomonas maltophilia; identical to SEQ ID NO: 340565

SEQ ID NO: 505900 - DNA, 372 bp, Stenotrophomonas maltophilia; identical to SEQ ID NO: 340562

SEQ ID NO: 505901 - DNA, 378 bp, Stenotrophomonas maltophilia
atgaacaccacgacacgcatccgtaccgcagaacgactcggccgcaccttgggtcgcggatggcgtgcctacgtgcgcggcgaacgccgggcatcgagctggttggtgtcaaaggggggggcggcggccggtgccaccgcgctcgtgtgggtggtcaagctggttgcgctcggggtgctgctgtacaccaccttctggctggcggtgttgctactgctgggcgttgcggcggtatggatggctggcaattcggctagagatgaagaccgctggacgcaacaggatgaattgcgcaatggcgaggcgggctttggcctgtattcttccaatggccagcggctcgaccctcacgacccgaacgatccgttcgatgactga

SEQ ID NO: 505902 - DNA, 459 bp, Stenotrophomonas maltophilia
atgcaacggcatggctggacgctgctcttccacgactgcgtgatcgagcagttgcagaaactgcatgcgaccgcgaggcgcgcgcaggagaacgacccgacgggcttcgagtccaatgccaacgtcaagctcttccgggccttgagccagttgatcttggatgtggtgccaggcgatccggcacgcgacgagtaccgccagggcaacaccttgggacctgcccaccgccactggcgaagggccaagatcggacggcggttccggctgttcttccggtatgactcgaaggcgaaggtcatcgtgtacgcctgggtcaacgatgaacagaccctgcggtcttcgggtagcaaatcggacccgtatgtcgtgttcgagaagatgctcgggcgcgggaacccaccagacgactggcatgcgctgatacaggcaagcaagcaggattggagcaaactggaatag

SEQ ID NO: 505903 - DNA, 318 bp, Stenotrophomonas maltophilia
atgcctgccatccacgaagttgccacgctgacctccaaaggccagatcacgctgcccaagcccatccggcaggcgctcggcgtcgatgccggtggcaagctcgcgttcgatctgcggggcagcgaagtcgtcgtcacccgcgtcgatgccgagcatgaggaccccgccatcggcgcattcctgagcctgctggcccgcgacatcgaagctggccggaacgtccagggcctgcccgaggatctggcccgcgccatgctggagcatgctggccacggtctggacctggacgaggagatcgacgggaaagtggaactctga

SEQ ID NO: 505904 - DNA, 1878 bp, Stenotrophomonas maltophilia
atgctctctctgttccagcgaaaacggcccgcggttgctgctgctccgacgccaccatcggtcaccgacctcccgaaagggttgatgcggcccgagtcggccgcatcgctgctggccaccccgcgccggcagaagctgctggagcacatctggcagcgcacgtcgctctcacgtaagcagttcgccaccttgtaccgggcgccactggaacgctacgccgagctggtccaggctttcccggcttccgaggcgcatcatcacgcttaccccggcggcatgctggaccatggcctggaaatcgtcgcctacagtctgaagctgcggcagtcccatctgcttcccatcggcgcaagccccgaggaccaggctgcgcaggctgaggcctggactgctgcagtcgcctatgccgcgttgttgcacgacatcggcaagatcgccgtcgatctgcacgtcgaactggccgatggctcgctgtggcacccgtggtacggtccgctgcaccagccgtaccgcttccgctaccgcgacgatcgcgaataccacctgcacagcgcggcgacgggcttgctctaccgccaactgttggacacccaactcctggactggctcagtggctatcccgacctgtggggaccgctgctctacgtcctggccggccagtacgagcacgccggtgtgctgggcgaactggtcgtgcaggccgaccgcgcttccgtggcccaggaactgggcggcgatccggcgcgcgccatggccgctcccaagcacgcgctgcaacgcaagctgctcgacgggctgcgctacctgctcaaggaacagttgaagctgaaccagccggaagcctccgatggctggctcaccgaggacgcgctgtggctggtgagcaagacggtatcggacaaactgcgtgcgcacctgctgtcccaaggcgttgacggcattcctgcgaacaacaccgcggtgttcaacgtcctccaggatcacggcatgttgcagccgacgcccgacggcaaggcgatctggcgcgcgaccgtgaccagttccaccggctggtgtcactcgttcacgctgttgcgcctcgggcccgcgctgatctgggagccaagcgagaggccggcgctgttcgccggcacagtggcgatcgacgcggcggccacggacaaagggcccgatgtgtcagccactactccgccggccggagcgcagtcagcctcggagggccaagaggttccgccatgggagggaggtaacccctctcgtccagcgaaaggtgaaccgctgcccgacgccatggaagacatgctttcgatggtgggcatggtgaattcacccgcaacccggcaggacgctgaagcaccttcggagccggtgtctgccgcgcgtactgaagcgacgaccttgaccgcacctcagcgttcgtccccagcgcccaagcccacgacagcgccatccggagagcacttcatggcgtggctgaaacaaggcatcgcttcccgccggctcatcatcaacgacgcgaaagcgctcgtgcataccgcgagcggcaccgcctacctggtcagccccggcgtattccagcgctatgcgcaggagcatccgcaagtcagcgcgctggccaagcaggagagccagcaagactggcagtggatacaaaagcgcttcgagaggctgcagctgcatcgcaagcaaccgaacggcctgaacatctggacctgtgaagtaaccgggcctagaaaatcccgccgtctgcatggataccttctggaagatccgagcctgcttttctcggaaacgccttcgagcaatccctatctatccctgttgggtgagaccagacactgcgaacagacttcaggaaagcaaggggcgtcaacatga

SEQ ID NO: 505905 - DNA, 225 bp, Stenotrophomonas maltophilia
atgacctcctcaatttcgccggggcagtctattgccgccaaagcgcacctttattcagacagagccaaaggcccgatgagcgcagcgatgatggaacaaggcagcgcctctcccgtctctgggctgcactacgccggcaagaagcataaggtcatcgctcccgaccgggagattgtcttcgagttctcgcaggactgtctggactcgggccgattcgctccttga

SEQ ID NO: 505906 - DNA, 258 bp, Stenotrophomonas maltophilia; identical to SEQ ID NO: 340560

SEQ ID NO: 505907 - DNA, 369 bp, Stenotrophomonas maltophilia; identical to SEQ ID NO: 324057

SEQ ID NO: 505908 - DNA, 969 bp, Stenotrophomonas maltophilia; identical to SEQ ID NO: 340559

SEQ ID NO: 505909 - DNA, 276 bp, Stenotrophomonas maltophilia
atggctgcagttgcgttgtcatgctccgattcgccgaagctgccgcggatggcggcgtggctggtggtactgctggtgcatggcgggctcgctctgtggctgctggacagcggccggatcgaactgcgcagcggtgagggcccgcggatctcgctgcattggctgccactggaaccgccggcgccggtacctcaacagcccgcctcgccctccgcaaagatgacgcgtccggccgcatcgatgatgccccgccctgctccggttgcacaggcatag

SEQ ID NO: 505910 - DNA, 765 bp, Stenotrophomonas maltophilia
atgaaaatgatctcccgttcggtgctcgccgttgccgcctcgctggctctggtcggtgccgcgcatgctgccgacatcgtcggtgccgccagtgccaggaccgatgccgagctgtacgtggcggttggcgaatcgcaggtcaatggcggcccgcaccgcgctggcaaggccggcatcggtgtcggtaccgtgtcccaggccaagccggtggacttccagggcctgagcgcctactcggcacccaccaccgtcaatggcgtgacggtacgtaccctggccatgccgatcaccggcgcaccgggaagccacgccggcatgggccacttcaacttcgtcaaggtcggcagtggcgatgtctggttcggcgaatggtccaaggatggcgctgccggtggcttcaacaaccgccaggtctacttcgttggcgaccgcgccggcaccacgctgcccgccggcgtggcgtcctacaccgtggccggcctgaacaagttcaacggcagcaacctgctgagcggcaccttcgacgccgacttcggcgccggcaccctggatggtgcgctgtccggcaatggcctgaccctggccatcgttgccaacatcaacagtgccgatgcatcgttcgccggttcggccaacgtcaatggcagcgtcaacggcaccacccagggccagttcttcggcgccaacgcggccaccctggccggcatcgccaccttcgccggcaacagccagtacgacaccgccttcggcggcagcaagaactga

SEQ ID NO: 505911 - DNA, 1188 bp, Stenotrophomonas maltophilia
atgcagcgctggacacttctgttttcattgacgctctgctccgccatgacggcgcccgctgtgtgggccgcacccgtgtgggtcactgcctggacggccgcgcccgcgcccgaccgcaaggacggaacgtccgatgcgccggtacagttcgccgcacagaccgtgcgccaggacatgcgtatcggcagccgtggcgatgcgctgcggctgcgcatcagcaacgagctcggcacggcgcccttgcgggtcgaggacctgcgtgtgggagtgaagaacggcaaggccgcaccgctgccggtaacggtggatggccgcgcggtcatcgaggtgccggtcggagccgcgctgctgagcgacccggtgcggatgccggtggcggcgctgcaggagatcagcgtgagtgcctatttcccgcagcccacccgccccgccgtgcgccgcaccgagctgcgggtcgcagatggcaggcagacagccgtcgccgacagcgtgcggctgagctaccagcagaacgtgttctcggcagtgatggtgcagcgtgatgatcgtccccaggtaatcgtggcgctgggcgattccatcacggaaggcgccaccgcacgccgcggcaccttcaaccagtggccggagcggtttgcgcagcgcctgcagcaggcctgcccgaaccggttcgtggtacttaaccagggcatcagcggcaacaagctgcttgaccacggccgcagccacagtgcgctgtcacgattggatcgcgatgtgatcgcggtggccgacgccgatcaggtgatcctgttcgaaggcatcaacgacatccgccacggcggtggcgcgcagccgctgcctggacgcaatgcggcggacatgctgctgggctatcaacaggttgcggcgcggctgcatgcgcacggcatccgcgcctggctgggtacgttgaccccgttcggcggttccgagcgctacgagcccgtgtccgccgccacccgcaccacgatcaaccagtgggcacgcggcggcaacagcggcttcgacggcatcatcgatttcgatgccgcgctgcgtgacccgaaggcagccgaatcgttgcccaacgagatcacccgcgaccatctgcatcccaacgacgaaggctaccggcgcatggccgatgccatcgatctgcgcatgctgggctgcaccacccccgagtga

SEQ ID NO: 505912 - DNA, 1305 bp, Stenotrophomonas maltophilia
atggggtcacgcttcctgctgcttgctgtactggcgctatgtgcgcaaccaaccgtgatggccaacgaacgggagctctccgacgcggcggcccgggaggtcttcctgcacgcagaacaactctgcaacggagaccggggccgactgtgggggcactccctgtgcgggccgatgatgctggttgatccagggagccgtcaggtcatcgcctcgcacgcagacgtacagggggcgctgaaggcaagcggtaacgtgttcgcaggccagcttccggccgatgcgatcgtcgccaataccgccgtggactggtccggcacacgctggacgcagctgctttggccattgccgcaggacgcgtcccggcgcagtaccctgctggctcacgaaatgttccatcgcctgcaaccggcgttgcccatcatcgcgccgaccgagggcggaaacgaacacctcgacacgcttgaaggacgctactggctgcaactggaatggcgcgcactggcggatgcgcttgcggccaccgatgcagtggcgcagcacactgcgatgatggatgcgcttgcattccgcgccgaacgccatcgccagttccctgcggcagcgcaggaagaagcggcgctggaattgaacgagggcctggccgagtacaccggcgtgttcgtgggcaacccaacgcgctccacacgtacccaggcggcgctgcatgaccttcgcgcgcacgttgctgatctcagcttcgtccgctctttcgcctatgccaccggtccggcctatggcctgctgctggaccaggttgcgcccggttggcatcgcaatcttggccatcccgcccgcgatctcggttcacttctggcagagcgcatgcacagcactccactcaccggcgaagctgcactgttgaccacggcagcacgctatgacgggcctgcgctgcgcgaaacggaagtgcagcgcgaacagcagcgccttgcacagcttgaacgcaaccaggcccgcttcgtgaccgggccggtactgcggctggatcttcgcagcatgcgcatccagttcgaccccagcaacatgcagccgctacctggcatcggcacggtgtatcccacgatgcagctgagcgacgtatggggaacattgacggtcaccgatggagcgttgctgcagaatgactggaaggccttgttcgtgcaggcgcctgcctcgggcaaactgcccctgcagggtcacggatgggcgctgagcctggcccccggatggtcgctggtaccaggagcgcgccgcggcgactacgtgttgcgggcacagccctga

SEQ ID NO: 505913 - DNA, 1056 bp, Stenotrophomonas maltophilia
atgaccaccgctgacctggacacgtttgcccgccgcgtgctggccttccatgccgcccgtgggcctgccaccccacgctgggcactggacgtggcccgccgttccgaaagccctgtgtgcgctttctgcaccgcccccctggacttggaccgtcgccattcgtgggggctctcaccgctcgttccgttgagcctagccggcccaagggacaccgagaacctgcgcatggcttgcaagcgctgcatcaccgagcggggcagccgtgacctgttggcctggcccgagttgagccaacggttgcccccagccatgctggatgccctgctggccgaccggctgcttgtcctccagcgctccgacaaccacctggtcgaggtggggcgctttgccaagccagccaccgtccatgcccagctccaagagcgctggatacacccccggttcgtcgttcacgtcgagcggcattcggacagctggatgctggggtggccactggcccagcgtcccgatctcacgcggaacgacttggccgcgctcttgcgcaacgtgcaccggggcgaatggctggaacaccccgaggtggtggccttcctggtgacggaagaagtttttcaatcagcggtgtggcaactgattgccctccacgcgttggtcattcccctgcctttggggactgctccccctcccgaccgcacctttgagaaccggtggatggcccgatatccaagcctgagccagatccgatggcggcgacagggcgcgcacgaaacaccctggcccagccagggcaaagaccatgtcccggcttacagcgacaagcccaacgcggttcgcatgcgaacccagcgtcaagccacacgtgagggggaaacgaaggcccagtggttggaagcaaggcggcgtttggcgaagcgagacgcgggcgtggcaagtgggacgctgagggcatggttgcccggggagcgggcagccatgcaggccgatgtggacgatctagcgtcgtcgtggttggaggcccgccagcggaaagtgcaaggccgctctcagcggccgtga

SEQ ID NO: 505914 - DNA, 882 bp, Stenotrophomonas maltophilia
atggaaagcgaaaaggaacgcatcgccaagtggcgggcggagaaacaacgacgacgccacgaagagaagagccaagccgccacgcggacctacagaagcctgtttgccatcgatgacgatgagctgaccgatccgcccgagcttaaggaatacttggtccggcagaacctagccaagggcaacctcgcccgccggatgagcagcggtgaggtccagttggcgctgaacacctggggcttggacgaactgaaccagctttggagcatgcgccgagagaagctcacttacctcgaagacgccgccctcctgttggcccacatccgacaccgatccggcattgacccacagctgcgcccggcggcagagctgcttggatacgatgccatccaagcactcctgggagtgctggaagagagcgggcggttggcagtggaacaggcactgcccccggcggcggaagccgtcgtggccgagggcaagcgggtggaacaagtccttcgggtgatccgagagggccaagccgagtttcgtaaacgcctagtcgctcactacggagccgtgtgcatggtcaccgggaccgccttggcaagcgtcatcgacgccgctcacatcgtcccctacaacggggcagccaccaatgctttgagcaatggcttactgctacggaaggacatccacgcgttgttcgatgcaggcctgttaaccatcgggccggacctggtcgtttacgtcagcgcgggggtggacgatccgttctaccgttcgctggacggaaaggagctctcgctggacgctccgcccaagatgtccaaagaggccctgcggcggcgactggcgggcaatgaatcgtccgaactggaggttgccagccttccccaatga

SEQ ID NO: 505915 - DNA, 624 bp, Stenotrophomonas maltophilia; identical to SEQ ID NO: 502964

SEQ ID NO: 505916 - DNA, 174 bp, Stenotrophomonas maltophilia
atgattgaaagccccgccaacttgtcccgccttattgctggccttcctttcgcgcacatccctcccacggttcccgcgttcctgcccgaaggcaagcttcgccggcaagcccgcctggcgcgcgagcaacgccacttcgagcgccagctgcgcaaggagctgaaatggaaatga

SEQ ID NO: 505917 - DNA, 918 bp, Stenotrophomonas maltophilia
atggaaaagttcgattggtcgaaggtggagtttgcacgcacaccctggcggagccgggttatcccggatgcgctgcccatcctcatccggtgggcgcaggagggcgaagctcattcctacagcgacctggcccaagagctgcacgacaccttcggacacgagatcaaaccccgcaaagacctctacggcaccgtcgccgggggagtggcccaggccctgcagtggctcagcaagcggtggaaggagcccatcccgcccctccatgcaatcgtcgtcaacaagaacacgaaacaccctggcgagggtgccataacgatttcgccggcctacttcgcgggcaagaagttggacaccgaggaagagcgccgcgcgcacttgcgagaggcgatggaagacgttttcacctatcccaattgggaccaggtcgcccgcgctctgggagccaccatgctgaccccgtccgctggggcggttgaagaggtggcagcggatgcgcctcttccccttcctaaagtccaggagggtggcaggccagaaagcgatgagcacaaagcgttgaaggcgtgggtggccagccatcccgaagagttcatggattacggcgacttcaccacgggcacgaacgagaagctcttgagctccggcgatcggttggatgcccacttcgacaacggcaggcaccgtctagccgttgaggtgaagaccagccggtgcagcgaagacgaactccagcgaggcgtctatcaagcggtgaaataccgcgccgttctccgggccgagcagaaggcgatccgtcacgtgcccaacggggaggcggtgctggtatgcacgcgcgctccgaacacggaaactcgagcactcatcaaacgcctgcaggtgcggttccagcaagtgccgctggaggcggagcaagaatga

SEQ ID NO: 505918 - DNA, 474 bp, Stenotrophomonas maltophilia
atgacgcacgccgccgctccatccacccttcaagccccggcctacggcctgctgctcggtcacaccgagtgccatttctgccacgcgccgacgcccaccgccgcgatctgggtgccctcgttcgaggagcacgacgacgagggcctggtggatcagggggagggtggcgtgctgcgctacatcgagcgtttggacaagaaaactgccgctttcgtggcgggccacgcgccctggcttcgcttcgccgccaccctgacgtcagggcaaacctacctggcccatcactgcaccacctgtggggcccttcaaggggaccacttcgtgttctcgccggatggtccttactggccccagagcgacgtcgagcttgcacggctgacgtttgtccagggccttggcccgctcaccgcccaagcatcggcagggcagagcacctggatggaccgggtccctctggtctgcgcccaggcctga

SEQ ID NO: 505919 - DNA, 327 bp, Stenotrophomonas maltophilia
atgagcaccaagacctacacctacgccgaagcaatccgggttgcccgcaaagaaggcgtcgtcaagctggaggaaggcgtctatctgcgttcccggaaatcgatcctttccaacacttacgattactgcccctacagcggttcatacggaaccgatctctacgattacaagaacgagtttgtggacttcaggcaggctccgttctggatcactaccgactaccgcccgggcccttacgtctgtgaggtccagcccgtcttcgaagaaaacgacctgttttacgttttcgaattgctcgcatactgcgagctcgcagaaagcgagtaa

SEQ ID NO: 505920 - DNA, 510 bp, Stenotrophomonas maltophilia
atgagtgtgggaacggatgtccgcagcttggaaacaatggatcaggaggagaagctcagagagctgttctctaatggactgaggttggcacgattcaatttagacagcttgcctgctgaggtgaaggactacggagcggtatggctttcaaccaccgaagtcgcgctagtagatgagcgcatgattggcgccttgataagtgcgttgaacactcttcgcgacgaacgcaatctccatgcggcgctaattgccgaacaggacgcagtgctcgtcttgcagcgcgatgcgctgagagccattgaaagctcttcccaacgggaccaagaaaccgaacggcccagacgcggtggttggatcacgcgcgtcttcgggaaggcgcgtcgggctggagatgcgtcacattcgctctcgggcagtcttcgcgaggctctagatgacctgctacccggctgggcaaagggcaccctgaaggtgggcgaggaagtctgggaaatctacggcaagaagtag

SEQ ID NO: 505921 - DNA, 345 bp, Stenotrophomonas maltophilia
atgttgaagttctacacccaagatccagcaggccttctccagaagttcaaggcgaagctcaaggccaaacaaggccaggacagcattcagacgtgggagcaggtgggggagaactttgggcacacttccgagcgctggaaaggcaagctggcgttcaaggccaacatcaacgctgacgccacgcaaccgaacctctcctttacagtgggccctatggcgaaaggcacccaagaagaacggcagatcatctacgcctattaccacggccacctgcttcaaacgttcgtggaccacctgagcggatacttcactgctgctcaatatgccgacacgcgcggcaagtag

SEQ ID NO: 505922 - DNA, 171 bp, Stenotrophomonas maltophilia
atgaccaccgtcggcgcggtgctggccaccgtgctgggcctggctggcatcctatgggtcaacgggcggcatgccagcggggtgcgtcgtgagcgttaccgcttgcgggcccaaatcctggccggtttggcgctggcgtgggtgctcacgatggcgaggctgtccacgtga

SEQ ID NO: 505923 - DNA, 369 bp, Stenotrophomonas maltophilia
atgttcattggattcagactgacgaagcggcttgtcgtcaatgccgtggttgccctggtgctggcgcgattgcttttcatgggcatggacggcttggaccggttttccgacacgtggaaccgcaactttggggcgaacatgcccaacgccagcggattgcgcggcgccgtcaacggcgcacgccaggtgttcccgtctgggctggacgagtatgcgcgccaaggcgaactggacgcggcccaaagcacctcgttcatggacgtgtttgccagcgtgttcgggcgcgtgaaaaacgaggaggtgatgttgccctctaccatcaattccgccggaggggagggatcgatctatgaccgctacgaccaatga

SEQ ID NO: 505924 - DNA, 300 bp, Stenotrophomonas maltophilia
atggcccaaaccctagaagagctggcagcgcgattggatgcctgcgaagtcgatctggaagcccatcgcggatacctcaaggcgttggagtatgggctgcgaacgatcattgccagccacccgagcccccaactactgcccgtcgcttggaacatggctcttgcgggagtggccgacgcccatgccggccaccagacgctcacctacaacacggccttgcagcaggggctgcaggcgttgactcaacaattcaatgcccttgggcaagggcgcgaccaagcatccaactttcttggctga

SEQ ID NO: 505925 - DNA, 534 bp, Stenotrophomonas maltophilia
atgaaaaatttcgttcttcctctcggcttcttgctgctgtcaggctgcgccacatttgcgccagcgccgccgcggcaggtggctttgaccaccactttcgatcccagcgaagttgcttggttctctgagaaaggcactggcgccatcaacggccaagccttcttccaaacccggggggggcagcccagaacctgcgcggggttggaagtctccttgcagcccaagtccggctatggtcgcgagcgcctgatcgcgctttacggcagtgccgagagcgggtataccaccgtgggttcggccaacgtgcagttcatccctgacagcgccgattacaagcaggcgcgcaagacatcggtttgcgacgcccaaggcaacttcagttttactgggctgcctgcaggagaatatttcctgaccaccggcatcatgtggtccgttcccggtcaagagttcatgcctccgcagggtggacttctgatgcaaagcgtcaagctctcggatggggaatccacgcgagtcatcatgacccgttga

SEQ ID NO: 505926 - DNA, 195 bp, Stenotrophomonas maltophilia
gtgacgaacatcaacgcccactggtgcaccgccttcaacgccgctctgcaagcgcacttcgccctcaccatccaggacgccgggctcaccgacatggagttgtcccgctacagcgacctgcagcccaaagaggctgccctcacctttggcgaagaccacgatctggatcgcgtggatcgcggatggtttggctag

SEQ ID NO: 505927 - DNA, 210 bp, Stenotrophomonas maltophilia
atggtcaagaagaatccccagcccgccaccgaccgcctcgacgcctttctggtagaggaatacgaagtccagggcgaaaagcgcagcaactggtcgaagatcggcgctgcctggccgcaccaggatgacaaaggctaccgcctcgttctcaacgccctgccggtcagcggggtggtcgtgctccgtctccctgagcccaaagacgcctga

SEQ ID NO: 505928 - DNA, 1122 bp, Stenotrophomonas maltophilia
atgagccaacggatcattggcctggccctcgtagccatgctcgtgggatgcaacgcgcccacaccaccctcgccgcccgtggtggcaccgactcccgctccggctttacccgagccaactcccgaagcggaaacgaagccggcgcaggtggaagagcctgctcccgccgccgatgaaccgagggggcacgtcgatgatccggcggtggtggcgcggctgagaaagctgattaaagaaagggacgcattgggcaccaaggtgttccaggctggcgtgtccatcgatggggcaagttcggccggcacggcgttcaacgaaatccacatccctgagcacacgtgctttgtgctcggccagctgctggacaaggcggacttggtaaccccgctggctatcgcatacgagccggactacgagactcaaaccaccgagaatgcttcagacctccgaatcatgggcaattccctaggcaacttcgccagcgttgctcagcgcatgctggacatgccgcacgacgaacgtgtgatcacttggaacctggactgtgccggccagcttggcctgcccaaggcctacatcaagcaggagggacaatcctcgttctatgtggtgacgaacgagggccatgccctgaaggtgttgggtgatattgaggccgggtttgcacagaagatcgaagacgccatcgaggccaaccccacggtagaagtagtgatgctgggaagcggcgggggctacgtcgatgaagctatgaaggccggtgcttacattcgacgcaagcggctggacaccaccctctacaacaactgctactccgcctgccctctggtcttcatggctggggttgaacggcagaactggtcgccctatcccaagctcggattccatcagatctacacacccaatggtcatgccatcccctttgacagccagccctaccggcaaatagctggctacctgaccagcatgggcgttgagcctcgttacgtgctgcagaagatgtggtccgcgccgccatcgggcatgaccaacgtggacggacaggacgaggatctctgccgggccaacatcaccacctggattcagcggggttgttctaaccgagactacggccacttgtga

SEQ ID NO: 505929 - DNA, 1461 bp, Stenotrophomonas maltophilia
gtgtgccttctggcgatgctcgccgtggcccaagccatcctctacgtgcgtgacaaggcaggggcggaggccgtggcggaagccgcggtggcgcgctcggaggctatatcccttgcaaggcgcgtcgcggccgaacaagcctctcgcattggacagccgccttgctcggctaccgacattgactcactgaaagagatcgcgttccgctccagctacatgagcgacatcggtcgcatccgagacggacgccttgtctgcagcgctctctgggggcgctcgcgcccctacaccctccccgccccacgcttctccagcggcgctgtccggctttggcacgcatcggatctcgttggctccccctacaccgggtccaatctgatcgcccaaggcgacacattcaccgtgtcctccccgtctgccttcgagagcttggaccctgcgcgcagcagctccatcagcatcgaaacgaaggaccgatcgtttacattccgcaccttgtccccgaccagccgcgtcggcaccccgtctctcgtccaagctcaacattgcagccgggtggccgacgtttgcgcgttcgttaccagccctaggcacgtggtgtccgaactgccctcggcgttgctcaccaccatcctggcagcgggtgcctcggtagggctgttgctcgcgttcttgctgatcaaacaccaaatcacggctcggcaaaccatccagcaacggttggtgcttgcactgaagcgcagcgagatcgaactggcctaccagccactgcgtcgaattggcacgcgggagctcgtgggatttgaagcgctcagccgctggcgcccgccgggagacgatgaaatcccgccggccgtcttcgtgcccatcgcccaccgcctcggcctgagtcctgatctttttcgatacgtgctggcccgtgccatgactgacctcgcccccgctctgcgggagcacagaaacctctacgtgagcatcaatgccgagcccgtggacatggcccaagagtgcatcgttcgctacatcagcagcgtttccaccgattctggcgtgtcccccgaacagattcgcatcgagatcaccgagcgggaagaactcgtgtctgccgccgccaagagcaacatgcaggccctctcggttctgggataccggttcttgatcgacgacttcgggacgggcagcgcgaacttctctcacctcgcccagtcaccgtttcgaggaatcaagatcgatcgcatgttcgtggccgctatcaacgaggactcacccttgcggcccgtgttgccagggatgtatcgcatcgcgcgtgagcttgggctggatgtcatcgcagaaggcgtcgaaacagaagagcaagagctacttctctaccggatcgcgccagaggccatcggccagggatggcattacggccgccctctctcaaccaaagacgctctggccgccatccaggttgggtag

SEQ ID NO: 505930 - DNA, 288 bp, Stenotrophomonas maltophilia
atgcacgaggctgagacggaggcgttggtcaagttggagctccgcctgtgcgagtgcgagaggcgcctgtccaacgctgagggcaaaaccaatgccctggagtacgcggtcagggcgttggtcgccagttctgcaaatcccaccgcggtgcgcgtggcgtgggcccacctgatgcccatgatcgtcgacaaccatgtgcctccgcagccaggctccaatgcagactttctgcttggtttgcgtcatggcctgaggtttgtggccgagcaaatcgacgctttgccctga

SEQ ID NO: 505931 - DNA, 234 bp, Stenotrophomonas maltophilia
atggggacttccaagccagataacgatttgaaacgggtcaccttgtcagtgggagagcacgtttacacctgcgagatctggcggctcagcgaaagccgctgggtcctcctcggtgtcgaggtgcacggcgtgggtgagcgctcggatttgggcatcaaagcgccgtcgtgcctcaaagtgttggaggcgggggagcagatcgcctctgaaatcctcaccaatccctgtggctga

SEQ ID NO: 505932 - DNA, 777 bp, Stenotrophomonas maltophilia
gtgaaaccaatcaatggaatcaggaaacgggtgaaatggtggattgacgagcttcgtgatctcaatccctgggggcaagtgaattggtggatcgaagcgtttcgtgatcccagaaagggcttggatgacgacccctgtaaggcgcgagtggacttcttcctctttacgacgttttcccccctcttgatcccctacctaagggtattggagcgcctcggaattcgcgtgggtgtcaggactaagcggtggcagcggttatggaaggagccgcctatctttcggttgttgcggtttcgccacaaggaacgggaacgattctatctgaatgaacttcagcaactgattgctgaaggcgccgatgtgaatgctcgggagaaggaaggcggagagaccgcgcttcacctggctgcacgatgtgggcgggtggccgtctgtcgcgtgctgttggcggctggggcagatccgaatgccgagcgttccgcgcaagatttctccgaggaggagggtatctgggcgcccatcttttcggcttaccttgagagcaatgttgagttgctcgaggtgttgctggaggcgggggcggacccccatgttgaagcatgggtgcgaaagcttgctccagaggagaagacgcaccctgatgcgtggcttgaacagcaacgtccggaaatacgcgagcgcctatgcagatgggaaacggaacaagaggccctgcgtttggatgcgactctccctggcgcaacgaaagccgttccgaatagtagggcacggctatga

SEQ ID NO: 505933 - DNA, 495 bp, Stenotrophomonas maltophilia
atggggatcgcgaaaaccattgatggggcgggaggaaaaacgctgaagcggtcgaaacgtccacccacccgaaacgccgagctctacaccgtgaccgtctaccccgagcgaaagaacgccgcgatcgccgtgacttggcgcacccccacggggcatgcgagaagccttaacctgggttgccacgccttgcgggtgatcgaaacccaatcggggcttcccgacaccagcaacgggcagatcgcctttgagcttcgcattccgttgccgatgctcgtggccatccaggcagaaatgggaatcgatagccggcggcggaggcgggcctatgtgcaagccatcgagcgcgctatcgccatgacgcgggagctgggattcccaattggtggggcaaaccccaccggggttcccctcgacttcaacggcatgctgctccccgaaaagccgacccttgtcacggacaagcggcgagccggggtcccaaggaggccattgtga

SEQ ID NO: 505934 - DNA, 573 bp, Stenotrophomonas maltophilia
atgcccgtatcacccgacaatgcctatcggctgttgaaagctttcggaatgcttgagttccagctcaagcagaccggtgaattctttcagaccaagacccccaagcctcccatctggaagtcgttcaagatcggctcactcgagatcgatgtgcgccgcagcgccttaccaccacctgctcccgtccacatggtagacgtggactggaacaaggtggatcgagcggtggcgcggatggggcaagcattcgtcgccctcgttcccgttcccgcgcagagaatgctgcttgcaccaccacgtaatcggccgaaaagggagcgcattgagtttgacctgacgggccgaccacgagcggcctaccagcccgtcaacctaccccacaacgacgccgaagccttggtcgttgccatgcgccgtgtgcgcaacaacctcttccacgggggcaaggaagacccgctggaggaaacgtatttcggagaagacaacgattgggccgtggccgccgcagatgtcgcggatgctctgttggatcttctcgaccgccagctgctccgccccgttcaggccccctga

SEQ ID NO: 505935 - DNA, 150 bp, Stenotrophomonas maltophilia
atgaaggtcatggatcaggccaacgcgaagttcggccggggcacgatgggcatggcgtcctcggcctggcgatccaaggggccggcgctggccaagccggtgtgggccatgaaccagaaaaacttgtcgccagcttacacgacccggtga

SEQ ID NO: 505936 - DNA, 1281 bp, Stenotrophomonas maltophilia
gtgctgacgaaccctctcgatgaccacgtgttggagcggtgcttgggcgccgcttacgtgctgctccaagagagtgggcacaccgacgcggctgatcttcttcgcacctccaccgcatctatccagcacgacacgtctgatacctggaatgggggcacgaactactggaacgtgttgctggaggtgccggcgccggagttcgcgcgcttgcggcccaagctcaaggacgtatgcgaacagatcaccgaggcattgtcggaagccatccccccgaatggccgcgacttcttcgccgcccggttgattcccatcgtgggccaaaacgaagactggcgctccgcctctccggttgccattccccgaaacgtccgccggaacatcttcgatgggcttcggctggagcaggtgaatgtgttcggcgcgttggacgacacggagttcctgagccgcatctacgagcttcggcggttgccatccaccgatccgcgctacaaggatgcggccggggacatctaccagcaccgggtcaacaattttgactgggacgattactggatcttcgacgacgaccgtttcccgttgctcgatggtccggccgataccttcctgcggttcttggcggagatggtccacccggtggtgaggcctgaccgggaggaggccgccaccatcgttgagcacctcaacgaccaactgcggcaagcgggttggcacttggtcgaagtcgagcggatcgcaggaagggcccggtatgaaccccgcccgttgacctccaacggtcaccgatcctttgagaggggaaggtctgccgccgattccttggacgcgggcgccatcgccaagcagatacagcgcatggaatacgcggttgagaaagatcccgagctggccatcggcagcgccaaggagctggtggaatcgtgctgcaagaccatcctgggcaagatgggggtggagataggcaagagcgacgacatgaacgacttggccaagaagctggccaagagcttggacctggtgcccgaagggatcgatgaccaagccaagggggccgagtgcatcaagcgcatcctgagcaacctgaaccaaatcgccggtaacctggccaaccttcgccgcctctacggcaccggccatggcaaggacggtaagcaccgtgggctgcagccccggcatgcgcgcttggcggtggcgtctgccgtggcgtttgtggatttcgtcacggagacctaccgggaccgcacgcaagcacggccggccaaatcggaggtggatgggtga

SEQ ID NO: 505937 - DNA, 1194 bp, Stenotrophomonas maltophilia
atggctgattgggacgaagacgaggccttattggccgaactggggcaagatctggccccgatcaaggccgctgcccgaacgccccaggaagaacggctgatcgccggtttcgaggaaatcctccggttcgtggatgagcatgggcgtgctcctcagcatggagaggagcgcgacatctttgaacgcctgttcgccgtgcgcctggaccgcctgcggttgcttgccgatgcacatccattgctcatgcccttggatacgcacggattgctccgagaagccccaacccttgctgccaccgggcaagatgaatcggtggacgatgacgccctgctggccgacttgggtgtgagcgaaggaggagcagaggacgacatcacccagctgcgtcacgttcggtcctatgaagagcgcaaggccttggaagacatcgccagccgcacgccttgcgcagactttgagcgctttgcaccgctctttgagcgcgtggagggggatctcaagtcggggctccggaaaaccctgcggtttggccgcgacgccagcgtggagaagggcaacttcttcattctcggcgggcagatggcttacgtcgccgaggtaggcgagccggtgcgcacgcccaatggggaatccaacgccaggctgcgcgtgatctactccaacggcaccgagagcgatttgctcgagcgctccttgcagcgggcgctctacaaggacgacaccggccgacgcatcaccgacgacgattacggtcccctgtttggggatgctttggaaacggacgacgtggtgaacggcaccatctatgtgctgcggagcctttcccgcaattcatacgtccaggagaatcagcagctgatccacaagatcggcgttaccgggggtaaggttgagaccaggattgctaacgcggagagggagtcgacctacatgttggcaaaggtggaggtcatcgcgacttacaagctcgccaacgttaatcccattcgccttgagaacatctttcatcgcatcttccagcctgcgcgtcttgagctaaccctccgagatcggatgggagttcctgtgaagccgcgggagtggttcttggtcccgcttccggtgattgacgaggcggtcaagcgcatccaagacgggagcatcaccgattacgtctacgaccccgcccaagcgatgctggttcgccggagctga

SEQ ID NO: 505938 - DNA, 2106 bp, Stenotrophomonas maltophilia
atgaccatggaaaccaatccgaccaatcggcacaccgtgccgtccgtctccatcacggccgctcgcaccggggagtcgaacaaggtcaacgcgcttggcatgcggcccatgcaggagcgagcctacggcaagcggggcgagcagtttctgctcatcaagtcgcctccggcctcgggaaagtcgcgagccctgatgttcattgcgttggacaagctggagaaccaagggctaaagcaggccttcatcgtggtgcccgaacgctcgatcgggggcagctttgccgacgaagagctgagcaagcatgggttctggagcgattgggtggttcggccacagtggaacttgtgcaacgcaccgggcgaagacaacgggaaggtcgccaagtccaaaatcaaagccgttggcgagtttctgtccagcgatgaccgggtgctggtctgcacccatgcgaccttccgcttcgccgtggacgagttcggtatcgaggccttcgacaaccgtttgatcgccatcgacgagttccatcacgtcagcagcaacccggacaacaagctgggcagtcagctgggtcagctcatcgcgcatggacaggtccacgtggtggcgatgaccggttcctacttccgtggagacaccgtggcggtgctctcgccctcggacgaggcacgctttgaaacggtgacctacacctactacgagcagctcaacggctacacctacctcaagtccctagacatcggctatttcttctacaccggccgctacctggacgcgatcatgaaggtgctggatcctggcctgaaaaccatcgtccacatccccaacgtcaatgcccgggagagcctcaaggacaagcaccgtgaggtcgaggaaatcatgtcccgcttgggcacctggaagggattggacccggccacggggttccatcaggtcgagctggccgacggacgcgtgctcaaggttgccgacctggtggacgacaccgacgctgcacagcgcaccaaggttctgtcggcgctgaaggatcctgcgcacaaggacgaccgagaccacgtcgacatcatcattgccttagggatggccaaggaagggttcgactggatttggtgcgaacacgcgctgaccatcggctaccgcagcagtttgaccgaaatcgttcagatcatcggccgcgcgacccgcgatgcgcccggcaaggagcgatcccgcttcaccaacctcatcgccgaacccgctgccgacgaggccgcggtcgtggacgccgtcaacgacaccctgaaagccatcgcggccagcttgctcatggagcaggtcctggccccgcggttcgagttcacgcctaagaacgccggcaagatggacggctttgactacggcgacgacggctaccaagagggcggtcacaacgtgggcgtcaatccgaccacgggccaagttcacgtggagattggggggctggccatgccgacctcgcccgaagcggcgcgcatctgccgtgaggatctgaacgaggtgatcaccaccttcattcaagacaagacggcggtggaacgtgggctgttcgacaaggaaaacaccctgcccgaagacctgacccaggttcagctcggcaagatcgtgcgtgaccgatacccggacctgaccgcggaagaccaggaggccatccgtcagcacgccatcgccgcgctcaacgtgacccaacaggccaagcagcgtctggcggaagacgatgcccagggggagcagggcaacacctcgctcatcgacggggtgcggaagttcgtcaacgtgcgggatttgaacattgacctcatcgaccggatcaacccgttcgatgcagcctacgcggtgttagccaaggccatggatgagaagattctccgtcaggtccaggccagcatttcagccaagcgcgtggccattccttacgacgaagccaaggcgttggccctgcgtgcccgcgcgttcaaggcagaaaagcagcgagcccccgacatcaactcgccagacccttgggagcgcaagatggctgaaggcgtggtggccttggccaagcacgtccagcaacgcaaggcggcagaggctcgaggcagcgatcatggctga

SEQ ID NO: 505939 - DNA, 2760 bp, Stenotrophomonas maltophilia
atgaacgcggtggaaatcgaagaggccatctatgagctggcccaggctccctttgattctgcagagttccccttccagttcttggcggcgtttggcaacaacgaggtcaccctcaagcgcctgagaaaagtcgggtccggcgggacgaatctttccgacgttccaggggccattcttcaacgcaaccacatccacttggcagtgtgcgaacgaggaaaggtgcgtgagacgttcgaagcgttgaaggccagcgccaagaactcgacgtatcggatcaagctcgtccttgccaccgacggtgaatcccttgaggcggagtatctggccacaggggagcctttggcatgcccctatgccgagctggccgagcactttggctatttcctgcccttcgctggcatcaccaccgttcaggagatcaaggaaaacccgatcgatgtccgggcgacgggccgtctgaacaagctttacgtggagctgctgacccacaacccggactgggacaccgacgagcggcgatcggacatgaatcacttcatggcccgactgatcttctgcttcttcgccgaggacacggacattttccacggcgatagcttgttcacgcgcaccgtggaccggatgtcggctcctgacggatcgaacacagacgccgtgctcggaacgctgttcacggcgatgaacttgaaatccgatgatcgtcccagcgcgggccttcatggttgggcgctggcatttccctatgtcaatggcgggttgttctcaggcagcacagaagttccgcggttcacccgggctgcacgctcgtatctgctccggatcggtgaactgaactggcgccagatcaacccagacatctttgggtcgatgattcaggcggtggccgacaaggaggagcgcggatcgttgggcatgcactacaccagcgtgccgaacattctgaaggtgctgaacccgctcttcttggatgacctgagatcacatctggaatccgcggaggacaacaaggccaagctgctcaacctgcgcaagcggatggcgcacatccgtgtgttcgatccggcgtgcgggtccggcaatttcctggttatcgcctacaaggaaatgcgcaagattgaggcggagatcaaccggcggcgcggcgaggaggaccggaaatccgagatcccgatcaacaatttccgtggcattgaactcaacgacttccccgccgagattgcccggctggcgctcatcattgccgagtttcagtgcgacgtgctttaccgcgggcagcagcaggcgttggctaccgtccttccgctcgacagcaagaactggatcacctgcggcaacgccttgcgcatcgattggctctccgtttgcccgccgacaggaaccgaggtcaacctccagggcgacgacttgttcactgctcccgccgatcagtccgaaatcgactttgaaaacgagggtggagaaacctacatttgcggaaatccaccgtatgtgggagataagttccagacagactctcaaaaggctgatttgaaatctgtgctagggcctaggagcaagcacaaagcaatggactacattgccggatggttctggaaggcatctcaatatatcgaaaggggcggggcatttgcgttcgtatcaacaaattcaatttgtcagggggttcaggttcccattatttggcctcaaatttttgctaggggtcaggaaatatttttcgcccataaggacttttattggtccaataatgcaagcaacaacgcgaacgtaatttgtgtggtcgttggggtttcgagtcggcgggtcggtgacaaatgtatttacagggattctcagcggcaggtcgttgggaatatcaacgcttatttggtgaacggtccaaatgtcatcgtggaaaagcactcgcagtctatttcaggtctgcctgagatggttgcgggaaatattcctcgggatctgggtaacttcatgctcacctctaatgaaaaggacgagttactccaaggtcatccggaggctgcggttctcgtaaggaaaattcttggctccatggagttcatcaatggaattgagcgttattgcctttggatcgatgacgataaggcggctttggcgaactcgatcccattcatcaagaagcggttggacgcgattgtcgcctatagagagggtggtagcgagcggggcaaattaggggttgatacgccacatcgctttgagcgcacgatcacggctaaggccacttcgataattgttccgcgtgtttcatcggaaaagcggccgcacattccggttggcctggtgggtagtgatgttgtgatatcggacgctgcccaggctatctatgatgcgccgctgtatgtgttgtcgctgatttgttctcgaatgcatcttgcctgggtgtcgttgactgcggggcgaatgaaatcagatcttcgctactcatcgggcgtctgctacaacagctttcctgttccgctgttaacggatcagaatcgaatagatctaatgacctgtgcccaggagattttgctggcgagagaggcgcactatccatccaccatcgcggatttgtatgtcgctgatcaaatgccggaggatctgcgccaagctcatgaacggaacgatgatgtgatcgatcgaatctacatcggtcgcagattccgaaacgacactgagcggctggaaaagttgttcgatctctacaccaagatgacggccgcgccggccaagcccaagaaggggggaagggcgaaatga

SEQ ID NO: 505940 - DNA, 2196 bp, Stenotrophomonas maltophilia
atgcgtggccacgccttggcgttgttgttgctggctgcatcgtcggccagcgcagcggtgcccgaaggcgtggcacccgcgttcctggtgccggtgatcggcggcaaggccaaggcggatccgctcacgttctggcagcaaggcggtcagtggttcgccgagccggccacgtggcgcgaggtcggactccagcttccaccgggtcaaacggatccgatgagcgcccaggcgctgggcgtgggctttgccgtggacgaggccagcgccacggtcgctctggacttgccggcagaccggctcaaagcccagcgcgtggcccgtgtccgcgccgagcgcggccccatcgcgccgcccgctcccggggtgctggtgaactacagcgtggcgggcatggtgtccgagcaacagcaggcgctctccttggggcacgaagtccgcaaggcgggccgttggggcgttgtcagcaccagcgggcaggtcaacaccgacgcgtcgggcaccggctacgttcgcggcgtgacgcgctggcagaaagacgatcccaaccgcttggtgacttaccaggccggcgatgtgttcgctggtccgtcgtcctctccggtcaacctgggcggggtgcgcgtggccaaggacccgcgggcgttggacccgttgacgcccacctatcccgtcccgatgctcggtggcgtggcgctcgatccggccacggtcgaagtcctggccaaccgcgcccgtgtgctgcagggccaggtggggaaggggccgttcacggccgatggcagcgccttgggcgccggtgcgcagcaagcccaagtggtggtgcgagacccctacggccgcgaaacggtggtgagcgatcagcgtttctacgttgcccccacgttgctgcgcaaagggctcaccacctgggaagtcgccgccggccgggtgcggcaaggggagagcaattacgaggcattgggcgcgaccgggtcggtggcttggggcctcaatgaccggtggagcctgcgcggcaccgcccaaacctcatcgaacggtaaggccaacgtggcgttgggggccaccacggtgcttggcacctacggcacgctggatctggaagtgggcacgtcaacccaaggcggccaacggcaggccatggcttacgactaccgcggcccggggtttggcgtgcgcctggagcacgagcgccaacaggactactggcgcctgcgcgcctccaatgcggtggaggtggagcagcgcacccgaggctcggtcttctggcggcccacgccccagtggtcccttcgggccagctattcggacgtgcgcacgccgcgctttcgcaccgcttacgccgacgccggactgacctggcgtggcaacgggcacaccgtggccgtctccgccttgcgggatctggagcgcaaggaaacccgggtggaggtgggctatagctacgatttcggccggggcaagggcgtgagcgttagggcccggcaagcccccgatgccaccgcctgggccgtccaaggacgcgcccgtcccacggtgttgggaaccccggtcggcttgtctgcctcggtggacgagggagcggctggccagaccgcccgggccaacgccaactggaccacccgggcagggtgggcccagatcaacgccgagcaagggcccaacggcacctggacttccggttcgatgaccggtgccgtccacctggaacgccagggcgtgacgttcctgggtccggccgaatccttcgccgtggtggacgtgcccggccaagccggggtgccggtgagggtgggtggccgcttggtggggaagaccaacgcccagggccgcttggtggtgggcgaggtgaccccgatggtgcccacggaggttcgcgtagacgatcgggcgctgccactgggcacccaattggccgagatcgagcaaaccgccaccgctggccgccaagccggcatgcaccttaccttcccggtcctgaccgagaccgcacgaaccttccgcctcactggctcggccatcgaagcgggcatggtggccaagacggcgaccgagaccacccaggtgggctatgacggggtgctctacctggagcagccgcgccccggccagacggtggacgtggaaggggtctgcaaggcccagctgcctgcggaccttcgggctgcgcaaacggtggccgaggtggcttgccgctga

SEQ ID NO: 505941 - DNA, 717 bp, Stenotrophomonas maltophilia
atgaacatccagcagaggagaaacgaagtcgttcggatggccgaagaaggcagatcagctcgggaaatagcgacgttctttaataggtcggtgatgaccattcacgttgaccttcgggcaacgggatttccgagaaaggggcgcagagcggtcgggctgaaagtccgttatcgctcatcggcggatgagttggcccacagaagggcgatcgttccatccttggtggctcaagggctcagtgcgcgtgcgatagcagaaacgtttgatgtcagtcgtgactcgatcgagtccgacaaaaaagcgaccggatcgttaaagaaaaacttcaggggggcggtcgaaatcagtttggcggaattcgaggtatggattgcgcagggaaaaagcatgaaggaaatggcatgcattcttggagtgacgtcgggacggctgatttatgcggcaaagaagttgggctgggtgcgtccggggccttctcgtcccatcccagagaacctgcgtgggctcttgcccagcatctgcggcccggagcgcttgcaaggcttgatcgatgaagggcattcacttggcaagattgcaaggcaccttggggtgagcaggcaagggctctgcgactactgccggcgaaaagagttgaagatcaagccagttttcaatgggcgacgctcacgaacaagagcgaccccttgcgcatttccagaatcgatctatgaatag

SEQ ID NO: 505942 - DNA, 435 bp, Stenotrophomonas maltophilia
atgcgcatggtcgagatgttcgttgtcgtcgcgctctgcacttggggtgggctcagtgagcttcaggcacggctgccggaggcgcgtttcatcacggccgacggtagtttcgccagcgcaattgcgtcgttggtgatcaattgctacctggttttctacctcttctgcagaagaaacgtacatggcgatcattcgaaatgtgtgtttggaagtctcctgatactcagtgcaagcgtgaactatctgagcttcgagctgctatctgatcggctgcaggacatttccaggtggttacctcctaccgcgtggcaactgaacttcgcgctgctcatatcgaccgtcaggaatgtcatcgctttcggtttcggcgcgattggcgcggggattgtctcgggtgttctcagtcggcacggaaagggtgtctcggatgcctaa

SEQ ID NO: 505943 - DNA, 279 bp, Stenotrophomonas maltophilia
atgatcgatccgctcattaccttcgtgctgctggcggccatcgtggccgtgtccatcggcggcgcaaagctcgtttcgtggctgctcgaccggcgtgattacaccgcctcgcagcagtcccgcgaagccatcttcgtagcccaggcacgcgccgagctggcagcaaccggctggacccttgatcacgaaaccctctatcaggccgaaatcgccgccaccaagcgcggcgatttgctgggcgccgcttgctacgccgaagagcaggagcgcgccgcatga

SEQ ID NO: 505944 - DNA, 177 bp, Stenotrophomonas maltophilia
atgagcaggtatccctcattcgccgagctcgccgagttcgacatgggcctcacagcatgcgctgtctttctcgcgctcgttctcggcggggccatcgtctccatcgtcatcgagcaggcatggctggggcttcgtcgcctgtggaagctgcggaaggatcgttccaatggccgctga

SEQ ID NO: 505945 - DNA, 132 bp, Stenotrophomonas maltophilia
atggccgctgagattgctgagttcttccgcgatccgctcgttgttgctactgccggcggcgtactggtgacggtcgtgtattggactgtcgtgtttgcgctgcgcaagaaggagccgggcaatggtcggtga

SEQ ID NO: 505946 - DNA, 303 bp, Stenotrophomonas maltophilia
atgagcatcaaggtcaccgtcctcaagaacgaaattgacgaacgcggcggcagcttcaagaacgacgctggcgagaacgtggaatacaccacccgcaagcagaaggccaagctggaaaccggtggttttgcctacccgttcgacgtgcgcctggacaagggccagccgggttaccccgagggcgagtacgagctcgatgttgaatccatgttgcaggtcaacaagggcgtagcctcgctgagcaagttcaccgtcctgcgcatggtgcccaaggctgcaccgcgctcaaccgcgcaggcctaa

SEQ ID NO: 505947 - DNA, 399 bp, Stenotrophomonas maltophilia
atgaatcggaaacatctgatcgtgttgggtgcagcgcttcttgtgttggcgctgtcggcatcatgggcgtatgccgaaggcgtgagcccgattgctgcgatcaccgcatgggccaaagagcagatcacgtcgctgtgggcggacttctccgatttcatgacggacctgcaaacggacttcatcgagctcgtgttgtcgttcgtgaaggcgattgtgtacctgatcccggcaccggacttccttacgcaaatcagcttctgcgcgatgctcaatgcggccggcccatggaccgccttcatagtcgggcagctgcgtgtcggagaggcaatcgcgctgctgaccgcagcccttattttccgccttgtgcgggtgttcctgaccgtattccagtggacgtaa

SEQ ID NO: 505948 - DNA, 1293 bp, Stenotrophomonas maltophilia
atgatcttcggccatgaagggttgccgcgcagcggcaagagctacgaggcagtgctccaccacatcctgcccgcgctgcgcgctaagcggcacgtgtacgtgcgcctcaacggcgtaggtgagagcctgggcaagattgcggctcatctcgggatgcctgaggaagaagtgcgtgatcttgtccacgtgatgggcgacaaggaggtggttgactggtgtgtatgcgacacggacaacgacggcgctatctcgttcccgcacatcgagaagcatgctctagtcgtgatcgatgaggcgcatgagtactggcccacgaaccgggccaatttgccggagcgcacggccaacttcttcgcgaagcacggccacattagcctcgacatggtgatcatttcgcaggactgcaaagacctgcaccggctgatcattcgccgcatggcgaagaagaacacgtataccaagctcgatgcgctgggctccgatcagcgctattcggtgaggttctacgccgccaccggcaccggcaagtacgagacggtaggcaccgaggttcgcaagtacgatccggccatctgggagctttaccacggcgtgcagccgggcattgagtcaaacgaggtctacaagggcaacacccgcaccttgtggaagacactgcgggggccctcaatcgtgatggggcttgcactcgttatcggcgttgtcatgttcctgcgattcttcttcgctggtggctcaaccggcgaggaaagcaagctgaaagaggttgtgaagtcgcagaaagccgcgattccggcaatcgcgcaagcgcccggcgcacagccggccaccgtggtcacgaaggtggtggacaccccgaagtccaaggagaaaatgcccgcaggcgtgcagtacgtcctcgacatggcggccaatgccagggcgcggcacgctggttggtacggtcaccgggatatcgtggagttccgagcatcggggggagggcaggtgctcgacagattcactacggagcagctgtgggcgctgggctggtccgtaaaacggacagagtttggtgtgctgctgtcagcgaaaggccatgagatcatcgcgaccacttggcccgtggatccgttcggcgaacagtccgattcaactaccgagcgcataagggctgcggcggggtcgcctgtgacgagcgcgagcgagacacagccgaccaccgccgcggcgaacgggagcaccctgattgcagttggcaagcgcccgctgggcacgttccccgaaacgccgccgtatcaggccagcttctga

SEQ ID NO: 505949 - DNA, 453 bp, Stenotrophomonas maltophilia
atgaccgccgtaggtgaactgctagatgccgcccgcgaacgcaccggaatcccgtctgacaacgctttggcggcgcgactgggaattcagaggcagctgctgtcgaaggcccgtgcgggcgaaaaaccgatctctgatgagcgaattgcgcagatttgcgccctggcgaagctcgatggcccgacttggatcgccatgatccatgccgagcgcgccacgacggcgaccgaacgcgccctgtggcggctgatgctggaccgaatgggcgcggcggctgcggtcgtcgcgctggtagcgctgtcgatgccgggcctcgcaaacgcaaaaaccacccaaaatcaggcggttagcgtcggtctactggcccattctgtatattatgttcgcagcatctgggccagactggcacggagcttgcctcgaccctcagccctgctgtggcatggagcctga

SEQ ID NO: 505950 - DNA, 279 bp, Stenotrophomonas maltophilia; identical to SEQ ID NO: 505943

SEQ ID NO: 505951 - DNA, 177 bp, Stenotrophomonas maltophilia; identical to SEQ ID NO: 505944

SEQ ID NO: 505952 - DNA, 132 bp, Stenotrophomonas maltophilia; identical to SEQ ID NO: 505945

SEQ ID NO: 505953 - DNA, 1107 bp, Stenotrophomonas maltophilia
atggtcggtgatcgcgcggtgctggccgggtcgggactcccctcgtctaacaggggagtcagtgaattcaggaaccccgagggaaccctgacggtcggcattgactggttctccgcttccatcgatctgcgcgcagcgctggacgaactcgcgttccgtgatggcgacagcttcgaagaggtccgccagtggatcgagttctccccggacaacgcccgcatcgcggccctgcaggtgttctgctggttcttcgccgggctcggccttgaacttgatgaaaccgtgggcggcggtcgcttctacacgtggcgaatcaagatcatcgacgcagctaagaagttcgttggcatgatcgaattgggcggcgaagattgccgccgcgccgatggcacgtataccgctcgtatcgagctaacgggtgatggatgcaaggccataggcgcagcgcgctgcggccatgcgcagcggtggctggagcttcgagcgaagctcgaaagctgcgccggaaggatcacccgtgtcgacgtgtgcgctgatgacctggtgggcgactacccattgcgtatggcgcagaagtggtacgccaatggcgacttcgacaaccgtggtcagcgccccaaggcgcagctggtggacgactacgacagcggtgacggcaagacgttctacgtcggcggtaagaagtcggaaaagcagctgcgcgtctacgagaagggcagggagcagggcgacaagagttcgccgtgggtgcgctatgaggcgcagttccgcaactccaaccgtaaggaactgccgctcgacattctgcgtgacccggcctcctacctgctgggtgcctatccggtcctgtcctttctgcgctgcgttgccacgcgcatcgaaatcacgaaagccgccgttgaagcgacgtggaagagtgttcggcgccacatccgccgccagtacggcgcagccctcaatttcatcgccaagaactgccctgacgatcaggcattgcgggcggtaatcgaatcctgcacttcgccatcgctgccgaagtgggtcacaggtgacacagcagcgcactggcccgaaatcgcggccgtacagccaacctcaaaggggtaa

SEQ ID NO: 505954 - DNA, 303 bp, Stenotrophomonas maltophilia; identical to SEQ ID NO: 505946

SEQ ID NO: 505955 - DNA, 258 bp, Stenotrophomonas maltophilia
atggccgtgtgcgtgtctctgacggctgaggggacgctcgtacccaccggggagcctgcatcgcagtgtggtgggtatgtgcttgtgtcagcagcagagcacgcacaggcctcaattctcatcgatctattccagtggccggaacctgaggtggcgactggttggttctcgggggtgttcacgctggttctagcactgaacgtgctcggctacatcgtgggcgccgtcgtgaagtcggtcagtacagagcgggattga

SEQ ID NO: 505956 - DNA, 135 bp, Stenotrophomonas maltophilia
atggacttcggcgacattctgaccggcctcgcagccgccagcgcagtcagcgcaatcatcagcgcaggtgccatcaaggcgtccccgggcttcgcccgctgggcgaccaacaaggtcgcgaccttcttccgctga

SEQ ID NO: 505957 - DNA, 270 bp, Stenotrophomonas maltophilia
atggatttcagtggggtgtttctcgggctgtctgtcgctcaggccgtcgctgcaatcgtggcggctgggacactgatggcactgccgtggtttggccggtggtgtgtcgacaaggtcgccgggttctttgaggaccgcgaggatcaggacgccgatgagcatgccgatgatgaggcaggcgaggtggaggaggcggtgtgtggtgacaccggtcacgactatgacggcggcgaatgcgtctattgcggcgcgccagaaaggggagattga

SEQ ID NO: 505958 - DNA, 984 bp, Stenotrophomonas maltophilia
atgcgcgctcttgtcgcagtcctgctggccctctgcttctatctccccagctttcgggctgctgcttacgacattgggctagccatgcgggactgccgcaacagttcgtcattcaactcgacgcaatcgacaaagcagtgcgttgatattggcccgcagcccggctcaaagacgcaatgcctggtgggacttacctctaaaactgggacggggtacttgggcctctggtcctacacctgcaacgagacgtgcgacaaacgcccggaagaaacggggtggaaaggcggaggtacagatggtttgggtgctgtctgccacaacggttgcgcctacgaaggttcgctttacgcgggctctcccgttggtcgtcttttccagccgacagggcaaacgtgcagtactgacgatcatcccgcccctactacgcccgacccgggcgagggcgggggcgacggaggtggcaccggccccggcgatggcggcggcgatggcggcggcgacggcggcggcgacggcggtggtgacggcggtggtggcgatggtggtggcggcggtggaaccggcccaggtgatggcgacggtgacggcgactgcaaagaccctgcgggctgcgaaggcccgggccccggtcccggcccgggccccggtcccggtgatggtggcgaaggaggcgagggcggcggggcggggccgacgacagggcgcctctacaagaagtccggcaagacggtgcagaaggtgttggccgagttcaagaccgccattgagggcgcgccgatcctgtccaaggtcaaggggttcttcggcaattgcaccggcgcaggcggttcctgtcccaccgcaacatgggacggcggtcagtacgtcggtaagttcgatctgagcagcttgtgcagcgggccattgctgcagcttttccagtacgccggatttgtcttccttgcgggcatgggcgttgttgccctgaggtgggcactgctatga

SEQ ID NO: 505959 - DNA, 1293 bp, Stenotrophomonas maltophilia; identical to SEQ ID NO: 505948

SEQ ID NO: 505960 - DNA, 126 bp, Stenotrophomonas maltophilia
atgagtggcaagcggtacacggatgagttcaagatcgaagcggtcaagcaagtggccgagcgaggctattcggtggccgaggtggccgatcggctcggcattactggaccgcccagatttttgtag

SEQ ID NO: 505961 - DNA, 1449 bp, Stenotrophomonas maltophilia
atggatacagatgatcagagcgcaatgatccccccccgctaccaacggctgtccgacgaactggccgaggccatccacggcggacgccttccggtaggcagccgcctgccctcgctgcggcagatggccctgcagcgccggctcagcctgaacacggtgatcgccgcctaccgccagctggaagacgctggtctggtcattccccggcccaaggccggcttcgaggtcgcgccgcggctgtcggtgccggaacgttcgctgcgcgacacaccgtctgcgcccaccgcgccgctgcagcaggtactgatggcccgcgtgctggaagcacagcgccgccccggcgtgatcgacctggcctttgccggcccgcgcggtcgccagttctaccccggagcgcagctggccaagcacacggcgcaggtactgcgccatggccagcagaccgtggagacgtatgcacgccccaacggctcgccacggctgctggcgcagatcgtgcgccgcggcccgcgcatgggcctgcatacccacagcgaacgcctgctgctgacccacggtgcgatggaagggctgcagctggcactacgcgcggtcacccagcccggtgatgcggtcggcatcgaggcgccgtcctacttcaacctctacccgttgctggccaacctcggcctgcaggccatcgaactgcccacccatccgcagctcggcttggatgtggatgcgctggacgcgctgctggagcacacgccgctggccgcactggtggtgatgccgaccgtgcataacccgctcggctgcaccatgccgaccaccgccaagcaacgcctggccgaactggtcaacgcacgccagctgccgctgatcgaagatgcggtgtatgcagaactgcagttctgcgaaccgccggcaccgctcctgaaggccttcgatcgcgatggctgggtgatggtggtcggcggcttttccaagacgctggcgccggattaccgcatcggctggctcgatggcggccgcttcgccgagcgcatcgcgctgctgaaattccagtccaccggcggcgagccgcagctgctgggcgacgcggtggcggcctatctggaagcgggcagctacgagcaccatctgcatcgcatgcgccggctgtaccgcgaacaggtcggacggctgcgccagctggtggccgaacacttcccggccggcacccgcgccaccgaaccgcagggtggcttcctgctgtggctggaactgccgggcgtggacacgcgcgagctgttcgagcgtgcactgcaggaggacatcgtgttcatgcccggccaggtgtattcacgcggcgcgcggtatcgccattgcctgcggctgtcgtgctgccagacgctggatgcacgcttcaccggcgcggtggagcggttgggtgcgatcgcgcgggagctggcggccgcagcacggtag

SEQ ID NO: 505962 - DNA, 609 bp, Stenotrophomonas maltophilia
ttgcagggcttgcagccctgcacctgctcaatgcaacggcaactgcaacggccgaagccgaagccaaagcggcatttcgtggggtggcggggcggtgtcggagtgcggggacgccgcaagtacgtccttgtaggcttggcagcggcatccatgccgctgacaccccgcactccgacaccgccccgccttcgacaggttcacgcggctgttggtaactgcggctgttgttccgcgctgttggtaggtgtcgaccttggtcgacacatctgtcagatatcgaatgagtcatccacgcatggcgtggatctaccgtgtcgaccaaggtcgacacctaccagagcagtaagccgttccgtcagatcacggaaaactgtcgaaggcggggtgggtccggttgcaggggtgtccgcggcatggatgccgcggccaagcccccagggatgggtttacggcgtccccgccatccgacaccacctcgccaagcacacagaaacccagagccgacgcctcagctgttgccgttgctccggcctctgcgggcgccgggctgcaagcccggcacccaccctggaacctcaacagcagcgaccaccgttgcgtccgccgtag

SEQ ID NO: 505963 - DNA, 1380 bp, Stenotrophomonas maltophilia
atgaacgacgacatcaaggagatcttgcgcagggtgcgtgagaacggtcacaaggagctgaccatccagcaagtgacgctgcccaatgggctgaccctcggcggtgtggaaatcaacacgacagaggaccgccggctattccggcaaaccgtgcaggacttgaatgctctggcggggaaagacccactgatggccgcgatgcaaggctgggagcccccgcagccaccggcaccgtctgcacctccctccggccctctgctttccgaccgcatagaggtatacctcaacgatatgaggcgggcccaacgggctgtgcgcaacgtaatggacacggaatacaccctgcgcctgttccttgctctgggcgatgacaggcccattgaacagatcagtgcaacagacgttcgagcctttctggatgcattagcggcctaccccgccagtgccagcaagaaggcagagtttcgcggactgacgcccaaggaagtgttggcgaaggccaagatgcgcagctatccgacgctcagggaacgcacccaggaaaagcgccgagaccatctggcagccttcttcaatgcgcaggccgatgaggcgctcattccgaaggccccgcacaaggccatcatgaaccgcgccaagtccaagaccgacgagccgagccgcgaacccttcacagccgaagaattggcaaaactgtttgatgccgaggctttccctgcgtgggccagcaaatacccgcatcgctggtggggctccattctaggagtggccaccggggcacgcgtaaacgaggtcgcccagctttacgtaggcgacgtggcggaggtgggaggccactggggcatccatatccgtgtctcgcataaggaccaacgtttgaagaatagacattcttcacgtttcgtcccgctgtcggacactgtgttacaagccggtttcctagcgttcgtcgaggatgtgaaacgcgctggatttcaccgccttttcccacatctcccttattcggagggtggcggctacggcgatgcgatgggcgaccagttccgcgcctacgccatcaagcgcggcctgactgatcgactgaaatcctaccattgcttccgacataatgtctctaacactatggtcaacgaaatcggaacgaccatccaaatggcgcaggaaattactggccacgacctcacgttacccagcggcctcaagcattacgtgaacccagcgactattcccgcacgccttgaggcactgaacaaatatggccccccggtgcaaatcccggcctacgtgcctgggcagtttaatcacgcgttcaagcaagttcgccacatggagcggcggcgaaaacgagccgccgacaaccgcgaaaaaaaggccacctaa

SEQ ID NO: 505964 - DNA, 768 bp, Stenotrophomonas maltophilia
atggaactatattcgatcgcttacagcaccttcgctgctatcggtcaaatggcccccatttcggatagaggcggcagtggcgtgattgagtggattgaaagccacgaaaaaaccgtcgacttgctcaaatgggtcgccgccggcctccttgcttggtcactcggtgttgtccgctacatcaggatgaagctaaagcggcccaccattgagattgatctttttaccagccgttgtgcatgcgacgatcttggcgaaatagacggctcagcaaggaacatcagggcgatttatgtcctacagatcggggtgaacaatccaactaccgatcccatcgtcattcgtgatttcacaatcgccacgaaagcgatgaggcgctggcccatatggcaggaagaactctacccaacgaccctgccgacaaggcctcaacattcggtaggaactataactaagatcctgaagtgctggttctcaaactttcacgatgacctcaatcacttaagcctgatggggaaaatcgaaccaagagaatttcagtccggctaccttctcttcacctcagttacttggggcgaccttgaaccaagaataatcaacggaaaaactccagtgagagcaactgcacgtctcacaactggcgaaacacttagaaccaaggcacttattcgtgtcgttgatgacccgtccattgtggaagggatcgtcccagggatactggaccatacaaagaactcttccacatggaacatcatccgaagcagatactag

SEQ ID NO: 505965 - DNA, 1827 bp, Stenotrophomonas maltophilia
atgcgtctgaagtcgttaaaactgaccaattttcgtggatataggaccaccaccgttattcccattgacgaggcactgaccggcattgtcggtcgcaacgactatgggaagtcgaccattctagaagcgttagccatcttctttgaggccgaaggcgtgaaggccgataagaacgatatgaattgcttcagccaagctgagggcgaggatcgatttgaaatcgcttgtgagtttgatgaagtctccgagccgattgttcttgatgagaacgtccaaacgtccctcgctcaagaactacttctgaaccgccatcaagccttggaggtcgtgaaagtattcaaggccagcactgccaagcttgagaagactgcgatcaggtgcgagcaccccgtagatgagcccatcagtggattgttgagcctaaaaattgctgatttgcggaggctgggcaccgagcgtcaggttgccgagcgtgtggcggataaacgcgtggcttctctctggcgacaggccatccggcaatcagccgctccgtttgcttgccaagaaaccctcttggacgttgataaggaattttcaacagagggcaagtccatctggagcaagatcgagggcagacttcccacgtttgcgctgtttaagtcggaccgcgaaagcaatgacggcgatgcggaggctaagaacccgctgcagcaagcggtgaaggaggcacaagccgcgcttcagaatgagattggtgagctggaagcaaagattgaggcgagcgttctggatgtggcttctcgaacattggagaagcttcgtgaaatggcccccgagcttgccaacgagctgaagccaagatttaaggaaaagcccaagtggacgttcggcttcacgttggatggcgagaatggaattccgatcaacaagcgtggaagcggtgttcgccgccttattctgttgaacttcttccgcgctgaagctgagagagtggcagtgggaggaaatcgcaacgtcatctacgccattgaagagccggagacctcccagcacccgaattaccaaattctgttgatgaaagcgctcttggcgctttccgcgcaacctaatcgccaaatcatcgtcaccactcatgtcccggcgcttgcggggttgatgcctatcgagggcctgcgttacgtcacacgcagccaagacggtgccccgaccgtcaagatgcctgacgctgaaacactcagagaggcctcggccagcctgggagtgctccccgagacaggaatggagcgggccaaggcagtcatcttggtagaggggaaatcggacgtcattttcctaaggcacaccgcatccgttctcaaagagagcgggcacgtagcaaaagatctgaccgaagctggaattgttccaattccaattggaggttgcggcagtgtcaagcattgggtgacgttcaatctggccgacgatcttggccttccgtggtgcgtcttcttggattccgatatcgggggcgacccgggacaggtcaaggccatccagaagcgaaggcaagaagttgaagacaaggggcggctcttcatttccactcggaagcgtgaaattgagaactacctgtgccgcgatctaattctggaaaatacaggtgtcgctttggacttcacggatacctgtgacgccaaaaaaatcatcggggccgccctcgggatgaacccgaatgatgtcgtagaggtccattggcctaagatgaatgctgacagcatccttcggcgctcaatctatatggacggcgacacagagaagcatgaattgaaagaggttatacagaaaattattgaattggcttag

SEQ ID NO: 505966 - DNA, 324 bp, Stenotrophomonas maltophilia
atgaaattcatccgtgttgcgttggccttcaccatcaccgcctccgggctttccgcctgtggcagcagccagccatccatcaaggaagcccaggctgccatcgggaccgagttcgcccaggtctccggtggatccatgaccgttgttggctaccgagacttcaagctctctgggtgtcgggatgcagctcctgcggatggggtcatttgtgaccttgggggtgaggtggtcctcaatgtctcgggcactgagctggtgcgccccatcgtggagcccgttcgtttcagcaagtccaatggcgcttggaccgctcacaagccctga

SEQ ID NO: 505967 - DNA, 246 bp, Stenotrophomonas maltophilia
atggggcttgaaaagcacgtggcagcaaatcgggtgaaccgttacgagagccaagccaggggcatcgatctggacgggctgggtaagctggctgaggtgctgggtgtgcccgtggcctacttggtagccgaggacgccgctacggcggacgcggtcctggcgcttgcccagctctctccggaacagcgtgtaagagcggttgcggcgctgctcaaggtcgcggcgacgggcgacggtgcggactga

SEQ ID NO: 505968 - DNA, 1704 bp, Stenotrophomonas maltophilia
ttggcgatttaccacctcaccgcgaaggcgtattcacgcaaggatggcaagtcatccacggggggcgctgcctatcgggcgggggtttgcatcgaagacgcgcgcacgggcgaagtccacgattgcacccgccgcagcggcgttgcctttgccgcgctgtgcctgcccggtggcgccagcgccgaccgtgccgagttctggaaccgggtggaagcccaccacaagcgcggcgatgccatcacttgccgtgaagtggaagtcgccttgcccgccgaactcgacgccgacgcacggcgcgaactggcccatgccttcgccaagcatttgtccgacacctacggtgtggccgcggacgtcgccattcacgaacccagcaacggcggcgacgaacgcaaccaccatacccacatcctgctcagcgcgtgctcggtcaacgcggatgggaccttggggaagaaggctgaagccttggaccccatagcgtgcaagaaagcccagcgcccctccttggccgacacccagcgcgagcactgggcacggatggtcaataccgccttggcgaaagccgggtccaccgttcgggtggaccaccgtcgcctagacgcccaacaggccgacgccgcccaacggggcgacttcgccaccgcagcacggctggatcgccgggctacacagcacgaaggtaaagagctgaccgccgcccggcgtcggggccacacacccaagcgcgtgcggaacaatgaccgggtgaaagctgctgcaacccggcgcttcgaccgtcacacccgccgttttgaagaactcaaagccaaggccgccaagtacggaacgttggtgcaggtggacgagcaagccttgcacgcacgggcgttgcttgagcggcggaaagaaggcgtccagcggtttcgaatcgaagccgtcgccgaggttcaggccatcgaccaagcggcacagcgaaaagccgccgtccgggcgcgtgcaaagcgtcccgcttcgcacaaagccgggacttccgtgtcccggcaggccgcacctgcggccggtctccagggcaaggcggcggcagccgtcgagcgggcctcacgcaaaaacactgcttcaagacagggggaaaccatggcagcagagcaaatcgcaaaagatctgaacgagatgattgagcaaatgctgaagcgcgcacgcctggcactccagcaacaggacgcgacgcctctacagcgggccagtgcccggacgctgattgaacggcatgacgaccttctccagaagcggcgggatcatgtggtggccaaggaggcaaggaaattggccgggctggaccggcgacgtgcggaggccgacgccaatgtcaggccccagcccgatggtttacgtaaccgcgtgctgcgggccatcggcaggcctacaacccagagcttggccgcacagatggcgcaggagcaaaagcagaaagcccaagcagcggagaaacaggcacgccagaggcgggacaagactagagaagcccggaacaaagcggtggtggccttcgatgtggtgcaggtggaattcctcacacagttccccgaactgctgtcgtcgcacaagccagctttctcatctgagcccaagcgcgagagtttcccaacgttgcctgcggcggggcaatgcttgccggaggcaagccccgtcagtccgcaccgtcgcccgtcgccgcgaccttga

SEQ ID NO: 505969 - DNA, 369 bp, Stenotrophomonas maltophilia
atggcaaccgatgtagagaagcaacgcgagaagttggaccgcatgatgaccagcttggcgaaagaacaagccaagctcttgatggcggaaaaggctgagcagcgaaagcagcaacgcgaagccgcaaaagcccggctcaaggaacgttccgcgttgttccgttcggcggacgcccatcgaaaaatcgttctcggtggcctaaccattgccgccggtgccgacgactgggatccggcagaaatcgttggcgcgttgttgctggttgctgagcaactggcgcagcaccccggcaagcgcgaacacctccgacagaaaggcattcagcacctggaagcccgtgaggctgcacgtcaggcggcgcgctcatga

SEQ ID NO: 505970 - DNA, 1587 bp, Stenotrophomonas maltophilia
atgaaacgccgatgtgtgggttggggcttgatggaaacgctgctcaccttgggggcgatcagcgcgttgtcgttaggcatctacaaggtcttggaaccagcccgtgccaacgcacaggccaagagtgaacatgacaacctgcgcaacctatcggcagcagtggagcgctcgtggggtgtcttgggcagcttccagggcgtgagcactcagcgggtcatagatgacgcattgatgccctctcacatgtttgacgggcaagccattcgtacgaagtggggaacatcagtcagtgttgtgccaagggcggtgtcatctcccggtgacgccttcgccatcgtttacccgctaacaccagcggatgtttgttcccgcttagtcacttcggtggcgcgaaccacgtatgacgtgcgcattgacggggtcagtgcattcaccgctgatcatcccgatccaggagcaatcgccgcattgtgtggcaaaagcaatgaggctacgcttgagttcgtctaccactctgggctggtagctggttcggtggtcgcggcatcacctctagtgctgccctctgtctccgcaggggtattccccccggtttctggaccggtagacggtccagtgggacccgtaggcccggtggggccagccgggccggtggctccggtggcaccggccccggttgctcctgctcctgcacctatcaccccgcccccttcaagtggcacacccgtgtcgcccgtcaccccagggccggtttcaccaccgccggcaccggtcagccctcccacctcgcccttggccgcttgtgtggctcctgcgagccgcacgacgaccgaaggccagacgcgcgccatctgtcctgcagggcaacacgggcaagtcaccgaacagcgcgtgggaacctacagctacagctgtccggaagcctgggacaggcccgttgagacgttctcgtgggcagggtggaccgtcaccagcaacacgtgcgcgacatgcccaggcgtgcagccgcagcagcagacacagtgggttgccaccggccagggctgccctaccggtcaagagggttcacacacttgggaagcagaacagatccagacacgcacgggcacctacaactgccctgcgggcaccgctacgcttccaggcattgactggtccccttggggcgggtgggccaacactgacaaacgccggaacgaaagcaacacctgcgccccgtccgctcccgcctttgaaatcaaagccacgtgtagtttcactggcgcgcagaccaaccaggggcccgaaacgtggaacggcggctgtatccaacccggccagttctacatgcgcacctcgccggtttcggcagtgttttggctgacttcaagcgttgatttgtcgcaatacgccattcagtggacaggcgactgcgtaggcaacgcgacgtcgtgcactgccgagcaggtgcgcgtctcagtgaactcacctcacgacaagacagcaacagtgactgtgacccaccgcgcgactggtcagcagttcaccagaactgtgaccgcgcagtggcgtgtccagggcatcgacaaaggcggtggcggcagctaa

SEQ ID NO: 505971 - DNA, 585 bp, Stenotrophomonas maltophilia
atgctgtggaaactcttggcggtgatggcattggtggccggtggctcggcgtgggcacacgccgatgggcctgtgggcatcaatgaattggagaccgtcccgggcgtgggccgagtgggctaccagcgcctttttgaggcggtgagcgagcccggcgaaagcctagatgggtttgtgctgcggattggcccacgtcttcgcgcttacagcgatgagactgggtatgaggcctgcggcgttctagccagcgacggcgaccggttcggcgtggtgattggaacaaatcattctcacgtcgcctgcgtgaacttcgctagcaaaatccccgcaggcttccagccgacggtggcgacaattcacagccacggcggcgaaaagacgtttgcagccagtgccacggacgtggcgctgctgggcaaagacgcatttggctcacgctcgcgcacgtcgctccgcgtgacgggccagaacctccacatgttcagcaagacggactatcacggcggggccggatacctggcaaccccgaacggggccatctaccagaacggccccaagaacgtgcgagaagtagcgccgcgttag

SEQ ID NO: 505972 - DNA, 663 bp, Stenotrophomonas maltophilia
atgaaaatgcaggtagctattctcatgctcatcgtctctacatctgtgcaggcaggaggcggaactccagctgatggacaaaccgctgacgaagcgaagaccccatcaagaatcgtccgcaccgcagaatggcccgacttcatgggaggagcggtaattgtagagcagtccctcatccgcaactcgaaggggcaatatgtatatcgctacgacgatcaatcggcagctacgaaacaatatcacgaggcatcctgcgcggatatcgggatgaatccggccaagggtgagtcaatcacagtgggtccaggaagcgccgcgtggcattgctcaagcatcgagtcgaacagtgttatcgacgaaaagagtactgactatgtaatcgcctatgcgccaaatggacaggtatccgccggccagaacttcgtttcctacggaaccgtaagattcaacagttcagtcagcggaaacatccaaggtagtgcgcaaatcgacaacggaaggtgccagaccttctatagcgagtattacccacccaacactgtgggaagtcacactgccagaatactctgcttcgctcatgcgccacagacgatgaatacgttgatggaaggatgcgtgccgcgggcctgcgcaagcgatcgtggctccatcagagcctactga

SEQ ID NO: 505973 - DNA, 657 bp, Stenotrophomonas maltophilia
gtggcaaaggaactcaccgaaagcaagatcatgcaagcgctggactacgcctacgagaaggccatgaatggcttgccgggtgtcgactcggccatcgagatggccgaaagctacatgcgggagccgggcacactggaggacaaggcaaactcgctggttcgctggcagaacaccaaggccgcgacctcggggttcgtcacggggttggggggccttctggtcatgccggtgacgattccagccaatcttgccagcgtgtacttcattcagatccgaatgattgctgcgatcgcacacatggcgggatacaacgtgcacgatgataaggtgaaggcaatggtttacgcatgcctgacggggaatgccgcaaaggaagtgctgaaggacgtcggcatccagttcggcaagaagcttgcccaggcgagcatcaaccggatcaccggcgcaacgatcattcgcatcaacaaggccgtgggcttccgcctgctgacgaaggcaggcaccaccggcgtagtgaacctcagcaagatggtccccatccttggcggcgtcatcggtggggcggtcgacgcagccacgaccaacatcgtgggcaacgccgcagtgagtgtcttcattgcagatgagtcgtctactacaccggcacccgtggtttaa

SEQ ID NO: 505974 - DNA, 681 bp, Stenotrophomonas maltophilia
atgaaagcaacagatctgatcgaatcgttgacccgaaagttgggaaccacctcgcagggtgagctggccgctgctctgggtgtatcagtggggacgctgatcaactggaagaaccgcgacgaagacctgagtgccaatcaggtggcttccgcgctggcgaaatcgcgagaggcggcggtcgatgagtcgcagctcagggccattcagccaattgtggagttctatacaattgaccggtgcctgaccaagcaagagaagagttggcaggttttcaacggtggttcgggcgcgagcaagtatgcgcagggagtcaaggccgagctcgaaggtagctacggcatctacattttctacgattcccgaggccaagccttgtacgtcggaaaggctcgtgagcaatcgctctggagggaaatcaacctggccttcaatcgacggcgcgatgtgcagtccatctcgctggttagccatcctgatcggaatcgggagttcaagccgggctacgaaaagcttcgccagccgaaacgggtcagtctcgagctgttcgacttggctgggtacttcagtgcgtacgacgtggacgcagggatgatcgatgatctcgaagccctgatggttcgtggctttgccaacgatcttctgaacatccgtatggagacgttcgctcacttgcgaaagtga

SEQ ID NO: 505975 - DNA, 408 bp, Stenotrophomonas maltophilia
atgagcggctactggcttgtgtcagagcgccttttccaagtgatggaacagattgatcctgacgcattccagttccatgcggtggactatcgactggccgatggctctgaggggcccgcatatcgcctctgcgatgtggtgcgcacccttgatgcattggatgaacagtcatccaagttgaagatcatagtgagcgatgagtacgagaacggaaagtactaccggctcactggtgatgtgaagctggccttcaatcgccaagtgctgggatctgcgcatgttttcaggcttccattccatggaggcgtcttctgtgaccgcatcttcaaggacgctgtagaagcggcaggtatcacttcgcctcagcattcgaatggtctgtggtttgaggatgtcgtgaactgctga

SEQ ID NO: 505976 - DNA, 816 bp, Stenotrophomonas maltophilia
ttgagcccctccaggaaatccgcaaagccaaatcgctacgtcgagctcattgaagagatcttcttgaagggataccgggcgggggccacgcgtgtgccgttcgagcgggaggatctcgaaagggcggcggccgaaagaggggtgcggctgccgaagaacctcggcgacgccatctattcgttcaagtaccgcagcagtcttccagcttcaatcctgcagacggcgcctgatggtctgatgtgggcaatttatagtgtcggtcgtgccaagtacgagttccggctggagcgtcccctctctatcgagccaagggcgaatcagttagttgtaaagattcctgatgcgacaccggagatcattcaggcgcatgcgcttggcgacgaacaggccttgctcgcgaaggtgcgatacaatcggttggtggatgtttttctggggattaccgcgtcttctcttcagaatcatctgcgcacgacggtaaagaatatcggccagattgagattgatgagctgtatgttgggcttgatcgccatggatgccagtacgtgatcccagttcaggccaagggtggcaaggataagcacgggaggcagcagacagagcaagatgttgcgtgctgtcgcgagaagttcccggggctgatctgtcgcccagtctccgcgcaattcatcaacgcgaacaagattgcgatgttcgagctcgcaatgcaggatgacgagatcaaggtggtctctgaggagcactacgagctggtgtcctcagccaatattacggccgacgatttggcgctctatgcgggtcggagaaggatctag

SEQ ID NO: 505977 - DNA, 1320 bp, Stenotrophomonas maltophilia
atgactagacccatcggaattgatctcttcgccggagccggcggcctcagccttggcttcgagcaagccggcttcgatgtggtggctgctgtggagattgaccccgtccatgctgcgatccacgcgttcaatttcccgaattgtgcggtgattccccgctcggtgacggatttgacaggtgatcagattcgtgcggcagcgaaggttggagaccgcaggatcgacgtcgtgttcggcggcgcgccctgccaagggttctccctgatgggccaacgtgcgctcgacgatccgcgcaactccttggtgaaggacttcgtccgcattgtgcgcgagctcgactcggactacttcgtctttgagaacgtgaaaggactgacgcttggcaagcaccggcgcttccttgaggagctcattgaggaatttcaggccgtgggctacgaggtggtcactcaatggaaggtgctgaacgcctattcctacggtgttccgcaagataggcagcgactgttcttgatgggcgccaagcgcggcctgacggtacccaactatccggtcgcactcacggcgaaacccggcctgaaggattcgagccttccttcaggccccacctgcaaggacgctctggacgaccttccggatgccgaacggttccaggagttgaatgtcactgacgaagttcggatcaggaagacaggcaaacccagtgcgtatgcgtcgctgatgcgatgcgacgggatggatggctgggcattcggatatcgccgagcctgggatccggccgtgatgacgtccagcatgcgctccaaccacagcgatatttctcgcgggcgctttgcagaaaccgttccaggccaggttgagccaatctctcgttttctcaagctgccgccaaaaggagtcagcaacacgttgcgcgcgggcacggattcggcacgtggcgcattcacgagcccacggcccatccactacaagtggaaccggtgcgtcaccgtgcgtgagatggcgcgtctgcatggcttcccggactggttccgtttccatgagaccaagtggcacggcgctcgccagattggcaactcagtgccgccgccgttggcgcgtgccgtggcttcggaaattatgaaggctgctggactgcgccccattcgaccgaaaaagttggtggagcttggcagcagggagttgctgcgcatgaccctcgctcaagctgccacctattggggtatcgtcagtccgattggccagcgcaataggaagagcggggcgaagaagactaaacaggttcctgtaaaccctgatcagctggacattctgctctag

SEQ ID NO: 505978 - DNA, 267 bp, Stenotrophomonas maltophilia
atgaagaggtcccgtttcatcgaggagcagatcgcgagcgcgctcaagtacgtcgagctgggtatggtgatcgtccagatgtgtcgcgaaatggacatcggatgcgacgttttaggtcaagtgcgccgcgcagttgctcgcgcgctctatcctttccaatctgtggatggtgcgccggcaggtggtgtcagctcggggctaatcatgcctgagtggggaccaggccgccgaagatgcatacggggactgggagtcatcaagtcctag

SEQ ID NO: 505979 - DNA, 1971 bp, Stenotrophomonas maltophilia
atggctgtcacatgggatccacttcaaaacggtaatgacattgatggcgagataattgctgccgctcagaagagacagataaagaacatcctcaaatcatatgttgggatgtacgactcgttctcagagcttcttcagaacgcgctcgacgcgcttgacagacgatgttctgaggatggggatggctataagccaaagctttggatcagaattgatctagctgaaaattcattttcggtagttgacaacggcgttggatttaaagaaaaagagtttaagtcgtttcttgcgccgaatatttctttcaaggatggaaggaagacgcggggtaataaaggggtgggagcaacctatatcgcatatgggttcgatagcttgacatttgcgactaaaggtaacggctatcttttttgtggcgaaatgctgggaggtcggacttgggttgatgacgagaacggtatcgtcgtcaggcctgtcgttgaggaagccctgagttcaagtcaaacttttgatgcgattgatcgaggctcctactttcggattgtgttcggaggcgtaaattccaggccgaagtcgctgtcttggtatcaggccacaactgccgagcaatggctttatcttctcctgattagaacacctttgggatctgttccctttatcggagaggcggagtctaaggtgacctttgatttagaggtgatcagtcaagatggagctgttacaagcatttcgaatgctccgccctcttatatgttcccgcaccttaaaatcaaggcgagtataaatcttaaagatgttcttgattatcaggagaaggctctcaaggacgggaaggatcctggggctctaccctcaaagtactcaaagctaaatggaatatacgagttctttgatactggtaagcttctcgagatgagatcgctaggcgtcgatgaagacatttcgagagttatttccgagttctctgtggaggcttacggttatttttcttactcaacttcgatctgggatcagttgaacgattcagtcgccaagttgagaaggggataccgaattttgcggggcggtctccagctcgcgaacaataggatgattcaaggggacttaatcgtgatcccgctgacttcgaatactggctatcagaatcaagctcatatattagttcacttcaaaggcgcagaccctgacctgggaagaaagggatttcagcccgagctgagaaccgcggctgaggctatatccgtagctatcgtcaaccgtcataagcagtggcgatcaaagcttctaaaaacggacagcggagctaagccggaaatctccaaagagctggaattgcatgaatgggtaaagcagcaagaaaaatacgaaagtgataatcccctagttattgaaaacaaaaatttctttgctccggttcgagagatttcaataacttcgattcctcagtctgagcaggatgtaattgtcctatttaatcaactaatcgctggcggcgttattcgtggcatacgcttgcttgctaccaatcaagttcggcagtacgacgggatattcaagttctcgattaaggagccactcgctaatcacgtcttcgacaagatgacgaacccccttggagttgaggagcttcatcatgatggcgagcgggttagtgctccaaaaatacttgaatacaagcatagccttgacgggttgattagagaatttgagaatggagagaaaagcgagaaagatgtccatctcgcggtagtttgggatatcggagaggagtggaagcggacttatgaggcgttatccttgctggatcttgacaacattcatcagcgtgattttcacggcctcacgcatgttttaagttcaggcaacacaaggctctatctgatcgttctcaaagaactcgtggcatatctcaataatgtcgacggcgttcaggattttcagaaggtaatgtatggagggggcggacagtag

SEQ ID NO: 505980 - DNA, 228 bp, Stenotrophomonas maltophilia
atgaccactcgtggctttcatcgaaccctgcgcggttatcacgatggctaccgtttcgtgctgaccatcaccagcagcgaccacgatgttttctcgtacacggctgccgtcgacggagccgaagttgagttgcgagccgaagggctgatccgcagcaagggcgacgctatgcagctcggcatggctgcggttgagcgccacgtggcgggcctgacctccaggcgctga

SEQ ID NO: 505981 - DNA, 501 bp, Stenotrophomonas maltophilia
atggttgagcgcgccgtcatcagtgattgcggtagctaccgctacctgctcacccgtcctagcgaggttgcacgccccgaccgtggcacggccttgttcctgatgctgaacccaagtaccgcagatgccgaggtggacgacccgaccattcgccgctgccggggcttcgccaaagcgtggggctgtaacggcctgaccgtcgccaacctgttcgccctgcgctctaccgatccagccgttctgctgtcgcatgcggaccccattggcccgcttaatgacgactggctgcggcggctcgcccgcgaatacggcgacgtggtgtgtgcctggggcgcccactccatggcagtgggccgcagcgccgcggttgcagaaatcatgcggaaggccggcgcacgcctgtggtgccttggaaccaccaagcagggctttccccggcacccgctgtatgtccgcggcgatcagcaactggtggagtggacggagccgacccatggctga

SEQ ID NO: 505982 - DNA, 228 bp, Stenotrophomonas maltophilia
gtgaagcgccttgtctgcaagatcgtaggccatcagccgcctgtctacggcaggaagggttggtggtcgcccggcgaggaatacgcgaaggtccgactggatggccgagacggcatcggccgcgaacacgcgcaggtgataggcgaatgcccgcgttgtggtgagacctacaggatgtgccgcatccacgtcccgaagatcgacggcaaggcggtgggcaatggttga

SEQ ID NO: 505983 - DNA, 762 bp, Stenotrophomonas maltophilia
atgagcaacgacaagacaaccctggcggacgtgaagcccggtgggtgggtgaggctgggaacgcccggcgctcgctgggcagccataggtgagccggacccgcatggaacgcgctatgactgcgagcgcgctgcgctggtcatgggcgaccttacggacgacgagctggcgaatgcggtgttcatgcacggcaacgagcggcagaccatggccgagctcatcggcggcgccaccccggcaatagcctacctgaccgccgccaaggaccgcatccgctggctgtcgcgtgcccttgcggcagctgaatccctctccgcccagccctccccggcaacatgtaaggaaggcttacaggttcagccctccccgggtggtcaggagtacgcgtggaacatcgccgaactggtgagggtcgaccttgatcgccagtcgtgcccggacgcctacatgcggatcgcgatggaatcggtggtcaagcacctcgccgcccgccagccggtgggggagatccccgcaggattcgtcctggtgccggagaagttcggcatcccggctgaagtgtgggagggcgtcgagttcgtcatcggcgggccagggaccggcgagggagaagcctacctcgacagcaccgcgtgggtcggggacctgctccaggacgatggaagcgccgtctatggcttgcacctgtcctgcgacgagtgccccgaagaaggcagcgtgacgctttctgtgttcaccgcgcgcgcagaggttcagccgtga

SEQ ID NO: 505984 - DNA, 840 bp, Stenotrophomonas maltophilia
atgaaaaccaaggttgcctgccaatacgcgattgtgaggttcatcccttacgccgaaactggcgagttcgccaatgtgggggttgtactcgcgtgcccagaacttgggttcctgaaggctaagttggctcccacgaaccgtactcaacgcgtcacggacttcttccagggcctcggccctaggatctatcgtgaggcaatgaagtacgtacggtcagaaattgtccgcatagcaaatgcggtgcaagatggcgcgctgccggcgcactacgcgttcgactcgattactcgcccgagagaggccctgatgacattcagcgcaacccgggtcatcttggcagacagccccgatcaagcattgacggagttgtacgagcgattcattgaacgtgacttcgcgaccaaggagtaccacgagcagatccttaccaagggtgtagggaagattcttagcggtgctcgccttaagacatatttcgatgatctccccgtcggcgacgacagcttcagcgtgaagttccccttcgtgtctaccagtgaagacgcgcccaaagtcgtgatcaagccgctcttcctgggtcaggatgagccgaacaagatcttcgagcacggcgggatatgggttcacaaggtggcgcgcctgaaaaagcaccggctactcccgcagcacacgctgttcgctattgaggctccagtcgccggaactagcatcagcacgaaccgcttgagggcgactcgcgagatcacggaagagttgcgagagctgagcgttgaagtggtagacgcatcggacaggccggccattctccacttcgcagagaaagccgtaccgcgctactga

SEQ ID NO: 505985 - DNA, 756 bp, Stenotrophomonas maltophilia
atgaacggacaggtcgcaggctccattctgcccattgtggaaatcactgagcggagttccgatggtaggacgatgccattcaaatgccgaggcgaggatgggcacctctattacgtcaagggtagatcagccactcatgagagcttgatctgcgagtggatggctgggcacctcgccgcccggatgggactgaatttgcctcgctgcgcgatcgctgctgcgcccgccggcttggtgcgcctgcacccggaggggcgggagctgggcagcggccccgtcttcgcttcaagggcagtggaagggctgaactggataacatacgcatctaggctgagggtgccgctaccagtgcggcgggacgttctcgtatttgactggtgggtccacaacgccgacagaaccttgacagagacgggcgggaacccaaacctcctcttcaatgcggagtcagaggagcttgttgtcatcgatcacaatttggcgtttgacgccgagttcgatgaaacgacgttcctccagacccacatcttcggagatgaatggaacccgctttgccaagacctggtggagatggcaaattaccaagctcggctgagtgaagtactggcagacacatgggacaccgcctgggcgagcgttcctagcgaatggctgtttcacgatgatgaacagaccatccccgtaaattttgacgagccagcctgcaaggcgctgttggctcggtgcatccatcaagacttctggaggctggcatga

SEQ ID NO: 505986 - DNA, 750 bp, Stenotrophomonas maltophilia
atgaacgtgttcattagcgttcctgatatggaatcgtcgcgcaaagccaagccaaccaaagcggatatcgcggcagcggctcgccttaagtccgtatggacctccaaggcgaggaagctcgggatcactcaggagaaggtggcattggagcttggtatcacccaaggagccgtaagccagtacctcaacggaaagatcccgatgaacttccgaacgctgaaggtctttgcggcgtcattgggcattgaggacacggaaattaggaacgatctcccagagcagcaattcacagctactaatgccaaggacgacgactacgccgatgtactcggctattcacaggccgcgggcttaggttcaggcgcagaagcggtcgagtacgcagaaacccacagcctaaaattcaagaagaccagcctccggaggcgcggcatctacggccgcaaccttgccgtctactacggcaagggcgacagcatggaaccgaccataaaggacggagatgccatccttttcgacacctctgatacgcgagtcgtggatggcgttctctacgtcatccaggtcgatggctacgcgaatcctgagttctatgtgaaacgcgccctggtgctcgacgccggcgtctacttccaaagcgataacccgcgaggcgaccaccaatggcagaagccgaagccaatggcgtcgaagcgacacccgatcaccgtcatcggtcgagtccattggattggcggatgggctgactga

SEQ ID NO: 505987 - DNA, 204 bp, Stenotrophomonas maltophilia
atgaagaagacgaaggcactggcgccgaggtttaaccctcaagtcgcgccacgcgaacgacggatggaccacaacacggtgtcccgacccaggcgggtgaaggccaggccggtcgccgctggtccggctgaaacggtggaggaattcaaggcgcgtggcgggcgggtgcagtacctgacggcaagctgggggcagcgtgcatga

SEQ ID NO: 505988 - DNA, 366 bp, Stenotrophomonas maltophilia
gtgaacgacaagaccatcgagcaggaaatccacgacaagggcctgaccgcgccgcgtgttacgccgaacgccaccgaggccgagatcagcggcgagtacttcttcaccgcagaggaaggcgtgcaggctgcggcgcactgcaaccccgaggcagtggtggccggcgtccacggcgagcttcgcctgctgacgttctgcgtcctccgtctgcgcaacggcttcaccgtcaccggcgaatcggcctgcgccagcccagagaacttcgacgccgagatcggccgcaagatcgcgcgccagaacgcggtgcagaagatctggccgctgctgggcttccgcctgcgcgacgagctggcagccaaggcctga

SEQ ID NO: 505989 - DNA, 477 bp, Stenotrophomonas maltophilia
atgaatcggatccttgccacggtcgctgccttcgtcctgtggtcaggtgccatggtcggcgttggctgggcctggcgcagtgatcagtcagagggccgggaagccacccagcgcgccgccggcgccgaggcagtcgccgcccaggtgaaccagacccgtgccaccgagcacgcccaggccgagacactggccaccatcggagcgaagcatgaagaagaccgcgctgcggccgcgaccgtccctgctgctgttgtggctgacttgcgcgctggtcgtctccagctgcgcgacgacctcgccacctgcagcaccagcctcctgtcccaagccgtcgccggcgccgtcgaacgtgatgcgcgcgccgaactacgagcagaggttgcggcagctgttgttcaagtcggcagagaagccgacgaccagctccgcgccagccaagcagtgatcgcggccgaccggcaatcggtgacgccatga

SEQ ID NO: 505990 - DNA, 381 bp, Stenotrophomonas maltophilia
atggctcgccatcgacagccgagggaactggccgagctgaagggcgcgaccaagaaggatccgcagcggtacaagaacgaagcgcccaaggcgaatgctccgttgggcaaggcaccggcacaccttccgaccgaggtcgcagtggtctggaaggagctggagaagtgcgccctgcctggcgtcctgaccagcgccgaccgtttcatcatggaggtggcgtcatcgctgctttccgagttccgtgccaaccgcggcgagttcgttgcggccaagtactcccacctgatcggctgcctggcgcgcctgggcctgaccccggctgaccgtcagaagctggggaccgaaaagaccccggagggcaacccattcgacgagttctga

SEQ ID NO: 505991 - DNA, 1305 bp, Stenotrophomonas maltophilia
atgttcggactattcgagaagaaccggcgggccgatgcccgcgaccgtatcgagccgacgatcagcaacctggtcgacggcgaggtgatccagtcctccgacatgcgcatgttcgaggtgttcgggaacccgacgacggcctccggagccgtggtcagcccggaatcggcgatgcgggtttcggcggtgttcgctgccgtctcgttgctggccggcgcgatcgcccagctgccgctgcctgtgttcgagcgggtggacggccatcgcaagcgggcggagcatgactactggtggctgctgaacgagcagttctcctccggctggtcgagcgccaccggctgggagttcgtcgtcggccagatgctgctgcgcggtgatggcgtggtgtacgtgacgcgcaaccgtgccggggtggcgaccgggttgatcccctggccacgcgacagggtgatgatcctcaagcaggagaagaccggcccacgggagccgacacgcctgcagtacacgttccacgatgcggacgggtacttcaccgtcgaccaggacgatgtgctccatttccccggcttcggtttcaacggcgtgcacggcatgtcggtgatccagtggggcgcgcggaacggcatcggcatcgccatccaaggtgacgagcacgccggcaagttcttcagcgagggtggcaagcccgaagtggccatccgaacgcccaataagatgaccaaggagcagcaggacgatttccgcgatgcctgggtcaagaagtacggcggggtgcagggcaaccgtcgcattccgctggttctgaccgaggggctggaggttcacgagctgaccatgtcggcggtcgaccagcagctgctggagtcccggcagtggcaggtgatcgatgtggcccgcgcgttcggcgtcccgccgcacatgatcggcgagaccagcaaggccaccagctggggaaccggcatcgagagcatgggcatcggcttcgtgaagtacacgctgggcccgcacctgaagcggatcaaggacgagttgaaccgcaaactgttccgcacgccgcgctacttcgttgagcacaacgtggacatgttcatggccggcgactcgaagacgcaggccgagtacttcaccaaggcgttgggtggccctggcacccaaggctggatggccgtcaacgaagtccgccgcctcaagaacctgcctcccatcgagggcggcgacaagctctaccaaccgaaagaccccgcgccaccggcgaagccggacagcgacgaccctgaaaggaaccctgaagatgccgattcctaa

SEQ ID NO: 505992 - DNA, 741 bp, Stenotrophomonas maltophilia
atgccgattcctaagttgctgcagctggccaagaacaacgccggccagtccaagcccatccgggcggagaccgaaggcaaggaggccacgatctacctgcacggcgtcatcggcgggtggtggggcgacattgacgagacgatgtttgcccaggctatggccggcatcgacgcggacgtgatccatctgcgcatcgattcgcccggcggtgacgtgtttgcggcccgatcgatgatgacggccatcgcacagcacaaggcgaccgtgatcgcccacgtggatggactggcggcctcggctgccaccggcatctgcatggcctgcgatgaggttgagatcagccagggcgccggtttcatgatccacaacgcctggacggtcgctatcggcaacaaggccgatatgaccaagaccggtgagctgctggccaagatcgataccgggctggccggggactacacccgtcggactggcaaggatgaagcgcagattgtccagtggatggacgaagagacctggttcacggccgacgaagccaaggagcacggtttcgctgatcgcgtggtggaggtcgtcggcaagaagaaggcatccaacacctgggatctgtccgcctacgacaacgcacctgccgcactggccaaccgtacccccgaacccgacgacggcgccgccgccgccgccgcccacaaggccaacctgtcgcgccgtctggcgctgctggaacgctccgctgcgtaa

SEQ ID NO: 505993 - DNA, 1245 bp, Stenotrophomonas maltophilia
atgcccttcaacattcaggccgagcgggagcgccgcaccgcgctggcaaaggaaacccgcaacctgctggacaccagcaccggtgacggcaacaagtggacgccggagaaccaggccaagtacgacgacaacatcgccgagatcgagcgcatcgacgcggcgatcgagcgtcatcagaaggtcatggacctgacggccgacgaggcactgcgcgagcagggcgtgcgtgaacacgacaccgccaaccgcggcggccgggagctgtccaacgagatgcgcctgttcgaccgctgggcgcgtggcggtgacagcgccttgagcgccgaggactggaagcaggtcaacgcggccatgtcgggcaatccggccgtcaacccggagcagggtggctacaccgttccgaccacgctggccgagcagatcctggatgccctgaaggcattcggcggcatgcgccaggtggctgatgtgttcagcactgccggcggcgagccgatgcagtatccgaccagcgatggcacctccgaagagggcgaactggtcgctgaaaaccagtcggcgaacgaccaggacgtggccttcggcaccaagggcctgcaggtgtacaagtacagctccaaggtggtgaccgtgccgtgggagctgctgcaggacagcacggccgatatcgccggcttcatcgagaagcgcctgcagacccgcctgggccgcgtcaccaaccgccactactccgtcggcaccggcgttgggcagccgatgggtgcctttactgccgcggcggtgggcaagatcggcgctgtctcggcgctgccgatcgtcacctacgacgacctggtcgacctggagcacagcgtcgatccggcgtatcgccagctggccaagtggatgttccacgacgacatgctgaagctgatccgcaaggtgaaggacgaccagggccggccgatcttcgtgccgggttacgagcagggcaatccgggcggtgcgccggatcgtctgctgaaccgcgatatccagatcaaccagcacgctccggctccggccgcgggcgccacctcgatcgcgttcggcgacttcagctactacaagatccgcgacgtgatggccgtgaccctgttccgcttcaacgactcggcctacgtgaagaagggccaggtgggcttcatggcctggatgcgctccggcggcaacctggtcgacgtgggcggcgcggtgaagaccttcaagcacggcgctgcggcttaa

SEQ ID NO: 505994 - DNA, 405 bp, Stenotrophomonas maltophilia
atggcaaagcagaagaacaccccaccgcctgcggccggcgggccgctcggtgcgcaggaagcgcccactgcagtagtggacgcagcggctagccagcgcgagcaagcgaacgccgaaagccccggcgctgccgcggcagccgccgtcggtgagccggcgtcggatgagggcggagacagccagacgcccgaaaccgtggcgacggacaatgacgtgccgccaccggatgaagaactggctccgccggagggtgaaaccgtgccggcgctggtgctcagtaacaaccacctggggaaggttggccaggtgatccaggtcaacgcggcacacgttgaggcgctgcgccttggcgggctgatcgacccccaccccaatgccatcaagtcggccacgccggaggaatga

SEQ ID NO: 505995 - DNA, 423 bp, Stenotrophomonas maltophilia
atgctgcgcacgttgaccccggcggcagaggaacccgtgtcgctgagcgaagcgaaggcgcacctggtagttatccacgatgccgacgacgcgctgatcggcgccttcatcaccgccgcgcgtgagtcggtggagcgcaccacggggtatgcgttggcagcagcgacctatgagtggaccccggtcggcgagagccgctctccgctgccgatcgagccggccacgctcgacagtgaagcaggcgcctatccggtgaagttcacgacgacacctggcccgcttccgggaccgctgcgcgcggccgtactgctgttgctgggtgacctgtacgccaaccgcgaggcggtcgtggctggctcgcagttggccgagaacccaaccctggaccggctgatgttcccctaccggcgggtgctgccatga

SEQ ID NO: 505996 - DNA, 1968 bp, Stenotrophomonas maltophilia
atgaccgacactttcgggcggttcgccgccacacccattggcccgttactcgctgcgcgagatggcgggcttaccctggccaccaccggcgccaccgcgctggccagccacgcgcgctccgacttcggccttgatgccgggacggtgggcgtggagtttgcggtgtggggtgatgacgcccttgcagccctcgtaggcttcgccacaggcccggcagcgctgaacaaggcgctgggtgcggatctcgccagcatcggctgggacctcgccgccgggcgcctgctgcaggctggaggagcgatcgccacttccctgccggcggtgacccacggcgacattgtcgggctgcaggtcgtgttctcgacccctcgccagctgcggctctacctcaacggcgcgcagatcctggtgcgcgagctgcagctgtcagggccgctgttcttcgccgcgtcactggccgcaaccaaggcgggcgggctgtgcctcgcggtcaacgcagggcagtgggggccgcgaagcgaggcggcggccgctggctggcggttgcccgctgcatccgtcagcccgacccggctggccgacgtggactggctgtctgcgcccggcgatagcccggcgaacgttcgctacgaggggttggtggccgagggcgtcaacctgatccaggagctggcgttctggccgtggggcggtgaccccgtgtcccaggccgcggccgccgagtgcgtcgtggtcgatgcggaaggtttgctggacggaatggcgggcactggtgcctctggcagctcggtgcagatcctgcttgcgcccgaaaacgggatgcgggccgacgcggtcccggccttccgttgcgcgatcgagcagatcgagatcaacgacgacggcaccaagacgctgcacctgcgcgatgcgcacgactacctggatgaaaccatcaaccagggcgtcttcctgccgaatgtggcgtcgctggcatggaagccacagcccatcgtgatcggtgcggtggccagtattccagcgatgggagccaactcggacggcacgtcgatgttcgttgctgacgggcgggtctacgtggatgccgtgatggaccgcggcgacctgatggagacaggaacctacagccaagcgccggatgggcagcagctgctgatgaagtcgccgccggtaacgccggtggtggcggacgcctccagcatcggagcgggcatgctgccggcgcggttggagcaggcggtgggggacgtgatggccaggttggggcgagcggcctggtcagccagcgactgtgcgagtatcgaccaagccacggggtatatgggcatcggctactacgcaggaacagccatcaccggacgcgctgcgctgaatgcgctcctacccagctacggcgccggctgctaccaggatccatccggtgtgctgcgcttcgcccgcgtgaccgcgcccgagacctatgccggcgcgttcgccttcgacctgtcggaggatgatctggcggctgatctgatcatggtgcccgatgatgctccgaacctgactcgacgcatggcctaccgacccaacggccaagcgctgggcgcgtcagacctggtcaccgacgttctcgacgtgccgcagtcccgacgcgacgaactgaccggcctttaccgggggcaggtgtatggcgctggtcctctgcacccccactaccagcgggcagaggctgctgacccggtcatctcgttgttctggcatgcggccgacgcgcaacaggagattgaacgcgtcctcggcctgtaccgggtgcagcgccacttctaccagctggcggtgcgtggtgatcaggacctggctccgctgccgggacagatcggccggatcacttacagacgttacggtcttgacgacggcaagccggtgctggtgcgccgtgtagagcgcaaccctgccacgggggacgtggtgctgacggtgtggggatga

SEQ ID NO: 505997 - DNA, 192 bp, Stenotrophomonas maltophilia
atgtttgaggacgcaggctttcaaatcggctcaaagggcaccacgctcacttgcccggcttgcggctcctcaggattgatggatgaaatggagatctggcaccactggcttgaccagtgccgtcgcgaacgactgctggcacagttcgatcctacgcctgacgatccgctcgatattgaggaattgaaatga

SEQ ID NO: 505998 - DNA, 669 bp, Stenotrophomonas maltophilia
atggccgtgccgtttgagggctggacacgggagcaaaggattctgcaccggagaagagccgcgagatcgcagtgtgcgcccctcagagtgaacccttcatcacagcaagctgaagcgtcgaccgtcatcgcaggatctgcgacggccggtcgtatccttccggccatgtattcctcccacagcttccgcaccgccccgatccccgctggctgggtccaggccggtgagcgctgggcgctctggtacaacggccgggaaacggcgaacgtcacgcttgatggcggtcctggcgtccggctgtggatggagggccagaagatgtggcacaccaaggaagcacgcgccgccaacgtccgtcaggcgaagcgctacgccgagcgctggtgcgcagcaaggctgtatcccgagctgcctctgcgtgaggccgtcgcccggctgaccgacagcacgccgatccagttgcccccgccactgcctggtctgccgccgacgcgcgagcagcagcaacaggctcggcgcctggccgaggccggagcaacggagatcgagcggatcaaggcggcgctggagccgcgcaagccgccggcggagacgaagccccgagcgagggacgtccgcagcaaggcgtgggtgagtgcagggctgcggcagctacggcgaggggtgtag

SEQ ID NO: 505999 - DNA, 672 bp, Stenotrophomonas maltophilia
atgtccgacgcatcgctaaggtccagcataattgttgcagttgtctcttccgtactcagctctgtcctgactctggggtgcggtctgatgctgcaatcgtacatatcagagaagagcgaagctgaaaggttcgctgaaggcgcccagcttacctttcaggaaacggtaattctcctcaacgaaggctacttggccttgaagcagctgcaatgggcgacggacggaaagggatgggaggaagtgaaagacggtccttggctggattacatggaattcaaccgccaatggaatcagaggttgattgcacactactttaagattgagcggtattttgggactggtgcagcaaagaagctggttgatctcagtgggatggctgagtcgaatgtgctggcggccgatgccgaaagctatagcttcaaggatcatgcggacgcgatcgagtactcaatacggcgcgccacgataagcaggatggtcttcgataaggaaagcgcgaagcttctgcaagctgagttaattgatcaccttgaagatgatcgtcagaacagagagaaaatgtcggatctgatgggggcgtaccagaagaacgtggttggctacagccttggattggataggactctcgatcagttgggtgtcaaacgcgttgtggccaagccgcatccgtag

SEQ ID NO: 506000 - DNA, 2808 bp, Stenotrophomonas maltophilia
atgtgcgaaggcccaagcgacgagtccaacacccatgaaaactcattagccaacgttgcgcaaccactctccaaaaggcatgctaacgggccgtacttgccaaggatcgacacagatatggctgaactaggcctccaccctgcccttagctcgaaagttttaaggcgaaaagcaacatttcttctccatgcgtttgaaggcgctctgtatgcatacgcatgcaataactcggcgtcgttgtctgatctgcccccaggcgtcgtaaccgcaatccgcgcgagagtaaaggggcgttccggtgaactacagggaggtgtggctgagtatttggagcacgcatacctcgatgagatattcgatagtgcgatcgcctctaatagcggccttgattctgaaatcctgctaaaggcacttaaagaaaaatgccaaatttcagggattttcgagattagaaatgcgtgcgctcaccctgcccgagaatttcctgcgttctattggtatcgagcggcgtcggtagcatcggacccccttatatccgcactacgcttgcagggagtttatgaggcactactatccgcggaagatgacagaataagtgacccgcctagcgagtggcttgagaaatttatcgcacaggtgccaaataatcttcccgcgcagtccgagcacgaactcaccggtcttattggacgagataaagagctccaacagctgatcgagagactggcttctccaggggttagcagaattgcaattaccggctacggcggcataggcaagacttcgattgccttgcaaggactgcagagaattcgttatgacccatcaatcgccccaaatctgcagggaatcatttatctaacgctgaagacagagaagctaacatccgacggcattgtttctctagagaattcggccgcattggcagaaattggcgatgcactgcgcgatgcaattcgtgagtctggcctcgcgcccagtggcggagggttcttcgaacttgatgagctgtccgataagcgtctaatcatatgcattgacaatgccgaaagtctaatcaagttcaacgaaaatgaattcgtttctttccttgaccgactgccgatttcctggaagatcctcctgaccagccgactaacggttgatggggctcgcacacttcccgttgagccgttgaagaattcccagagcgaatttctagcgagacgttatatttctgcacgcaacctttctgcagactctgacctcgcgaggcaggttggactggcagccaagggcaacccgctttgcgtccggcttataattgacaaaatatgtcttggcgtcgatgttgcgcaagcaatctcaatcgttggccaagacttggtgaggttctcctttacaagtctcctcgaagttctgccagactctgcacacagaatacttgagtccctgtatttggccggaggtgcaagcagagccgaactttctcaactcctcgagttggaagacgacaccgtggtggggtcaattaggctcctacagaaaacgagccttatatccacatcgttcaccaacggctatgaatcactgtcattgagcgatgcggttagtgacctattgatgaatcagccgctcctttcacatgccagagaggatgtcagggaaaagcttaggcttagatctcaaaggcttcaaacgcaacaagacaagcaggagcggcaaggaagcaatctctgggatctcgattttatcccttcagattcccctattggcctaaaaacgctcctgatagaggccaacttcgccgctcgccgaggccttgacagagaacgtttaattgcgatcgccgcctccctttccagcgctcaagagtcattttccaaagatccatactattggcgcgcccggggtcgagttttggacagactgggcgatccttctgcagaaagcatgtatcgtcgcgcaatggagctttccagtgagcctgctacggttgccgtgctccttgctcaatgtatcgggagacagggccaggcccgggaggtcattgagcttcttgatccaatagttaagcgcggcatacatctcaacgatgcaatcgggatcaagtatcgacggggacttgtctataactatgttcgatctatgcgcgaccttgatcgttttgaggacgttgttgcattttgcgaaactgtcactgagagcgatctttggatggcgttctctccgttctggatatcctccgtgcgccaaggcccactgaccccaagacgggactgttacttggagtgcatcaagatcgctcaacggtgtatcgacaaggggatgcattccgccgccctggttgaggagatgacgaaactccttggctcgatgagcttggacctgcagcagggccgaatggatgcaagcgatcttgtgcacacggcgaagccactcaggacgatcgcccctgcgctcgcttcagttcggacagagcgcactgatccacagcgttttcttgatgcttacaggaaaatcaatcccgaggaatctcccactctatccaaggacgaagtggagctcatcagcttgggctacgtgcaggccacgctcgagaacattccagtagacggactgcgattcccaagctacctattctttaggtccgatgcaggcgaagccatattttgccatcgatcatccctgtctgacactgacctcagtgtgtggaatgatcttcatgtcggcgacagggcattcatcctgccgattgacagtgaggatcaacatccgcgaaaactaagaaaatcgctgtctaccgtcattcttggggagagatcctga

SEQ ID NO: 506001 - DNA, 360 bp, Stenotrophomonas maltophilia
gtgaatcgcgtggcgctgtaccgcgtggtggtgttcgtgccgtcggcagcactgggcgctgtgaagcagggcatcctggcggtggatgcgttggcggccggcgactacgagcacggtatgtggtggtcggcgccggggttcgaacagttccgcccgcgcgtgggtgcgtcgcccgtgcagggtgaggcggggcgcaccgaagtggtcgacagcgtacgcctggaattctgcctgccgcgagatccgcagcggctgcagcgcatcttcgaacagggcatcgtgccgcatcatccgtggcaggtgccggtggtgcaggtggaggaaatcgagcttctgctggccgacgcacgccttttgtag

SEQ ID NO: 506002 - DNA, 222 bp, Stenotrophomonas maltophilia
gtgctgggcctgctcagccggccttcggccctgctgctggcggggatctgtgcggtggcagcgctgaccgatggcatcgcgcgcattcctgcgggactgagcgtgccggattggttgagctggttcttctacctgagcgaagtgccgctgggtgtgttgctgttgtggattgccgcagtggggagtggacggttcgcgatcgaagcgcgttgggcgcgctga

SEQ ID NO: 506003 - DNA, 714 bp, Stenotrophomonas maltophilia
atgcgtctgttggtgatcgaggacaaccgccagctggtggccaacctgttcgactatttcgagtcgcgcgggcatgtgctcgacgtggcgccggatggcatcaccggactgcacctggccgggagccatccgtatgacgccgtcatcctggactggatgctgccgcgcatggagggcccggaggtgctgcgccggctgcgcgccgagcatgcatcggaagtgccggtgatcatgctgaccgcgcgtgacgagctgccggacaagattgccggcttccgcgccggcgccgacgactacctgaccaagccgttcgcactcccggagctggaggtgcggctggaagcgctgctgctgcgtgcgcagggacgcaacccgcgcaagcgcctgcaggtgggcgatctggtcctggatctggccaccctggaagcccagcgcggcacccaggtgctgcacctgtacccggcctgccgcaagctgctggaagtgctcatgcgcgccagccccggcgcggtgacccgccagcagctggaattcgctctgtggggcgacgaaccgccggatggcgacctgctgcgttcgcatgtctacgagctgcgccgcagtgtggacggaccgttcgccgagaaactgatccataccctgccgcgggtgggttaccgcttggccgtgaccacgcccagcgatgccggcaaggatgatgatgaaggcgagtaa

SEQ ID NO: 506004 - DNA, 177 bp, Stenotrophomonas maltophilia
atggcacagcagaaccagaacccgaaccagaagcagcagggccagcagaaccagcaggatcagcagcagggtcgtggccgcgaccagcagcagcaacagcagcaggaacagcagcaggaacagcagcagcgcaaccagcgcaaccagcagcagggtgggcaggacgaggaagagtga

SEQ ID NO: 506005 - DNA, 594 bp, Stenotrophomonas maltophilia
gtgcagcaattgactgaacagattctggcgcacaccgagggcttgcccgagggcgctccgatcgcggcgaagagcctgctccatctcggcaatcgcgccgcggtggaccaggcattgtcgcgactggctgaacgtggccggctgatgcgtgccgggcgcggcgtctatctgcgtccggtttcgagccggttcggcgttcgcgcaccttctgtcgagaaggccgtcgaagccctcgcgctccagcgtggcgaaaccatcgtgtcgaacggcgccgccgccgctaacgcgctcggcctcacgacccaggtgccggtccggtcggtctatctgacatcgggtcgtagccggacgatgaatctgggtcagcaggtcgtcgagctgcggcatgcgccgcgctggcagttggcgctagccgatcggcctgccggacaggcggtgcgtgcgctggcctggctagggccggagaaggcggaagcggccttgaagacgttgaagcgcaagctgccgtcttccacgttcggcgaacttgtcgcggcagcgccccagctcccaagctggctcgccaggacggtgggcaaggtcgcgcatggctga

SEQ ID NO: 506006 - DNA, 1020 bp, Stenotrophomonas maltophilia
atggctgaagccttcctcacattgtcggcggacgatcggcgcgaggctctggctgtcgccgccgatcgatccggccgcccgcttcatctgctggaaaaggatgtgtgggtcgtctggaccctcgcgacgctgttcgggtccgatctcggcgagcatctcgtgttcaagggcggcacgtccttgtcgaaagcctaccgcgtcatccaacgtttttccgaagatgtggatcttacctatgacattcgcgccatcgcccccgacttggtgggcgagaatggcgaggctctgccgaagaaccggagcgaggagaaacggtggtcgaaggccgtccggcaccgtctgcccgagtgggtcgatggaattgtccgacctcttcttgccgacgcgatcgacaggcaatcgctgcccacgacgctcagggtcgaaggcgaaaagctgttcgtcgactatgaggcgaccgctgcgggatcgggctatgtggctccgagcgtgatgctggagttcggcgcccgctcgacaggcgagccggcgagcccgcgtgatgttgtgtgcgacgcggccggactgatcgaggacgtcgaatttccaagggcgctcccgcgggtgatgcatgtcgagcggactttctgggagaaggcgactgcgatgcacgtattctgcttgcaggagcggctgcgtggcgagcgcttcgcccgccattggcacgatgttgttcgactggatgatgccgggatcgccaccgccgcattggacgaccgtgacctcgccggcgcggttgcccgccacaagagcatgttcttcgcggagaaggcagccgacggtgaggcaatcgactacgacgccgccgtcggcgggaagttgcaactcgcgccgactggtgaggcgcgcacggcattggctaccgactatgcgcgcatggtcgaagacgggttgctgcttggagatgccgagccattcgaggcgttgatcgaacgatgtgcagacatagcagagcgggcaaaccgcgcggcaaagggatga

SEQ ID NO: 506007 - DNA, 882 bp, Stenotrophomonas maltophilia
gtgtctacctattttacggaccgtgaatacggaacacggccccaaacaatcgatgtcatcgatgagcgtttgtgggccggcctctacagcttgatccagacgggaattggcaacggctcattcggcctgcgctttccggaacagtgccccgacggaaacggtccttgcggatgtgacgagcagtccttccgccaagtgctaggcgccgaggtgccatggatcgaatggccgctttctccgaacgtagtgcccgacacgccggtaatcctcgatctgctcgagttctgcgccagcgccgtgggtgagcctattcagggcgcctatcattcctactaccgccaccatcacctgagttgggaccgagatgccggccttgcgcgatttgtggcggacgtgaacctcctgttccgccggaacgctgtcgcctatgagctcacagcgaccggacaggcccgtcgccttcttccgcaggtgatcgccaatacgattggctgggccttgtttcacaccggcgatgcggagaccgataggctacttgaagccgcacgacagcggattctctcgccaaagcccgacgatcgccgcgatgccttggaaaagctgtgggatgcgtttgagcggctgaagacgctggagccgggggccgacaagcgcgtgcaggccgatgcactgctggatcgtgtcgccgcgccggcctccggttttcgccaagcgctcgggcgcgaagccgccgaactgaccaaaatcgggaacagctttcgcattcgtcattccgagacgacgcaggaagcgctgacctctctggatcaggtcgactatctgtttacgcggatgtttgcattcgtgcgcgtgatcctgaaagggaccgggcgtggcggatga

SEQ ID NO: 506008 - DNA, 1263 bp, Stenotrophomonas maltophilia
atgagccaggagccagagcaggtcgctgggctggtcgtgcctgcaccagagggcttctcgaaacggcagcgtatcgaacttgcgctcaatgacctcacgcaggaggacctggctcgactggcgctcaaattcgctgctgctcgcagcaacatcccgctcgatgaggcgggccggaaggtgctcgaggccgatgatccaccgctgacgcagatcacacgacgagacgtcgcgcggatcttcggcgacgatctcgccggtgagcgcagcaccgtggaagtggtcgagggctacttcccgctctcctcgccattcgaagactttttcggcagcaggggccagagcctgcgcgaccaggtcgcccggcacatggatcacaatcccggcgattggtcggtcgaacaattgtttggagaaatcggggcctttgattgttccagggccaggttcggcgccttgctcgaacaagctgttcaccccctttcgcgatcgggcgatgagcagacgaagacggtcgcagcactgaacagggtactcgcgcgggatggatatgagcttacgcaggacggcgagatatccggccacccgctcttcagttttcgctctctggtgcgcggggtcagtggccggccgaaaaacctgatctttgcgtcgcgaggaccaaagccggagatcggcttcgccgatgcgatcaacaacgacatcgtcattctgtctggcgaagagagctgcctggtctacgacaggccgatcagcgcgagcggtcttctgtggtcggagctcgtttcctggtggggcgaggttacgtcgggggctgatgccgcaaaacttggagctcgcctccaggaatccttggcctcggacgcagaacgcaagcttttcgcgacctacttcaaggcctatcggtccgccctcggcgaggcgctgcccgcgcttctgccgcaggtctatcttcactatgaccctgccgtggtgaagaccctgcgtcatcggcttccgctaccgcgtcagcgcatggactttctggtgctacttcccagccgtcagcgcatcgtgatcgaggtcgacggcaagcatcacttctcgaaaaacgaccttccgtcattgaaggtctatgccgacatggtgtcggccgaccgcgaaatgcgccttgctggatatgaggtctatcggttcggggcaaatgaactggtcggcaacggcgctgaggcgcgcatcacggatttcttcgacaagctttttcgactgcatcgcattcggcaatga

SEQ ID NO: 506009 - DNA, 1311 bp, Stenotrophomonas maltophilia
ttgacggctacgatattctggtcttggcaaagtgatcgcgacccgaagttgcaccactattttgtgcgcgacgcgctgaaagatgcctgcaagctcatcgccatcgatcccgactatgaggaggcagtgcgacccgaggtcgatcacgataccaagaatgtcgctggaaccccagacatcacgaagacgatcctggagaagatcgccaaagcgaatgtgtttatcgcggatatgacgccggtcggggtaaccgatcctgtagcgcttcagccgaacacaggcgcggataagcgctcggagccgaagcatctgcaaaacccgaacgtcatgtccgaacttggctacgcggaacatgcgctctcacagagccgcatcatcctggtagccaacggcgcgcactatcccggccccgtggcgcttccgtttgactggcgtcaccgtagcggcgcgaaagtctatcacctgaaggacggggccacgaaggacgagatcaaagcggagcagaagcgtttcgccgaggttttgaagagctgcatcgtgcccatcctggccgagcaggcgccggcaaagacacccccgccgcccatctcctggcaaacgtcgagcagtagtgatccggcaatctggccggcggcggagaagaagctcgagttccgcaacaatgcgatggaggagccgcggcgtgatgttgcgctgtccgaagggacgcggatctttgcgcgcatcgcgccccgcgaatggtcggtgcctgccagagtcgagcttgaacagcggatttcggacatcgggctgaatattcgtgggcgagatggtgactggggtctcaatagcgatggcgcattgtcggtctggggtcacatcaccggctcgcggaacgacatgatcgttacgaacgcgacgcaatggtttcaatcgaacggcgagctttgggccgtcaatagcaactgctttgccgagaacagtggcagccgatttttcgcgtctgcgctgccgttcacaccattggatgagtttcttcgtaagggcattgccgccatcagggccatgggcggtaaaggcccgatcgggatcaagctgggtgccggcgatctgaccgacactgtcttgcctggccaataccaatcgcaacgcttcccggctgtcagcgcgcatgtagatgtgggcgaagaaattgaggactggacgccggtagaacggcgggggctcctgctccggttctggaatgctttgatggacgcctacggtcggccgcctgcgcgttccatgacagagttcgagcaagcagcagcggtcgcgccactttcgcaatag

SEQ ID NO: 506010 - DNA, 5109 bp, Stenotrophomonas maltophilia
atgtcccgcacggtgatcggcacgagcggtgccggcacgacctttgaatctcgggcggtggcgtgtctgctggcggcgctgctcggcgaagccgctgcgctcggcgacggtgccgggctggtgatcgagaatatcgaactgcaacgctccggcgcggtggcgggcttcgacgatgccatcgtccgccaccgcctggcggcaggcggcgcccgcactaccgtcatccagatcaagcgcaccttgagcggcgagcgcagcgatccggcgttcaagcgtccgatcgcagaagcggcacgccacattcgagccaatccgggcgacgcgcatcggttcaggatcgtgaccggacagagcgggttcggcccccgcgacgccgaacgcaccacgcttgcagcccgactgtcgctcagtgcagaagatttctggcaacgctgggccgatcctgctgctgccaatgcgggcgagcgtgcctttgccgaagccgtggcatgggtgatccaggatgagctcgacggcccagatccatcgctggcctgggaactgctcaagcggctctcgctcgttgttgccgatattgaggaagcgggatcgctgcacggtcactgggcgctgcgaaaccttgagcgcgccctgtccgatgctgcttcggctccggacctgttgcgggagcttgaccatatcgccgccgacgctgcgcgcgtggcgggggcacttgaccgatcaattctcgcgcgcgaacttgccgatcgctttccactctcagcgtcggaacgtcttgcaccctgtcttgccagactggaccgggaggccgaactggcgctggccagcattcgcgacgatatccttggttttcggctcccccgcgccaatcccacgacgcaattgtccgggcagatcgcagagggcaagagtattcgtctcggcggcgctgcaggcagcggcaagtcagttatcctcaagcgcctcgccgaggaggccgccgatcgggggcacggccggatcgtgctcaaacatgaccgactctcggtggcgacctggcccgcttacgccgcgagtctgcaactctccaccgacctgcctgcgttggttgaagcgcttgcggcttccggcgaggctctactggtgatcgacgggctcgatcgaattcaggacagccagtccgttggtatcctcaatgatctgctggcggccatcgcgcgctcgccaactgcagcaagatggcgtttcctcgtttcgtcgcgcgacctggccggccccgacgtcgctaccctcgccaacctgccggacctgctgagattcgtcgtcaacgcgccggatgctgacgaactgcgcctccttggcaaacggttcccgcacttgcaggcgatgctcgcgcgccagggctatggtgagctcaataagaacctcttcttcatcgcgcagatcgcggcccggccctcggaggccggggcgtcctccgaactcgatctgatgcaggcctgggcgacgcgcggcagcgtggagtcaccgcccgatccacatcgcgacacggcgctgcgaacccttgcccagacgcgcctcagtcagccttttggcggtctgccgaagggtgggattgcgcttggcctcacagcgctcgtatcggagggcacgctcacggagccgccgtatcgcgatgtcgtgcatttcacacatgacatctacgaggattgggcgatcgcccgggcgctcgatgcgcagcgctcgaccttgccgtcgctgttgaaatccgcgcgtcaaccgctggcgtggctgcgcgctgtccgcttggtggccgaaatcgcggtcgacgctgaaggtgccgcagcatggcgtgcgctccatgcacggctgcgcgacgatctcgatctcgatccggtctgggcacgtcaggtgctggtcgcgccgctctattcgccgcgcgcggcgagcctgctcgatcgcatcgaacccgagctgctcgccgatgatgccgcgctgatgcgcgaactagccgacacgctcaccagcttcgaacttcagccgcaccccgaaatcttagccggcacggcctatcccgaagctgatgccgcgacgcgtgcggcgatcgcccagcgccatcaagtgccgcgctggccggcctggccggccttcatgtcctggtccgtcgagcgttggcctagctggccgcagaccctcgccccgatgttgagcaggctcacgctgttttggctgcggaagcccgtccatcgctggcagatcagccgccatgccgttgagcaggttggcgcgtggctggcagccgccgatgcagtcggggcattgggctgggaccagcgtgaggaacgggacaggcgccttgcggcgctggggcttgatgacggcaagcgcgatccggcggaactgcttcgccttgtggtaacccatggttccgacgctgcacccgaggtggcgcgcctctatctcgaacggctattgtccgcagacggagcccaacataccgaaacggtcgtcatctcaccgggcatccttccccgtctcgagccaaggttattcgccgagctcgttgctcgaacgatgatctttgagcgccgggatgaaccattcggcacgagcctagccgtatcgcgtggttatggcctgcgtgacgcctccgggctctttccgagtgctccggggcgggcggggttcgacgcgctattcgccgctgacgaagacgcggcgctcggactgctcgggcaattctgcagcgtcgcgagcgagcaatggcgcttgcagcagcaggagcgcggcctcacgccgcggccaattcggctcgatctgcccgatggcccgcttgacctctggggggaccaacatgtcttcaaatggtcgcgcggcattcttgggccgcatattctgacatccttgctgctggcggccgatcaatggctcgctgcgcaggtcgcgttaggccgctcgctcgctgaactgattaccaagacccttcgcgccgggccgctggtggctatcgcgggacctgtgatcgccgctggtatcgaccgtaacatcgtgcaagcagaccttgcggtcatgctgccgatgatgtgcgcgccgcgcctgtggttttacgatctggtgcgctggatggaagaccaacgtccctccgtctatgggattggttggaaccctggggacgaggacaatcggaccgatgtcgtcaagttgctcggccgccgtcaacgtcagcgcccgctgctccaggggctggtggcacagcttcatgtgctgggagacgacgcaagcaaggcgacattcgcaacggcggcggcgaactggcaggtggctgatctcgccgacttcgaggagttgctcggagatcaagacggcgagttggccgaacgcctcgaaacgtaccggtcgcaggccaatcccgacaattggcaattgcaggtcgccgaggatcgcggctggttcgccatgcactacatcgttccagaacatctgcaggcgcgcgccgccgcggtcaacgagcagcagcagacactcaatgccaccggccccttgctcgactggtcattcggccgctcgcgcggcgctgtatcgactgacgggacgtccattgccgacgtcattccgctggcggtcagcttggatcatccgcagctcttcgacagcgtaacgttcgacgtcgagatcactatgcgcgcgcaggccgtcgcagcgattgccgcgtcgctgctcacagcaggcgacgacgggttgcttgctgagcatggcggctgggcacgctcggtcgtggggcgcgctgcgacgctggatccctggtcgacaggcatccactatgaagatacgtccatggcggacgatccgctggccaatgccggacgcggtcttgcggcactggttggacgcggcattgccgagtctggcgagattgaagcgtggttgaggctcgtctcgagtccgttccgggacgtggccaaagcaagcattgaaggaatcgcaccgttcgcggtatcacgacctcaggccgttgccgcgggtcttgccgccctcacagatagctttctgttcagttggcgcctatggggcgtggatcttgaacaatggttgcgcgccgatcgcgctgcgcgtgccgagcgggcgatcgcggccatcgccgatcaactggctaacgacgagttctgcgacctgccggcgcctccgcccattccggcgccgttcgtagcggcgagccagggcttctatcctcatggcgatatcgaccagcagttcgacacgtatcgcgcggcgtcgatcctgcgccagtacgacctttcggcctttctcgcggtcccggaattgcgcgatcggttgtgccgctttgcccatgcctcgattgaatggctgcgctccttcgccgacggacaggagccgccgcccgaccgctgggacacaggcgatcggcggatggactgggagcaagcgctcggcgccttcatgggccgggtcgcctattcggtgtccgccgggcgcgtcatcgccgatctggtggcgcccatcggagcgatcgaggatgaggaaacgcggatggaggttcttgactccttcctcgatgcctatgccacccaactgttcgatgcgaaccggccgatcgatgaggactttgccgccgtctggcgcgctgcggcttcgattgccttcgacggcatggccaggcaccgggaatatcgtcgatcgcgcgcactcgacgctgcgggcttctgttcctatggccggccggtgttcgagccaaactggcagcatgccgcgagtttcgcgccgctcatcgccgaatgggtcgacgcttgtgcggccttcgaggtggcgccgccggtggtgtctgctctggtctctcaggcgccagccgcattcagtcgcgaccctgcgctcggctggctggagcagatcatggcagcgcgtatggcttcggatcttcgcgagcgtctccggggtggggcaggacgccactgcggccgattgctgaccatgatctggggcgcgaccccggcatctgatcgtctcaccgctgtcgagcgtttccggcgccttgcaagccagcttgccgatttcggcgtccctgaggcggtgacccttcttccggagattgccgaggtgcaggcgcggggttaa

SEQ ID NO: 506011 - DNA, 357 bp, Stenotrophomonas maltophilia
atgcgtttgatgaccttcacctgcccgctctgcgccgccgcaggccagcggtttccactgcactccgcagggaaacgccaagcgaggacggcctgccgcgggtgtggcgtggtgctgcgctcggaccctcgtctgggcatgcacacgttctatctgctgtacacacagttcatcgccatgctggctgtatttcccgtgatctgggcctacaccctgggtcgatggttctggctggccgcgatcttggccctgctgtcggtgctgtgctggttgcccggcatgatcaggcacgcacgaagtccgatcgtgcgcgccacaccggatccgaatcgaagctacgctcgacgcatgccctag

SEQ ID NO: 506012 - DNA, 651 bp, Stenotrophomonas maltophilia
atgacgggggcggcagggctgcgccctgcacctgccgaggcaacgtcaacgtcaaaagcgggtattccttgggatggcggggtagatccggttgagggggacgccgtcaacccatccatgggggcttggtcgcggcttgctcgtgtgcgctgtcctgcgcacacggcaagaccggggttgggcgtcctgcccaacccgcccgaggcatgcctcgggcccatgccgctcacaccccctcaaccggacccaccccgccttcgacagtttcctgcgatctgccggcacggcgttctgctctggtgggtgtcgaccttggtcgacacggtagatccacggcatgcgtggatgaacgtcggaatgatcgaagtacgctgttgtaaagtcgagccatgctcgactgcttctgcctggcgatcaggtgaaggggtcagagcccgttcccgatgggaacgggatccgaccccgattcagaacaactggccctgcaccgtgggctgttcgacgcgcggcggtgtttcggccacctcctccgcacccagccgccaggccaggccacccaaccggctggcgtggcgtttcaatgcagcctgcagcacatcagcgctgcccgccacatgcagtacctggcgggcgcgggtcaggccggtgtag

SEQ ID NO: 506013 - DNA, 177 bp, Stenotrophomonas maltophilia
atggatcggtcggctgtggatgaggccagcgtaagagagctgatttcgatgtttcgactccatggaatagacatgcgcaagttgcgcgagctagagacgaaagagttcagcatcatggatgcgaagcatatccgcctactggttcaagtcggtgtttccggatccatgagcgcatga

SEQ ID NO: 506014 - DNA, 1650 bp, Stenotrophomonas maltophilia
atgaagagtaagtcgaagactggccctgtcaagggcggggaggccaatggcgacgccgttgatcaggctcctaagaaaaagggcaaggtctttggggccgatgccaatcccaacgacgccacggatgacctgggcgttattggggaagacctctcgtttgagctggcttatgccgacgatatgcgccgcgccaactgtttccgcattggcggcaagatggacaacggcgagatcgatgtttcgctgtatcagtggaatgagtccgaaggcatctgggccctgcaagccacccgggaagtagaagcccacgcgttggactggatgcgcaagcacgccccggaggacgccaagcagagcagcgcgaccagctgcgtcaagacggccattctcgaaatgatccgcttgcctggcatgaagttgcctgaaagccagcatcgggccatcgtgccgctgaagggcggttacctggagatcctcaaggacgccaacaagaaggcctacatcgaatacctgccggccgaccccaaacacgggatcacttccttggtcccagcgaagctcaacctcgaccaggtgaggtccggccgctacacccccaagccgttggaccccaagtcgcggtgggccaaatatctggatcgcttcatgcctgacatggccgtgcgagggttgcttcaagaagccatggcgtcgtcggtcatgccgatgtgcctggaaaaagccttcctgttgctgggaagcggcagcaacggcaagagcaccttgcttcacgtcctgcgagccatccaccccaagaacactgcggtccgcatcgacaagctggatgggcagttcgccatggcacctctcgcttccaagactctttatctggcgacagaggcgcccaaggtcctctccgatcccatccagcaggtcctgaaggcgctcatctcacgcgaccccatgtccgccgagaacaaaggcaaggacgcttacaccacggttcctcggggcacgctctttcttgccctgaacgccatgttctccgtgacgagtcatgagcacggcttttggcgaaagatctgcatgatccccttcaatgtgcgcctggccgagaacgacaaggaccgcgatccggacttccacaagaagctgaccgaggacccggcggaaatggccgtgatcatcgactggctgctggagggagccatgcgcctcattgagcgaggcggcctgcccgaggaaatgcccgaagccgtcaaggcgctggccgagcagacccggcaagagacggacaccacggcgtcctacttcgctgagcgcatggtcatcgaagaagaaggcacgtggaccgacaagaacgacatctatgccgactaccgcgattacgtgctggaagagctggggcgcaagccggtgggcgcagaagagctttggaagcgcgtgcgcgaacggatgccggggctccagcagaagcaaaagaaggcgacgaagggcacgaaggccgagcgctgggtcaacctgcgcgtggggggggtgaagccgcgcctggagggcggggctccccaggccatcccggacgaggaggttccgttgggtgaccctctgagcaaagaggccatggaagccatcgccctcctgtcgggcgcaccgatggctgaagccgcgtag

SEQ ID NO: 506015 - DNA, 1014 bp, Stenotrophomonas maltophilia
atgtccaagtattccgatctcatccaagccaccgccgagcggatgcttgacctcatgaagcagggcaccatcccctggcgccgcccatggaatgatcccgatgccccgcagaacggcgcgatcagcgggccctggaacccgaccacgggtaaggcctaccgcggcagcaacacgctcatcctgcgtggggcgcagatggcctacggctacgaggaccaccgatggctgacgtatcgccaggcgcaaagcattggggcccaaatcaagcgcggcgagaaggggcagcagatcgcctactgggatttcagcaaggccggcaaagccaaagacggtgccgagccgttgaccgaaggcgaagagaagaacggataccaagggccatcggtgttcgtcgccacggtgttcaatgccagccaaatggacggcatgcccgagcccccgccgcccttcgtcatgcccgagtcgatccgccacttgcgtgtgcgggagttgttggacaagcaccagccaaaacttcatcacgacggtggcaaccgagcgttctactccatcgccgcggattcgattcacttaccgaagcaccacactttcagcgatgacgtgagctaccaggccacgctgctccacgaactggcccattggactggggcgaagcaccggctcgaccgagatcagaccggccggttcggcacccaggactacgctaaagaggagctggtagcggagctctcaagtttgttcatttccgagcgccttggaatcggcctggggaaagaacacgaaaaacagcacgccggctacctgcagtcctggatgaaagccctggccgacgaccccaggaccctgttccgcgcagccagccaagcggagaaggtcatgacctttttggacatcccggcgtttgaacgcgagccgctgccccaggtcaagaaggagaaggacatggagcaggggcgaaagacggaagccggtcgaaggtccccatcgcgacgcaaggaacgccaggttgcttag

SEQ ID NO: 506016 - DNA, 312 bp, Stenotrophomonas maltophilia
atgcctgcggagatccaagccatctacgacgctgcccaacgcaacacgcctttcagcatggacgtggacgacgccctggccgcgcaccgccaaacgtgtggtgagcgggatcaaatcgagcacgcccgacgggtagacccgtccgatgccatgcccatcgagccggaggcgcgtcgccaagcctatgcacgtcagcggcggtatgcgattcgcgccggaatgaccgcaggcctgacgcttggggccatcgcccaggcgcttggtgtgtcaccctccgagattcagggcgacttggcggcgatggatcgatga

SEQ ID NO: 506017 - DNA, 1677 bp, Stenotrophomonas maltophilia
atggctgaggccgcccctcagtttgctctggagtcgttgcggatcctggattccgaccccgagccctttttcgatgcgctgatgcgggccgcgagaaacatgacgggcatgccggtcgccctgatctccttggtggacggggaccgccaatggttcaaggcccagataggccttcccggtgtggacgagacgccccgcgacattgccttctgcacctgggccatccagtccgatgagccgtttgaggtggcagacgccggccaggatgcccgcttttcgaccaacccgttggtcttgggtcctcctttcgtccgccactatgtcggcgcgcccatcagcgccaatggccagaacgtgggaacgctttgcctgctcagcccaaacccgggaacgatctcagcggagcagggagcagccctgtcatgcttggcccaggccgccgcagtcggcatgcagcagcgcgctcgccttcttgagcgggtcagcgaatcccaggccttgcaacggcgttttcagagaagccagttctttctggagcgcaccaatgcactggccgaggtcggagggtgggagctggtgcttggaactggagaagtcaaatggaccaaggagacccggaggatccatgacgtctctgacgacgcggtgcccggcctggacacggcgattgccctgtgtccggaaggcgcacggcagcggctggaggccgccctggaagactgtatctcatcgggtgtgcccatcgatttgacccttccgtccagcaagctttcgggggagcgcacgtgggtccacgtggtgggccagcgggaagagaccgaaaccggtgcccgattgatcggcgcgatccaagacgtgacggagcaacgggcggcggtcgaggccttggcgcatagcgaggcacgctaccgcaggctgttccaacacagcctcggcctcatctgcacgcattccttggacgggacggtcacgtcggtcaaccctgcggcctcgcactcactgggtctctcggagggtgacgtcgtcggccgatcgctggccgagctcattccccagagcaagcaggacgcgttcaaggcttacttggatcgcatccgggaaaacgagagcgactcgggcatgatggagctggtggcccgcgacggatcgcgccgcttctgggcgtatcacaacgtgctggacacagaagcccaaccgccctacgtgctgggccacgcgcaagacatcacgactgagcagcagctccacgacttggcgacccgcgacccgctcacccgagcgttcaaccgtcgctacttggccgatctggcccaccagcagttcgatgggtggggctgtctggtgtttgacttggaccacttcaaagaagtcaacgacacccaaggccacgcccaaggcgacaaggtgctggtcgacttcgtggctttcctgtccgccccgctccaaggcgaggaagcggtggttcggctcgggggcgacgagttcctcgtgttcgtccccgatgcgacgttggaacggctgagcgtgttggaggacacctaccacgagcgcgccggcgaggcaccgatccgcttttccggcggttgcgccattggtcggccctcggaatcggtggccgataccatcaatcgcgcagacatgaaactctacgaccgccgaaagcgggaacggcagtga

SEQ ID NO: 506018 - DNA, 186 bp, Stenotrophomonas maltophilia
atgagatggaagttcgtaaggcagaccgtggttcccgggcgcatctatggcttcaaagaaggggtgtttgtcgtggtgaatgaagatttcaccgactcttggaacatggttttttcaaagggcggggcagaagagaaggccaagcaatacgctgcggagaggaacgcgaataatgggcttgcttga

SEQ ID NO: 506019 - DNA, 219 bp, Stenotrophomonas maltophilia
atgggcttgcttgaacgccgccgccgctactttgcctacgagcgccgatccgggggcacgtgctacttcgacagggatatgcatgcccacctgcagcggtatccgcacaccatcggccattaccagctcacgcgcttcctgggcacctccgcgttgctgaccgctgaagaggcggccgcccagggctggatggctaagcccagtcggaggaccgcatga

SEQ ID NO: 506020 - DNA, 240 bp, Stenotrophomonas maltophilia
atgaaagagttgattgaaatcgagaacgccggttaccgccaccgggtcaaatacatgtgcgactcagaagatggctttggcgtagtgactcgccaggaatacagctacctcaaagatgggattgtggtctggagtcaagagtttccggcgggcgtttcgtttcgcgagatggccctcgtttttatggattcggggttgtatgtaagagcagacctgaaggagaagaggaggagcggatga

SEQ ID NO: 506021 - DNA, 375 bp, Stenotrophomonas maltophilia
atgagccgctacacgctacaacccaagcggaacaacatgccacttgtggagaccatccacgaaacgtggattgacgcgcctagcaaagccgcgtttcaagccctggccgccgcgcaaggcctgagcatgcgcgctgcactggcccagctcatcgagcaacacgcccagattcgagaaccgttttcccctcgacgccccacgccttggaccggagaggcggcgaaggggcgagagcgctacaaaaccgcgctccccagtgtgcaggtggctccccaggtcgccatggccctgctcatcgacgccaaccgaatcggcattcgtcagccagaagccgttcgccagttggtctggcgatgcatccaatccagcgcctga

SEQ ID NO: 506022 - DNA, 246 bp, Stenotrophomonas maltophilia; identical to SEQ ID NO: 501403

SEQ ID NO: 506023 - DNA, 186 bp, Stenotrophomonas maltophilia; identical to SEQ ID NO: 501404

SEQ ID NO: 506024 - DNA, 2607 bp, Stenotrophomonas maltophilia
atggcgaacaagaatggggccgctgcgcctacgactctggaagagtggttgaatggccgcccaagctggctgcgcatggccgcttccacggtgatccagcaccgccgcatgccgaacgaagaggagatggaggcgctggcggatcactgcctggccgaggcagccaagaagctggatgctccccacccggcgttggcaccgggaaccatcttggggacacccaccgccgctgagcttcgcatcgactcggtctcctccatctgcggcgtcaatgcccttggcgaggacgcggcattggacctcagccaaggccagatgaccgtggtctacggacccaacggggccgggaaatcgggctacgcccgtttgatgaagcacgtttgtggcgcgcgggccaagggatctatccacggcaacgtgttcaagcagaatcccgatgctgcctctgccttgatcaaagtcacggcgacccgatccgacggcacgacatcgtctgctgatctcacttggcaagcatccgacggtgcccattcgacgttgaaagcggtcccggtcttcgactcagccacagcgctggagttcggagacagcgccaccaccgccacccatcttccccgggcgatgcggttcgtcgggatgctcatccacatctcagacgatctcgccacccgattgaaggcccgcgccgccaagctcaccagcaaactgcccatcatcccggaagagcacgcgcagagcagcgctgcaacggtcctccggaagttgacggcgaaactgaccgaagaggatattaaccagcgttgcgccttccccgctgcactgaacgatgagcgtttggcgctggagaccgcactggcccaggcgaaccctgaagtggcccacgccaaggccgtcggagagctagaacgcttgtcgcagatggccacaagcatctcggcattgaaggagagcttgaacggcgagaaggcccaagccctcttggatgcccgcagcaatgcagaggtcaagcgccaggccgccaccgcctatgccacggccttcctcaatgggctgccgctcaaaggcgtcggagacgccgtgtggcgaaccctttgggacgctgcaaaggcgtattcgacaggtcttgcctaccgtgaccaccctttcccccacgttggggacgaatcccgttgtgtcctctgccagcaaccgttgggagacgacggcaaggcccgcttggccagctttgaaagctacctcaacgacaccctgcagacagaagctaagagcgcggaagacgcgctgacggcgctgaagaaagcgttgcccagtcctctcaccgatgtcgcctggcaggcccagtgcgctgctattggcttggaagccccccaagccactgagctgtttgaggccatccatgcgagattgaaagccatggccgaggccacggcggctccggcagtgcagtggtcggtgtggaccaacgcctacgatcagaaggtcaagaccactagcgctgatcgcgacgcgctggcgggcttgctggacccgacgggacggaaggagaaggaaagccgcctagcagagctgaaagcacaacagtggctgtcggagcagcgcgatgcggtatgggccgacgtgatccgcctcaaacgcgtgggaacggtggaagccgctgtccggtccacctcaaccagccagttgacgaccaaaagcaatgacattggcgagtcggagttggccaagggctattgcgaccgcttcaatgccgagttgcgggcgctggggggccattcgcttcctgtccgcatgtcgtatcgatcccaaggcaaaggggcgttcacgttttacgttgagctgaaggacgcgcaaggcgcccagaagaatcgtgaaatcctgagcgagggtgagcaacgcatcgtggcgttggcagccttcctggccgacgcgacgggccttgaacggggcatgcccgtgatcttcgacgaccccatctcctccctggatcagcgctttgaggaggcggtcgccaaacgcctcgtagatctggccgagcatcgccaggtgatcgtgttcacacatcgattgtcactgatggtcctactgcagagtgccgccaagcagcgggccaacctcgatcagcctacggtcaaggtcgcggttgaatcgatcgcccgcgatggaagcaggaccggcatgccggcgcagatcaatacgttctctctgaagccacaatccggcttgaaccaaatgatcagcagcatcggacagcttaagaagcttgatccgccactaaaagaacttgccctgaaggccgcctgcagcaacttccgaatcttggttgagcgctctgtagaggacgagctttgttctggcgtcatcaaccgctaccggcgcgagatcaacacgctcaacaagctacagcggctcagtgcaatcaccccagcagactgcgcactgatcgacgggatgatgacgaagtattcggcattcgagcactcccaacccaccgacacccccagttggcttccgggtccggacgaactgctaaaggacgttcaagacatgctcgaatggtgcaaggagttcggtaagcgagcggaaaccgcggcgaaacccaaggcgtag

SEQ ID NO: 506025 - DNA, 588 bp, Stenotrophomonas maltophilia; identical to SEQ ID NO: 501416

SEQ ID NO: 506026 - DNA, 432 bp, Stenotrophomonas maltophilia
gtgggtcgtccgtcgcttccaaccaagtctttcaacattgccagcgacgagctggagagcgcgcggtattgcgcgaaagagcagggggtttcgctcaataagtatttgcgcctggcggtcttggaaaagaaccggggcgtggtgcaggggttggagacccgcgacgccctggacgacatccgggccacggtgcgcgaatccgaaacccggaatgccatggtcctagaaagcctgatggcggacctgcgagccgagcagagcgctgcactccaagccaatgaagaactggtggtgaaaacccttcaagcgttttcccagttcttggcgcaacaagaacccgtcgcgctcgcacccaccaagcaaccggccaccaaagcagcaagccgtgggccggtagccaatccggcgttcctgcctcccaagccctactaa

SEQ ID NO: 506027 - DNA, 705 bp, Stenotrophomonas maltophilia
gtgggcgagactaaccgtagaaagccgaagggaaatgacaagcatctaatccttcactacataattgtctttgtattgtatgcgatcgcggtactcatcgcggttaagcttcttgctttgcccgccgctcacaaagacttcatcacctcactatccagtgcagcgatactggcaacactgggatcagccattgcgacagttggttcgctttggtctggagatcgcacgaccagaattgccttggatgttgacatccttttcaaggatatcttcaaacaggaggcatggaggagatggccgttcttgcttcgctccgggagcagaaagctcctagatgggggtgtccacgaattttcgctcagcaaccctgtcatacccttaaacgtgggtagccacaacatcaaaattacgcttccaacggttcaagaagatttttttgatctgccgctgttcttaaacctatatccacttgttaggtataggaatgctgcacatacaacaatatccaatgcgccgaaggactcaatattcccagagaataagctgaatccatgggatcagtacatggcgtatgagtgtcttacggatatatggatcagtgtttttgtgttcagggcgtcaagatatgtcgtccatttcggtgcagcactcacaataagtagcgctattattggtggccttgccgcctcggcgagtgctgcctaa

SEQ ID NO: 506028 - DNA, 609 bp, Stenotrophomonas maltophilia
atgaatagccctagccagcctccccatcaggagctgaagtttgaacaccttggccaggccctggatcgcgcctttcttggaggcgatccgtacctgccccccgatactccttggccttgcgacgccaaggggaagccaatgcttcatcttgcgagcctacctgctcccttcattcaaacgcacatcccgaagatcgcaatcagagctcacctctgcgtgtcgatcttcacgccttatgacgttcttgatgatgcctatatcgaaaccgctctactgactggcggacgtgtcatcgcttacgcgccccacgaacccggcgcagacagcgcagcgccccctttggacccacgcctgatcaccactgccacagcctccatcccggatgacgtcgagaacggaatcgccaagatcggcggaattcccgcttggcttcaggacgattgcgctgatggacgggaattcatcctccagatcaacgcttcccgattgaaccgggcagcaccgacgcatcgaggaatcctggtcggcggaatgggctatctgttgcttgatcgcaacattccctcaccttcgacggactgcggtcgattcgtcatccagaccacttga

SEQ ID NO: 506029 - DNA, 288 bp, Stenotrophomonas maltophilia
atgagcaaacattcacgaaaggcacgggaaaagctggcggaaggcttgatgtcgatgtccggctccctggccgttgcattgactgttggtgtgttaattactcctctcctggcagtcgccaatgcggcggtcgcgggaaaggatgtggacctttgggccatgattactgacctcaaaccgactactgcggcaatactgttcctgctctattgctcagcggttgcgacagtactcggtggacgtagcgcggcgatgaaaatcttcaacgagttgtatccggacaaatga

SEQ ID NO: 506030 - DNA, 201 bp, Stenotrophomonas maltophilia
atgctcatgaatgctcaacctgtactgctgcgccccgaaacactgaccctccgcgatcgaccggtccgcgtcgttccgccggaagaggtcatcgacagcgaagccctgctcaagggccgtcgtgaaatcctgatccagcacggcgaccgcttctatcgcctgcggcacaccagcaacgacaagctgatcctgaccaagtaa

SEQ ID NO: 506031 - DNA, 1437 bp, Stenotrophomonas maltophilia
atgtggatttcactcgatatgttcggtgcgcaggcgtatggtaggattgtcgagctcgcgagtgggtctagaaggtgtgcgcggtggtcgcttgcggctgcgctcatgccatggggattggctagtgcacagacggtgccgccggcgccacttagctacaacgaagctgaggcgcgcttgggcgacgtatcggatgctgttttggcggccagtgcaggcactgctagcaagcgcgatcttgccgatgcggcgcgccatctgcgtatccctgatgtgacgctggacgtcaagcagttgaagtttcagaagtctctcgatatcccattgggccctctgtcaggcctagccgagtcagcaggcctaccgggcacgatcaactatttcgatcagggatggcacctccgccccactgccagcatcgtgctgccgctctacacaggtggcaagattccagctgcgcaacgtgctgccgctgccgcggtcagtcaggctgaagcagaggaagaggggacaagacagtcagagacggtgcaactcgtgcaggtctacttcgggcagcagcttgctgcgcacgttgtcgatgtccgccgccaggtcagagacggcctgcaaaggcactacctcgacgccgaagctcttgagcacgcaggcatggccaccaaagcacagcggctccaggcggcggtggcgcgagatcaagcagagcgcgaataccagcagtcgctgaatgatcgatcaacgctgggggcgacgctcagccagctgttgagagcagggcagccagtggagacgactacaccactgtttgtgctcagcacccccatgaatgacgtcgcaagatttcgtcagtcggcgaaagatcggcatccacagttactccggctccgcgcgctcgtggagcaggcggaacaaggcgtaaagctaaaggaagctgagctcaagccacaggtgtttttgttcgggcagcgagacctcaagcgctccgatgccctgctcactgatccagactgggtatttggaattggcttcaagtactcattcctctctagcagcgaccggcccaagcagatcagcgccgcgcgcaatcagctagagcaagcgcgatccagcctcaaggagcttgagaatgaaatcgatatcgcggtaactagagcagttaataccttagatagctctcggcagcagtttctgcttctagatagctccattgatcaggcggaggagaacctgcgcctacaggagctctccttcaaggaaggccaagcgaactcgcttgacgtcattgacgcgcgcttgaggctgggttctgtcgccgcagagcgagcgcgagcagcttatcagtacgacgtcgcactagcgcagcttctcgaagttgccggccagacagatcagttctctacatacatccagaaagccgaccgagtgttcacaccatga

SEQ ID NO: 506032 - DNA, 1002 bp, Stenotrophomonas maltophilia
atgagcgcacctgcgaccgattcaccaagccgaacaaggaagctgattcccgctgcaattgccctaatcgtcgtgggcggcgggctgtggcttgccactagaaaacctgctgacctggtgcaggggatggttgatgcagacacgataaaagtttctgcaaaaatcacagcccgggtctccgaactcaaagtgcacgaaggcgacaaagttcagcgcggacaggtgctgtttgagctggatagccctgaggttgaagcaaagaagcagcaggtttccgccgtactggaagctgccaaagcgcaggaagccaaggctgatgagggcgctcgacgtgaagatatccgtgcagcacaggccaactgggctagagctgaggcatccactaccttagccagaagcacctacaatcgagttgagagtctatatggccaaggagttctaacgcttcagaagcgagacgaggcatttgcccagctgcgcagtgcagaacaagcctcagccgcgacaagggctcagtatgatcttgcattggcaggtacgcgaagccaagacaagctcgccgcacaagcccaagttcgtcaagcagagggtggcgtggctgaagtggaggcgtcaagaaccgaggtgcgcggcgtcgctccaagtgatggggaggtgaatcgtcgcttggccgacgtcggtgaactggtgccggcgggctacccggtattcacactgatcgatactcagcgccaatgggtctccttctatttgcgcgaggaccagttctctgccgcgaggactggtcagattgtccatggcgacattcccgcgctcaatgtcaaaggagcatccttcgagatctacttcatcaatcccgcgggggacttcgctacttggcgcgctacccgacagtccgcgggctatgatgtaaagagctttgaggtgcgcgctcggcccacgaagtcgataattggcctgcgcccagggatgagcgtcttgtttgcctggccgcagacctga

SEQ ID NO: 506033 - DNA, 1167 bp, Stenotrophomonas maltophilia
atgcgcgctatcaccagcattgcaaattcagccaaacgcgaactcgcctttctagctcgcgaccgctggtcggtggcaatgatcacctggttccctggaattttgcttcttgtcattgccatagccttcagccgtggcgtgctacgggatgtgcctgttgtcattgttgatcacgatcgaagcccaatgagccgggacttggcacgccgtgtgacagctctacagggcgtttacgttgcagccgccactgagtcactggataaggcgtggtcccaggtcaggagtagaaacgcctacgcggtcctgtacatccctcgcgaaacaactagggagatcgagaagggaaatggggccgcagtatttgtctactacaacgctagcttcctacttacatcgcaatcagcaatgcgggagctaacatcggccgttcagagcgagaacgcgaatctagcgttgattcgcagttccttcgttagaggtcgatttggagcggacgctctgccggcgcgcgtccaggcccgcataatgttcaatcccgaaaagagctacgaacacttccttacgtctctgctctacccagcaattctacaacttgcgttcagcttaggcgtggttggggcaatgggccgagagctacgtgacgctacggggcccgcatggttgcgcgagtgcggagatagaccactgactgcactgattggaaagctccttccttacgtgtttctgtttctggtctatggagttgcggcaagcgcatggctcgcttaccgaggagcgggagtagcgggcaatcccgccgttctgattctcggatacttagccatgtacttggcctacgcaagcgttgcatcgctgctaataggattgaccaagagtatggtcgtagcgctgtctttaaccgggatctatgcaggtgtcgcaatggcattctccggcgccccgttcccaacaatcgatgctccaatttttacgcgaatctggagtgaactcatgccgttcacgacgtttgttcacattcagtcgcaacagcttgacattggatcggattggcgggactcgttacatcattttggaagattggccgtctttgttctaaccgccggcgttatcggggcaaggctgtatctacgtgcgctttccgatgagaccgcgtggagaaggcgatga

SEQ ID NO: 506034 - DNA, 1146 bp, Stenotrophomonas maltophilia
atgaaagcgtatctgagatcactgagtgccaccatacgtcacatctttaaggatagagcggccgtgacgaccatcatcgtcgcgtcgatcatctacgccttctactatcccgctgcatatcagcaccaggttgcaacgagaatgccggttgtcgccgtggatctagatcgcagtccggcgagccgtgacctactccgcaagctaactgccgtacgtgacatcgaactaaaggacaccctaggatcattgtctgaggcagagagacacattcgcgagggacacgccgaaggcattctcgtaattgaccagagatttcaaagggatattcttcgtggcggccagggaaagttgacattccttgcatcaggcgcgttgctgggcagggctaatactgtctcccagggactcgcagctgcggtggccggcttttcaagtgacgcggttctggagcaagcccagttcttgggccttccggcccatgccgcgcttacacctatccaacgacctctattcaatacacgagaaggatacgcaagcgccgttgtcaccggagtatccgcccttatcgttcaccagacgcttcttaccggaatcattctgattttgggaagttatcgagaagagagaggggggcgaatccggctcgccgcgagcacccttggtggtgcgctgacagcattctggctaattggcatgaccaatatgctgttctactctggtttcgtattctggttccaggatttccctcgaggaggaaatcttgccggcctcctgcttggaactgcgatatacatcgcagcactcgtcgcatttggcgcatttgtcggaagtttcttcagagtgcgcgagcatgcaatgcaatttgtactaatgacgtcgatgccactctactttctgtctggtttatcttggcctcgcacttctattccaacgtggctcgcgtatgtggcggatttacttccatcaacctccggcatcattgcaatggtcaagttcaatcagatgggggcgagcgtatcggaggccatgccggagctcgccaagctcttcgcattgtttgttctatacacaagtctttccttcctccgctacagaatgccgaatggtgccggcagcagacacgccaacggtgatccgacccaatga

SEQ ID NO: 506035 - DNA, 1677 bp, Stenotrophomonas maltophilia
atgaataataagaattcaaacctgaggccctggctgcaattctatccccctggcgttccggccgaaattgacgccgatgcctattcgagcgtaattgatctcttcgagcatagctgtgccgagttccgggagcatgtcgcatactcaaacttcgggcgaaagctgacctatggtgagcttgatgagttgagcagggattttgcagcataccttcagggctcattgagtctaaagagaggagatagagtgggcattatgatgcccaattgtcttcagtaccccgtcgcactctttggggcgctgcgagcaggtatgactgtggtcaacatcaaccccatgtataccgtccgggaactcgaacaccagttgcgagactctggcgccacgaccctcgtcgccttggacacctgcggtactgtcgtccagcgcgccatgctgaagagcggcgtcaagcacgtcattatttcgcgcttaggcgatttgttgacaccaattcgtcggctcactatcaacttcgtcatgaagcacgtgaagcgactagcacctgattatcacattcctggtgcaattgggttcaccgccgccctagcagagggccgctctaggccgcttgccaatgtaacgatccactctgacgacgtggccttcctgcagtacaccggcggaacgaccggcatttcaatgggagccatgttgacccatcgaaatgtgatcgccaacatgcaacaagtctcgacttggatcgagaaggccaacctgcagccgggtcgagaaattgcggttacggccttgcccctctatcacgtctacgcattaatgactcatgcgttcataataatgcgcatcgggggaatgaatcatttgattaccgatccgcgtgatattaccgggcttgtcaaaagcataaaggacatcaggttcagcataattcttggcgtcaacactctttacaatggactgttgaacgcgcctcacttccaccgagtcgacttcagcgaactcaaattctgcttcagcgggggcgctgcgactcagagggccgtagcaaaacgttgggagaacgttacagggcacaagattgttgaaggctatggactgaccgaagcatctccggtcgtagcggttaattggcttggaactgaagcattcacaggcacggtcggccaaccgcttccgtcgacggaggtgcgcattgtggatccggtcggcggcatcattgggcctggtcaggtcggagaactgttcgtgcgtggccctcaagtcatgaagggctactggaaccgacctgaggacacgagcgcagcctttgcggatggctggcttcgaacgggcgacatggccgcaatggacgatcaaggcttcatccgcatagttgatcgcaagaaggacatgatcattgtatctggcttcaacgtctatccaaacgaaattgaggacgtcttggccgccgtcccaggcgtgaaggaggttgccgttgttggcattcccgatgaacgttctggcgagcgagtgaaggcttttatcgtcagatcaaacacctctctgactcaggccacaatcaatgcgtacgccaaggaacgccttactggctacaagcgtccttcggaggtcgaattctgtgaaaatttgccgaagagtaatgtcggcaaggtactgcgccgggaactccgcggataa

SEQ ID NO: 506036 - DNA, 783 bp, Stenotrophomonas maltophilia
gtgaaaatttgccgaagagtaatgtcggcaaggtactgcgccgggaactccgcggataaatcgatgcacaagatcggcgttccctcagagaccgcgtggagtagacggctctgccggcacctctactctgatagctgtagtacgaagtgggaaatgattgccctgcccaagcctccgggcccaatggccgggcggcccagttgcggggcaaaggctgaggcaatcatgagatcagcgtcatttcactttggggaaaagggattcggctgcgccaggattgctgatatcgcccgagacgccgaggtgaccaaggcgaccatttatgcatggcacgaaagcaaggaagggctgttccgtgccgttcttttgagaatgatagattcgcttcccgctcctaggcagctttcttggaggcagcatggaagctctgacaagaaccttgaggaggtcgccagagaactgtgggagttaaccggaaccccagcgatggcgaatctgaataggatgctcaacgggcctggtgcgccttcgagcataagctgccaggctctatggaacgagatagtgcagggctatgttagggaaacagagtttaatctaaatgcgatcgcctggaattccacgcggaatgatctgaactgcagcgagcttgccctaggcttggtccagatgatggttggagcgagagtccttaattcacttcaggacgcggatccaccagcgcatacttcgggccctcgcggcgctattgctttgattcgagcgtcgctgctcaccaattga

SEQ ID NO: 506037 - DNA, 1032 bp, Stenotrophomonas maltophilia
atggcgtcaaatacagctgcgagcttgcctgagagcgcactgcttccagcgacagtgccaataagcattgtcaacggattcctttccaaatccgaccctgcgactgtgtcaaggcttgcgacacgttgcggactgcctaacggtcttctgggtcgaaacggcgcccgaattacgagggagcagttctcgcttctgtatcgaaccctcgcgaacgagctcgatgacgagatgcctggtgtctttagccgccctctacgctcgggaacactgaagtacatgtgtctcagcatgatcgatgcaccccgcctggaagtggcacttcaccgcatgtcgcagttcttccatcttgtgctggatgacttccgaatcagcgttggcggtctagctggcactggatttgtagaggttgttccagttggcgacaaccgcgacggcgatggttcagagcttggaaagctcctcctgctaaagttagttcatggcatctcatcttggcttattcaggggcagcttccactttccaggattgagtttgatttccagcgccctccgatggttgatgactacttgtcactgttccctggccgatcgcatttcagttgttcgcgatcgtcaatttcattctctgacgagcacatgacttcgctcattcggcagaatagggctaatcttcgcgcgttcctcgcgagagcgccggaggactggatcttctcttcgttcgcccatcgacccacctacaatcgctgtcttcagttgatcagagacgctcttcccgattccatctcgctcgcagccgtcgcgatgaggatgcactgctccgaacgcacgctatgtcgcaagctctcagcagagggggggagcttccaatgcatcaaggacgaagtgcgccgcgatgtcgccattcaaaagctcactcaaacggacgcgccgcttagcgaggtcggggcctttgtggggttcgataactcgacggcctttcatcgcgcgttccgggtgtggacgggcagcacccccggctcctatcgaaagtaa

SEQ ID NO: 506038 - DNA, 1791 bp, Stenotrophomonas maltophilia
gtgagctacgccgcgcccgttaaagatatcgattttgtcctagggaggctgatagatcctcaatcgttggctggtgccggtgaagaggacggctgcagtctggatttggcccgggctgtcgtagacgaatgtgcccgcctgaatcaggaggtagtctcacccttgaatgttgctggggatcggatcggaagccaacgtactggcagtgaggtcactacgccccccggatttgtcgatgcctatcatcagtacgttgacggcggctggcagggcatctcacatgcagcgaagcatggggggcagggccttccaaaggttatcggcgccgcctgcatggagatggttcaatcggccaacttggcatttagcctctgcccgcttctgacggatggcgcaatcgaggccctgaccacggcagcaagcgatgaggtgaacaacctctatttgaagaggctcatttcgggccagtggaccggcacgatgaatcttactgagccacaggcgggctcggatctcgcgttgatcaggtcgagagcagagcctgaacccgatggaacgttccgaatcagtgggacgaaaattttcatcacatggggtgagcatgatcttaccgagaacattgttcatctagttcttgctcgcacccctaccgcacctcacggcgttaagggaatttcacttttcgttgttcccaagtttcgtgtggactccaacggcgcactgggcgagcgcaatgccgttgaatgtgtctctcttgaacacaagcttggcatccacgccagtccaacggcagtcatggagtacaagggagcgatcgggcacctggtcggcgaagaaaatcgcgggctggagtacatgttcgtgatgatgaacgcagcacgattcgcggtagggatgcaggggattgctgtttctgccgcggcctatcagaaggccgcgacctatgccaaggagcgcgtgcaaggacgaccggttgacgggtcgtcgaactcacccgtgcctatcatcgaacatcctgatgtccgtcgcatgctgatggagatgcttacccttacggaaagcgcccgcgccttggcctatgtagtggcgagctatgcggatctgtctaagaatgccaaagacgtcgccgctcggaagcagttcgccgggctgtatgaattcctggtgccgatcgtcaaggcgtggagtactgaaatttcaatcgatgtggcgaatcttggaatccaggttcacggggggatgggctacatcgaggagacaggagcagcgcagtacttgcgggatgccaggatcctgtcaatttatgagggaactacggccatccaagccaatgatctgcttggacgaaagctgttgcgcgatcaaggcagtacagcgcgagttttgctcgggatgattgacaacaccttagaggagctcgaggcaccagctcttgtgggggtctcctctgcggactcaatgcgccgaagtctacagcttggccgcgacgtccttgaggactccactcagctcctactttcacgtacgcgagatgaacccaaggcctgttttggggtggccgtcccttacctgaagctctgtggcctggttctcagcgggtggcagatggcgagatcgctgctatgcgtattgtcgtcgccgtccagcgacaccgcattcgatgcaagaaagatcgccggtgcccacttctttgcaactcacctccttccacgagcagtggcatatgccagcaccattcaggcgcccaaggggctagacgaagtgatggcgctgagcgcggattccttctaa

SEQ ID NO: 506039 - DNA, 747 bp, Stenotrophomonas maltophilia
atgagaattctcgtttcctataaacgcgtggtggactacaacgtccgtattcaggtcaagccggacggttccggcgtggtcaccgacggtgtcaagctgtcccccaaccccttcgatgaaatcgccctggaagaagccctgcgcctgcgcgacaagggcatcgccagcgaagtggtggtcgccaccatcgccccggccgatgcccaggcgcatctgcgcaacggcctggccatgggcgccaaccgtgccgtccatgtggtcaccgaccaggccatccagccgctgaccgccgcacgcaccctactcaagctgatcgagaaggaacagccggacctggtgatcctgggcaagcaggccatcgacgacgacgccaaccagaccggccagatgctggccacgctgtggggccgcccgcaggcgaccttcgccagcaagctggagattgccgacggcaaggccacagtgacccgcgaagtcgatgccggcctggaaacgctggaagtcgatctgccggccgtggtcaccaccgatctgcgcctgaacgagccgcgcttcatcaagctgccggacatcatgaaggccaaggccaagccgctggaaaccctgcagctggccgacctcggtgttgaagccgccgataccttcaagaccacccagtacgccgcgccgtccaagcgcagcaagggtgtgatggtcaaggacgcggccgaactggttgccgcactcaagcagaaggggttgctgtaa

SEQ ID NO: 506040 - DNA, 942 bp, Stenotrophomonas maltophilia
atgagcaagattctcgtcatcgccgagcaccacgacggcaagctcaacgccgccaccgccaagaccgtcagcgctgctgccgccatcaacggtgccagcatcgacgtgctggtgctggccgccgatccggcgatcgtcgccgccgaggccgcgaagatcgccggcgtcgccaaggtcctgaccgtggccaacgctgccaacgcgcaggccatcgcccaggggctggcgccgcagatcgcgcagctggccaagggttacacccacgtattcggcccgtcgaccaccttcggcaaggacctgatgccgtgcgtggccgccctgctcggcgtcaaccaggtctccgacctgatgagcgttgaaggcagccacaccttcaagcgcccgatctacgccggcaacgcgatcatcaccgtggaagccccggccgaccagatcgtagttgccaccgtgcgtgccgcgtcgtggccggaagccgcccagggcggcagcagcgccgccattgaagcggccagcgtcgacgccgcgctgccgacccacacccgtttcgtcggcctggccgctggtgccagcgaccgcccggacctgcagagcgccaagcgcgtggtctccggtggtcgtggtgtcggttcggaagagaacttcaaggtcatcttccagctggccgacaagctcggtgccgccgtcggtgcctcgcgcgccgccgtcgatgccggctacgtgcccagcgatctgcaggtcggccagaccggcaagatcatcgcgccggaactgtacgtggccgtgggcatcagcggtgcgatccagcatctgaccggaatcaaggacgccggcaccatcgtggcgatcaacaaggatggcgacgcgccgatcttcgagattgccgatatcggcctggagggggatctgtttgcgatcctgccggagcttggccggatcatctaa

SEQ ID NO: 506041 - DNA, 1224 bp, Stenotrophomonas maltophilia
atggcaactgacaacatattctccggactcaaggtagtggacctagctagcttcattgctggtccagcggctacaacaatcctctctgatttcggcgcagacgtcataaaggtcgaaccgccgagcacaggtgatccgtatcggttcttctatcagactccgccaaatcccatctctgacaagaactacgcttggcagctgacaaacaggaacaagcggagcatcgctcttgacctgaagaatccagaggcaaagcaggtgctacagaagctggttgcatgggcagatgtccttgtcactaactacccgcccgaagtcaagaccaggctgggcctggattacgatgccatcgcgtcaattaacccgcgactgatctatgcagacatcacgggctacggagcgaaggggccggaagcgaataagccagggtttgacgtcactgcctactgggcacgtactggcctgatgcaagttacacacgacgaggatagccctccaacgctgccgattcctggcatcggggatcatgcgaccgccagcacgctgtactccgcaattgtcacgggtctctacaggcgcgagcgcaccgggcagggcgggtatgttacgacctcactcatcgctgagggagcttgggccgccgcccaatggatcgagggcggcctcaacggggcaaaattctaccctcagcacaatcggaaatccccgcccaacgcactgctgaacccctacaagacgtcagacgatcggtggatccttctggttgcggcgcagcaaaaggattggccgggctttgtcaaagcaatggcgatggaagacctcttgagtgacccacgttttgtagatggccagttgagaactcagaacgctagcgccctggttgacatccttgatccggtgttcgaatcccaaccgctgagccactggaaggaagtactcgatggcggccgcgtcatttacggtgttgtccagatcgcagaggacatcgtgaacgacccgcaaatgcttgccaatgacatctttatgccagtttctgatccatccatcgggtctaagtacacggtgagtagccccattcaggtcgtcgggacacctaaagtcgagccacgaaaggcgccagatttaggtgaacacaccggatcagtgttgttggagcttggattctccaatgaccaagtcgcgctcctgcattcaagcggcgccgtggcaagtaagcatagctga

SEQ ID NO: 506042 - DNA, 306 bp, Stenotrophomonas maltophilia
atgagcacgagcactgcacatgcggaaaaggttgtagctggcaagctgcctttggccgatggagacttctacaatctctccagcactctttcggatgaagataattcaatccgactgaaggtccgtgatttcatggaaaaggaggtccagcccatcattaacgatttttgggaacgggacgaatttcctttcgacctcctccccaaatttgcacagttgaagatcgccggacttccctatagtggctttgattgcccgggaaggagcaacaccctatttgggtttggaccgcccagatttttgtag

SEQ ID NO: 506043 - DNA, 1047 bp, Stenotrophomonas maltophilia
atggacgctctactcctgtcccggattcaatttggcttcctgatcagctttcatgttctcttcccagctttcaccattggtctggctagctggctggcatttgtcgagtggcgttggctcaggacgagcagcaatgtatggcgagacctctacttcttttggcagagaattttcgcggtttctttcggcatgggcgtagtcagtggcatcgtcatggcatttcagttcggaacgaactggccacgccttagtcaggtcgcgggaaccgtcatcggaccgcttctgacatacgaagttctgaccgccttcttcttggaggccagcttcctgggagtgatgatgtttggttgggggagagtttcgccccgccttcactttctttcaacttgcatggtggcgctcggcacactgtgttcgacgttctggattctggcctcgaacagttggctccaaacgcctgcggggtacgaggttgtcaacggcattgtgcatccgttggactggctcctgatcatcttcaatccctcgttcccctatcgattagctcacatggcgctagcctcgttcattaccacgtgtttcgtggtcggcgggatcggcgccctatacatccgtagggggcgacatgtcgaagctggaatgaagatgcttcgttgtgcagtgatcttcgcggctctagctgttccgattcagatgttcatcggcgatatgcatggcctgaacacgcttaagcatcagccgatgaagatcgctgcaatagaagcgcactgggatcacggagacgctgaagaagaaggggtgccactggttctatttgcaattcccaatcaacaggacgagcagaacagatacgagatcgcaattccgcgtctaggaagtttgatcctgactcactcgatcgatggaacttttgcgccgctaaccagcgtgccggccagtgacaggcccccggttctccctgtcttctttgcatttcgcatcatggttggccttggctgcctcatgctatggaccgcccagcctttcgtagacatcttcgagccataa

SEQ ID NO: 506044 - DNA, 633 bp, Stenotrophomonas maltophilia
atgcccaagacgcaacgcaccaggccgactcgtgaagaaagccgattgcagacaagatctaggctccttgaggctgctaggcgctcaatcatcaccaccgggatcgcatctgccaccatccgaggcgtctcggaggaagccggttttagcctcggtgcgttctactcgaacttcaggtccaagcacgacatgcttgttgcaatcatggaagagcagtttgacgagctatcggactccttctcgcaagctatggaggcaatgcagggcctgaatctcgatgcgtcgctaacggcgcttgcgacttggttggagggcctacatcgggagcgggcgacgtcccgcctgattcttgagcttcacatgcatgccaatcacgatgagaccttcggtcgctcgtacagcgagcgacggcgagtctacgtctcaaagttcgcaaagggtttgaagcggctttacacactcaactcccccccgccgtcgatgccggccgatcagatggcttccgggttcatcgcactgtggaatggctttagcgtccagcatgaagggagccgaccaacgcaggttcgagaaatctacctcgcgtttcttcgatctctattcaatgcccgccctgccgcccccgcccattag

SEQ ID NO: 506045 - DNA, 852 bp, Stenotrophomonas maltophilia
atgcaggcccatgcccgcgagtttcgtctgtgcgcgatgtgccgggtgctcggggtgcatcgcagcgggtactacgggtggctgtgccaacaggccagtgcacgagagcgcgaggatgcgcgcctgctgggacggatcaagcacttctggttgaccagcggcggcgtgtacggacatcgcaagatcacctgcgatttgcgcgaagccggcgagcggtgcagccgccaccgggtgcgtcggctgatgaagcgggaaggtcttcgggcccagatcggttacggcagcaagccgcgccaccggaatggccctgttggcgtggtggccaacgtgctggatcgggagtttgcgcccgaagccccgaacaaggtctgggtcacggacatcacctacatccgcacctacgagggctggttgttcctggcggccgtgatggatctctattcgcgtcagatcattggctgggcgacacgcccgcacatgaccacagatctggtgctgcaggcattgttagcggccgtgtggaagcgcaagccaggccccgacgtgctggttcactcggaccagggcagtcagttcactagcgatgactggcagtcgttcctcaaggcccaccacatgcagccgagcatgagtcgtcgcgggaattgccacgacaatgccgtggcggagagcttcttcagcgcattgaagaaggagcggatcaagcggcgcatctaccccacacgaacggcggcagcctcggacgtgttcgattacatcgagatgttctacaacccgattcgccggcatagtttcgccggcgacctgtcaccggtagagtttgaacggcgctacgcgcaaagcggctcgtga

SEQ ID NO: 506046 - DNA, 795 bp, Stenotrophomonas maltophilia
atgggaattctctcggttatcggcaagcatcgttcgctgacgttcgagctgagccagcgcgaagtcctgggccgctaccgcggggccagtttcgggctgctgtggtcgttgatcagtccgttcctgatgctgctggtgtacacccttgccttcggcttcgtgatgaaaggccgctggccgggatcgacaggatcgaccaccgactttgccctgatcctgttcgcgggcctgaccgtgcacgggttcttcgctgagtgcttcacccgcgccccacagctgatcgtagccaacaccggcttcgtcaagcgggtggtgttcccgctggatatcctggtgtggagcatgaccttctcggcgctgtttcacctgctgatgaacatggtggtactgcttctgttgcagttggcgatcaagggcagcattccggccacggccatcctgctgccggtggtgatcatcccgctggtgatcctcacagcgggcgtgggctggatcgtctcgtcgctgggcgtgtacctgcgtgacatcggccagattgccggcgtgatggcggcggcgatgctgttcctgtcctctgccatcgtgccggtcgaatcggtaccggaaagctatcgcatcgtgttcgagctgaacccgctgaccttcatcatcgaccaggtacgcgaagtggtgatctggggccggctgcccgactgggccggcctgggtctctacaccctgatcgcctgtgcggtggctctgctgggccatcggatgttcaacaagttgcgcgtggggtttgccgatgtcctctga

SEQ ID NO: 506047 - DNA, 1356 bp, Stenotrophomonas maltophilia
atgtcctctgagctgaccgacggcgacatcgtcatcgatgtgcagggcgtgggcaaggcgtaccacatgtacgaacgcccctcgcaccggctgttgcaggccctggccggcaagcgcaaatccttctacaaggatttctgggcgctgcgcggcgtcagtttctcgatccgccgcgggcagacggtgggtattgtcggccgcaacggctcgggcaagtccaccctgctgcagatgatcgccggtaccctcaacccaaccgaaggccatattacggtcaaggggcgggtggcggcgctgctggaactgggtagcggcttcaacccggaattcacggggcgcgagaacgtctacctcaacgctacgatcctgggattgaaccggccccagatcgaggcgcgcatggagagcatcctggccttcgccgacatcggtgagttcatcgaccaaccggtacgcagctactccagtggcatgtctgtacggttggccttcgcggtgattgcccatgtcgatgccgacatcctgatcatcgacgaggcgttggccgtaggcgacgccttcttctcgcaaaagtgcatgcgtttcctgcgcgagttccagaagaacggaacgctgctgttcgtcagtcatgatgcagcggcggtgaccaacctctgcgaaagtgcggtatggctccagaatggccagatgcgcctgtccggtacctcgcaggaggtgatcgaagcgtatatgacggagcagcatgtggtcggtcgccgcgaagctggtgtcgaagacgtcaaggtggaaaggaagtcgcgcaggctggcgtccgacggtccggacttccgccacgatgccctgcgcgaagcgggcgtcagaaaccggatcgccctgttcgaattcgacccggagaatgtgggccaggagttcggtgcgcaaggtgcgagaattgtcgatgtcgcactgaccgaccaggacggctcgccgctgggcatggccgaaggcggcgagctggtccggctgcgcgtccgggttgagctcatgcagtcgctggacagcctgatcgtcggcttctacgtgaaggatcgactgggccagaggttgtttggcgacaacagctatttcgcctgcaaggacgcgccggtgggcgggcgcgccggcgagtctgtcgtggcttcgtttctgttccgcatgccggtgatgccgtccggctcttacatgatcgatgcagcggttgcctccggcgaccagcacgaccacacccagcagcattggatccatgacgcgctggagttccgcgcgatcgacgagaccatgcggtttggcctggtgggactgcccatgcttgccatcgaagtcaccaaggaatcctga

SEQ ID NO: 506048 - DNA, 3423 bp, Stenotrophomonas maltophilia
atgatcgagttcaccggcgaacgtttcgtccctaccgaacacggtgtcatccgccaggaacatctgcatcgctatgcgtggtgcctgcccctggtggaaggcaaggacgtgctcgacgtggccagtggtgaaggctacggcagcgcgatgcttgccgggcgcgcgcgttctgtccgcggtgtcgacatctcgcaggatgccgttgggcatgcgcgggagcgctatgccggcgtagcgaatctgcaatacctgcagggttcggccgcggcaattccacttcccgacgacagcgtcgatgtggtggtctccttcgagaccatcgaacacctgtacgagcaggaggagatgatgtccgaaatccgtcgcgtactgcggccggatggcgtgatgatcatgtcctcgcccaacaaggaggtctactccgatcgcgccggctaccacaacgaataccatgtcaaggaactctacctggaagagttccgcacgcttgtggagcggtatttcccggcgatgtacctgtgcggccaccgcatgtcggtctgttcgaccatcacagggctggatggaggaccggcgcagcctgtctaccaggcgctgaccgatactggcgagggcgtgcaggagcgtgccgcagtcattcccgacgctgtctatttcgtagtggtggccgcggcggacccattgctgctgccgcagctgccagcgtcggtgctgtacaccgaggcggaggatctgtacgcccatcaccatgaagtcgcgcgctgggcccaagcgcaggacgcggagatcggctcgctgcgaggccatgtggtacgcgagcagagcgtggtggcagagctgcatcgtcagcttgagcaggccgggctggccgccgccgaacggctgcagcagttggagcaggatcagcgcgcgacggtcgcacgcctccagcagcaactggagcatgagaaggcgcgggcccagcacctcgagtcggcgatggccgaggtatgggaggtccgcagccagctgcaggcacagatgaccgcagtgtccggcctgaccagtgcggcacgcgccgaattgcgcaagcgccacgagcagatcgatcagctcctccaccagtcaggtgtcagcctgccgggtaggcagctggcggaggagagcgatggcagcgaggtatcggcgcttctggcgtcctatcgcgaggaactgcagtcgttgcaggatctgaccggctcgctgatcggttcacgttcctggcgcatcaccaagcctctgcgtttcgctggtcgcgtgctacgcggcgagtggcgtgtggttctgcaatcgctgcgtgcgtccgggctggcgcggcatccactgctcaagccgatggtgccgatggcaaagcggatgctgctgaagcaggacgaatccgcgccggctgcgctggacggactgttgctggaggacgtcaggaacgacccgcaggccatcctggagagcgtacgcttcgccgaggtggcggagccgttggtcagcattgtcatcccgacttacggtaatttcgagcagagcctggcgtgcgtggcatccattgcccgtgccggtgcgcgtgtaccgttcgaggtgttggtgctggaggatgcctccggcgatacgcggatcggcggcctggcagcaattccggggctgcgctaccacgccaatccgaagaatctgggtttcctgcgttcctgcaaccaggctttgaccttggcccagggccgctacgtgtatctcctcaacaacgacaccgaggtccggccgggctggctggatgcccttgtcgcggtgttccagtcgcatccggatgccggcttggtcggctccaagctcgtttaccccgatggccggctgcaggaagcgggcggtatcgtatgggccgatggcagcgcctggaacttcgggcggcttgaggatccctcgcgccccgcctacagctatctcaaggaagccgactatgtgtccggcgcatcgatcatgttgccgttggacctgttccgcgaacttggcgggttcgacgaacatttcgctccggcctactacgaagacacggacattgccttccgggtgcgtgcacgcggcctcaaggtgtacatgcagccggattcggtggtcgtgcattacgagggcgtctccagcggtaccgatgagagcagtggcgtaaaggcgtggcaggcggtcaaccgcgacaagttccttgagcgctggggcccgacgttgcaggaaacgcagttcgccaatgccgagaatgtctttctcgcccgcgatcgttcgcgcagcaagcgccacgtgcttgtggtcgatcattacgttccgcaaccggaccgtgacgcgggatcacgtgcgacctgccaggtgctgcagacgctggtgcaggaaggatgccaggtcacgttctggccagccaacgcttactacgacgccgagtacgcaccgccgctgcagcgatcgggcatcgaggtgatgcatggagccgcatgcgtgggcacggacggctttgacgcctggatggaggccaacggtcgctacctggatgtggtgatcctcaatcgtccgcatatttccatcgagctggtggccagcgtccgccggcacagcaaggcaacgctggtgtactacgggcacgacatccatcatctgcgcatgcagcagcagcttcacgtgaagcccgacgatgaactgaagcgggaaacccagcgctaccgccagttcgagcatgcactctggcagcaggccgacgtcgtgctctatccatcggaggatgaaacgcgccacgtgcggcagtggttggccgaacacgcgccggccgcgaccagccgcgctgcaaccatcccgctgtatgccttcgaacagtcggaactggtgccatcaccgcagggccgacaggacatcctgctggtggccggctttgcccatgcgcccaacgttgatgctgctctgtggttcgtcagcgaggtgctgccgctggtcgagcgagaagtgcccggggttcgggtgagcctggtgggatccaacccccgtccggaggtacaggctctggcgtccgagcggatcgaggtgaccggctatgtcagcgatgcgcgtctggaaaccttctatgcccgcgcgcgggttgccgtcgcaccgctgcgattcggcggcggcgtgaaaggcaaggtgctcgaagcgctgcgtcacggtgttccatgcgtgaccacgtcagtgggcatgcagggcctgagcggcgccagcgcgttcatgcttatggcggacgaaccacaggcgatggcggcacatattgtctcgttgctgcgcgatgacgcgctctggcagcgcgtgtcgatggcggagcaggcattcatcgatcaggaatactcgcgtgaggcgctgtggcgtgtgttgtcgtcatcaatgcagcgcgatgagcaggcagcatga

SEQ ID NO: 506049 - DNA, 1788 bp, Stenotrophomonas maltophilia
atgaggggacacgcagcacagcgtccgactgccggcgcaggcaccagcggtgcacaggtactcccttggcgcagtgttgccctggtattggccgtggtggcggtgttcgcggccatccatcaggtcatcctcaaccgcgcgcaccccgacgcgctgtacatggattcgctgcgcctgctgttccagcttgaccaatggcaggcgggccagctgtccacgttcgagttctggggcggatcctcgcaccgcggattcgtcaaccagctgttcctgtgggcgaatgtcagccttttcgaccttgacgtactgctggctaatcggttgaccggggcggtgatctccacggtcgcggtgtgcttgtgcatcgcttggctggccgacatgcgacgccagcccggcgcgcagcgcccgtggctgaatgtggtggtgatggtgaccttggcggccctgtgcttcagctgggccggctatgaattgttgactctggatctgggcctgccgctgtggacgaagaacctggccttcgtggcgtttttctgtggccatgcccacctgctgtcagggcgttcacgccgaccggcgctgtgggtggtggcactggtgcttgccgcgccgctgatcgtgctggtctgtggcatgggctggaactacgccttcgtcggcgccgtggtgatcgtgcaggtgttttcgttcctgccgcgctggcgggcggaggggcgctggaccggcatcctgccgagcgcggcggtcgcgctgtcgatggttgtgtatctgctcagcggctcggtcaccgacgcgtctacccgcaacggcctgaatatcgggttggatctgccggcgctgctgctgtacgcggtgggctccacgatggggtatcccgaagccgtgctgatgggcggaaggctgccgctggaggccattgcggtggttggtggcatcctgcttctggtcggcgtggtcgctgctgtcgcctggctgcgccgcggcgctcccgggtcgcggttgccactgctgctggcgctctatggtgttctgatcgccgcttcgctgacactggcacgcggtgctgaggggccgttcgcggtgatggcgtcgcgctattacatggaccttgtgctcggactggcgggtgtgatctggctggcggcccgcgagctgcaggccgcgccccgggcatcagggtggaacgcgctggtgggtggcctgctgtcggccgtgatgctgacccagctgctcacctatgtccacgagtggagagccagtcctttccgcgaagccatcttcgcgtccatgaacaaggcattgttgcgggccgtgcccgacgaggctgccgcagggttgctgcaggcgcagctggattatgcgcgcaaaggcgccaacgtcatgcgggagcgccgtctggcgctgtacgccgacagcacggccagcgattgttccacgcgcaggatcgggtacacccagggctggcatccgcccgaaggcgccgtgcgctggagtggcgcgcacgcgtcactcgcgcttcctccctgtggttgcgcgtacttcgccgagctgtacgtgccgcccgggcaatccgagcgccacgtgcgcatcaacaccggcgggggcaacgaggatgtgctgaccgtgcggccaggccaggccgcgcgcgcgcgcgtgggcaatgagcatgccgaactgacagtcagtccggtgagcatccccagccgtgaccagcccggcagcagcgatgcccgggaactgggtgtactgcttaccggtttctcggtgagctgcgaggtaccgtga

SEQ ID NO: 506050 - DNA, 474 bp, Stenotrophomonas maltophilia
atgaccaggaaggacaacgacgcgttgccgcgctccggcccgcccggtccgctgcagcgcctgatcaaggaccagcgcgtcctgttcctgctggtcggtggcgccaacaccgccttcagtacggcattgttcgccgggctggtgctgctgctgggccccaaggtgccgtcggtcgtgagcctgggcatcgcctgggtggtctcgctggtgctggtattcttcatctaccgacggctggtgttccgggtcagcggcaatggctggcgcgatttcctgcgcttcaccagcgtcaatgtcggcagcctgctgttgaacatgggggcactggccctgctggccgacgtgctcggccttccggccattccgacgcagatcgtcattaccgttctggtggtgatcttcaattatgttggccacaagcatttctcgttccggcgacgaccggaaccacctaccgcggagaaaaaggaatga

SEQ ID NO: 506051 - DNA, 840 bp, Stenotrophomonas maltophilia
atgaacccacgtgtctcggtcgtggtgccggcctacaggaacgtcgagtaccttgcgcagacgctcgattcgatcctcgcgcaggactacgatgatttcgagctggtcgtggctgatcattcctccaacgacggcaccactgaactgctggcccgctatgccggtcatcccaaggtccgggtactcgacccgacacccgccggcggcggtgccaaggccaattgggaccgggtcagcattgcagcccacggcgagctgctgaagctggtctgcggcgatgatctgatcgcacccgatgccctcagccggcaggttgcggcgctggatgcacacccctcggcagtactggtggccagcaagcgtgacctcgtggatgcgcacggcaaagtggtgatggccggccgtggcttgggtccgctgaaggggctggtaagggggcgcgatgcggtacgggcatcggtgcttgccggcaccaaccttttcggtgagccgggctgcgtgatgttccgacgcgagctgctggtgcaggcggggggctgggacaactcccacccctaccttatcgaccaggccagctattcggcgatcatgctgcagggcgacatggtcgcgctgcgcgagagcctggccagtttccgcatcaacgcagggcagtggagcgtgaggctgatgaacgaccaggcgcagcaggccatcgatttccataacgccttggccgcagcgcatccgcagctgctgtcgccgatgaccttgcgcgtgggcaacctcaaggcccgcctgatggcgcaggcgcggcgcctgacctacctctggctcgggcgccggatgggcgcggcctga

SEQ ID NO: 506052 - DNA, 966 bp, Stenotrophomonas maltophilia
atgaagcctgaactctccgtcgtcattcccgtctacggcagcgcctcgatcctgcccaaccttgtccgccgcctggaggaagtgctggtgccggcgctgggcgctgatggcttcgaggtcgtactggtgcacgattccggcccggacaatgcctgggaagtcatccgcggtgaggctcgcacacggccgtggctggttggcgtggacctgcgccgcaatgccggccagcacaatgcaatcatggccggcctcggctttgcgcggggccgctatatcgtcacgatggacgatgatctgcagcacgacccggccgacatccctcgcatcctgcagacgctgcgcgacggtgccgacctgtgctacgtgcagttcgaaggccgcaagcatgcactgtggaagcgcgccggcagccgcttcaacgatatggtggccgcacgcctgctgaagaagcccgagggtctgtacctttcgcccttccgcggtttcgtgcgtgaactgggtgaggaagcccggcgctaccaaggcccgtttgtgtatctcgacggactgctggtacagagcaccagccccaagcgcatcgcgaccatctccggccagcaccacgcgcgcagcgatggccgctcgggctacagcctgagcaaatcgatttcactctggctgcagatggccaccagcttctcgatcgtgccgctgcgcttcgtctcgctggccggggtattggcctcatgcgtggcattcgtgatggcggtggtggtgctctggcagaaactgcacagcccgcagatggcggtcggctggccgtcactgatcattaccatcctgttcatgggcggcctgcagctgctggcgctcggtgtcatcggcgaatacaccggccgcgttctgctgaacatcaacaaccgcccgcagtacatcatcgggcgtaccaccaacgtggcaggccgggacgaagacgatcgcccctga

SEQ ID NO: 506053 - DNA, 693 bp, Stenotrophomonas maltophilia
atgattgtcggttccggactggtggcgcgcgctttcgcgcagcgctatgccgaggacgattcgaccatcattttcgcttcgggtgtctccaactcgaacgaaaccgacccggaagcgttcgcccgcgaacgctccatgctcaccgggtatttggccgaaggccagcagcggctggtctatttcggcagctgcaacgtagtcaatgccaaagagcactcggcctatttccagcacaagcgcgccatggaagcgctggtgatcggctctggccgtggcactgtgctgcgtctgccgcaggtggtagggcgtacacgcaaccccaataccctcaccaacttcctgcgcgactgcatcctgcaggaacggcagttgaccttgtggacacgcgcacaacgcaatctgatcgacatcgacgatgtcgcagccatcgctacccgcattctcgagggcggtgcagcgccgtcggtggtggccatcgcttcaccttggtcactgccgatgccccgtatcgtcgacctgttcgagcaggtactcggccgccgtgctcatcgcgtgctgatggaacgtggagaagcgatggccatcgacagcagcctctccgagcaggtcgctcgcgacatcggggtggattttgggccagactatccactccgtgtgatccagaaatactatggcccccgccatgaagcctga

SEQ ID NO: 506054 - DNA, 2544 bp, Stenotrophomonas maltophilia
atgaacaaccgccccttcccgctacggacatcgcgccgccctgccgttcgcgtgctgggtctgacgattgccgtcgcggtgacattgacgattgccggtcatgcccgtgcgcacggtgatgagtccctgcagttcagtgaaggcttcctgattggtggccgggccatcgacatgcagcgctacgcgcagggcaatccgatgaagccgggcgtgtatcccttggacgtggtgctcaatggccagttccacgacaagcgcgacatcaccttcgtggcgacgccggcgcctccgggtgcaaccccgtgcctgccggccgggctggtacgccagttgccgctgaaggagaagttcctggccgagctggaccaggaggatgaaagctgcgtcgtgcttcccgccctggtggaaggtgcaacggtcgatttcgatgacggcaaccttcagcttcttgtgaacgtgccgcaggctgcacaggcgcgcaatgcacgcggctatgtggcccctgcgctgcgcgaccacggcatcacggcggcattctttgactacaacctcaaccatagccgcagccagggccagcaagccacctatctggggctgactaccggcgtgaatctgggtgcatggcggctgcgccatcgtgcgtccttcagccagggcagccgcagctcgcgtcacgatgtgatcagcagcaccctgcagcgcgacctgccagcatggaatgcgcaactgctgctcggccaaggcaccacgggcggcgaactgttcgagtcgctgtcgttcaagggcgtgcgcgtggccagtgatgagcgcatgctgcccgattcgctgcgtggcttcgcgccggtagtgcagggcatcgccgaaaccaacgcagtggtgactcttcgccagaacggccatgtcatccatgaagtgagcgttgcacccggtccattctccattgaggatctgtacccgaccagcttcggcggtgacctggaggtcaccgtcaccgaggccggcggccgccagcagaggttcacggtcaacttctctgcggtgccgcaggcgctgcgccctggtgcaagccgtttcagcgccactgcaggcgagctgcgagatgcgcacggcgtgcgtgaagcactgcgctttaccgaagggacctatgcccatggcatcagcaaccatttcactgcgctgggcggagcacagattgccgaaggcttccagtccatgctgctcggtggtgccgtcaacacgcctatcggcgcgttcggtgccgacattacccattcgcgtgcgtgcctggccaatggcaagcggatggccggcaacagcttcaggctcaactaccagcgctacatcaccgaaaccggcacccactttggtctggctgcgttgcgttacagcacccgtggccatctcacgctgaatgatttcgcacaggtatccaacgatgactgggggttcagcagccgcgcacggcagcgattccaggtcaatttctcccagcgcatccgtggcagcagcacgctctcgctcaatggtggtcaggtacgctactgggacagcgcgcaacggcagaacgatctgcagttgcgcttccagaccagtgtcggccgcgccaatctgagtctgtctgtcatgcgcttgcagatcggtaatggccgccaggacacccgctatgcggccagaatcagcattcccttgggctcaacgcccagcgcaccacgcttgagttcccagctgacccattcgacacggggtgaccaggggcagttgggccttaacggaacgttgggtgccgaccagcagctgagttacaacctctctgccagcgctgccagtgatcgggctggcagtgccaacgcccatgcgtcctatcgcggcgggcatggcacggtaaccgccggctacagtcggtcgggtaactacagtgccttcaatgcgagcgccgcaggcagtgtggtggggcaccgcgatggcatcaacttcggtgcgcccgtgggtgacggtttcgcgctggttcaggcctacggcgctgagggagcccgtatcggctacggcaatgatgtgcgcatcggacgcaacggctacgcgctgcagccgcacatcagcccctaccgctggaaccagttcgagctggatccagtggggctgccgatcgatgtggaactgctgcagacctcgcaccgcgttgcgccgacagcaggcagtgtcgtgcgcgtggcgttcaatgcgacgcgcgaacgcacgttgttcatcgactccactgatgccttgggccagctgctgccgtttgctgcgcgcatcgaagatgaagccggccgcagctacggagcggtggggcaggggggcgtgatccaactgcgcggcgcgcctgaacacgggcagctgattgttgacccggacggaccgcagcgctgccgcctggagtacacaaccccggatgcacccgatgcctacgggctgtcgtggagccagacggtgtgcgtgccgcagccgctgccgccggaaggtttgcaggtaagcatgttggacccggtcgagagcaccaccccatga

SEQ ID NO: 506055 - DNA, 510 bp, Stenotrophomonas maltophilia
atgcccccttcttctctccccctggcaatcgccattgtgctgtgctcgagtgcttcggtggcacgggccgaccaggtcaccctggccatcaccggccgggtactaccgggcacctgtacgttggtggctcccgctatcgcactggatcccatcagagtcgatgaactggcgccgggcgacaacaagcttaaagcgggcacactggagttcatcggctgcgtgggcgtgagcaaggcggttctgtcattcgacggtgccgcggcgaccggcgacccggaacgctgggaaaacaccgcaacgaccgatgccgctgccggtgtttcggtagcgctgctggcgggtgccacaggcagcagttatctgaagaagggcgataccggcatcgacataccggtgaccggtaccaccgcaagctatgcgctgcgcgcaggctactacgcgacgtccgtgggtgcggcgcggcagggtgaggtacgggcggaaatcaccgtgacggcagattaccaatga

SEQ ID NO: 506056 - DNA, 981 bp, Stenotrophomonas maltophilia
atgaggcgcattggctcacgagggcgcggtgccgcgattgcgatgatggtcgctggctgcagtgttgctccgaccgcctacgcctgcaagatgagcgtgggtcaggctatcaatggaatcaccgtctctgttcccaatgatgcccggcccgatgtggttatccttcctttccgacaaacgcttaggacaacgagcctgaaggattgtgctgatgatccttcctttccgatcaccctgacacctgcgagtgcgggtctgatctatgtgcggaacgtgcagattgatggtacgtcctatcctgcgtatggatggcatgccaactcgccgctgatcgcattcaggtatcgtctcgcgaacagttttggggagatgtccagcgggcctttgaacatggaacggtctaccgatgtggcgggttgggccagcggctatctcttcatgtcggtggaaatggcgatcctctcgcgcggtggaagaatgactggagtgggtcgcgtttcgatgggggctgttggaaccaccttcccgaagtttcctgccctgcaacttaccaacgaactggccggtgacgtggagatggagcgcgaaacgtgcttcatggatgctccggtggccgcgctgcgggatgtctcccattccgaccttccaaacccgggtgatagtaccgccgagattgatgtcgaggtgctgatgctgtgtgatgcattgggggttgttgatctgagcatcagtgatgcaaatgcgcctggaaaccgtacggaccagttggtgccggcgcccggctccaccgcgaagggcgtgcgtacacagctgctgtacagggacgtgccactggcgatgggagcgcagtgggagttcggcgcagttcaatccggtgtggactactacattccgttcaaggcgcgatacattcgaacgtccgatgcgattggccctggtcccatcaagggtgaagccgttctttcggtcagctatcggtaa

SEQ ID NO: 506057 - DNA, 186 bp, Stenotrophomonas maltophilia
gtgctgattgaatcggaacagtacgccgtgtggttgctggcccggggcctggcccaggtgcgctaccgcagccgccatcacgtcgatggccaggcgcaacgctgggtgctgcgcagttcgctgtggcgtcggcatgcgcaggggtggcgcgtggtgttccatcagggaacgccgcaggcccggtag

SEQ ID NO: 506058 - DNA, 339 bp, Stenotrophomonas maltophilia
atggacggaagcaagaccgaagaacagaagcgctacgatcacgttaaggagtattcgtggcggctttatggtctacacgctgcggcacggctgctgggcagctccggcatgctgaccaccgctcacgttgagcgggcaacggcggcagacgcggagctgcggaaggtgcttgagaatctcaaagccgaggtgatcgcactacctggtcccttggacggccaagagttgtgggtatcctaccgaggacaattgatgcctcgggacggcgaggccgtctacaaggaccgttggcatgtccacctgctcgacccttcacagccgatgttcccgacaggctga

SEQ ID NO: 506059 - DNA, 483 bp, Stenotrophomonas maltophilia
atggccctccccggctccggcccgatctcctgggaaatgattcgtgccgagttcggcggcggctacccaatctacgcgaaccagtactaccggggcgctggattggtgcccgacgttccagccaactacggcgttcccacgagcggcccgatctacgcctcgcagttctacaacgccgtcaaggccacgccgttccaggcgtcgatggcgagctggctgtccggtcagtgggcgcagaacacgcaaggcaccgtgtcacgtagtaccaccgtcagctgctctggcggaaccggtaactactccatcgtctcgcgcagcgttacgggcggggcgacgatctccggcagcggactgaacgtcgtcgtcagcgcgaccggccgtaacacggagcgctccggcacgttcactgtcgtcgttactgacggcgtgaccaacatcaccctcaccggcaactacagctacaccttcggcgttccgctctaa

SEQ ID NO: 506060 - DNA, 387 bp, Stenotrophomonas maltophilia
atggacacggctacagccggggtagctcgctacggctccctcctggtgattgaggatgatccggacctctcgggaatgctcgccgaagtcctgatgagttcgggatacgacgtagatgtagtcgcgtcgtccgccgacgcctttgcccgcatggcggcaaagtccttcaacgctgcgattttggacatccagaccgctgacggggcaacgatgtccgttgcagatcatctgctctcgcatcgcattccctatatgtttgcgtccggactgcccaacccgcatttgcctgacgagcatcagtgggcaacgttcttacagaagccgtatcggattaaagagcttatgagcgctttggacaggacgcgtcagatggggattcccacgtag

SEQ ID NO: 506061 - DNA, 324 bp, Stenotrophomonas maltophilia
atgaacctcgacaagtacgcaccgaagatcgccgccgacatagcgcgggcgttggtggacctcgcgctcgccaagggctatgccatttccgtcaacgatggcgaggagtggacggtgaagcgtggacgcgaccggcagatggtgctggaagcgctggcgaccaccgacgccgacacgctggtatttcgccgcgaggacggcagccgcgtcggtttcgtgtggctgatctggcagaacggggccgacgtagcgagcgactggagcgcaaacgaggacaccgacgcgctggtggagccggtgctgcgcgggctgggggtgctgtga

SEQ ID NO: 506062 - DNA, 468 bp, Stenotrophomonas maltophilia
atggcacgcaaacctgccgcactactgacccgcgaagaactgatggcgatgctgaccgctttcgtcaatcagcgccccggcttcgatccgtgcaactacggcgacgcatcgagctaccgcagcgaccagcgcaccgcccagaggcagcgcagcgacgcactggaaatgctggccgcgattggctggcgcgagtcgatcaccgcgcacgacatccgcaaggcgctgcaaagctcggggcggctgcaactgcgcgacgacggccgcttggactactgcgccggccagtattggccgaccgagttccgcgctggcgtctgccgcgtgctctcgcaactgctgtgggactactggcgcgagaactcgcccgccgagctgcgcgcgcggcacgacgggagctggggcaatcacatccgcgcaaccgcgcgccgcgagctgggccgcggtgtggcgcagcgctggttccgctga

SEQ ID NO: 506063 - DNA, 519 bp, Stenotrophomonas maltophilia
atggacaccatcgagctgcatgggctgacgttcaaggtcgagcacatccccgaccctgatgcaggtgcgccctgggagaacaacgaaacgctgggcacggtgagcggctgggaatgccgcgaccactaccggggcggcaagcgtcccggcgagcgcatcctcaacagcaggcgtcaccactaccgcttctacgactacgccggggcggtcgcaaagggccgccgcgagggcatgaccgggccggaagctgccgaggctgctgaccgcgagttcgagtggctccgcgcgtggtgcgaggaccgctggagctacatcggcgtgcaggtcacgctgctggacgccgagggcaacgacaccgagcacagcgacgcgctgtggggtgtggatgacgatggcgactacgcaaagacggtcgccaacgacctggccctggagattggcgcgcgcgtcaattgggacgacgtgatcgaggtgcccgcgcgcaccatcgtcctgcgcgctccgaaggtggccgcatga

SEQ ID NO: 506064 - DNA, 411 bp, Stenotrophomonas maltophilia
atgcctgaggcggccgtgtgggtcgtggcggccgttgccgtctatgccatcggcgtggcgatctacgccaccttctactggccgtggtcccgtgcccagcgtgcgctgcgccgcttgagcaggcatggggtgcccctccgcagcctgcgggagagcgaggcgcgcatcctgcggttggtcgaatttccggcaggattgcctgtgtatctgctcgaaggcagctgtgcggcattcgtgatcaggagcaggatctctccggcccagcatgtgcagacgctggccggcgtcccagtgaagtatccggcgagccttgcacgtgccgtgcgtatgggcagcaataccgccgaagtggtgctgggtcgtgaccacgcgatgatcgtgcgactcaatggggtcaagctggcctggtag

SEQ ID NO: 506065 - DNA, 612 bp, Stenotrophomonas maltophilia
atgaacccagggtacggtttcacgacgatcatgatggctgccggtcttttcgccactgtcctggtgctgggcgcgcatgccgtgcgccgtgtcagtgcacgcgaccccagcgggcagcactggctgctgcgcacgctggcactgctgtcaccggcgtgcgtcattgccagcctggcggtcggcgtgatcgggcctcacctgctgcagcagcggcacgggatgagcaccacgatgggcctggtgacgagcgcgctgctgctgatgctgatgggcgcgctcaccgcgccggtggcctggcgcgtggtggtccagcagcgcctgcggcgctcagcggcgaccttgccgttcttccatgcgtcaaccgcctcactctggctgttgtacgcgctctgcgcgatgtacgtcccactggcgaaggccgccgaaccggcactgatgccctggttcgaacaatcgggcctgctgccgttggcggcccgcgggctgctcactatcctccacgcttcgatgaaggcggtgctgctcaccctgccggtgatggggctacgcgccctgctgacccgcggcagccgcagcagcaaggctgagaacccgcccccgtcaccgttatga

SEQ ID NO: 506066 - DNA, 516 bp, Stenotrophomonas maltophilia
atgtctttgcgccggcaaaacggcttcacgctggttgagttgatggtcacggttgccgtgctggcgatcgtggccgcgatcgcctttccgagtttccaaggcactctccgctccaatcgggttgcgtcggcaaacaatgaagtcctgggcctgctcagcctggcgcggagcgaggcaattcgcagcaaccgcggcggtggcgtgtgtggcagcagcgacggcgcgagctgtgacggtaactggtctgccggcatgctggccttcactgacaccgatggtgatggctcgatgtcctccgaggaaaccgtactgcggttcgtcagcggcagccccaagctgcagctgagtgggccgtcggaagagatcgccttcgatgggcgggggcgccgcagggccgccagcgatcagtcgatccagctggagccggatgtgtgcagcaagggcgcactggacaaacgcactcttacggtaaatgcctctgggcagatccgcagcgccaaggaaacctgctcatga

SEQ ID NO: 506067 - DNA, 474 bp, Stenotrophomonas maltophilia
atgaacccgcgttccatccgcgcacgccaagcgggcggcttcactctgctggaagtgctggttgccattatcgttctggcattcggcctgctgggattcgccctgctgcagaccatgaacgtccgcttcgtacagagcgccaactatcgtacccaggcaaccaatctcgcctacgacctgaccgagcagatgcgcagcaaccgctatcaagcggcgtggtacaccgccgcgtcgtttgaggcaggcagcaaaaccgcagagaaggcgtgcacggccgataccggcgacgtcgctattgctgcaaaaattgaacgttggcaatgccaggttgtaaaggcgctgggtgacgatgccggtgccgaggtgacctacaaggggggcgtggtgaacgtcgcgatcacctggggcgaccagcgctgggatccggatgatccggacaaggccactaccttcgcgctggcgacggaactgtga

SEQ ID NO: 506068 - DNA, 1161 bp, Stenotrophomonas maltophilia
atgaccatgaaacatcgtacctccatggctggtctatcgctggtcgaactgatggttgcgctggtgatcagcctggtgttgatgctgggcgtggtccaggtgttcattgcctcacagacggcttcgcgcctgtctgagggggcctcccgcgtccaggaaaatgcacgatttgcgttggacttcctggagcgggacatccggatggccgggcacatgggctgcgtcaacgaccaggcccatgtagtgaagaatcagggagacccggtatcgcatctcggtgcgacctccggtgatggcagtccattggatttcagtgtttccatccagggcttcgacgctcccgacacggctcccggtggcagtctggcgctgggcgcggactggtcggcgccccagggcctgccggccgcgatcgccggattgagcccggcaccggccggcggcagcgatgtgctgctgctccggttcttcgccccgatgggggcgccggtcacggcgatctcttccgatggcggcgatgcactcctggacgtggacagtgtccacgtcgcgcgcctgaccagcgatggcatcagcacgcccactctgttcggcatcgctgactgtgggcatgccgatgtgttcgcaggcacgttgagcgctgcgcgggtgactgcgacctctctggatctgtcgcgctacgtggcccagccaaccgggcagacgatgctctatcgcgccgagtcgatggtctattacgtgggtatcaatccggagacgaaacagcctggcctgcggcgagcgcgtgccgacagcgatggggagtactcgatcaatgaagagttggtggaaggcatcgaaagcctgcagctgatgtacggcctggacaacactgccaacatcagtatcagcactccgccggccggcaacatcacccagctcgacgcagccggcggggtcagcacggatgccaatgccgagggtgctgcacagtggttgcgcgtggggcaggtgcaggttggattgctggcgcgcagcccatcgccgtcgtcctcggcccaaacggccaatgcgctatcggtgctcggcgttgagttcaccaacagtgacaagcccgacggtcgctaccggtccagttatgaagtgtcgattgccttgcgcaatcgcttgttcggaaactga

SEQ ID NO: 506069 - DNA, 519 bp, Stenotrophomonas maltophilia
atgccccatttccagcgttcattcagacccgtcaccgccgcccgccagcaacgcggtgcggtgttgtatgtcgcgttgatcatgctcatcctgctggcattgctgggtatcgctggcatgcaggtggcgggcatgcaggagaagatggcagccaactaccgagccgccaaccgggcgttccagaattcagaaggtgtggtgcgtgcagccgagcgcacggtggaacagatcgccaatcgccaggatgtcggcgacgagagcctggtacaggccagcgatgtgtcgcgggtctgcgatgacggattcgacccggccgattgggccgtggagcgccgcgacgatactcgccctgccgtcaacgtaaggcagatcgacagttgcgtcattggtgaatcggcgctggagatggggcggccactggaagacatcacaccgatctaccagatcaccggatttgccactgacgatgcagatgccagctcgtccgcagtggtcatcgataccgtattcaaactctga

SEQ ID NO: 506070 - DNA, 3756 bp, Stenotrophomonas maltophilia
atggcttcgcgcaaattccgcttcatggccgcaggtggcgccgcactggcgctgggtgggggctacttcatctataccctgatggcggcccagggccagggtacgctggcgcaggcgccgctgaacatccaggttcagacgccaccggcattcctgatggcgctggatgattccggttcgatgctgtgggaaacgctgaacaacactcgtgatggtgtctatcgctgggatggcagcagcttctacaaccggggcgttgccaacggctacggtgattccgtgcagcgctatctgtatgtatttccgagttatgggcgtgatagccaagtggccataccaccgttggacaattttggattcgcacgttccccggacgtcaacccgtcgtattacgatccccgcgaaacctaccccggttggaagacgggcctgtcgggcgaggctgcctccaattacatggagatcaagccggccaatgcgcctcttgatccccgaccagctggtgcacctgccaaaatcggcggttcactgaatctgactgcggattccttgttgaccagcatggctacgggggcgaaggatccggcgaactggcgcttccgctttcgttccggcatgaagctaccggtaggcacccgcatcgaacgtagccggtgcaacctgagcgatggtgctacacagagagagcaaaatggatcatttgacagggtcacccgtgaggccaccatcagcagctcattctgcgatgctgctgtggccttctatccggccacgttcttcctggcggatcctgccacgttgcctgcggagtatggttacaccgccgctccggtggcgataaccaatccggctggtgggcggccaggcaccctctacaagtatgaaatcaagcttgagaatttcaacaaggacgagggcaagtacaacgctgccatgcagagctttgcaaactggttcagcctgtaccggacgcgtcgtgaggcgttgatcggtgccgctaccaatgcactgtacgacaccaccaatctccgcgtgggctggttccgtatcaatggccaacgtccggtgaccatgttcaacatgaccaccgaatcggaaagagcgcggctgctgggggagatcatcggtgagatgcgcgccagcagcagcacgccgaaccgttcggctgcggactacctcggtaagcagttccagcgcacggatgaaggggcgcctgtgctgctggcttgtcagaagaatgcgggcatgctgttcactgacggctatatcaatgaaagcgaaaacaagactctgatgaaggacctggtggcgccctactacaagggcccgctggtcgaggaccttgataacagctctgtgccggttcctgcagagtgcagcagttcgagtccggacccgtcattggactgcaacaagaagctgcacatgaatttctacggcgtgacgctggggacgctgggcaaggagttcggcgtcaagtaccttccggatcccaagcgcccctgggtgctcagcccagatccgtatgttgtcaagcccaatttcccgaccacgacgcaggatctcaagccggaagcggtcgacgagctgtggaacgcggtgtatgacacccgcggcgagatggtcaacgccacgcgcccgggcgaaatcaccgctgccatgcgccggatcatcagcaatgttgcccagggggccacgccgtccggctcgcgttcgttgacgggggctcgtatcggcgtgggctcgctgtcggtggagccgttctacgaggcgaccaacaacggcaccgactggtacggcaggctgcatgcctactcgctgaaggtggacgaatcaacgcgcaggattgtctcggaggaggcatgggaagcgtcggcgaagatgccagcggccgcatcgcgccgcatccgcttctggcgcaacggtgaactggttgatttcaccggcagtaatgtcagcctggccaacctgtgcgacaagtcgagtgtgatgtatccgggcatgctgatctgcagtgcctcggaactcgaagggctcgccacgaattcggctaccgccgttgcgtacctgcgtggagacacaaccaacgaaaagcgcagcggcggcaagctgcgcgaccgtaccacagtgcttggggacatcatcacctctacgccggccctgagctcgccgctcgatgactacggcttccgtcgcctgccaggcgcgatgggcaccagttatgccgactatatggtcaccaagcgcaatgaccgacgctacatggtctacgcggctgccaacgacgggatgctgcacgcctttgatggcggcatgggcgcggatggcgagatggacagcgatggtggcaaggagctgtttgcctatatcccatccacatcgttgggtcatatgggcaatctgttgctgcccaacgatcccaccaaccagaacgtccagcgcttccagcatcgctactatgtcgatggcccggtgacgatcagtgatacctacagcggcggaagctggacgacctcgctggtcggcacggcgggtgccggtgggcgcagcgtgttcgcgctggatgtgtctgatccggccagcttcggcggcaccggttcgctgctgtgggaaatcagtgatctcaatgcctcgctggatgaggacgtaaggaacaatatcggctacgtgctgggcaagccggtgatcgtgccgatgaagaactctgacggctcggtgggcttccgggcgatctttggcaatggctatgaaagcaagagcggaaaagccgtgttgttcgtggtcgacatggcggctggcaatacgccgaccatccgcatgatcgaggcggtcgagtcgggtacggatctgcctgccggcagcaatgggctgggcaatattgtggtggtggatcgttggggtggggctggacagaacgaacgggtccgcgatggtcttgctgataccgtctatggtgctgacaagcgcggagcggtctggaagttcgacctgcgtgccgacgcggcaccgacggttccgctgttcaccaccgatacccatgtcgatcgcagtgacaagcgaacctatcgccaacccatcaccggcggcttgacggtaaccacaggcccatccggtggcgtgatgctgatcttcggcaccggcagcttctcgtactacggcgatgagaacgacgctgcggtgcaggcgctgtatggcatcaatgacgttgaaaccgggcagcccagtgctacgctgacgtcggccaatctgcgcccgttcgcggcgcaatttgagaatggcgttcgcaccctgcttccgggcactgttccggcgctgagccgcggctggaccgtaacgctgtccaacaaggagcgtgcggtcggcaatccgcgcatcgtttccggagtggtgttcatgcccacctatatcccgtccgaggccaagggctgctcggtggatggcgcgaactgggtgtttggcctgcaggccggcagtggcgaagcggcaatgtcgcaggtgcgcttcggtgcaccggacggcacgtcgccgggggcaggtacggccggtgtacccctggaaacgggcggcaacgcaccggtcagggatgtcacgacctctgttgtccctcgccttgcgccgccggatccgggtgaaccagggactcctccaccgacgccgccgggcgaggcctgtctgatgcagatttcggtggcaggtgcaaaaccgatgtacttgccttacccgtgtggtcgccagtcgtggaggcagatccagtga

SEQ ID NO: 506071 - DNA, 423 bp, Stenotrophomonas maltophilia
atgcacacgacgttcgcccctggccgcctggcccgcggattcactctcattgaactgatgatcgtggtggcagtcgtggcgatcctcgctgcgatcgcgtacccgaactacagcgaacatgtgcgaaagtcgcggcgtgcgcaggccaaggccgatctggtggagtatgcgcagctggccgagcgctaccacaccatcaacaacacctatgtgggcttcaccttcccgggcggagctgattccatcaactcgccacgcgagggcggcactgcggcgtacaccttgtccatggaaaccgcgcaatcgacgtttacgtttacggcgacggctgccaatgctcaggccgaagacaagtgtggtgacctgtccctcaaccaggccaatgtgaagacatccaagggcacgctgtccgaatgctggtga

SEQ ID NO: 506072 - DNA, 537 bp, Stenotrophomonas maltophilia
atgcgccactgcccaatccccagccctacggcgccgcgaggcatgcacctggtcgaactgatggcggtggtggcggtgttggccgtgctgctggccgccggatggcccaccctgcattcgatgctgttgcggcagcgtgcggacgccacccgtatcaacctgcagtccggactcgctgctgcgcgctaccaggcgatcatgcgccgaaacttgatcggcatctgcgcaagtaccgatggccaccactgcggcgacgactggagccaggggtgggtcatctacaggacgagcggccggcgcgaacccccctcttctgccgacgctattctgatgcaccaggcaggctttccgaacatcaggatccggggaaccaccagcagtggccggccgcagctttacttccaaccggatggccgcagccctggagccaatctgacgctgcgcatctgcgcggacggccgtgagcactcccggataatcgtcagcaacagcgggcgcgtccgatcaacacggaccagggccgatcgaccctgctga

SEQ ID NO: 506073 - DNA, 1944 bp, Stenotrophomonas maltophilia
atggcgctctctgatctgaccgtccggcaggcgaagaccaccggaaaacgctacaccctctccgacaacgactgcctgggcctgatggtctcagccgcaggcggcaagtcatggcaattccgctactactggctgggcaagcaaaagcgcctgtgcctgggcggctatcctgccctcagcctgcgtgaagcccggaccgagcgagacaaggcccaggccctgcttgccagggggatcgatccccaggtcgagcgcgaccagaaacggcacgcggccaagctggcgggcgaatacaccttcaagaccgtcttcgatgcttgggtcgagcatcgccgtaaggaactcaaggaaggccgtcagagcacgctttcccagatcctgcgcatctttaacaaagacgtgctgcccactctggggaagatgtcgatctatgacattcgccgccctcagcttctgggcgtcctggcggcgatcgagaagcgcaaggcgttcactactgcggaaaaggtccgcacctggttcaaccagatgttccgttatgccctggtcatcgccgaggggctggaggtcaacccggccgcagacctggacgtggtagccgaacccaagcccccggtagcccacaacccctacttgcacctgcccgagatgcccgagttcctccagaagctccggctctacaacccccgtggctggcagacccagcttggcgtccggctgctgttcctgaccggggtgcgcaccggcgaactgcggttggccgaacccgaacagttcgacctcgacaggggcttgtggatcatcccgccgcagatcgtcaagcagctccaggatgaaatgcgcaaggcagggaagcggccgcaggatgtgcccccctatatcgtgccgctatccctgcaggccatcgagatcgtgcgctatcttctgggggtgatgcggccggcgcagaggtacctgctgtcacaccgcagcgaactcaagaagcgcatcagcgagaacaccctcaacaaggccgtgcagctcatgggctatgaggggcgcctgaccggccacggcatccgcggcaccatctcgacggcgctcaacgagattggctacccgaagatttgggtggacgcgcagctttcccattccgaccccaataaggtgagttcgtcctacaaccacgccaagtacgttgagccgcgccgtcggatgatgcaggactgggccgatcggctcgacctgctcgaacagggcgaagtggaagccgcgagcgcgcacctgaccatccgtatcgacggggtgccggcaatggcagaagtggaggaaacgatggatgcgaccctcacgatggccgagcccactcctcccggcgtcccgcccgtcgtggccacgcctattgtcgtaaccccgagcagcggcgggatcacgttccagcggctgtctcaggtgccgccgcctccgacgcatgccccagagccggaagtgtccgcgatccagcgcgagcgcgaggaaatgctgaccatctacgagtctccaagcagcttgccggtcccgctgttcggcaagctggctggaaagtccaaggaccagatcaaccgcgaactgaaagcgggcaagttgctgtccatcagtttgggtaatcgggggcagcgtgttcccgattggcaactggtgccgctcaagcacaagctggcccaggtgctcatgaaccagtgcctgcacgcggattcgtgggatctgtaccgcatgctgacccagccgcaccctgacctgggggaccgcgcggccattgatgcggtcacgccgaccaacgtgccggcgatcatccgggtcatcatgggcgactaccagcaccatgcggatatgcccgaggccattgccccttaccccatccccgaggatgtgcggcaaagcgttcgtcggctggtggatagcgcagtagttctagacggagcatag

SEQ ID NO: 506074 - DNA, 969 bp, Stenotrophomonas maltophilia
atggttggaagtggttgggaccgagtaccaattgactcgcaaagcatcgatgcgccgctgtcgcgcgcggcggtgtttctcacgttgacggtcgccgagggccacgaggcccttcaggcggtcgccggcatcttggacgggctggacgacctgatcaaaacggtgggcttccgcgatctcaacggccggctgtcgtgcatcactgcgctgggatcggcgctatgggaccgtttccagaccgggaagcgcccgaaggaactacggcccttcgtgcccatcgagggtgccaagcacaccgcgcctgccacgcccggcgacctgttctttcacatccgtgccgaacgtgaggatctctgttttgaattcgagcgcctgctgctggaccaactgggcagcagcgtgacggtggccgacgaggtggtcggttttcgctacttcgactcccgcgacctgcttggctttgtcgatggcacggccaacccgaccgggcacgacatcggcgcctcgacgctggtcggcagtgaagatcaggcgttcgccggcggtagctacttggtggtgcagaagtatctgcaccaaatgcagccgtgggctcggctcgccaaggacgagcaagagcggatcatcggccgggagatcgtcagcaatgtcgaattgcccgacgcgacgagcggccagaaatcgcacaagaccctcgccacaatcgtggacgacgacggcaccgagcacgacatcctgcgcgacaacatgcccttcggccgccccggccagggcgaatatggcacctacttcatcggctactccaggcatctgtgggtgacgcagaagatgctggagcgcatgttcctcggcgatccgccaggcatgcacgaccgcctgctcgatttctcgacggcgcacaccggcgccgtgttcttcgctcccgcaccgcgcacgctgagcgaactcgtggaggcggtgcaagcgtaa

SEQ ID NO: 506075 - DNA, 816 bp, Stenotrophomonas maltophilia
atgtgccagaaggacggcctggctgaattgttgatttctgcattagcagaagcgtcaaacaatctgccacaattaaccacgttaaagataacgacgttaaacttcactctttactgcgacgctggtttgcctttctggacagatcgcttattgggggccctcatgcatgacgccaccagccagttttcccatttcaggcttgctatcgcacctggagtgccatcctcttgcctcataacgcttcttgcccttcagcgcgcagaggagcctgaagtcaccatcgcgttctttgagacctcgggcgacgacctgatgacgggccttgaggaaggccgctacgacgccggaatctcgcttcggaacgctggtgctccagccgtgaaaagccagccgctctgggtcgagaacgtggccgttgcaatgccgctggggtcccccttacttgcccaggcgaagatcacgcttgccgagcttctggactatccggtgtttcgctggccggcggaggcatgcctactgctcgatcagcgactgtcttcccttccgttgagccaacagagcgtgcagcatgtgacttcgttcgagatgatggcgctttgggtcaccgctggctacggtgtggggctctcggcgcaatcgcgcatggagcgtgcccatgcgtgggggatcactatgcgaccgctttcagacggcccctacgagatcgtgacatacctgcagcggccccacggacgagccaatgctgtttctgagcggttcgagcacagggcaatgctggttgccagggatagggcggcttgctcgaatatcccatag

SEQ ID NO: 506076 - DNA, 891 bp, Stenotrophomonas maltophilia
atggagctgcgccatcttcgctgcttcgtagttcttgctgaggagctacatttcacgcgggcggctgagcgcttgcatatcgaacaaccaccgctatcacgagccatcaaggaacttgaggacgagttgggcgtagtgctcttcgaccgaaaccgacgaggaacagttctgacggcggcgggtgcggtcttcttgcaagatgtacgccgtctattcactgtgctggaacaggctcgtgaaaatgccaaggctgtggcatcgggcttgcgcggtagcctgcgcatcgcagtatcagatggagctatcgatccacgactgtcggcatttctggctcgttgtcgcgccgaggagccggagatcgaaatacgcttgtcagaagtgcctctggcagagcaagtgcgcggtttgcgctcgggcgacttcatgatcgggttcgcgcacacggccgatgtcggcgacggtatcgctgccgaggcaatctggcacgacccgctggtgattgctgtgccagctcggcactcattgctcacctacaaggaggtgccacttcaagaactccaaggccatccacttgtcctgtgcgacccgcaggtatgcgagggttattgccgcgaactcaagcggctgctcaacacgttggagcacaagctgaatgttgtcgaggaagtatcctcactggacatgatgctcaccttggtcggcgccggctacggcatcggcttcatgacggcgaccaagattcccatctctcaacggccggatgtggtgatccgccccttggcgatggattctgccgtgatcacgacctacctgcttcggcccgacggcagcaatttatcggcttcggtagagcgatttgtcgttcgcctacgcgactcatcggacggttga

SEQ ID NO: 506077 - DNA, 1215 bp, Stenotrophomonas maltophilia
atgactccgaccggtaaccgaatcgtgactttcgagaagcccttggaaatgaaggtcaacaccttcaaatttccagagctgataacccctcaagggaaaagcgcaccccatggcgctatcctcaaaatagttaccacaaatatctgtggcagcgaccttcacatttatcgcggttcgtttgctgttcccaagggaatgaccatgggccatgaaatgaccggcgaagtgatcgaagtgggatcagacgtcgaagtcgtgaagaagggcgacatcgtttccgtccccttcaatgtgggttgtgggcgttgctacaactgcaagcatatgcgctccgatgtatgcgagaacaccaaccccgaaatcgactgcggagcctacgggttcaacctcggtggctggacggggggccaaggtgattatctcttcgtaccgtatgcggatttcaatctcctgcgctttcctgacaaggatgccgccatggaaaagatccgcgacctgacccttctctctgacgtactacccacagctttccatgggttcgctggccctgattggccagccgcaccggcctacgtcgtcggcgaaaacatcctgatcttcggtgccgggccggtcggcagagcgggtgccgcctgcgccagacttctgggtgcaggcgccatcatcgttgccgattacattcaagagcggctggaccttctcaagccacacggcgtggaaaccatcaacctttccgacggcgtgccgatcgaggaacatctcgaacgcattaccgggcacagggaggtggatcgcgtcatcgactatgttggtgtggactgccgcgggtttggcgcggaggctgacaagatcgtggagagcgctgttaccaacgcaatgctcaaatatgtccgcttcggcggaatgaccagcacggtcggtgtgtactgcgcaaacccgatctcgaaagacccgaaagccaagaaaggccatatggatctggaatggtccaacgcctggatcaagtcgccgcgaatgtcggctggtcaatccccgacggccaattacaaccacgcgttaatgcgggcgatactgaacgatcgcatgccttacctttcgccgatgatgaacactaagttcatcaagctcgaagacgcgcccgccgcgtacaaagagttcgacgcgggttctgcatacaagtacgtcatcgacccgcatggttcagtgcggcagtaa

SEQ ID NO: 506078 - DNA, 816 bp, Stenotrophomonas maltophilia
atgggtgtcgagatcgtgcgtcatggccgacgctatgacggcctcacttctgaagggatgcgcgtactgtcttgggctcagcagatgtatgacgtctgcaaagggctggagcgagaactctccgcactacggcgaggtatagaggggcaattccggctagggatactcccaggaactgccggtgtagcgcccacattaagcatcgcccttgctgaaaaaacacccttacttcaacaatcagttctggtttccggcgcttcttccctgctacaggcgattcgagaaaacaatttggatatcgcactcatgcatttggaggatatcccaggggaagacttcgatactcaccttctgtaccgtgaacgcattttcctttttcacgccgcgagaacacagcaaccccgaagcacaacgtgggaccatgttctcaatagacaactctgcgtgctgaactcggcagtacctgaacccattcaagataggctgatgcaatgtaccgcgcagactattcgcactgattcaattgacgtgctatcggcacacgtggcgacaggaaaatattcggcagttcttccgcaatctctcgccggccaactcgcgcacattccaaatctccacgcaatcgcaatcaatggaccaatgtcgcactcaaatgtcggattcgttgctgggaaaaatgcgttcgaggcaccgtcatcgcgtgcattgctcgaaatggtgcacacccccgaactcgccgccactcttcaatccgttatatcgatccatcgtcggttccagcccaaagcagactcatctcaaagccccctgaaatag

SEQ ID NO: 506079 - DNA, 432 bp, Stenotrophomonas maltophilia
atgaagatattcacgattggattcactaagacctccgcgcgatccttcttcaccaaattaggtgattctggtgccaaacgcctagtcgatgttcgtctgaataatgtttcgcaattggccggcttcgcaaagcgcgaggatcttcggtatttttccgaggcgttgtgtgggatggaatatgagcacctgccagcacttgctccaaccaaggacatgttcgaggcatataaaataaaagggggagattgggatatctacgcgaggaagtttctggatttaatgtcgtcccgaaagattgagtcaatcgataaagaaaagattgataacagttgcctgctttgcagcgaagacaagccccatcactgccatcggaggctagtggccgagtaccttgcaggcaaatggccgaatgttgagatcgtgcatctttag

SEQ ID NO: 506080 - DNA, 1977 bp, Stenotrophomonas maltophilia
atgtcaaccggtacgttcattctgcactccagctatacgccggcgggggaccagccagaggcgatagcgcgcctgctatcggacatagaagaaggtgcgacacaccagacgctgaagggtatcaccggctctggtaagacctttacgatggccaatgtgattcatcgtctgaagcggcccacgttgatcttggctcctaacaagacattgaccgcgcagctttatggtgaaatgaagcacttctttcctgagaatgctgtcgagtacttcgtttcctactacgattattttcagcccgagatttatatgccgggcaccgatcgtttcattccaaaggactcggccatcaacgatcaccttgagcgcctacgcctgtccacgaccaaatccttgattgagcgccgcgatgtgatcgtcgtcgcttcggtgtcttcaatctacggcctgggtgacccggaggcgtaccgagcgttgcagatcgctctgtcccctggggtcaaactaaaccagagagagctgattcgtcgtttggctctgctgcaatatgatcgcactgagcgcactctcaaacgtgcaacgtttcgcgctcaaggtgatgtgatcgatatctttcctgctgattccgagcatagggcagttcgggtggaactgctggatgactctgttgcgtctgttcaatggctagaccctgttacaggtaaaacgcttggggcaattgaccattacttggtttcgccaaagacgctttttgcaccgcccacgaataaaatagattccgcgtccaagaagatactcgctgatatggaagagcgggttgccgagctgaacaggaataatcgcttggtcgaggcaaacaggctgtacgagcggatcacgcatgacgtggagatgatgcgcgaggtaggctattgttcgggcatggaaaattattcctgctacttcagcgaacgggacccggcctcgcctccgatcacattgctggattacctgccgaaagatgggcttctgttcgtcgatgaatcccacgtcatggtgccacagatatccgcaatgtaccggggggatcaggcgcgcaaggagacgttgatagattacgggttccgcttgccttcgtctaagaacaatcgcccgttgaactttggtgaatttgagaaggtcaagcctcagaccatctttgtttccgctactccgggagactacgagctgagggtgtcgaaagacagggttgtcgaacaagttatcagaccaacgggactgcttgatcccaaggttgaggtgcggaaagcggacggatacatagatgacctgcttgccgaaatatcgaagtgcgtgaagaagaaaaatcgcgtgctcgtgactacgctgacgaaggtcagtgcagaagagctaacggatttcttgacggacaacgggattcgagcgcgctacatgcattcggacataaaagcggaggatcgtgttgagatcatcaatggcctgcgcgcaggagagttcgatgttttgattgggattagtcttttgcgcgaagggctggatattccagaggcatcattggttgctattctcgatgcagaccgtgcaggattcttgcgttcggcccatgctctcattcagatgataggtcgagtcgctcggaatgaaaacggcaaggcgatcttgtacgccgacgcggtgactccggcgatgaaacaggcgatcgatgaaaccaataggcgcaggcagcttcaaattgcctttaacgaggaaaatgggatttctccggcctcgtctgtgcgaaaactagcaggagaagagacgaatacggaggagcccaccgttcactccgaggctttctgcgagaatttgtccgacctttgcgatcagatcactgccaaggaacagcagctactcgaatttaccgataccggtgacgagcagcgcgtcgaagatattcgtcgtcagttggatggtttgtaccggcaattcatttacatctaa

SEQ ID NO: 506081 - DNA, 276 bp, Stenotrophomonas maltophilia
atgccacacagcccggaagaaaagaagcaagcactgacgcgcatcaggcgcatcaaaggtcaggtagcgactcttgagcaagcgcttgatgcaggtgcggaatgtcctgcaattcttcagcagcttgcggccgttcgtggggcagtcaacggattgatggcaacggttctggagagctatctgcgggaagagtttcccagtagcgaaatcaggagcgattcgcagaacaagtccattgacgagaccatctctatcgtccgctcctatctgcggtag

SEQ ID NO: 506082 - DNA, 831 bp, Stenotrophomonas maltophilia
atggaacgcatcgaacatcacgccagctttgatggttggcaggacgtttatcagcatgaatcgacgacgctcggttgcacgatgaaggtcggcgtctatctgcctccgcaggcgcagcacggcaaagtgccggtgctgtactggctttcgggcctgacctgcaccgagcagaacttcatcaccaagtccgccgtccagcgctacgcggccgaacatggcattgccgtcgtcgcgcccgatagcagcgctcgcggcgaaggcgttgccgacgatcctgcctatgacctcggacagggcgcggggttctacgtcaatgccacacaggaaccctgggctgcgaatcatcggatgtacgactacgtcgtgcaggaactgccggcgctgatcgaggcccactttcccgtgacagcggagcggagcatcagcggccattccatgggaggacacggtgctctggtcatcgccctgcgcaacccgggccgttatcgaagcgtctcggccttctcgcccatcgtcgcccccacccaggttccctgggggcacaaggccttcgaggcgtacctgggcagcgatcgggaggtgtggaaacagtacgacaccgtggagctgattcgcaccgtgcaggagcgtttgccgttgctggtggaccagggcttgggcgacgagttcctggagagccagcttcagcccgacctgctgcgcaaggcctgcgacgagacggggcacccgctcacgttgaatctgcgcccaggctacgaccacagctactacttcattgccagtttcattggcgagcatatggcacaccacgcatcggcgctgaaacgctga

SEQ ID NO: 506083 - DNA, 1308 bp, Stenotrophomonas maltophilia
atgacaaagacctccaaaaaccgacatcacgtcgtcattatcggagcgggcttcggcgggatcgaggttgccaaccagcttgctggtgccgaggtcgatgtgacgatcatcgatcggcgcaatcatcacctgttccaacccttgctttaccaggttgcaggggcgtcactttcgacatccgagatcgcctggcctattcgctatctcttccgaaatcgcccggaagtgaacaccttgatggcggaagtggaaggtatcgaccaggacgcgcgtcaggtcattctcaacaatggattgcggcaaacctacgacacgctcgtgctcgcgacaggcgctacccatgcctacttcggacacgacgaatggggggctttcgcgccggggttgaagacgctggaagatgccacgaccattcggggccgaatcctcgcggctttcgaggaggctgagcgcacgagcgatcctcagcagcgtgccgcgctgcagacgttcgtcatcatcggtggtggtcccaccggggttgaattggccggaaccatcgccgagcttgcacgagacacgctggcgcgtgactttcgctcgatcgacccgagcacgtcgcgggttgtactgatcgaggctggcccgcgtctgttgtccgtctttccagaggatctttcggcctatacgcgccaggcgctcgaaaagctcggcgtcgaggtcgtgctgggtacgccggtcaccgaatgctcggccgatggcgtggtgtacggtggcaagcccctttcggccaagaccatcgtctgggccgccggagtccaggcgtctcccgcggctcgctggctgggcgctgcgtctgatcgtgcgggtcgggtggtcgttggccctgacctgacggtggccggtcggccggaggtcttcgccatcggcgatacagcctcgtgcaccatggccgatgggaagcccgtgccgggcatcgccccggccgccaaacagcaagggaagtacgtcgccaacctcattggacggcgtttgaagggcaagcccgctgacggacctttcaaataccggcatcaggggaacctggccaccatcggccgcagcctggcggtgattgacatggggcgggtgaagctgcgtggtgcctttgcgtggtggatctggaagctggcgcacatctactttctgatcggtacgcgaaatcgtctcagcgtcgctttgagctgggtatggaaccacagcatcggctaccgcggctctcgcatcatcatgcatgcgattagcgacaaagagcccgcggcgttggacaaatccggctccctggattga

SEQ ID NO: 506084 - DNA, 1314 bp, Stenotrophomonas maltophilia
ttgaccgatctattcacgacaaagcccaagcctcccttggccgaactcctgcggcccaagacgctggatgaattcgtcgggcaacggcacttgctcggccccggcaagccgcttcgtctcgcgttcgaggcgggcaagttgcactcgttcatcctctgggggccgccaggcgtgggcaagaccaccctggggcgcctggccgccagtgcgaccgacagccgattcatcgccatctcggccgtgcttgccggggtgaaggacatccggcaagccatcgacgaggcccaggcagaactggacaaccatggtcgatcgacggtgcttttcgtcgatgagatccatcgcttcaacaaggcgcagcaggatgccctactgccccatgtcgagtcggggctcctgaccctggtgggggggacgaccgagcatccggggctggcggtcaattccgcgctgctctcgcgcgcgcaggtctataccctcgaaccgctgtccggcgacgaactgaaccagctctacgaacgcgcactgccgcatctccagggcgtcacgttggacgcggacgcgctggatctgctcaagggctttgccgatggcgatggcaggcgcttcctcaatctgcttgagcaggtgacgaatgctgcgtcgggcgcgggcaaggccgtggtcgatggcgagtttgccaaactgtccaccagcccatcactgcgcaggttcgacaagggcggcgacgagttctactggcagctctccgccttccacaagtcgctgcggggctccgaccccgacgcggccctgtactggctggcccgcatcctcgacggcagcggcgacgtcagccaggtgacgcgccgcatgatcgtggtggccagcgaagacatcggcaatgccgacccgcaggcgctgcaactggcgctcaatgccgcgctggcttatgagaggctgggttcccccgaaggcgaaataccgattgcccacgcggcgacctaccttgctgccgcccccaagtcgaacgctgcctatgccgcctggaacaaggcgaaggccttcgtcaagaacaacggctccctgcctgtgcctctccatcttcgcaatgcgccgacgaagctgatgcagcagatggggtatcacgaaggctaccgctacgcccatgacgagcccaacggctatgccgctgggcaaagctactttcccgagggcgtggcgcggccgggctggtatcagccaacggacagaggtgttgagcgcaggctgggagaaaggcttacttggctgcgctcgctggatgatgggacgctgccagaggcggacgcctga

SEQ ID NO: 506085 - DNA, 1866 bp, Stenotrophomonas maltophilia
atgtcagccacttctttcggtgcatcctcggcgaagatcagccggggacgcgttgcccgctatctgcgcacggagtctggtgctgcggtgctgctggtgatcgtcacggtcgtggcgctggcgtgggcgaactcgccgctatccgatgcctatttcgagttgtggcacctggacgtcgggtttgacttcgggccgctgggcctgcacatggacctgcatcactgggtcaacgacggcctgatggtggtcttcttcttcctgatcggcctggaggtgcgtcaggagttcgcccacggatcgctccgggatcgcagccgtgcccgtctcgctctgatcgcgggggtcgcgggtgtcgtgcttcccgcgctggtgtatgtcctgatcgtggggctggccggaagtgagggcctgcacgggtggggggcggtggtcggcaccgatacggcattcatgctgggcaccctggcgatcgtcggcccgcggctatccggtcagttgcgcgtgttcctgctcaccctgaccgtggtcgatgacttcctcgccgtgtccatcatcggcatcgtctatagcgatgagattcggatcgtcccgttgttgatcgccctcgccagtctcgttgcgttgtggcggctagggcgcacccgccagtggcgggcaatgccgtatgtgctgatcgtgatcgtgctgtggctcgcaaccgtgtactccggcatccatgcctctctcgccgggatggccgcggggctgctgatccccgcctacgcgacgcaacgtcacaaggtcgtcgcggcaaaacaactgttccgcgacttctggcagtctccgagtgccgcatcggcccgcgcggtggactgcgggctgtcccggggtatctcggtgaacgagcgattgcacgagttcctgcggctgccgacggcgctgctgatcgtgccggtgttcgccttggcgaacgccggagtggacgtgcgtggcgggctgctcgccgaggccttcggctcgccagtcacgtggggcgtcatcgcagggctcgtgctcggcaagctcctgggcatcgggctcatcactctcatcgccgtccgtctcggcctgggccggctgcccgagggcgtcggggtgggcagcgtgttcggtggtgcggcactgtccgggatcgggttcaccgtgtcgctgctgatcatcgggctcgcgttcggcacgacctccgacttgggccgccaggcgacggtcggcgtgctcgtgtcgatggtgttcgccacgttgctcgggtggctgatcttcaaggtcgccgcccagcggtggggtgagaagaccgctgacctgccgatggtgcttgagccaccggtcgatccggagatcgatcacatccgcgggccggaggacgcccagctcacactcgtcgagtacgtggacttcgagtgcgcgtactgtgcgcacgccaccggttcgtgggacgatctgcgcgcccacttcggggacgacctgcggtatgtggtgcgccatctgccgcaccacccgcacgggccgattgccgcgcgggcgtccgaggcagcggcgaaccaggggatgttctggccgtggctggacttcgtgttcacccgtcagcatgcgctggagcgcgagcatctgatcggctacgccgccgagcttgggctcgacgtcgaacggttcatcgcggatctcgacagcaccgcggtgatcgagcgtgtcgagcgcgacctcgccagtgccgtcgccagcggtgcgcacgccacgccgacgttcttcgtcgagggtcgtcgtctgcgcggcagctacgacgcccgcactgtcaccgcggcgctcgaagccagtcgccgcggcccccgaactcaggaagtcccgtcctga

SEQ ID NO: 506086 - DNA, 1839 bp, Stenotrophomonas maltophilia
atgctctccctgttccagcgaaaacggcccccggtcgctgccgcaccgacgccatcacccgtcaccgacctcccgaaagggctgctgcgtcctgagtcggccgcatcgctgctggccaccccacgccggcagaagctgctggagcacatctggcagcgcacgtcgctctcacaccggcaattcgtcaccctgtaccgcacgcccctggaacgctacgccgaactggtccaagcctttccggcctccgaagcgcatcaccatgcctatccgggcggcatgctcgaccacggcctggagatcgtggcctacagcctgaaactgcggcagtcccatctgctgcccatcggtgccagtcccgaagaccaggcggcgcagtccgaagcctggaccgccgccgtcgcctatgctgcgctgctccacgatattggcaagatcgccgtcgatctacacgtcgaactggccgacggcagtacttggcatccgtggcatggcccgctgcaccaggcgtaccgatttcgctaccgtgacgaccgcgaataccgcctgcacagcgccgcaacaggcttgctctatcgccaactgctcgaccgccacgtcctggactggctcagcgactatccggctctctgggcaccgctgctctatgtgctggccggtcagtacgaacatgccggtgtactgggggaactcgtcgtgcaagcagaccgggcgtcggtggcccaggagctgggcggcgatccggcgcgcgccatggccgcgcctaagcacgcactgcaacgcaagctgctggacgggttgcgctacctgctcaaggaacagttgaagctgaaccagccggaagcctccgatggctggctcaccgaggatggtttgtggctggtgagcaagacggtctcggacaaactgcgcgcacacctcctgtctcaggggatcgatggcattcctgcgaacaacaccgccgtgttcaacgtgctgcaggaccacggcatgctccagcccacctcggacggcaaagcggtctggcgcgcgaccgtcaccagcacgaccggctggtcccattcgttcaccctgttgcgtctcgctcccgcgctgatctgggagtctggcgagcgaccagcacctttcgcaggcacggtagagatcgacgcgacgcccgcagaaaacgacgccagcatgtcggctcccgtgccaaccgtctcggtgaacccagcgcagggaggtcaagagcctccaatttgggaggacgacagcaccaccatcgtttcaccgcccgcggcccagcccgtgcccgacgtcatggaggacttgctcgcgatggtgggcttaggtgagtcggccggcgttggacaggatgccgaagagttcctccaccctcccgcgccagcaacagccgcgacgtccattccatcacctgtacccgcgcctacgcctgggtcatcggcaacgaagccatccacggaacagttcatggtttggctgaagcagggaatcacctcacgacggctcatcatcaacgacgcgaaggcgctcgtgcatacggtgaatgacacggcctacctggtcagcccgggtgtgttccaacgctatgcgcaggagcatcccgaagtggccgcgctcgccaagcaggagaatcaacaggattggcagtgggtgcagaagcgcttcgagaagctgcagctacatcgcaagcaccccaatggcctgaacatttggacctgtgaagtcacgggcccgaggaagtcccgccgactgcatggctacctccttgaagatgggtccttggcattccccgaaataccgcccaacaatccctatcttgctctgactcaggaaggatga

SEQ ID NO: 506087 - DNA, 627 bp, Stenotrophomonas maltophilia
atgcccactgccattgaattcattgccgaccgtctgccgcgcgtcacggtggaagatgtacgccgcttcgcggataccgtcgaaatccgggatgccacggctttcgcggccgagttgcaggcgttcgtccacgagcgcgtggaagcggtaacactgcccgccaacttgcagggggagaccgttgggcaggcccttgcacgcaaggcggccgcgctgcgcgccgacacgcgctgggcaccgaatgaaaccgacgtccagcgaggccgtgcggtgctactggaaaccttcaaccagccgcacaacctgccgcccgcggagttcgccaagctggcggacaagtcgcgccagcagatctacaaggacatcctcgcgcgtcggctgctggcgctgaacgtggggccgcgcggtcagaagctgcccgactggcagctcgacccggtaaagcagcagttgacccaaaccgtgcttcaggaggtcgagggtatcgatcactggacgatctaccgcgcactgtccgaaccgctcgaaggcttgggcggtcgctcgccggtggatgcggtgacgcatggcacgatcgacgccgtggccgaggccgtgtttaacgtgctgggcgttcaggtgcattga

SEQ ID NO: 506088 - DNA, 633 bp, Stenotrophomonas maltophilia
atgaaccacgagctgccttcttttctgatcgatgccggtgaactgctccagcatgtgagccgcgtcgtctatcggggcagcccgctgtactatggtcgcagcagcaccaatcgctacgacgacccggcccgagcctacggcgtgctctacctggggcgcgacctgcccacggcgttgatggagtcggtgtttcacaagcatcagtggcttgatgacgcgaagcgctcgatcgcattgaaagaagtccagggcaggatggtgcgcgctgtaggggtggtggccgacgtgcttctggccgatctcacggcaccgagcgtcatggcgggctactttggcctgaacctggagcagttggccagccgcgactacacgcacacgcagcaggtgtccgctcaggtgcatgcgatggtcggcgacgacggccaacctctgttcgacggagtgctctatccgtcgcgcaacaactatcccgccaagagcatcgccctgttcgagcgtgcgggagcgaaggtcagcgtcatcgaggacatcgatctggttgaccatgtggattggccgcgtttcgttgccacctaccgcatcggcgtggaacccgacccgggcccggtggaaccggatgacgaagcgtcctga

SEQ ID NO: 506089 - DNA, 366 bp, Stenotrophomonas maltophilia
atgaacaccacaactcgtaccagcaccgcagaacgtatcggccgcgcatttggccgtgtatggcgtgcctatgcgcgtggcgaacggcgggtatcgaattggttgatggtcaaaggggtgccttcggttggtgccacagtgctgctgtgggcggtcaagctggctgtgctgggcgcgctgctctacgtcgccttctggttcgcactcgtgttgttgggagtcgtggtggcgggatgggctgctgctgccaatacctcggatgaagacgagtggcctttcaccgacctcaccgaactgcgcaagacgccgggctacgatcccaacctgtacaacgatacgtcgcacgagttgtacaccgacgactga

SEQ ID NO: 506090 - DNA, 357 bp, Stenotrophomonas maltophilia
atgagcccgatgcgtgcggcctggctgcgcccgcgctggctgttcagccggcgcgcagcaaaggcgctgctgtggacggtggtactcgcggccgtcgccgtgtgcgccaacatcgttggcatctacctcgtcggaagcgtcgcaggctgggagcgttggctggcggcagcagcgggctacttcctggtctggcggctgtgcctgtacggcgcgacggcctacggctgggtctggatgcgtcgccgactgctggcgcgcgaggacgacgcgcaagcgcggcgccgcctggtgcgcagcgagatcgccggcgtcgttgccatcgtggcgcttgaagccagcctgttgatgcagggctga

SEQ ID NO: 506091 - DNA, 447 bp, Stenotrophomonas maltophilia
atgccggcatccttttccacgttcgcgtcgggctggcgaacccttggtctcgtcgtggcgctgccggcgtccctggccgtgttcagccccgtcgccttcgcagccgacgtactggtcgtcaccgacagccaccacccggtcaagaccatgggcggcgagcggctgatcgagctggacgaagcccgccggattgaagcggagctttctgcggaactgcccgccgcccccgaacaggcggcggccaccgtcaagcgtcggctgagccaaggcggcgccgacctacagcgccgcatcgcttccgcataccagggcgtcaccgacgcatggagcctgggcatcaccagcatcccggctgtcgtggtggatcagcgctacgtggtctatggcgagccggatgtggcccgcgctgtcgcgcgcatcgagcagcgtcggaggacccagccatga

SEQ ID NO: 506092 - DNA, 765 bp, Stenotrophomonas maltophilia
atggaacagaaacgtccttccattccgatgcaggtccaggcgttccgccgccgcaacgggcggccccgctggccctgggcattggttgctgtgctggtcgcgctgctgctgatctggcttgtgccgaggtcgcccggcgaatccccgccgcagccgcccacgccggtcagcatggcaccggtggccgggccgccctggctaatgggcaaccccaaaggccgtttcacgctgacgctctatgccgacctggagtgcccgttctgccgggaatattttccgcagctcaaacggtgggtgggcaccaacgccgacgtggcgctgcaatggcaccaccagccgctagccgcgcacgagccggccgcgtcggccgaggcacgtctggccgaatgcgcagccgaagctggcgggcatgccgcgttctggcaggcggtcgaatgggtctatgcccacacgcgcagcgacggcctgggcttgccggatggcttgcgctaccccgaatcgacgccagccatcgagcagtgcatgtcaagcgaaaggtccagtgccgctatccgcgcccaggccgcggaagccaccaagagcggcgttaccgccacaccgtcactgcgtctgcttgatcgcgagacgggccaggccatcctgctgcagggaccaatcgagggcgacgccttgttgtctgccatggacatgctgacggctgacggtccgaccggcacacccacatccgaaatgcctgccgacgtcgtcggcgacatgcccaggtag

SEQ ID NO: 506093 - DNA, 606 bp, Stenotrophomonas maltophilia
atggcagcgtcagccgtagcggccacctccgtctcgcagctcctgcgcgcactggtgcttgctaccggcctgtgcgcctgcgccgtccatgcccaggaggttccaccaccggcctaccaactcgccgcacagcgggcgggcatcccctcgaccgtgctcttcgccgtggccttgcaggagagcggtgttcggcgcaacgggcgcatcgtcccgtggccgtggtccctcaatgtcgccggccagtcgcgccgcttcgccacgcgcgccgacgcctgctcgggcttgcaacaggcaatgcgcgccacgccccacacgcgcatcgatgcaggcctgggccagatcaacctcggttaccacaagcaccgcttcaccagcgcgtgcgacctgctggacccctatcgcaacctcgccatcgccgctgagatcctgaaggagcagcacacgtccggcgaagactggctgttggcgatcggccgctaccaccgtcctgcgggcggcgagcccgccgcccgctaccggcgcagcgtgtcgcgccatctcgcgcgtgtgcagggcgcacgcccaaacgccgcggtgctcgccacgcgccaggagacttccccatga

SEQ ID NO: 506094 - DNA, 726 bp, Stenotrophomonas maltophilia
atgaagccgtcgatcatcctttccgcactcctactggcttcagtccagtggcccgcgtgggcgcagcagtcagccacggctcccgctcgcaatgcgcagagccaggagcgcccgctggccgcccgcgtcctggacgaccgagtagcaagcaactggggcctccaaccccaggaatgggtgcgttaccgcgagctgatggatgggccgctgggaatctactcgcccaacctggacccgctgtctgccctaggcatcgaggcacggaccgacgaagaacggcggcgctatgcagagctgcaggtgcaaatcgaagcacgccgcgtcgagaagttgctcgcctaccaacgcgcctacgacgaagcctggcagcgcctgaaccccggcatgcagcgcgtgaacctgcccgacgacgggccgggcgccggcaccgcgcgcggcagcggccgaatggcggtgttcgtcaaggacggctgcgcggcctgtgggcagctcgtgcagcgcctgcaatcctcgggtgccgagttcgacctgtatatggtgggcagccgccaggacgatgcacgcatccgcgactgggccaagcgcgcgcagatcgacccggcgcgcgtgcgcagcggcagcattaccctcaaccacgacggcggccgctggctgtcgctgggcctgcccggtgacttgcccgcggctgtgcgcgaggtgaacggccaatggcagcgtcagccgtag

SEQ ID NO: 506095 - DNA, 642 bp, Stenotrophomonas maltophilia
gtgaacgctccgcaatcttcgcgtcgcccgaccgccgccgtggtggtgcaaagcatgctctggctctggctgctcggtctaagcgtcatcgtggccctcggctaccaggcgatgagcgaccaggccgaccaggaacggctcgattcccgtctgcaacgcctcgaagcgcaggcggtggccctggccgaggccatcgagaccatccagcagcgtccggccgtcgcaacggcggcggacctcaaagacacccgccaaatcctggaagcacgcgcttcccaggttgagaaaacactgagcggctacgcagccgccgacgaccttcaggcgctgcgcgcggagatcgagcagatcaagacgcgccagaccgccgcgcgtgcagcagcccccgtccagccgcgcacatcgagcaagcccgccgccaagtctgaaccgccgccattgccgttccgcatcgtcggcgccgaactgcgcgccggccagcgcagcgtgtccgtcgcgccgagcagtggggacttcacgcccgaccagcttcaggtgctgctgcccggtgatgcggtcggcccatggcgcttgcaggcaatcgatggcagcgccgcggtgttccaagccggcgaccagacccgtcgcgtggcgattccctga

SEQ ID NO: 506096 - DNA, 207 bp, Stenotrophomonas maltophilia; identical to SEQ ID NO: 449305

SEQ ID NO: 506097 - DNA, 2280 bp, Stenotrophomonas maltophilia
atgtccctcgatctcgaaaccaatgccgctgaagccgcgcccgtacagggcgaactgctcgatgcggaatcttcccctctgaccctgagccttcaggatttcgtcggcgagttcggcgacgaactgctcgacgccctcaacagcgctaatccgccggtctataccggccaaccgcaggcacatcgccagctcatcgtcgccagcctcaagcgcaagctgttccaggcccaggccgaagtcgtccatgccgccgccgagctgctgattgaccgtggcgaacatgccgcgatcgtcaatggcgaaatgggctgcggcaagacgaccgtcggcatcgccacggccgccgtgctcaacgccgaaggctaccgccgcaccttggttctttcgccgccgcaccttgtttacaagtggcggcgcgagatccaggagacggtagcaggcgccaaggtgtgggtgctcaacggccccgataccttggtcaagctcatcaagctacgcgagcagttgggcgtgcagcccacgggccaggagttctttgtcctggggcgcgtcaggatgcggatggggttccactggaagcctgtcttcactcagcggcgtacccgccacggcaacgtggcagcgtgcccggactgcggcacggtcatcaccgatctcgacggcgagccggtcaacccggtcgaactcgaagccgaggaatcccgcaggaagtgcagccactgcgccgcccccctgtggacgctgatccgcccgagaagcctgtccggcagcgatcagtcctcggccgtcctcaaagccttgaagcgcatcccgaccatcggggaagtcaccgcgcagaagctgatgcagaagttcggcgacggcttcctggcctcgatgctcggcgacaacatccatgagttcatcaacctcatggacggcaacggcgaactggtgttctccgaccgtcaggccacgcgcatggaacgcgcgatggccaacatggagttcgggtttggcgagggcggctatcagccgtccgagttcatcaagagatacctgccgcaaggcacgttcgacctgctcatcgccgacgaggcacacgagtacaagaacggcggcagtgcccagggccaagccatgggcgtgctggcggcgaaggctcgcaaaaccttgctgctgaccggcacgttgatgggcggctacggggacgacctgttctacctgctgttccgagcccttcccgggcggatgatcgaagacggctaccgcccgaccacgagcggcagcatgacctcggccgcgatggcgttcatgcgcgatcacggggtcttgaaggacatctactccgagagcgccggcacggcgcacaagacggccaagggcaccaaggtatcggtgcgcacggtcaaagccccgggcttcggccccaagggcgtcttgcgctgcatcctgccgttcacgatcttcctcaagctcaaggacatcggcggcaacgtcctgccgccgtatgacgaagagttccgcgaagtcgcgatggacacggcgcaagccgcggcctaccgcgatctggcgggccggctgaccgcggagctgaaacaggctctggcgcgacgcgatacgactctgctgggtgtggtcctcaacgtgctgctggcctggccggattgctgcttccggtcggaaaccgtggtgcatccgcgcacgcgcaacaccttggcgttcgtcccggctcagttcaacgagttcgagatcagccccaaggagcgtgagctgatcgatatctgcaaacaggagaaggcgcagggccgcaaggtcctcgcctacacggtctataccggcacgcgcgacaccacgtcgcgcctgaaggtactgctggagcaggaaggtttcaaggtggcggtgctgcgcgcgagcgtggatgcaagccgccgcgaggactggattgccgagcaactggatcgtggcatcgacgtgctcatcaccaaccccgagttggtcaagacgggattggacctgttggatttcccgacaatcgtgttcatgcagtcgggctacaacgtgtactcgctccagcaggcggcccgccgctcctggcgcatcgggcagaagcaccccgtgcgcgtgatctatctcggctacgccggttcctcgcagatgacatgcctcgaactgatggccaagaagatcatggtctcgcagtccacctcgggcgatgtacccgaatcggggctggatgtcctgaaccaggatggtgattccgtcgaggtcgcactggcccggcaactggtcgccgcctga

SEQ ID NO: 506098 - DNA, 306 bp, Stenotrophomonas maltophilia
atggcatcacatcgcatcgaaacctactgccagaggctggcgttccccatcggggcgcttatcttcagcaaaggcattgaccgcctggtccgctcgggtcgcctcgacccgatcccgtacttcaggcgccacacccgtggtgactggggcgacgtcaacgtccagcaatggcaggccaacagcaccgcgcttcaatcaggtgcttcgctggcatcgcactacgtgatccacccggggctggccattcgcatcgttaccgacgcggagcgccgcgccaccgtcatcgttctgccgtccgaggactga

SEQ ID NO: 506099 - DNA, 1110 bp, Stenotrophomonas maltophilia
atggccctcatgttcccgcggcttgcccgcaatttcgccaagaacggttactacccgaccgacgaacccacgctcgaaagagccctcaacgcactgatgcccagcgacgggccgatgtgcatcctcgatccctgcgccggcgaaggcgtggcgatcgccgaagccgcccatgccctcgggcgcgagcaggccaaggcgttcgccgtcgagttcgacccggagcgggcacgtcatgcccgcggcctggtcgatcactgcctgcacgcggacctgatggacacgatggtctccaagcaatccttcgggttgctctggctcaacccgccgtatggcgacctgtccaaggacgtcaacggcaacatcggctaccaaggccagggccgtgcccgcctcgaaaagctgttctatcagcgttcgctgtcgctgttgcagtacggcggcgtgctggtcttcatcgtccccggctacgtgctcgacgcggagttggtcggttggctgacacgccactacacggacctgcgcatctaccgagcggtggaaacgcaattcaagcaggtggtgatcttcggccgaagggtgcgacagcgtgaacaggctcccgatggcgtcaaggccgtgcgcaatctgctgctgcaggttgggcttggcgaagtcgaagccgaggagctgccgagcgattggccgttcctgccgtacatcgtccccgccagtccggccgagccggagcatttcttccgcgtgacgatggagcccgagcagttcgccgacgaggttggcaggctgcaaggcctctggccgtcgctggacacgcacctgggggccgcgcagcagtcgctgcgtccaccggcgcgggctttgtcccactggcatctcgccctggctctggccgcgggcgcgatctcgggggttgtgcgctccaagaccgggcgcgtgctcgtcgtcaaaggtgacacccacaaggacaagacgctccagcgtgaattcaccgaacgcgaagacggctcgatcgccgagacccgcatcctcaccgacaagtttgtgcccgtcatccgcgcgtgggacatgacgcctggctccgcgacacggggcgaggtgttgaccatccgctga

SEQ ID NO: 506100 - DNA, 261 bp, Stenotrophomonas maltophilia
atggacccgatcctggctgcgctccccgcctcactgttgaaactcgttgaaggcagtttgtccaacgacgaagtgtcttccgacgaggaaatgcaggagtacttcatcagcaacggccttaccgaggaacaggcgcggcaggcgctgacctaccgcgaccagtacctcaacaacatctacctggacggcttcacgccgatcaccgcggtggacgaggcgcttcacttcaacccgcacacccggcagttcgagccggactga

SEQ ID NO: 506101 - DNA, 324 bp, Stenotrophomonas maltophilia
atgtccatcatcacttgcgatacaccccgttccgcgctggacgaaaccgcgtggcgcgccgtttgcaagacggccgccgagcatgcccaacgtggttgcggcctgtcctgggatcactgggtcacgcttttcagctcggagatcgacgcgcaagccagtcgattgccggaaagccagcgcgttcatgcgctggaaatcgcgacccaggaatgggactacgcaacacccgccgaacggcaggaaacccaggactggctcgctgaaaacggctgctgttcgcatgggatcacgctgggttgctgcccggccggttgcggttcctag

SEQ ID NO: 506102 - DNA, 690 bp, Stenotrophomonas maltophilia
atggcagtcacatcggcacccgagaaatcggccacgcccatcatcgtcccgggccagctcgcgctgcgcaccattcacggccgcaacggaaagttcaacgttggcaagctcgaatgccaactcggcaagttcacgattaaagacgcggagttggagcaataccccgagggcaagtaccaaggggaattcgttcttcgctacatcttcctcaaaggctatccgatcagcgacggcagcatgcgtttcgagatgcgcgccaacctggacggtatgacacttttcggcatcgacaagctgagcaaggccgaagcacatagctttgctccgcaggaagtcgatccgctcgatgaagagcaagggacacagcctgcgacaacgccggccaagcccgccaaggcatccaggtccgccaaacctgcacccgtgcagacgtccgcggacccgctggtcgataccacgcccttcggcgtggacgcgccgcctgctgcggctgctgcccccggcagcaccgaggatggcgacgccgcgctgttcggcctgttgtggccgctgggcgagtctgtgaagctggattcgaccatcgaccgccgcaccctgcgcgcgcagatcgcccgcctgggcgaactgggctacgcgctggacttcaagacgcaggagtggagccgccaggccgaactgcaacctgcgtga

SEQ ID NO: 506103 - DNA, 354 bp, Stenotrophomonas maltophilia
atgtcactgcgattcagaggctccgacctgcgccccgtgcttgccgaggccatcgccaaccaatgccgcgtcgccctggccaaggaccagggcgtgtacttcctcgccgagcgcggagagcgccgccccgatggccgcgtgaagctgctggcctatgccgtcggctgcaacccggataccgacccgttcgatgactggtgggaactggcacgcgccgagcttggcggcgacgatttcggcgagttcttcgacccgaaagacagcgttttcactcgcattctgcaaagctcagatgatctggagctgtccgccaccgctacgtatctgtcactggcggcggtggaatcggcgtag

SEQ ID NO: 506104 - DNA, 1380 bp, Stenotrophomonas maltophilia
atgttccccgacctcatctcgcgcacgccagacttcgagcaccagctcggcgcctgcgtcaatgccatgggccaggacgacgccatcggccagatcctggtattcgagcgcatgagcggcacgctgcacatgcgccatatcgccagcgccgacctggtggacaccgacattgacgactacgaaatggtcgtcttcgacggtggcaacaccagcggcgatacatggaagcatgtcttcttcccacgtcagcgcgagcactacttcgtgtacgaagcccgacccaaccaagcccctttcgaggggctttttcttgtccgcagcgcaggaaagcgggtgcgacgctgtgcgatttcttgcgggcaggccgcccattccagagccatccttgctccatgttcgtcggcgttgccgacacatgccctggcagccgagaccttcaaggctgcaagtgcgggaaaccgtgctggtcgtttcttcctatggacgtaccccgtccgttcacgccacccacaagggacctctcccttgcgggcggggaatcccttgttcttcctcaaggagattcccatggaccgttccctcatcaaatccatgatgccttcgcttgtcgcgggccatatgcctcgcaacgtgcgttcgttcaaataccgcgtattcgatgatcagccgcagtcctcgacgttgggcttcgccatcgaccctcagcccttcaacggcaaggtggtctccgcgaccgacgatgccatcgtcgtcaagctcaagccttccgagttcgccgtgctcgatcccaacctggtgaccaccgttcccagcgagggcgccaaggtccatgtccaaccctacgcccggcgacgtttcgacgggctgcgcgcggacaccccggaagtcgtcaccgagaagacttcggatggcacgccttacaccatcacgaggcatatccttggcaaagcacccgccaagctgccaattcccgagccgcagtgcatggagctgggccaactcatcgagcagttggaggagatgcccgcgcccgacgggttccggtgcatcacccacatgctggtcgatgcaggtgcccgcgacttcgcctgggtcgatcccaagccctccaagatcatcgagaccccgccggcgatcagcttcacggtctcaaccaccaagttcgagggtcaggtgacgatcctctacgaccgtggcggcgacacctacgtggtggagctgcaccgcgacggtgagttgatcgataggcacgacgaggtgtatttcgacatgctcggtgaagtgctggagcggctcatcgacgacgggcgctggcgcctgatcggcgtgagcgtgatcgacgccaaagcctctcgtcaacgtcaggcggttccagcctga

SEQ ID NO: 506105 - DNA, 687 bp, Stenotrophomonas maltophilia
atggcaaacaactactacgaaggcacgggcgttctcgtgctcgaccgcgttactcccgtcatcaaggcactgttcgatgccttcgcgctcgacgaaaaccatcccggcaatgggcaggcctacatcgcccagatcgccgagaccaatgatccacgctggacagatgtgctggacggtctggaaaacctggccacacaactcggaatccccatgcccgacgacgaagagttgtcgattccgcctctgcttgaacggctggccgcgcacttcggtgctgaccaggacggggagctggagaacctgatagagcaccaccacttcgaggacagcgcggacctggaagccctgcttctgatcgctacccgcttcgatgatggccataacctgaccgccatacagtttgagggctgctggtattgcagcaagccaaggctattcgagttcggcggcaacggctgctacctgagccgcgaggtccaggtcttcagaacgtcctcgcaggcgcttcaactcggcgatcaactgcgcaacaccatcctggccgccgacatcgaagaggcctcagcgttgatcgcgctggaggccgccaacctgcttgccggcatcaccgatgagcaatttcgcctaaatgtgcgccatcgcatcgccgaacggctggctcagacgtcaacgatcagcgccgactga

SEQ ID NO: 506106 - DNA, 558 bp, Stenotrophomonas maltophilia
atggaaaccatcaccaagcaagaccgcatcacgctgaagaacctcaaggtggccgacttcgccagcgaggaaacgctgtgcttcaccgcgaccatcgtgttcgacggcattcccatcgccgaggcccgcaacgacggccacggcggctcgacgttcctccacgcactcaacggcaaggcggcgctgctggcgcaggccgaagccttcgccaagggcctgccgcctgcgccgctcgacctgggccacgagggtgaagaccctcattacatcgccatgacgctcgacttcctggtcgatgagctggccgatgccatgcacgcggaacgcaaggtgcgagccgcgttcaaccgcgacatcggcaacaaggtgctgttcatcaaggaccgcaaactgctgttcatcaagggcatcaagctcaaggccatcgccgaccgcaagtcgtacttcgcttcgctgcgcgcccggcaggcccagcccatcgtcatcctcgccgagctgccgcccgagcaggcattcgacctgtggaagcagcatgtcctgggcgacaagcccgactga

SEQ ID NO: 506107 - DNA, 1608 bp, Stenotrophomonas maltophilia
atgaacccgcaaccttgcacccttcgcggtgcgccccaggccgcgccactgctgtacggcagcgtgtgcagcggcatcgaggccgtgagcctcgcatggcaacccctcggcctcaaagccgcgtggttcgccgagatcgagccgttcccgagcgccgtgctcgcccaccgttacccccatgtgcccaacctgggcgacatgaccgcgatcgcccgtcaggtgcgcgccggcatcgtgccggcgcccgacatcctggtcggcggcacgccgtgccagtcgttcagcgttgccggcgcgcgccaggggctgaacgacccgcgcggcgccttgacccttgcctatgtggagcttgcaaatgccatcgaccaaacccgccaccaagaccgccgcccgccggcaacgctcgtctgggaaaacgtccccggcgtcctcaacgaccgcagcaatgccttcgggcatttcctgggagcactggccggagaaagccgtgcgctccagccgccaggggaaaaatgggcgcacgctggttgtgtgtctggaccccgccgccgcatcgcctggcgcgtgctcgacgctcaatatttcggtgtcgcccaacgccgcaagcgcgtgtttcttgtggcatgtggtggtgatgacctcgatccctccgaagtactttttgagcgcacaggcctgcgcggggattcttctgcgggccgcgcgccgtggcaagaagctgcccgcgctgctggatcgggtgctgctgcagcaggcggatacgcaggattcgctggactgaaccagccctacggcaaggtcacgacgacgttcggattcagcggcggcatcggccccgtcgatgttgcggcatgcctgatggccgcgggtcccaagcacgacatccgcaccgagacgttcatggtgcagtccatcgccggcagcatcgcccacaccctcgacaccgccaacaacggcaagggcagcagcgaggacggtacgggaaagggcgtgccgatcatcgccttcaccgcccagggcagcggcgcggacgccacgatcgacctgacgccgacgctgcgtgccggcgggcatcgcaacagccatgcgaacgcaggcgtcgtacccgccatcgccttcgcgcagaacaaccgcggcgaagtgcgcttcgagtcggggcatggacaggtgtcttgcaccgtcctgtccaacggcaagccgggctacggtgtgccgatggtggcctgcgttgccctgcggggacggacgcagggtcttgccgccgaactgggcggaagcgttgcagcggcgttgcgtaccagcggcggcggcgcagacaagccccatgtcctggcccccgacttcgaggcacatttccgctacgactggaatgaatccggtgcagcggactggtcgcaatggcgggtgcggcggctgatgcccatggagtgcgagcggctgcagggcatgcccgacgactacacgctgatcccgtatcgcggcaagcctgccgcagacgctccgcgctacaaggcgattggcaactccatggccgtcccgtgcatggcttggctgggcaaccggctggtgcagtgcctgcacaagacggacttgaccgattcggattga

SEQ ID NO: 506108 - DNA, 1227 bp, Stenotrophomonas maltophilia
atggccgtggacgacaccgcaccacgccgtggccccgtcgcactcgcggacctgttcgacgccgccttgaaagacctcgtgcccaagcccagtgcgccagcacctatgcctgcgccgacgcccgccacgtccggcgatgccttcctcttcagcggcaaccggcatgagaccgtgccgcggcgactgttcctcgaccgtcgccttacgccgctggagcgcaacgcctggcaggtgttccggctgatgctcaacgacgatggcgtgacagccttcccgacgtatgagcagcttcgaccctggctggcatcgatgccctgcgccgggcaggcctcgcatgaaaccgtggcccgagcgttgacgctgttgcgcctcacccgatggttgagcctggtgcggcgacggcgtgaccccaagaccggccgcatcctcggcaacctctacgttctgcacgatgaaccgctgacgcccttcgaggccatgcagctcgacgccgactacctggcactggtcagccagtccctcggccattcggccaaggccgtccagatggtcggcctgaacacccttaaggagatcgcggaagatccgctgctctccgggcgcacattgccgtcgcggctgcaggttctggcagaacgcctcgccagccaaggcatcacggccgccgcaagttatccacaggaggacgccgcccacgattccgaagaaggagtatcgagccttcttcggaatgcggatgacccatcttcggaatccgaagcaggggcgaaacccgtgccaaacgcctctcttcggaatccgaagcaggcccgtacagtacgtagtagtcgtattaatgaagtacgtactaccgcgcaggcgcgcgcgctgggcgatctgcaatggcccaagcgcttcacggaactgaaggcagagcagcagacaggtgccagggtggcattgcagcaggttgatgccgcgctgagacaggccgtgctggacgaatgggccacacgatgcagcagtcatggcatacgcaatcctgcggggtatctgttcggcatcatccagcgcgccatccatggcgagttcaatgcctgggccaagaaagacgcgccatcggcatccgtcccaccaaacgagcgaccaccaccagcaccgccacctcagccgcagggtaagccagtgccgccagaagtcgccaagcagcacatcgagcggctacgcaatctgctcgccagcaaatga

SEQ ID NO: 506109 - DNA, 1650 bp, Stenotrophomonas maltophilia
atggctgagatcacctcccagcagatggctggcaagctgctcgcggccgggttcgagcgcagcggcccgtcagcctcgaccttgagcgacccgatcgccgacacacccatggtcgtgaccctagatcagttgcgcccctacgaccacgatcccaggaaaaaacgcaacccggcctacgaggaaatcaaggcgtccatccgcgagcgcggtctggacgcggcgccggccatcactcgccgaccaggtgaggaccactacatcatccgcaacggcggaaatacgcggctggcgatcctgcgcgaactatggtcagagaccaaggacgagcggtttttccgtatatcgtgcctgttccggccgtggcccagccgcggcgaagtcgtcatgctgaccggccacctggccgagaatgaattacgcgggggcctcacgttcatcgagcgcgccctcggcgtcgagaaggcacgcgagttctacgagcaagaaagcggcactaccttgagccagtccgagctggcccgccgcctcgctgccgatggcttcccggtacaacagtcgcacatcagccgcatgaacgacgcggtgcagtatctcctgcccgcgatccccaccgtgctctatggcggcctcggtcgccatcaggtcgaacgcctgtcggtcatgcgcaaagcctgcatgctcgcgtgggagcgctacgccaagggccgctccctggttcaggacttcgacgaatttttccaggaagcgctgtcgcaattcgacgtccaggccgacgagttctccgcgcagcgcgtacaggacgagctgatcggccagatggccgagttgctgggtgtcaattacgacgtgctcgccctggacatgaccgaatccgaaagccggcagcgcgccttgatcagcgacccaacgccgccctcgacgccgcctgcgttgccggagccggagtcggaaaccatcgcgcgcccaactgccaacaccgcgccacccaccgcaggggctgcatcggcagcgccgcctgcaggccgacctgcgcgcgagagcgacacggataccagtcaggcgggtccggccagccctgcggcggggagcgatctgcttcgggagcacatcgtttcgccggcaccgacgaccgaacggctccagtccatccagcgcatggtcgccgatcagttgggcgatgcgctgcctcccgacttctcggcgagcgtcttgcagtccatccccgtgcaggctggcgggctctatccgatctccgatgtctggtacatcgatcccggcttggatactgccgagcgcttgcgcatccacatcgcacagttcgcccgcgaaatcgcgagcgaggcagacctggacgagtgcattgatgaccgtgcagagggtatcggtttcgcctgccgggcccgcacccaaagtccggcgccgctgggccgttccgtcctcgcattgttggcgtgcctggccggtcagcggcccgccgacgtcggtctgcacgacgggcaaatcgtcatcgacctgccggcattgctgcacggccagggtgatgcggcccagcgattgagcgacaccgcgctggtcaagctgttccggctgctgcggctggcccggcgcctgctcgatcttgaagccggcgctgcggaccttggaacgtga

SEQ ID NO: 506110 - DNA, 249 bp, Stenotrophomonas maltophilia
atggcgaacgcacatgagcttgcccgaggccacaagcggcttcgcgccctgatcgagttcgcggttggcgaaggttggcacgtcaaacgcacgcctggcggccacctcaagttcaccaagcctggctgcgccgcgatctacaccagctcgacggccagtgaccaccgggcgaccctgaatgcccgtgcgcaaatccgccgcgccgagcgcgaggcccgataccaagcgcagggaggcggccatggctga

SEQ ID NO: 506111 - DNA, 213 bp, Stenotrophomonas maltophilia
atgtcgcaaacacctgcactgcccgcaagcgagcgccgcatcctgcggcttgatgaagtcgaaaccaagtccggtttcaaacgcgcccacatctacaacctgatgcgcaaaggcttgttcccgaaggcgctgcgcctgggcgtgcgcgcggtcggctgggactccatcgagatcgatcagtggatcgccgagcgcgtcaacaaccgggcctga

SEQ ID NO: 506112 - DNA, 753 bp, Stenotrophomonas maltophilia
atgcacgagaacaagaatgatgcaccaacatcaaaggtgttctatcgcccgatcgaagcgtccatccgctgggccgggctgctgcgatacgagcaggtgatcctggcttcgatttcgtcgccaaggcgcctgccgcagtcgttggactgcccacgttgcgccgagctgagactttgcaccgaacgtatcttcgacggcatcctcaatggagaactgcccttcgggcagaacggcatcacgacgcgcgattccacgctgatcgactcccctgatctgacggtgcgccacgtcgatctgaagcgctggatgcgccaacactatcccgagcaacgaccgggcttcctcttctcccgaagcgagcgcatcacccatcccttcatctcgctggaaactgggcaggcgatgctagtcgagcgcctggccctgaaatccaccttggaccagtacaaacgccaactgcatgagttgcaggaaaagcacggggcgcttctcaagcagatggcgccctctgctggcgcacagtgcctgatcagtgatcgcgccgaagccacctacctgaacattatcggcagcatgctggacctgatgctcggccagtcgccttcgggcgtgccgtactccagcttcaagacgcaggaggcggtggtcagtgcattggtcgcccatcacagcggcgccatggggatcgcggagcggacgctaaacggcaagttcgccacggccagacgccggctgcgtagcgcgacagtctga

SEQ ID NO: 506113 - DNA, 156 bp, Stenotrophomonas maltophilia; identical to SEQ ID NO: 449306

SEQ ID NO: 506114 - DNA, 252 bp, Stenotrophomonas maltophilia
atgatcgacctgaatcaaatcgatgacctcgcccgtcgcctcagcgacctggtgccgccgggcctgcgcgaatcgcgcgaggaactgcaggccaccttcaagagcgcgctgcaggcggggctggccaaactggacctggtgacgcgcgaagagtttgaagtgcagcgtgctgtgttgttgaagacccgcgagaagctggatgcgctggaaacggccgtgcgcgagctggaagggcgcggcgccgcagaatga

SEQ ID NO: 506115 - DNA, 990 bp, Stenotrophomonas maltophilia
atgcgtgacgttctcatatgcggcggtgcgggctacatcggcagccacatggcccagtacttgtccgagcaggggcatcgggtaaccgtattcgacaatctgtccactgggcaccgtggtgccgtggcgtggggggagctggtagagggcgacttgctggacgcggcagcccttcaacggctgtttgctggtcggcacttcgatgcggtcatgcacttcgctgcccggtcgctggtaggtgagtcggtacgtgatccgtacgcgtactacgccaacaatgtcaccggcacgatgaatctgctgcaggcaatgcgaagtcatgaggtggagcgccttgtgttttcctctacggcggcgatctttggcgagccgtgctctgcgctgattgacgaagaccatcccaagcagcccatcaacccctacggggcgagcaaactgatggccgagcgcatcttggcggacggtgctgcagcctacggtctgcgctcggtatgcctgcgctacttcaacgccgcaggggcattgccccagcacggcatcggagaggcgcatgcctgcgagactcatctgatccccaatgtattgcgctcggcgctggggcagggcgggcggctcaaggtgtttggcagcgactacgaaacacccgatggaacctgtgtgcgggactacgtgcatgtgcaggacctggcccaagcccatgcgctggcgatggattacatggatgcacagcctggtgcccatgcgttcaatcttggcaatggacagggcttctctgttctggacgtgatccagacggctgaagccgtgtctggcttgcgcgtaccctacgacgctgctgagcgacgagccggtgatcccgctcggctggtggcttcgagtgagcgcgcgcgcagggtgctggggtggcagcccgtatggacagaattggctccgatcattgagagcgcttggcgctggcacaacgcgccggcagcgtggggcaaggtctga

SEQ ID NO: 506116 - DNA, 2229 bp, Stenotrophomonas maltophilia
atgacgaaacaaatggaaaaccgttcggtcaaaggggacgaaattgacctgcgcgaactgattggggtcgtccttgatcgaaagtggctgattttgatcgtcacggctgccttccttgtaatcggtgccggttatgcactgcttgcagctcctgtctatcaagctcaagcgatggtgcaggtcgaatccaagatgcctggcattcccggcctttctgagctctcttcgtctcttggcgtgggaagtggcagtaaggctgctaccaccgaggtggcactgctcacttcccggtccgtcatcggcactgccgtcgatcagcttcacctggatgtggtcgttgaaccggtacgtttcccgttgcttggttcctacttcgcgcgccgctactcgccggatgcccaaggtcagttggccactgcgaagttcggtgcgaacagctatgcctggggcggggagaacctcgttcttcagcgttttgaagtgccgtctgtctggttggaagttcctttgacgattgagtccttggacggtggcaaattccggctcctgggcgaggatggaaatgtgattctgaccggcgtcgcaggagaaactgcgaccgcgaacgggttcacgattgaagtccagaagctgcacgcaaacacagggacgcgctttagggttgtgaagcgccgtcgcctggatgtcatctcgggtctgcagagtgaggtcagggttggtgagcagggcaaagagtctggaattctgcaggtggtctacgaaagtcaagacgcagccaaggcagaggctctggtccaacaggtagtggaagcctacgtcaggcaaaatgttgatcgggggtccgcggaagcggctgcccagctgcagtttgtgaaggaccagcttccctcggtacggaagcaggtcgaagaagctcaagctgcgatgacgacctaccagtccaaggccaattccgtcgacatcaccatgcagaccaaggggctgctggagcaggaagtcgctgtggaggggagcatccagcagctgcgcctgaagcaggcggagatggatcgcagctttacccgcgaacacccggcttaccgggcgctgctcaagcagatcggtgacctggaaggccgcaaggctggcttccagcgccaggtcggccaactgcctgacacccagcaggaactgcttcgcttgacccgtgatctccaggtcagcaacgagctctacaccgcgctgctcaatcaggcgcagcagctggatgttgcccgtgccggcaccgtcggcaacgtgcgcatcgttgatccggcagtcgtggatacgaccaaccccgtcaagccgcgcaaggccctgatcgtagccatcgccaccctcctcggcggcttcctctcgatcgccttcgtcttcctccagcgcatgctcaacccgggcatcgaagacccggcggacatcgaagccctgggcctgccggtgtacgccgcgatcccgctcagcgtgtccaatacgctgcccaagctgcgcaagggcaagcacggtacgcgcgtggtggccgacggtcgccagcacctgctggcggtatccgcaccagccgacccgactgtggaggcactgcgcagcctgcgtaccagcctgcacttcgccatgctggaagcgaagaacaacatcctgaccatctcgggcccgcgcccgggcgtgggcaagaccttcgtctccaccaacctggccgcggtcattgcgcaggcgggtcagcgtgtgctggtcatcgacgccgacatgcgcaagggcacgctgcacaagatcttgggtgtgtcgcaccagaggggcctgtcggatgtgctgggcggcaagctgagcaccgacgaagtgatccatccggtgtccggtctggaaaacatgcattacatggtgcgtggcgatattccgccgaatcccgccgaactgctgatgcacccgcgttttgcgcagctgctgcaggacatgtccggcaagtacgatctggtgatcgtggatacgccgccgatcctggccgtgaccgacccggcgctggtcgccactcatgccggctcgagcctgctggtcacccgtttcggcgtgaaccaggccaaggaaatcgagctgacactgcagcgcttcgagcagaacggcgtgcagatcaagggcgcgatcttcaatgcggtcgagaaacgggcgacgggctactacagctacggctactacgagtacaagtctgacggcaaggaatga

SEQ ID NO: 506117 - DNA, 1434 bp, Stenotrophomonas maltophilia
ttgaagagcaaggcggttaggggcggcgtcgtgaccctttccgcgcagatggcgatgatcgcgattcagatggcatccgtgattatcctgtcccgcctgcttccacctgaggacttcggcataattgcaatgatcatggcgctgattgcgttcatgacgctgttccgggatatgggcctgtccactgcatccatacagaaggtaaccctcagcaacgaacaggtcagcgctcttttctggatgaatgtaggtgcaggccttgtattgactgccctggtacttgcgctgtcccctctggtggcctggttctattcaaggcccgaactgcaggcggtttgtgcagctctctcagcatctttcctgattacaagcgtcggcgcccagcatggggcaatgatgcagcgcgagttgcgattcctgcccaaagcaatcgctgacgtttcgggggcactcgtcaacctgctgattgcatgcaccttggccttcaagggattcgaatactggtccctggcggttggcaccattgccgggacactggcaacgactacgctctatctcgcacttggacgcttcagggtgggtcgcccccggcgcggtcaaggcatccgggaaatgctgggctttggcgcggacgtgaccggcttcgaaattgccaactacttcagcagaaacctggacaatatcctgctgggacgaatctgggggccgtcggcactaggcgcatatagccgggcgtatcagttgatgatgctacccatctatagcctgcgcacacccataaatgccgtggcgttcccggtcctcagccgactacgaagcgatcccgtcgccttccgtcactactactgcagagtatccacactgctggcattcctatcgatgccgctgatggccttcctctgcgtgaactccaggaatgtcatttccgtctccattggcgacaagtggctcagcgtggtaccgattttcgtactgctgggaataacgggattcatacagcccgtcgccggcctgcgcggcatggttctgcttagccttgggcactcccgccgctacctcatctggggcgttctgaatgcggctgcggtctgcctatctttcgtcatcggggtcaactgggggcccgaaggaattgcacttgcatacgccctagtcaactacgcgatactctacccgtcgctcgttttcagcttcaaggactcgccgctgagcacttcggacttcttccgctcaatttcgcttccactactgggctctgcgatcgcgtccacgaccaacttcctcctgctgagaaccatcacgctctcgtcccccatcgaaagcattgccatcaacttcgtggcgttcacgactgcttacatggcctgcatcgcgatcgtgccgaagggcagagacaccttgaaattctacgcaaaattgattcgaaaccattaa

SEQ ID NO: 506118 - DNA, 1062 bp, Stenotrophomonas maltophilia
atgaaagcaattctgcgagacttaaaaaggactgccaagcgcatcctgcaaacactggacgaggcattcgttcgacttggtgcggcaaatcgttttcttgcaacagtgtattatctcgtcaacgggaggtacggccgggagcaacaggccaatctttccgggaagcttgcctacaagaaatctctaagcgatccctcgatcaacacaagtctcttgaggcgaaacattcaccgcttggagaagggtctcctgatgcgcccccgccgggtgccgtttggcgtcagctacattggagagacggtacttgcataccgcaatgcagtttcttcgggcatggagggagatgagcttcgctgggctcacgacgttctcagtgaatacatgaatgtgactcccagtcatgaagcggtcgatgggttccgcagcatcatgaactcaatcaggcacccatcgcttggcaaccccgccgatgcaagaaggcttattccatacactcgactcgaatcagacatgcctcaggtcggaatcgatgatctgctgaagctcgccaagcatcgccgctctgttcgctggtaccgccccgaccccatcccgcgtgatgcgattgaccgtgcaatcgaaattgcttcgtattcaccaactgcatgtaaccggcagccgtacgagttccgaatctttgatgctccggaactggtgtcccgcatcatctccatcccaatggggactaccggctttgccgaacaggtcccggccgtcgcggtggtagttggcaggcaacggaactatccggctgatcgggatcgccacctgatttacgtagatggttcgttggccgccatgtctttcgtctatgggctagaagttcagggcctgtcatcctgctgtatcaactggccggacgtcgaagcacttgaaagaaagatggagtgcgaactccgtctggcttcagatgagcgtcccataatgctcatcgcctttggatatcctgatttaagcggcctggtggccaattcgacaaagaagtcccttagcgcaatctgcaaatacaacttcgagaaataa

SEQ ID NO: 506119 - DNA, 1101 bp, Stenotrophomonas maltophilia
atggcaattgccgtatctgaacaggtgcgagcaagatactcgaacccgacaatcgtggtctcttcacggtttggaacgccagcagatctcaatcgctatggattccgtgcaacatgggaggctctgggacgatttggaagattgaagacgttcgcacgaggacttgcatggcgtttcgacgcaaacaaggccaaccccgcttctgtcgacgtagtactcgatgcatcgggcttcgcgttctcggatcagtggggcgctcagccagcagaactgctgctgacgaagatgtcacgcccataccgcaagcggcaggatctctatctgcttccccaggcactggggacgtttgagaaagagtctgttcgctcggcggttaaagcgttgtttgcccgggcaacacaggtgttcgcccgtgactccaagtcgctggaatctgcacgcctgataggatccagcaccgacgtgagacagtgccctgacttcacggttctcgtaggacctgtcgcagatgcaagcatcatcgtgccggaccagtttgtcggaatcgtcccgaacattcgtatgctggacaagacgaagagcggggaaagctacttgggcttcctgcgagccgcgattagccaggttcgccaaagtgacctgactccggcattcgtcctgcatgacgcagaagaagatcgaaaagtgattgccatgctgggagcagaccatgctgccatacccgtgcttactcaccacgatcctcgcgtgctgaagtggcttctcggaaaggcgagcatagtaatcggatcacgcttccatgcattggttagtgcgctgtcacagggcaccccgtgcattggcgccggatggtcgcataagtatccggagctcttttcggatttcaattgctccgactatctggtcgatgatctggatgatcacgcgaagctcgatcagtgcattcaggcgctctccaccactgaaggaagatcagaggcgtccgctcgaatcactgaagctgcaaatggcgtcaagagctctgccgaggccatgtggtcccttgttttcacgcagatcgaagagcgcagaaagacactcctgaaagcgcaagccgggtaa

SEQ ID NO: 506120 - DNA, 309 bp, Stenotrophomonas maltophilia
atgcataaatcccctacgccgacatacatctacgaagatgatcaatcctcgcagaaaataagcaatgcaaagtacgaaaggattcttgacgcctacaatattgtttcatcccagaattcactcaacctctccaggcgggaaaagctgatactcaagatgaactatttcaggtacgcccaggctccgatgagcattggcgatctcgctgcttatgtggccagtggaatcgtcctttcaccatgcaaaacctacgtaaagaaagttctaggcaaagcatttggcatgtcacaggccaagggctggccatga

SEQ ID NO: 506121 - DNA, 1194 bp, Stenotrophomonas maltophilia
atgagcggtgcaatgcggctgtcccgccatgacgtcacactgtacgcttcctgcttggtgttcgcccttgactcgatcgcgaactactacttttcgattccggtatttgtagcgtcgacgccactcctgaccatacttgcattgtcctgcgttaggggccggcagaggctgctcctcacgttgattgcgatagtgctgttgaccagtacattcctgatcaacagtgctcgatttggcctcagccaggacaatgtatctgacgctttgtttctcattctgaccttcgcttacatcagtgcggcgtcaagcggctctgcaagccggagcgctatcagcaccgcaaccgttctttttggacttcttttcattccagcctttctgggcatcaacaatagttttggcaacgacgacgcgctatcgtcaggctcaacagacattgagtaccttcgggcctatcgacagggtctttacaggcttcctcatcttgccgcctacctactctcgttcggtgcaatgtggtggttcatgcgatgggaggcggacaagaagcgcatcacgtacgcagtcgtctcagcaggcttcctgctgacttgcctttacactggctcgcgcacgcccgtgtttatttttgtcattggctttctgctctccttcatggagctttcgataaagaaggttgccatgctactcatcgccgtctgcgccctcgcactggcagtcacgaagattgacgctatcctgcaactgacggaaggcacgttcttctatcagtatccatcggcagtcaagaccgctctaacgaatttcgagcgcctgagcagattcatgatctggtcttcctggtatgaggcaatgggatcattccggctggaggattacgcttttgggcgatcattttcgcaatcccttgagtacaacaggatacatctcggcaatgccatttggtttcacaatgactttctctcaataatatattcctatggagttccagtatttctgatctatgcttggatgctgatcggggcaactcgaaaactagcgaagggatcgttcactcgcggatcaaccatgctggtaacttttatcctcggatccggattcatcaacggattctacaaatatctgcctgtagtgttcctgctcacactctcctattggcacttcaatgacaagagacctgacggccgtgattga

SEQ ID NO: 506122 - DNA, 921 bp, Stenotrophomonas maltophilia
atgacaagagacctgacggccgtgattgaccttgatactccagccagttccgaccgaccgatcctcgatgtttctgtggttgccgcaaactacaataatgcaaatttcctgcatgatttctttgacgcatggctgtccagcacggcaatgccatctgaactgatctttgttgatgatggatcgacggacaactcagtagagattgcccgactctatctgtcgaagatcccgagcctgcaaataattgagctgcaggagaacaaaggattcgggaacgcgttgaacgttggaatagatagggcgacgtgcaagtaccttgcacgtatcgatccggacgatgtagtcgtggctgatagactcgcgaagcagatcctggagctggagtctggtagagcggatgttgtgggatccaatgcttacatctttcaatcgtcaggagcccgggtggtaggtgtaagcaacttcccgagggaccactcgatgatcgaggtagcgattactcgaggcgaacacggtgtcctgcacccaaccgtaaccgcgagaacttcgctcttccgagagaacaagtatgtccagtccaacgtacctgcggaggactatgacatttttgcgcgaatgctacgctcgggcgcacggtttcataatatccaggagccgctgctccgttatcgcgtccatcaacgaagtgcctcgaacattctgccattcagcacgatagaacgcacttaccgtattcgagatgaaattttcggaacgcgaacatctcgaacagcggttcggctctattactggcacattaaattctatcgaaagcatctttttgcacagcggagatcggagaggcttttctacctggcactggcctcgggcttgcggccagacaaggcagtccggcgggttatccgcagtttgcgaaaataa

SEQ ID NO: 506123 - DNA, 1116 bp, Stenotrophomonas maltophilia
ttgaaaatcagaattctgggcattcgcggcgtacctgccgcgcatggtggctttgaaacttttgccgaacatctttgtcatcaccttgtcgggatcggctgggatccggtggtctactgccagcaggatggcagtggcgagatgtggacagatgaatggatgggtatcgaaagagtacacattcccgtttccaatccgggcccattgggcacgattattttcgattggaaatcaatgcgccatgcggctaaagaacgggatccgtgcctggtccttgggtacaacactgccgtcttccttttccttctgcggattcgcggtatcccgaacgccatcaacatggatggcatcgagtgggcgagagccaagtggggccccctcgcgaagctttggttctggctgaatgattgggccggttgctggctagggaagcacctggtggccgaccaccctcagatatcgaagcatctttcatcgcgtgtcagcaccacgaagataacgatgattccgtatggtgcggttccagtacgttcagcggacccttcacttcttgagcgatggcagctcgagaaaggccgcttcctgactgtaatcgctcgccccgagccggagaactcccttctggaaatagtgcagggattctcgaagcaacgcaggggcgtcaagttggtggtacttgggaactacgaccgctccaacgcatatcagaagctcgtgctggagtcaggaagcgatgaggttgttttcaccggcgcgatctacgacaagcctgtagtggaatccctccgattccatagcttggcgtacgtgcacggacatcgagtgggaggcacgaatccatcgctggtcgaggctctcggcgctggaaacgcagtttttgcacatgacaaccgcttcaatcgctgggtcgcaggtgatggcgcacagtacttttctgatgcagaaactttctctgcgcttttggacggggtgctctcagacagcgcagagctaaaaaggatggctttggcatcgcttttgcggtttgagtcagagttcacatggccgattgttctccaaaagtacgaatcactcctcaggggaattaccgggactcaatctacgcgagcgccctga

SEQ ID NO: 506124 - DNA, 1167 bp, Stenotrophomonas maltophilia
atgaaaatcgccgttgctggaaccggctatgttggcctttccaatgccgtactcttcgctcagaaccacgatgtggtggccctcgacatagacgccggccgcgttgcgcttatcaacgacggcaagtcacctatcgaggatgctgagatccaagcctatctggcgcaagcaaccttacagttgagagcaactctcgatccgaaggatgcctatgccggcgccgcgttcgtgatcatcgctacgcctacggactatgatccgcagaccaattacttcaacaccggctcggttgagtcagttgtccgcgatgtcgtggcaatcgagcccgatgcggtgatggtcatcaagtccaccattccggtgggctgcacggacgagcttcgcgagcggttcggcacccgcaacatcatcttctcgcccgagttcctgcgcgaaggcaaggcgctgtacgacaacctgcaccccagccggatcatcgtgggtgagcgctcgaagcgtgcggaggcgtttgccgggatgcttcaggaaggcgcggtgagcaagaacgtacccacgctgttcaccgattccaccgaggccgaggcgatcaagctgttcgccaacacctacctcgccatgcgcgttgcctatttcaacgaactggacacctacgccgcctcgcacggactggacacgcgccagatcatcgatggcgtaagcctggatccgcgcatcggcagccattacaacaacccttcgttcggctatggcggttactgcctgccgaaggacacgaagcagttgctggccaactacagcgatgtgccgcagaaccttattcacgccatcgtggaagccaaccgcacccgcaaggacttcatcgccgacgaggtgatcaagcgagcacccaaggtggtcggcatctatcgcctggtgatgaaatccggctcggacaacttccgcgcctcggccatccagggcgtgatgaagcgcatcaaggccaagggcatcgaggtggtcgtccacgagccggtcctgcaggttccgcacttctacaattcccgggtaaacaatgacctggagcgcttcaaggccgagtgcgacgtgatcctggccaatcggttgtcgccggagatttcggacgtttcagagaaggtctttacccgggatctgtttggaaacgactga

SEQ ID NO: 506125 - DNA, 318 bp, Stenotrophomonas maltophilia
atggacaatccggacaactggcagccgatcacccgggaagaactggaaaccctggtcgcacggcagttgcaggattgctcacctgtccaacgagccaccttcgaatccctgcgcgtgccattccatgcggttcggttgcacaggctgggcatgattgagtgggtctgggcggtcgcacagctgcccgacgggttgctgtactacgaggacgttgaggaaggattcgagatgggcacgccgggagaggatggtgtgttgccgaaccaaggctgttctcagctgacgctgacccacattctccatcgtttggtgatctga

SEQ ID NO: 506126 - DNA, 618 bp, Stenotrophomonas maltophilia
atgtggtttggagtgggaatcgaacccacgacagacggaatcaggatccgttgctctaccctactgagctatccagtggtgaaccgcgcggaatcgaaccgcgtaccggcgaaccggcgcctgcctccagcaggcgatccaggcgatggcatgtccgcgacctccggcatacgccacggcaacgccgcgcgcaccagcccgtggtggaaacgggaccgttggagaatcgagggtgcaagccaccgacattatcggcgagcgataatgtttgggtgcgatgcagataatgtccaggcgttgccatgcacgcggagagaatcctccggtggggcaggaaaaacctgggtcagtgagcggcgggttgccgcgcggggtgcagttctggcatcgcgggtccttgtgccgacgcaaacgaaaacgcccccgggacttgcgttccgagggcgtcgtcaggcctcggagatcggggtggccgatctccgcagggcgggtatcaggccgttgtcagctggtcttccttgccgaacgcgcgcgccagcacgtccatgcggaggcatggcagtagtttggcggtggcgacggagtgcgcgttcaagggagttttccagtggttgttga

SEQ ID NO: 506127 - DNA, 1104 bp, Stenotrophomonas maltophilia
atgacgtcatggcaacgaattaatcacgtgcagggcgatcgcatcttcctgagtggagatgtgacctacgccgacgcggtgtccctgccggcattgctggccaaggcacaggccgaaggccggccggtccgtgaggtgatgctgcgtacgtccaatggtggcgcgttgatcgccggggagtggctgcagggcatcatccgcacctccgggctgaacaccatcgtgtccggcaattgcatctcatcctgctcgatcatgcagtccggcggcgtcgagcgctatctggccggcgatctgccgctcatcgactcggtgcagatccacgcagccagcagcggcggcaaggtgatctacacgccgtcgccgcgcatgacccagatctatagcggcaactacggtggtggcatggatgccgggctgctgcacaaggccatgtatgaagtggtgaagccgaacggcctgctggtgttgcgcgttccggcacgcggcaccggtccctcggtcaccttcgaccccgatggcagtggcagcaagctggagtcgttccccggccaggacatctacagcaacaggatcatcaccgcatacgggtaccgcgatccgggcgacaccctgaacgtcaccgccaacgtggccggtgacatcaatcccggctacctgcgcaccggacgccagttgcaggcgttcgtcgatgatgatttcgcgcgctggcataccgactggcgatccacctacatcaatgtcgcacagagcatctacaccgcatccagccgcggcccgcagggcatcggtgcgctctcggtgcagggttacctcagtgacccggacatccaggacctgttgctgtccaagctgcggctggctgatctggatgtctccacgctggacaacgccaaggccagcgatggctctggtttcaccggagatgtgcgcgcgctggacgtgggcggctacctcgatgcgacgtacgcgcgcggctatctgtcggcggccgtgcgcttcaccgatctgcggcatgagacccgtcgcagcatcggcggtatcgatggcctgcagcagcccctgcgcgaagtacagcaacgatgcgatctccgcacgtgttga

SEQ ID NO: 506128 - DNA, 342 bp, Stenotrophomonas maltophilia
atgcttgcaagttgcggtgcacgaaaattcaatgctgcggggcacaactccgtagcaatcgcggacaaagaaaagccccgcatgagcggggctttcttttctgctgcaggcgagcgtccgatcagaacggttgtgaatactaaagatgtcaacaactactccctggccagacaaggcaagcactctcatcgactgagcctggtcgaacgtaaacatctgcttgtcagcccagagtgtcgacgcggttaccggcttctgcgtcccgccttgagctactggaagcagccaaacgtctatcgctgggctgaaaccaagctgcgccataacccatcaaaccggtag

SEQ ID NO: 506129 - DNA, 297 bp, Stenotrophomonas maltophilia
atgatctacggtttcactggccgatacactggcaaggccgaattcgagtggaacgcgcccagcgtcggtgcacaccaccaggcaatgctgttcctgctgcaggacggtgaacaccatgcattcgacctcgcgttggccgagtgcttccgtttctgcttcgatgaaatccgggatctacgctgcggccgcctgcaggtcgatgtactcaacaccgatacctaccgcggctttgctcccttctacgaggaagcgctggaagccggctctgccctgctctactaccccgctccactgtag

SEQ ID NO: 506130 - DNA, 900 bp, Stenotrophomonas maltophilia
gtgaaaatgatctctgcagctagcttgattctggcaggctccgcgctttccacgttcaaggcgcacgccgtccaggtagtcacctgtggcaattgcactcaatcctggcaatacgaatccgctggcgaaatggcacatggattccgtcgtggctgggaggtctacctcgtggtcaacccccacaccgcccaagcgctttacgtcaccgtcaattacattcctcctggcgaggttcccagaaggctccacccagctccttccctgggcgaattgggaatcgctgctgacatcaacgttccaggctggcgcctaccgagccaaccggtgcagacccgggatgggcaaggcgacttcgacagcagttcacaaggtttggcagaaggcgagcgacttcagcttgaagcggttgtccgcatgtcgaaagaatgggtgttcataaagcctgcaaatgacagcggatacttctccagcctgcatgtcgcaaaccaattcattccagcagtagatgatgcgatccgaatcgcgcacacggcaagcaatccggcctggcaacacgggcagatcaatggaaacctccttggctcacttttccgatcactcgagcatttcttcgggagaggcgttggcggctgcctgctgatggacaacggcgacaccgcttgctggcagatcaatccaatggcaagaggggcggctcgactgatcaaaggtacggccaaggatattttcggccaggcattacctgaatcagacaccatcaagaatgggggacagattgatattgatgtcgacaagggtgattggcctcgcgagatccgctacaacttcaatggcggctattatcgatgcggatcggtaagcggaaggctggatcgctgcgaatggatccgcccccgctag

SEQ ID NO: 506131 - DNA, 375 bp, Stenotrophomonas maltophilia
atgaagatatggttgcaactgggaacgcattccttggtcgccgtcgccttctcacttcttggggcatttcacatcacccttggtctccccagcctgaagcgccagtacagtgatgatctcgcgttgtccatccacctgctgttcgacgaggatggccaagaacgatcccaggctgaactgcagtccagagtttcatcccacatcgtcaacatgcttttgctctctgcccattcccagggtaaatcggatgctgagaatgcgcgtttggcagcaatcagccaacgcgttctcgcccaggacctcctgcgatacgtcgagcgcgacgatgtacgacacaacgctgtcctggtggcaggcaacctggctgcggattga

SEQ ID NO: 506132 - DNA, 2202 bp, Stenotrophomonas maltophilia
atgctgaagatcatttgcctgaccgctgccctgggggcagcgctggggacgaccgcgcaggcggccgacctgcaattcgacggccgccatgcgcgcgccgaagccgctgccaatggcagcttcgtgctgcatgcgccgaagggcgcagtgcagatcgcagccgcaccgatgcgcagccagaccggcagcgtgatgttcgatgcactgttcgcgctggcccagcaggagatggaccaggaccgtgtggacgcgattcgcgatcccgcgttcgacgaaggccggccggtgccgtgcgagtgcttccagaccggcgcgcgctggccctatgtgtggacccgcgatgtcagcttcgccgccgatctggcgttggcgcggctggacccgcagcgcacccggcagtcgctgcagttcaagctgtcggcagcccgcgacgggcacacgcccggcctgttcgtggcgcaggacaccgggtccggcggcagctggccgatcagcagcgaccgcgtggtgtggttcctggccgcgcgccacctgctggatgatccggcgtttgccgatcaggtctggcaggcgctgcagggcacgctggcacaggaccgcgcgatggtgttcgacgcgcaggtgggcctgtaccgcggcgagacctcgttcctggactggcgcgagcagacctatccggactggacccgcgaggacgtgcgcttcatcggtgattcctacgcgctgtccaccaacgtgctgcactaccaggcgctgcgcctggccgaacgcctggccggcaagcgcggcgatgcccgcgcggacgagtacaaggcgtgggccgatgcgttggcgcagcagatcgatacgcgcttctggcgcgaagacatcggccagtacatgagttacatcggtgaagccgcgcacccggtgccgtacgccaaggtggatctgctcggcctttcgctgggcatcctggccggggtgctgccgccggagcgcgcgcggcgtgcgctggcggcgtatccgatgggcccggccggcagcccggtggtgtggccgcaggaggcgcagcagccgatctaccacaatcgcgcgatctggccgttcgtcagtgcgtactcgctgcgcgcggcgcggcagctggatgatgcgccgcgcatcgccgccgaaatccgctcgttgatgcagggcgccgcgctggccggctccaacatggaaaactacgagctggtcagccaggccgtgcatgtcgaggaaggcgcactgagcggcccggtggtcaattccgaacgccagctgtggtcggtggccggctatctgtcgatggtggtcgaaggcgtattcggcgtgcaggacgatggccgcgtgcagcccaagctgccggccgtactggtgcccgaactgttcggcacgcaacgccgcatctccctggaggccaacggcaagcgttatgtactggagcggccgaagcagctgggcgatggatcgctggttgcaggcaaggtgacgacgcgtggtgccaccaccaccgtgcagctggtccccgccgcatcggcaccgcgcagcgtggcgatgacggccgacgccaatgcgcgcgcgccggccacgccggccgcaccgcaggcgcggcgcaagggcaggggctggaacgtcgaggtcgctgccggccaggtgctgtggcaggacggtcgcgcgctcaccgccagcaacggccaggcgcacatcagtgacgatggcctgcagcattgcctcagcctgacccggcgcgacaacgcattggaatcgctgcacagcccgacggtctgcgtcggtccgcagcaggtgctgaagggcgaggatcgctggcagttcacctcagccaaggccgggcaggtgcgtcttcgcctgcagtaccgcaacccgaacgggccgatcaacaccggcgtcaccgctgcggtgaagcagctggtgctgcagtgcccgggccagccgttgcagcggcacacggttacgctgccgcacagcgtggcggtgcaggactcgacctcggcggcattcacggtgcccaagggccgatgcacggtcgcgcttgaagaaggcttcaacatgagcgcgctgcggcacttcgcgcactacaccgggggcaagggcgggcgcgacggcgtgctcaaccaggcgcaggtgcaggcgctgacggtggcgccggtggcgccggtggcgatggaagagggtgcacgatga

SEQ ID NO: 506133 - DNA, 420 bp, Stenotrophomonas maltophilia
atgaaactcgtaggacaggagcaacaacttacccgtgaagatctctgcgacttctcagaaaggacgggcttgaggctctctagcgagtttgtggatttctacttggacaacaatggcggatatccggatgttgaggcggatgaggcgaatccacttctgctgaacagctttctttcgatccgctacggtgatgggacgatcgataccgcctaccaatcgttggttaaaggcaacccggcactggaggggttggttccctttgcatatgacgattgcgggaatgtttttctgttgtccggaaatccggacacgcccggagaggtcctcctttggttgccgggagagagtgagatcgagaccatattcagctcattcgctgaatttcttcgtgccctgtacgaaggtaagcaagccagctag

SEQ ID NO: 506134 - DNA, 594 bp, Stenotrophomonas maltophilia
atgagccttgtcgatcgcttcctctccggcctgattccgcgcctgcctgccaacgacgctgcgcaatgggcgcatgtcgagggcgccagcaccgatgacctgcagggcctgcgcgcgcagtggccaaaggtgccggacagcctgctggaactgctgtcgcgggtggatggcacatacttccgcggatatcccggtggggaggtgtgcgtgctgatgctgggttcggatgtcgaggacggccgctatccctactacctgagctcggccgcagacatcttcgaagaccaggatgagtgggacgacagcatccgcaccatctacgaagaatggctggacgacgagccggagattcttggcgacggtattgatgcggatgttccgatggaccgccgcctgtgcttctcgcactgcacgaacaacggcggcacctcgaagctgtacctggatttcaaccccgcaccgggcggtaccgtcggccaggtggtgcgctatctgcacgatccggacagctacacagtcatcgcacccagcttcgatgcgtacctgcagcagctgattgatcgcgattacgcgttcatccggcacgaggactga

SEQ ID NO: 506135 - DNA, 429 bp, Stenotrophomonas maltophilia
gtggatctgctcaccaccacccacgggaatggatcccgtgactgcgagaacatcttgaagcgcaccgccctgatcgccctttccctcggcctgcttgcaccgctggccgcccatgccgcacaggacctgccaacgctctaccaggcctttgaagaagccggcaattcttcactgggcatggacgaactcaaccagacggtgacattcactgccgtggcactgagcgtttccagcaacctggcgggcgaaccgctgatcgaggccggcgatgaccagggcaatgtcctggcccggctgaccagcgacgatgagcagcaggcggccaagctgggcgcgctggaagaaggcgcgaccttcaccgccagctgcacgctgcagttcagctcgggaacggattacctgtccttcggcgattgcagcatcaagtaa

SEQ ID NO: 506136 - DNA, 798 bp, Stenotrophomonas maltophilia
atgcttatcggattctcccctgcaggcgtgaccgctgccgttgatggcgccactgtcgcaaaccccgtcgccttggccgatgggcggcccacaagcattgctcggctcagcggtggtacgtcgcccgtccggctgcggttgacctggccagcggccgctggcgtccgtgtcgttggcatgctcggcctgtcctgcccggtcggcacctccctcaagctcactgggcgcaaggctggtgacgctacgtatggccaagccctcggcggcacctcgctcacgcaaaaggtgatcgaactggtggacggcagccgcgcggcctggtgggtgcttccagcgggcactgtggccctcgtgggtatccaggtggagattggggtggcgggcctggacgtgggcgagctgttcgcccaccaggctgtggacctacccattgagcccggttcagagactgaacgcatcgatcccagcattgtcgagcgcaccctgggcgcaggcgtcaacgtggtggctcggcgcacgtaccggcgcctccgctttacccctcagaccgaccgcctgcaggtcgcccgccagggcggcctggggggcgggatggactgggagcgactggccatggcggccgcaggtggcgcgcggatgtcgctggtgccgcgttggggaaaggatggcgccctggacacggaggagctccatcggacggcactgtatggcacggtggtggccgggtccgctgggcacgctggcggcaaccagttccgcagcggcgggtgggtggccgatgagctccccccgatttga

SEQ ID NO: 506137 - DNA, 1968 bp, Stenotrophomonas maltophilia
gtgcgtaccttcggccgttgggcggcgtctccgctcggtgctggcctgctggtagaggatggcggcttgaccgtggcctcaccgggggcggttgttctggcccgcatcgccaggagcacctttccgcttgccggccctgccggcgctgagttcatgctgtggggcgacgatcctctcactgcgatcatcggcctctgcaacgccgctgcgccgctgtcctccgagttgggtgcgtccaatggagtcggctggaagctgcacaccggccaagtggttcgcaacggcgctgtgattgccagcggcctgccaatcccgctcaagggtgaggcgctgggggtgcgcgtgctgcctggcacgcctgcgcaggcccagttctatcgtgacggccagctggtggccagcgtcgatgtctcagcgggtggcccgtactactttgctgtgtccatcgctgctaccaaagcgcgcggcctgcgctgtgtcgtgaacgctggccagtggcaagggctcagtccggccgcactcgtgggatgggcccaagctgccgatccgatccccacgatccgcgtcgcaagtgaggactacatgagcgctgccagcgactcgccagcgaacactgcgttcgctgggatcatcgccactgagggcctgagtacgatcagcgcagtttcgttctggatgtggagcaacgagtcgcgtgccggcagcgctcaggtccgcgtgcaggacgccgcagggatgctggatgccgctgcgctgtccgctattcgtgacgttccagtcacggtgcgccaggtcgagcagggccagtcgatggccggtgcggtgccagtcgctcgctatgtgctggatcggatcgaggtcgaagacgacagttacaagcgcctgacgttcaaggacgcgcacagtgacctggatgagccgctgagcagggccgtatttctcccgacccacggcgagagcattgcctggcagccgcagcccgtggtgatcgggctggtgcgaagcgtgccgaccacggcggtaaacagtgatggttcgctgcaatggatctgcgattcgcgcctgcaatcagtgatgagtgtccgtgaccgcgcagtggagctggttgccggcaccgcgtacagcctggttgctggtggacagcagctctccctgcagtcgccacctcttgggccgctgacagctgacgtctcgaccatcggcgcggaccggccggcaacgcttcaacaggcgctgtcagacgtgttcggccgtattgggaaagccgcatggcagagcgccgacgcggtcgccatcgatcaggctacgggctatgccggagtgggctactttgcggacggcaatagcacgccgcgcgaggccttggccgcgatcctgggcagctactgcgccgactggtggcaggatggggatggcgtgttgcgcttggcgcgattgatcgaccctgagagcgttgccgatgcgaacctggcattcgagctcgacctggtcgagctcgccgctccgctggttgtgatgccggatctggcccccggcctcacccgacgcatgggctatcggcccaacgcggtagtcctggctgacggcgacatggccactggcctggatcaggtgccgcccagcatccgcaaggaactgtctgccagccaccgtggccaggtctacgccaccggggatctgcctgcctgctaccagcacgcggaggccgcgccagcggtggagtcatgtttcgatagccgcgctgacgctcaggcggagattgatcgtgtcgtgaagctctacgcagtgccccgcaacttctacgccggccggatgaccgcgcggcctgacctgcagctgcgaccgggccaggtcgggcgcatccgctacccgcgctatggcctcgcagccggtcgaaaggtgatcgtcacggcggtgaccagcaaccccatcactggcgaacagacccttaaattctggggcgcataa

SEQ ID NO: 506138 - DNA, 192 bp, Stenotrophomonas maltophilia
atgcgctttgatgctcgcctctacctccgcaccgagtctgccgaccagcccggtgtgatgctgcagttccgcccggtcaatcagccgaacatgccgcagatcaacatcacagtcgatacagccgacgcgtccgcgctgaaagtcggtgcggtctaccgctttgagaccactgaaattccccaggaggcttga

SEQ ID NO: 506139 - DNA, 5625 bp, Stenotrophomonas maltophilia
atgaaccggaaagtattgctcgttgaaatcggaggccagggcctgcctgccgtcacgcccgtgacccggcagccctccaactgggtggcgtcggccaagcctgctgtggtggttcctccggccgaaggtgtggagaccaagccggcagcagatagcgtgaccattacctggaacgcttcgccgctggctggcgctgtctatgtgctctggcgcgcggcggatgcgggcggaaagccgggcgaatggaagtacgtcaccaaaacctcagacacgcgctacacctacaccgaggccagcggtgttgtgagctggtggaaggtcactgtccaggtcaacggcgtgtcgtctgcagactccacgcccaaggctcaggcccccgtggtgccgccgactacggcggagctggtccagctgcagggcaaggtggaccaaggcctgcgtgacctggcactggcagatgctgccgaggcacagcagcgtttggcagacttccaggctgcgcaggcacagatcctggcagagagtcagaagagtgcggccgcagtgggcgaagtggccaagcgcgccgaggatctggccaccaacctggccaacgaagagcgcgcccgtattcaaagcgtgctgaacgagaagaccgagcgcaccgccgacatcagcgcggtcaacacgaaagtccagaacggcctggattcgatggcccgctctttggccgaggtggccgcaggcagcggcacgcagtttgactctgccggcatctggcacttcaacgccgggctggaaggctggacgggtgtgtatggcacgccgactatcgcagacggcatgctgcggccgatcaacaccaccaacaactccggcatccagtccccggcgccgctcaacatcgacggcgccgcctatcgcttcatcaagctgcgcatgcgcaaggtgggcaatcccgcctggatggggttgatccgttggatcactgaggccgaccgggagtggaacgacgccaagtcgatttccatccctgcgcccgcattcgacgccaacggcgtcgccgtgctggacgttgaccgcctgccttggaatggcccctcgccactgcgcgccatccgcctggcactgacgggtgcgcagacagcaggcgcctacattgagtacgactggattgccgtgggccgcccgtcgcctggcgcatccgtcgcgatggtgcagcaggaaagcgaggcgcgcaccgccgccctggcggctgaggccggccagcgcaacacgctggccgtgcagctgcgcggcgactacaccggaaacgatccggcgaagctgacgggcggcctggcctacaacgaaatgagggcgcgtgtcggcgcggacgaagcgcttagccagcgccagtccgccgtggaggttcgtctgcctgcaggaacaggtgcgctcgcatcggaggccaaggtcaactccgtcgagcaggcgagcgtcacccgcgacgaagctatcggccagcgcatcgaccaggtcaacgcgactcttcctgccatgattgtgcagggcagcaacatgatcctcaatggcggctgggaccagggcagcgctgtgggttggacgtacagccacatgggcggcgtcaccattgcttccgaaggccggacaggcaactgcttgaaggtcaccgcacccgcaggtagccgcagcatgactgccaatggtgcaacggatcgcaacatccccgtcgtcattggcaaaaagtaccgtgtcagcgcgtactaccgaactgatgcggcctataacggcaccaacgccaacggcaagctcagaattgccgaccaggcagatgcactgatagccggcctggggttcttggcagatcggaccgaatggacgcgactggaaacagttgtggcagtgacatcaacaggcgcgctgcgcgtgtacgtcaacacgaaccacaccgcaggtacgttgtgggtcgatgatgtcgtggtcgaggaagtgaccgaggttctggcggtcgccgatggcctcagctcgctgagcgggaccgtcacccagcaggctggtctcatcaatgcacagtcgggcctcatcagcgcccttcgcaccgacgtggacggcaaggccactaacagcgcgctgcaggccctgcagtcccaggtgacgctccaagggaacacgattaccagccagggcggtgcgctcaccagcgtccaggccgccatcaaaaacctgggcggtgacaatcgcctgcgcaacagcagctttgaagtcctgcttcccagcggcgtccctcagtattgggcgccctcatcgtcatccaccgacgcggcgaccaggatcacgcgcaagctggtggactctgcgctgccgggcagcaccaaggcctggcgttgggacatggcgagcattcccgccagcgcctatgcagagtgctactcatcggtgtaccgcatcgatccccagcagcccgtcaccgtgtcctgcagcgtacgcgggaagccgggggcgcgcttcttcttccagctcgggctgaaagatgaggctggtgcgtctgtcggttgggtcggcgggcctggggccagcgagggcatggtcgtcacggaagcatgggacaggaaggtctacacgttctcggcgtcgccgattctcgccagcgccgtctccgcatcgctctacctccgtgtgtacggcaacggctcggcggatcagtgggtggagatcgacaatgcgcagttgcagaccggagcagctgccacgggctatgcgccgtccatggaggagacagccgcgcagtccaatgcaaatgcggaggcgaacaacgctctcaatgtgcgtgttaccaacgctgaggggcagctgctgtcccagggaaccgctttgactgcggttcgtgcaggcatcggaaacgcgactgtctatgacatcacggccaatgcggcgacttccagccagccgactggcgggccacggtcctctggcacaaggaacgcgtcgggtgcagccgtgggtggtgcggcgcgcggcattaacgtgctggtggtcgctgccgacagcaccttgggcgaacggaggacgttcgacacctatgggaatggcccggcagcctgcgccagcttcaatgattggtacgacaacggcctggcggacaatcagtattttattctgttcaccagcgaccacactgggacattgagcaacggcgtcggtgccgacatcgcgggcaccagggatcgcctcgttgatgcaggcgcttcccggcgcaatgtggaggcgctggcaggtacgcgcatgttcatcctgattgggcgcaaacgcatcggtgagggcgcaggtattcagcgaatgtcgccgccgcagtccactggacgcgccgacctctggactgagctcatcgtggagttcgtcaacggccgcccccaggggagtctagacgtttcggcgctggagaaggcaacacaggccaattcggccgcaacctccagcttggaggcgcgcaccctggcgaatgagagcagcgtcgtttcgctgggtcagtcgctcaccagcgtcaatgccaagatcgatagtatcggcggcgacaatctgctgccgaacagcagctatgaagcctctccaagcgatacgtcagaccccactggctggcagcgcgaggggaacatggcgaacgttgtgctcaagtacgttccatcacctttgtctggtggtggtcgcgcgatccgcctggaggcgaatgccacggcagtgggtcagtacctcggcctcgctacccgtaacgacaatgggtgggttccagttcgtccccggacccagtacgtcctcagcagctacgtgcgcgccactgcagggaccgggctgcgcatgtacgtccagtggcgaaacgccgcaggtgtcattaaggcaacgagcacaatgcccaacgttgttgccactgctcaatggcaacgcctggttttccaggccgacaccaccgctgacgatgtcgtggaagctcggctgttcgtaggccgaatgcacgcgacggcagtccagggcgttgccattgagctggataacgcgttgttccaggaaggcacagcggccaccggctgggtgcccagcggcaaggaaacagcagcagcagcggcggcaaactctgcggcaacggctggcctcacttcgaccgtgacccagcaggggcagcagctgaccgcgctgggccagtccgttacaggcgtccaggccgagattgcaggaaaggccagctcctccgccgtccagacgcttgaggcgaaggtcaagaaccagaatggcgccggaaacctacttgggaacacccagttcactggtgggcctggcacggtgggctggcccaacatgtggtcgcccgatggggcaactggcacacagaagtatttcgctccgggtgccgggatttccggcggtgttgaccctggtgtcccctacggcatgagggcgctgatcgtagcgggcaccaccgccgccagcggcgcagtgttcgtttggcccgcgagtgatgcccccgtcgaggcgggcaagacctacgcgctttccgtctatgcgtcgggacagcgtgggcggctcattcttgaattcttggatgccaacggcgtccaggttggctctgcgggctcgcctgccaccgacttggccggaggtgggaataccatctccttgtatagccgcctttgggtgaaggcggttgcgccggccaacgcagtaagggcccgctgcattctcgtaagtcatcacgtcagcaatgcgcattggttcgtccgatggctgcggccaatgctatcgatggtggacaaggatgcgaccgagccaccggagtggtcggcaggcggcgcggagagtagtgccaggtttggtatcgcgctcgatgtggacggcaacttggccggcttggaaatggaggctaacggtgaccgcagcgagatgcgcattctttccaagattctgcgcatcatcagccccggcgcccccgacggcatggagctacaggacggctacctgcgcgtgtggcgcggcaacgttcagcgcatcatcggcaacggtttcgggcccgatggattgattgactactttggcccgaacgtcggtgcagccggtgccaccaagcagaatgcgacggtgtggatggatgtcaacgggggcgcctactggggaggagccattgccgcaggcatccgccgcaatgcagctcaatccaccacgacgcagaccctcggcgtctcgattgtcgttggccctttcagcaccagcggtcgcaacaagaacgtggtcgtcagctatcagcggaccgtgactcgcaggcacggcgctatgaattccactggatttgtcgcgggcgccggacggaacgcctgtgcgatctatgtctatcgcaagctcggcaacaacgctgagcagctctggaccagctttgaagccagtggcggcgtgacgatcatgaacgagcgcgatggccccgacatcgctacctcccgctgggcaggctctgtaaccctcaatgacagcgaaggtacgcaagaccgcacctaccgcgcagagattgtcggcttcagcgaacaagacgtgagccatcagtccggaagtttcaccggcctggacacctccgccagcctttcactggtttcaatcgaagagtga

SEQ ID NO: 506140 - DNA, 4971 bp, Stenotrophomonas maltophilia
gtgaacccaaccgtcaccctccgcctcgatgccgacaacagccgcctggtgccagccgttcgggcatcggatgcggagctcaagcgactgggcgcgacggcgggcacaaccggcgaccaggcacggcgtggtgctgccggcatttccagcatcggcacggcggcggattccactgctcgccgtgtctctgctgtgtccagcgcactggcatcggcgcgggcgacggtggccacctacattggcgcgcagacggccggcgccctcatttccgttgcggacaactacgccaacatttcagcgcggctcaagctggcaacagatggacacaaggcctatgccaccgcatcggcccaggtgttcaacatctcccagcgcaccgccaccgcgctcgacagtaccgccaccctctacgcgcgcttgtcgcagtccaccgccgagtatgggatcacccagcaacggcagctggcgctcaccgagtccatcaacaagacgttcgctatctcaggcgccagcaacgtcgccaccgccaacaccattgtccagctcagccaggccctggctgggggcgtgctgcgcgcagaggaattcaactctgtcgtggaaaactcgccgcgtctggccaaagcgctggccgacggaatgggcctgtcgatgggcgagctgcgcaagcacgtcaacgacggcaaggtgaccgtcgatcagatggtggccgcacttgagaaccagtcctccgtcatcgccgccgagtttgagcagatcccgctcacggtcgggcgcgccatggagctgctgcgcaacagcgtcaccaagtttgtcggcgagtcctcccaggagctgggcgccagcggcggaatcgcccagggcatcgcgttcctggccaacaacatgcagcacctggaccagatagccggtgtcctggccgtcgccctgggaagtcgcctggtcgtcagcctggccagggctaccgccgagaagatcacggccgccgccgcatcgcgaacgctcgcccgcgaggagctggctgcagcccgtattgccgagcagcaggcggcaggccgtctatcggccgctcgcgccggcatgagcgtggcaggtggcgtagccgcggctgagcaggcgctggccgccgcccagctgcgcaccgccgctgctgcccaggccgcatccgttgcgctcagcgcaaaggctgccgcaatgcgaggcctcaacgtggcaatgggtgcgtttggtggccctgcaggccttgcgatcaccgcgctgtcgctattcgtcgcttgggcgatgaacagcaaccagaaggcacaggagctgtccaagaccgtcacggccggtttccagccagccatgcgggtcctgcaggagttcaatcagcagactgcgaacacgtcattcgcagagctttcaaacaccgttgaaaccattgaagccgcgcgccaggagatcaagaacctgggcgatgagtacgagcgccttgcggcaacgcgccgttcgttccaggcccgtgaccgtgctctgccgttcgggttcgacaaggaactggagggtgcatcggcggccatcgagtctgcgcgcctccgcctggacaacctgaccaagggctatgacagggcaatctctgtatcggccggcctggtactgcgcaccgccaacgtaaccgacgccacggacgcccaacgccgctctctggaggagttgctcaagcgccaggccaaccaaggccagacgctggagcaaacccggccactgctggagcagtgggcgaaagatcagctcggcgtggacaacgccaaccgtatcgcggcggcgagcttcgataccgtggcgtcagctgcacgcaactctggcgctgccatcaaggctgccctccagtcggtcaacgaaggcctggacaagcagattcagagtgtccagctggacctgatcgagaagacgcagggcaaggcagcccgcatgcgtgcgcagttcatcacggaaagcgcgcagaagggtctggacccgaccagctccgactatcagctcgcgcgggccaagaacgaacagctcatccagctcacactgacgctggacaagcagaatgcggccacccgtgatctgacgcgcacccagaccgaggccaagcgctccggcgagcaggctgcgcgcctggcagagcagcaggccgactcccaggccaagtacacccgccaagcggcattggctgctgccgagctttccggcccgatggcggctgcccaagagcagcacaagcagcgtattgccgagctcgaccgcgaactggccaagcacctcatcacccaggaggcctacgccagcctggtgaagtcgtcagcggccgagttggccaagaatgccgccgaggtcaccaagcagcagcaggcgcccagggcattgctcgatacgctgagcggcgaggtgcaactgctgggcgtggtcgggatcgagcgcgagcgccgcgcccgccagctgcgcaacgagcaggacatgctccaggcgatcaacgaggccaacaaggccggcgccggcatcaacgcagaggcaacagcaggcctgatggcccaggcacgggcgtgggccaatgcctccattcgcatcgaacagcagaccgccgacctggaggaatgggccaacgtcggaacgcgcggtgtcgcggatgtcgccgatatgctggccgatatgttcagcggcgggctggacaagtctgagagcttctttagccgcctcaaggacatcttcaagcgtggttggcgcgacatcgtgcgcaccatgcttgagcagaacctggtgcgcccgttccaggatgcgctcaccaacgccatgaatggcgcgctcgctggcgtgtcgcgcggccaagctgacggcaactggttgtcgaagatcgccggcatgttcggtggcggcaaccagggcggcgcgggctcgggctggatgagcagcctggccaacatgatcggtggcggccgcaacctcactggcaccaacgccatgctggccggtggcggctggcgtgccggtgcggccgcgccaggctcgatgatgggctttggcaacaacgtcggcgggttcattggcaccggggctgccggtggcgcggcgtccgcatcgatggctgtgccgatcatcggctgggtggtcgcggccatgatgaagaatgccgagctgttcgatcagggctgggacattgccaatggcgagagctggggcggcaagatcgcaaccctcggggccgtgggtcacgtcgataagatggcgcgcaagctcggcctcaacgccaaagcagcctccattctgtctggctcctcgatccatgctgccctgttcggtcgcaagaagccgcagatccaggcgcagggcctgaccggctcgtatggcttcgacgggttcgctggccagtcctacgccgacatcaaggccaagggcggcttgttccgcagcgacaagaagtggaccgagtatggccaggtcgataccacgatcaccgacgctttcagccaggccactggccgcgcgcgtgcaggcgtcatcagcctggccgagcagctgggcgtggacatcaacagccagctgtcctccgtccgcgtagacctcggcaaggttcagctcgatgcggacccggacaaggcccaggcgcaactggagcaactgatttccggcgcggccaagaacctgaccgggcgtggcgtgtcgatcctcggattcggcgacttcctcaacaaggggtttgaagccggcgacgtgatgaacagcctggcggcgtccatcgagctgatgaccggcaacgcccaggagctgggtcgcgcgctcaatgcccaggaaatcgacctggtcaagcgcacgacaaccatgttccagcagatggccaaggctgccggcaccaccatggaggaacaggtcaaggcaatcactactgccgcgtcctcctacggcagcgtagtgggcaacgcgcagcaggagatcgcgacggatggattcagtggcttcgccaagtcgctcctggcagtgcgccaggaggagcaggagcgcatccgcacgctgcagcagcaggccaaagccctgggcggtctggccgcacgcgagcaggatctggccaccgttcggcaggccgcccagctcaaggccgacgcgctggccaagtcgctggagtcggagctggtaggcctggcgctcaaccgcgtcaacgatgaaatcgaacgcctgggcggttccatcgacgggaccagcagcaagctgcaggacttcatcaactcgctcaagctgagcagcaccctgtcgccggacaccgacacacagaagcgctccacggcatctgatctgatgcagagcgcagccagcgccggcaacctggagagcttcacccaatacgcccagcagttcctggaagtcagccgcaaactcaatgccagcggtcagggctatcaggtggactatgcccaggtgctggagctcgccaagcgctttggcggtgatggcaccgccgcgtcgctgcagcagctgtacgcgcaaaaggctgccctggaacaacaacaggaagccgccgcccgcctggagcgcgctcagcgcatcgcccagggcgtggccgatctggctggcgcccgtggcggcgatccgctggagatcctgcgcaacgtcactggcatcagcgctgaggcgctggccaaggatctgggcctgaccacggacgagctggccaagtacctgcagaaccagcagaccgacatcaccgacctggcagagatcctgttcgatctgcccaagcgcatcgcccaggagatggtcacggtgctgaccgacagccgcgttccagtcccggcgtcggccgcgccaggcggtggcaacacgcctgcagcaccagctgcgccagtcgcaccggggcgtggctacgtcgatccctcttacgaggtgctgctgcaggtccgcgacggcatccagtccctggcacgccagggtgaacacaacgctttgatggcgctatga

SEQ ID NO: 506141 - DNA, 162 bp, Stenotrophomonas maltophilia
atgcacgccccggtttacgacggcattgaagcccgcgagatccaagccgctgcctgcctccagggcattgccccgcacctattgccagacctgatgccatcgctggacgtgctgattggcaccacggctatggcccatcgcgaagcctcggatagcccgtga

SEQ ID NO: 506142 - DNA, 360 bp, Stenotrophomonas maltophilia
atgctccgtctcgcccgaaccaacaccgtgcacctgccggtggaactgcgcatccccaccgaccagcccaacgttttcgtcaccggcgccatccagtgccaggtcaagatcctggggcgcgaagaaatcaaagccatccaggacaaccccgttgaggacgaggagtacctgcgcaagatcctggtcagcgtcgctggtctgggtgatgcagacggcaagcccatcgagggcgaagccgcgatcaaggaagttttcgatggcccgttctacgccttcctgcagccggccatcatcggcgcctacttcgaccagttcggccgggcgcacgtaaaaaactcgaagccgtcgcgcgggcgctga

SEQ ID NO: 506143 - DNA, 981 bp, Stenotrophomonas maltophilia
atggcccagcccaacctggaatccttcaagcgtcgcggcctggccctggcgctgcgcgcatcggcctcggtgccgactgtccccaccgccagcgccgatggcgtgttgctgttcaacggcagcagcggcaccgagttcgacaagatcgaacgcccggtggatcgtccgtttctgactggccagcccttcgcagtcggtgccaagcgcgccttcattgagggcgagtttgagctgttcccgccgaccaagccgggtgcagcggctgactccgatgccgtctgcgcgccgctgttgctgcccgctggcatgaccgccgtcaaggatgctgttgcgaaaaccacgcgctacaacccgatcagcgcgaacatcccgatctctgatgccaagttctggcatgccggcacggtcaagcagatcggcgccgcacgtcacaacctcaccaacctggcactggccgttggcgagcgcttcaagggcaacatccgcatccagggcgactacgacaccatcgccgaggacgctctgcccaacatcaccaccaccgccgtggtgcccaccgtcgcgcgcgcggacaacacccgcaccacgatcacggttgatggcggagcgggcctggtcgtgtgggccaagtccctctcggtggacgtgggcaacacgatcacgtcgaaggagtacaccagccacaaggaaagcggcatcagcgaccgcgccccgacctggacgcttcgcctggccaagacggccctggctgacttcaatccgtgggcagtgcgcgactcggccggcgtcctggaggttgcgctgcgcctgaccgaaaagagcaagctctacagcgagctgggcattcgcggccagatcgagaacatcaacgaagtcgagattgatggcgactacggctgggagctcactggtccctgcgtggccagcgatgctggcggcgatgagctgtatatcgagttcggcgatagcacgccaccgtaa

SEQ ID NO: 506144 - DNA, 174 bp, Stenotrophomonas maltophilia
atgactaccaagcacacccctaccagcggcggtgcctggcgcgtgatcgatggccagctcgtggatgagtccgtactgcccgccgagcccgctccagcacccgagccgccgccaccgccggcatcgagccagaaccgctcgcgccgctcctctgcaacctcacccgagaactga

SEQ ID NO: 506145 - DNA, 453 bp, Stenotrophomonas maltophilia
gtgacagtggggccgttcccgatctcgcccgtcctggagcgtctgcggaatcacgtccaggcactgctcctggtcggtgacgccgccgacctggataccgccctggaccagcagccggcaaaggactgcgccgcgtatgtgacggccgccgaggtgggtggccgcccgaagtacacgggcgatcagcacatccagaacgtggatgtcacgttgcgcgtggtcctgatggtgcgcaacttcagcggccaggccagtggcagtggcgcgcgccgccagatggatgagcaagtcattccaggcgtccgcatggcgctggccggctggaccccagtcgatgcgttcgatgcgctcagcttccaggctggccgtgatgagaagttccgcgccggctggctggtcagccagcaggtattcgtcaccaactaccgcatgcaacacacaccgcccccatga

SEQ ID NO: 506146 - DNA, 507 bp, Stenotrophomonas maltophilia
atggcctacgtcaccctcacgcaactggccgagctcccaggggcgctggaactgtcccaggtggcgggtgggcgcgatgagcgcccggttgccaccgagctgatggatgccacgttgcgtgggggtgaccgcagcgcctttccgccaagcgaagtggccaaggccgatgcggccctggagcgcatccaggaggccacccgtcaggcagacgcgatcatcgacggctacctggcacggcgctacagactgccgctggccaaggtcgtgccgctgctggccgtttggtcgcgcagcatcacgcgctacctgctgcaccctgatcgccagacggacgagcgcaccgatcccatcgtgcgtgattaccgtgacgcgattcgcctgctgcaggagacggcacaggaaaagttccacctgggcatcgaagatccgaccacgtccagcggctctgcaggggaattcatcttccatgccggcaacaaggtgttcgggcgcgagggccgaccgtga

SEQ ID NO: 506147 - DNA, 357 bp, Stenotrophomonas maltophilia
atggccgaacagatcctggtaaaggcccgcctggagcgtggccgctggcgtgccggcatgcacttcacccggcagggccggacggtgcatgtcgatgacctggacaagaagcagctcgacgcgatcaacaacgactccgaactgatcgtgacggaggtgcccgcctcggacgatcccaacgaactggcactggctcgcgaacgcaaggcaaccaaatccggcaacgccaagcgtaagtgggcagaagcggaggcccgcgcacgcgccgccgctggcctggccgaggaggcctgggcgacccagccggcagcagatcgggtgggcttgatcgaggcagcgctggaggccggcgcgtaa

SEQ ID NO: 506148 - DNA, 894 bp, Stenotrophomonas maltophilia
atgatcgtcaatcgcggcaatctctccacgctgtacgtcgccttcaacgcagcattcaacgccggcctcggccaggcaccgtcccagtaccagcgcattgccaccgtggtgccgtccaccaccaagtccaacgagtacggctggctgggcaagctgcccagcttgcgcgaatgggtcggcgaacgtgtggtgcatggtctgcagaaccacggctacaccatcaagaacaagccgtatgagctgactgtcggcgtggacaaggatgacatcgaggatgacaacctcggcatctacagcccgctcatgcagagcatgggcgagtcagtcggcgcacagccggacgagctgacgttcgcgcttttgaagaacggcatctccaccgcctgttacgacggccagaacttcttcgacaccgatcacccggtgctggaccaggaaggcaaggaaacggtccagagcaacgtggattcgggcggcagtggtgcctactggtatctgctgtgcaccaagcgcgcgctcaagccgatcatcttccagaaccgcaagccgccgcagttcgtttccatggacaccgataccgatgagggcgtgttcaacaagaaggaattccgctacggcgtcgattgccgccgcaatgtcggtttcggtttctggcagatggcctacgccagcaacaagccgctgaccgaggagaacctgcaggcggcctacaccgccttcacttcccgcaggggcgaccacggccgtccgttgggcctggtgccggatctgctggtgtgcgtgccgaacgacaagttcaaggccgccaagatcctgaccgccaaccagatcgccggcaccgacaacgtgatgaagggcgttgttgaggtgatggacagcgcctggttgctctga

SEQ ID NO: 506149 - DNA, 408 bp, Stenotrophomonas maltophilia
atgagcgcagccacccaggctcgcaacaccccgcgccgggacgcacatcgtgtcggccacccctccaaccccggcaccgcgctccatgcgggcacgctgattgcgctgctggcgtccaacggcaacgcggtgccggcaggcactgccggttccggggacgcagtcggtgtcgcactccgctccgtcaccggcactgccgcaggcgagaccgtcgaatgcgagcgcggcactggcttccgttttgacaacagtgctggcgctgatgccatcacccgcgccgacatcggcgcaactgcctacatcgccgatgaccagaccgtggccaagaccgacaacagcggcgcccgcaagcgcgctggtgtcgtcctggacgtggatgcggccggcgtgtggatcgtggtcggctga

SEQ ID NO: 506150 - DNA, 1128 bp, Stenotrophomonas maltophilia
atgaatcagcccgcccgccgcctccataccgccgttgccctggctgcctgcagcttccagctgcaggccgacgccgtgggcgatgaccgcatcatctccatccagctgacccctgccggtcacttcaagcccagtgacgggcgaaagatggatgtccccgcctggtacatcgacgcctcggtggcggctcgcgtgatcgagcgtttcaacgctcgcgtcaacccggcagtggtcgattacgagcaccagaccctgcacaaagaaaccaacgggcagcccgcgccggccgctgcctggatgcgtgcgctgcaatggcgcgagggatctggcctctgggccaccaccgagctgactccccaggctgcggagcagatccgaaccggcgcctatcgctatgtctctccggtgttcctctacgacaagaccaccggcgaggtgctggccatgcagatggccgccttcaccaatgaccccgccatcgacggcatgcaggccatggagctgcgcgcagcggcttgctttgcccacgacatcgatcctgacaaggaaacctccatgaacccgttgctcaaagccttcctggctgccctgggcctgcccgaaaccacctccgaagcggacgccatcgctgcctgcagttccctgaccaccagcttgggcgtgctgcgccgactgcaggccgagctgggcgccgagggcgagccggccgttgcggcctgcagtgccctcaagaccaaggccaccgccaccccggacccgaccaagttcgtgcccatcgccgcactggaagaagtgcgcggccaggtcgccgctctgtcggccgagcgcaccgctgacaaggtcagcgctctggtcgaggatggcctggctgatggccgcctgctgccgagcatgaaggactgggccaccgacctgggcaacaaagacctggcggcgctgtcgtccttcctggacaaggccggtccgatcgctgccctgaccagcacgcagaccggcggccggaagccggccggcgcgaccaacgagcatggcctggacgcggctgaaatggccgtatgcagcgctaccggcgtcacccccgaagccttcgcgaaatccaagaaggacgccgcccaggcgcaggcctga

SEQ ID NO: 506151 - DNA, 552 bp, Stenotrophomonas maltophilia
atggccaatgaccctctgattctcactatcgattcgcggcaggccgaacagtggtttgcccgtctcctggagcgcagcgtcaacctgtcgggcctgatggcccaggttggcgaggatctgactgaaagcacacaggcccgattcgataccggcattgggccggacggcgttgcctggcagccgctggccgatggatcgggccggaccccgctcaacgatacccgccgcacccgtgacggcatccacccgttgtcgggccctgattgggtggagatccgcgccgattccaagcaggcgcgctggcaccaggaaggcaccaggccatacgagatccgagcaaagaacggaaaggcgctttactggcccggcatgcaggcgcgctcaggaaaggatggcaaggacggacccgcgttcgtggccaaggtgaatcatcctgggttgccggcccgtcccttcatgggcttgagcgccgaggatgagcagagcatcgaacgcctggccgtcgcgtggttggaactggatgccgaccccgctggatcgccccccgcctaa

SEQ ID NO: 506152 - DNA, 1254 bp, Stenotrophomonas maltophilia
atgccctggctattgccggtgcagcgggcatgctcgatgccctggacgaaagccgtggctgagatccggggcaacttcgggagcatgcccgaagcggagcgatactttcgcgggaaggtgaaccttccgacgcgacggtgggatgacctgatgcacgggcagcacgcgcgggcgtttgtagttgccggcgccacccgcgatgcgctgttgaccgatctgcgcgaagcggtggatgcagccattacgcagggcgaaacgctggaggatttccgcgctcgcttccaggacatcgtccagcgcaacggatggcatggttggaccggcgaaggcagcccaggcgggcaagcctggcgcacggcgaccatctaccacaccaacctgcgaacggcataccaggccggccgctgggagacgctcaagaacttcccgttcctgcgttacaagcacaacaccgtgcgcaacccgcgcgagcagcacaaggcgtgggatggcgtcatcctgccgtccgaccatccctggtgggacacccactacacgcccaacggctggggctgtcgctgcacggtgctgggcgtatcggccgccaagatgaaggccatgggctggaaggtcagcgagccgccagcgcccatccagggcgacccgccaccggagtgggcctatcacgtcggccacgccgccagcggccgccacatcgccgacagcacgcttgccaaggatgcagcggccaagtggtcggaggtgccagggcgaagcgccgaggactacgggcgtcccgctcaggttccgctcgacgctgcgattgcgcggccgctgcccacgggtattcgtgatcctcaacaggtgcgccaggcctggcaggaactgtacggccgcaccgccacgctcaccgatccatccggggccgaggtgtttcttaccgaccaggttattgagcactggctggagaagccgtcacggctggatggtcgggagaagtatctgccgctgctggccgagacgatccagagcccgtttgaggtgtgggccaacttcgcccgcaacgaggctggccagctcggcctgcgccgctactacgtcaagcggatcgaagtcaccgaatccgatggcggcgcgcagaagcgctacgccctgacaatgattgccgaggtgctgccaggcggggtgtggggatcgttcgacttcttccgtggcagcaaggctcagccgcgttcgcgacaggggttgctggtatggggacggccggaggaatga

SEQ ID NO: 506153 - DNA, 1584 bp, Stenotrophomonas maltophilia
atggtgacccaaacccgcattctcggccccgatggccaaccctttaccgtggccgatctggcacagcctcagaccgcgcacgcgaattcgctgcagcgcgagtttcagggacatccctcgcgcggcctcacgcccagccgtctggcctcgattctcctggcggccgaacaaggcgatttgatccgccaatacgagctgtttgaagacatcgaggagcgcgacgcccacgttttctcggagatgtccaagcgccgccgtgccgtctccggattgccgttcaagatcagcgcaccgcccaaccccagtgcagccgagaagaacgccgccgagcagctgcaggcgatggtgctggctatcgatgacttcgatggggtggtgttcgataccaccgacgccatcggcaagggtttcgccaacctcgaaatcgaatgggatcgcagcgcccaggagtggctgccgaagtccatcacccatcggccgcagtcctggttccagttgcatcgcggctatcgtcaggagatccgactgcgcaacggtactggcgaaggcgaagccttgcgcccgttcggttggattacccacacccacaaggccaagagcggctatctggagcgcgctgcgctattccgcgtgctggtgtggccgtacctgttcaagaactacgcggtcggcgacctggcggagttcctggaggtctacggcatcccgatgcgaatcggcaagtatccgccaggcgcatccgaccgcgagaaaatgtcactgctgcgcgcgttgatggaaatcggccacaacgcggccggcatcatccccgaggggatgagcatggagttccccgccgttgctgagggtgatccccaagcttttgagctgatgatgaactggtgcgagcgcagccagagcaaggccatcctgggcggcacgctgaccagccaggccgatggcaagaccagcaccaatgcgctgggtacggtgcacaacgaagtgcgcaaggaaatcaaggatgccgatgctgggcagctggccagcacgctgtcgcgtgacctgatctacccactggcagtgctcaacgggttggtgcgacccggtgattaccgccgttgcccgcgcctggtgttcgacctggccgagatcaaggacatcggcacctacgccacggcactgcccccactggtcgccatgggtatgaagatcccatgtgcttgggcgcataccgagctgggaatccccgaggccggcgaagatgagccgatgctggggcaggctcccgcagtaacggatcgagtggcgttgagcagtgcccggactgcggcggctgccgctcagcccgtctcggtgtcgtcgcgtgaccgcgaggaccagttggcgcgactggtggccaccgagctcgaccccgtggtggccgaatgggtgggctcgattcgcgagctggtggatcgcgcccaggatctggagcagatccgcgatggcctgctggccctgctgcccaacctgagcgtggcgcagttcggccaggccatgcagcatgccctggctattgccggtgcagcgggcatgctcgatgccctggacgaaagccgtggctga

SEQ ID NO: 506154 - DNA, 1569 bp, Stenotrophomonas maltophilia
atgactgagaacgcccgccagcttgttccgaacaccgccgccgccgacgtgcctgcggcactgatgccgtatcagcagcgctggatcgctgacaccgccaacctcaaggttatggagaagggacgccgtaccggcatcacctgggcggaggctgccgacgacgtgctgattgccgccagtgcaaagggcgcgggcggtcagaacgtgtactacctcggcaccgacaaggaaatgaccgaggaatacatccaggcctgcgccatgtgggccaaggccttcaactatgcggccgggctggtggaggaaggcttttgggatgaggaggaggatgacaagcacatcaagaccttcaccattcgttttccggagagtggattcaagatcacggcactggccagtcggccgcgcaagttgcgtggtcgccagggcgtgctggtgggcgacgaagccgcattcgtcgatgatctgcaggagctgctcaaggccgcagttgcgttcctggtgtggggcggaaaagttcgcctcatctccacccatgacggccatgacaacgcattcaatgagctgatcgaggagatccgcgcgggtggtcgtcgcggatcgatccaccgtgtgcctttccgtgaggccgtcgaagaaggcctttaccggcgtgtctgcatgcgcctgggcaagacctggtcacaggaagccgaggaggagtttatcgccgaggtgtacggcacctatggcgatgccgccgccgaggagctggactgcatcccgtcgcagggcagtggcgcatggctcagtgccgcgttgatcgaggcgcgcatgaacgatgccccggtgttgcgctacacctgtccgaagggctttgaacaggaaagcgaccacgtccgatgggaggccgtgcagacgtggttggatgacgaagtcggaccgcacctggacaagctggaccctgatctacagagcgtctatggccaggacttcggccggacaggtgacttgtcggtgatggtgccggcgcagatcacccagacgctcaagcgcaaagcgcctttcatcctggagctgcggaacatgccgcaccgccagcaggaacaagtagccaagttcgttatccaccgcttgcctcggttcgtgaaagccgcagtggatgcgcgcggcaatggccacgcactcgcagagtttctcgcccaggagttcggctatagccgtgtcgagttggtcatggccaccgagggctggtatcgagagcacatgccgccagtcaagaaggcatttgaggacgacaccatttccctgccgcgtgacaaggacacgatggcggaccttcgcgtggtgcgagtcatcaagggcgtggccagggtgcccgagcggaccactgggcgcgatggtggccagcgccatggcgactcggctatcgcagttgccctcatgtactacgccagccgccatccaggcgcagagatggactggacccctgtgccgcgctcagtgcgcggctttgattccgtggccaaccacgggcacgagcgtccagaggacgacgaattcaatctgccggaaccgcaagcatggtga

SEQ ID NO: 506155 - DNA, 579 bp, Stenotrophomonas maltophilia
atgagcaccacaccacgccgtcgcggcaagtccagcattcagcgcctgcccgcagaacaacgcacgttcatcgagaagctgttgcgagaagatcgcctcacgctggccgagatgatcgaggcactgcaacagcagttcccaggacagcctgcggccgacatctcgcgctccgccctgcatcgctatggtgcggggtttgctgagctgacggctcgcatgcgggagattgaggcagtgtcccaggctgtggtgggcgagctgggcgaaggtgtgggcgagaaggccggcgcgctcctcggccaagccatcaccaccctggccaccaatgcggcgctgcgggctcacgaaaaggaggacgtgagcattgatgagatccgcaaactggcccgcgctgccaaggacgcgatggacacccagcgcgtgagcgtcaatgtgcggcgcgccatcatgcaggaagcgcgcgatgccatggtgcgcgagcaggccgccaagctggagaaggtcgtcaagagcggcggcctgtccgccgctgccgccgccgacattcgctctcagatcctgggaatccgcaccgaatga

SEQ ID NO: 506156 - DNA, 306 bp, Stenotrophomonas maltophilia
atgtcccacaagacctttgcggagcgccaccgcgaggaccgccgcctggtgttgctgcggctgctctcggaacagaacggctaccgcgccaacagttcggtactgcatgccggcctcaacgtcctggccgtggccgccagccgcgatgacgtgctgaccgacctgacctggctgagcgagcaatcgctggtgcgcgttgatgagcccgtgccgggcgtgatggttgctgagctgagcgctcgcggtcacgacgtttcgcgtggcatggccagtgtgcccggtgtcagccgccccagcccccggtaa

SEQ ID NO: 506157 - DNA, 279 bp, Stenotrophomonas maltophilia
atgatcgccgccgccgcatgggatgcgtccatcgtcattgggctgttggtcctggttgctggactggtcgcgctcaacctcctggtcggcgtggtgctttggtggcgccactccggcctggctgatcgagtcacgaaactggaggttcagcacgcacaccacctgacccacaaggaaaccggcgaactgtttgaccgaattgcccggttggagggcatggcagccgccaccaatcgcatgctcgaaaccgtccaagaacacctcatggagaaagactga

SEQ ID NO: 506158 - DNA, 210 bp, Stenotrophomonas maltophilia
gtgaaggcggaacccacgatcaaggtcgctgacctgacccgcttgcggaacgagtacgagcagatggttcgcgatgccgaaagcggcagcaagcaaccaggcaacgcagggctcatcaaccgagggcgcgtggccacgcttcgggccgtggcggtggacctgactgaaatcattcaaggcaagaggcacccgagtggcagacgacgctga

SEQ ID NO: 506159 - DNA, 255 bp, Stenotrophomonas maltophilia
atgccggcagcgctcaaggccgagtgcccggagctgccagcagccaaggacgatctctgggaaaccctgctggggaatcacgaccaggtcgcggcgctgtaccacgactgccgcaaccagcagcgaaggctgacgcaggcagtgtcggactgggaagcgaccgcctggggctggtactgcacagcggtcacccagctgcagctgcccgtggaggcctgtgcccgtgaaggcggaacccacgatcaaggtcgctga

SEQ ID NO: 506160 - DNA, 690 bp, Stenotrophomonas maltophilia
atgacccggcacggccgccccgatcccggcctgcgcttggccatcgcggtctgcctggtgcttgtggccgtcgtaacgtgggccatctgcggcaaggccgaagccgcacccacccgcgccaccgtcaagattgcccccgcatctgccttgtatcgacatcgcgtggaacaggcagcatcccgcgcttggggcgtcaacgcgagctcggcgcgcctggctgcacagctgcaccaagagtccgcatttcgggccgatgcgcgctcacctgtgggcgcccagggaatcgcccagttcatgccgtccacggcgcgctggatcgccacgatctatccgaccgacctggccggattcgatccttggaacccgcagcaggccatcctggctgccgccctgtatgaccgttggctattcgaccgggtcgccgagtacagccaggggcgtatgagcagctgcagccggtgggcctttactttccgcgcctacaacggcggtgaaaaggcgctcaaccgcgagcgggcactggcgtacaccagcggtgcggatgcaaacgactggcgggctgtcgagccgtaccgcgcccgagcagagtgggcgcacagagagaacaccggctatccgaaacgcatcctgctgacactggagccggcatatctcgcagccggttggacgggggtggccacatgcccctga

SEQ ID NO: 506161 - DNA, 321 bp, Stenotrophomonas maltophilia
atggaacccaacaatcgccgtacccgagccatcgcctacctcggctcgctgttcgaccgcatcggctacatctggctgtggctggcgctgagcctgctcctgctggccagcgtggccatcctcaatcccatcctggtggcgtcctacgcctgggcggccgccaagctgacgatggcggcggtaatcggccacggcgttgacctgaccctgttccgtggcgctgatcccaggtatctcgatggcatcgagaagtcgatggcgcaaacccgccgcgtgacgctgatcgctgcggccatgattgcggcagggttgatcggatga

SEQ ID NO: 506162 - DNA, 348 bp, Stenotrophomonas maltophilia
atgagtcggccggtgctgggcaaagttgagtggaccgtggtggcagtgattgcggcggtggtgctggggtgcctcgtttggtccgtatggggttactcaagttggaagatcgcctctgccaagagtgcgatcatggagaaggcgggcgtaaccgtcgcggcattcactgatgtccgcctcggggtggacaagcgcacggtctgtgggcgggtgtcgttcggcccagatggctatcgccgattcatggtcgatcctgtcgctgcggtcattgatccgggccaggacgatggaagtgtggatgccatactctggcgcgactacccaagggcgtgtgcgcgacacgattag

SEQ ID NO: 506163 - DNA, 417 bp, Stenotrophomonas maltophilia
atgatcgagcaacgcgattgggtcggaacaccggacgccgatgcagccgccgagctgatcgcggccgcaccgctggatctgaccgaaaagcaatgggagggcaccctggtcgcgttggtcgcggtcatggaggctgcattccgtcgtgccggcctggatgaagaacaggccaccaggctggcccttgccggcatgctggcgcaggccgagtatgctggcggccgtcagatttacatcccgcagggcatgcgcctgcgaaatgctctgcgggatgcggaaatctaccgcaaggccaagcgcggtaacattgcgcagctggtgaccgagtatggccttactgaggttcgggtctacgagatcattcgtcagcaacgccagctgcaccttgccagagtgcagcgtaattttgagttctag

SEQ ID NO: 506164 - DNA, 591 bp, Stenotrophomonas maltophilia
atgagagccacctgtcccgattgtggctgccagggccacatcaatgcgttcctcctggaagaggaaggcaagcgcctggcggttaccgtggcggcaatgccgcccgagcttggccgagcggtgctggcctacctgggcctgttcaaaccggccaaacagggcctgcgaatgggtcgcgcggtgaagctcgcccaggaagtggctgacctggtcgcctctggcacggtctgcaaggacgaacgcggcggcatccgccgcccggcgcaggttcgtcactgggtggcaggcatcgatcagatgctggtggctcggccgaacctgaccctcccgctggagtcgcacggctacctgcgcgcggttgtgttcggcctggccgaccaggccgatgcagccgctgagcgccaacgagaagaacacgcccgcgcaggccggcacctgggcaccacggcacgcgtcaatccaggtgctggcgaatccaggctggatcagcgcttggcctggatcagccagatggtgtcgcttggccagatgtccgacgacgatgccgagcgcgagcgcgcagaggcgcgcgagaagtacggagagaattga

SEQ ID NO: 506165 - DNA, 264 bp, Stenotrophomonas maltophilia
atgagcaataccgtaagcgacgccgagcgggaacaagagcggcagaaggccaccggcgaagccctgcgcgtaaccttcgagcgcatcaagactctcccgccgccgcaggtgattcagtatctgaccagcattgtgctggtcggaatcgaactgctgcgcgccaatggacgagaggatgcgtatgtacgggagtttctggagggagccctgggcagcttggatgccccgcccatcttcacgttgaaggatcggcggacgcactga

SEQ ID NO: 506166 - DNA, 417 bp, Stenotrophomonas maltophilia
atgaacaccaaagcagacccgctgcgccgcgcacagatcgccaagatcaaggttgcacagaaggagctcggcatggatgaggcgggctatcgcgcgctcttgcagcgtgtgacaggcaagcagtcatccgcgcagatgtcgccgagcgagcgcgacgcggtgctggctgagctgacccgccttggctggaaggccaagccgggcaagcctcacccggaccgcccgaaaaacaccgaccaggttccgatgctgcgaaaggtggaggcgctcctggccagcgccaaacgtccttggagctacgcgcacgcaatgtcagtgcgcatgtttcaggtggaccgcctggagtttctcaagcatgaccagctgcacagcctgatcgctgcgctacagatcgactgcaaccggagggaaggatga

SEQ ID NO: 506167 - DNA, 450 bp, Stenotrophomonas maltophilia
atggccaagcctgacatcaagcaccccagccgggaggagtggctgcggttcgatcaggctctggcgacgccctgggcaggcggcgtcgaggccctggccgatggccatcgactgcagatcgtggtcaggcagatcaaaccgctcaagttcgcagtcgtggtctatgtggatggcgagattcgccaggagttcgttgaggcgggaaatgccattggagccaagttctaccggccgcgctccatctgcgcctatagcccaaaggagcgagcaaagatggaaaaggactggggcaagcgctggaccaaggcatcggtcaagaaagcgacggtagtggtcaatgatccaggctggggatcgtcggccgcactgcgccggcatctgacgagaacctgcactgaaatcgacctggtgcgcattgggtggcccgagaaggccggggcggcggaatga

SEQ ID NO: 506168 - DNA, 294 bp, Stenotrophomonas maltophilia
gtgaccgcccgcgttccttccgagctcgccgagctggcattggccgtggctgacgcgaccgtgcgcgccgacatcgagttgtttgcccgccatcaggacatcgaaggactcgccttctatgacctgagctgcgccgatgatccgcgctctccagaggccatggggtacatccagcgggcggccgcttacatcgaggcccgtggtgacgtgttcccctggcgcctggtgcgccatatcagcgccccgagccttgtttgcttccgcgacaaggagcccgctcatggccaagcctga

SEQ ID NO: 506169 - DNA, 621 bp, Stenotrophomonas maltophilia
atgcaagcaaatgcgattcccgaaggctaccgacaggatgccaagggccacctggtcccggagcaacacatcaaggaaatcgacaagctgcgcgatgaactggtgcaggagctcgctgatcgcgctcaggatctgcacaagcgcatggcagaattcaagcgccatgcattcgacagcattgccgcgttcgtgtccctgagcgcagagcagtaccgcgtccacatcggcggcaagaaaggcaacgtcacgctggtggcctacgatggccgatacaaggtaatccgccagttccaggaaacgatcaagtttgacgaacggctgctggctgccaagtcgctcatcgaccaatgtctggccgaatggaccgagggcgctcgctccgagattcgcaccatcatcaacgatgcgttccgtgtcgatcagcagggcaatatccgcaccgggcaggtgctgcagctgaaacgcctggagattgccgatacgcgctggaaagaagccatgcgcgccattggtgaagccgtccaggtcatgggcagcaagtcctacgttcgcgtgtaccagcgggacaaggatggcgcctatcagcccatcaccctggacctgtcggcggtgcccctgtga

SEQ ID NO: 506170 - DNA, 453 bp, Stenotrophomonas maltophilia
atgaagaagcatgttccgttccccaagtcgctgcagcagctgctgcagcgaatcctggaggcaatcgaccaggcaggtggctgcatgacgcgcgtccagctggccaccaccctgcacgatgcgcgccccctggacatcgacgacaccctggaggagctgatcgaccgcaaccaggtcgaacgccaggggagcgatccccagatgctctggctggtccgtggcaccgctggcacccagctcccagtcctgccggagcccgcgccccccgagtgcgagcgcccgccgcacacagtgcgagcgctggacgtggaacgacgcctggaagccattgcccaggatgtcctggacgccgcactggatgcccgcgctgccgggctgccagcgccactggtgcgactgctgatgcagtgcgatggcgccctcgccgaagcccgcaaccacctcaccccctga

SEQ ID NO: 506171 - DNA, 291 bp, Stenotrophomonas maltophilia
gtgaacaccaccgacaagaatcgcaccgccatccagcaccagctgaccgccgcgctggaggccatcaatgccctggccgacaagggcctcacggctcgctccgtctcgatcacgggggcccggcccgtcatcgtgattgaccggccgcgtggggattcgctggtcggtgcccagcacatccgcgagcgcaagggccagctggtgacccgcacgaagatggcgaccccattccacggttgccaggtggaatgggacgtgtgccagtccacgcccaccagtgggctgcactga

SEQ ID NO: 506172 - DNA, 234 bp, Stenotrophomonas maltophilia
gtgaccacgtccatttcccacctcacggccgacctggtgtcggctgtgggcggcatcgccaggctggcatcaccggatgcactgccggcgcgctgcctgatcgtccagcgctgctatgcgctggccaccccattcgattcgctgaccatcggccagttgctgcagtggagcaacgaagccatcgcaagcgccgcacaaacggcccaaatcgacaaccaggagcgtctcccgtga

SEQ ID NO: 506173 - DNA, 1227 bp, Stenotrophomonas maltophilia
atgcaaagcaaccccgccaccggctaccagcgtcggcaggcctacctccagcgcatccgcaatgaaggttcgcacccacttcgccaccaggcacaagcccgtttcagatccggcgtagacacccggaccaacccgaaagcgacagcagcaggcggtggcatcgcccgccgcagatcgaagctcgccgccctcaaacgcccgccccttccacccgttgccccgctgcacccgcaccaatccaaggaacccagcacgatgaatctggccgtcaccccgatcacccccgaagaactgtcaccggagcagctcgccgatctgcgcgaccgtctccgtatcaccctggaggaagacaagaacctgagccaggcccgtttggcaaaggaatcggacatcagcagcgccacgctgtcgcagttcttgggcggcacctacgcgggcaaccagcaaaacgtggctcgcaagctggccggttggctcaatgtccgcgatgagcgcatcagcaacggcaagctgcccgaaggcccggagttcgtcaccacgccgaccagcgagaagctacgcgccgtcctgcagtacgcccacatggctggcgacattgcagtgatcgctggcggcgcgggcctgggcaagaccgtcacgaataagcgctatgcagccgtgagcccgaacgtctggcacgtcgaactgaccccggccacgggtggcgtcctcacctgcctgcaggagattgccgcagtcatgggcctgcgcgacctggtcaactccgccgcgtacatccagcgggccatcttccagaaggtgcgcaataccagcggcctgctgatcttggatgaagcacagcacctgaccgtgcaggcgctggatatggttcgcgccatcaacgatcagaccagcatcggccttgtgctgtgtggcaatgatcgtgtcatcacgcagatgacgggcggcaatcgcgctccgttccttgaccgcctgtatagccgggttggtaagcgcctggtcattcacaaggtggtcaagggtgacgccgacgcgatcattgacgcctggaacatcgccgatgccggttgccgcgatcagatccggcagatcgccgaccttccgggcgcacttcgcgtcctgaacaaggtgctgcgccttgcctcgatctactcccaagccaagaacgagcggatctgctgcgagtccatccgctacgcagccaaagaactgggcgtgatggtgtga

SEQ ID NO: 506174 - DNA, 1992 bp, Stenotrophomonas maltophilia
atggcggacggcaccatgtccccccgttcgatgctggacctggccaccttggccagcagcctgggcaagaccaagcgagccgtcgagatccgcgccaagcgcgagggctgggcgtttgtggaaaaggccactcgcggtggccgtcgccgactgtatgccgttgatgcgctaccgccagacgtacaggccgcagccgtcatcgcgggtcaggtcagcgagacgccgcagcgggccgtggcggttcgccaggccaacgtcgcttccatcgcgtccgcgtggaagcgctacgaggccgtcccgcagcatttgaaggacgaagccgcacgccgcctgcgcgccctgcaggccgttgaggcgctgcaggctgccggccagcctctgatggcagcgcgtcagatcgtcgccagccagatgcagcgcgaccagggaggcggcgtcagcgtggccagcctgggccgctgggccgcgctggtggccaaggccgagaagcagcaccgcctggctctgttggtgccggcatacgccgcgaccaaggccaaggccgagattcacgccgaggcctgggatctgttcaaggccgactatctacgggtcgaggccccgagtgcgcaaagctgctatgaccggctgcagcgcatcgccgccaccaaggactggcccgcacttccgtgcgccaagacgttcatccgccgtgttgaggcagaattgccgcgcgccgtcctggtgatggcccgcgaaggccaggagcgattcaatcagacgttcccggcccaggagcgcgaccgcagcgtgttccacgcgctggaggcagtgaacagcgacggccacaagttcgacgtgttcgcacgttggccggacggcacggttgcacgccccatcatggtaggcgtccaggatctctacagcggcaaactgctgggctaccgcatcgccgaaaccgagtcgtcggacctcgcgcgcttcgcgttccgtgacgtgatcgagcgctatggcattcccggcaaggtctggctggacaacggtcgcggcttcgcatccaagatgctgaccggcggcacggcgaatcgattccgattcaaggtgaaagaagacgatccgaccggtctcctgacggcaatgggctgcgagatccactgggcgacgccgtatcacggacaggccaagcccatcgagcgcgcctggcgtgacctgtgcgaccgcgttgccaagcacccggcattcgctggcgcctacacgggtaacaagcccgacgcaaagcccgagaactacggcagcaaggccattccgctggatgagttcgtgcgtgtcctgaatgaggaaatcgcggcccacaacgctcgcgaaggccggcgcacgcgcaccgctgcaggccggagctttgattccgcgtttgagtccagctatgcgcagtccacgatccgcaaggcatcgcctgagcagttgcgtgaaatgctcctgtccacggacgtggtcacctgcgaccgccgtgatagcagcgttcgcctgtccggcaatcggtactggagcgacgccatcgccccgtttgcaggtcagaaggtgatgcttcgctttgatcccgagcatctgcaccaggctgtgcatgcgtacaccttggccaacgtctacatcggccagctggactgcattgccgccgttggcttcgccgataccggcgccgcccgcgaacacgccagggcaaagaagcaataccgccaggcaacacgtaagcagctggacgcggagcgacgaatggaagcggccagcgtggccaaccagctgccgtcgccgatgcccgaatcgctgccgcctgcaggcgtgatcgcgccgctgttcggtcgtcggcagccgccgcgcgcacaggaagtcgagcccgccgaacggctgcgcaccggcaccgacgacaacgaaagcgcgttcgtgtcgctgatggaccgcatgcaggcccagcagcgccggaacagcctgtggaccacgcctgacggggaggcctga

SEQ ID NO: 506175 - DNA, 444 bp, Stenotrophomonas maltophilia
atgaatcgtcagcccagccagccctatgacttcttcttgaccccacgcccctcggcgccggtcaacggcaccatggattaccgcaagtccgtcagcatgctggtcggccagatgctggaggccgcgcacgctgcaggcctggaccggcacgaagtagccgcacgcgccagtcgcctgactggccagaacgtatccaaggcgatgctcgacggctacaccgcgcccagccgcgaaactttcaacattccgctgtgggttgcccccgtgctggaagtgatctgcggcgggacgttgctcgctgagtggcaggcccaggtcatcggtggccagctgctgctgggcgccgaaaccctggacgttgaaatcggccgcgcgcaccgtgagcgcgtcgtcgcaagccagcgcctgcgccagctgcaccgtctgagcgtgagggcatcctaa

SEQ ID NO: 506176 - DNA, 423 bp, Stenotrophomonas maltophilia
atggccaccctcatcggggtgtcaaagaacacctatgggcgctttgagcgcggcctgagagagattggggcggagtgcttggctgcgctggtgcagcagggctggaacgccaattggctgctgacaggctcgggcgatgaacgcctggattccggcacgattccgcgtcaaaacaatgacttgcggcagtctcaggtagtgagccagtcgtctgtgaagatcgccgcgcaactgctccaggaggcgcttgatgacgcggatgctgtactggccccggcccagtatggcgaggcgcttgttctgctggctcagctgctggaaaagggactgccggaagcggacgtaaggccgtttgcccggcagacagtcgggatgatcgttacaggggcaaaggatgcaggaacagcggcaactggtaggtag

SEQ ID NO: 506177 - DNA, 327 bp, Stenotrophomonas maltophilia
atgcaggaacagcggcaactggtaggtagattgagggcgattctgcgggacgcggtccctcggaatcattgggagacaaggctttcggaccctgtgctggcaatgccggtgcatctgcgtcgcgctcgcgcgcgctatgagatccaggatctcgccgcccgctatggctggcagcgggaagttgaacgggatctgttccgcctcggcgttccttccctcaaatatctgagccaggagcagctcgaccaggtgctggtcaggctcaagggcctggaggactgtctgcagaacatctgcgatccacccgatggaccgccagctcgttga

SEQ ID NO: 506178 - DNA, 3636 bp, Stenotrophomonas maltophilia
atgctcgaacgatctgtggttctcctaaaggaatctggggaaaaattgcgaaaaatagtcgcaaagatagcgggtcggcgtggccgctcgacacaaactgccgaactcccgaccaagttcatcgatcttgcgccgaccagcaaggcagacgaggcaggcgtctactcggaagcgctcgtttacgcgacagataatccccgcgtgtcaaacattgcgctgaccgggccatatggatcgggcaagagtagtattataaagtcgttcgtgcagaggtatcggcgcccggttctgcagatatctcttgcagcctttctcgcggagtctgctccctctaaagggaaagttagcaagcaggagatagagcgaagcatcctgcagcagatgctctacggagcagatgcgaaccagctcccgctctcacgcttcaaaaggatagaatcgcccgggaggtggtcgatcctgttttctctttttgcaatcattggcgcaactgcgtcttggaacatcttccaaaagcgcgatgaaattatcgatggaacatattttcttccggtttccatcggcaacttgccgcattacatttggtttgctatcggtgcttctttcctgtgggtaactatatatcacgcctacaaggcgagcttcggtttctcgctcaagagtatttcactgaaagatatcgagatcactcctactgcagttagtcaggactcaatactaaataggcatctcgatgagattgtttatttctttcaatccacgaattatgatctcgtaattattgaggatcttgatcggttcgacgatcctgatatctttgtaaccctgcgtgagattaacagtctcgtaaacgcgaatgctggagtgaaacgacctatccgtttcctgtacgcactgcgagacgatatgtttataaacacagagcgaacgaagttcttcgagtttatcattcctgtcatacctattatcaattcatcaaattcgattgataaggttctggagcagggaaagcgcctctcactcgacagtcgctttgaccagcagtttcttcgcgaagtgtcgcgctatctaaatgatctcaggctcattcataacatatttaatgagtatgcgatttatgctgcgaacctggagcttgatgatgaaaatgttctagacgcgaacaagcttctggccgtcttgatctataagaatgtctttccaagagactttgagagtctgcatcgcgggaagggcaatctcgcaaagattcttgctcgccacgatgagttcatcgcccgcgccgaggtgaaaaatcggtcagaaatagatgaagtagaggccagtctagcttcggcagagagacaggttccagccgatctgcttgagctgcgtcggatctacgcaatggcgttggtcgaacggctgcccccgttggcatctcgagtcggccggaacagccaaactatgattgagatcggcaatcttgtgagaagcgatgatttcgatcagatcatttccgccgagcaggtggtagtaacaatcagtaactattacggcgccagcaaccaaaacgtcgatatttccgggctgcaggctgaagtcgatagcctgcgggcgttcagtgatcgccagaaagagatccaacggcgcgcggcagagttcaaaagtcttgctgccaaaaagcttcagtcgctgcggatgagcggtgccggactgcgttcagcaaaattcaatgaaatcatcaggatcagcgcagaggacttggaagacattttcaacgatttcggcgatggtcacgagttggctcgttttcttattctggaagggcacatcgacgatacctactatcagtatacgtcgctgtttcacgcggggcggatgtctccgaatgacaataagtttttgatcaagatacgtggcttcattgtcccgccccccgacttcccgattgacaatgtcaaagaagtcattgccggaatgcggggcgaggatttccggcaaccctacgtcctgaatgtgaagatcgtagactgcctgctgagtaacgctacaacctatagggagcagttggccaagatgttcacttacatggcatcggacttcgacaattgtgaggcgttcttcgcaagctactatgtagctggcgcggagatccccaagttggtggacggccttcaggcaacctggccgggctatgttcccgctattctcgacgaacgcgatttttcccatatcggccaggttatcgcccatctttctgagcaggcactcgaggctttgccggtcacgtatcccaaggtttcgcagttcgtatcagataatctggctcgagttctcgctcttggaattgactttgatccgtctcggcttgcgctgctcgggattgaagttcaggacctgtcgagtgtggaaggctttcccggagtggcccggttcctcttcgaagagggcttttacacactctcgatcgaaaacctggagttcatttttcacgcagttttgggtgtcaatgatctcacccccctgcgcacccagaatttcaccacggtgactggcatgggtaatccccagctgatttcacggattgaggacggcttcgagctgtatctgaaagacgtgctcctcccgctgcagagcgatacacgcgaaagcgttgcggccatccttaaccttcttgggcgagaggatgtggattttgacgttataagtacaattcttgagaggcagtcagcgaccatccagtcattcgatgacgtgcccgtccgcttccagtcccttgtcttccaactgggtaggatcgaggccagctgggaaaactgccgtgccttcatgaacagtgatgcctttgatgcgggcattcttaccggtttcctagagacgaaagcagcgcttgacgctttgaccgcacagcccatcgcaggtgatgataagaccgcgaagcttcgccttttcttgatcagcaataatgcgttggaggacactacctaccgcgcatacgtcaagcagctccccaggaccttcaataaattcccggacgagctcgacgccagtaaatggagaattttgatcgaggaggcgcgtattagcttctccaatgacacggtatcggcgctcgcggaacagatcgatcttcagctgctatttgtgacgaagaatattgacaagtatcttatggaagtcgcggagttcgggcttgacgatgatttccgggagaggcttctcagcgagaatataggggacgcccaaaagttggcgactatccgggcgatggatctgacctcactaggtggcttgccggcgcgggccggcaaggtggggatgacccttgagcaaataggggcagataccgttatgctcaatgctgagggagcccgggccgctatcgtcaattcagagcccgtccgcatacagatctcgctgttcaacaggtacgagaagatcttgagttcggcagaggttcgggggatcctggcggaactcccgaggccatattcagagatcaacgtcgggtatcacaagcctacaattgagaataatgttcagaacgttgaattcgtcaattggcttagaaggaggaagatcatctcgtcctggagactgtccctattgggggatattcgcatcaatctattcaggtccagcggcaacgcgtag

SEQ ID NO: 506179 - DNA, 714 bp, Stenotrophomonas maltophilia
atgataaataatgtaaatttgatgaatgtcgagaatgaggaattgcgttcgaagtgcgcggatttatataagaatctcgatcaggttgccaaagttgcaattggaagcgcatttgcacagcgtcttttgccgtctatggagatcagtggttattttaggctgagtgataattttcctgatggctatacgactatcataggtgctgacgatctcagtatgtatatccagggcggagagtacgccgaaatggttcgaaggcagtgtgtggtaactatatgtgcctccatggaggccttcgtaagctcattgttcccgattatggacttgaaggagtctgatggtgaaaagtttggtgagtttgcaaaggaatttaatcttaatattcagaacggcaacaaggttctgagaaaaatttattatatataccggcatctcaagctcgcgcttgggtttgagacttcaaactgggaaaatgtgcagtgcccgcggatgctggacgaaatgtttacgattaggcacgttatagtacattttggaggggaggtgaggaagtcagctcacttcgaacggattggtaggatatttagaacggagaggggggctcttacattgcctccaaactcaattgatgacttcattcatcgtgtgacgataaatcttaatagccttataaagaggatggattcttacgtcgcttgttccgcgcggagttaa

SEQ ID NO: 506180 - DNA, 372 bp, Stenotrophomonas maltophilia
atgattctgaagaatatgctgcagcgactgagaacctgccgccagccaatcctctacgagctggtcaaaggccggcgtgcgctcaatgtctggagccagccgacggatgtaagtatccgcaatggtttggtagtcaacgccacgctgctttgcgatctgacggactacccgaaccctcaccctacgaagtggttcgggtttgtcggcttgatagccactgcggatgccagcaagaacttgaagaacgtcttcaatcttctgactcatcgccacggcctccctaagccgcctaacatcgaagttgacctgcacacagcggcattgccccacgcggcgcaataccgcttcgcgtgcgcgtcgaagtactattag

SEQ ID NO: 506181 - DNA, 243 bp, Stenotrophomonas maltophilia
atgatcagcaggaagtactggtttaccaggaaaaagtacggatggggttgggggatgccgtgcgcgtggcagggctggcttgtttacgcagtcgcattcggcctgctgctggcgggtccgtttctgttctctccatttcgcgagcccatcgcgtttcagctctacacgtgggccgtggtgttggtccttgtctttatctgctggatgaaaggcgctccgcccggttggaggtggggggagtag

SEQ ID NO: 506182 - DNA, 978 bp, Stenotrophomonas maltophilia
atggacggcaatgcattggatgcaaggccgcaggacgccaatgctctctacattgcgccgttggtgcaccagctcggcgccgcacctcaggatttgagcattatccattctgtacttctcgacaacaatgtcctgaccgacatgctggagaatcgacgtccgtccgatctccagtacctcagcaatcttttccgctccacgccgcttgaactcaatccggtcatggcattgatcgagaaacatcagaactttgctggtgccagccaatccgtctacgacctggctgagctgcttggcagaacgttcggctcttggaccgcaaaggccaacgctgcggatttcgagagaattctactgcagggaaagccagaaatggcgagaaacatcgaccttctctccggctacatccctgcgacaatccatctcttccatcaaggcggaagcgcagaactcaagctgcaacaactggcaggtctcattcaagccaatgaccttccttatcttcagatccctttctatcttgccgcactactttttctggtcaaagagcagccacagctctttcctcagaaggtcgtcagcaaagtcaccaaggacaccaaactgtgggccagtgtggaactgcagaagaaggccgcactgaatctagcactcgataccatgctgcctgcggttgccctcttccccgcaggcctgcgcaacagccttgtcgtaccctacatcgctacacgcgactatcttctccaagaactactgactcagatccggtgcggagtcatattgacgatgagcgatgggcgggccaacggcgcatggcaactcaatcccaatggccaccttcacgcctacctcggcaacgctatttcagcgtacatgcctcgccgcgcggcgcctggttctgaggaagagatgtcagtacggcgggcacgcctgcgcgccttctcagatagctatctcgacaagtgcgccaagctctaa

SEQ ID NO: 506183 - DNA, 444 bp, Stenotrophomonas maltophilia
atgctccacgcatttgcctactccagccacatgtcggctgggctttccgatgaaatcctccggcagatcgtctcctgctctgccacgttcaaccgtcgcgtggacgttaccggagcgctgctcgtcgacggtcagcggtttttccagtacgtcgaaggtcctcccgacggcctggaggcggtcaagcgccgcatccatgacagtcgctcgcatgctgccgtcgttccggttctggacatggccatcagcgcgcgtgctgttccctattgggccatgacccgcatcgacaccgggcagatcatggtgtccggcctggtcaatgcgcgatgggacgaattcggccatgccgttccgggcatggatcagctcgtcggcctgctgcgtccgcactttccgcgcatcggcccgctcagtgcgcaccatgcgcccgtcggatccagctga

SEQ ID NO: 506184 - DNA, 441 bp, Stenotrophomonas maltophilia
ttgtccgtgttcaagaatattctggttgtgtgtgtcggcaacatctgccgtagcccgtcggcggaagtgatgctgcgtgaggctgtgagcggcaagggcatcacagtgtcctcggccggcctgggggccctggttaaccacggtgtggatgctaccgcgcaggcgctgttgaccgagcatggcctggatggcagcagccatcgtgcgcggcagatcgaccggagcatcctcgcagcttcggatctggtactggtgatggagcgcaagcatgtccatcgcatcatcgaaatcgcgccggaggcgtcgggcaagaccttcctgctgggcaagtggcagtccgatcgcgagattcccgatccttatcgccagcaacgtgctgcattcgagcacgtttacactctgatggatgagggggtgaagagctgggtgcgttacctctga

SEQ ID NO: 506185 - DNA, 2190 bp, Stenotrophomonas maltophilia
atgatccagtcctgcctgcgcgcgcacccagtgcgccccgcccgttttgcactgagcgcgcttgcgttgtcgctgtcctgcgcactgcatgcccaggaggcaccgccccccactgccaacgaatggggtgggatcggtcttctgcagacacctaccgcgcgcatggcaagcgacggagacctgagcttcactgcgtcgtacaacgccccctacgcccgctacaacctgacacttcagccattcccgtggctggaggcctcattccgctacatcaacgtcaacaatttgctatacgggcctagcattgccggcgatcagcattacaaggacaagtcgatcgacttcaaactacgcctgtggcaggaatcacgcctgctcccgcagcttgcctttggtgtgcgcgatctgggcggcaccggattcttttccagcgaatacctggttgctaacaagaatttcggcccgatcgatgcctcgatcggacttgccaccgggtacatcggcaatcgcggcgatttctcgaacccactgggcgccatcgatgatcgtttcaaagaccggcgctccattgccaacagcgacatcacgcagtccggaaagttcggcctgagcaacatgttcaaggggccggtcggtatcttcggcggcatcacctaccagacgccgatggatgagctgttgctcaaagtggaatacgacggcaacgactaccggcgtgaaccgcgaaacaacaacctccgccagcgcacgccattcaacgtggggctggtctatgtgccgaaccgcaatgtcgaactgactgcagcctgggagcgcggcgacgcggcgatgttctcgctcaccctgcgtggcaatcccggcaacgcgccagctgcgccgaagccgttcgacccgccaccgcagcggctgttgcccgcgacaaccgccgccgatcagcgcgcatcaatcgccagcagcgacgcttctggcgccgctcctggcaccagtaccgactgggcagcaatcagcaccgaactgcagcgcaatgccgggttccgtgtcgaacgcatttcgcgccgcggcgacgaactctatgtcgacggttaccagacccgctacctgcatcctgccaagggccttggacgcgcgacgcgcattcttgccaacgcgaccggcgatgactacgactggttcaccctgcgcaccacccgcgtgggcatgccgatcgccgatctgtcaatcaaccgcgaagcgttcgcggggtacctggatggcaccgtcagcgaagacgtactgcggcggagcacggaactgcaggcgcccggcgcgctcgcgcgcgaaacgctgtacacgcccaagcgcaacccattcggcggcggcttcaacatcggctaccggcagaatcttggcggccctgatggcttcatcctgtaccagatcgcagccaattactcgggcagcctgttcctgcgcgacaacatctggctgaccggcaccgtcagtgctgatgtcaccaacaactaccacaagttcaagtacaacgccccaagccgcctgccacgcgtgcggacggacatccgccaatacctgaccacctccgacatcatgctgcccaatctgcaggccaacatcgccggacggctggcaccggacctgtatggcatcgcctacgcaggctacctggagtggatgtatgccggcgtcggcggcgaactgctgtatcgcccaagcggcgagcgctgggcggttggcgtgaatctcaaccgggtgcagcagcgcgactacgatcagcactggggcctccgcgactatagggtcaccaccggccacgccacgctctactatgccttcgacgcccgtgaacgcatcatcggctcgctgtcggtgggccagtacctggccggcgacaagggtgccactctggacctggcccgcgtattcgacaacggcgtgaccatgggcgcgtatgcgaccaagaccaatgtctcggcgcgtgacttcggtgaaggcagcttcgacaagggcatctacttcagtattccgctcgatggattcctgccacgctccacgcgcggccgtgccgccttcaattggaacccgctgatccgcgatggcggcgccatgctcggccgcaagtacggcctgtacggcatgacgggcgaccgcgatgaacgcttcttctatgacaatctgcgtaacgtcggggaatga

SEQ ID NO: 506186 - DNA, 753 bp, Stenotrophomonas maltophilia
atgacgttcagatttatcaacctggtagtgcttgccgcgctgttcgctgccactggcgtccaggccgcgcaggtacatatcgaaggtgccgttgaagcagcagggcagtacgagctgcgtaccggcgcccgtctggccgacggcctgctgctgacccgtcccaaggccgacgcctacctgctgggggcaagtctcgaacgcccgcaggccctgccggcccaggtgcggctgcgcgcggggctgcagtatggcgccgggcagctggcagagtctgccgacgcacaggtcgtgacgctcgcgcaggcattgcagacctggctggagacacatccggccaccggccggacgcccatctccgggcccgcgcgactgatccaggtccagcctgcgaacaacccggtgctggccacaggtgacaggctgcggtttccgctacggccccgcaccgtcactgtcatgggcgcagtggagcaggagtgcgagctgccacacggtccgcttcgcgatgcacgcgactatctgcgtgactgtcatcccagtccccttgccgaccgcaacgacatctacgtgatccagcccgacgggcgaatccagcagttgggcatcggcctgtggaaccgcgcagatccccaggctgtcgcgcccgggggtacggttttcgtgcccgtgcgcgcctccctgatcaagcgcatcgacccgctgttcaacagcgatttcgccgcgttcatcgccacccagcccgtcaacccgtga

SEQ ID NO: 506187 - DNA, 684 bp, Stenotrophomonas maltophilia
atggctcgcatggatgcggcctgccaccgccctgcacatcgcgcccatggcgcgctgttgctggtcgccgtcgccgccctgctgttcaccgggtgcaccaccggcagccgctccacactggataccttccggctgatcacccatcgcccggcacaggcgaccgcagaaggcgtggccagcaaccgcttcccgcagatgcaggtggaaactcccgacctcaccgcagtggctgttctgggctacgtcgatggaggccgccagcagtggttcgcgggttcacatgcggtgttcgaaatggacgcccacggcctgctgctgggtggcagcggcctcgggcagcaatggcacgcgcgtatcgatggaccctcgcccttcgatgacctgcgtacagtgaccacgcccgttgcggtgcagcgccggtatgactggattcccgcctaccaggtcgacgtagccgtgaccgggatcctgagaaggggcgaactggagcaggtggagatactgggttcgcgccggaccctgcagcggttcgacgagcagctgcaaggcggtggcatgagtggccgcaatgtctactgggccgatcctgccacaggcttcatctggaagagccgccagcatctggcgcccggtcgtgttgctgagctgacccagctcaaaccctatcgcccggccaaggactga

SEQ ID NO: 506188 - DNA, 1110 bp, Stenotrophomonas maltophilia
atgaataacatcacccctcgcctccttgccgctgcgttgaccgcactggcactgtccagctgtgcgcttgcgccgggacagcacctgcgccgcagcgacgttgccgtcgaccgcaagagcggcgatggtcagctggaaatcgtcagcatcacgccgaagctgatcgcccaggaaaacgccgcgcggacgcagaattcactgccagctgcgttgttcgattaccagcctgcaccgtacacggtcggggccggcgacattctctatgtcaccgtatgggatcaccccgaattgaccgtgccggccggtccccagcagcagggtgctctggcagggcgccttgtgcagagtgacggcacgatgttctacccatacatcggcaaggtcacagcctcgggaaagacgccgatgcagctccgtgaggaaatcagtacccgcttggccaagtacgtggaatcgccccaggtggacgtatccgtcctcacctatggcagccagcgggtctgggtgacaggggctgcccagcgatcctcgccgattgctctgggcacctcgccgctgacgctggcagatgctatcagccaatccggactggacaaccagcaggccgacttgtcgggcatccagctcagccgggaaggcatcacttacacgatcaacctggaaaccctggctcgcgagtttggcggccgccaattactcctcaaggatggcgactccatcttcgtgccctaccttgatcgcaaagagatcttcgtggtgggcgaagtgaatcagcccggcgcctacagcttccgaaccggtgatgtctcgctgaaccaggcactcggccgtgctcgcggcctgcttcaacagaccgcaaacggcaatgccgtgtatgtcatccgcggcagcacggacctgcaacaggagccctcgatggtctatcagctggaggcgcgctctccgaccgcttttgccgccggcagtcagttccatctgcagccgggcgacgtcgtatttgtcggcgcggccggcgtcagccgttggaaccgcttcgtgaatcagctgctgcccttcaccaatatcctgtacaacgcggcgcgtaccggaaccgaaatcaaggacaactga

SEQ ID NO: 506189 - DNA, 351 bp, Stenotrophomonas maltophilia
atgttcaagaagacgatcgcagttgtggcactggcggccctgtccgcctccccgatgatgagtttcgcgcaggaagcgcaggctacggccggcacggaggccactgcggcggaagttgccggagcggaggctgcaggcgtctcgaccgctgctgtcgtgggcaccaccgtaatcggcgtggccgccgcggccgttgcgtacagcatcggcggcgacagcaccagcggcagcaatgacggcggcggcggcactgatccgggcggcccgggtccgggcggccctggtacgggtggcaccggcggtacgggcggtacgggcggcaccggtggtacaggcggcaccggcggctga

SEQ ID NO: 506190 - DNA, 534 bp, Stenotrophomonas maltophilia
atgattgtagttgccgcaaccacgctagcgagcaagattgccttcatgggttggggtttcggcttgaagcatctggatttcaccggcgtctccgggcacgccgccatgtccagcaccctctatcccgtgaccttctggctgctggccagcggacgcagcctacagctgcgggcctgggccgtcgtgggcgcaggcctagcgctcgcgatcggctactctcgactgccattgcgagcccactccccatccgaaatcgtcatgggactcagcctcggcctggccgcgtcggcctgggtgctgcgtggcggacatacgctgggcaacacgctggtcgtgcgtggccgcgccgcgctgctggccgttgccgccgccgtgacctccccgatactgcttgcagacttgcacacccatgacctcgtgaaggccgcggcgaagacactgtccggccgcgcgcaagcgttcgagcgccacggcctacgcggccattcgttcccagtcagcggccatcatggcgatagcaatcacaaaccttga

SEQ ID NO: 506191 - DNA, 1041 bp, Stenotrophomonas maltophilia
atgagtgatgtcgttggtgtggtttttcatgaagtatcggaatgcggctacttcaagcatggttcgaagacacctcaatttggctcgttggcacacttgctagatgatctaaaaaagtggtcggctgggaaaaatctcgcaaacacgcagttgactgcaagcggattcggtaactctcttcctgtttatctggtaagcatagaagaggacgccggagcgcacttggttacaatgtggaacgaggtgccggcgaccgtcgataatcaggttgcgtcggtagctgcaagtgacgtggttgggtcagtcacacagcacatgaatggaatcaagcagggaacgattcccggcttcccaacttatttcctattcctgccgaatgtggatgcttttgcaacgcttcgcatcgatagcctcataactgcccaagcgccctttcaaaagtactgtgaagcttttctaagcatgcagtcgtcctttgccgttcagctgcctcctgcgccggcggtgccatttgcaccgccggcgacggtggcgtacggctatagagcgaatcctcgtgatcctattgacacgaagattcgtccaaaattcaggaccaaactatttactaagcctgcgatcactactcagataattaacaggtggcaagatatttgcgaagtccatcgcaacgcgcatttgacgtttaaaacagtcgacgagcgcgatttgtggcaaaaagcggttgatttcattgctatgaataaaacgcccgcgatgcccaacaaggctcacttgcggacgatcatgtctgcatcgctcactcaggcagaggttatggctctcgttcaggactggggccagcaggcccagacaaccgactgggacgactatgggtttaggtttaccaacgagagcaccgtaaattggctcagcaaagctcatgcccggggtgaggtcgttctgaatgggatcagagcggctgatatgaccgtgtccacaactgacctgctcagggctatcatgagccatcagtcatatctccgcgggttgctggtatga

SEQ ID NO: 506192 - DNA, 318 bp, Stenotrophomonas maltophilia
atgacccaggaacatatcagccacccggaagggttgccgaactgcgccgccggccaccgcgcgcgccacatccacgacaagcgctgcgcgtccgccggcggtggccacctggtcgagtgcgcctgcaggtcgaccagcaagcatgccgaccccgacgcggccattgcggaatggcgccggctcaaccgcccgccgcgtagcgcgcgggcgccagcccagccggccgtcgctgacaacgtcgtgcagttcaacctcagcctcgccgagcgggcgccggccaggaggcaggccgcgggaggcgccaatgggcgccgctga

SEQ ID NO: 506193 - DNA, 363 bp, Stenotrophomonas maltophilia
atggctgaccagacctacgccggcgcactgccggatgccgagctgcagatccttcgccacgccctgggggtcggcgagtacggctgggagcgcagctaccgcaatcacttcgtcaccggcccaggcggcgtcgaccaccagcactgcatggcgctggtcgagcgtggattcatggtccggcgcgcgggcaatgcgatcaccggcggcagcgacgtgttcaacgtcacgcaggccggccgtgccgcggtgcaggagcacaccccgcctccgccgaaactgaccaggtcgcagcagcgctaccagcagttcctgcgctacgacggtggcgtgacgttcggcgagtatctgcggggctggcgatga

SEQ ID NO: 506194 - DNA, 879 bp, Stenotrophomonas maltophilia
atgagcaacgacaacaagaccctggcggacgtgcagcctggtggcagggtgaggctgggggatcaggccgagcgggcgcggtttgaggtgtggtgtgcgtctcagcggtttccgttgggtacgagtcgaatgcctaccgacagcaacgagtatcgcagcctaaaaacccgcgaggcgtggcgagtatggcaagccgccctctccgcccagccctccccgggtggtcaggggcacgctgcggacctgagcgcccttgccgccggcattggcgaggtcgcgcaccgcctcagcacctacatgccgcacctgtcggaatgggcagatcgggcacgagactgcaagaaggctgctgaggttctgtcagccatcgccgcccgccagccgttgggggcggatgacgcgactgaccgggccttgggcgaagccatcgaacagcgcgaccgctgcgaagaagtagccgacgagctggccgatcacatcgcgcggatcactggcgtggacatcggcgaacacagcagcgccaactgcccttggcagaacgccatcgaggccgccgaagagtacaagcccgcgcaggccgtggacctgggtgcggagcgcatgttctacatccaggacacgcggcaattcgtcggcaattgccccatgtggtggggcccgaatggcagtggctatgtgaccaggctggatgaagctggacgctacaccgagcaggaagccatcaagcagaaccgcacccgcgacacggatatcccgtggccatgtgctgagatcgatgcgatcgcacgccgcacggtcgacggccagcacatgcgccctcgcgctgagcgtctggctgagctggcccttgtcgacagccaggcggtgggcaatggctga

SEQ ID NO: 506195 - DNA, 216 bp, Stenotrophomonas maltophilia
atgagcgccgccctcgccaaccattccaacgaacagcgcgcggcggctgccgcacgcgcagtcgcccacgccggccgccgctggggcctcctcccctaccaggtcgtcatcgcctccagcatcgccgccaatgccgtccttcggcacggccagagcgctgcgggagccgtcgctgccgtccgaaccgcagcgcgcgcgcacggaggagcagcctga

SEQ ID NO: 506196 - DNA, 363 bp, Stenotrophomonas maltophilia
atgagccgtgtcctggtcaatcaccgcaagcagttcaccgcgacccagctcagggcacctaacgagctgatggccgcgctgcgcaaggcggccgaagaaaaccggcgctccgtcaacgccgaaatgatttcgcgcctgatcagtactttcgaaggacttgccatgcctgcaaccgatgccggcgacggcaaagctcacttcaaaatccgtctcgatgattcgttgctggattcactgaagcagctggcaagcgagaacaaccgcagcgtcaccgcacagatcgaattcatcctcgcaaccttcgttgcagatcaggcgccggcctccgtgagcgaaagccccaccccggaggccagccgatga

SEQ ID NO: 506197 - DNA, 342 bp, Stenotrophomonas maltophilia
atgatggcaacacaaaccgacggtcatccaaagatggtgaccattcagcacgagcgcgcgccaggttaccgaactgaatacgtgaacggcgtcaccacagccgggccactgagtgacggactgtgtcgcgtaacgttcttccgtgatgcgttcccgccgattgcggaacgttttcgcgtttctgatgcagaccccacggcggtggacacatctaagcgggagcacttacaagtgcagatcattcgtgaagaccttattacactgctggtcaatgcgaatactgcccgcgagatggcgcgcgacctagccatgctcgctgattccatcgatgcggcgaagtga

SEQ ID NO: 506198 - DNA, 213 bp, Stenotrophomonas maltophilia
atggacaagatcaccgaattcgaagggcgactgcgcgaggttgagaagacggtcgtccgaatcgacgaacgcatcaagcacatgcctacgaccgctcagctctggaaagcacttgcgctcgcgggcggggcgactatcgcggcgatcttgggaggtggctggtgggctgtgcagcagtacttggctcccatactcgccaatatctctaaataa

SEQ ID NO: 506199 - DNA, 441 bp, Stenotrophomonas maltophilia
atggactggaaatcccacatcgaagggttgttgagcgccggcgccacggttgatcagttggccgccagaatgggggttaccccgaatgccgttcgcgagattagagcgggcaggacgcgctcaccgcgcgctgacgccgcgttccgtcttgccgcaatgaagcccggcgaactggggacttcggccagagaaattgggcttgaagtcgacagccgaatgagcaaacgcgccctgcgtgcgtggcttcgtattgcaagcgataggcacttggccaccttgctccagcttccgaacgaagaggtcgaggcatggcccgaagagggcgctctgccagccttgcctcagatccagcgcctgctcggtattgagccaaaggctgtcgctgagcccgcgaacgaggatccggacgccgaccgcattgggcccgtcgacaccgcctga

SEQ ID NO: 506200 - DNA, 531 bp, Stenotrophomonas maltophilia
atgacctgccgcacatccgctctcaactggctcgacgttctctacaactccgtgcgcaagacgccgggtggtgtcgtggacgcggccgctttcctggccgaccgccgcggcaaatccatgcatccggaaacgctgcgcgcgaagctgcgcgggctggagggtgagtctgtaacgatggagattgccgaactgctgaccgagtggatgcaggagaaggccggcggcagcgattacgccctggactggatgcaggcgctggccgggcagttcggcatggcggtggccaccgttccgccgccgccggagggcggctggtcggatgagattggcgccatccagacgaagctgctggagatcaccacgcgggtgggccggctgtcgggtacggcagtggaagccatcgccgaccgccacatcgacagcgacgaagccaaactgatggtggaagaggccaactcgctgatcacgatggcgcaccggctgatccgcaacgtgtcgcgcgctgcagcgaaggggagggcgcgtcgatga

SEQ ID NO: 506201 - DNA, 312 bp, Stenotrophomonas maltophilia
atgaaccatcccgcccgctccagcgatcccagcaccagccatgaagcagccagccgcgtggtgtccagtggcaaacagcgtgcccagcaggcgacgaccgaggcagcggtaaggcgctacccgggccagagcagtctgcacctcgccaccctgaccgggcttgatcggcacatgatcgcccgtcgcctgcccgagctggagagggagggccgcgtatggagaggtccgaaggcaccttgcgccagcggcgatggcagcgcgtgtacgtggtggccggttgccccgggcgaaaacctggacctggggctctga

SEQ ID NO: 506202 - DNA, 354 bp, Stenotrophomonas maltophilia
atgagcgagatcgaactgagggcgcggaaccttttggccagctgcctcaatgagtggggccactatcaggaggcaggtaacgtccgcgacggcgaggacctggagagctacgagttcgagctgcgggttatcgggcagcttcttcgcttcgggttcgatactggccacggccacgcaacccgcgcgccgcagtggcagccgatcgccgaggcgccccaggacggcacgcggctgatgctgtgggactcggagagcaagcggccggtgttcgggagctggcggccggacagtgcccatgaccatggcccgatcacgcactttgcagccgagccggccggcccggaggtgggctga

SEQ ID NO: 506203 - DNA, 429 bp, Stenotrophomonas maltophilia
atggaaaacgcattggtgaatgaggcgcgctggctggcggaggaggcgcacgtcacccaaacggacaaggctggccggccatacatcgagcatgtgcgtcgggtagcggctgctgtcgcaggtcatgacgccgcagaaatggtggcttggctccacgacgtgctggaggatcagccggcctttgcgacccaagtgctgctgttcccgcaggacgtggtggaagctgtgttcgatctgacgcgcggcgtgaacaagagcgaggcgttctactactggaacattcgacacaacccgttgtcgctcaaggtgaagctggcagatatcgccgacaacagcgacgagtcgcgattggctctgttggacccggagacagcggctcgcctgcggtcgaagtatgccaaggcccgcgctgcattgggggtgaagtga

SEQ ID NO: 506204 - DNA, 705 bp, Stenotrophomonas maltophilia
atgcaaatgaacaatgcccgcgaactgctgtccagccggactggcccaaaaaccatgtgctttgacgggtctgccggtggcccgtccacccaggagatcgtcgctgcgttggcgtacgttccgcatgggctggggcatgagctgctgcaggcactatggtggcccgagagcggccagcgtcgacgtgagcagttgcgccaggccgtcgttggcttggtcgcgccggagttcacccgccagatgcacgatcttgccgatgcccgcacggatttcgggatcgccaaggccagcatgggctggggcggtggcacggtgaccgatgtgcagcgacgtgagctgcggcgtgccgagcaggcgctggaagatgcacgggcggcggcgtggccgaacaacacgatggagcaacttggggtgctggccggggcagtgatcgaagagatggccggggcgtgcgagtgttcccgctgtggaggaaagaaggttcttcgggacccttcggttgcgggagtggtgaactgcgacagctgtggggggagtgggttcgatccgctcagcggccgaaagcgcgccgccgccatcggtgccgactggtccgcctacagccggttctggcgaccggtctatgagtggatgcttttcaacttccgtgcggccgaagcgcgcgctgcaaggcagctcagtaaggcgctcacgcgggccgcatag

SEQ ID NO: 506205 - DNA, 477 bp, Stenotrophomonas maltophilia
atgagccgtatcaccgttgtggtcatcggactcggcttgtggtccgccgccatgtttggtgccggctggaattggcgaggtaaccgggcggaggcgagtgaagcccatcagcgtggcaccgcagccttggccgtggccgaacaggtgaatcaggcccgagccgtcgaacaccgccaggcggacagcctcgcaaccatcggagcaaaacatgaagaagaccgcgctgtggccgagaccgtccctgctgctgttgtggctgacctgcgcgctggtcgtctccagctgcgcgacgacctcgccacctgcaataccgctcgcctgtccgaagccgtcgccggcgccatcgaacgtgaccaggcagcccaactacgagaagaggtcgcgggcgctcttgttcaaatcggacgagacgccgacgaccacgtccgggcctgccaggccgtgatcgcagctgaccgtcaaccggtgacgccatga

SEQ ID NO: 506206 - DNA, 291 bp, Stenotrophomonas maltophilia
atgacgaccgaaatcacggaaaccctcgatcgcctccacgcatgcgagtcagaacttcagatgcaccgcggctatctcaaggcagcggaatacgcgcttcgagtactcacgctgactcacccagcacccgaacggctctccggtacttggctgagtcttttgcccagcatcgcctctaagcacaggcaaagcgacggcgatctgttcgccgccgctttccagcagtcactcaccgtgctcaccgagcagatcggggagcatcgccaaggggatcaggcggccacagcgtaa

SEQ ID NO: 506207 - DNA, 174 bp, Stenotrophomonas maltophilia
atgatcgaaaagtttgaaatccacagtcgccaaatcgctgacgagttcctggcaagcctggtcgcgaacgaggcccggttggcagatgccagcttccacgccgctgacaagatccatgacccttccgtccgcgaatacttcttggaccgggcgcaacagatgctgcaagcctga

SEQ ID NO: 506208 - DNA, 381 bp, Stenotrophomonas maltophilia
ttgatcgcgctcgacagcgtggcagccattgatccagagcggatcatgcagattggcaactgcctggcacacggcggcctgcaggtcgccgagcaggacggcagggtcgttggctacctggtcatgcatcaccacttcttcggcgaggccttcgtcgagatgctgatggtatcgcgcgagcggcgcggccaaggcatcggcaccgcactgctgcggcacgcggttgcacggcgcggtcgcggcaagctgttcacctcgacccatgcctccaacatcggcatgcagcgactgctcgttgcgtcgggcttcatagacagcggcatcgtgcacggattggatgacggcgacccggagctgatctaccgcttcgctgaagactga

SEQ ID NO: 506209 - DNA, 1767 bp, Stenotrophomonas maltophilia
gtgcctctgacccgggccgagcaactcatcgatctactgctggcgcgccagcagccccgcgccgtcctcgagaagaccacgcgcctgccttatggctgggcgctgtggctgcgctcgctggggccgctgccgcggccgtaccacgcgcgcgacgtgatcgcggtattgctgccccgaccgttgccggggccacccggtcaatcgccgcagctgtcgccgtggcaggcgctgcgccgcttgttctggcaggactgggatgctgcgccgcgcgatcagcgctggatgcgttgcgtctcggccttggccagtgcgctgctgcatctgctgttcttcatgctgctgctgtgggtggcagtgatccgcacctcggcaccggaagaacaaggcgccgagggcgagcgcgtgcaggtggagttcgtcggtcgcgctacccaggaaggcggcggcgatcagccaggtgcggaagcggcggccgctgcaccgccgggccaggttgcagctggccagaacgcaggggccgcaacggcgcctgagccgcgtccggcgtccgcgtcggcagctgcgtccgcacccgctccggctgcagtggccagcgtgccgccgccgcccgccgaatccgagctggcgccggtcgcggcaccgccgccgtctccggtgcaggccaccgaagtggcgcaggccagtacggatttcgtggtgccacctgtcagcgtgccgcgcacggagatcagcatcgtgccgcgcgacacggtaccgacggtgcgcgagcgcagcgtgcagccggtgcaggcgccggcggccccggccgcactgcgtgcgccggagatcgcggtgcggacgccgcagctgcgtgacatcccggtgcaggagcgtgaaatcagtacggtcgatgcaccggcgatatcgcagccgctgcgcacggccgatgtacaggtccgtgtgccgcagcgcgatgtgcaggtgcgcgagcgtgaagtgcatgccgtggtcgatccgcaggtacggatggctgctgtggccgggcgcgagccgaccgtgcgagcgccggcaggccgtgacctgcaggtgcgcgagcgcgaagtcgcgtcggcacccgcggcggcgccttcaacgtccagcggcagcgcgccagcgacaacggccgcgcctgcggccagtggcagtgcgcgccaggccgaaagcagcacgccacggccgtccgcctccagcacggcaccggcccaggctggagcgcgcccggcccccgatccgggcaactgggccacgcccgccaagggcgatgactggggggcgtcgagccgcaaacaggacggcgccgacaagggcgcccgccaggccagcgccaccggcaagggcagtggcctgttcaacgccgatggcagcgtccgcgtgccgggccaggaaggcgatggacgtgccgagcgcggtgcgcccggtggtgccaacgatggctggagcaaggaacgcatcgcgcaatcgggcacctggttgaagcgaccgccttacgactacacgcccacgtcattcgacaaatactgggtcccgcaggaatcgctgctggccgagtgggtgcgcaagggaataaaggcaatggagattccgttgccgggtaccaatacgaagatttcctgcgtgatctcgatcctgcaggccggtggtggctgtggccttaccaatccgaacatgcaggaccagccggccgtggcgcggccaccgccggacattccgttcaagaaagaactgcaggaagataacgggagccggtag

SEQ ID NO: 506210 - DNA, 609 bp, Stenotrophomonas maltophilia
atgcgcgctgtcgctcccacgcttcgctgcgcgaaacacgggccccacttaccagcttccatacccccgccgcttcgcggccgccccctgactcagggggctctaccccagacgcgatccgatgctcgacatacaggcggggtcagatccgttttccgtgggagaacggatctgaccctggattggatttcgatatctgagagatttcatccacgcatggcgtggatctactggctgccagccaactgtcgaaggcggggcactgtgggtttgcggggtgtgagcggcatggatgccgcgcccaagcccccaagggtgagggcgctttgcttgcgaagcactgcttcgcaagcgcccgaacgcacagccgccagcggctgggccggaccgcggagcggggtttacggcgtgtcctgccaacccacaccgccccgccatcccacggatagcccgctgttgctgttgctgttgctgttgctgttgcttcggcctctgcaggtgccgggcgcagcccggccaaccaaccccttgatttcgggacaatcacccctaccccttggcgaggccgcacgcgctggcgcggcattgcacatggagccttaccgatga

SEQ ID NO: 506211 - DNA, 504 bp, Stenotrophomonas maltophilia
atgaaaattcatcacctcgtcagcgacggaaaccaagcggtcgccatcacgcaatcggcatcgagtggtggcggttacgcgcacccggtgaagctctccaccattcgcttcaacgtgcaagatgctgaagcggcgcttggcgagctcaacaggtctggccaccgttatgagaaggcgttcgaagtgatcgagcgttgggatgtcgatgctcgcaaccaggggccaaagtcaaagttcggtcgaacccttgccgccctgctggacgatgcgcgagatcacctgaagggagaggcgacctacgaagccaaagacttgggggagggcaccatgcgcgcactcaacgccatggcgaagcaagccaggctttcgcaggtccttcctgctgcaggtggtccgagcatgatcatcggtgggcaggtgtggaacccgtgccaagaggtgccgaaccaagctccagctccggcggccgctctggaagctccccgtcagcgcgtgcgtctgtga

SEQ ID NO: 506212 - DNA, 483 bp, Stenotrophomonas maltophilia
atgtcttacaacgctcaccacacccccggcggtcacatgcagtggggcttgttggcccccgccactgtgatccttgggggagcgggcttgctgtttcttgccggggcccaagagatcggccagaacgagggctacggctggcaggccggcctggcagccgctggtggggcagccgtgctgctcttgctggcgattctctacgtgttgaactggcgagcggcccgcgtgcgcgcggcaagggccagcgggctcccggtttcgccgcccaaaggtggctttggaaagggcgccctggtgggcttgctcgtcgtcgttgccctgcagctggccagcgttgctgtgggcctgctctacccggggttggaggagagcgagcgaaacttcttcacctccgtgcccccgatggctctgacggcgctcatgccggtggccctcatcgtcggtggcatcgcaggcaagctttggcgctccaccagcctgtaa

SEQ ID NO: 506213 - DNA, 345 bp, Stenotrophomonas maltophilia
atgttgaagttctacacccaagatccagcaggccttctccagaagttcaaggataagctcaaggccaaacaaggccaggacagcattcagacttggcagcaggtgggggataactttgggcacacttccgagcgctggaagaacaagctagagttcaaggtaaccatcaatgctgatgcttccgagcccaatttggctttcggaatggtagccatggccaagggcactaaagaagagcgtcaaatcatctacgcctactaccacggccacttgctgcagacgtttgtagaccacctgggcgaacacttctctgcggcccggtatgccgacacgcgccagaactga

SEQ ID NO: 506214 - DNA, 384 bp, Stenotrophomonas maltophilia
ttgagcacgaagaccctcaaaatcctgcgcacccgttcttttcacgcccaacaaggccgttgctactactgcagcggcccgatgtggctgtgctcgcccgacgagttgggcctgcgcccccgttcggccgcccctttccgatgcacggcagaacacctgctggcccgccaggacggtgggaaggacgtggagggcaatgtcgtggccgcgtgccacctgtgcaacctgcggcgccacaagcgccccactccggctccctcaccggaggtgtatcgcgaccgggtccaacggcgcgtggcccaaggaaagtggcacgtgccctgcccccgattggccatctccagccgcgcccaagcgattaccatggaaccgtcggtgcggtga

SEQ ID NO: 506215 - DNA, 1050 bp, Stenotrophomonas maltophilia
ttgcgcctagaggacctggagctcgccctggcgctggacggtcgcacccatcgggtcaacgtcgagaacgaggccacttaccgcgtcaacgccggcaccttctggaccgacatcacgttccatcctggacagggcctggaagtaagggccgacgggttgcccaacgcccaaggcgccgattcggttcaagcgttgaacgtcgcattgaaggagaagcgcctgcgcgaggaggtggcgttcctcaaggaccagcagggcacgattgacgcgtggctagaccacaaggcagaacaagagcggacctgcttcgcacagcgccgctggtttacccatgagcagcaggacgatgtcctggcggcccgccccacggttgacccggccgtcctccgatctcgcctgaagaagcccggcgtggcgatccggctgggaccggctgcccaggcgatcgagcgctcgctggccgcttgggaagccgaccaccgccctgcttgggccgcgctcaacgctgcccacgtggaacgcgagctggtggcctgcaaagacttgctggaccgggtggagagcaaaccgctcaccccggaacaggcaagggccgtggtgtgcttcgacaaccgcgtgcaggtggtggcctcggccggctcgggcaagacttccacgatggtggctaaggcggcctacgccatccaacgcgggttcgtggatcccaaacggatcgtcctgctggcgttcaacaaacaggccgccgaagagctcaaggagcgcgcgaccttggcatttgagcgcttgggcctggcggagttgaccgtggaggcgtccaccttccacgcgctgggcctgcgcctcatcggcaaggccaccggagaaaagcccgacattcccgattgggccaccgacggtcgcccgcgttccgccgccagtgggacctgttccgcttcgtctttggcaaagacctcccagcctttggtgagcgggagccagcggaggtgtgggacgcccagggcaaggcaagcgtccgcaccagatggggcatgtgacagtgatcatctgtga

SEQ ID NO: 506216 - DNA, 177 bp, Stenotrophomonas maltophilia
atgatgcgttcgtttcactacgcctaccagaaggctcgcgcttggcacagctccgtagcgacatcgatttgggccggagtccgctattcgtttacgggcgacaccggctatttcaagtcgcacggtggctggcgtctgtctcgcgtgcaccgggggcctgaatcggcggagcaatga

SEQ ID NO: 506217 - DNA, 519 bp, Stenotrophomonas maltophilia
ttggccctgaccaccctgaaatccctcaacgccgaaatcaaacagctcgaagcccagaagaagctggtggagaagcgcgacggcgaggtgcccaaagccctggcggtcctgcagaagtatgcgaaggtcctcagtccggcccagcggcggcaggtggccaagctcatcggggaaacgatcgacgccaagccggcgcgtgccgccaaggctgccacaggtcccctcaaggggcgcaagcttggcaaggtagcgccgaagtatcgcctcccaactggtgagacgtgggctggccggggtttggcccccaaggccttcaccgcatgggccaagtccgccgagggcaaggcgtgggctcaggccaacccgggcagcaagtttccgtcggctgatgggacggtgaagaaagctccggccaaggtggccaagaaggcgggcaagccggtgaagaaggccgcccagaaggccgtcaagaagcttgcgaagaaggccgtcgcgaagaaggcgagcaagaaggcctga

SEQ ID NO: 506218 - DNA, 258 bp, Stenotrophomonas maltophilia
atgaccaccttcaccgatccggtgtcgatggagattcgccaagcgatcgaggaaggcagcgatgttcgcttcctctacacgaaacaaggccaggcgccgcagtggcgcactgtgacgcccttggagttgacacagttgcaccgcgccagccatgcgtcccggtgcgtattggcctactgccatctgaggcaagccaagcgtcacttcctcctatcccgtatcgagcagatgagtcgcgtggcggctatgcgcccgtaa

SEQ ID NO: 506219 - DNA, 945 bp, Stenotrophomonas maltophilia
atgagtctttctaagcgaatgatggggttggacgacgaatcgccggaggttgattcggcggctttcagcgacctggacacctgcgaggtcgatgacgactggttgcgcgcagccgatcccgatcagcaatcggccgcgatgcggcactggctgatggcccgttactgcgatccggctgacgaaacgccccataactccgaagtgggctacatctacacccgcggtggtccctggcatccccgcgacgtgctcatggagcgcttcgaagggattgccgacttcgacacgatcgagcagctggtggccgacatcttcgccgagataggcgatgagttggcaccgacagcgctcaccgccgaggaagactgggatgttgaggtcgaaaccgccgacagccccatccaagatctccggaagcggtcgggcgacctgatgttggtgttgcagatggaagggcccgagcccggcaagtttcaggcaaggaacttggtttacgccgctctgatcaccgcactggaaactttcctgtgggaaacggctgtgtggtggctggccaacgaagctggcagcgtcgaccgtctggtggccgcacgggcatccttctcgagtgatcgccggttgaaagacatggtgggcggagaacagatggaaatggaagggcgacgacagcggatccacaacggcatgaaggacatggtctggcatcgctggcgcagcaactggccgttcctcgcggctctgctggacgtagagatgcctagccatgacacgtatggcttcactgcagccgcgtcgaaacgacatgacatcgttcatcggttcgggcagaacaaggatcgcaccgaggccgtctatgcgaccaccgccgaggtggaggccctggcggacgccgtgctggccttcgcagatgacttgaacgcccgtattgcggcgagagggctttga

SEQ ID NO: 506220 - DNA, 141 bp, Stenotrophomonas maltophilia
atgacgttggtcggagacgccgatgtgattgaaaacgaggctggtgaccacatcgatcccattaaccgctggatcaacattttgttgcgccggcacgggcgctacatggtggcattgaggaggggcaatgagtctttctaa

SEQ ID NO: 506221 - DNA, 375 bp, Stenotrophomonas maltophilia
atgcccaaactccaacgcttgagaaccgacgctttccacgcccagaagggccgctgctgctactgcagcctgccgatgtggaacgcttctcccgatgaactaaagccgttcggcctgcgcgccaaaacggccgccccgcttcgttgcaccgccgagcacctggtcgcccagcaagagggcggcaaggacgtggccggcaacatcgctgccgcctgctggctctgcaacatacgccggcacaaacgcaaatcgccgccctcccccgaggcttaccgcgcgttcgtgcagaaacgcttggcgaagggcaagtggcacccgccggtggtggccagactacgtgtcaaagcacctggaacgccactacccgacggatga

SEQ ID NO: 506222 - DNA, 315 bp, Stenotrophomonas maltophilia
gtgacgctgacgtccaagcctcccttgacggccgtgctgccgaaagtgtccctttcttcaaccttgcgccaggcattggccgcacgcgctagagcagccggggtgagcgagagcgaagccgtgcgccaatggctcacctgctacctggagttgcccgacctgctctctccgtgtccggctggcctttgggatgagcggttgccccccattcgggcatcccgcgacctggtcaaccaagtgcgggcaacggcgagacgtcaaggcgtgagcgtggcggagctcatccgtcgggtagtggcgttccaggtgctttga

SEQ ID NO: 506223 - DNA, 615 bp, Stenotrophomonas maltophilia
gtgattgatctctcgtgcctctctcggcaggacatcatcgcccacggcttttccttcgctgcgctgctggagacacccttggaagcgctgcgctggagcggttcgtgcctgtctgtgttgaagttacgcggacaggtgaccgagcaagccatgcggcgcttcgcgttgggccaggacttcgatggaattcagcaattgtgggagggcgccgctcattacgaacgtgcagcgggctaccgggtgagctttcgcctgcgcgaaggattcaccgaggcgttggcgatggcaaacgccgaacaacgggaccagttgcggcttttccacctgcgagccgtagggaacgcgttgttgtccctcgcgcttcaacgggaccaccaggtgctgtttgtcacgtccgatcaattggagggcgactggacgcatcactggctgttcgccaccgcctgcgcccccgatgggacctgggagcgcctgactgaggccttgcgcgttgggatcgcccagacggcctatggccgcgagatggaagccatgctggacagcgccaagttggagcgctcgctgggacgtgttttcccccaagcccccgtgggccgaccgaggcagaggctgtga

SEQ ID NO: 506224 - DNA, 543 bp, Stenotrophomonas maltophilia
atgaaaggttggggccgggtgtgggacatcctgagcgaggttggcaaattcaccttgtgggcattggtgggtttttgcgtgctcttcaccatcgccgtcctggcggtgaagctggaaaagaaggatgcggtggccaagagggcgcaggcgatcgaggcggcgatgcccatggctgccgagatcattgccgtggctgacgagggcgttcccaaagaatgctccgatggaacgtgggagaaagatgggctgacgtgcaggctgaacgaggcgcgtgtggcggcggccgacaattttaaggtgctctatcggatgaacgtgccgggcactgagaagatcgaggcttacaagctcttccagaggggagaaggcgaggtcaagcgttaccaatgggcggtttgcctgaaaggcgacaacaaggaattggtggagtgggaggccgactacgcgcttggcgcttatgagtcttcgaagagggtcctggaacttctttgcagccattccagccaataccctgaggcgtgcaagaaggaaggcctctggtga

SEQ ID NO: 506225 - DNA, 2106 bp, Stenotrophomonas maltophilia
atgaccatggaaaccaatccgaccaatcggcacaccgtgccatccgtatccatcacggccgctcgcaccggggagtcgaacaaggtcaacgcgctgggcatgcggcccatgcaggagcgagcctacgccaagcggggcgagcagtttctgctcatcaagtcgcctccggcatcgggtaagtcgcgagccctgatgttcattgcgttggacaagctggagaaccaagggctcaagcaggccctcatcgtggtgcccgaacgctcgatcgggggcagctttgccgacgaagagctaagcaagcacgggttctggagcgattgggtggttcggccacagtggaacttgtgcaacgcaccgggcgaagacaacgggaaggtcgccaagtccaagatcaaggccgttggcgagtttctgtccagcgatgatcgggtgctggtgtgcacgcatgcgaccttccgcttcgcggtggacgagttcggtatcgaggccttcgacaaccgtttgatcgccatcgacgagttccatcacgtcagcagcaacccggacaacaagctgggcagccagttgggtcagctcatcgcgcatggacaggtccacgtggtggcgatgaccggttcctacttccgtggagacaccgtggcggtgctctccccctcggacgaggcacgctttgaaacggtgacctacacctactacgagcagctcaacggctacacctacctcaagtccctggacatcggctatttcttctacaccggacgctacctggacgcgatcatgaaggtgctggatcctggcctgaagaccatcgtccacatccccaacgtcaatgcccgggagagcctcaaggacaagcaccgcgaggtcgaggaaatcatgtcccgcttaggcacctggaagggattggacccggccacggggttccatcaggtcgagctggccgacggacgcgtgcttaaggttgccgacctggtggacgacaccgacgctgcacagcgcaccaaggtcctgtcggcgctgaaggatccggcgcacaaggacaaccgagaccacgtcgacatcatcattgccttgggcatggccaaggaagggttcgactggatttggtgcgaacacgcgctgaccatcggctaccgcagcagtttgaccgaaatcgttcagatcatcggccgcgccacccgcgatgcgcccggcaaggagcgttcccgcttcaccaacctcatcgccgaacccgctgccgacgaggccgcggtcgtggacgccgtcaacgacaccctgaaggccatcgcggccagcttgctcatggagcaggtcctggccccgcggttcgagttcacgcccaagaacgcaggcaagatggacggctttgactacggcgaggacggctaccaagagggcggtcacaacgtgggcgttaatccgaccacgggccaagttcacgtggagattggggggctggccatgccgacctcgcccgaagcggcacgcatctgccgggaggatttgaacgaggtgatcaccaccttcattcaagacaagacggcggtggaacgtgggctgttcgacaaggaaaacaccctgcctgaagacctgacccaggttcagctcggcaagatcgtgcgtgaccgatacccggacctgaccgcggaagaccaggaggccatccgtcagcacgccatcgccgcgctcaacgtgacccaacaggccaagcagcggctggcagaagacgatgcccagggcgagcagggcaacacctcgctcatcgacggggtgcgaaagttcgtcaacgtgcgggatttgaacattgacctcatcgaccggatcaacccgttcgatgccgcctacgcggtgttggccaaggccatggatgagaaaattctccgtcaggtccaggccagcatttcagccaagcgtgtggccattccttacgacgaggccaaggcgttggccctgcgagcccgcgcgttcaaggcagaaaagcagcgagcccccgacatcaactcgccagacccatgggagcgcaaaatggccgaaggcgtggtggccttggccaagcacgtccagcaacgcaaggcggccgaggcccgaggcggcgatcatggctga

SEQ ID NO: 506226 - DNA, 2787 bp, Stenotrophomonas maltophilia
atgaacgcggtggagatcgaagaggccatctacgagctggcccaggctccctttgattctgcagagttccccttccagttcttggcggcgtttggcaacaacgaggtcaccctcaagcgcctgagaaaagtcgggtccggcgggacgaatctttccgacgttccaggggccattcttcaacgcaaccacatccacttggcagtgtgcgaacgaggaaaggtgcgtgagacgttcgaagcgttgaaggccagcgccaagaactcgacgtatcggatcaagctcgtccttgccaccgacggtgaatcccttgaggcggagtatctggccacaggggagcctttggcatgcccctatgccgagctggccgagcactttggctatttcctgcccttcgctggcatcaccaccgttcaggagatcaaggaaaacccgatcgatgtccgggcgacgggccgtctgaacaagctttacgtggagctgctgacccacaacccggattgggacaccgacgagcggcgatcggacatgaatcacttcatggcccgactgatcttctgcttcttcgccgaggacacggacattttccacggcgatagcttgttcacgcgcaccgtggaccggatgtcggctcctgacggatcgaacacggacgctgtgctcggaacgctgttcacggcgatgaacttgaaatccgatgatcgtccaagcgcgggccttcatggttgggcgctggcatttccctatgtcaatggcgggttgttctcaggcagcacagaagttccgcggttcacccgggctgcacgctcgtatctgctccggatcggtgaactgaactggcgccagatcaacccagacatctttgggtccatgattcaggcggtggccgacaaggaggagcgcggatcgttgggcatgcactacaccagcgtgccgaacattctgaaggtgctgaacccgctcttcttggatgacctaagatcacatctggaatccgcggaggacaacaagaccaagctgctcaacctgcgcaagcggatggcgcacatccgtgtgttcgatccggcgtgcgggtccggcaatttcctggttatcgcctacaaggaaatgcgcaagattgaggcggagatcaaccggcggcgtggcgaggaggaccggaagtccgagatcccgatcaacaatttccgtggcattgaactcaacgacttccccgccgagattgcccggctggcgctcatcattgccgagtttcagtgcgacgtgctttaccgcgggcagcagcaggcgttggctaccgtccttccgctcgacagcaagaactggatcacctgcggcaacgccttgcgcatcgattggctctccgtttgcccgccgacaggaaccgaggtcaacctccagggcgacgacttgttcactgctcccgccgatcagtccgaaatcgactttgaaaacgaggggggagagacctacatttgcggaaatcctccctacaaaggggggactgagcaggacgatcaacagaaggcggacatggaggcgctgttcgggaatgtcaccgacagcttcaagtccttggattacgtttcgggctggttctacaagtttgcccgctacgcccgtgccacccaggcttcttgtgctttcgtaagcacgagctcaatcactcaaggcgagcaggtcgcccgcctctggccactgttgcttgcagagggcttgcggatccgtttcgcctataccccattcaagtggcgaaacctggctgcgaagaatgcaggtgtgacagtcatcatcatcggcttgagcgaaagggacacgagcaaccccttgctcttccagtcggacgacaacgacactatcaccaagcgcgaggtggcgaacatcaatgcttacctcataccatttcgagacatctacgttcccgctctttccaaaccgttgtgccccattggtgaaatcatcaatggcagcaagccggcggacggcggtcatttgttgatgaaagcagatggcgcgagggctttggtccaggcagagccacagaccgcgcgttacgtgcgtcaattcctcggtgcaaacgacaccattcaaggcaacttgcgctattgcctttggatcacgcctgaagaggcggagcaggccatggccctggctcccatcaaggcccgcaccgatcaagtggtggagatgcgtaagaagagcggcaaggcgctcaccaaggcaggagccgctactccctatgctttccagcaagtgcgccagacgggcgaggagacggtcattttggttccgcggcattcttcggaaacccgcccttatttgcctgtgagcctgttcccacgtggggccatcgtggccgatggggcatttgccatgcttgatgcggagctgtggtcctttgccttgctcgcatccaagatgcatctggtgtgggtcgcagcggtctgtggtcgcatcaagacggactaccggtattccagcacgctgggttggaacactttccccgtgccggtattgacggagcagaacaggtccgacttagaggcctgcgcgaaagacatcttgctggcgcgggaggcgcgttaccccgccacgcttgcggacctctacgaaccagatgacatgccggacgacctccggcaggcccacgagcgcaacgacgaggtgctggagcggatctacatcggtcgccggttccgcaacgacacggagcgcctcgaaaaactgttcgatctttacaccaagttgacggccacaccggccaagcccaagaaggggggaagggcgaaatga

SEQ ID NO: 506227 - DNA, 501 bp, Stenotrophomonas maltophilia
atgtctctcctgctgccgcagcatgccgcccgcgtcctgctgctggcgtcattttccagcgccattgtgcttgcgcagcagacgcctgcgcaggcgttggccgagtgggaggtgcaagggtgcgcggatggcctggcgcgacctgatactgaatgccaggatttcctgcaggcaatgggccggaagcctccggaactgcagtatgtaggctgcagccaggatgacgtgtcctacatcaagccgatggaggcccactatcgtgtttcaggcgcgcaagcggcgcaggtcgaagcctatctgcacacggcattcggcctgcctgcattgcgctacgtctgttgtggctggagcaacggcgcaccctactactggcgcgaaggtccggatgcggtgaggtatcagatcggcatgggggtggaatcgctgccgtacgaacggggccaatggcatagcatcgaggcattcaacgtcaccgtcgaggtggtgcggcagcgtccctag

SEQ ID NO: 506228 - DNA, 1359 bp, Stenotrophomonas maltophilia
atgaatctggaaagaaccatctttgtacagataccaagctatcgagaccctcagctgttacccacgttgaaggacatgatagaaaatgctaagtcgccattcctgctgcgcgttgtcatctgctggcaacacggatccgaacaggacatccagtcgatcgaagcgaacggatttgaattgacccatacagcaaccgaagaaggcactacagtccatttcttacggatacatggtgcaaacatcgagttgatcgacattgattacattcactccaagggatgcggctgggccagaaacctggcccagcggcgctaccggggtgagcactacaaccttcagatcgactcgcaccaccgcttttccggtgaatgggacttcaagatgaagagcctactcgagcgtctgagggtgcactcaccaaggccacttctaacaggatacccccccagcttcgatcctgacacctatcctttggggaggcaggagtacaccgccgccatcatcttcgactcgttctcaccaaccggagtcgtcagatttcgatctgtccgtctccccgcgcccgttcatggtgagattgcattcaaggcgaagttcgtagccggcggattcatcttctcggatggggccttcacacaggaagtaatgagcgatcctgaccatttcttctgcacggaagaaatcgcaacatccatacgcgcgttcacgaagggatatgagttctatcatccatatgcgccgctgctgtggcatcagtacgacaaccatgcccgaaaggtgtgggacgaccagtcagaaccgccagcagccaactccgccacctccatgacacttgaagatcgttccagcgcggcgctacgaaagacactcgctatggtcggccttcctacgggatctgagatggaagactttggaatttttggactgggctcacagcgcacactgcgtcagtacgagcgacacaccgggatcaactttcgacttcgagcagttcacaagcaatcacttactgtgcaagaaccagtccgcttgtcagagaccattgaagagaatgaatggaagcggagtctcgtctacttccgctcaatgcgagtccacatttcctgcgcaacccgctgcccttcatttccggcctcggtgcttgtctcttcctactcgtcggatggcgtgaggcagtcaacccgcgagttgtccaagtccgaactgaaatctctttcaagagaaggccaagtccagtatatcgacacactcagggcaccgctggaccaactgccggtccgctatttggtacacgtgcgcagcgacgatgcgctgacggaccatcagcttttgatcttcgttgaagaggtccttctctga

SEQ ID NO: 506229 - DNA, 2865 bp, Stenotrophomonas maltophilia
atgaacgttcgtattcctgcagtgcggctcggcttgttgccggccggcattgcgcttgccttggcaccgtccttcgcttcggcgcaggacgcagctgccggcggcacgaccgacctggaccgcatttcggttaccggttcgcgcatccgccaggcgagcatggaaaccgcgcagccggtgatcgcgctgcagcgcgccgacattgaaaagcagggcttcaccagcgtcggcgacatcgtgcagaacctgtcggcaaccggttcgccggcgatcagccgcgccgatgccctgagctcgggcgaagaagtcggcggccagtacgttgatctgcgcggcctgggcccggagcgcaccctggtgctgctggacggcaagcgcatgggcgtcagcaccggtggctacaccgacctggcctcgatcccgacctcggtggtcgagcgcattgaagtgctcaccgacggcgcatcggccatctacggctccgacgccatcgccggcgtgatcaacatcatcacccgcaagaacttcgacggtctggaagccagcgtctacggcggccagtacagcaagggcgacggcgaaaagcaggtctacaacttcgtctacggccagaccggtgagcgtggttcgatcaccttcggcgccgagtacagcaaggaagatccggtctgggcgaaggatcgtgccttcagccgctacccgaacggccagttccacccgaacccgaccgacgcagacgccaacggttggtcgccggcatccaaccacggcgtgctgatcgacagcaatgacaactggtacacccgcgccaacaatggctcgggcaacaccatggccgatttccgcgagttcggcacggcggactacaccaatgccagccaggaaatgtggctgcagaacaagctgacccgtcgttcggtgttcgccaacggcaactacgacttcaccgacaacatccgcggcaccgcgaacgtgctgtacaccaagcgtacggccacccagcagattgccggctacccgtaccagtccgaggtctatgagaccccgctgtcggccaacagcatctacaacccgctgggcacggatgcgaatttcatccgtcgcacatccgaagtgccgcgccagaccgagtccgagcaggagaccttccgcttctcggccggcctggaaggttcgttcgagttcggcgacaagttctgggattgggacgtgggctacgtctacaaccagaacaagggtgtgaagaccggcaccggcaacctgttcaccccgaacgtgcagaatgcggtcggtccgtccttcatggacggcgacgttgcccgttgcggcaccccgggccatgtcatcgctggctgcaccccgtggaacccgctggcaccgtacggctcgaccggcaacggctcgctggccgatccggccctgcaggcttacctgtacctgccgagccacgatacctataccaacaccaccaaggcgtacagcgccaacatcggaggttcgctgttctcgctgccggccggtgagctggccatcgcggcgggctacgagcaccgcgaagaaagcggcgagtacaacccggatgcgctgctgcagtctggcctgagtaccgacctggccggcaagccgaccaagggcagctacaagctcgacgagttctacgttgaactgaatgtgccggtgctggccgacatgccgttcgccaaggagctgtcgctcgacatggccggccgctactcggactacaacaccttcggcgataccatcaacagcaagttcggcctgaagtggaagccgatcgacgacctgttggtgcgtgcaacctactcgaccggcttccgcgccccgagcatcgccgacatgtacggcggtacctcgcagacctttgacgcctacaccgatccgtgtgacagcagcttcggctcggccgcacgcaacccctcggtggcggcagcctgccaggcgcgtggcgttccggccaacttccgccagatcacttccggcggtgcacagtcgaccggcccgggcacccagtcctacagcgccttcgagtcgggttccaacccggaactgaagccggaaacctccaagacctggaccgccggcctggtgtacagcccgaacttcgtgcagggcctggacgtcagcctcgactggtggaagatccgcatcgacaacgtgatcgccgccgagtcggtaacctcgatcctcaaccagtgctatgtgctgggcgtggcgtcggcgtgtgagcgtttcgaccgcggcaccgaaggccgtaccgccaaccaggtggtcgacgttacccgtaccctgatcaacggtggttaccaggaaaccgcgggttacgatctgggcatcaagtaccgcctgccggagttctccttcggcaagttcgtcatcgactggaagaccacctacgtcgattacctggagtacaagcgcgacaacgaagccgagaccccggtcgagcagcacaccagctgggcgaccggagactggggcgcgaacttccgcgtccgctcgaacctcaacgtcgactggacctacggcaacctgggcgtgaactggggcgtgcgttactactcgagcatgaaggagccgtgctcctacgataccgagtgcaacctgcctgacttcagctcggcctacaccctggcgcagccgacccgcaaggtgggttcgaacaccttccacgacgtgcaggtgcgttacaacctgccgtgggaagccacggtctcgctgggcgccaacaacgtgttcaaccacgagggcccggtcatgtacagccagccgaactcgagcttctcgtactacggtggcttcgacatcggtcgtttctactacatgaagtacacccagcgcttctga

SEQ ID NO: 506230 - DNA, 807 bp, Stenotrophomonas maltophilia
atggaactgagcgttcgggggggatttgaacgatatacaagctggatgaaggacgctgacgcgggtccgacgggaacggagacagccccgcgtggaccgggctggagtgccaatgacgtcgagtacgactgtggcaacgcggtgacggaggcattggagcggcagccccccgtcaccttcgacgcggcagcccggcagtaccatcaggcgctgctggccttgcaggccgtcgctgagcctgttgatcgttattatcgtcgtgaagaattccgtcgtgacggcggcgcgggcatgcgccgccagcacgctgccctgatgcaggcttacgcgaggtactttgcagcgaacgaagtgctggatgctgccctgcatcagcacgaccttgcctaccgcgctgagttgctggcgaggatggagggatatcagggaaggtccacggactactacgcactacgtttcgtgggtgaaggccgtgatctggtgcgctcgctgcgggggccgacgccagacctggtagctgcacgcaaccaactgcagcagtatcagaccatgctccagcaagcgcagagcagtggcatcggcaaagatgtggcggcgtggcgcctgttcgagcattccgccgacaccttggtcagtgaagcctggcatcgtgtcgagcgattggaaaagggccagccgattgtcgagcaggatccggcggtgctgttgcctggtatgcggcccagggtgtatgcgtcccctggcgccctgtcgcgactgaacgatgcctatggtgacctggctgcggcaagcggccgccttccctga

SEQ ID NO: 506231 - DNA, 963 bp, Stenotrophomonas maltophilia
atgacaatgatatataagcacttatatatcatcaaggcgacggaggcgatcatgacggtttcgtggatgcttggcgcgttgctggcggccgcctgcccggcgcaggacgccgtgctgcaggcagcggccacggcgatagaggcgcagtacctggatgcggccgaaggcgcacgcattgccgaagccgtgcgcggctggtccacccagcagcgctatgtggacagctgctcggatccgaaggctttcagcgcacgcctgaaccaggacctggacacgttcgatggccacttccatgtagagcgcgtggacgcaacggccggccaggacgactggctgatggcatggcgcgcggatgcgcgcagcaatggcgctggcgtgcgcgaggtacgggtgctggagggcaacatcggttacctgcggctgagtacattctatccgctggatctggcccggccgaaactcgccgccgccctcgagctgctggccgacaccgatggcctggtgctggatctgcgccagaacggcggcggggatgacggcagtgccgacctgctggtgcgcacgctgttggacgcgaagatcgacgcggtgcagcagttggaccagcgcgggcggcgcacgctggtaccactgccgccggcaagcctgcccacatacctgaagccgctggtcgtgctgatcgatcgccgcaccgcgtcggctgccgagttcgtcgcctactcgctgcaggcgctgggccgtgcacgcattgtcggcacgcgcagcggcggcgctgcacacatggtcgatgatcctgtgctgctgccggatggctatcagatcagcattcccgatcggcagccgatcaatctacataccggagccaactgggaacgcaccggtgtcacgcccgacgcggcaggcggtgacgatccgctgttcgtcgcgcggcagctgctggccagatcggcctcgcgggaatga

SEQ ID NO: 506232 - DNA, 534 bp, Stenotrophomonas maltophilia
atggctggaagcgcccgctcaagaaggcctgaggcacgcattccgcacgccgacgagctcggcctgctgccgggcattgaacagcgcgctggcgaactgctcagggaccacgaagcctatcgggtgttcaccggccacggcctggacctggcgacactgcagtacggccttgagcgcgggcagttgtgggtggtggatgcggccggcggcggcattgccggctacgtgctggcgggagaattggcaggtgagttccatgtgctgcagatggatgtggatcctgcacacgggcggcaaggccatggccgcgcgttgttgcgccatgcgttggcacaggccagggccgacggctacgcgtcagcggtgctgacaacgttgatcgacgtaccgtggaatgcgcctttctatgccagcgaaggattcgttgaagtgccggaggcggagtgggatgccgggctgcagtcggtgatggccgaagaggctgcgctcgggtttccgatgcacctgcgggtggcgatgcggcgggtctggtag

SEQ ID NO: 506233 - DNA, 819 bp, Stenotrophomonas maltophilia
atgacgcatctgcaatctcctcagaccggggagctgatcgaaaccttcatatacagcaagtggccgcttgtactgatgtacgcattggcaggagttttttttctggcagctgcattgctgctcgtactgaagaatcacgtaccggtcgatggctacaggaccatccacatgggcgtagcacttgtgctggtgtgtggactggctgttctggggcagacggtatggcagggaacgctgcgcaaggcgcggtatgaagtctatgagcgcgggatcaccgaggttgtcggcaggaagcgcacctatatcgcgttcgctgagatacaggacctctacctgtttggtacaggcaagctgggagcggcgggggttcttaccgatgtcgcctaccgcctcgcaccaacgaccgccttccactgggcaaaccaacatcttgggcggcatctcgaattcatgcagctggtctgccagctgcacgtgcgggaacgcctcccggtgatgatcacggcattgagcttggactcagtggttaccttcaactacgtctccagcgcacaggtctggaaaaagcgaatcctggggaaataccttgacgtcacaacccagcccatcctgctgacccgcacccatatcgaggtgggtgggcgccgcattccagccgcagcgctggcccaggtcgatatcaaccagtggagcgagcgcatcacgatcaaggatgcatcaggtgccgtggcgctttccacgatagcgagtgggatcttcagtctggatctcttcctggaaacgttggcttggatccttcgtgatgaaaatcgcgcctga

SEQ ID NO: 506234 - DNA, 273 bp, Stenotrophomonas maltophilia
atgctcgacttagagcgaagcgacccgctgttgctctgcttttctttgatcttccgtggctggcgcacacggaaactgtcagaggccgggcggggtgggctgcgcaggggcgtgagccgcatggatgcggcgaccgagcttacatggacgtacttgcagcggcccctgcgcagtccatcccgcccggcccagcacggctgttgcttcaaccatacccccagccagccacgaggggctccgccgttggccgtatccgcgccgaaggcgcgataa

SEQ ID NO: 506235 - DNA, 354 bp, Stenotrophomonas maltophilia
atgctggaggaggccatcaagaagctttcgccggatgagcgaccgatgatccactccgaccagggctggcagtaccagcatgaaaactaccggcacatactggagaagcactctttgaaacaaagcatgtcccggcgtggcaactgcctggacaatgcagcgatggagagcttctttgggacgctgaagtcggagttcttttacctgaacagctttgacagcatcgagagtctggaggcggggctggtggaatacatccagtactacaaccaagagcgaataaaattgaaattgaagggcctgagcccggtacagtaccgggagcagacccaacaggcccaatcggccgcctga

SEQ ID NO: 506236 - DNA, 483 bp, Stenotrophomonas maltophilia
atgggacttgccgagcagttctcgaggcgtatcgaagaagaaatcgagaactgcaaggcgattgcccaacgaaccgacaacacgggagaaaactggctgtcactggcagccgctcaagggtccattgaagcccgactgatgtacgcccagaaccctcgcgccgccatcggcaatctcaccgaagtcctctctgatcccagcaggttgatcgactttcgccggaacgctgtggagtatctggacgaatctgtttcttcaggaaacctggattccatcgaagcgctcgcaaacatctatgacagaggaatagtcgccgagcgctcctacaccaggagcctcggctactggatggccctgcaccgcgtgcatccaagccagtactcggcggaatcgataagtcgcctgtccagcagcatgcaggcagagcagatcattcgtacgcaggaaatctcaagagaaatctaccaatcatgctgccaatga

SEQ ID NO: 506237 - DNA, 1581 bp, Stenotrophomonas maltophilia
atgccaaagccattgcttttggccagaccaagcggggtctatgcccgttttctcgtcccgaaagacttgcgagcattggttggctcgcgcttcctcgttcgtccgttgcacgctcccttcggagacgtggccaggctggtcgctgcccgcatgggcatggcactctctcaggcattccaagcattgagacaggggcaggcggtggacatcgacgaggtgttacgcagggtgcggcggaatggtgttcagcagctgatcttgaaagggatcacgttccccaacggcgcgggcgtgaccgaggtggagatcagaacgccggaagacatggcgttctggcgcgagaccctcgaaaagatggccagcgccgatccagtagaaagcatcggcctgcttcctgagcattttctgctcaagcagcaggaggcgcatgcgaagagggaggcgacaggtcgttcggttggactgtcactgtctaaggccatcgaaaaccacctgacggatttgaccaacgcgaagttgcagccaaagacggttctggagagccgtcacacgttgcgattgtttgctggcgtggtaggggaagatctgcccgtgtccgagctttcgcaaggtcacgtgcgcgagttcttcagcgcaattcgatggtggccttcgaatgcatccaagcggcctgcttaccgaggaatgccggtgctggaggtgatggccctggcaaaggccaacgatgagcccgagccggccgcctggaccatcaaaaagcaccgtcagcgtctgtcggtgttctttatctccttggtcgaggccaagcgagtggaggtcaatccattggcaggcgttcgagcggtggcgaccccggacgaagaagacaggggatctcccttcaccgacagcgagttgggcgccatttttggaagcgcgtttgttccctgggcgtcgaagtatccgcatcggtggtttggtccgatgctcgggctctacagcggtgcacgggtcaacgaagtagctcagttgcaagtggatgacatcgcaacggtcgatggcgttcccggattctacgtccgggtggtggccaggggccaacggatcaagggcaagcactcgcgccgttttattcccttggcgcaacccgtgctggaggccgggttcctggactacgtggaggaggccaaggccgcaggccatgtgcagttgttccccaatctaccgaacagcaccggcctgggatttggcaggcagctgtcacgccagttttccacctacatcaagcggcaaggcgtcgaggaaaaggggcagggctttcacggttttcgccataccttggccgatcgcctcgacgccgcgggtgcgtcgccagcggccatcggcgcggtcaccggccatgctgcggggcaaacggttttggagaagcactacattcaccgctccaccctgccggaccgcgtggcgacgttgggcaggttctcgcctccggttgtgttgcccggctatcaaccggggcagtttgacttggcgttgcgctcggccgagcagaagctgcgggaagttggtcggcgtggaggaaagaaaaaggcccccaggtga

SEQ ID NO: 506238 - DNA, 735 bp, Stenotrophomonas maltophilia
atgttcaattccttgacaggtgagcgcatgaaaaacttcgcaatcgtggccatgcttgcctgcgcactttccgcttgcgcggataagtccccccccgcagcggacgttcaaacgaccgaacagaaagcccagcgggacgaccatacacccaaaagcgagaccccacgccccacgcaatcctccaacgccggcgcaaacgcagccgagcgctctgctgaagttcagcagaggctgtgccctgcggtggatccgtcctgtgcgagcgccggcccgctgagcgctcgctctccggccgaggcccagtggttgattcagcatggctatccctccgaacaggaaaacgccaagttgcatgccgctagcctgcaatccctccaagagatggcagcgtctggcaacagaccggccgccgttgtctacgcggagagaattgccctggaggccgggaagttcacggaaggctccgtgcttctctatgagcaagccaagtcaggcaatttgttcgcttactatgggctttccaagatctactacgacgaccccagccatggctccttggtggacagcgccgcgtatctcaaggttgcctacctgctgggtgactcaagggcctcggaactgctggatcgtccaaaacttggcaccgctgaactgttgtcagcagacaagcgagcggcagggctgctagagacgttctcaggcggcgtggaacgctctcctcgcccgctggaataa

SEQ ID NO: 506239 - DNA, 930 bp, Stenotrophomonas maltophilia
atgaagaacaaaccgacgttaactcgcgaagacatctctagatcgcagaacctcaaacgccagatccgcgacatccttcgcatctcactgatcgtgggcgggtcattgctcgcagcccaatcaggcatggccgacaccaccaacgatcgaggaacgaccaaccttccccccgttgatgcgataccgcctccctacgttcccccctacactccccccatggatcctccttcggttcccggaattgggggctacgatccaggcgagggaggtggtggtgggggcagttcctcccccccctcggcagacacttggaaacagcgggtttgcgcagaacacattgccaggaagcccgcctcctgccctgcacgcatcccgttcccgtcgggggccagctacgcgaaagatcgcttgcctggcgcttcctggggggcaaagtctactgtcctgatggcgatttccttcagcgaaggccgaactcacgggtttggtcgaaccgtgccgcctgatccgaacgctcaggcttccatgaaggacgccctggaacgccaaacccagaattacgccaacctgacaaaggacttcaacagcgcaaccggggagtttcgctacgcggttatgcatgcatgcgaacagcagcttcaagcatcaagcgcgaccagggcgggcataaacatcaccattcctgagtcatactgtctcggcatccttaaggcgatagacgatgaggtgggggcaccaggcctcgtcgagaccttcgtagaatgggcacgtcgctacggcgtgcccgtggaggaatacatcaccccgcaaggggcaggtgcggttgagttggagaaatccctgaaagagaaatggaaatttgtttctgaagatgcccagtgctcaacatggtggacgcaactggaccaacagcaatgttcaattccttga

SEQ ID NO: 506240 - DNA, 1008 bp, Stenotrophomonas maltophilia
gtgacactgcactacattcctcctcccctgatccgatcagcgggcgaagcacagatctggggcacccacggcgtcgtggtctcgcaaccccaaccactgcgctccgaagcatttgagctgaggcaggcttacgagcccaagctcctggagccggaccttcacccgctcctgctgctttcgtcacgactgaatcgggttcactcccaagcttacaacggggacttcctgctgcccgtcagcgccgttgaaaaagcccacaaggcaatcgcgcccctgagcccagcggatctgcgcacaaccgacgccttgatcgcctcactgacgtccgcagcaggcctccaggcaccctcgcttcgatcagatcgcgcatgggtggcaggacgaggccccaaggaggcggtgctcgtgctgccaccggtcgcggtcgtcgatccactgctcgccaatctcctgaccaccctctcccagcaccaatccaactgcaatgagcacctcgacgaggcgctggcgcaccaactgctgacgatccacccattggccgatggaaacggacggatcacacgttccttgctgatcaagctcgccgctcgcaaacgctgtttgttcccgctctacatttgctggctgctgatgtttgacaagttggcaaccgttgcttcgtggaacgacgcctccctcaccggccagcacacacccaacccggcaaggatggagcggtggttggcagcggcgcgcgccctgacctccgcgtggcgagaggcgcgaacagaactcgatgtcagggccgttgacgccctgctgttcactggagccgtgaccgaagacgccgtgcgggctgtcagcgagcactgttccccaccgcttgcccggcgaattgcctcgacctacgccgcgtcctccctcccctccaaaagagacctcgaagaagccattcaaacatgcattggaacgtgcaagaagctcgcatcgcccgctttgaagcccccaaggactgatggtgattcatga

SEQ ID NO: 506241 - DNA, 1290 bp, Stenotrophomonas maltophilia
atgaataagacgcttgaagatatttccaacgcactagatgaagtcgccaaggccatcatcgaaggctggggtagtgacattacacttaaggagaactggggttaccaccaccctgcgttgacacgtcaagacctcgcggaaatggctgaactcctttccgataagataagaaagtatggcgccaatgaagttccaagttcggttgaagaatccgtcgccgatgcagccaagaaaataagattacttaagtcagacaccatctcgcatttttactccggcaacggatggcaggcaattccagcatatctaacaatgctttcgtggcttgaaacggcgctggagcctgtgctctcttggcaggaggctacggatccaagcctaatgcctccaaaaattgcgcgccgcgtgcgcgcaatgcaagcgcgtcttgatgaggtgacaccagaaatggagtcaattcagaaaaagatatcgctaatcaatgaagcgtcagacgcagccgacgccttgccgacagacctggaagaactccgcaaagcgcgcagtcagatcgaaaagctatcaacggaatcagccacaacgcaaggaaagatccagcagagatgggacgagatagagaagttgctactgacgatgagcgaaaaatctgttgaggcagataagttggtcaagcagacggaggaggcttatcgcgtcgcaacctcgattggacttgcaggggctttcgaccagcgatccaaatcaatggcttggtcgatgaggttctgggtagtcggcctgttggttgcgctcggcggcggcaccgcaattggtgcaagtcgggtaagggtattaaccgatgcgctgagctccagttcacccaactggggaattgtttggattcacataattctttctgtcgtcagtgttggagcgccactatggtttgcttggctcgcaacaaagcagatcggtcagcgtttccgaatcgcagaagattacggatacaaatcctccgttgcgaaggcttacgaaggatatcgcaaggaagcagctcgcatcgacgaggacttcgagaataggctgttcaattccgctctaactcgcttggaggaagcgcccttgcgattggttgaagatgtaacccatggaagcccatggcatgagctcatcaactctgatgcctttaaggcggcgctagacaaggttccagatctaggaacgacctttgcgaagatcaacctgaaagctggtagaagatcaaagaattcggctagcttgcctgagagggccgtagaagcagctgagtaa

SEQ ID NO: 506242 - DNA, 465 bp, Stenotrophomonas maltophilia
atgaactcctacgcaaacgtgggttgcgcatcggttcttctcgggggagccggcatcgtcttcatcggtggcggcttggagatgctccagaacggaagctcatttgggtggctggcggtcttgggaggcattggcacctggctggtgctggccttccccttctggatcacccatcgggccaaccgacgacgggcgtggatcaaccgccagcccttcccccattacgcagagcaacgcctcccacggggaggcttctggcggggcttcctttggacttgggcaggggtcatcgctgtccacatgctggtgttcctgagcagcggctttgccgaactgttacctcatccggaacggctgcgcgggttgatgtccctgtggggtttggcactcgtgccagcgcagctggtattgccaacgatgggcggtattggctacagcctcatacggcagacatcaatccgctaa

SEQ ID NO: 506243 - DNA, 387 bp, Stenotrophomonas maltophilia
atgaagaaccagaagggcttcacccttatcgaactgatgatcgttgttgcgatcattgcgatcttggccgccatcgcgctgccgcagtatcgcaactacaccgcacgcgccaagattacgcaggctatcggctcggtggccggtgaaaagattaaggttgctgagaatcacagctccgagcgtccgttgtgcagcgacgtggctaccaatgctaactgcgaagccggtactggtgccctggcagggagctcgaaggacgggaccgcaactgtgtccattgttccgaccattccggataacggcgttgacgagatcacctgggtctgcacggttactaagtctagtgtcgacgcctacaaggacaagccctgtgaagcgctgaactaa

SEQ ID NO: 506244 - DNA, 309 bp, Stenotrophomonas maltophilia
atgctgaatgccgtgatcatgaccgcgctggccgtcggctcgccaacctacgccgattgcctgtttggcaacatccaacccgggttgtccgaccctgcggtacaactgatacagcaggcatgtgctgcgaagcatccggagagctttgccgcagcgatggagctggaacgcaggttcagtgaacagcggcaggccgacttcgcggcggtccaggcgcaggcggcacgttctgcgaatgcggcagcgacggctgcacagcaagctgccgacgcggcggccgccgaagcgaaggcggtagggacgcagtaa

SEQ ID NO: 506245 - DNA, 1080 bp, Stenotrophomonas maltophilia
atgagccagcacgccagtccacgccgctttctgtcgctgcaagttctacgcggcgtcgcagcgctggccgtggtcgtgttccatcttcggggcgtcgagatcaaatatctgcctggtgaggggatcctcgacgggatcgggcgctacgcggacgccggcgtggatctgttcttcgtgttgtccggcttcgtcatgaccacccttaccgccggtcgcgagggaggaattgccgccgccggcaccttcctgacccggcgtgcgtggcgggtgctgccgccgtactggatattcactaccttggtggtggtgttgatggccctggtcccgacgatggtgaactcgtcttaccacgaccagagcatcctggcctcctatctgttgatcccgcaccagcaactgccagtgttgacggtagggtggactctggtgcacgaggcctacttctatctgatgttcgccgtggcgatcgcctttgtcccggctcgagccctgaccacgttcctgctcgggtgggccgctctgatcggcgccgcccatctgtttgcaccggcggccacttcgccagcccatgtgctggtcatcaatccgctcaccttcgaattcattgcgggtgcgctgctgggcctgcactggcgctaccttccgcgcagccttggctggcccttggcacttggcgggggagcactcgcggtggccgcagccagtcttctgcccaccgaaggcccgtcgatcatgccggtgtggacccgggtcatgctgtttggcacggccagcgcgctccttgtcgccggggcagtgctgatcgaagcgcgtgcatggcgagcgccaccgaacagcctgatcctgttgggcgatacgtcctatgccctgtacctgtcccatatcttcgtgatctcggtcgccggccgcctatggtcgatgctgctgcccacaggggcctggtggaatcacggcctcttcgtcgctgcgaccctgctggcatgctgcgtggtcggctatctggtgcatcgcgtggtcgagcggccgttgctgctgttgccgcagcggatggcacagcgcgggctcagcaggcctgcatag

SEQ ID NO: 506246 - DNA, 183 bp, Stenotrophomonas maltophilia
atgaagattatctactggcttggcatcgcgttcctgtggatgcttccattgaacgtcctgttgctgacggccggcaagctgatgtcgggtggcaggcttggagaagaagagctcgttggcttcggtgtggcagtgttcggtgtagcggcgggcacgattctctatcgccgtcgcccacggtag

SEQ ID NO: 506247 - DNA, 537 bp, Stenotrophomonas maltophilia
atggcgcttattgccctggatgaccctcgctgggccgcactacagcatgcctacggggctgcggatgacattccggagctgctggcgaatctgagtattccgaaagacgaaagatccgaagacgatccgattgaagacacctgggaggaactttggagcagcttgtgccatcaaggggacgtctacagcgcttcgtttgcggctgtgccgcatatcgtgaacgcacttctgcttcagccaaagccactcacatttgacttcgttggattgccaattagcatcgagatggagaggcgggaggcgggtatcgcgcttcctgatatcgctgaacccgagtactccgaggcgcttcaccggcttgcgaagttcgctggtagcgtcgtaatggagaagcacgatttcagcacgagtacgtgtctgctgacggcgctggcactggagcacggaaatgctgcggcagcgtgggcgctggcctttgtggtatccggtgaaaaggacgaaatggaagaagcgatggagcttttccggaatcggtga

SEQ ID NO: 506248 - DNA, 147 bp, Stenotrophomonas maltophilia
atggagggctattgggacgtagacctagagcagctgttctcaggtgcgctcaagttcctcctgcgtctctctggtgagccccaaccatctttccagcgctccagctctattgcatcgcttgcgaccgtaggcatggtgactatctga

SEQ ID NO: 506249 - DNA, 360 bp, Stenotrophomonas maltophilia
atgggctacaagtccgttaacggcgccgccaagatcaatccggagctggctgagccgatcaaaaatatgattgaggctgagccttcgttcagctatcgcaccgcctcagcgccgcttggcatggacgaaaactctgcgcatcgtatattccaagtcaagggccggcaggtgagcaagcatccattcggcgagcggccgcggattgaagcaaagatatcgcgcgccgaagggccggatcagtgctgggccgccggcctgcgcaggttcgggggcggcaaggatggctggctgagccaaaattcatcatgtcggatctctcgcagcagaacgggatgctggaatgagtcattcgaaggctga

SEQ ID NO: 506250 - DNA, 2856 bp, Stenotrophomonas maltophilia
atggatctcgagcaaggcgtaaccgcagtcagcaagattcgggacgttctgtccaatcaaccagccgctacgctggtgataattctgcttctgctttttattattatgcagacagcccttcagatcggtgaggccctggggaagttctttggggcagtgaagtcttgcctgattcatttcatcggcatggctcgtggaggcgctgagtatagggagaatctggggcgacgcagacaatttctcgcggtgctcagttctgatctggcatcaattggaaaggcggaggcgtggaatgatcaaaactttaccgatctagaagcggaagttcagatcgagggaggatactacgcatcgttgatcgacaggttcagaaggaggcgctcgcacagtgagcgcaaagaggaatctttaatcggagcaatcgatgggagcatcgaacgctgcttgcttctaacgggggacccgggagcaggtaaaagcgttgcacttagacatcttgcttcgcaaatggttgagcgtgcgaggaaatctagggctaaatatgttcccattccgctttatgtgaatttaagagagcttgatcgcgatggtgttgttgataaagatgctattaagcgattcgttattgacaacgttcggcgcggtgacgccgatacggcggactatatccagcaaaactgggatagttttaacagcaacggtgggtggttctttcttttcgattcattcgacgaaattcctgaggtaatccattcttctaatgaagatgtctcaattgagaagtatggacgggctattcaacatttcatggatggtctcggcgcttgtcgcggcgtactggcttcgcgggaattcaaaagtcccaaagccctcccgtggccaagaataaggattcttccgctgagtgagcgtttgcaggaggagttggttggaaatacttttctaaagaaaaatcagaaggcattggcgctcagtgccattacaacgtcttcgacatctacatatagaaatccactatttcttacacttctgtgccgattcattagagagaataattcctctccaaagaatgagcatgacttactttatcgccaggtagagtcgctagcatctcgtgactccgagtacgtccagagcagatgggggttgaggccgggcgagctattgagtgcggccactgatcttgcgcgcctatttgctttgtctcccgatatcggcctggcgcccaccatcgaagaaattgtcgcgagcgcggctcggcttgatctaatggaaggtcgaattgagagctcaattgaagcgctcacttacgtgaaaatagggcgcatggatgttgcctcaacaaacaggaacgagcgtcgtttcgcattttcccataggcgatatcatgaggcgatctttgctcgctatctttcgggaaatttaagtaaatttgatgttaatgacctgctggttaatgctcggtggcgtgagtatgttgtagcgatgttgcaggcgaatcccgctgaggataatgtttctattatagtatctgcggcgaagattcttgagaggcgagtatcagtaattaaattgagctccgataaagccgtgggcgagatatttaggtattacttgtgggatgatccttcgatcactcatatcctaaagatcatggttgatgttaagaaatacaatccgtctccgtgctgggacgttgccgaggaacaagtagatcgtttcttctccccgctatggagaaagggggatctgcatgatcggctgatgataataaagtatggtggtgcgggttcatctgcttcgcattcgagaagactggatttcgcaaggaactcgggaattgaatgcttgcaacaggcagctgtttcttcttgtcagttcgctacgtcacccagcgagcacctggctgactggatacgcaatcgggtctctacgagaattctattttcgagaaagaggcttgaaattctgaaatgggagtctttggctgctcagcttccggcctcatatgaaatggaggtctgtcttagaagggctaaatccttgaggaagttcattataggtgcgcaattctggatgttcccccttatgctcttgaggcgggttagattgttggaatccagactagttgattttgacagggtcgtcgagagacaggcgtcattcgtagtcgcatcaaatttgatgccgttttttatggttacgggtgcgttgctttcagcatatgaatctagcgtcccctctgttgtaattaattcgttgtttggactttcgcttactcttctgctgaattctatttttgtctatattgcagttagtaatatatctctacccaggagaattgcatggactgatgtcgtgagtacattccggagccggaaatttcagccggttgccgttgctgtgttttcgataattgccgcgattgtcgctgcagtacctggtgggattgctctgtttttagtcaataagtatgagctattcacggatgtggggcgatgggacattttcgtgctcggctctgctattggtatgctgttatttggtgcaactggttccatccttaactggaggtcgcagcgaaacatcacttcttcgacgctggcaatcttgcgcgcgaggaagtcactaaggtcggccttggtcgaggctaagggcttccgtcagatatttgagatgtgtaggttgtcagtatcagggggagaggtgcctggcgtggagttgaggagggccattgtgtatctgtctgcgcttattattcgcaacggtgacgaaaagaataatgcgggaaattcgatgcttacgagcgcggcatccgctctgctggaggattattcatcgcgagatactggctga

SEQ ID NO: 506251 - DNA, 552 bp, Stenotrophomonas maltophilia
atgccgcacacatccgccgcgtcactgctgttgcggggacgtgcccgccgtagggtgcgcgagctgctgctcatcatccttgcgatgatgctgcaggcggccgagcgcagccagcctcctgcgcgcatcgtgattcagacggacgatgtcacgcgtttcttccatgtgctggatgccagcgctggaaagccgagtgccgacgatctgcagcgcggctatctggatgctggcacagacgctctgcgcagcttcaccgacagccgtatcggctcgatggagcggctggccagggccatccaggacacgccggcattgtttgcgaaagcgagaacctgcgcgacagcattgccatcgatccgcatgcgcgtcgccgctgccgtcgatcagctgggcaccttgttgccgtctgcggcgctttccccggtcaccgtactggtgggccgcggcaacagtggtggcgtgaccgccgaagcaggcgtggtcattggactgcaagcgctgtgcgacgccgactggatgaggccgatgtcggcgaccgtttcgtgcacctga

SEQ ID NO: 506252 - DNA, 192 bp, Stenotrophomonas maltophilia
atgaagatggtgtccaaggtcgcgttcgcctttttttggggacgcacgtggtcgggtacgctgatgggtgagaatttcagtgaaggtatttcgagaatggcactgcagcaaggcggcatgggcctgatcctgaccacgctgattctgctgcgccccaatggcggccatgttcttccagggcaccttgggtag

SEQ ID NO: 506253 - DNA, 585 bp, Stenotrophomonas maltophilia
gtggagctgttgcgtcgccaataccctgagaccgaaggtttcttcacggcacacacccacgagccgttcttcgtcaaaagcttggagaacatccagggcgacgaacgcgatgtcatcttcatctctatcggctatggccgagattcgcgcggcggcgtgagcatgaacttcggaccggtcagcagcgaaggcggtgaacgacgtctcaacgtgctcatcagtcgcgccaaacaacgatgtgaggtcttttcgtccatcactgacgaagacatcgatctcagtcgaggcaagggcaagggcactgctgcactcaaactgttcttgcactatgcccgcacagggcgcctccatatcgccgacgaggctgtcgaacagcgcaagaggacgtttgagcaggaggttgcaaaagcgctcatcgctcgtggctacgaccttcacatgcatgtgggggtggccggcttcttcgtcgacattgccatcgccgatccggagaggccagggcgctacatcatcggtatcgaatgcgacggagactcctaccgaaggtccaacggtgcgcgtgatcgagaccgtctacgtgactag

SEQ ID NO: 506254 - DNA, 1281 bp, Stenotrophomonas maltophilia
gtgacgggcgacttgcccgattcagttcgcccgttgttccgtggtcaggacgtgtttttcagtggattcattcctgggatttcgggcatcccgaatgttgagcacaagaattctaagcgcgtcgtgctcaaagcgtgctcgttcggcgattccaacgtctatctgcgaaatgcgctgaacctgctgccggctgctgacatcgtcaagatcgaagagtggttggagccgctattgggtccgatcaagctcaagatcgtgttcgatgagtctaaggacttcgacatccatgcgcacgcagagctaaacggtctttcgacgccgttggagctgcttgggacgggcttcctgcaactgatccagatcttctgctacatcctgctattcaagccaaaaattctgcttattgacgaacctgatatccatcttcatccgacaattcaagagaagctggcaagcagtttgttggagatagcaagagcgcaggagatcaagatcgtcatgtcaacgcactctcccttcatcgtaagaggagcgccggttgacgctaatgtggtctggctttcagacggtgagatcaaatccgacgaccggtctgtggtcgaactggcgctcggttggggggcgttcggtaagcaggtgatcatcgtcagcgaagacgcaaagaacgagctattgaagaagctcattcgacagtggccagagatcgagcggtccgtgactgttctcccaggccggggctacaagcatctgctgaccaaggctgaggcggtggagctcagagagtcactaggtggcaagttcaaaatattggttcaccgagaccgcgattcattgacagacgcggaggcgacacggttgatcgacgcctatgcagcagagggtattgccctgtggctcacagaccaatctgacatcgaatctgagttctgcaacccaagcttcttggcatcgctgacaggtcagtcgttggccgtgtgcgacgactggatcgttcagatagtcgctgctagggccggaccgatcagagaccagttcactggccagcgagctgcgcataacgaagaactatatgccgctggcggtagtccgacgaatgatgatgtgtgggcggagatccaacatcgtccgttacgcggggcaaagggcaaatacgtaatgggtcagttgaaaaataaggtccccggtaacgcctactcagaagcgagcgtagaggggcacagcggttttccggaactagcatcaagcctcaagaatgccattgagatgctgatcgaccattga

SEQ ID NO: 506255 - DNA, 420 bp, Stenotrophomonas maltophilia
atgaacgagaagttccggcgcggttgttggttcttcttgggggcgacagaggagcaggctgatgctttcatggagcgagacgaactgcccagcgcgaagacgatggtggctgcaatcgaagccgatgggccgtttagccaattccccatttttagcggacagttccaggctgggatcaaccatctccacagcttcacgcacggcggcaaccagatagccatcccctaccttgcaacaaacgaagtaggggcttcctacttggatgacgatatcttctatgcgctggagagcatcgaagcgattgggatgacagctgttctcatcacgatcctggtcgctggggagagcaatcccgagggagcacaactggcgctaaacgcttttggagcgaagttcgcgtttggcgaaccctcgccgtag

SEQ ID NO: 506256 - DNA, 174 bp, Stenotrophomonas maltophilia
atgctcaatggactgggccgggtcgctaaaaagcgtctgaagtgcactgagatcgtcattcgcagcaagggcaagcatagagacgaggtgggcaaacttatgtcagataagggcgcacagctaccgcttccggttggaaataatggcaaggaatggctctggaaaatcccgtag

SEQ ID NO: 506257 - DNA, 585 bp, Stenotrophomonas maltophilia
atggacatggaagaatcgaatactgtggtggtctatcgcctgatcacttccaggctcgtggatacgcggcaggcttacgcgattagcaaagcactcaatcttgcattgggtgaagacagccccaggcgactgaccgaccggctcagcggtttggaggacgttacgctgcccatcctttggtcatgccagctcgccacgttcgtctggctagtggcggtgctggaagacagcaagggaagtgcttcgatccccgagctcgcccgcttgattcgagcagatggcacagaagtgccggcagagctagaagcagaagctgcggtgatctacgagaaatatcgtgtctttcgcaacaagctcttctctcataattcgacccaacgcgagcggcatcgagagctctttgacgaagccaagatcagctgggagcagctcgacgctgacttcgacgcggtgacgcggatccttttccaaattgcggacaagaaccaggatctttcgttcgatctcgcgccactcatggcgttcaatgatgtcgaagcgactgaggcttgcatgagaaaaattctgtcagaactcggagcatag

SEQ ID NO: 506258 - DNA, 225 bp, Stenotrophomonas maltophilia
atgcctccgaacctgaatacgctggaagctcagctcaacgcccttgagaccgaccttcccgtgctgatccaggtccactccagctcgggcggcctctgggcagcattcgcaggcctggcagacgtcattgaagacaacgcgggagctcaccaggagttggtcgctcgacggatcagtgccatgcttaccaggcacggcgtagcctgcgaagatgagctggtctag

SEQ ID NO: 506259 - DNA, 789 bp, Stenotrophomonas maltophilia
atgactgctgaggatttggtagcaatcatgcgatccctcgaacaggacatggaagcagaaaaatctgttctttatggtcgtcttgcacgaactattgcgcttgggcgaatagtgttgtcagagcggcggcatttcatcaaagtcctacgcgagttgagctttcaccaagtcgagcagctcaggagcgcacatgtgtccacgctcttcaatctccatccgggttctggtagcggaaggatggtgccaaaggacttccttgcatcacttgttgagcatgacaagctgcaaatcgagcagttgggcctgtgggttaaagacagtctgtcgcccacagggaagcgcttggttgaagcttgttacttgaaggatgaactcacgccccaggccatcggtgctcgtgagtgggtagatgggatgcttgacatcatctgcaacgaaatcggcgaaggagaatgctctcgatttattgatgaggtgacgatggttgggcacgggcgcttggtcaaggttagaaatcaggccgctttccgatccaacaacacgatttcttcgttgtttccggcatcgatggccgtgcttctatattttgatccttccaagcttacgagccagtggaaatttgttgaggagcgcattaggcctggggcagaggtggtcaccgcatcttttgatgacggttcatcccgcgaaactacgctttcaagctatcgccacttcaacctggcaagcggtattcccatcgtggcatccgagattattgaccatttttttgccgctaagtcgcgctag

SEQ ID NO: 506260 - DNA, 894 bp, Stenotrophomonas maltophilia
atgctgcttggagtcggcgactggttcggcctgcgaacctcccaggacgacgaagaggcactgacagtcaggcttgcccacgccctgtttggagagagtcttgccatccaggatgctcggtatccgctccatcaacctcatggggcaaagggatacagcatctctacgttagagagggaagagcctgggaactttcaggaagaagacatcatcaagtgcttgacgatgtgctttcgccaaagccagatctaccacggaccactacgaacaactgacaaggaagagatttgtgacgtcttggtggtgacagatgatcgagtgctcatcatccaagctaaggacagtccgaacgttgagcgcatagcaaagcagaagctcagtcggaagcaaaccaatgcgatgaccgctttcaagaaagctgtggcacaggttcggggtgcacaaagttacatcaaagcaggcaacggaacgcttcgatacatcctcaacggcgaagagaagtcaatcgatatcagtcagaagcagctctttgcgatcacgatcatcaaagaagtctttgagcgagagagcgaagaatacgcgacgatcctcaatgtgctgatggtggagcgcagcttcccttgctacgtgatctcttatggcatgttctttgagctctgctatcgagtccatgaccctgacaggttctttcagttttcagaagaaatggttgaaagcatcaagaatctgcaagacctccctgtgatcaacttccactcccagtccactttagagattatccttaatattctaggaagttttttcagttcttttgaacttacaactggtgggggtgggctgtggcagactggcttagcgaagcattggagatggcgagagacccgttcgccctga

SEQ ID NO: 506261 - DNA, 2763 bp, Stenotrophomonas maltophilia
atgaatttccagtccaacaagctgcgcgacgccgttctggtcgcgctcgttgccggtgtggcgtccacagccaccgcccaggctcaggaagcgaccaaccttgaccgcatctcggtcaccggttcgcgcatcaagagcaccgacatcgaaacctcgcagccggtcctgagcctgacccgcgccgacatcgaaaagcagggcgtgacctcggtcgccgacatcctgcagcgcgtcgccgccaacggcgccgcgctgaaccgtacgttcaacaacggcggtgatggctcggccggcatcagcctgcgcaacctgggttctgcgcgtaccctggtgctggtcaatggccgtcgctggaccaccggtctggatggcagcgtcgacctgaacaccatcccgaccgcgatgatcgagcgtatcgacgtcctcaaggacggcgcgtcgaccatctacggttcggacgcgatcgccggcgtggtgaacatcatcaccaagcagaacttcgatggcgcggaagccaacttctacaagggccagtacagcgctggtgacggcgaacgcgaagcagccgacttcaccatcggtaccaccaccgatcgcgcgtcgctgatgctgggtgtctcctacgtgaaggaagacaaggtcatggctggtgatcgcaagatctccgccggcggccctccgttcttcgacggccagagcagcaccggcatgccgggttcctacctgcgcaatgacgagcgctatgtcctgatcaacggcgtggaaacgccgttcaatgccaacgtccacggctacaacaccgcaccggacaactacctgctgaccccgcaggagcgcacctcgctgttcgcatcgggctcgtacaacatcaccgacaacgtcaccttccgcaccgaggcgatgtacaacgagcgcaagtccgaacagctgctggccgccatgcccgtcaccggcatgcgcctgagcaaggacagcatgtacaacccgaccggtgaggacctgaccggcgtcaaccgtcgcttcaacgagagtggcggccgttcgttcaaccagaacgtcaagaactggcacttctacggtggcttcgaaggcttcttcgagttcgccgatcgcaactttgactgggacgtcggctaccgctacgacaagactgaccagaacgacctgacctatggcctgttcaacctggccaacctgcgcaacgcctatggtccgtccgagcttcgtggtggcgtgccggtgtgcgttaccgctccgggtggcgacatcatccagggttgcgtgccggtcaatgcgctgggcccggaaggctcgatcagccagggtgccatcgactacacctcgttcaccgcccacgactcttccaacctggtgtccaagggctactacgccaacatctccggtgaaatcgcccagctgccggcaggtgccctggcgttcgccgcaggctacgagtaccgcaaggaatccggccagttcgatccggacgccttcattgctgcgggcctgagcaccggcaacggcgccaagccgaccaagggcagctatgacctggacgagttcttcctggaactgtcgatccctgtcctggccgatctgccgggcgccaagctgctggacttcagcgcggcaacccgctactcgaagtacagcaacttcggcaacactaccaacaacaagttcggcttccgctggaagccgatcgacgacctgatgatccgcggcaactactcggaaggcttccgcgcgccgagcatcagcaacctgttcgcaggtgatggcgattcgttcgaaacctacgccgatccgtgcgcggccgccaatggcccgaccggtgcagtgctggcgcagtgtattgcccagggtgttccggctggcttcgtgcagcccaatacccgcgacgatgacggcgtgccgcagtccggtgccgcccagaccgccgagccgttcacctggaagtccaacccgaacctgaagccggaaacctcgaccagcaagacgctgggcctggtgtggagcccgagcttcgtgaccggcctgaacgtgaccctggactggtggcagatcaagatcgatgatgccatcacccgtccggcaatccaggacatcatgaactactgctacggcggctcgccggctgagcaggcagcctactgcggcctgattacccgtgacccgacctacggcactgccgccgagcgctacaccatcaccaacgtcgacatgccgctgcagaacctggcgtcgtacaaggtggaaggctgggatctgggcatcctgtatcgcctgccggaaacctcgatcggccagttcaccattaccctcgacagcacctacctgagcaagtgggaaaccaaggccaccgaagactcgcaggtcgaaggtcgccagggacgttacctcgatcaggatccgtactggcgcatccgttccaacctgtacgtcgactggtcctatggtgatttcggcgtcaactacggcctgcgttacaagtcggggatgaccgagtcctgcctgctgggtggttcgctgcgcaactactgctcggatcccgagaaccgcgagaaccacatgggcgcgaccacctaccacgacgtccagttccgctacaacacgccgtggaagggcaccatcatggtcggcctgaacaacgtgtgggacaaggatccgccggtctcgtactcgacctcgtacaacatgttcgacccgcagtacgacctgccgggccgctacatgtacatgcagtacaagcagaagttctga

SEQ ID NO: 506262 - DNA, 2076 bp, Stenotrophomonas maltophilia
atgcgccgcgcccacttgaatgggttcttgcagatcatgaaaagcgccacctcccggtatatgccgcacattgatggactgcgctgcgtcgcggtgctcgcggtcctgctcttccacttcggggtgcctgggctcggcggtggctatgtcggcgtcgacatcttcttcgtgatcagcggctttctgatcacctccatcatccgaggtgagctggtggagaccggtggtttccgcttcgccaacttctacacgcgtcgggtccggcgcatcctgcccgcactgatcgccaccctgctggctaccacggtcctggccgtgctcagccttacgccagccgatctggtcgcgtacggcaagtctttgttggcctcggcgctgtcggtatccaacctgctgttctggtcggaaagcggctacttcgatgcggcctcgcagactaagcccctgctgcacacctggtcgctgagcgtggaggagcagttctacctggtgtggcctgcgttcctgttcctctgctaccggttcggcggccgccgcggtatcgcctggggcatcgtcgccgctgcagcagccagtttccttgccaaccacctggtggtggccaggcagagcgtgggttttgcttcggatctcttcttcctgccgcacttccgtgtgttcgagttcgccatcggcgcagccggctgcttcatcgccgcgcggctgccggcatcgcgctggctccacgaaggcatgtttgccgtcggcgctgccctgatcgtgtattcgatcgccaccctggtggaaggcgacgtattcccgtacaccaacgccattgcgccgtgcgtgggcgcgctgctggtcatcgcatcgagccgctcccgtgcgaccacgttgctgctggccaatcccctggcggtctggttcggcaagatcagctactcgctgtacctgacccattggccggtagtggtattcgtcacccagttcatgccgcactggtcgtgggcggtacagttcagtctgatggtggtgatgtccctggtgacggccgtggcgctgcatcattgggtggaagtgcgattccgctatgtcgatccggccgcgcccaagggggcgctggtgggccgcacgctggccgcctcgctgttctgctgtgcgctgggcgtggcggtgctggcatccaacggcatggtttggcgctaccagtactttacccctggcatggtcgggccgggcacggcggccagcgcccccgtccagcatgcagcggcacgcgccgaagtgccggtgttccagccgctgggggccgccgacatcgaggccggcaaggggcgccgattcgaaggcctcgccgcagcctgcaatgtgcagtcgctgcgggatccagcgcgctgccccatggatcggccggtgcaggtgctgctgttcggcaactcgcatgagcccgacggcttcaacgccttcgcgcagatctacgggcgagaccgccgcgtgaacctggtcaatttcggtaccgtcaacgactgcaaggtggtgctggagcggggccgcattgcatcgccaacgccggagctggcatgcgatgcccgcttcgcggcgctggacgacgaacgcttggtgcaggcgctggacgtgattgtctacaacacgcaccagggatttgaccctgttgccgctgacctgtggcggatcctcgagatcttgaagacgcgcaacccgcggttgaagatcatcgcgatcggctccttcctgcaaaccacctccgactgcgcgtcgctgtacaaccgctacggaagcttcgatgcatgcaaacgcccggacctggtgaattacttcaacccggatgagcgcgccaagtcgaccattccgcaggtgaagtcgctgccgtacctctacatcagcaagtacgaactgctgtgcggcggcaatgctatggagggctgcgtgatggaggccaacggcgagccggccttctacgaccagcatcacctgtccctaggctacgcgcgcttcctgggccagcggctggccaagcggcatgccgccgacctggttgctgccggcctgcctgaacccgtttccagtgaggagtag

SEQ ID NO: 506263 - DNA, 171 bp, Stenotrophomonas maltophilia
atgcacgcatccgcaaccatttcagatccaaacgccgtcgccgcatggatgaaatcatccagcgcaaatgcgagatccctcgacgcagtgtttgaaaccgaggcggacgaaatcaaagtagccgcattcagcagtgactgctgcggatcgaacaattacgaagagcgctga

SEQ ID NO: 506264 - DNA, 723 bp, Stenotrophomonas maltophilia
atgactcgcagtcatgacggcatgagccgaatagcacaaagcccagaacaaagccgcatgcgatgcgatggaacattccccttaccaaacgacacatcatcatcgaccgcaatcattgccgcgacgactcgatccaatattaatcgcgctatcgaactccgcaaaaggggattgatcaccgagacaattggcacagatcccgcttactcgacaacgccatccgacgcgcttcgcaaactggagggtgatgcgggaattcacaccattatcgtgttcagtgaccagcttacatccagccttgacgctcctgtcttgacgtcccaccacgggcagcagcgctacctgcctctggtggaaggagtcctcaacagcatccacgaatttcaaatcatgacaggcacatgcgatgacacgatcaaattgccaccctgctcacccatcacttccgttctgcgcactatttcgaaccatctggattccatccagaagcttggaggagactggctcgcgcaaccagttcagacaaagcgatggcctgctacacggctagccgagagcagattccgtcagcgtgtctttcactcagctctgatgcacatgtactggaagcatcctgacttcaatcccaagcatttcgattggctccatggacaactcaagaacctctaccgcgcatcgcagccagcaaaggaggtccaggatgcacgaaagtcaagcacatga

SEQ ID NO: 506265 - DNA, 978 bp, Stenotrophomonas maltophilia
atgcacgaaagtcaagcacatgagagtcgtcagcctgccccggaggccacctttcggcacagcgtccagacagagcaacagcttggattgaccctttccgatatggaaaggaaagccatcctctccgcatgcgaagtcagcggactcgatatggattcctactacagctggtatcaatcgaaagcctccatcagctcccagttggctgacctttgccgcccgtcactgttggaggcggtccactgcatcgaccgttccgactactcctcaatcgatggaaagctccctgccgacaggggagttgtgatcgaactgccgcatcacggccactatatcctgtctgcggtccgtctgatggagcacattcgccatctgcgtgacatctacatcttctatggcgacccaaagaaccatgcaggcaacgaattgttcgacgacctgtaccaccggctcttcaatcacgccggatgccgcgcgagcatcatccactcgaatgccagagggataggcatagcgcttcgcgcactgaaaaatagagctgcagtcatcatgatgcccgatgtccaccgctttcgcgaagaagcctattgcattccatttttggggcgccccttggacatcatgctgggaaccgccgcaatggcgcgcaaaaccggaagttgcatattgccagccatctccgtcgttgaccgggatcttcgagcaactattactttcggagatgccatcgagcctatacagacgcgagcatcgcttccatctgaagtagctgactactggacgatggctgaagtctatcgtttccttgagcgtgcaatgggacctcaggccatctattggcagtacatcaggcaacacttcatgaaatcctccaagttcccgatgttccaccccgaaacaatcgatgaagcttggcacatgttctccaatgacccgcgaaccaagccacacacgcgttacacggcatgcctggattga

SEQ ID NO: 506266 - DNA, 1077 bp, Stenotrophomonas maltophilia
atggatcaatttcattctccttccattaccttggcggccatcgccctgatggcgatggcgcccatcaatggatacgcaacggatcaagagaatgccgatgcaactcatcttcctgcgatccacgcggtccactcagcccccggcccgcgcatctggcagttcagaaaaggctcttcaacgctgcttgtactgggcacgattcaacccctaagaaagagcctatccatcgatactcgcagcgttgaagcagcaatctcgacgtctgatgcaattctgagccctccgggcgtgaccgtggagcacgatggcggggtatttcgcagcctcattctgtggcccgccatccgcaagctcaagttcctttcaggtagaagaacgcttcgtgacgagctcaccgaagaagagtacacgcgattgagcgatctcaagattctctatggcctgcatgacgcgagcattgagaggatgcgcccaatgtgcgcggcttggaaaattcatgatgctgcactgcaattcagtggagcccgagccggtgagccactttctcgagccattgaccgcatggcccgcgatcatgggatcccgatgatcaacgcccgcttcccgatgctggtgagaggcgccagggaaactatccagaattttcacattgactccgtgaaagaccgcaaatgcttctcggatgccacatcaagcctgcggccctggctcgataacctagatgagctaggtcatgcgtgggcagagggagatattgaatcgggcgcgctcctgcatgcccctccatcgccctcccggtgctgggctcgtctgaccaacgacgcgatcgccactacgatgaatattgaccttgatatccagagacgaactcactgggttgcagtgctccgctcaactacttcgcggcacagtacggttttcaccactctgcccttggatgatcttctgcattcaagaggcatggccgcggtactcgtggacgagggatacatccccgatgccagggtgttctttggcgatcagccgcgacctccaaacatcggagcaagtgaaacctcaaatcatccggacgggtga

SEQ ID NO: 506267 - DNA, 2424 bp, Stenotrophomonas maltophilia
atgggtagaagtggcacggaccagcagagccggcgggtgccgatgacccgtgggctgggattgcgctttgcgttgttgacgggcatggcgatcgggctggtcgcattgtccgcgttgatccaggaactgcaggcggcttcgacggcctggatcgccgggcagggttactggtcacgcgggcagcaggatgccactgctgcgctgagccgctacctggcgcgcggccatgcccaggacctggaggacgcgcgccaggccctgcggattccgttgggagatctgcaggcccggttggcgctggaacaggcggtaccggacgaggagaaggcccggcagggcttcctgcagggtggcaacgcgcatgccgatatcccgcgtctggtgttctcgttccgctatgcacgcgacatcggcgccttccgcgaagcaaccgcgttgtggcggcagaccgacgatgacctgttggcggtgcagcggctggtcgccgagctgcagtcggcgcacgccgaaggcacgctgccagtggccgaccgcgaccgttacctgcaacagttgcgcgatctggaccggcggctgcaggtgcaggcgcagtcgttttcccgagcgttgctgcgcatggccacgatggtgcggatcgccacgctcgtggttggtgggctgtcggtgcttgcgatcagcctgatggcggtggccctcgcgcgccgcgtcggcaaggacctgaccgaacatgaaagccgcttccgcgccgccttctatcaggccaatgtcggcatgctcaagctcgacaccgaaggcaaggtgatcgaagccaaccaggcgatggccgatatcctcgactaccggcgcgacgtgctgctgcagatgtcgttgggcgatctgctgatggacggcgagcttgtcattgatggggtgggccgtatcgactgggaccggcagctgcggccgagcgaactgcgcttccgccgtcgcgatggcagcctggtctggggccgctggagcggcaccggtgtgcgcagcgccgccggtggcctgtcggtgttcgcgatcatcgaggacgtcagccagaaccatgcactggcgcgcgagatcgagcaccacgccagccatgacccgctgaccggcctgatcaaccgccgcgagatcgaacggctgctggaacgcgcgctgttgcaggtgcgcagcgaaggcggcacgcacgcgctgtgctatatcaacctggaccatttcaagctggtcaacgacagcttcggccatgccgccggtgaccagatgctgcgcagtttcgccgactatctggtggcggcggtgcgtgatggtgactgggtcggccggctgggtgcggacgagttcgcggtgttcctcgcccatgccgggcaggacgaggccaagcgcgtgctgcagcgggtgatccgcaacctgggccaggccacgtttccgatcagcgagggcagcccgcagctgagctgcagcatcggcgtggtcgaggtcagtgcagatgcgccggacgtgaactggttgatgagtgccgccgacagcgcctgctatgccgccaagcaggccgggcgcaaccgcgtgcactgcttcaatgagaaccgcatggcgctggaggagcggcggcaggaggccgagcgcctgcagggcgtcagcctggcgatggccgagaatcgcatgctgctgtatgcacagcgcatcgcccgcgtgggggatccgtcttacctgcactacgaggtgctggtgcgcatgcgtggcaccgatggcagcctgcatctgcccggccagttcatgccggcggtggagcgctatggcatggcggtggcgctggaccggcacgtgctcgggctgctgttccgccacctgcaggtgtgcccggcgcacgtgcgccagctgggcctgtgcaacgtcaacgtgtccgcgcagtcgatcgccgagccgggattcctcgccttcgtctgcgacctgctcgagcgcaaccgcgcgctggcctccaagctgtgcttcgagatcaccgagactgcggcgatcagcaacctcagccaggcccgcgccttcatcgatgcggtgaaggcacgggggtgccggatggcgctggatgacttcggctccggcctgtcttccttcggctacctgcgccagttgccggcggacatcctgaagatcgacggcgccttcgtgcgcgacatggataccgaccctgtcagccacgccacggtgcgcgcgatcagcgagctcgggcgcgagctgcagatggaagtggtggccgagtgggtggagaccgccgaggtcgccggtgcgctgacccggcttggcgtacaggggctgcagggctatgccatcgaacggccgcagccgctggagcggctgaccctggtcgatctgcgcccggtacggctggtcgcggtgaaggggccgccggcggctggctga

SEQ ID NO: 506268 - DNA, 759 bp, Stenotrophomonas maltophilia
atggaccctgtcccgggcacgagtcgattgtatcggggtatccccctgcgaacacgtgcgacaagcgtcccgattggaatgggccttacacgttccttagcggtggcaagccgaaaaacggctctgttacgtgcaacgacggatgcaaacaagcgtggtactcgactggcgatggctatttcaacgggaagtacacgtccgtaccgggcacctgtaacgactatgacgaccggaagtgcaaggccgaattcggtaccggctactactggaatcagggcatgggtagctgtgagcctgaagaggccaagtgtaaggacggcagcaaggttaattctcttggtaagtgcgagccagagccgtgcccggacgggatggttcaaaaccccgacggcacctgcaagaagaaggagaacgagtgtcctgcaggacaggtcaggtcgcccgacggccgttgtctgcccggcgatggtcagtgtgcgaagggtgaggttcgcgggccggacggtacgtgcaaaaaggactccgacgacgacggacagcctgatgagccgggggagaaggacaccttctcaggtggcgatgattgcagcatgccgccttcctgtagtggctcgcccatcctgtgcggtcaggcgcgcatacagtggcgcattgattgcaatacccgaaagaaccggaacatcgcaggaggttcctgcgccgcgatgcctgtttgtacgggtgagaagtgcgatgcgatggagtacgcaggcctcttga

SEQ ID NO: 506269 - DNA, 246 bp, Stenotrophomonas maltophilia
atggttctcgacgtccagtcccgggaaatgctcgcggacattgaacatgacgtgctggccgtaggagtgatcttggagatggctgttagttcgcgcgaaaagaacgactacgaaaaattccgggctgactttcgagtgcttgccgaggcgtgtcaggaggcccatagcgatgccagcctccttatcgatcttgtggaggctcggcttcaaaggctggaggctgaaattggtgttcatggcaattaa

SEQ ID NO: 506270 - DNA, 768 bp, Stenotrophomonas maltophilia
atgtacataacacagcgatccgttgacatactcctgcttctggcaccaatagctctaggcttcttcagcacgtttctcgtgcgccgacgctatggagagctcgcttgggagcccgttttggaccagcgagtgaactgctataaatggctggtcatcaccatcctggttattgcgtacattgcggcagacagggcgtatagcgcctcgatgccggcgggttgcgatggatttgcgtgcgcacgattctacctatcgaatgggtatcgcatctccgtaaatgagaagcacctattcctgcttctcaccacagcgggcgcaggatacttctacggacggctttcgaagtacttcacgccgattcaaaccggcacgcccgggtacttgttgaaagtggccgcacatggcaagggcgagcactcgccacacctagaaatctcttggcgcgttcgccggcaacagctgaaggcagatcctgatgttcgacgaaaactggagctggagggatttcgcatttggatgcgatgcctaggctcgtgggtaaacactctggagactggatctacagtggagcttatcagcccaatactgattggtcgggatccttcaacactagccagatggatttctcgaagaagatccattcacagcgtaactcccatgacagtaagaggcggctggtgcgaggggtttctgtacaacatcaaggttaaccagcggatctcatttcagccggtcgtactcgagggaattcgattcaaggtcgcttag

SEQ ID NO: 506271 - DNA, 759 bp, Stenotrophomonas maltophilia
atgcagatcaggggcgccaaaggttggttcgtgtcgttcgggtccatacgccccccccaggcgtccttagcgcattctagtctggtcgagccagcgcggggagcggactgccgtttatcatgcgaacaacttgagcgggcaggggaaggacggatgtcgattcttgactacagcaaggaaattgcttcgatactggttggacttttcggcttgattggaaagctcgcggcgaagcctaagacttcgatggggtggggaccaagggcttcaataagtcacatcctgccgcccttcacagatgcagacggaaatgtgacggatcaaaggccgcatctaacagttggatcattcttcatcagcaatacgggcaaggtgcccctgagcgaaatcgagatcgtcctgaactactctccccagtcacttaatctttggccgccgcgaccgttctccatcactgaaattgcacacggccgaattgcgatctctctccccacgctatccccaaaggacgagctatggtttgagatggtcgccgtgaacaataccctgccgaatgtcctttccgtcaggagtaaggaaaccgtagcccggccaatcacggtcgacttgttgcctgttgcgccacggtggcagattcgtgccatccaaatcctgtcactcttcggcctcgtagctgctgtgtacgcgacactttggctgttgagcggcctgctaacagacaattggtcatggctcaacggcggctgcagaggggtgtag

SEQ ID NO: 506272 - DNA, 858 bp, Stenotrophomonas maltophilia
atggatatctatcagctacggggcgcgcatattgggccccagacgatcctggagatcagccaagatcgccacgttgccttggcaaacgcgcggcattgtctcattgacgcgggatcctttgagcggcgctacgagctacttatgggcaacttcttggcgttcgaggagttttgcgccgtagcacatctgcgaagtgagctacgcaaggactggagctatgagactggcgatgcccttctaatggaggccaatcgacacgtcatcaatctattcaccagtggcaagacgtacatggaccaagtggcacgtgacttcaaatcattcggtgaagaaggcgaatttgcccggcaagccaagcatctagcagctgtcgcctatgacaactgccttgcctaccgcctgacgtgccaactgcgtgatcgatcccagcatcgcgctctccccgtggacgggcaagagggcgggagaggcgagcacgggctgtacgcatctaaggacaggatcgtggctgaccgagggaagttcaaaaagtccatcctcgatgaaactcccgacaggatctatctcagaagaatcctgcgcgagtacatgcgggaggtgaatggaattcacctttcgctgcgctcgctggtcaatgaccacgttgaatctagtcgtcagactgttgaggcggctatcgccgactacggacaggcgcagcagttcaagggtcatgcatcggcgacaggcataggcctcgaatcatgccattaccatgaccactcggtagtggagacagttcccctcctgctgaactgggatgatctgcgattagcactggcgaggaagaacagcttcaagctcagattcgatgattag

SEQ ID NO: 506273 - DNA, 774 bp, Stenotrophomonas maltophilia
atggcggggtgggtccggttgcggggggcgctgcaagtacgtccgtctaggcttggcagccgcttgctcgtgtgcgctttcctgcgcacacggcaagaccggggttgggcgtcctgcccaacccgcccgaggcatgcctcgggcccatgcggctcacgcccccgcaaccggacccaccccgccttcgacagattcctacgatctgtcgtagatccacgccatgcgtggatgaattttcatcgaagtcgaatatttcgagaattgaacgaaaagcatccacgcatggcgtggatcgaccgtgtcgaccaaggtcgacacctacccacagcagcgggaatctgtcggaggtggggcggtgtggggctgcaggaccgttggcgccatggatggcgccatcgagcccccaagggtgagggcgctttgcttgcgaagcactgcttcgcaagcgcccgaacgcacagccgccagcggctgggccgggttggggggttacggcgtgtcctgcagccccacaccgccccgccagaccatcgacaatccagagccgctttggctctggctttggctctggctctggctttggctttggctttggattcggcccttgcctctgcaggtgcagggcgcagccctgccgaaacccaccctcaggaactgcaggacagcatcgagcagccggcgcggttgtcggcccacgccgggcgcttgccggcaaagtgctccagcccggcgcgttcggtatacgggtcacgcaatacgtcctgcaatgcgtga

SEQ ID NO: 506274 - DNA, 672 bp, Stenotrophomonas maltophilia
atgatcgaactgctggacctgggacagacgctgcaggccttcgcggcctgcaatgacgaccacgacgtgtatgcatccttcggctgggtgcatgccagcgaaggcgatctgctgcaggcccgcttctggctgccgcccgacgaagacaccgccttcgacgatgacagcgaggtgccggccgaggcgcgtgcgctggggctgaccacctacctggagccggccacgtttgccgacgtgctggacgtgcagaagcgccagcatccgttgtccggcctggccgactacgcagcggcgctggcgtactaccacgagtacgacgccttccagcaggtcgagggcattgacgaggcgctgggcgaagccacggccgaagcgcaggcggcggcgcgcgcggccggtgtgggcgcgggcatcttcgccgcgttcgatctgcagatggtggcctgtccggacgctcagctgaaggccgctgcacagtgcgtggcccgtctgcacggggtgccggtgggtgaggcgctggcacgttgccgtgcactgccgctgccattgggcgaagcgctggaccgcaaccgcgcgcaggcaatcaagcacgaattcgaggccatcggcgcgaccgtgcaggtgcacgggttcaagccgttcccgtggatggacgcgccccgcctgcggtag

SEQ ID NO: 506275 - DNA, 162 bp, Stenotrophomonas maltophilia
atgctctgcctccgcaatgtcgccggccagccaagcggttctcccgcgtttggcgattgcaaggaagcgttcttccagttcggcatcgagactcagggccgtgcaagtgtttccgctcagtttgtctattggattgacaccgggctgagtctagccgcgtag

SEQ ID NO: 506276 - DNA, 315 bp, Stenotrophomonas maltophilia
atgattccagagccgaaatctgcttatggctacggccagattacctcgtatggaatagctgtcttctatcgcgataccgctcagtttgagaaggccagagcgtgggcgatggtcgccagaggcatttatggacaaggagaagcctcaagcgagtacatggacgagctccttgcaacgattgagttcgaggccggagacctggatggggcctacacactatttgaaccgcagtaccggaagtacggccgtcgtgtctttgagggccatgagaaggggttcattgatttcatcaagagcaggaagaaggccagatga

SEQ ID NO: 506277 - DNA, 381 bp, Stenotrophomonas maltophilia
atggagtcaattccgaacgcgaattcagacagcgctgccaagattttttcaaaggtttatcagaagtactctgttagattcggatgggaagtgagtgcggaaatcgtgatgaagaatagcggtgcctttcacctttccgatattgggatatccagtcaggttcgtgacgtggactggctgggtgggactgccggtaggcctctcgtaggggggatcaatatccacacgcatccagcattggacggatacaatcgtgcctactcgccattctcatattgggatgttgaaacgtacaagaaaacaaattcgattaattacgtttcggatccgtcgggggtctataggctgaacaaggatggtgtgtcggaggttgtgaaatga

SEQ ID NO: 506278 - DNA, 195 bp, Stenotrophomonas maltophilia
atggtatccgaggcgggtgccgacaggtcactgcatactggacggcgcctgtacaccggccccaatacctacgtgcagtcgagcggcgggacctactgcgccagtctctacattgtcagggcctgcaacgccggtggctgttcggcatggtccgcagacttccccgtcacccgcggcgtattgaattgggactaa

SEQ ID NO: 506279 - DNA, 1014 bp, Stenotrophomonas maltophilia
atgaatggactctgttcgctgttgattcgggcggtgctcacgctggtggtgctggcggcctgtgtggctccggcggtcgcacaagaagtcgtcgagtacatccacactgatgcattgggttcaccggtggcgatcaccgatgccagcggaaatgtcatcgagcgtacggtgtatgagccgtatggggcggtggtgaatcggccgttgaaggatgggccgggatatacggggcatgtgacggactcggggaccgggctgagttatatgcagcagcggtactatgattcgacgacttcatcgttcctgagcgttgatccggtttcggctttccagagctcggtgaatgcttttggccggtatcggtatgcaaatgcaaacccatatagcctaatcgacccggatggacggcgagcgtgcgggaaggactgggactgcagaatgaccgagcatgcaggcggaaaaagtctatctcgcgggcagctggcggcaatcaagagggatccgcaagcgtacattgacagggcgaacagtattcccaaccgacaaagttcggaggcgggatctgccagatatttttcggaagttgcccggcctgtcacgattgcgaccaatttggaagtaggggctgatatcgcgcaactttctgatcagtcttacacagcagtcaattttgctttgggcgatgcgactgcgggcgctggagcaggtagcgtcgttcaagggcaaaacaactacgcaggcccaggtgtcagggtagccattgctcatacacacccagtgaatacagcgttcagctactggaagggatcctgtttctgcggtggtcgatgggaggggagtctctatcgaggtgatctggagagagcaagatctgcaggtgttaacagctatgtggccactcctagcggttccgtcatgggattcgacttcaggggtatgaatggagcggtcaatgctagaacgaaccctggcgcgtacatcgcggccgaagactacttctttaaggtgaaatga

SEQ ID NO: 506280 - DNA, 138 bp, Stenotrophomonas maltophilia
atgaaggtttccggggtgaccccggccttttccgcggccagcatgatcggcgtgccgtgggtgtcgtcggcgcagacgaaccaggtcctgccgccgctcattcgccgcgcacgcacccagatgtcggcctggatgtag

SEQ ID NO: 506281 - DNA, 465 bp, Stenotrophomonas maltophilia
atgcagtaccagctcgacaacctcgatcggcgcatcctcgacgccctgcagcgcgacggtcgcctgcagaacctggagctggctcgcctggtcgggctgtcgccgtcggcctgtctgcgccgggtgcggttgctggaggagggcggctacatcgaccgctatgtggccttgttgaacgaggccaaggtgggccgtggcttcacggtgttcgtgcgggtgtggctgcgggggcaggacgaggacaccaccaatcacttcatcaacagcatcaagtcgttcccggaagtgctggaatgccatctgatggccggtgactgcgatttcctgctgcgggtggcggtggcggaccttgatgcctaccggcagttccagatgcagcacctgaaccggattgccggggtgcagaacaccaagacggagattccgatgcagcggatcaagcagacgacccagctgccgctttga

SEQ ID NO: 506282 - DNA, 513 bp, Stenotrophomonas maltophilia
gtgaacgtgccgcagtacagcctgagctggtcggtgccggccaacagcgagagcttcgtgctggaggagagtgccaacggtggtggctggacggtggtgcataacggcggcgggaacagctttggtgccagcagtggcaatggcagctacgcctatcgcgtgagggcatgcaatttcgcggggtgcagtccctactcgggcatcgccagtgtctccgtggtgcttcctcccgcggccactcagatctacgtggccgagtggctcagcacgcgcaaggcgccctatcaggtgcaatgcagcgtcggctggcgcgcggttccgggggcaacggagtatcagcttgagccttccggagctggacggcgcctgtacaccggccccaatacctacgtgcagtcgagcggcgggacctactgcgccagtctctacattgtcagggcctgcaacgccggtggctgttcggcatggtccgcagacttccccgtcacccgcggcgtattgaattgggactaa

SEQ ID NO: 506283 - DNA, 132 bp, Stenotrophomonas maltophilia
atgaaaataaaaagcgaaaagctaacggtgaacctaaaaaagattctatattacaggatattaaaactattcatgagcgcccagccgaagttcaagaaagaaaaataccgggtcattgggaagctgatttaa

SEQ ID NO: 506284 - DNA, 183 bp, Stenotrophomonas maltophilia; identical to SEQ ID NO: 500890

SEQ ID NO: 506285 - DNA, 909 bp, Stenotrophomonas maltophilia
atggatcacttcgccgccctgcgcgcgctgcgcgccatcgttgacgcgggcagtttcaccgcggccgctgaacgcctggggaccacccactcggcgatgtcgcggcagctgcggcagctggaagaacacctgcaggtacgcctgctcgatcgcaacagccgtcggctgtcattgaccgaggccgggcgcgattactaccgcgaggcggcaacgctgctggaccgcctgcaggaggcggacgatcgtgcccgcgccgggcaggcgcaacccagtggcagggtgcggatcagcgtgccgcaggtagtggccagccaggaactgccccactggctgccctcgttcctgcagcgttacccgcaggtcacgctggacctgtcggcggatgatcagctggtcgatgtggtgggcggtggtttcgacctggcgctgcgcattgcagcttcattgccggacagccagctggtcgcgcgcgcgctggccagctgcccgcgcatcctggtcgccgcaccggcctacctggcccggcatggcctgccgcggcaggctgcggatctggagcagcacacgctgctgggtttcagtcccaccccatcaatgccgccctggcagttacaggggccgcgcggcgcctgcgtgagcgttgaagccgggcagcgcctgcgtgtggatgccacgcctgcgctgtacgccgccgcgctggccggaatgggcatcagcctgttcaccgcgctgaccgtgcaggaggacctgcgcgccggtcgtctgatccgcgtgctgccggcctggcatgccggccagcggcgctacttcgcgttgtacccgcatgcacgtgcgctcgcgcccaaggtgcgcgcgctggtcgagcaccttgcggcgcactacgctgcacaggctggcgtggctggctag

SEQ ID NO: 506286 - DNA, 252 bp, Stenotrophomonas maltophilia
atgttggagaattggatccttgcagatgtcgcttacttgagtacgaagaaggtttatcttaagaaggttggtcgccagaagcgctacgaatctaccgacggaaaatctgaattaaagaagctttttgaaaagggatatgattacagcgagattcggcatgggcaggagcttttcccgctcttgaggtcagatcaagcggttaaattcagtccttcctttgccaccttcatagaagagctaggtttggcctag

SEQ ID NO: 506287 - DNA, 996 bp, Stenotrophomonas maltophilia
atgccgcacgcatcagtcgcgtcactgctgtttccacttcatgcccggcgcacagtgcgggctttgctgctcttcgccctgccgatgatgctgcaggtagccaacgcagccgagcgtacccgcccttccgggcgcatcgtgattcagaccgacgatgtcacgcgcttcttcagcgtgctggatgcaagcggagggaagccgaatgccgacgatctgcagcgcggctatctgcatgcgggtacggatgcactacgcagcttcactgacagccgtatcggctcgatggatcgtcttgcagatgcgatccagcgcagacctgcgctgtttgccaaagcacgtacctgtgcgacggcgctgccggagatccgcgagggggttgccaaggcactcgatcggttgggcactctgcttccctccgcacgttttccgccggtcaccgtgctggtgggtcggggaaacagcgggggtgtcaccacgcccgacggcgtggtgatcggactggaggcactgtgcaacgccgactggatgcagcccgatgtgggcgaccgtttcgtgcacctgatcgcccatgagtacgtgcacgtgcagcagcccggtgcgagcgttgatgtcgcgcagcccaccctgctctatcagacgttgcttgaaggcggcgccgagtacgtgggcgaactgatctcggggcaaccggccaacgcgcatctgcgtcgttggacgcagggccgcgaatgcgccctggaacgccagttcgcccgggacagcgctggtactgagctgtcgcaatggctctacaacggcgccggcgacgaaacgcgccgcggcgatcttggctactggatcggctaccgcattgccgctgactacgttgcccgcgccgatgacaaagccggtgccgtcgccacgctgctggcggtgcgtccggaaagtgcgccggcactgtttgccgcaagtgaatggcgcccggcgtgtgggccagtggaaaacgggcaggaatga

SEQ ID NO: 506288 - DNA, 420 bp, Stenotrophomonas maltophilia
atgcgcctgatgaccttcatctgcccactttgtggcgctagcgggcagcgctttcccctgcgatttgctggaaggcgtcaagcaaagacgtcgtgccggggggggcgcgtggagcttcgttcagacccgcggttgggcacgtacacgctctatcttctgtacacacaggtcgtcatccttgtggcggcattgccgctgatcggggccagtgtcgcgggtgaatgggtacggctgggaatgatctgtctggtagtgctgatgctgtgctggttcccgggcgtgatcaggcacgcacgaagtccgatcgtgcgcgcctgccgggatgccgattacagctatgcgcgcaggccaggtgcttcgactgcgcacgctgccgcaaatccggagcagcgtagcgacacgccaagtgccagcccatga

SEQ ID NO: 506289 - DNA, 1254 bp, Stenotrophomonas maltophilia
atgacctgcccttcctgccgcctggtgccggtagcgatcctgctggccctgccctcactggccgtagctgccaacgcgagtgatgtcctcactcccaaactggcttacaccggcgaggcggccgccacgctcgatggtggcaagcgcagcggcaccgcctacgccggccagctgatgttcggcgccgatgttgacctcgacgctgcgttcggctggcggggggccacgatcaaggcctatggcatcaatcgccacggcaccaacctcgccaacagcagcaccggcaacagcacctcggtgcaggaaatctacggcggccaggggacccgcctggccaacctgaccctggaacagaagctgttcaacgaccggctggtgctggaggccggtcgcagcgtcgccaacatccaccacctcgggtcggagctgtgccagtacttccagggcaactcggcgtgcggcaacccgacctacgttttccgcaccagcaacttcacctggtggcccgtatcaagctggatggccgacgccacggcctgggtgacgcccgatgtctatgtccgcatcggtgcctaccaggtcgatcccagccaggccgaggacggccagcatggcttgaagtggaatacgaaccaggccaccggctggatcgtgccctacacgatcggctggcgcagccctgcttcggcacgactgaaagcccgctacgaactcggtggctggcaggacaactcgacctatcgcgatccgctgcgcgatgccaacggcattcccgcgctgctcagtggccaggagtacacggcacgccatggtcgctccggtgcgttcgcgcgcttcgagcagcagcttaccggcgatggcaatggccgcggcctgactcttttcggcgcggcgctcaagggtacctccgggcagctgatcgaggatcacttcctgcaggccgggcttgtgcagaatggcacgttcgccggccggccgcaggacagcatcggcttcgtcgtcacccggcagaagtacagcgacatcgcgctggagaacctccgcctggcccgcgctgccgccggcggcagcggcaccccgcacggaagccaggtgatgatggagctgagctatggcatccagctcaccccgcagctcaggattgcaccgaacctgcactacatcgtgcatccggacccgttcaacgaacctgcgcggcagcgggacctgccgaatgcactgatcgcgggcatgcgggttgactggaacctgtag

SEQ ID NO: 506290 - DNA, 282 bp, Stenotrophomonas maltophilia
atgccctacctgtggtgggtgccgaccatgccctacctgtggtgggtgccgaccatgccctacctgtggtgggtgccgaccatgccctacctgtggtgggtgccgaccatgccctacctgtggtgggtgccgaccatgccctacctgtggtgggtgccgaccatgccctgcccgtggtgggtgccgaccgttggtcggcacagccctgggccccgccagccacggccggggcccatccacgctagaattacccccttatcgagtcccccaagccgcatatga

SEQ ID NO: 506291 - DNA, 285 bp, Stenotrophomonas maltophilia
atgagcttgtggctggcggtacagccaccgggggttcttcttctcctcggggctttcgtgacactcatggcgctgggggcagcgctcaccgcaatccggcttttccgctactggcagtgggccaggtccgccgagcaacggcgccaggacttcgtggtcgcagccgtcgccgccaccttggccgcgggggccgccgcagccgcgatcgccgggccgcaggcgcccgtagacgatccggaaaccgtcaccgacctgcagcaggggagggtgggctatggcgactga

SEQ ID NO: 506292 - DNA, 177 bp, Stenotrophomonas maltophilia
atggcgactgaccccaaggccctgcaggccgtgcctgccgcacccgccgttgatccttcggccaccgcacggcgtgacatggatcacctcgtttttctaatggcccttccgatcctgattgcagccttagtggtgtgtgtcaagcgcgacgtcactcaccgcacgcgtaatcgatag

SEQ ID NO: 506293 - DNA, 216 bp, Stenotrophomonas maltophilia
atggcctctccccgtaaagccatcgcgatgcttgccactggccttgtgtgcttctccctgctgctcgccgcgttcactgcttacgtgtggttgatgcttggcggcgagagcctctacgacgctcttatcgcagccatcaagttgctttgcggcttcgttggggcgttggctatcgccatccacatcaacgctgttctgcgcggtcgggaggcgtga

SEQ ID NO: 506294 - DNA, 324 bp, Stenotrophomonas maltophilia
atgtctcaggtccgcattgaaatcgtgtcgaaggctgtcaacaccatcgagggcgtctccaagtccagcggtaagccctacaagatgcacaagcaggaggcttacctgcacaacggccaccactacccggatcgcttcgaaatcggcctgcaggatagcgagctggggccggtggcttatgagcccggtttctacacgctcgccccggggtcgatcacggtcaaccgtgagtacggcaaccttgaaatcaaccgctacgaaatgaagttgctccgcatcgaagaagcccaggtcaagcctgcggctgcgaaggctggggcgtaa

SEQ ID NO: 506295 - DNA, 264 bp, Stenotrophomonas maltophilia
atgagcaagaacacccagattgccgcccgcccgtcggtcaagtcccgcgtcaagtccgccgccaccaagctgtcgtcggtggtcgtcggctcgctggtttccgcctcggccttcgcccaggctgcaggcgatatgccgggcagcgtggatggtgctgccgagttcatgaccaccaagggcggcattgccatcgctgtggctgctgccatcacgctgatcactctcggcatcactgcggccaagctgccgcgtaagggcagctga

SEQ ID NO: 506296 - DNA, 504 bp, Stenotrophomonas maltophilia
atgagacgccaccgccaacaccaggtggcggcactgatccgggggagggtggcggtactgatccgggcggcggtactgaccccggtggcggtggcactgatccgggtggtgggactgatccgggtggtggcggtggcaccgatccgggtggtggcggtggcaccgatccgggtggcggtggtggcactgatcccgagcccaagccctgccctgagggtggcaaggatgccgatgggaacccatgcccgggggagggcggtggtactgatcctggtggtggcacaaatcccggcaatggcggcggtagcggtgctggcagcggtacttgtgcgcagccacctgtgtgcagtggcgatgcgatccagtgcgcacagcttttccagcaatggcgcgctggctgtcaggctgaagggctgggtggcaaggtcacgggtgatccgacgaattgcaaagccgcataccagtgcgaaggcaacgcgattgcctgcggtcagctcgctgtga

SEQ ID NO: 506297 - DNA, 438 bp, Stenotrophomonas maltophilia
atgcgtaagcagatgtgcggcgccggtgagggggacggcgacggcacactcaccggcgacggcacttgttcccaagatttcgtttgtaccggtggcgatcccgttgcgtgcgcagagttaaagcaagtgcacatgctgcggtgtgccgtggaaaagctgacgaaagaaggcaacggtgatgacgactatggcgaagagctaaaaccatccgatttctttggcatcggcaatgaaagcaacctcgaaggcctcgacgcgtctggttggattggtcgtggttcgtgcccagcgttgagcaacgccgtgttgtcgcagcttggggtgaagggcattgatgagctgtgccagggcgcgtctgtgctggcgatgtacgttctattccttggctggcttcatgccgccgtgatccttggtcgcgctctcacaggaggcaactaa

SEQ ID NO: 506298 - DNA, 1125 bp, Stenotrophomonas maltophilia
atgttgcatctgatcaccggccagaatggtgcgggcaagtcgctgcgtgctatcgagttgatgtataagcggcacggcgaaggcatggaggtttatgccttcggctttcgtggtttgaaggctccctttgtcaagcagttcgccgatccgcgcaggtggcgtgagctgcctgccaatgcggtgttgttcgtcgatgaggcccagcaggtctggcgtacccgtgccggtgggcgtccagtgccgcctgaagtgatggatcttgaaacgcatcgccatcagggcatcgatatctatctgatcacacagagtccgatgtacctggactcgcacttgcggccactgatttcgtcgcatgagcatctgatcagctacgacaagagttcagcgcgccttttccggttcaccgagtgctatgaggatgtcaagtcatcggcgcttcgcagcaaggctcagttcgaagtctggaagtatccagtggttcactacgcggactatgactctgctgaggtgcacacggccaaggcgaaagtgccgtggcgccagcgcattgcaaaggtcttctttgcgttggcggcgctgctgatcttggggagcattggttggttcttctggggtcctgacacgcctaaggtgcagcctgctgccggcgctgcagctcgaccggccaagtcgatgggctcctcattgctgggtggtttcggcggtctgcagtccggtggacctgagcggcactatgccaatgcacaggagtacgtcgaggcgcacacgccgcgcatcgcgtcgttgccttggtcgatgcctgcgatggatgggcgccaggtcaaggccgagccacggctttactgcatgtcctcgggcgaaggcgtcgaccgcacgtgcacgtgccttactgagcaaggcactaagtggcagatgcggatcgatcagtgtgtgcagatggcccgctggggcccggcgtacaacccgtacaaggaagccccgcaggtggcctcagaatcgctgcaggagccccgtgaggcccgtcgcgaggctcaggggcgcagtgatgcccggagcgtgtcaggagtcgctattggtgctgagggaacctttgagcgcactcaggcgtatccgtcgaactggtga

SEQ ID NO: 506299 - DNA, 312 bp, Stenotrophomonas maltophilia
atgcgtgatcggaaactaaccggcccttgggccggtttttcgtttaagcgtggccgactggtcacccccgaaggccgcgaactggaaccgcaggatctggcatggctggccctgactgctgcacaggcacaggaatggcggcgcatgatggagaaccgccgagcccccggcaagcctcgcaaaccgctgcagttcaccacggccaacgtgatcgacctggccaccgcgatcaaccgcccagcgccatcaccagttcgacggatacgcctgagtgcgctcaaaggttccctcagcaccaatagcgactcctga

SEQ ID NO: 506300 - DNA, 996 bp, Stenotrophomonas maltophilia
atgagcgacatccaatccctcaccacccaggcgctggccgatgtggccgccgcacagagccccgacgtgctggaacagctgcgcgtggccctgcttggcaagagtggcagcatcacctcgcagctcaagcagctcggtgccctgccggcggacgagcgcaaggccgctggtgaagcgatcaaccaggcccgcgacgcgctgacccgcgcgctgggcgagcgcaaggcgctgctggaagacgcggcgctggatgcgcgcctggccgccgaagccatcgacatcaccctgccgggccgcaacggcgagcgtgccggcctgcacccgatcacccgcaccctggagcgcatcaccggcatcttcggccggctgggctacgagctgtcggaagggccggagatcgaggacgactggcacaatttcgaggcgctgaacttcccgccgcaccatccggcgcgcgccatgcacgacaccttctacttcggcgacggccgcctgctgcgcacgcacacctccggcgtgcaggtgcgctacatgggcgaccacgcgccgccactgcgcatgatcgccgccggcaaggtgtaccgaagcgacagcgaccagacccactcgccgatgttccaccaggtcgaaggcctgctggtcgacgagcattcgaccttcgccgacctgaagggcacgctggccgagttcgtgcgcgcgttcttcgagcgcgacttcgagatgcgcttccgccccagctacttcccgttcgttgaaccgggcgcggaagtggacatcgcctggcagcagcccgatggcagcacccgctggctggaagtgctgggctgcggcatggtccatccgaacgtgctgcgcaacgtcggcatcgatccggagcgctacaccggcttcgccttcggcatgggcgtggagcgcttcgcgatgctgcgttacggcgtcaacgatctgcgcgcgttcttcgagaacgacgtgcgattcctgaaacagttcgcgtaa

SEQ ID NO: 506301 - DNA, 360 bp, Stenotrophomonas maltophilia
atggcacgagttaagcgtggcgtacaggcgcgtcgccgccacaagaagattctggatctcgccaagggctattacaacgcccgtcgcaaggtcttccgcgtcgccaagcaggcggtcatcaaggcacagcagtacgcctacatcggccgtaagcagaagaagcgcaacttccgttcgctgtggatcacccgcatcaacgcggctgcccgcatcaacggcctgagctacagccgcttcatgaacggcctgctgaaggccggcatcaccctggatcgcaaggtcctggctgacatcgccgtgcacgacgcagccggttttgctgcgctggccgaaaaggccaagggcgcgctggcggcataa

SEQ ID NO: 506302 - DNA, 198 bp, Stenotrophomonas maltophilia; identical to SEQ ID NO: 495859

SEQ ID NO: 506303 - DNA, 543 bp, Stenotrophomonas maltophilia
ttgggagaacgtaatatcagcacccctgacaacaaacagaaccgcaagaatcaggaaatccgtgtgccgcgcgtccgcgtgatcggcagtgacggagaaatgatcggcgtgttgtcgcgcgacgaagcgctgtccatggccgaagatgaaggcctggacctggtcgagatccagccgcaggccgatccgccggtctgcaagatcatggacttcggcaagttcaagttcgaagcgcagaagaaggccagcgaggccaagaagaagaccaagcaggtcgagatcaaggaagtgaagttccgtccggtcacggacgagggcgactaccagatcaagctgcgcaagatgcgcgggttccttgaagaaggcgacaagatcaaggtcaacatccgcttccgtggccgtgaaatgagccaccaggaactgggtcgtgaaatggccaaccggatcgaggccgatctgggcgaggacatcgtcattgaatcccgtccgcgcctggaagggcgtcagatggtcatgatgatcgcgccgaagaagaagacctga

SEQ ID NO: 506304 - DNA, 1902 bp, Stenotrophomonas maltophilia
atgatcaacattacccttcccgacggcagccgccgcgagttcgaaaatcccgtcagcgtcatggacgtcgcccagtcgatcggtgccggcctggccaaggccaccatcgccggttccgtcgatggcgtgctggtcgatgccagcgacgtcatcgaccacgatgccagcctgcgcatcatcaccgccaaggacgaggagggcgtggagatcatccgccactcctgcgcccacctggtcggccacgccgtcaagcagctgtacccggacgtgaagatggtgatcggcccggtgatcgccgagggcttctactacgacatctattccgagcgcccgttcacgccggacgacatggccgcgatcgagaagcgcatgggtgaactgatcgcccaggactacgacgtcatcaagaagatgacgccgcgcgccgaggtgatcgagatcttcaaggcccgtggcgaggactacaagctgcgcctgatcgaagacatgtccgacgacatccaggcgatgggcatgtactaccatcaggagtacgtggacatgtgccgcggcccgcacgtgccgaacacgcgcttcctgaaggccttcaagctgacccgcatctccggcgcctactggcgcggcgacgcgcagaacgagcagctgcagcgcatctacggcaccgcctgggccgacaagaagcagctggaggcgtacatcaagcgcatcgaggaagccgagatgcgcgaccaccgccgcatcggcaagcagcaggacctgttccacctgcaggaagaagccccgggcctggtgttctggcacccgaagggctgggcactgtggcaggtggtcgagcagtacatgcgcaaggtctaccgcaacagcggctacggcgaagtgcgctgcccgcagatcctggacgtgagcctgtggaagaagtccggccactgggacaactaccaggacaacatgttcttcaccgaatcggagaagcgcacctacgcggtcaagccgatgaactgcccgggccacatccaggtgttcaaccagggcctgcacagctaccgcgacctgccgatccgctacggcgagttcggttcctgccaccgcaacgagccgtccggcgcgctgcacggcatcctgcgcgtgcgtggcttcacccaggacgacggccacgtgttctgcacggaaaaccagatcgagtcggaagtgacggccttccaccagcaggcgctggcggtttaccggcacttcggcttcgacgagatccagatcaagatcgcgctgcgtccggaatcgcgcctgggtgacgacgccacctgggacaaggccgaaggcgcgctgcgctcggcactgaccgcctgtggtgtggaatggcaggagctgccgggcgagggtgccttctacggcccgaagatcgagtaccacctgaaggacgcgatcggccgtacctggcagctgggcaccatgcaggtcgacttcatgatgccgggtcgcctcggcgccgagtacgtggacgagaacagccagaagaagcacccggtcatgctgcaccgcgccatcgtcggctcgatggagcgcttcctgggcatcctgatcgagcaccatgccggccagttcccggcctggctggcgccgacacaggtggtggtggccaacatcaccgacgcccaggccgactacgtctcgggcgtgaccaaaacccttgcggagcaaggcttccgcgtcagctcggatttgcgtaacgagaagatcggctataaaatccgcgagcatacgttgcagcgcgtgccctacctgctggtcattggtgaccgcgagaaggaaaatggggctgtggcggtgcgtacgcgttctggcgaagatctgggcagcatgagcctgcaggccttcatcgagcggctccacgccgagggcgcgtaa

SEQ ID NO: 506305 - DNA, 1818 bp, Stenotrophomonas maltophilia
atgtcgcgtggtggcaacaatgccggtccgcacgcgttcgaacgcccgaccgccccggtcgtgcgtgaagtcgcgatcggcgagaccatcaccgtggccgacctggcgcagaagctcgcgctgaagggcggcgaggtggtgaaggcgctgttcaagatgggcgtgatggcgaccatcacccagtccatcgaccacgacaccgctgcgctggtgaccgaagaactcggccacaaggcgatccgtgccaacgacaacgatgccgaagacgcgctgcttgcttcgaccggtgaaaaccaaggcgaagccgtgcagcgcccgccggtggtcaccatcatgggtcacgtcgaccacggcaagacctcgctgctggactacatccgccgcaccaaggttgcccacggcgaagccggcggcatcacccagcatatcggtgcctatcacgtcgaaacgcccaagggcgtcatcagcttcctggataccccgggccacgccgcgttcacctcgatgcgtgcccgcggtgccaagctgaccgacatcgtggtgctggtggttgctgccgacgacggcgtcatgccgcagaccaaggaagcgatccagcacgcccgttcggcgggtgtgccgctgatcgtggcgatcaacaagatcgacaagtccggtgccgacccgatgcgggtcaagaacgagctgctctccgagcaggtcgtggccgaagagttcggtggtgacatccagatggtggagatctcggccaagaccggcctgggcatcgacgacctgctggacgcggtgtcggtgcaggccgaactgctggaactgaaggccgtcgacgaaggccgcgcctcgggcgtggtgatcgaatcgtcgctggacaagggccgcggcccggtcgctacggtgctggtgcagcagggccgcctgaagaagggcgactacctggtgtgcggtatccagtacggccgcgtgcgtgcgctgttcgacgaaaccggcaagcagccggagttcgccggcccgtcgatcccggtgcaggtcctgggcctgtccggtgtgccggaagccggagacgacttcgtggtggtcgaggacgagcgcctggccaaggatgttgcgcagcagcgtgagaccaagcgccgtgagtcgcgcctggtcgccaccgctggcagccgcatggaagacatcatggcgaccctgggcaagggcgagggccagcaggttctcaacctggtcatcaaggccgacgtgcagggttcggtgcaggccctgagccaggcactggtcgcgctgtccaacgaagacatccgcatcaacgtgatccactccggcgtcggcggcatcaccgaatcggacgccaactcggcggctgcttcgaaggccaccgtcatcggcttcaacgtgcgtgcggatgcttcggcccgtcgcatcattgaatccaacggcgtcgacctgcgttacttctcgatcatctatgacgtgatcgatcaggtgaagcaggtggcatccggtctgctgggcgtggagatccgcgaagagatcatcggtatcgccgaggtccgcgacgtcttccgcagctccaagctgggcgccgttgccggctcgatggtcatcgagggcgtggtcaagcgcaacaagccgatccgcgtgctgcgcgacagcgtggtgatcttcgagggcgagctggaatcgctgcgtcgcttcaaggaaaacgtcgaggaagtccgcaacggtaccgaatgcggtatcgcggtgaaggcctacaacgacgtcaagccaggcgaccagatcgagtgcttcgagcgtatcgaagtgccgcgcaccctgtaa

SEQ ID NO: 506306 - DNA, 384 bp, Stenotrophomonas maltophilia
gtgcccaagactttccatcgaaccgaccgtgtctccgcccagctgcgccgtgaactcggcaccctggtgcacaacgccgtgcgcgagcacgggttgccctcggtgagcgtgtccgacgtggaaatcacccgcgacatggcccatgccaaggtgttcgtcaccgccctgatgccggaacgctcggctgaagccgtggccggcctgaaggagctgggctaccgcctgcgcatggacctggcccgtgcgatgaagctgcgccacgtgccggagctgcatttccactacgacgattcggtcgaccgtggtgagcacatcgacaacatcctgcgcgacctgcccgatacgctggccgcggagaagcgtcgcgagagcgacgaagaataa

SEQ ID NO: 506307 - DNA, 909 bp, Stenotrophomonas maltophilia
atgacccgaattcagttccgccgcctggatggcatcctgctgctcgacaagtcgaccggcatgagctccaacgccgccctgcaggtggcgcgccgcctgttccgtgccgagaagggtggccacaccggcagcctcgacccgttggccaccggcctgctgccgctatgcttcggcgaggcgaccaagatcgccggcctgctgctgggttcggccaaggcgtacgatgccgagatcgtgctcggccagaccacggataccgatgatgccgagggccaggtgctgctgcagcgtccggtgccggcgatcagcgccgaggccctgcaggctgcgctggcaccactgacggggaacatccgccagcgggcgccgatctattcggcgctgaagcagggcggtgaaccgctgtatgtgaaggcccgccgcggcgaggccatcgaggccccggagcgcgaggtgcaggtgcacgccatcgaggtactcgagcagcagccggaacggctgcggctgcgcgtgacctgtggctccggcacctacatccgcagcctggcacgcgacctcggcgaacgcctgggctgcggcgcccatatcagtgcgctgcgccggctatgggtcgagccgttccgtgaaccggtgatggtcaccctggaccagctgcgggtgatggccaaggccggcgacgaggcgggcatggacgcgctgctgctgccgctggcggccggcctggccgagtatccgcgggtcgacctcgacgccgcccaggctcaccgtttctgcgtcggccagcgccagcgtgacatgacctggccgcatggcctggtggccgtgttcggtccggacgatgctgtccagggcctgggccaggtcgacgacagtggcctgctggccccgcagcgccgtttcaacctctga

SEQ ID NO: 506308 - DNA, 261 bp, Stenotrophomonas maltophilia
atgtcgatcgacacccagaaggtcattgaagacaacaagcgcagcgccgctgacaccggctccccggaagtccaggttgccctgctgaccgcccgcatcgaactgctgaccggccacttcaagacccacaagaaggatcaccacagccgccgcggcctgctgcagatggtcaaccgccgtcgcagcctgctcgactacctgaagaagaaggacgtcgagcgttacaaggccctgatcgaaaagcttggcctgcgtcgctaa

SEQ ID NO: 506309 - DNA, 2109 bp, Stenotrophomonas maltophilia
gtggcaaaaatcaccaaaaccttccagtacggcaagcacaccgtcacgcttgagaccggcgaagtcgcccgccaggccagcggtgcggtcatcgtcaagatggacgacaccgtactgctggtcaccgccgtcgccgccaagagcgcgcgcgaaggccaggacttcttcccgctgaccgtcgattatcaggaaaagttctacgccggcggccgcatcccgggtggtttcttcaagcgtgaaggccgtgcaaccgagaaggaaacgctgatctcgcgtctgatcgaccgtccgatccgtccgctgttcccggaagactacaagaacgaagtgcagatcatcgccacggtcatgtcgctgaacccggacgtggacggcgacatcccggccctgatcggcgcctcggctgcgctggccctggccggcaccccgttcatgggcccgatcggcgctgccaaggtcggctacaagaacggcgagtacatcctgaacccgaccgtcagcgaactggctgactcgcagctggaactggtcgttgccggtacctccaacgccgtgctgatggtcgaatccgaagccgcgctgctgtccgaagaagtgatgctgggtgccgtgaccttcggtcaccgcgaaatgcagaaggtcatcaacgcgatcaacgagctgaccgtcgaagccggcaccaagccgtcgacctgggaagccccggccaagaacgacgcgctgatctccgccctgaaggaagccatcggcccgcgcctgggcgaagccttccaggtgcgtgacaagctgcagcgccgtgacgccatctcggcgatcaagaaggacgtgttcgaagccctggccggtcgtgtggccgccgaaggctggaacccggccgagctgtcgaaggaattcggcgaactggaataccgcaccatgcgtgactcggtgctggacaccaaggtccgcatcgacggccgtgcgctggacaccgtccgcccgatcaccgtgaagaccggcgtgctgccgcgtacccacggttcctcgctgttcacccgtggcgaaacccaggccatcgtgaccatcacgctgggcaccgcccgtgacggccaggtcatcgacgccgttgccggtgagtacaaggaaaacttcctgttccactacaacttccctccgttctcggtgggtgagtgcggccgcatgatgggcccgaagcgccgcgaaatcggccacggtcgtctggccaagcgcggcgtgctggctgtcatgccgtcgctggaagccttcccgtacactatccgcgtcgtttcggaaatcaccgagtcgaacggttcctcgtcgatggcctcggtctgcggctcgtcgctggcgctgatggacgccggcgtgccggtgaaggccccggtggccggcatcgccatgggtctggtcaaggaaggcgaccgtttcgtggtcctgtccgacatcctgggtgacgaagatcacctgggcgacatggacttcaaggtggccggtaccgctgagggcatctccgccctgcagatggacatcaagatcgaaggcatcaccgaagagatcatgaagcaggccctgcagcaggccaaggctggccgtctgcacatcctgggtgaaatggcccacggcctgaccgctccgcgtgaggagctgtcggactacgcgccgcgcctgctgaccatcaagatccacccggacaagatccgcgaagtgatcggcaagggtggctcgaccatccaggccatcaccaaggaaaccggcacccagatcgacatccaggacgatggcaccatcgtcatcgcgtcggtcaacgccatcgctgcccaggctgccaaggcccgcatcgagcagatcacctcggacgtcgagccgggccgcatctacgaaggcaaggtcgccaagatcatggacttcggtgcgttcgtcaccatcctgccgggcaaggacggcctggtccacgtgtcgcagatctccagcgagcgcgtcgagaaggtcggcgacaagctgaaggaaggcgatgtggtcaaggtcaaggtgctggaagtcgacaagcagggccgtatccgcctgtcgatgaaggccgtcgaagaaggcgaaggcgccagcgccgaataa

SEQ ID NO: 506310 - DNA, 999 bp, Stenotrophomonas maltophilia
atggacatgagcaccgactacgacagtatcgacgacggcgacctgcttggcgacgaaaccctcgacgaccgcgaggcactggaggcgcgcgcctacgccgccttccgcgaaggcgacctgcagcaggcggtggcgctgttcggcgagctgatcgcactcgctgccgaagtgccgtacctgcattacatgcgcggattggcacacaagtacctgcgcgactgggcctcctcactgcaggacaacctgcaatcagaacagctgcgcggcgagttcgatgaagccaccgcgtggaatgccggtatcgccgccaccggcgtcggtgactgggccgaagcacgccgccaatggtcccgctgtggcatcaccctgcccgagggcgaaggcccgatcgagggcaacttcggcgtggcctgcgtgcgcttggcaccgtggtccgacgccgaagtggtgtttatgagccgcattgatccggtgcgtgcacgcatcgacaacgtaccgctgcctgaaagcggcttccgcttcggcgacatcgtgctgcacgacggggcctcgaccggccaacgtgcctatgacgagcgccaggtgccggtgttcaatgccatgcagcgcctgcagccttcggacatggcgaccttcaccgtgttcgtgcagtgcgactcggccgatgacatcgctgccctggaggccatcatgctgcccggcatcggcatggtcgaggactggacggccaccgtgcgccggctgtgccgccgctgcagctacggcacgcctcaccatcatggcgatgaggcaccaggtgaagaccaatggagacgcgaacgtgacctcggcgtggccgcacagggccgggccgcggtggaaaagctcatggcgatgtgggttgctgcagcccccggccgcgtgctggaggccatcgaacagcgcgagcacccgctgagtgaccccgagccgggccaggtgtggtggctgggagaggaggaagaaggcgcgcaggtgtag

SEQ ID NO: 506311 - DNA, 1191 bp, Stenotrophomonas maltophilia
atgttccgccagaccgtggccgtccttgccgtgctgattgccggtgccttgcccattgccgcgcacgcagcgcccgcacagcagccgatcttcggcgcctattaccctggtggatcggccgagcgctatccggtgtcgagcattccggccgagcgcctgacccacctgttctacgcgttctccaccatcgaggacggccgctgcacggtcggtgcggaagcgccgaagaatttcgccgcactggccgaactcaagaaggcgcacccgcacctgcgcacgctgatctccattggcggctggggcgcaggcggcttctccgatgcggcactgaccgaaaccagccgcaagcgcctggtcgactcatgcatggcgctgttcttcgagcgccatgcaggcagcttcgatggtgtggacatcgactgggaattcccggtcagtggtgggccgaaggagctggcacaccgcccgcaggatcgcgccaacctgacccggcttgcgcaggccttccgccaggcactcgatgcgcgcggtcgcaaggttggccagccgatgctgctgaccgccgcgttggccgccggtcgcctgcagaccgatggcccctatgatccggcggcgagctacgacctgccggcgctggccagggtgttcgatttcatcaacctgatgagctacgacatgggcaccggcttctcgtcggtgtcgaccttcaatgcgcccttgcatgaggtgccggccgatccgctggcgccggagctgcgccgctggaacaacgtggccggcgccgtgcagtactaccgtgaacatggcgtgccggccgacaagctggtgctgggcgtgccgttctacgggcgcggcttcaaggtcaccggcgatgcaccggatggcctgtatcagccttacagcgcaccggccgacgccggcgactggcgggtgatcaaggcgcgctatctcgaccagccgggctggaccaggcactggcagccgcaggcgcagagcccgtggctgtacaacgccgaacagaaggtcttcatcagctatgaagacccgcgctcgatcgggctgcgtgcgcagttcgcccgcgagcagggcctggccggggtgttcatgtgggagctgaccggcgacgacgagcaggccagcctgctcaacgccatgctcggcccgtggcagaaggcgcgtatcggcgattga

SEQ ID NO: 506312 - DNA, 1560 bp, Stenotrophomonas maltophilia
atgaagttcagttcgcagacgctgcgcacattcaccaccctgcacacctgggtcggcctggtcgccggcttcggccttttcgtggccttctatgcgggtgcgctgaccctgttccatcacgacctgccgctgtggcagaccccgggcgccgccaccgccttgccggcgggcctggacgatgcgcagtatctgctggaagacgtactggcgacacacccggaggcccgccgccacgttggcatgaccttccccggtaccgaacacccgcagcccctggcgtactggcaggccgacgacggcagctggcgctacgcctggccgggccagatcgccggcagccccgcgccgccgcagaccggactggccgaactcgtcaacgaattgcactacagcctcggcctgccggtggccggcatctatgtgatgggcgtcgtcagcctgctgtatggcatggcgctgctgagcggcctggtgatccacctgcctaggctgttcggcgacctgttcgcgctgcgcccgggtcgcaacctgaagcagctgtggcaggacgcgcacaacgtgatcggcgtgctcagcctgcccttccacctgatgttcgcggtcacgggcgccctgctgtgcctggtgttcgtgcagatggccctgctcaatccgctgatctacgatggcaaggcgctgcaggcggtaccgaccgcgatggacactgcgccggtgcgcgatgccagcggaattccggcgccaccgggcagcctgcgcgtgctgcatgcgcgcgcacttgaagtggcccgcgcgcagggcgtggccaactttgaaccggcctacctgaagctggccaatggcggcgatgccaacgccacgatcgagatcaccggcgaggccagtggcaccctcggcccgcttggtgccgtggcattggacgtggccagtggcgacctgctggcctcccagctgccgggccagcgcgacgccaaccacgccacgctcagcgccgcctacgcgctgcacttcggtgagttcggcaacggcgtggtggtctggctgtacttcctgctcggcctcggcggtgcgttcctgttctactccggcaacctgttgtggatcgagtcgcggcgcaagcgtcgccagccgcaacagccacgtgccggtgtgaacatggcgcgggccacggtcggcgtgtgcatcggcctgtgcgtggcgatctcgatcgcgttcgtcaccgcactggtgctggagcggctggcaccgtcggcggtcggccacggcatccgctgggcctgcttcggcagctgggcagcctgtgcgctgtgggctgcactgcgccgtcccgcgcaggccgcgcgcgaactgctgtgggccgcagcgatcagcactgcactggtgccggtcctgcacggtgcactcaatggtgactggctgtggcgcgccgccgggcgtggccagtggccgctgttctgggtcgatgccatcgcgctggccatggccttcggcttcgcccgcctggccgtcgccagccagcgccgcgcccgcaacggcgatccgaacagcgtctgggcgaactga

SEQ ID NO: 506313 - DNA, 264 bp, Stenotrophomonas maltophilia
atgtggtcgcgcgccatcgccggcatcatcgctggcttcctgcttgcggccgccgcgaccggcctgctggcctggctgccgcccggcccgtggcagcgcgcactggtgccgaccctgatcgccttcatcccgttatggatgctggccgccctgtgggcgttcagcttccgcagcgcactgcgcgcctggctggttctggggggcagcgccgcagccggcttcgccgtgctcgggctgctgcgcctggccggcgcggtgcaatga

SEQ ID NO: 506314 - DNA, 297 bp, Stenotrophomonas maltophilia
atgatcaccgtcggcctttccaccctgggcttctgcagcctgggcatgctggcagcgatgttttcggcactggccttctatgccgcctcgccgcactgccgttggccgcgcctgcgccgcgccggtcgcctcggtcgccagatcggcctggtcgccgcggctgccgcattgtggctgtggatggccgaactcggcttcgctgccggtctggtggcgatgctgtgcacctggatgctcgccgcgatgctgctgccggcgctggccgcctggcatcgcccgggcacggagtcgccgtga

SEQ ID NO: 506315 - DNA, 312 bp, Stenotrophomonas maltophilia; identical to SEQ ID NO: 500959

SEQ ID NO: 506316 - DNA, 1491 bp, Stenotrophomonas maltophilia
gtgcttgccgctccacgctttcaactgcccggccaggcgctcgaagcgctggcgggtgcgctggtggtagcccgacggctgcgcctccagttcggcgatcagcgaggcggtggcctgctcgatgcgcggcgcgtcgttcggcgccagcttcagcaacccttccacgtacagcacgccccattgcacgcgggtggccgggccctgcgcaccgtcgtaggcacgcttcaaccactccagcgcaccggcggtgtcgccccgctgctcggccagttcggccagttcgggcatgtagtagtacggctgctcgctgcgcttcagttcggccagcagcagcgcttccgcaccggcgtcgtcaccgacctggcgcaatgcgtacgccgcgctgctgatcgttgcctggcgcgcgtgcgcatcggtggcggcggcatcggcagcggccacgcgctgcttgacccgctcaaccatggccgcgggcagtgcgcccttcggctgctgctggcgggcaagcgatacttcgatcagcgcccgcgacaatgcgtcgtcggcgcggtcgccgcgctcggcatctgcgcgttccagcgcaaccagcagctgctgtcccagcgtgttgcgggtggccggcccggcactggcctgcttgaccagctgcacgcctgcatagcccagcaactcacggttgcggcggacttcggcgggctgcgccagcacggcctgcagcagctcgcgtacttcggtaggcgagctggcgggcgtgtcggcggtggccagggccagcagggcgaagcggcgctgcagggcggcatccggtgccgccttggacagctgccgcagtacatcctggctcctgcgctcgccagccaggcggttggcgtcgacttcccagccgtagtcgcccagcacctgccagtcttcggcagccaacttctccggcgtggccagggcggtagccagggtggcagcgattgcactgcggcgcccggcggcgacggtcaacgcccgggtcagttcggcggcgtcgttgccaccggccacgcgggtaagttcattgcgctgtgggtccagtacgatcagggtcgggtagccgcgcaccccgaagcgttcgccccaggcctgcgcaccttcctcgtcgccatccagatagaccggcacgaacttgccggtcaacgcgatgaacgccgggtccttgaacaggccggccttgagctggttgcacggcgggcaccagaccgcgccccagtacagcagcaccggcttgccgctctctgcggcttcggcgaaggcatcatcgacgtcgccctggcgccacgcgattcccttggccggcgcaggtgcctcggcggagttggcggtggaaaccggggccggggtgcaggcgctcagcgccgaagccagcagcaacacggaaagcgcgacgcgcatcggcggcatctcgaagggggacagtccattgtaggaatggccggggagtgtgctgattcagtttgcttatga

SEQ ID NO: 506317 - DNA, 1350 bp, Stenotrophomonas maltophilia
gtggtaggcacccatgccgcttgccccaaccccgccaaacggcagcccatcagcggcgaagtgcagcagtgtgtcattcaccgtcaccccaccggccaccacctggccgaggatgcgctccaccgtcgccgtgtcgtggctgaagggatacagcgccagcggccggtcacgggacagcacgtcggccagcgccgcctccagatccgggtaggcccgcaccggcaggatcgggccgaagatctcctcgcgcatcaggtccaggtcgtccggcgggtccagcaccacggtcggcaccagcaggcgctcgcggtcggcgcgcgcaggatccacctgcgccagcggaatcaccggcacgccgcgttcgcgcgcttgcaccaggtagcgctgcaggcgctggtactgcccctcgttgatgatgcgcgtgtagtcgtcggcattgctgaagtcgccatagcgttcgcgcacctgctgctgcagcgcctgtacgaactcgcgctggcgcacggtatcgatcagcacgtaatccggcgcgatgcaggtctggcccgcgttgaaccacttgccggtggccagccgcgcggcggctttgtccagcgggaaatcgcggcagacgatcgccggcgacttgccgcccagttccagcgtgaccggcaccagatgctcggcggcggcggccatcaccttacggccaacggccgtcgagccggtgaacagcagatggtccagcggcagcgaggacaccgccgcagccacgtccgccccaccctgcaccaccgccacgcgctcgggcgggaacacgctggccagcagatcggccaggaacgcgctggtgcgcggcgtgtgttccgaaggcttcagcagtacatggttgccagcggcaatcgcggtagccagcggcaccagcgccaacgtaaccgggtagttccagggcgagatcaccccgaccacgcccagcggcgtcggccgcagctgcgcacgcgccggccacagcttccatcccgccgatgcccgctgcggcttcgaccatcgccgcaggtggcggcgcaggtggtcgatggccgacagcacgctcatgccgtcggccagcttcgattcggtgtgggcgcggtggccgaagtcctcggcgatggcctgggccatttcgtccaggcgtggcttcaacgcctcgcgcaggcgacgcaggtcggcttcgcgctggtccagcgaagggcgctgggcctgccaggtactgcgcagggtgtgcaggagagcgggaaggtcggctggggcggcggtcgtcatgggccgactatacggggtgctgcacgtttggatggggtcagatccctttcgcgcgcgaaagggatctga

SEQ ID NO: 506318 - DNA, 990 bp, Stenotrophomonas maltophilia
atgtcccatccgctttaccgcccgcgccgcatgcgccacgacgagttctcgcgccgcctgatgcgcgagaacacgctgaccaccgacgacctgatctacccggtgttcgtgcacgaactggcgggccgcaccgcagtgccgtcgatgccgggcgtggagcggctgtcgatcgaagagctgctgaaggtggccgaagaggcgctggagctgggcattccggtaatcgacctgttcccggtgatcgacccgtcgctgaagtcgctggacgcatcggcggcgtgggccgaggacggcctggcgcagcgtgcgatccgcgcattgaagtcgcgcttcccggaactgggcgtgatgaccgacgtggcgctggacccgtacaccacccacggccaggacggcatcatcgacgacaagggctatgtgctgaacgacatcaccgtggaagcactggtcaagcagtcggtgtcgcacgccgaggccggtgtggacatcgtctcgccgtcggacatgatggacggccgcatcggagcgatccgccgtgcgctggatgccgacaaccacatcaacgtgcgcatcatggcctactcggccaaatacgcctcggcgttctacggcccgttccgtgatgcggtgggcagcgcggccagcctcggcaaggccgacaagaagacctaccagatggacccggccaacggcgacgaggctctgcgcgagatcgcgctggacctggaagagggcgccgacatggtgatggtcaagccgggcatgccgtacctggacctggtgcgccgggtgaaggagacgttcggcgtgccgaccttcgcctaccaggtcagtggcgagtacgcgatgatgaaggccgccttcgccaacggctggctggacgagcgcgcctgcgtgctggagtcgctgctgggcttcaagcgggccggtgccgacggcgtgctgacctatttcgcgccgcaggtggcgcgatggctgcgcgagcgctga

SEQ ID NO: 506319 - DNA, 3150 bp, Stenotrophomonas maltophilia
atggcacgtttcttcatcgatcgcccggtgttcgcctgggtgctggcgatcttcatcatcctggccggcgtgctggcgatcccgcggctggcggtggagcgctatccagcagtcgccccgcccagcgtcagcatctatgccagctacccgggtgccagcccgcagacgctgaatgacgccgtggttggcctgatcgagcgcgagctgtccagcgtcaagcacctgctgtacttcgagtcgtcggtggacacgtccggcgaagcatcaatcactgccaccttcaagcccggcaccaatccggagctggcgcaggtggacgtgcagaaccggatcaaggcgatcgaaccgcggctgccgcgcagcgtgcgccagaacggcctggccgtggaggccgctgattccggcttcctgatgctggtcggcctgcgttcgcccgatgccagcgtcagcgaggccgcgctgggcgatttcatggcgcgcaacatcatcgaagagctgcgccgtatcgatggcgtcggccgcgtgcagttgttcggtgccgagcaggcgatgcgcgtgtggctggacccgacccggttgaccggctacggcttgaccatgggcgatgtggccgccgccatcgagcagcagaacctggagatttcgccaggacgcattggtgattcgccgggtgttccaggccagcgcatcaccgtgccgctcagtgccgacggccagttgtccacgccggaacagttcgcggcgatcgtactgcgtgccggcgccgacggttcacgggtggtgctgggtgatgtcgcccgcgttgagctgggcgcgcagagctatgcctggggcacccgcgaggacggccatccagccaccgccgccggcgtgcagctgcgcccgggcgcgaacgcggtgcgtaccgccgcggcggtgcgtgagcgcatggctgagctggcgccgctgctgccacgcggggtggaagcgagcatcccgttcgacaccgcgccgttcgtgaagatctcgatccagaaggtagtgcagaccctgctggaggcgatgctgctggtgttcgcggtgatgtacctgttcctgcagaactggcgttacacgctgatcccggcgctggtcgcaccgatcgcgctgctgggtacgttcgcggtgatgctggcgctgggcttctcgatcaacgtgctgaccatgttcggcatggtgctggccatcggcatcatcgtcgacgacgcgatcgtggtggtcgagggcgtggaacggatcatggccgaggagggcctgccgccgcgcgaggccaccatcaaggcgatgcgtgaactgaccggcgcagtgatcggcattaccctggtgctgaccgcggtgttcatcccgatggcgttcgccagcggttcggtgggcgcgatctaccgccagttcaccgtggcgatggcggtgtcgatcctgttctcggcgctgctggccctgagcctgacgccggcgctgtgcgcgaccctgctgcgccaggccaaccacggccatcacggtcgcggcgggctgttcggcgccttcaaccggggcttcgagcggatgaccgggcgttaccagcgtggtgtggcgacggtgctgcagcggagcgggcgggtgatgggcgtgttcgccgcactggtggcggcgttgctgctgggcctgcactggctgccgggcgccttcctgccggaagaagaccagggctatttcatgacctcgatccagctgccggccgaggcgacggccgagcgtacgctggccgtggtcgaagcctacgaacggcacgtggcctcgcgtccgggcatcggctccaaccagtcgatcctcggctacagcttttccggttccggcccgagtgcggcgctgacctacaccatgctgaaggactggggtgagcgcgcaggcgcaaccgcggccggtgaggtggaggccgcgcagcaggcgatggccacgattgccgagggtgaggtgatgagcgtgatgccgccggccatcgacagcctgggtcgttcctccggcttctcgctggccctgcaggcgcgtaccgggcagggccaggccgaactgcgcgcggccctgcagcagctgctgaagctggccgaagccagcccgctgctgtcggaggtgcatgccgatggcctgccggccggcaccagcgtgcggctggacatcgaccgggccaaggccgaggcaatgggcgtgggcttcgagcagatcagcagcacgctgtcggcagccatgggctcgcagtacgtcaacgacttccccaacaagggacggctgcagcaggtgatcctgcaggccgatgcgccgcaccggatggagctggaagacgtgctgaagctgtacgtgcgcaacagcgagggcggcatggtggcgttgtccgagctggtcaccccgcactggaccgaagcgccgttgcagctgcaacgctatcttggcttcccggcgctgaacctgtccggcgccccggcctccggcgtgtcgaccggtcaggccatggcggagatggagcggctggccgaaaaactcccgcccggcttcgccctgcagtggaccagccagtcgctgcaggagcgtgagtcgggggcgcaggcgccgtggctgctgttgttgtcgatgctggtggtgttcctggtgcttgccgcgctgtacgagagctggtcgattccgttggcggtactgctggtggtgccactgggcctgctcggcgcggtcgccgcggtgctgttgcgcggcatgcccaacgacgtgttcttcaaggtcggcatgatcaccgtgatcgggctgtcggcgaagaacgcgatcctcatcgtcgaattcgcgcgccagctgcagcagcaggggcgcggtttggttgaagcagcgctggaggcggcgcggctgcgcctgcgcccgatcgtgatgacctcgctggcgttcgcgctgggcgtggtgccgctgatgctggcgcagggcgcgtcgaaggaaacccagcaggcgattggaaccggtgtgttcggcggcatggtcagtgcgaccgtgctggcggtgttcttcgtgccggtcttctatgtagtggtgcagggcgcgcggcagtggatcgcgcagcgcctgcgcaggcgccggccgatgccgggaggaaccgtggatggaacggaacatcgttga

SEQ ID NO: 506320 - DNA, 480 bp, Stenotrophomonas maltophilia
atggatatgaggtgctgggcattggtgggtctcttggcgttcgccgcttctgctggggctgcgcccagcctgtcgtgccaactgcagagcggccagttcaaggttggtgggggagggaagcccaaggtctccgagttcatctggtccacaggtcatggctccgcgatccccaccggtcccgtgcgaacaagcattggtcggatcgaccctgtggaaggccgggactacaaacgcgctatcaagctcgatggaaagccggttctgctgcctcccgaagcgcatagcgtcattggcttcggcaaggtctatgacttcaaggacgccatcgctctggcttacctcggcgagcgtgaggaggactcctctgcgcggcctagtcagatcgtgatcgtcatcaataaggccgggtccgtgatcgatagcgaagtcctgcctggtgctgcaacgaatccgggcagtcactgcctactcatcgactga

SEQ ID NO: 506321 - DNA, 219 bp, Stenotrophomonas maltophilia
atgtggacgtttttcaacgtggtgcgttggctcatcacggtcgcggcactgtggtggctttgtagcgtggtgtttgagaagggcactaccgctgaaggagcagtatttgggctgatgctcttcggccaggttgtcttctggcccctcttgctgttgtgggggctgccgtggctactccgccgccgctcaaggcgtgctcaagcccaaaagttctactga

SEQ ID NO: 506322 - DNA, 1344 bp, Stenotrophomonas maltophilia
atgagaagagctctgtgggcggccacccaggatcttgaactagcagagaaagcaattcccgtcagcaagcccaaagaagatgtgaagcgcatttgggaacagattgaaccccacttgccaatctttgctctatttcaaagcgaccgtagcagtaaagattccgacgacgaagtgcagagtccaatgaaagcggcagtctccgcagcactggcagaggtgcaagatgacatagcaagaatccaagcgcgcgtgagggacaaagcggaagagatcgccaagcacacccatcgtgcactgatgacactcgatccgaatctggccagcgaattaacgcctgagttcactccacctaccgcagcaaagtggctcggactcttttcagtgggccttactactgatgatggcatcccactaaacaagcgtggaagtggcgtcaggcgacttgttcttgttagcttcttcaaagctgaagcggaaagaagactgaagacgagtagccgccgaagcatcatctacgcaatcgaagaaccagaaacagcgcagcatccgaataaccagcgagttcttatcgattcatttaagtctttagcggaggattcggggtgccaagtcattcttaccacgcacagtcctggctttgcttcagaactaccacaagacagcattcgctttatctgtcgcgatacagtcacaaattggccaactgtccttagcggcgtggatgtcttcggaatggtcgcagacgcactcggagtgactccggacaatcgagtcaaggtcttgctttgcgttgagggtcccaatgacatatctgctctcaaagcgcttagcaaagcactgcattcacaggacccaacgctgccaaaccttgaaattgaccaacgttttgcattcgtctctctgggaggcgggacgcttggccactgggttaatacgaattacctaaaaggacttggccgtagagaggcgcacatctacgacggcgacgttgcagattacgcaaacgcggtcactgcgataaatgccagagaggacggctcttggggagttcagaccagaaagcatgagatggaatgctaccttcattctgatgctatcgaagcggcgttcggagttcgagtcgaagtgaacgatcatccggtcgatgggaagaccacacccgtgatgtttgcggaggcttataccgcctatcgcggtcttggcgctcccatgggtgagaaaaaggccaagcaacaccttgccagaagcgcgttccctaagatgaccgcagcaatgctcgataaccgagacccggcaggtgaagtgcggggatggttgcaaaagctgagtgagatggctaactaa

SEQ ID NO: 506323 - DNA, 297 bp, Stenotrophomonas maltophilia
atgccgttagagagaaagttggctatcgctagtcgagtgttgtgccctttgattgcccaagaccggacacgagacacccaagagcggatcgaggacatcatccatgctctcgaaatcgccgacgaactgattaatcgatgcatggctccaaaacccccggctgacgaccacactctgaagcctgccgttagggtcagagaagccgtggtagaacgcgatcaggtgcagctgagcgacatgatcacagaacgccgtggcgcagtgtccaagcccactcgcgggcctacctaccactga

SEQ ID NO: 506324 - DNA, 1425 bp, Stenotrophomonas maltophilia
atggatgacaaggatagagaagacctgctgaaagtcgtcagcggctccatcaaccagtggaccggaaacatccagctgccgaatgggactaagctcaccggcctgaacgtcaatgggcgagaagatgctcaagcacttctggaaacgatcagaggcttggcgttgcctgagctctcggttgtgggactgcccaatggacccacccgcgcagatttcacgctatgcgaccgcatcgccctgtatctggcggacctgaggaatgccaagacctcacccggcaatcttctagatagtgagaacacgctcatcatcttccaggaagttgcaggacctgacctgctgatgtcgaaggtcggggaagctcaagtcagagcgtttctgacaggactccatcactggccaagcaatgcgaggaagaagagtgaatacaaagagctgactgcaccacagatcatggccaaggtcaggcagcagagagataagggcatcgttgttgccggtctctcagatcggaccctcggaaagcaccgagaccggcttgccagcttctttaacgcacaagtggccagcggcatcatcgcgcgctcgcccttggacgggatcaaacggcagaactcggcacaatctgtggctgccctgccccgccgtcagttcacgattgaagagatcaacaagatctttgacccagagaatttcctgccttgggttaaagggcgacctgatcgctactggggcgtgctgctggcggcaggcaccggggcgcgggtcaacgaagttggccagctttatgcggaagatgttgcagaagtgaacggcatctgggggatccacatccgcgccgtccatcgcgaccagaagctgaagaatgccaactcgctgcgcttcatcccactacatccccgcctcttggatgctggaattctcacctatgcccgcgatgtcatggaggcaggccatgagcgcctgtttccccacctgccttggcataagaaggcaggctacggggatgccctcggagatcagttccgcgcctatcttgttggcttgggcatgatgcagcccggcatgggcttccactcgttccgacatactgcgagcactcgacttctctacgcgggggtgcttagctctattgccgcagccattacggggcacaaggcgcacatgcccggcgagctcggaacctatgtagatgtgccgacactccaatcgcgcgcagacgccgtggcgcttctccccgttcccgaaggtctgccggtctatcagccgggagaggcagcgcagtctctcaggcaagcgcaactcagagcgaagcggagggcggtcaatgcagctgcacgtgaacgaaaagcggtcgctcttgccaaaagcgcgcactccacgacgccagcaagtcgcgtgaggaagccatcgaaggcgtcgtag

SEQ ID NO: 506325 - DNA, 363 bp, Stenotrophomonas maltophilia
atgaaaaagcccaagcccgaagtacagaagttcaacctgaggatgcctgtggatctgatggaacgtgcccaggagcaggcctcggtgatgggggtctcactcaacgcgtttatcctgatggccctgtcggatttcgtgcgccggatcgaccagcaggcacgagcgtcgacggatgccgaagcggaatcgatcatcggggcgccgatcaagccagcccccaagccgagggccagccgtgccagcactgcgaaggcgacagcgtcgaagccggtggaaccgccaatgccacgcgttggccgcaacgaaccgtgcccgtgcggctcgggccgcaaggccaagcactgccatccggcgtactgctga

SEQ ID NO: 506326 - DNA, 147 bp, Stenotrophomonas maltophilia
atgttaatgattgcatttgccatagttatttatgcaattctactgtatctcacctttaaaaagaaactcgattcaccatcccaagagaacaagcaatctggaaacgccaaatccaaccaggaggatggcgatatagataaaaattaa

SEQ ID NO: 506327 - DNA, 1398 bp, Stenotrophomonas maltophilia
atgggagaaacatcgagcaccgcgacttcggacggtgagcttgtagcggtcagcagtaggatgttcgagaacatcagagatcagcttgtcgctggcgaatttcgagtagaactatttgactgcaaggcggtgcaatgcgtcgagaacgagccattggtcttcgaggggattggcgtcgtcagccaggcgaaggatggaagcattgaattcacgctcctgtgccagaaggttgacgctcgcttcgatccattcgtagagcttttcagcgacttggaacccggcaaattggtggaagacaggagtcgctataacatttcggggcacgactcgcttggaatacggtggcggtgtcagcgtcagatgttgggcgtagaccaagggcaagagttaaggctcacttcaaatctaacaaacctggttgcggagcagaagtcatcccgaaaggaactggagaaggaataccaaggctggtacttttcaggtgatctgaagatgccgactcgaccgcattcgaagaagtgggagcatgagcgtggctcgacttcctggaagggagtggtcgatcatcatggaaattcagaactctcgttccatgcgccccaagagggcttcaagcaacgatcagaggacttcctgcgtggtgtagcgatgctgtgtgggcgtccactttcgccgatgtgcgggtatcgtttctttggcgaccggcaagtagtagagatcttcgggtggcgacgcgaccctcatcgaaaagtgatggtcccttttgttccacgtgcgtggcgatatgccatatcttggaacgagtttttggaggcgtggatttccgtcgagcgtcaagtaggcgaccgtagagcacagacattcatcttccatcactttgcccgcatctgctacgcccagcaagaaggtatcgagaacggagcgcaggttctttcctcttctattgagggcatgctcgcaagcttgtttatgacgaacgacgataaggatctggagtttgctcggcttatcgaagtgacgcttgattcggcttcaagcgctggtctcgatctggatgagaggattgtaaggctcttgacgaagagtaaggagaacgcagaacgaccaggtataaagagcgttttccagagtatgattcgtcgcgggcttctgaatccaaagctcttcgaggcgtggaccaagattcgtcacaaggctgcgcatggagagctgcttggaatcacggaccaagagcatcagaaaatgtacgaccgattttttatatgcatagagaccttcaagagattggtgtttgatgtcgttggctatgccgggaccactgttgactatcagaaggcagggtggccagtgatcgagaaaaagctagcaacctctactggtgatggatcagaaccatga

SEQ ID NO: 506328 - DNA, 252 bp, Stenotrophomonas maltophilia
atgtgggagccaatacttgggcgcgacttccttcttcacacctcccgccttcttagggacatccgccgccagcatgctgacgatctcggcgcgctgcttcgcagagaagctcttaccgtactgggaaacgaggttggcgacctccgcgaaggcatcagcagcctgctcttggagaagctgaacttcctgttcctcaagcttgcgcagctcttcagcaagcttggctttagcggaggcaatggaatcgagtga

SEQ ID NO: 506329 - DNA, 1983 bp, Stenotrophomonas maltophilia
atgtccacgcttggaagcttgatgcatacctcggccacgcaaggcaatccgattgatgccctgcgaagtttccttgagacggaggcgcgcaatgaggctgcaaagcagacaagcaagatgcgctttgtgggctacgtgctagagctaggtttcgacactgcaaagatcatcacgagcgatccctacaagctggccgtgggcggaatccctcgcggctcatttttgatcatgacgccggtaaatacggcggcggcaccggcgcacttcacccttcttcgagtgactggcgtatcacccacgccactgagtaatcaagttcagcagacgtattttgagctgcacaagaagtccatgccagaactggatgtttggacacagagcgagttgcagtggggggctctggactgtgatgtgctggggatgttttacgccgatcctgccgctatgcaacgtctcgcctactccggtgatgtgaacaatgtggtgagcgcacatcgatacaaagtttttgcgccggatgacgctctgttgagagtaatcgtcaatggcatggtcaagccagagagccagatcgaaatcggggcgttgaggacgatggagtgcggtctgtccagcgcaaccgcaagcagaatcggcgtatcaatctccatgcgagatttcaagggctgccgaactgcgatgttcggcaagacgcggcttggtaagtccaacgtagtcaagctcattgccaagggaatgcttgatgcaacagcagatgacaagtcagtaggccagttgatctttgatgtgaatggcgagtatgccaacgacaatccgcaagatgggaacaagtccatccgctcggccaatgcagaccgctgcgaagtctatgccttgacgagccgagcggaaactccctctaagcctttgcgactgaatttctacgagcagactgattcagctatccaggtcattggctccatgcttgcgcaagcaaacaagagcgcagattacgtcaaaagcttcagcagcgttgagctgccctccatcgaaggcataaaagcacttcctgatggcgaaaaggtcaggccaattcgaaagattcagatgttctgggcaattctctcaaaggctggctttgaaatggatgaggccaggttgagggccttggggcttgtttcaaagaatgcaaagaatttcaatccgcatttcaataaaaatttgcgcaatgccgcgtatcaggctgttcgcgacacggatgcgccggcagctatcgattcacctgatgggttgagggctgagcttgaagttatggctcagttcgttagggagaatcctaaccacccagagcttacttcttcatctgggaagcccatgttcgaagcggatcatctcgcgcttctaaaattcttcagtcccggagccttggggacaggtccagctatgctgcgtccttacagagtctttcactctccccatgctggagacttcaatgccgaaatccttaagcttttggacgacggaaagactgtaatactagatctgggtaatgcaacggatgaaatccgtcgctactttgccgacatgttgtcgaaggcggtgttcgcccatcaagagactaagtttgttagcaacgctctgggaggtcgcttcgttcagctgtatttcgaggaggcccataacctatttcctcctgatgcgcgtgatttgaccggagtgtatgctcgctttgccaaggagggggcgaagttccacatcgggatggtgtattcgacccagtcaccctccacgatcaacaaggaccttttggctcagacagaaaatttcttcgtcggccatctatccagccaggatgaggcccgtgcgttgggacgagttcagatcgccttcgagggtatcgagcaggacatcctcagagctaagacacctggttatatgcgcatgcttaccatgtcgcatcggttcgtcattccagtgcaggcaaacaagttcgaggccatttga

SEQ ID NO: 506330 - DNA, 1389 bp, Stenotrophomonas maltophilia
atgaccgattcccgcattgcctcgctgcagcaggcctgtcccggcctgaagctgaagaccgacccggccgacctggagcattacgggcgcgactggacccggcgctggacgccggcgccgctggcgatcgcactgccggccacggtcgaggaggtacaggcggtgatgcgctggagtgccgccgagggcgtggcggtggtgccgtcgggcggccgcaccggcctctcgggtggcgcggtggcggccaacggcgagctggtgctcagcctggagaggatgaacaaggcgctggactacgatgcggtcgatcgcaccctggtggtgcaggccggcatgccgctggaggccgtgcacaacgccgcgctggaccacggcctgatctatccggtggatttcgctgcacgcgggtcgtgcacgatcggcggcaacatcgccaccaatgccggcggcatccgtgtgatccgctacggcaacacccgcgagtggatcgccgggctgaaggtggtcaccgccagtggcgaactgctcgagctcaacaagggcctgatcaagaactccagcggctatgacttccgccagctgctgattggttcggaaggtacgttgggggtgatcgtcgaggcgacggtgaagctgaccgatccgccgccggccagcaacgtgatgctgctggccgtacccagcttcgaagtgctgatgcaggtgttcgccgcgttccgcgcgcgcctgcaactgcaggccttcgagttcttcaccgaccgcgcgctggaacatgtgctggcgcacggtgcgcaggcgccgttcgacgaggtgcacccgtactacgtggtcaccgagttcgccgccaacgacgaagcgcaggaagcggcggcgatggcggccttcgaggactgcatgggcaacggttgggtcagcgacggggtgatcagtgccagcgacgcccaggccgcacagctgtggcgcctgcgcgaaggcatcaccgaatcgctggcgcgctacaaaccctacaagaacgacgtctcggtacggatctcggcgatgccggcgttcctggccgagacccaggcgctgatcgggcaagcctatccgcacttcgacgtggtctggttcggccacatcggcgacggcaacctgcacatcaacgtgctcaagcccgacgacaccagtgacgcggatttcgtggcgcagtgcgagcacgtcaccaagctgctggcgcaggtgcttgcgcgtttcgatggcagcatctcggctgagcatggtatcggcctggtcaagaagggctacctggacagcacccgcggcccggccgaaatcgcgctgatgaaggcggtcaaacgcgcgttcgatccccaagcgcggctgaatcccggcaagctgttcgacgcctga

SEQ ID NO: 506331 - DNA, 435 bp, Stenotrophomonas maltophilia
atgcggacctcgttggcgcaggctgtctcgtacatccacgtcgaactgaatttgcaacgaaatgtcatcgagggcgatgctgaaacccaggccatctcgacaaggcaatcttgcagccaaggttcgaatcgcttcgcggggcagcgccagacggcagtactcacctgcactgaggaccacagcctgttccccggcgtgcagcgacagcacgacgccccaaccgtagtcgccgccgagccgcgtcatgttttccaccgactcaccaaccagcaaccgcgccagctcctcctcatcaaggcgcaggcgaattgcttgccgttgcatctggactttcatgatgcgatggactccagatcggccgggctattgcagttgagaagcagcttgcgttcgttgtctgccagtggcagctcgatcgcccccaggcgttcctga

SEQ ID NO: 506332 - DNA, 261 bp, Stenotrophomonas maltophilia; identical to SEQ ID NO: 500966

SEQ ID NO: 506333 - DNA, 762 bp, Stenotrophomonas maltophilia
atgcagttcgtggaaatcgagcttgatcccggcgagagcgccattgccgaggccggcgcgttgatgttcaaggacgccacggtgcagatggataccgtgttcggcgccgccaatggcgaccagggcggcggcttcatgggcaaggtgatggctgccggcaagcgcgtactgaccggcgaaagcctgttcgccaccgtctacacccagagcggccatggcaagggcaaggtcgccttcgctgcgccctaccccggcacggtgctggcgatgaaactggaccagcacggcggccgcctgatctgccagaaggacagtttcctggccggcgcgcgcggcgtgcagatcggcgtgcagttccagcgcaagatcatgaccggcctgttcgggggcgagggtttcatcatgcagaaactggagggcgacggctgggtgttcatccacgccggcggctgcgtggtggagcgcgagctggccgccggcgaacgcctggacgtggataccggctgcgtggtggcctaccacccgacggtggacatggacgtgcgtcgggtggccggcatcaagagcatgctgttcggcggcgaaggcgtgttcctggccacgttgaccggccccggcaaggtctggctgcagtcgctgccgttctcacgcctggccggccgcatgtggatggccgcaccgcagggcggcggccagaaccgcggcgaaggctcggtgctgggcggcctgggccggatgctggatggcgataaccgcttctga

SEQ ID NO: 506334 - DNA, 207 bp, Stenotrophomonas maltophilia
gtgtccagcctgacccgcctgaacgcccgcagcgccggcctggtgatcgcgctggaaccggtctacgccatcgccttcgcctggctcctgttcagccagcagcccacggtgcggatgatggcgggcgcggcgctgatcgtggccggggtcctggccagcgagatcaagttcaagcgcaaaccgaagccgctgccgtgcgaggcctga

SEQ ID NO: 506335 - DNA, 141 bp, Stenotrophomonas maltophilia
gtggaagccgagttgggcggccgtggccgcatcctgatccgcgcgtccggcaccgaacccaagctgcgcctgatggtcgaggccgaggacgaggccctggccgtctcctctgcagagaagctggcggccagcttgggataa

SEQ ID NO: 506336 - DNA, 1203 bp, Stenotrophomonas maltophilia
atgatgcgccgaagtctgccgctggccctgggcctggtcctggggctggccggaaccgccggcgcccagtcgctgggcgctggcatcggccagaacctgaccgccgccgcggccctgccactggatccggccgcgttgccggccgcgtcggtccgcaacggccaggagatcttctccagcttccgcgacggcctggccgagcccacctgcaatgccgaggccaccagcccgcgctggcagaagcagttcgcccacgccccgtcgcgcctggccaaccaggatgacgatgcgctggtgctgttcggctatgtggtcgaagagctgcgcaaggccaacctgcccaccgagttcgcgctgattcctttcgtggaaagcggctaccggcccaatgcccgcaacggcagcggcccgaccggcctgtggcagttcatcgccaccaccgcgcgcaatcaccgcgtgcccatggccaacggctacgacggccgcctgtcggcggtcgattccacccaggccgcagtgcgctacctgaagaccctgcacggcatgttcggcggtgactggcgcctggccaccatggcctacaacgccggcgagtaccgcgtgctgcaatccatgcgcaaggccggcatgaacgcgcagaacgccaagccctcggcgctgcccggcctgtcgccggtcacccatgcctacgtcgagaagctgcatgccctggcctgcgtgctggaagacgtggaagaccagccaggtgtcatggcctcgctggaccgcaccgtgccggtgctgaaggaccacaccctgcccgccggcaccagcgtccagcagtgggccgcacagcgcgccctggacccggcccggatcgcccgcctcaaccccgccctggcgggcggtggccgcgtctcgtccggcaccacccgcgtgctggcgccggtctcggccgccaacacgaccgtggcggacagcgccaccgcgctggtggccagtagcgtacctgtcgccgccgcctcgccaacgccgcaggccgccaagaccgtggccgcgatcgccgatcgtccgcgcagccgtcgccacaccgtgcgtgatggtgaatcggcctggaccatcgcccgccgctatggcatgccggtcaaggcacttctgtcgctgaacggcctgagcggcagcagcgtgctgaagccgggtgcggtgctgcgcgtcgaagactga

SEQ ID NO: 506337 - DNA, 1644 bp, Stenotrophomonas maltophilia
atgaacccgagctgggatacgttggaacgcagtcgccaggcccgcctggaacgtgccgcgccgtgggcccggggacgcgaggtcgccagcagcgacgtcggcaagttgctgcacgcagtgctggagccaggcgacaaggtctgcctggagggcaacaaccagaagcaggccgatttcctcgcccaggcgctggccgacctcgaccccgcccgcgtgcatgatctgcacatggtgcagtcggtcctctcactgccctcgcacctggacgtgttcgagcgtggcatcgcctcgaaactggatttctcgttctccggcccgcaatcggtgcgactggccaacctggtagccgaagggcgcatccagatcggtgccatccacacctacctggaattgtttggccgctacttcatcgacctgaccccgcgcgtggccctggtggccgcgcaggccgcagatcggcacggcaacctctataccggcccgaacaccgaagacacgccggtgatcgtcgaggccaccgccttcggtggcggcatcgtcatcgcccaggtcaacgagatcgtcgacagcctcccccgcgtcgatattcctgcggactgggtcaacttcgtggtgcaggcgccgaagccgaaccatatcgagccgctgttcacccgcgacccggcgcagatctccgagatccaggtgctgatggcgatgatggccatcaagggcatctacgccgagtacggcgtgaatcgtttgaatcacggcatcggcttcgataccgccgccatcgaactgctgctccccacctacgccgaatcgctcgggctgaaggaaaagatctgccagcactgggcgttgaacccccacccggcactgattccggcgatcgaatcgggcttcgtcagatcggtgcattcgttcggttcggaactgggcatggagaaatacatcgccgcgcgaggcgatgtgttcttcaccggcgccgatggctcgatgcgttccaaccgcgcgttctcgcagaccgccggcctgtatgcctgcgacatgttcatcggttccacattgcagatcgacctgcagggcaacagctccaccgccacccgcgaccgcattgccggcttcggtggcgcaccgaacatgggctcggacgcacgtggccggcgccatgccagcgacgcctggatcaaggccggccaacaggccgcgcgcccgggcgagatgccgcgcgggcgcaagctggtggtgcagatggtggaaaccttccgcgagcacatggcaccggccttcgtcgaacggctcgatgcttgggaactggccgagcgcgcgcagatgccgctgccgccggtgatgatctatggcgacgacgtcagccatgtgctgaccgaggaaggcatcgccaacctgcttttgtgccgcacccctgaggaacgcgaacaggcgatccgcggcgtggccggctataccgccgtgggcctgggccgcgaccgcgcgatggtggaaaacctgcgcgaccgcggcgtgatccgccgtcccgatgaccttggcatctccgtgcgcgatgccagccgtgacctgctggcggcgcgttcggtgaaggacctggtgcgctggtccggcggcctgtacgacccgcccaagcgcttccgcaactggtaa

SEQ ID NO: 506338 - DNA, 846 bp, Stenotrophomonas maltophilia
atgatcggcgttggcttgtcgccagccgcaattgcccagacgacggtcacgtacatccataccgatgccctcggttgggttgttgccgagagcgatgccaatggcaacgtgatcaagcgctatgactacgagccttatgggcctgtcgttggcggacaggtcacggacgggcctggctataccgggcaggtgagcgactcggccaccgggctgagctacatgcggcagctgtatatggatccccagttgggggtgttcctgtcagtggatccggtgacggcgtatctgaaaccggttgggcagttcaatcggtacaggtatgccaacgggaatccgtacaagttcactgatcctgatgggcggcaagcgatcccggtgccggctccttgcctccttcccatcccggttcccaatcctggtggaaacatccagcgcagtgaggatacatccggggggaatcgcgagagcgggccaagtggaaggccaacttcgagacccactgaacgtcccgcaggtcgggatacagttcggcgggggcgagacgggcagccaatacccaatcgtttccccgaccgaccactacccacgaagcccaatggtgagcctgcgccagaaccggatgcggctggcccgcatacgcaactggggcagcgagatggtagaaatggaaagtacgaccaggcgagagaattcgacggtcacgggaggccggtaaagactattgattttactgaccacggccggccgggcagtcatacgaacccgcacgaacatccttatgagccgagtgctaccgggggcactccttcacgcggacccgcgcggccgcttaacggaggcggatag

SEQ ID NO: 506339 - DNA, 624 bp, Stenotrophomonas maltophilia
gtgagtacgcttttgtctgattggtgcgcgttttgtgaagggcttgctgtgttcgataagtctcattttttgggtttgttgaaggagcattcgggcgattgtgatcttcgaaagatatttagctatttctcgtcgtcggcagatttgcatgagcgcgcggttaaggttatttcttccggtagattggatggttcgttgtacctgcttccacgtttctctgcgtctagggaggaaattgttaggcttgggggtgagtggttaaaaggccaggaggaaatatgtaggaggatcggtgaggtcgaaattgaagaaatttgcaggcgtgcggaggtagtttttgttgccggggggcatctggattccgtgcttcgcatggatattcctcaatattggctgtttgacggaattggtgactctgttagggggagtagaatatctgaatccgaccaggtgtatgcgctgctcgaggcgctttatggcttggctgccgattattatctggcgtggtacattggtagttctctgtttaagttggatgtggattttggtccatactttgaattctggcgcatgggggggcggtgcgcactgactgagtcgcagtttctagtttctaatcagtaa

SEQ ID NO: 506340 - DNA, 768 bp, Stenotrophomonas maltophilia
atgcccaaggaagaaaaaaccataacgctcacggtttcgggccctgatcgtgatccgaacctaatgaataaactcacggcgagcgacatcgtcgtagaagcggcgcatgccgccattcaggcggtccctgttgtgggaccggccgcgagcgggatgctaaaaattgcctttcagtcaccgagccagaagcgggcgtcggagttcttcaatcacgttcacaatgacctgagagctgtcgagggcaagctgtcaagcctgcctgatgaactctttgaatcaggggcttactcctcagctcttatcagcacgacccatattgcactactgacaaaagagccggaaaaaattgatgcactgagagctgcaatgctcaacgttgcccttaatgccagcgatgatgaggctttcaatcagatgcgaattgcggccttaagggacatgaccagcatccatatcaaagtgcttcagttttatgcagcgagacggccagatgttgtagaaagactggggaaggataatagggcaatcaccccatctgactttgagacaccgttacgggcttgtttcagacatgacctgcccttctacattgtagagagggcctgccgtgagcttgaatctgcaggactaatttccgtacggccaggcttctacaaaatcatgtctggagacaatttcgccacgatgcttcccactgcctttggttcagttgtccatggattcattaagcttccggcagaagtcagcccgctaacatcggcggagtag

SEQ ID NO: 506341 - DNA, 321 bp, Stenotrophomonas maltophilia
atgctgaacgaccttgcagacgaggtcccggactggcacagcctcgtacacggtgggaacgtggtagtcgatctgtacgatggcggcgacacactgcagtcgcaggtcgggccggacgacatggcgtttaaggttaggcgcgttgccgtcctagcgttcctgagcggcatcgtcggtttgaacctcacggcggatgagggcagacgccatgaagtggatcacattgggagccggctgctcgaaaagatccgagcattccaggcgaggtggccaccacctagcgaagtcggcgaggctaagaatgacgaaagccgcccgtag

SEQ ID NO: 506342 - DNA, 243 bp, Stenotrophomonas maltophilia
atgcaacgggtgaacgacgggatctggatcgccagtctcggccggcaccggcatggtcccggcgggccgttccgctggtgtaccagctacgagcaggggcgggccggcgccgagatgtgggtgaccaggcacgagacccgcctgcgcgaggatgtggccaagatcgaggcctatcgagaggcggtgcgggcgaacaggttgaagaagctgcacatcaagccacccttcggctggcaggcatga

SEQ ID NO: 506343 - DNA, 789 bp, Stenotrophomonas maltophilia
atgcacaaaatcgcaatcttcctggtcggcgtctgcgccattgttctttcaggctgcgcgactaccgtaccaccgaaaggcgttgcctcagctggatatactgaagttgtttccgtccctctaggccctcttcgctacttctacacggcttccatgcttcctggccagaacgccgtaggcaccacttatctcgtccgctgcgcgcacaccaagcggacgatcaacttacagatcgcggatgggcttgcgattaacgccgaagatgcctgcgcacgtgtcgatgcggcggctgcctcatccgagtcatggataccggcagcatcgaacagctatcggatccttcttgtacaggaaggcacttctgcggcagcgcgggcaagatcgcttggccgctttgccacgggcaggacgctcgcacttgtgtcaccggtctacggcgatcaacatcagaccttcgcgaatctcgttgacctggttgcgcacgagagccttcatgcattgggccacgctacaaagcatccccgagcgctggacgaaagaagcgcttactacgcgggcctatgcgcgcaacttcagatcaacggcttcatcacggaagaaggcttgccgggggcccctctcgcgtccggtgatcgggcagtacgctactcctcgcaggaagcctatcgcgtgcggctggaaacctatccgttgctagcggacggaggcatccggcttggagctcgatccggcgagttgatgctgcaacggtgtcagcagatcagacgcgagatgaatcggcttcggtag

SEQ ID NO: 506344 - DNA, 228 bp, Stenotrophomonas maltophilia
atgatcgatccgctcattaccttcgtgctgctggcggccatcgtggtcgtgtccattggcggcgctcgcatcgtttcgtggctgctcgacaggcgtgactacaccgcctcgcagcggtcccgcgaagcccaggtgatcgcactcgcacaggctgagattgccgccaccaagcgcggtgatctgctcgctgccgctgagctggccgatgcacaggagcgagtcgcatga

SEQ ID NO: 506345 - DNA, 1140 bp, Stenotrophomonas maltophilia
atggaaagttggagggaatcgttactctatttgcgcgccaagatgtcttccaagtcattgaaaatgataaagccgtaccacgaagcccggctgaaaaacatgctatgttttgcgcaatccgacagcgccagatcactgaagaaggcgttgaacgtccttagggcgggggtttggtttgaagggctgcgcatgcgcttgtatcaatccaccgcctatggagttggtcagaaaatgcagccgcacacctaccgcgacggcatctatcaccacaatgtgtgggccaagtacgctgtgggaaagcatttgccaagtgctgagacggtctatgcctgtgaggagcaggtccgggggtcgagtcacctactggaggatccgagctgggacctgctggatgtgagtcggccgattggcggcgacggtgacaaactgctgaggcgattgcggccctcgatccaaagtgcccttttcaaagaacgtgctttggcgaaggggcgctatgttcgtcgcaccgcacccgtccaaccgctgatccgccttgagggacaggcagacctgcaggcgattgcggcggctgtcgtacttgttcgagaagcctacgaggcgggcgatacgtcgcgcgcatttgacatcggacgttcattgcaccgaatcacgctgatggctgcagtcgtgaccggcttgcgcgggatcgcaccagaactgtttgagtacctcatccgctatgtgttcccaatggcgtcggacaccttcattgagttcgatctcaatcgggaagtgctcaatgcacaggcagattggctgcgcagcaccattcttcagatggaagacaatggctggacgggctatgtgcccggtggcccgacgcgggagcttcgtagactgctttcggtcgactatggctttgaccttcggtttggattggggccgcggttcaaattgaaggtgccgttcgaacacgccagcgaagacgcgcgacgctcagtcagcttcaataacgcggcctgggaatgggctgcagcggtgctcgcaacgggtagaaggcaggccctgatacctgaagaggccatcattcgcctgatggccgccaacggcgagccagatggcgccatggcgcactcccatcctgtggaaagtgcgtag

SEQ ID NO: 506346 - DNA, 246 bp, Stenotrophomonas maltophilia
gtgaccaagaccatccatcgcaaggagtattcggcgctgatcgaggtggttcgcgatgcacggctggcggctggcctcacacaggctcaggtttcaagcaagctgggacgcagtcagtcgttcatcagcgatgtcgagactgggaagcgcaggcttgacttagttgagctaagggatatagctgagttgactggacaatcgctctccaagctagtcactaacttcgagaagcggatcaagggctga

SEQ ID NO: 506347 - DNA, 432 bp, Stenotrophomonas maltophilia
atgcgaccgaccatacttgccctagatctggaagggacactgatctccaatgccgtcagccagatcccgcgcccgggactgagtgagttcctttgctccgttcatgatgatttcgaacgactggtgctgttcaccagcgttccggaaccacgagcgaggggcatcgtagagctattggctcgagaggagcatgctccttcgtggttctcccggctggacttcacccagtggcatggcgcgacaaaggacttgcgctttatcaccccagaacttggtgcagctttgttgctcgatgaccacgccgcctatgtgcaccctggccaagagcgctggtgggtccacataccgctatttgcctcgccctatgaggcctgcgatcaggggctggcgcaagcgctgcagaatctgcgtagaaggcttgctgagctttag

SEQ ID NO: 506348 - DNA, 780 bp, Stenotrophomonas maltophilia
gtggcctatgtcgttaaccaaccgaccctcctcgcaacctggccagaactggacacatttgttcgttcgattggccctctcttagcgtgcgcgtggtgtgcgcttgagagatcgaggaatgagagcagtccggtcgctactgaggggctcgcagttcaagctcttgagaccctctcaacgctccgagttctagatgcggtccccctccctcttgctggcaatgctgcgcgatcgcgatatgagccgcttgcttggtcatatcgcgccccatggagccgccctgatgttgatcttggctacctcttgaccaccattctcctggtctgggctcgagagtgcccggtcgactccaagcgtcggctctgggaaacattggccgaaggtgaagccaacgcctacctggcgagtctgttgcgcaagcaccgaatgtccccggaggtgggaaagcgcctgcgctcgctagctggcagtgactgggagcaactcagtcttggtcggaagcgatatgttctatggtcgagcatgcgcggcgctgcctccgagcttcttcgaaccggcatgagtgaggatcgagcgatcgctgccctggaccgagaggttggaacaaaatgtaagtggcttctgcagcgccagcaggctggcgggcttgcccctactgactattgcttctttcccagtgcagaatggcgccgacctttgatactcgatgtggcgttggcgacttttctgccgatcgggaacgcctattgggcctggccggtcggtcgctggaagttctaa

SEQ ID NO: 506349 - DNA, 2277 bp, Stenotrophomonas maltophilia
gtgacgctcgttgaccgcctcccgaccctgaacgcatccgccgctgacacgctcaaaacgctccaccgtcattcgcgccggatgacggtggcctgtggcattggtttcagcttggtgataatcgcggcgctggtgctggtggcgttcacctgcataaaccagttccaggctcgccggatctccgaattccgccgcgcgcacaacgccgtgcagatggagctttcccgccacgaagcgggctatgcacgtttgaccagcatggccgaatacacctggcagcatccgccacaatcgagcaatgaccaacgggagggtctgcgccagcgctatctggaaggcgggcagcgcgggatcatcgtgggtgatgccggaagtcgcccgcagatggcactcggtctgcacacggaccgttgggatcccatacggctggaccgctacctgcagctcagccaggcgatgtcgcacgcgcagaccctgcagggcacgaccgggcgcgtgtccgcaggggttgcttacttcttcgaccccagtgcgaactacctctccctcggccaaaggctgagcgaggcccagctgaagcacacgctgggcgcgtccagccggcaacaggtgttcgacaggctgcgcgcgcccgccgggctgatctctgcggcgtccagcaacgacagcctgccgatgctggccggggtcggccgcaagtcgcatgcacggtggtcgatgggcagccatccgctcaccggcgagccctccctggtcgcgtccttctacgcccaccagaacgagacgccggtcgccgccttcgtcgcctacgagtcgatcaccgaaatggtgtgcctgttgcgggcgaacagccggggacgcatcgcgctggtggacgaggccggtgttccggtcgcagccacctatacgatgagcgacacgcagaagcgcgatctggaacggctgaccggcacctgggtgctgctcggtgatgcggtacgcgcgcgcccgcacgacggcggcttcacgctggcgctgccggtggaaggtacgtcctggttgctggtggagcgcttcacctggcagaacgtgctggccggcatcttcgcgcccatgcgtgccatgctggtcggcaccctcctgttgcttgctgcgctgtggtggctgctgttctggttgcatcggcgcacctgcgtaccggcgctgagggccgccgatgatctctgccggcgcgagcagctgcagcgcgccgtgatggagtgcctgccgcagggcctggtgctgctggatccggcgacaggcagcgtcaccttcagcaatcgagcgatgcgcaggatgtccgagcacagcagcccgcccttgctggcacgcctgcaggacgctgccctcatgcagcaggccctggaggcggtggacacggtgcccagcaccccggtaatggcggtcatcgaagatgtgcagccatggaccgagcagattgctacgcgccagcgtgcgctggatgcggccaacgcgcggatccaggccaagtccgcattcgtggcctccatcagccacgaaatccgcacccccatgcacggcatcatggggcatctggaactgctggcacgcagcaccctggagcgagatcagcagcagcgggtggcgcggctgcggcaggcgaccgattcgctcatgcgcgtgatcggcaccgcgctggacttctcccaggccgagtacgggcagctggtggcaccgtcggtgaacttctcgcctgcggcgctgctcgagcgggtggccctgctgttcgcaccgctggccctggcaaaggacctcgatctggaccacgcggtggacccgcgtgtgcctgcggtatgccttgctaccgaagaccacatcgagcgcatcctgcgcaacctggtcggcaatgccatcaagttcaccgcctcaggccgtgtgcagctcaccctcagccatcagcgcgtgtccgaccaggatgcgctccgcttcgaggttgttgattccggcatcggcatgagcgcggaggaaaaggcgcagctgttccagccgttcgtccaggccaatgcgggcatttccaaacgctttggcgggtccggcctgggcttggccttgtgccgccagctctgcgaggggatggatgcctggatagagatcgaaagcacgctcgaggttggcagccggttcatcgtcacggtgccggtggaggtggtgcagggcgcccgtcccagcccctggccgttggatgcggccacgacgcccaaggcgagctggtgcgccgatctggagaacatgctctga

SEQ ID NO: 506350 - DNA, 3450 bp, Stenotrophomonas maltophilia
atgtcatctgtaagcctgcagcagggcaaggatcccgatgccttcactgcgcgcctggacggcctgcgccggctgcgccgacgtctgatattcggtggcggtggcctgctgagcgcgctggtgctgctcgccgccgtgctcggcgcgatcggcagcatcgacgacttccatgcccgggagcggcagtcgttcctggaggcgcgctcggccatcgactacttcctgttccagcgtgatcgggcctatgccagttcgatcaatggcaatgacctgatctgggcggaacagcggcccttgctgcaagtagcgggcgcgccgctggccgagcggttccgcgcccagggcgatcagctgatcgtccaggccgaaggacgcactgcggtgccgtggctggtgctggggctacccgagaacccgttggacacggcggacctgcgcgcctatctgggcatgctggaagcctattcggcctacagtgcggccaccataagctcgctcgagaccaccggcccgggggtgatgtatgcctacgagccgcaggggcggctgctggccatcagcaacatgcacgatgaagcgcagctgctgcagacgttgggggtggccacccgcaagcaggcgttcgcgctgctgatgcgggaagaagaaacggcgcggacgctgccggtacaggccggtccgatcaccagtgcgttccggtccgggcgcctggcctcccgttacggcatcaacccgctcagcggccagccctcgctgatcggcgtgcttaccctggcagatggcaccaccccgtacttccgccgggtggtgttcgaatccgtggagaacatcaaggcgcggctggccgccagcgaacaaggccggttcctgaccgtatcgcgcgatggccggttgatcttcaccagcggggggctgtcggccgctgcggcctccgcgcttgcgcccagggctgccgacgcgctgtccaaggagccgctgcgccgctacgagggcgggcagttcatcgtcagcggcagcctgctcagtaccgattgggcgctgctgcacacctatgattggggtgacgtctgggccgaccagggtgacaagctgttgatgacaggagcagcggcactgtcgatcatcctgctgttgtgggtgctgctgttgcggatggatcgccgcgtgtttgcgcctgcgctggccgacgcgtcgcgggtatatgaaagcgagcgcctcagcaacgccatcatcggcaccgcaccgatcgggctggcgctgatcgcccgcgacaccggtacgcctctgttggagaaccagacggcgcagcagctggtgtcggcgtgggggggtggggccggggccgcaacggtgcccacgctctacgccgagttgtcggcatacggacgcgcccacggcagtgacaacgcgggcgaattccagtggccgggtgaaggcagtggccgggccaatcgcatgcagctgcagatcggcatggcgccggcgtcctaccgcgagcagccggtctgggtctgcgccatgcgcgatatcaccgaccaggtggaactggaggacaacctgcggcgggcgcgcgaggactctgaacgcgcgcgcgaatcggctgaagcagccacccgggccaaatcggccttcgtggccaccatgagccatgaaatccgcaccccgctcaatggcgtgctggggcatctggaactgctggcacgctcaccgctgcaggccagccagctcgagcgactggcgcgtatccgcttttctgccgactcactgatgagcatcatcagcgacgtgctggatttctccaagatcgaggccggccagctcgacatcgagtcagcgccgttcccggtgcgtccgttgctggaggaaaccgcgatcctgttcgcgccggcggcgcagcgcaagggcgttcgcctgtacatcgcgcaggaattcagcatcgaccaggccgtggtaggcgatgtccatcgcatccgccagatcctcaacaacctggtcggcaatgcggtgaagttcaccgaatcgggcagggtgatgctgcgcgccggcctgcacatcagggacgaggaatcgttcctgttgtgcctggacgtcatcgactcgggcattggcatgtcgccgcagcagctggcgcaggtgttcgagcctttccagcaggccgatgccagcgtgtcgcgtcgctatgggggcagcggcctgggcctagcgctgtgccagcagctggccacggcattgggtggcagcatcgaggcggaaagctcgcagggtatcggtagccggttcagcctgcgcctgccggtggaccgcctgccgataccggtgcccgccgcgccgctggccggccaagcggcgacgctgctgtcgagtagcccggaatggcgtgccgagtacgcgcgggtgctggagcactggggcgcatccgtcaccgcgatggatgtgccgcaggaggccgcgcccgggcagggcagcagcccgttgctgatcgtgggcgagcaacgcgcctggaccgaggcggaagaggcactggccagggcttcgcatgcgcgggtgatccgtgccgaaccgaatggcccgctgcacccggagctgcgcagcgacggcgtgaccgtggtcagtgccttcgccagcgaggcgctgctggcggccctgcgcccggatcagtccggcgttgacgcgcaacggtccgctggcgccccgtccgaagctccctcaatgccgcgtggtgaacggcggatgcgggtgctgctggtcgaggacaacgaggtcaaccgcgagctgctgcagcagcagctggaagaactggagctggacgtggatgccgtcgagaacggccagcaggcgctggacgcctttgatccggtgcgccatgccgccgtgctgaccgacatcaacatgccggtcatggacggctacgtgctggccaccgagctgcgcaatgccggccaccggctgccgatcatcgccatcaccgccaccgcgctggccagcgagcgtgaacattgcctggcggcgggcatcgacgaactcctgctcaagccgctgaacctggagcgcctgcaggtggccatgacggcgctgatggagcgcagcaaggggcaggcgccagcagccgaacgcgagccagagtcagagctggcgcccgcaccggcgccgcgacgcgaactttcgtcacacatcaagcgtgttttcgtggacagcgggcgttcggatcttgccagcattcgacaggcccgcgacgcgggcgacgccgcccggctgctcgaccacgtgcatggcctgaagggcgcactgatgatgatcggagaagccgggctgggtgaacgatgcggcgcgatcgaacaccagctgcgcgcgggcagcatgccggacggggacacgctcgacgggctgcttgccgacctcgcgacctgcatcgacggctatgcccacgagctcacgcaggtgggcacatga

SEQ ID NO: 506351 - DNA, 657 bp, Stenotrophomonas maltophilia
atgacccagttgagtattcgtgttgtcattgcagacgaccacccggtcatccggctgggcctgcagaacgcgctggaagaagagcccgtgctgcactgcgtgggcgtggccggcaatgccggcgagctgcatgaactgctggcgacccaaccctgcgatgtgctggtgacggactatgcgatgcccgatgccgagcaccgcgatggccaggaaatgctggccggcctgcgcgccgacttcccacacctgcgcatcgtggtggtcaccggcctcgaccagctggccctgcttgaggcgctgcgcgtggcgggcatccaggcgatggtcagcaaggccgatgaccttcgccatgtcgcggcggcggtcatggcggtctacgccggccgtccttatgcgtcgccggccatcgccgcgctgcaggaacagcggcggcctcctgcgcgcaagcagaccctgtcgccgcgcgaggacgaggtcatccagctgtacctgcaagggttgaccatcgccgagatcgccaggcggctggaccgcaagaagcagacggtcagcacgcagaaggtcaacgcgctgcgcaagctgggcgtggccaacgatgccgaactgttcacctacgccagcgaactgggattgacccgggacaccgcagcggactga

SEQ ID NO: 506352 - DNA, 678 bp, Stenotrophomonas maltophilia
atgacgatccgcattgcgatcgcagacgaccacccggtcatccttgctggcgtcatggaggcgctgcaggcagagcccaccattgaaatagtaggatcggccccggattctaccgcactgctcactctgttggggacgacggccgtggacgtcgtgattaccgactatgccatgcccggcgggcggtacggcgatggcgcaacgctcatcagcctgctgcagcgccgcttcccgcagttgccggtggtcgtccttacgggcatggaagggtcgcagattctggagaacatcggcaaggctggcgcgcagtgcattgtcagcaagctcgacccgcccgaggacatcgtacgggcgattcatgctgcctatgcggggcaggcattctgctcgcccgccatccgtgcacggctggatgcgcttcagtcggccgatgatgcgcgcctttcccgtcgtgagtccgaagtgttgcgtatgttcgccgaaggaacgagcctgctggaaatcgcggcacgactgcaacgcagccggcagacggtgagctcgcagaagcgctctgcgatgcgcaagctcaatctgaagagcgacgttgagatctatcactatgcgctagccaatggctggctatctcgttcccaggcggcacgtaatgcaggttcgcgcgagggtggagtggcatag

SEQ ID NO: 506353 - DNA, 186 bp, Stenotrophomonas maltophilia
atgccccccagcccgcacgagactgtcgatgacctgctgatcgccttcgcgagcctcagtaaacaacagcagaggaatttcctcgatgcgctcaatacctatctgtatgcgtctccttgccagcgtagagcccaggtgcagatgctgcgctcgcgcctggccggtcagagcggatccttcgattga

SEQ ID NO: 506354 - DNA, 222 bp, Stenotrophomonas maltophilia
atgctatgggtcgggcgtgatcgcagccgcgagcaggtgcgccccttcttcgagttgttgggcaaagagggctgccagcgaatccaggccgttgccatggacatgaattcggctttggtggccaactacggaggggaggtcattgatcgggtgcgcgtggatggagccaacaggctgcgctatagcaaggccgcccggcggatggtgaaggcttcgcactaa

SEQ ID NO: 506355 - DNA, 693 bp, Stenotrophomonas maltophilia
atgaaactcaagcagtactctctcattggtctggccatttcggccgcgctggcctctgcaaccacttccgctgccgagacggctgatatcaccgtttccggcacgctttcgcccagcgcatgtgacctggccctgacccggaccaattttgaaatcgggcgggtttcgtttgatgacctgaatgaaaccgagccgacggcgctgacgggtggcagccgtggcgctgcaatctcggtcaactgtaccgcagacaccaagttcgctctccaggttatcgataacaagtccggcactgccaacgccgacgtggttagtgcgttgggttctgaagcggctgctgatcgcctgttcggcctcggcactgattcgagcggaaacaatatcggtggctacctggtgcgtatcaatcagaccgctaccggtgatgcgggtggcgacactgccgtggccgcgcaaaacgtcaatacgtcggacggctcgacctggagccgattcggttcgcgggccatcgtccccagtatcggccgcgctggctgggttgtgaccagcggttccagtgttgagccggacgcgtttacttctatcgacggctctctgtcgatccagcctgcggttgccgcattggaagatctggacggcggctccgccatcgatctggacggcaacgccaccgtagtgctgcactacctgtaa

SEQ ID NO: 506356 - DNA, 2481 bp, Stenotrophomonas maltophilia
atgagccagttcattggccccgacacgtgcgccgctctaccggccgcacctgcaggccctctcactcccaaagcactcgcggtcgccgtagccgccgcgctgacttttgtggctggcgacgcagtgggcgcgggtgcggcaaccatggcggatttcgatgtcaacaagctccggagcgtcggtcttgatccgtcattggctacctacttccgcgaggcaccgcgattttcttcgggcgagcgacgggtgaccctggtcatcaatggccagtcgcggggtatggtggatgcacgttttgatgacagcggtgcgctgcgcttcgatgcgcgctttctgcgtgatgcaggcctcaaggtacctgctgccgagtacctgctggaaccaccggaggcagatgtctatgacttcaccgccgcgtggccgcaggcgctggtcaaactggcgccggataccgaggaagtcagcctggtggtcccgtcccaggcattggacgtccgctcgacagatgagcgccgctacagtagtggcggtatcgccgcactggtcaactacgacatcaactcttccatcctgcgcagggatggacgcaaccggcgctccctgtcggcactgaccgaagtgggcttcaatgccggtgattggatcgtgcgcagccgccagtcgctgtccaagtacgacagcggcccctcacacttcgaccagatcgaggcctacgcgcaacggaccctggttggttccaagcaggtgctgcagctcggcgagctgtcggtcagcaacccgttgttctccggcgccccgattaccggcgtgcagttgctgccggaagaagccctgcagcagggcccttccagcgccgcattcgtggaaggaaccgcttccagcgaggcaacggtcgagatccgccaagccggcgttctgctgcacagcacagtggtgccaccagggcccttctccatcggtgacttccgattgatgagccaggatctggatctggatgtgacggtgcgcgaggccgggggggatcgtcagttcaccgtgccagccgcgattttccaccgcgccaggctcaacgtgcccgggacgacattcgccgcaggtcgaatccgctcgttcggaagcgaaaccgcttttgcggacccagtgctggtcgctgcaacagccgcatggcgtccgaagcgattgaactccattgtcagcgccggtgctgccgctacccagaagtatcatgcggtcgccgtgggagtggatacgccgctgccgaagggtgcggttctttccacccgggccaactgggcgacggatcgcgcccatgatgtcagcggtgcccaactcgaagctcgtttgagtatgcagttggccgaccgcttgagcgtgaatctatctgcggctcaacgtactccaggataccgggatatcctggagtcaacccatgcatccgacaactgggccaatgcgcaagccaagcgacggctcagcgcgggcgtgggctggtcatcgccttcgcttggtgctttcgctgcgtcatacggccagcaggaaatctttgcagggcggcgcaataacattgccagtgccagttggagtcgccgggtaggcattggcagcctttccctgaatctgcagcacggcgcccgtaacgatgcgcaaagcaagcggtctgatacgtctgcctatgccagtttgaccgtcccattgggggcagccaccgtacgcaacacagcgcgtcggacaggagatcgaacccgcgccggcatcgccgtcaatcaacaggtgaacccggcattcaactatcaggcgggcatcgaacgcgatagtcgtggcggcgatctcacctacaacgcgggcttccatgccgtcccccgctacgcgcaggtggcaatgggctacacacagcaagcgaacagccgcagcctgtcgacccgtttggggggcggaatgctgctgcatggcgagggcgtcacgctatcgccctatccactgcgcgaaaccataggcttggtaaaggtgggtgagcgtgcgggtacgcggatctcaacgcccgccggcaccgtttggaccgatcgtcgcggactggctgtcctgccccatctgaccgcgttcggcaagagccgcatcgaggtcgatccaaccagcctgccgcgcaactacgacttgcagaacggcgtacgcaccctggaagtcactcgcggctcggtcagtcgtattgagttcagtgccaataccacgcggcgcgtgctgctgcgcatcgtagacatggacggaaatccagttctgaggggcgcctccgtggccgccaatggtgccttcatcagcagcgtgaccggcaatggcgccgccttcgtcaacaacttccagccagattccgagctgctggtcaccctccccgaccaatctcagtgtcgcgtggagaccaccctgcccgacgcccagaaagaggacgcgttctatgaaactgcaacggccatctgccatggcatttaa

SEQ ID NO: 506357 - DNA, 711 bp, Stenotrophomonas maltophilia
atgaaatcgatctattcaaagtttcccgcagttgctcttgcaggcatcagcctgttcggcgttgcagcgctcgctcatgccgacggcatgaagcccgaatccccccttgtgatcatcaatgtggacaagggttggggtgaaagcaccatgcgtgtgaagaacacggacggccaggcggccctgctgcacaccaatgtctacgacattcctgaagacagcgaaacggttgtcgttgtgactcctccggtcgctcgggtggaggcgggccagcagcagcaggtgcgcttcatgtaccagggcgaggacctgcagacgcagcgcctgaagcgggtctccttcgacagcattggccaggccaaatcgactcctggccaggcaacggtggccctcagcgtgcgccaggacattcccctgctcctgcacccggccagcctgccgaagaatgccaagccctgggagctgctgcagtggtcgctgcagggcaaccagttgaccgttcacaacgacagcgcgtatgtggttcgccttgaaaccgaagtgaccctgctcccgtccggcgccaagtccagcctgcccagaagctacctgctgcctggcgagaagcacaccgttgccagcgcggcgggcacggccgtcgatgaccgcgtgcagatcaagcccgccacggtctatggcttctcggtgaaggcctacgaggctccgctgaagtag

SEQ ID NO: 506358 - DNA, 747 bp, Stenotrophomonas maltophilia
atgaagcaaatgccattgagttccccttcggtcacccgtgcaccgctgtggccgagcgtggtggtcaacgaagtcgacgtcgggtggcagggcaatgacgcctggtcatgcgcgcttctggctaccgggaaaacagcctatccgccttaccacgacggcatcgacgtgcctcccccggatgcggcccatccgatgccggcgctggccctgcaggcactgcccgctgcagcaggcgccattccctcgccggcgcgagaaatgcagacgacagaggcatccgtgccagtgacaatctgcccagcggactgcttgtgccacacgatgcaggccgagctggcgcacgccagtgccacatcggtaaccggagtcctgctccacctgcgccagatgcaagcccgttatcgtgaccggatgggggcacaggcctgtaccccggcgcgcgtcgcttggtcgacgatgctcgccatggaggcggaggttctgcttggcccggccaagcacgcacgctatcaggaggctgaagccactctggtcgatgtggatctggaacgctgtccggatgccgccctggtcgtggccagagcgcagctgatcaggcagctctcggcgctggagtcgaacgccaaggcactgcagcgcctgcaggacgcagcagcaaggttggcgtcgcgcgctccaggtgaacgggacgtggacatggagcagtcaaagctgaatgaggccatcctgcagcgtgccgcgggctaa

SEQ ID NO: 506359 - DNA, 735 bp, Stenotrophomonas maltophilia
atgcccatgaatccgcaagactccatcgttgatgcctcctcccgattcatccagggccgccacggcctgctcagcctgcttccgcaggaacagggcgtggtggcgcgctgcctgcgccggtatggcgaatgggcagagcaggagctggagcttctggccggcctgctcctgccgggccatcacgtgcttgaattcggcggccactatggcgcgcagaccctccccttcgccaaactggtgggtgagaccggcgcagtgcacgtggtcgagcccgagcgcctggccttccagcaggtctgcgccaatctcgccatcaacggcatctgcaatgcgcatgcgcgcgaacagtggctggggtcgagcgctggagaggtggcggcaggcccggcagtggccatgccgggtagcgtggacgcgctggcccttccccagctgaatctactgaaggtgaacattccaggcgcgttgaaggaactgcttgcgggcgcccaggacacgctgcggcaaagccgtccgtacatccattttctccagggcgatcttgaagatgccgctgaagagatcgagatggtcaaggcactcggatatcgatgctggtcgcacgtgacgtacctgttcagcgccagcaacgcgctcggcgaaacccgcaacctgttccccggccgggtgcaacagtcggtgctcgcgcttcctgtggaagccgcattcgatctaccgcagctcatcgaactctga

SEQ ID NO: 506360 - DNA, 222 bp, Stenotrophomonas maltophilia
atggagatcaagagggcacgcctgacccggattgccctgccactgcaggccatcctggtactcatggcgttcgattccctgcagatgctcgcggatgacccttgtgcgatccccgccctgatctttgccgggctcccgatcgccctcgccgctgccatcgccgtgatcagtatcaccgcggcgtgtgagtccctgcggatggagcattgccagccgaattag

SEQ ID NO: 506361 - DNA, 450 bp, Stenotrophomonas maltophilia
atgcccatcagggcagttgtgtatgtgagcggtgccggcgaggacatcgcggacgacacgttgggcctgtccagcggtaagctggacgggatcgtggacgacgcagcccgcttcaatcgcaacgccggggttaccggcgtgctcctgttcgatggcgagcgattcctgcagtatctggaggggccggaggacgggctatccgtagcgtactcccgcgtgctgggcgccagcagccacaatggcatcgttgagctgcaacggggcagagtgggacaacgccgcttgcctttctggccgatgaggtggctgcctgttaagccgcaggaactgcggcggttggcacacgccgactggacccgcttcaaccagcgaggcgacgtcgtcaatgtcaactcgaccgcaatggatctcctggtggagctcgtagagccctatgccatcgccgcttga

SEQ ID NO: 506362 - DNA, 354 bp, Stenotrophomonas maltophilia
atgcctctttcagtactatttgtcgacgacgaggatgatctccgcgagatcgttgtggatgcacttgccgcgcagggcttcatggtgaccaccgctcgcaatggcgtcgaagcgatccaatgcctgcgcggtagcgctcagttctctattgtggtgaccgattacagcatgccagaaggcgtgtcaggcttggatgtggcctcggaagccgccgccgtccaacccgacgcccgcatcctgctggcatcgggctatagtcgctcgcagttgcctgtgttgccggacaacgtccagttcctttccaagccctatcgcttcacgcagctgattgctgcgatcaagagccagttctga

SEQ ID NO: 506363 - DNA, 1134 bp, Stenotrophomonas maltophilia
atggctccacatcccacgggcgatctgggtgacgagtcgcagcaatttggacttctggtcaattccgtcactgattacgcgatctacatgctcgactctcacggggtcatccgcacctggaacccaggcggagagcgcatcaagggctaccgaaaggatgaggtggtcggcaccaactacgccagattctatacgcccgaagatatcgctgccggcgtccccgcacgcaacttggcaattgccgcgaatgaaggccgctacgcaggcgaaggctggcggcttcggaaggatggttcacgctttcgtgccagcgtagtcatcgaccccgtaagggtggacggcagacttatcggcttcgcaaagatcacgcgtgatgtaaccgagcgccaccttgcacaagagcagctgataagtgcccagcaagagttgctgcaggcgcagaagatggaggctatcggaaagcttaccctgggccttgcgcacgacttcaacaacctgctcagcgtcgtcaccaactgcctggatctgatcgccgcgcagcctcacggggagcattctgacaagtacatccgtacggctgtgaggtcggtagagcgtggcgcgttgctgactcggcagttgctgacgtttggtcgaggccatgaactggcgccagaacggttcgatgccggcaaggcgatacgtgacgtgcacgacatgctgcaacgttcggccggcgatgcggttgcagtcgagctcgacgttgcgggcgatcttccgtccgtcaacctcgaccgtagtcagttggactccgccattcttaaccttgtgtgcaatagccgtgacgcaatgccgcgcggcggacacatcaagattaccgtgcgtctacagacagaacgtcatcctgatggccccaaccaggaacctagcaggttcctctgcataaccgttgaggacaacggccaagggattgcgccggacgatcaggcacgaatattcgagcctttcttcaccacgaaaaccgtcggacgcggcagcgggctgggcctcagccaagtcttcggcttcaccagccaatcgggcggtttcatccgcgtagacagcacgcctggctcaggaacatctgtcgccctttactaccctgtcgccgagtag

SEQ ID NO: 506364 - DNA, 282 bp, Stenotrophomonas maltophilia
atggaacgcaagaggaacaaggatttcgttgacgtcgaaagtgaactcacgcattggggattggcattcaactctggtgcgctacccgccattagcttccgccatgaagttgacccggtcatccggctcgcatgtgacatctacatcagagacccgcacggaacacgcgcagaatggctggacgacctcgagggcagacttgcggcccgatccagcttgcgtggtcaccctggtgcagcggagatcgcaggccaatgctggtcgcgtctctcttgctcctag

SEQ ID NO: 506365 - DNA, 3855 bp, Stenotrophomonas maltophilia
atgagcatcgacaccgagttgacccagccgaacgacgacgcagagttcgaggccttatgccaccagctctaccgtgcgatgtggggcgatccaggctgtatgcgcatcggccggaccggccaggcgcagtacgggatcgatattgtgggcacttggcagggacgccagatcggcgttcagtgcaagtgctacaggcggacccgcttcaccatggcgaccgtgcgtgatgacatcgccaaggtcgagcaggcgggcttgccgctcgatcacttactgttcgcaaccaccgcaagcaacgacgcaaaggtggtgcttgaagtccaccagttaagcgtagcgcgcaagaacgagggcaagttcaccgtatccgtggatttctgggaggacatctgtgggcatatatgggggcatccggagatcggccggaagtacgtccggaattttcctggcagcctggccgtagccactcacgaaattgcgcagaacagtttggcgatgttgacggaggtgcaccgtgatagctcactcgccgccaccggcatttccgaggtcttgatcaggcttgaggcgctgagtgccacgcagtcgatctgcgcaaagggagatgaggccgatcccgtcgtcgcgcacactctggacttaattcgcgaccgcatccagcaaggacgtactcgggacgcgcgccagctcctagagggaatgggtgacccggatgctttccgagacaagtattcgcggtttcgctggcatacaaaccgcgcatcggtcgacctccaggacggcctcacccagagcgctatcgagggctacttgaaggcgtacgcgcttgcgcctacgcatgagaaggctatcgcgaaccgcgtgcacgcgctgctgctctccggcgaggccgacaccgcattgctggcttgcgatgaggggctggcggcccatccagatagtcatcacctgtgggcattgcggatccacgctcggcacgcagttggtgtctgcgatcccgagcagggtttacccgaggcgattcgcgatacgccggacctgctgtatgcgcgggcgaggctggctagcaagcaaggccggctcgaggacgcggcggtcttgagccgggcctgcctgatgcaggacggtggcagcatagaggcgaagtgcgcgtacttggccgaggccctcgcatgggcaaccgacgacacgatacgcgcggtgcacgcgaacatcacagccgggcagcggactgcacttgaggacgctgttggccggttggagccactcgaacaaacgctcgctgccattgaggccgaagcagtcgcgctggaagccgccagcaatgcggtgaacgctctactggtcctcggtcatcatgaacgcgtgcacgagctggcgcgcagattgcttgcgcgccatccatcggcaacggcactgttgcgggtccgtctccttgagttgaatgaaaagggcgacattgacgcaattcgtgtattgacggatgagcacctgcaggaaatcgacgatgcgttgctaccgatactggcggccattgcggcggagcacggcgatgtcatgtggtttcagcgagtgttcgcacaggccgaggcgcgtctcaagccgcaaggtctgatagacgacgtacggatcctcagtttccaggccgtgtgggtgtccggggagtcggaactggccatggcccagatcgaggaatatctcggccatcacccgaaccatattgcagcgcgctgcttacgcgatgagttcctagcacggcttggcgacaaagagcgctcgcgcgaatcggcaatcgccttagccaagtcgtgcgccacccgtgatctcagcacggccgacctacttcgcgtggcaacccgcctgtatgccctcgacgagtacgccactgcggcgccgctgtatcgacgattagtcaaggcacctggcagcgacgaactgaccgtgcgcctgctgcattgctacgttgagtcggatcagcgcaggttggcgcgatcgctgctggaagagttggatggcgacgcacgcgacaatgagcagatccggtggatcgagtgcaaccttgcgcgacggatgtccgactgggaaagactgaaagtgctgctcatagcggagcgtacccgcgcgccggagcgcgcagacttttcggttgcgttggtaacagtgctttatcggctgggacaagccgacgagcgcctggcgctattgtcggccgacccaaaatttgccaagactgatccgcagctggagttcgagtttgcgaagcaccagtccgccgtaggcttaacggaggcggcaatccgtcgtgtctatcgaatctaccgggatggcgcggaaagcaccaccaacgccggctacttcctcagccaacttctgctcgcgcaggacttcagattgcagttcccaagcgtcgtcaccgccggtgtttcggtgcagctacgaagcacggcacagacctgggtggtggcaatcgatctcgaggccgcagccaatccagcatggccggaactggtcagtccagactcggcgcttgcacgccagcttcttgggcgttcggttggcgatgtagtcgaggttgtacgcggccactggcgacaggaggcggaaatcgtcgcggtacagagtatctttgcctacgctgcagaaaaggcgcaggagcgaatttctgcatcggcggagcaggaggggccactctggagcatgccagcgttcctgagcgacggcgaagtgaacgttgaggcgctcgtcagtaccgccaagctccgacgggaagcctgcgaagcggcgttcggtagctacgcggaacacgggctcccgctctgctcgctagcaaagatgctcggaacggacgtaatcagcctactcttggagtggccatcgactacgcatcgattgctcgtagacagtggttcgcaggaagagcgactcgcggcaattgcgaaggttgatcgccgtgagagcccgtttgttgcggacctggttgctatcgcagaattgacccggcgggacgtattcgaggctgctaagcaattgatggggcgcgtgctggtgccgcgcagcgcccaggacgatttgatggatgccctgcagctcacagataggcagaggccggcaggcacgctgggcgagtgcgacggtcgagtcgtgttcgcggaagtgtccgccgagggccacgcacagcgccaagcgttcatgcggcgggtcctaacgaacttgaaggcatgtgaggtggttcctgttgtcgggccagcgcaacccagcgaccagctccgggacctgaaccaattactggacgcgaccaccgcggatgcgatctacttggcccttgagcggcgcgccatcctcctgagcgaggatggcgtcatacaacggctctacgcgggagttgctggcggaagttcttgcagcatccaaccaatcctactggtggccgacgcgcgcaagcagctgtcgcacaacaaggtagccgcggtgttggtgcagaaaattgccgacaaccacgacttcgttacagttagggcccaggacctcctggcgctcgcgcgcgagaggccatatgaagtgtcccaactcgttcgcatagcattgctggcgatcggtaggccgaccgttgagtttggttcggctataagagttgcacttgagttcgtcgcacggatcgccaaggagctaccgactcacatcgtcggcgcgtacgtaaaattagcattcgatgcgttgatcgaggacaaagaactgcagtgcaatgagctcaggcagctttttgccgaagcgctgcagccgaggttcggtcgccacggacgtcgcttgaccgttcaacaacgccagcacttcggcagggtgtacgagaggcgctag

SEQ ID NO: 506366 - DNA, 771 bp, Stenotrophomonas maltophilia
atgatctaccaccgcagcgaagcgggttgggagcagcttcctactcacttccctgctgccgaacatcagatctgcgaagacgatcctaatctggatgatttcgacaactggcttgactgcgttggccacctgttcgaactggacggcgtgccaccgctaccagctgacccggcggagcgcgacgcagagcttcggcgaagattcgaagaatcacgcgctgatctggctcgaatcgggaaggatcatgcgctcgaccaactgctggctgactttgacttggccagtgtgaatgacctctgcggaaccggctttaccgatctctatgcgatcggttctgacggcctgattgcgcactgggatggcgcaacctggaccattccagagcagatcacgttcgctgaactgctgcatgcatccaaaacggattggggcgaactgttcctggtcggtacagaggcaacaatcgtaacgggtcagatcaatacgggattcacgcccatcccgcatcagatcagccctgacgtaccgttctactgctcctgccagtacgggcagtccatctacatcggctcggagaatggactctatctctacagccccacctctggagtggttgaacgcttggatgcgggcattcctgaagaactggtggacgccgccattaacgacatcagttgcgccgatggggtgctgtgggtgttgacgcagtgggatctggtgcgatttgatggcctcaactggcaggtcatcgttcacccggacaacggatga

SEQ ID NO: 506367 - DNA, 1944 bp, Stenotrophomonas maltophilia
atgcttcaccccgtaccaagcgcgctggcgctggcgctggcagccctgatggctgccggcccggcactggcagaaaccgccacctccgcgcccgccacggcgccgccatccaccagcggcgataccgaagccagcaataatttcagcattgtccgttaccgcgccgactaccaggtgcggcccgatgcgggcaatgtgcagaccgaaacctatgaagtcctgctcaagaccaaggcctccgtcgagcagttcagccaggtgcggctgagctacagcgagaagatggaaacgctggaagtgctcggtgcctacaccatcactgccgacggccagcgccgcgacgtgccggccgaccgtatctacacgcaagagagctactccagtgcttcggcggcgatgtatgccgaccgcaaggtgcgggtgatcgtgttcccgaacctggccccgggcacgcgcctgtactaccaggtgcgccgcacccaggctacgccgtacttcccgggctatttcggcctgtgggagaccttcaacgtcttcaccgagtacgaggacgccgaggtcaccctgagtgcgccggccaacctgccgatgttcgtcgacagccgcggcgtgcagggcagtgaccggccgacagtgaagaatggccaggcgcaatggcgctggcgctaccagcgccgcgaggcgatgccggcgcagaactggtcggcggcgggctgggagttcggcccgaatatcatggccagcacgtatcgtgactggtcgcagatggggcgcgcctaccagctcaaggcgggcccggcggcgcaggtcacgccggaactgcaggcgctggcagacgaaatcacgacgggcatcagcgaccgtcgcgagcaggctgatgcgctgtaccgctgggtggcgcagaacatccgctatgtggcggtgtacctgggcaatggtggcctggaaccgaacagcgcgcagagcatcctcgacaaccactacggcgactgcaaagatcacgtgacgatcctcgaggcgctgctggcggccaagggcatcgccagttcgccggtgctgatcggtgcgggcggcggcccgacgctgccgaagattccggtgctgggccgcttcaaccacgccatcacctacatccccgaattcgatctgtacctcgattcgaccaccgcgtgggcgcgcttcggccagctgccggagggtgacctgggcgcgccggtgatgcgcacccgcgacgccacgctggcacgcaccccggccaacacgccggagcgcaacgccacctcgatggaagtgcgcttcaccttcgacgccaacggcaacctgcgcggcgagacgatcccgaagctgggcgagaacgccgagatcggcatgcgcgcccagttctcccagctcaatgcgcagaaccgtgcgcgcgctgaagagcagatcatggccgcctccggtttcgacgggcgagggcagctgcagatccagggtgtgccggtcgacctgacccggccgttcggctaccgcatggcgttccaggccgaggattacgccgacttcagcgtggccggcggcatggccgtgccggacccgccgggtggcgagtcggtgcgtggcttgtacgccaccgcctcggcgccggccaacgagacgccgttctactgcaatgccagcctgcgcgaggagacctaccgcctgcagttcccggccaacgcgccgatcatcgccatcccggccagccagcgattcgccaacgccgccggcgagtaccgcgtggactggagccgcgaagggcaggaggtgatcgtgcaccaccggttgcagcagaatgcggtgcgcggcccggaggcattgtgccagccgcgggattatccggcgttccgcgcgctgtatcgcgaagtgcggcgcggcttccgtggccaggtgctgtacggcaagctgccggcatccggcggctga

SEQ ID NO: 506368 - DNA, 576 bp, Stenotrophomonas maltophilia
atgaaatatgtcggtagctttgcccagatggagaaatcaaccagaccgccaacactggacctcatgccgatcagccagaaagagatcgatcactctgacctgctgctccaagcgcagcggctagctgaccaccttgagccatatccaaacaacaacgtgatgttccattcgcgccttcagagatgtaaggctaaccatcgcaccctggcgatctttggacacgtgctgggcgggctcttcttcgtggacctcaaagatggctccgtaggactacttccagtcgattccgaagcatcaccccagtactgcaattcagacatgaggagcttctcagctttccataccgcgttcatggcagcaatccgacccgcgctgaactccaacgaaggcatggcggagtctactctcatgaaactcgaggcctggttccgcaactgcgatgccacatcaatggcggccgagaataacttctggcccacatgcctttacgagctatcagaggggttctttcctctttcatccgagaaggtggaactacaccgctcactcgggatcgatcttgactatccctggtag

SEQ ID NO: 506369 - DNA, 201 bp, Stenotrophomonas maltophilia
gtgcgccgttgcgaagcatggacgagacatcccagcgaggttccgccatccgacgacggactggacctgcgcaaccacatggccaacatcgaactgggcctgatcaacgaagcacttgagcgcacccagggcgcggtcgcccacgccgcccagctgcttggcctgcgccgcaccaccctggtggaaaagctgcgcaagtag

SEQ ID NO: 506370 - DNA, 168 bp, Stenotrophomonas maltophilia
gtgcagccgcagggtgacctgtcaccgccgcgtgcgccggagccgacgcctccgccggacaccgctgacgccccggtcccggcgccgccgcccgaggtggccggcgaccccgtggacgtgatggtgccggtgtcggtgtcggtgtcgttcttcctgcgcgggcggtga

SEQ ID NO: 506371 - DNA, 285 bp, Stenotrophomonas maltophilia
atggccacgacgcgcgtgcgctggatccacatccatctgcaggacatggaactcgcctgccagatcgccggccagcaggtagccggcaatgccgccgccggcgccatccaccacccagagctgtccacgctcacggccttcctgcagcgtcggcaggtccaggccgtggccggcaaagaccggataggcctcgtggcccctgagcagttcaccggcacgctgttcgatcgccggcagcacagccagctcatcggtgcgcggaacccgtggctcaggacttcttga

SEQ ID NO: 506372 - DNA, 558 bp, Stenotrophomonas maltophilia
atggtcgctggagtgatcattgctgtgcttatcctggcgaccgcgggacttggcttcgcaggggtcatgagccgcccgatgaccagatacacccttatggtgctactgatcatctttgtcgcaacatttttggcctgggccctgacacagatcgtggaaatgttcctgacgcttaaggcgggctatcgcagggccgccgcacacgtcgatgaggacatcctgctggaacaggctgtcattacatcgctgacgcgctgcgatccgagtctcctgagggagcacggcaagcagatggacatgaaggcaaagctactcactcgccggtcccaaatgggcacggtcctggcaaccgtgggcgccgttgtcatcaaccttcaagccgctggcgagagcgccgccatctggggcaagttccaaggcatctcaccgatggtccttgcagggagctttggcgtgctcaccgcatccgcagcgctcatcatgtttgcgggccaattggagcggctatcaggcttgctgcttctcgctgcggaccgcgcggacaccattaaaaaatag

SEQ ID NO: 506373 - DNA, 174 bp, Stenotrophomonas maltophilia
atgggcggctatgtagaactcggagagagcgatatggattgctacgtctttgaattcgcaacagggcggtaccaggtccgtgacaaagtagcgttcgataatgtctacgaagaattcacttcattagatggcctactcggtcacatcatcggtctgatcgaacagcattgctga

SEQ ID NO: 506374 - DNA, 747 bp, Stenotrophomonas maltophilia
atgatgccgggccttacctatgtgagggacgtggtcatcgatggactcacctatcccgcctatggctggaatgcaacatcgtccttggtgattcttggaattcaggtttactccggctccggcttgggaatctggcgcttcccgctcaagatcgacaagacgtcacaacagggaatcctggcagggcctactggcgagttcgcggtgacacttcgagtggggctggtggcgcgcggcggtaccatcatcaaggaaacccaggccctcggtgtggtggagacctcattgctgaacgatccgtctgccgtggtttccaacagcggaagcgtcgaagtgaatccagctgtcgattcatgccgggtgcgcgcggatggcgcaggggtgatattggatccggcccggcaaccggaactgcagcgcccgggcgatacggccggggaagaaccccttccggcgcgcgtgcgctgttcgcgggatggcgtagtggccgaggtcggcattgacgatgcactggatatgggcaacaccagcagcgtcctgacaccggctgcgggtaccagtgcaacgggcgtgggtctgcagattctgcgcaacggtgtgcctttgccgatgggaagccggtggatgttcaccgatggggctacctggactgaccaggggctgtccgcccgttatatccggaccagtgatgccttgagtgcgggtgacatcgtgggcgaagcaattatcactgcgaccatgaaatag

SEQ ID NO: 506375 - DNA, 411 bp, Stenotrophomonas maltophilia
atgactgccacacactacccgttcctgttcgccaccctcggcgaggccgccaacgtgcttcccgaagccgtcgcgcgcgcgttggagaccacgctgagcgccacgcacggcaacactgtgccggccagcacctcgttattggcgtgcctgcagcgcatccgccaagtggatgccgccgacggccagccctggccagagaagggccgcacatccggacagcgcatggccatggcccgcgccaaccgcgccaatgccgggctgacgttgctattggaactgctgcacgcgaccgaacgcgtgcgcgtggatggcgatgaagatcagcaggtgggtgacgacgtgcgcgaagggctgctgctggcctgccgcgggttggccgagtatgtggatgtgcagttgcacgcgacttga

SEQ ID NO: 506376 - DNA, 648 bp, Stenotrophomonas maltophilia
atgtgcaatgccgcgccagcgcgtgcggcctcgccaaggggtaggggtgattgtcccgaaatcaaggggttggtcggcagggcttgcagccctgcacctgcagaggccgaagcaaccgcaactgcaacagcaacggcaagagcgggcattccgtgggatggcggggcactgtgggtttgcggggacgccgtaaacccatccatgggggcttggtcgcggcatccatgccgctcacaccccgcaaacccacagtgccccgccttcgacagtgtcctgctgctgttggtaggtgtcgacctgggtcgacacagtagatccacgccatgcgtggatgactgtctgtcagatttcgaaatcagaaaatggcgtcagatccgttttcctctggaaaacggatctgacgccaggctttgctggcagatcgaagaaatctgtcgaaggcggggtgggtccggttgcgggggtgtccgcggcatggatgccgcggccaagcccccaaggatgggtttacggcgtcccccgcaaccggacccaccccgcaaacccacggaatgtgggcctctgctcttgatgttgccggccagcggccggcactaccgcgggtgccgggtgcaacccggccgataccctcccggtgctacgctgtga

SEQ ID NO: 506377 - DNA, 1488 bp, Stenotrophomonas maltophilia
atgtcgttaggaaaagttagtcctccagaaattagcgcctctgcgccatggggagatgatccactgtcgaaacaaagggagggccgaatcctatccaatctgatctgcagcctcggcgattcagcatttgtgatttccttaaaaggcggatggggtacaggaaaatccatcttccttaagcgactcggctatcacctggagaatagtagaaaagtacctgtaatcaagatagacgcatggcagaccgattatatagatgaccccttacttgcattgactagcgcactcaatgagcgcattcaaaagactcaaagccgatccaagaaggcggcaaacgccattgtcaccggattggcggagtcagcagggaaaattgcgctacctcttatctcggtggttgcaagcacaatcgcccctggcggaggaaaagccgttgagatcgccgctgacctcccggagctggccaaaaattttctggaatgggatagatctcgaaagacggccgaggagagcttcagacagaacctaatgaaagcccgcgagatcctcaagaaatccttaggctcagaagagagctcccctattgtcctgatggtcgatgagcttgacaggtgcaggcccgacttcgcaattcagttccttgagcgcatcaaacacttttttgatgttccgggaatttgctttctcattgccacagaccacgacaacttgccacatgcggtaaagacagtatacggtcaacaggttgatggcgagctgtatcttcgaaagttctttgactacgagttcaatctgccgcgaccaaacctcgtagattactccaagcagatattccaaagtttcccgggaacggatcatacccatagcgcagaggaattgcgcaaaactctccttgaacaacacggcagcaaatattccgagtacacgaacgcttatgcaaacaacatagcggagctggatagagccgagtactcgatctattttggaataatggcagatgtcagcggacttcagcttcgcgatgcaatgcaagcgcatactctcttgatggcatttgtcagaagctacccaaaaaccaacaggcgatttccttttatcgactgctgcatagcatgcatgcgcttcaaatatcccgatgaattccgcgcactagtcgcggcagacgaacatggcgtggcctcagtcatgcgaagcaatagcagaccgctgctaaacacgatccgcgcaatcaacgtctttttgggggtcaccggacaaaccgatgcgcaggacatgtggagagcgctgatgaactcagcacaaagtcacgagtcctcagccattgacaagctggcgtacacctctctaatggtccgaggatttgcgcaccagcgtggtcagattccagagctgtccttcactccggatcgctatgtggcgcaagtggtcggactgactgcggccttcaccgatcttgaggacggcggcccaggccaaattggggcttga

SEQ ID NO: 506378 - DNA, 1101 bp, Stenotrophomonas maltophilia
atggaggcggtccctgtgaagaagaacgaagacattcaagtcctacgggggcttgccatcattttcgtggtgctgcagcactacaacaaccgcttgccaacgcccgattggtacaaggctatgttcacgcacgtcgccttctggggtggcgtggacatcttcttcgctatctcgggctatttgatctaccgcgccttctctcgggacctacgagtcgaagcgacgaagggatcagcccttcggggctttgcaatcagacgattccgtaggctgtaccctgcctgcgcggcctgggttcttatctcgatcggcctggccttcgttctcactacggcaccgaatgcagatccttggcccatcatcaagagtggttttgcgggcctgactggctggtctaacctctactacgtgctttgtgttcccgactacgttgcctgcggcaatgccgatttcaacggagtcacatggtctctgtctgcagaatggcagttctacgccgtcctgtcgctggccatgcttgcgatcggcaagcgccgagccgtccttctgcttttggcagttgcgcttttcatggccagtttccccgcaccgtcatggtccattccttgggccttccgcccgatgggtttcatgctcggcgcgctgattgccatgctcactgaatcttccaagtgggaaccgcccaaagcgttgggacggaccatgctcgttgccggcttggtcctggcacttgctgcgccggcgaatctgccacagccgttcatcatccctgccatctcaattggcggcgcgctctgcctcctgtcgtccctgagaggaaacctctattcaggcaagatgagtgcgccggtaaggtggattggagaacgctcgtactccatctacctctgccatttgccttcgatcctgattgttcgtgaaatattgacccgggtgggaatggcagacgccactcctgcgaacgtggccttggccatggctacagccgccctgctgatcgccatcttgtccagcctgtcctacaagcaaatcgaaaatcggttccagcgggccaagggcaagcctgaagcgccgctagaaccgcttccaatcagtcgctga

SEQ ID NO: 506379 - DNA, 1197 bp, Stenotrophomonas maltophilia
atgacacgcggcagaaaaaggaagttcaacccggccatacctgggcacatcgagcaggacgcattgccgaaggggatctactggcacgacgaccgctggttcgtctacgaagatcacgcggagggtggccggcgcataaagcgtacggtcgcccacgccagcgcccgtctgtccgatctgcacgccatcgtggaagagatgcgcacaggcgtaggacgcggcacactacgctttctcttcgaccgctaccacgaatcgagcgatttcaaacgactcgctgccggcacccgcaggaactacctgggctacgccgaggtgttggcgaactacgttagaaaggatgggaccctgctgggatctatccaggtcgaacgcatcacaacgcctgtcgtgcaacggctggtggagacgtttgctgcaggccgcccagcgaatcggacccagcccgccttacccgcgtaccccagcaaggccaatcatttgcaccgttacctacggctcaccctttcgtggggtgtacgaatgggctactgcaagaccaaccctgccaaaggcgtacgccaggcaaaagaacgcggcgacgcacgcatgccgtcgcaggaagcgtttcgcgcagtgctggcgttcgcgcgcgaacggggcgcgcttcccgccaatgccaagggcagctttcccgactacctggccccggtgatgatcctggcctacagcgtccgcctacgcggcatcgaggtctgcacactgactgacgcgcaccgccaagtcgagggggtgcatagcaatcgccgcaaagggtctcgtgacaacgtaacggaatgggatgaggcgatgatcgaggcgtgggatcagctgctggcgcggcgccaccgcatctggaaccggaagggccgcgtgcgccctgttccgctgcgcgctagcgacaggttcttgctggtggagcgaggtggcgatcccatcaccaagtctgccctcgacagtgcctggcagcgcttcattaccgaggcgattcgcgccggggtgatctccaggagcgagcgcttcgcactgcacgggctcaaacaccggggcatcacggacggggacaacaaggctgcaggcggccacgttaccgaaacgatgcggcagcgctacgaccacgaactgccggtcgttcaaccgcccggcaggaggaacgcacttgagcgtggaaccacttaa

SEQ ID NO: 506380 - DNA, 219 bp, Stenotrophomonas maltophilia
atggcgcagatcctccacttcacagacttgcagcggatctgcgctcccgacggcccacccccaagggccgtcaccgtccgccgctgggcagacagggaaggcatccgttacaaatacgaccgccgaggcggaatctggaccaccctcgacgcggtgaacgccgcgctgggattgatcgatccgcagcccgaagacgtaagggaagaggacaacatctga

SEQ ID NO: 506381 - DNA, 186 bp, Stenotrophomonas maltophilia
atggctgatatcgacgccgcccgccgattcctcgcggctgagttcgagagcgccggcctgcctcacaccgccggcagcatcctggcaggcatcagccccttcgcccagggtgcgtacatcgtcgccgtggcgtccgcactggccgcaccctgtgtcgtttgtgacggcgcgcgggaggccgcatga

SEQ ID NO: 506382 - DNA, 246 bp, Stenotrophomonas maltophilia
atggccagcagtaacgggcatacgccggtactgcccggcccgatggatcgcggtgcgcaggtcatcggcagcgccgactacctgcgactgtgccgcatcgccgacgcagccgcgttgctggccaagctgccgagcgaagcggcaaagatgctggatatcaaagccgatcacacgtctgccgtcgcgcagtacatggccgaagacctcgccgcgatcctgagccgatcccgccctgcagacgagtaa

SEQ ID NO: 506383 - DNA, 243 bp, Stenotrophomonas maltophilia
atgcctcatggcgccccttccacgcccggcaacgctgccgcgcgtcagatttcgctcgccttcggcctgatcgccgacaccctcgaatggcccaatgaagactaccaggcgttcattgcccggctggtcggtgtgggcgtgtccccgctcgccatcaccctgggcgacgtactgatggcctacaccgcacagtgcgatgcccgtagggacacccgtggcgctgatggtaagggggcgcactga

SEQ ID NO: 506384 - DNA, 165 bp, Stenotrophomonas maltophilia
atgcagccgagtttcgtcaccgcgccggtaggggtcgagtacgtgcccttcgcgcagaaacagcgcgacgctgccgagcttcgcgccctagtggaggctcacatcgccgccggtggtgcgtacgacgtgttgcctgcaacgactgctgcacaggtgtcggcatga

SEQ ID NO: 506385 - DNA, 345 bp, Stenotrophomonas maltophilia
gtgagcgggccggtcggaaaacgcgccgtcttcacctgcgacgcctgcggcacgccgttgacgaagcgcaccagcgccttgcagcaccgtcatctgcggaccgatgcgtacgtgtgccagaaccccatgtgcggcgcgacttacacgggcatgtcggaactgaccagcatcgccagccccagcggcctgcccaatgccccggcatgcgagctaccgccgacgcccggctacgagcgttcgttgctgcagcaacgttggcgccaggaactcggtgatgcgcagatcgactggatcgaagccaccgaatgcaatcagcaggaatgcggcgccccgcccgtctcctga

SEQ ID NO: 506386 - DNA, 333 bp, Stenotrophomonas maltophilia
atgaacgccaaacgacggactaccgcatccaagctgcgcactgctgagcaggcgcgccagtggcttgtcgacaacggcctgtcggttgctgccttcgcagaagccaacgggttgagccgccatgcggtgaacaacgccttgcggatcgacagcaagtgccggatcggcaagacccacgcagccgctgtagccctcggcatgaaagccgcccctgattctcacacagaatcgcccaaatccgcccggattcgcaccaccaagaccgctcggggtacggcctcggcgccggcgaaggctgttgcgaccgcagccaagcgcagggccaaggcgtga

SEQ ID NO: 506387 - DNA, 1377 bp, Stenotrophomonas maltophilia
atgaaagaactatttcctagctactacacgcctgatgaagagaagatttcacttctctggaagaatgcaacgttcgtctttgacacaaatgtgctcctgcaactctatcggctgccagacaagacacaacaacaggcattttccatcctggagcgattaaaaggccgtgtctggattcctcatcatgtagccctggagtaccaccgcgggcgggtgaggagcatcttagaggcccgcgagggtgtggaaaagttggttagcccgatgcgccgcgcctttgaagaggtcgagcgcgcagttggcgttattaagcttgaagagcgcggtcttaagaatgcagtaagggagatggaggcaataaagaagtcggcgagcatcgtaattgcggctgcagaaggggcgttggcaagtcatattgacccatcaggagccgacccagtagcagatcgtctagcgagcatctttgcaggcgccatcggcccggcaccaactgaccaaggtgaagtgaagcgtatcgaggcagacgcaggcgtgcgctatgctgccaagatggggccgggattcaaggacgaaggaaagggcgcgtataccgcgtctgggcttagatacgatggcaaatatgccgactacatcatttggcggcagaccatggattacattaagggtgctcggctgaaggatcttattttcgtcactcgcgacgccaagccagattggtggttgaagcacaacgaaattccttgggggccacagcctgagatgcatcgagagatgacgcaggatgcaactctagagcgtttttggatgtactcgctggatgattttttgaacttcgctggtaagaaacttcaggttgcggtttccgacaccacgctgaaggatgtaaagcgggcttccgagcaagcgtcctacttggagagcaaaagaaagttccttgacgaggtgatcaagcaccgcaggctaagtggactaaataggctaaaccacgaaatggcctcggcggctgatatcttgcgggagtacttggaatcggagtcctacaacatcgtggaatctacgaacgacattgctttgggcgtaaaatttcacttggacgcaccctacgtcggcattgcaattccgtcacagctgctagaagaagaccttggactgtctgcagtgcggaaagccttcggcaggctgcaaggaaaccatgcagcacagcgctgggatatatacgtggtggaacgaaatgcgcctcaccaaccgggattggcggagcgggttgcgtctgtgctgcagccggtgcttgcagacatcccaagcgcagctcccgcctttgttcatgttctgtcgggtaagtatggagagcataaggattcggctcgtttgttctga

SEQ ID NO: 506388 - DNA, 2865 bp, Stenotrophomonas maltophilia
atgagcggcggcaaccttcgcctgcaggtggtactgcaggctctcgatcaggccaccgctcccttccgcaaagtcatggccggcagcaaggggctggcttcggccctgcaggcgcagcaagcaaccctccggcgcctgaacagcgcccagcgcgatgtgagcgcctaccgccagcagcagcaggcgctgcgcggtaccgagcagagctaccagcaggcgcaggcgcgcgtggcggcgctggcccgccagatgagggaggctggcacccccacccgcaagctgagccgcgagttcagccaggccaagacggccgccgcccagctgagcgcccagcagaaacagcagcaggtcgagctgcagcggctgcgctcggggctggatcgggccggcatcagcacgcgccagctcgctgtgcatgagcgcaggctgcgcacggatatcgccgccgcctcgcagcagatggagcagcagcgcgctcgcctggctgcgctggacgcagcaaaggcccgtagccagaagatccacagcgccggcatgaatgcagcagcccacggtgcgggtgtcgcactggccgcgttcggcgcgctgcgcgcccaggtcctgcccatcgctcaggccatggacttcgagtcggctatggccgacgtgaagaaggtagtggacttcgacacgccggacggcttcgagaagatgggcaacgatattcaggagctgtcgcggcgcctgccaatggtgcccaccgacatcgccaagatcgtcgccgccgccggccaggccggcatcgccagcaacgaactgacccgtttcgccgaggacgcggcgaagatgggggtggcgttcgataccaccgccgaagacgccggccagacgatggccacttggcgcaccgcgttccgcatgggccaggatgacgttgtcgtgctggccgacaagatcaactacctgggcaacaccggcccggccagcgtgcagaagatcagcgaagtggtgaaccgtatcggtgcccttggcgaggtcgccggcctgggtagcggcccgctggcggcgctgggcgcgacggtggccggcatgggcatcgagtcggaagtgtctgccacgggcatcaagaacatgctgctcacgctgtcctccggcgatgccgcaactgcccggcaggtggcatcgttcgacaagctcggcctcaaggcaggggatctggccaaggcgatgcaggacgatgccggcggcgcgattctcggcgtgctggagaagctcaagcagctgcccaaggccgaacaggccgcgaccatgacgcagctgttcggccgcgagtccatcggcgccatcgcaccgctgctgaccaacctcgacctgctgaaggagaacctgggcaaggtctccgatgagcagaagtacggcggttcgatgaacgccgagtacgccgcccgtgtcggcacggccgagaatggcctgatcctgctcaagaacagcgccatcgtgctgtcccagcgcatcggcaagacgctgttgcccacggtgaaggaactggctgcgcgcgtggcaaaggttgccgatcgcatggccgagtgggtcaagagcaaccctcagatggtcgccaccatcgccaagctggccatcggcggcaccgcgctggctgctgcgctcggcggtttggttgtcgcaggtggggtcggcgcgatggcgctgacgcagatccacaaggctgtgatgctgctcagcggtggcggcggcttgggcaagctggtgggccaggtgctttccttgggcggccgcgcgttcccgatgctgttcaacgttggccgcatgctgctgccgctgctcgggggcatcagcctgccggtgctggccatcggcgccgccatcggcgtggtggcagcgctggtgtggaaatactgggagccgatcaaggcattcatgatcggcacctggcagggcattgtcgacgtggtcaatccgatcatggccgagctggccaccgcgctcgaaccgctcggcccggtgtgggacatggtgtcctcggcgatgagccaggcgtggggctgggtgatgaagttgttcgccccgttcgaggccaccagcgagcagctgcagggcgccaccgatgccgggcgcgggttcggccagatcctgggcaccgtgctgacggtgaacctgcgcatggcggtgaaggccatcggctggctggtcagcgcctttaccaccatcctgccggtgatccagaacgctgttggcggtgcgtggacgtacctgcagggcgcgtggaatctgatcgtgggcctgttcaccggcaacggcgacaagatccgctcgggcctgagcgcgatgtgggcaggcgtgaatcagatcctgctcggctggccggcgcagatgatgcaggccggcatcgacatggtgcagggcttggtcaacggcatcgtgtccaaaggcagcgcggccatggatgccgtcgccggcgtcgcctcgggcgtggtgggcaagttcaagggcatgctcggcatccacagcccatcgcgggtgttcgcgcagttcggtgacttcaccatgcagggcctggccgggggcctcgaccgcagccagggcgagccgctgtcgcaggtggctaccctgggcgaccggatgaagcaggcaggcgcaggaatcgccctgggcgccgctgcgctgcccgtcatggccagcgccggcccggtagtggcgccgggtgccgcgcaggccgccacgggcgccgcaggcggcaacagctacacgatccagatcacagcggcaccgggcagcgacggccaggccatcgccgacctggtccgtcagaccattgaaaccattgagcgcgagcgggccagccgccgtggctcccgtctgagcgattga

SEQ ID NO: 506389 - DNA, 138 bp, Stenotrophomonas maltophilia
atggccaccttgatcgccatcgctgttgcgctgctcctgctggcttcggtcggcgggctgctggtctgggcattgagcgcgctgtgccgcctgctggcggcgctggtgtcctcaccgaccgacacgccctcggcgtag

SEQ ID NO: 506390 - DNA, 510 bp, Stenotrophomonas maltophilia
atgtctatgcccagcaagctcaagaatctcaacctgttcaacgacggcctcagctacctgggccaggtcaccgaggtcaagctgccgaccttgacccgcaagatggaggaataccgcgccggcggcatgctcggccccatcgatatcgacctcggccaagagaagatcgaactggaatggaagtgcggcggactgatgcgcgacgtgctgcgccagtacggcgccatcgcccacaacgcggtgcagctgcgcttcgctggcgcataccagcgcgaagacagcgccgacgtggatgcggtggagatcgtcatccgcggccgccacagcgagatcgacgccggcaccggcaaagtcggtgacgacaccgagttcagcgtgaagaccaccgccagctactacaagctgagcatcaacggccgcaccgagatcgaaatcgacatggtcggcatggtgttcatcgtcgacggcgtggaccagctggccggccagcgacgcgccatcggcgcctga

SEQ ID NO: 506391 - DNA, 1548 bp, Stenotrophomonas maltophilia
atgaaagaacgcaaacccgagggcaccggcaggaactacccggcggcgcagcaaaccggccggcagggggaactttgggttgagaccttcttcaccaatgcaggctggactgtcggcatccatcaaatcgacgacgggtacgaccttttcgtcacaccaccaagaagcgacttcaacggccagagctttctagtccaagtcaaggggaaagctgagcgacagaggaaaggtgtcttcgcacctgtcgccagaaggcgtcttcgtgactacatggcgaatatcatgccggtcttcatctttcgggtattcgtaggagataacactgcgtactgggtgcacgcgcaaagtgcggtcaaacagaaacctcagctagccaccggtcccggtgaagctcaggttccacttccggcatgcaatcaagtatccacaatcgaagcattcgtcgaggcgacaagagagatccttctccccccacataggcgtcgcgacggcgtaatgagccttctgaatgcaaaggcatctcatctttcgagtctggacgagactatgaatgtatccatagttcagcagggacagatcactacattcgagttctcagaagctgagggcaagcagtgcacagcagaggtaacagcaaccttcgctggtcagaacgtagaggcgatggaagcaatggtggactttgggcagccagcaagagccaacagtgaagaggtcatattcaaaggctccgcggtcttcactgagctaggcctagaccgcccatccccagcaaccatcgaactttctccgctttaccgtgaggaatgtagagtaaagctaagaccgtcaaattctgcacacagcttcgacgatgaactgactattccttgccttctatccaggggcaccaagggcattacgattgaaagcagacaaggcgctccactggcgataagaatccgcggagaaatttcaaatactggtcactcgctcaagatgaacctgcaactacccgaatcgttcaccgatggccaggaggtagcgctcaagcaaagtatcggagttctcggcaaatgggcagaacatgcggccgccaactatggcgtaataaacggcgaaatcgtaaaaggcaagaaggtcgtcaaattccacgcgaattgtaatgatagtcccgagctgcttcacctaatgtcggcggtcggtaagctgcaccatgttgctcgcgtgatgaattcaacctatcggctgacaccggatcttcgacactcgaagaaagaggtctggctgatcgagtgcgtctaccgcatgctcaggggcgagacgctcgacgtaggcatttcctcagcaagcattccatgctctgaagaagacctcccgcaaaccggcgactacatcgtgccatttgtcttgccattgacgtttggcggacagctggtctgccccgtcaccataaaccttgaccttcgcagatacgaccgattgcctagcgatgccgggggcgagatagttctagtccggcgctcggatagcacatctacaatgtccctgaagaacctgggggagtga

SEQ ID NO: 506392 - DNA, 345 bp, Stenotrophomonas maltophilia
atgccgctgccccccgacttctactggacgacgcgctctgccagcctcaccgacgatgcccccacggtcatcgcttgcagcggcgtctgggtggtcgcactgacgcaacgggtgaacgacgggatctggatcgccggtctggaccggcaccggcatggtcccggcgggccgttccgctggtgtaccagctacgagcagggtcgcgccggcgctgagatgtgggtgaccaggcacgagacccgcctgcgcgaggatgtggccaaaatcgaggcctatcgagaggcggtgcgggcgaacaggttgacgaagctgcacatcaagccgcccttcggctgggaggggtag

SEQ ID NO: 506393 - DNA, 1122 bp, Stenotrophomonas maltophilia
atggagtctgcgacccaagttccgccgtttgactacatcaccgctccccactatcgggccattcttgaggcggacttcgcagagatgcaggtctgtctgcaggcaggcgcatggaaagctgcaatggtgatggccggcagcttgattgaggccattctcgtcgagcatttggaatggctttcgtcgccaagcgatgaagaacgcctgcgtaagatcatgctggccgacgccatcactcgctgcgaggcggctggggaaatcagcgaaaccgcagcgaagctctgcagcgccgtgaaggactatcgaaatctaatccacccgggaaaagtcgtgcgagatagcgtagcagccccagaccagaacaacgccgtgatcgtgacggcgctggttgggaagatcacgcaggaagtcgcgggaagacgcaatgcccgaagtggcttcacggcggagcagctactccgcaaggtcgagcgcgacacaggcgccatcgcgattattccgcatatgctgcgccaggtccggacgcaagagaaggcgcggctgcttcttgaggtactgcccgccgcctatgccagacacagtgcgtacgacgacttcggtgttgacgaatcgctactttctcgcatctcagcggcttatcgccttgtgcttaatgaatcccctgagcatgcggaagcggccgcaagaatgttctatacgctgctgctaagcggcgactccacagagatcaatcggcacagcaaggccttcttccgcgctcctgacgccaagcatctggaagcccaggaaagggctgcggtcgtcgactaccttattgagagcgtactacccctccaagatggggatgatgatttctcccaaacactgggaatcgggccgttcctcacaatggcgaactttggtcagttcatggcgccacttctgcgccatgtgctttcgacccgaccgtcgaagtttgctagaaaccacctcagcgtcgatctgatcgcccttgctgaggacgtccggccggaggcgaagaagcacctctcgcgtctcgccaatattcaagagaagcggggtaatgccaactacgcggccgagctacgtgagtacgccgaatgggtcgacttcctgttctag

SEQ ID NO: 506394 - DNA, 954 bp, Stenotrophomonas maltophilia
atgaatccagtgattccgcaagggccaggtccggggcccgcattcgatgcctcccttgtctgcgctgtcatcgtcacctatgggcccgagccggacctgttgcggcgggtggttgacagtgtgctgcagcaggtggggcatctggtggtgttcgacaatggcagcactggtgttgatgtcgacgaactgctggccggaagggaggggatcagcgtggttgcctcggcgcacaacgttggcctcgggagtgccttgaaccgggcctatgagcgggcgcaggcgctcggcttcgcttatgtgctgctgatggatcaggatagtgtgctggcgccaaagatggtggatgtcctggggactgcactgatcgaactcaaccgcgcagagcgcgtggctgctgtcgggccgcagttccgcgattcgcgcagtggcatgcttgccccgttcgttcgctttggcttcccgttcaaccacaagttgcgagggggggcgggccagcgcatctcctgcgatttcctcatcacgtccggttcgctggtgccgatgtcggcattgcaggatattggtgcaatggacgaagacctgttcattgacaacctggacatggactggtgtttcagggccaagcgccagggttattctctgtatggcatctgcgatgcgcagatgacccatagcatcggcgaggagctgctgccatcacgtacgaagccggatggcgtgatcgtgcacaagcccttccgcctttacttcatcatgcgcaatcgcgttctgctctatggacgtgcctatacgccccgggtgtggattgcccaggatgtgccgcgcctgttgctgaagctggcaggcaacggtctgttcctcgcccctcgctggattcggttgcggttcatgctgagaggtctgtgggatggacttcgaggcaaggccgggcctttgcctccggtaaatcgctga

SEQ ID NO: 506395 - DNA, 1044 bp, Stenotrophomonas maltophilia
atggcagcctcgccaggcacgcccggcgaggccccagtgggtacgtgcgataatgacgaatcacggtctcttgccacactgatgcccgcatccgtctccatcgccgtctgcacgtacaacggtgagcgcttcctgcaggagcagctcgacagtctgctggcacagacacgccgccccaaccagatcgtgatccgggacgatctatcaactgatggcaccttggcgttgctgcaggcctttgtgccacgtgccgaagctgcgggcattaccgtggacctgcaggtgaacccacagaacgtcggctatcgacggaacttcgatggtgcgctgcgtgcctgcactggcgagatcatcttcctgtgcgaccaggatgatgtatggcatgccaacaagatagcgcgcttctgcaccgagttcggtgcgcggcctggcttgcttgccctgcactgcaatgctcagttgatcgatgaggccgggcagccgctgcagcagacattgttcgatgcgctgcgttacctgcccgaggatctggcgcgcatgcatgccggcggcggcttccgtctgatgctcaagcgaaacctgatgacgggcgcggcgatggcgttccgtcattcggtgctggccgatgctctgccactaccggacaaggactgggtgcacgatgcctggatcggcacgctggcagccatgcgtggggacatcgacagccttcccgaggcactcatcggctatcgcctgcacagcggcaaccagttgggcctgggcggcaatgacacggcgccacgcgcggtgcgacgcaagcggcaactggagaccgagtgtgcgcaatcgggcttgttgctggcgcgcggacgcgaactgagcctgccccagccattgctggcgtgggtggagcgcaagcagcatcacgtttcggtacgagcgacgctgcccacctcccgcatacggcgtttgccggtcgtgatggggcaattgctctccggaaactacagcaatttcggtcgcggcctgctgtcagcctgcatcgatctggtacgcgcgtga

SEQ ID NO: 506396 - DNA, 471 bp, Stenotrophomonas maltophilia
atgctgttcccccacgacctgcccgacgccgacgtccagcacctgccgggctggctggccgctgccgacgctgaccggctcatgggggcgctgcaggccgacgtgccgtgggaggtccaccgcatccggatgttcggcaactgggtggattcgccgcgactgagctgctggatcggcgatccgcaggcccgctaccgctattccggtgccgagttcgtgccgcatccgtggccgcccgtgttgcaggccgtgcgcgagcgcctgcaggccgaaggccacggccgcttcaacagcgtgctgctgaaccgctatcgcagcgggggtgactccatgggctggcacagcgatgacgagccggagctgggaccggccccggtgatcgcgtcgctgagcctgggcgccgcgcggcgtttcctgctgcgccgacgcgacgatacggcgcaaggccgaattcgtgctgggccacggtga

SEQ ID NO: 506397 - DNA, 966 bp, Stenotrophomonas maltophilia
atggaatccggcagggatctcgtcagcgacactattctcgacgtttctgtcgtcgttcccgtatatggctgcaagggatgccttgaagaactcgtggaccgagtaggtgcgaccctcgaccgggagggtcgcacctatgaaatcatccttgttgatgaccagagtcccgatcaagcctggcctagaatcgaggaacttgccaatcttcgctcggaagtgcgcggattgcgcctgtccagaaacttcggacaacacgcagcaatcagcgcaggcctggccaacgccgtcggccaccacgtcgtagtaatggactgtgaccttcaggatatcccggaggagattgccccgttgctggccgcgttgcagggtgacgtggaggtcgtactggggcagcgcgctgagcgacaggacggctggctgaaacgcaagggttccttggccttttatcgcacgctgggctggttgacggatacagaatacgaccctagcaccgctaactttggagtttatagccgcaaggttgttgatgccttgaaccgcatgccagaagcggaccgcttccttccattgctggttcgctggacgggattcaacacacggaaaatcgtcgtttcccacggtcggagaaccgaaggcaagagtggttatacgttcggggcactgctcaaaatggcgaccaggattgcgttgtctttttcggacaagccgctcaggcttgtcatgaccgcagcgctgatcatcgccgcaggggcagctgcgattgccgcattcagcgtttataggtacaccgcaggtgacatccgggtcgctggctttaccagtgtcgttgcatcgatctggctggtagggggcttgatcatggccagcattggcgtgcttggcctttacctggggaaggtccatagtgagtccaagggacgtcctcaatatctcgtgtgggaagacactcggaagcagaagaaatga

SEQ ID NO: 506398 - DNA, 759 bp, Stenotrophomonas maltophilia
atgactccatcctcaacattgaccgagtctgcctttgactcgaagcgcttcggcgtgaaagtggcgcgaggattgttcgacgcaaccgacgctgccgaagatgtcatctttgagattgcgcgaagcgacgctgacctcatcatcttcagagtccctgctggccagtctctcatccccacttcactgacgcgccaagggcatgcagtcattcacgccgacacattggtctattacggcatcgacgtgcctgcgctgacacagccggcgacgacggccaacgtccggcgagcacgcgaggacgatagcgaggcggttgccctgatcgccagaaatggcttcaacggctatcggtcccactatgccgcaaatccccttctgccggccgaactggtccattccggatatgtcgagtgggcgatgaaccttctggacggaacgcgcgaaggcagcgctacgtgggtcgcagaatctgaaggcgtcgtcgctggtttcgccagctgcgattcgaaggtggatgagatggaaatcatcctaaatgcggttcgaccggatttcgagcggcgggggctgtacgggaatttgctgcaggccatcattcgtcattgttctgaagccagtgtcccgaggttgacggtgtccactcagatctggaattacaccgtgcaacgccagtggatcaaggctggccttcagttgttcaaggcctacgatacctaccatgtggatcgacgcctcacagtttcaggaattcagaagtga

SEQ ID NO: 506399 - DNA, 375 bp, Stenotrophomonas maltophilia
gtgagccaggtctttccatggctgatggtagcgatgacggtcatactgaccagctacggccagctgatcatcaagtggcaagccgccctgttccaacctgcttcgaacggactactcgccaagcttccatcggttatccagttgctgctgaagccttgggttctatctgcattcgtggcggcgtttggggcctcgctttgctggatgctggcagtgtcccgacttgagctgagcaaagcttacccattcatggcgctgaacttcatacttgtatgtgtcatggccgtccctctttttggcgaatcctttggaattgccaaggcactgggcttggctacagttgtcgtcggcctgctgattctcagccaaggctag

SEQ ID NO: 506400 - DNA, 1137 bp, Stenotrophomonas maltophilia
atgattcgtttcaatcgacccttcatgacgggcaaggaacttggtgccattgagcaggcccataccaatgggcacctgtccggcgacggcccgttcacgaaaatctgtcatgcatggctgcgcgagaagactggagcgcagtcggcgcttctgactcattcctgcactgcagccctcgaaatggcggcccttcttctgcgactgcgtccgggcgacgaagtcattctaccttccttcactttcgtttcgactgcaagcgcatttgcgctgaggggtgccgttcccgtattcgtggatatccgcgccgacactttgaacattgacgaaagcctgatcgaggctgccatcacccctcgtacgaaagcgatctgcgtcgtccattacgcgggtgtttcatgcgagatggatgaaatcctggatattgcccagcggcacggactggcggttgttgaggacgctgcgcaggccatcatgtcgatgtacaagggccgcccgcttggcaccatcggtgacctcggcgcattcagcttccacgagacaaagaacatcatttcgggcgaaggcggcgcgctgctttgtcgcgatgatcgattcgctgaagaggcagagatcattcgcgaaaaagggacaaaccgaagccgctttttccgcggacaggtagacaaatacacatgggtggaggtgggatcctcatacctgcctggcgagatcactgcggcattcctggcatgccagatggaggacgcaacggagatcacccaacgtcggctggcgatctgggacacctacgatcaatgggcaaagaaacacgaagcctctggccgagtaagacgcccggttattcctgagcactgcactcacaacgcacatatgtattacatgctgctgcccagtctccatcaccgcactcgctttattgatggattgcgatcgcgtggcgtgcaggctgtcttccactatattccgctgcactcctctccagccggcatggaatgtggccgaacccatggcacccttacggtaaccgacgaaacttcagagcggcttgtacgcatgccgttgtggctgggcctggaagacgagatggatgatgtacttgcagctgccaacggggcgctggatgaggcattctcgtga

SEQ ID NO: 506401 - DNA, 1500 bp, Stenotrophomonas maltophilia
gtgagcagtcaggttccatgggggcatttcgaagaaggcactcgatttcgcttggatcgacgcgcgctgttcgtaatttcgtacgtcgtggcttttgtagtatcaaagtacctggggttttcacccggctatgctcttgacgattaccacatcatcagtgcacagcaagacggcgagaacatttcattcttcatttcccagggacgctatggctctgctttgatagaagcagcgctacgtggaagtggcctgaacatggcgagcttctcagttgtgtccttgatcgcgtccatggtattcagcggattgtttttcgcctccgttctgtcaccagacgccagaaccagcgccttcactaccgcagctgcggctgcggtgcttggcgcccactcgtactacagcgagtacgtgacgttccggcaatccgcactgccgatggggatgatgtttggattgatgtggctttcatcagtcgcttatcgtcagttcagatgtagcaatcagctcaagcacgcggctattgcacttctcgctgccaccggcgctatgggcttcaaccagctggcagtgtgctactgcgcgtccgccattctttacatgcatctgaaggagacagcaagctctcagatagaagcaggcgcctgcctcaaggcagcagcctggggaacggttgccgcagctggaactggagcactcctccttgttgcgaatactgcattatcagccttgctgcgggaagcactgagcctctcgactgatgcccgcgcgtcactacttggcattgctcaagtgcctgagcgcggcgctcagatcctttcgctgattccgcagatgctctatcgttcggagacagttgcgtctccattggcaaagctcacgctgcttgcaggaattgcagcgctcgtcattccactcgggcgcaaggaactccgcaactcttttctcgcgatttactttttctcaattggcactgcaatcacgctcgttcctgtgagtctctccagcacgtggtggcccgttccccgtacattggtttcgcttgcttttgttctcgtaggcactgcctcgatcatcagcgcggacggcagaaggaggcgttcaatccttgcgggagcgctttttactgtaagtgcacttcttttcgccgcacacagcaatactgttttactcaatcaacaacgcttgaaccgatgggatatggcgcaggcccaggccatcgccctccggtcaaccgcacagttcccggaggcatctggaagaatcgccctctcaggtgccaattggtatcacccgctcgcacctggtatcgctcaaggggacatgaatacatccgccatggccgtaggatgggcagttgacgctctgtttgatgaagcgaccggcctagatcttcatgtccgaaacgctccagaccgcgctgcgatctgcgagaatcgccaaccgttcccggcaagggactccatgattgatattgacggtgaggttgtcgtatgcctttga

SEQ ID NO: 506402 - DNA, 558 bp, Stenotrophomonas maltophilia
atgctgcgcgccgcgctcaatggcagccatcaaactgtgtacttcagcagttgcgcagttgccaacccaaaccaaccagctacgccctacttttcccacaagcgagagatggaacggctcgtcatcaagagcaacggcattgtcttcagacttccccaagtggtgggaaaatcgaccaatcccaacacactgacaaactttctgtttgatcgcattcgcaccggagagccgtttgacctttggaccggggtggaaaggaatctcatcgacatcgacgatgtggcaatcattgccactaccctcattcgtcgtggcttggtaactcctggagcgaccgaatcaattgccgcaccgcgctctgtgacaatgcaggaaatcgtgaacgtgtttgaggacgtgctaggcaagaaggcatcttacgccccaatggaaaagcacctcgcgttcccgatcgaaagcgaactgtgccaagcagttgcacgtgaattgggcattcagttcaatgactcctatctgcgaaacctcatcgcaaaatactatccatccgcagatgcgtag

SEQ ID NO: 506403 - DNA, 1404 bp, Stenotrophomonas maltophilia
gtgatccgccgtcttatccagctgataggcaaagtcagctttcgccagctgttgagcaatcctcgctatgagctggggcgcattctcggttggtttgcgcgtcgcatgggacgtgtggccgatgtggcgacgcatggaaatcctcagatgccatcctggttggttgaggaagccgtggcgttggcgcagatcgagcctgagttgctgagtccgcatggagacacccttcactatcagcactacggcattcctgtgatcccccggccgggcgaggtctacaaggaagtaatgcaggagatcggtcgaaaggcctactctcatgtgatgataattccttggttggtgccgggaggggcggatcgtggcgcgctctaccatctcaaggcgtggagcgaatcggtttctcccgcgcagattctggtaatcaccaccgagccaaatccctctccttgggcagataagctcccgtccggtgtccgattggttgagttcggccgccttgtgggagagttgaacttcgacgttcaagtccagttgatgattcgattgctgattcagcttaagccggctgttattcataacatcaattcacgcgttgcttggcagtcgatcaagttggctggattggcgttgcgccagcgatcaatgctgtttgcgtcgctcttctgcgacgactacaactcaagcatggtgcctgttggatacgcgagagcgtatcttcgcgagtgctacaagcacatcgagactgtcttctgtgacaacagcgtatatccgtccatttggtcgcgtgagctcggtgtgccaatcaactccttcacggttttacccttcccttatgatcgtgagtggagtgagtcgagcgccactcttcagtcggtagaccgcccacgtgttctatgggcaggtcgtttggatcgacagaagaggcctgacgtgctcgccgcgattgcattgaggttgcccagtttccatttcgatgtgcatggcgttgcggtcatatctgcgggagacccagctgaggagcagcttagaaagctcccaaacgtcaccatgcatggaccattcaaaagactggaagatgttgttcgtccagatcacgtggcatatctacacacgtcggcatgggagggggtgcccacgatcctcttcgatgtggcggctgcggggttgccaatcgtggccccggacgtcggggggatacgcgatttcgtcgatcgatcctggctggtcgaggatttcgaggacgtcgctaccttctcacgcaagttgacggaactggcaacttcgacagagctgcgagctcagctgaggcgtagtcagtatatgagtcttgcgcgggacagaagctggattgcgttcacctccagccttcatggaatcaagaattacatgggtgttgcgtag

SEQ ID NO: 506404 - DNA, 732 bp, Stenotrophomonas maltophilia
gtgagctgccagttgtcggcgatcattacgtttcatcgagagggcatcctggctcacgccacgctgcgcagctacctgctctccaaagagcgggcgcgcgaggctggtgtgaacatggagcttgtgctggtgctagacaatgcggacgccgaaacgacgcgtatcgtctgtggacatcctgctttggcgggaaatgaactgataattgaaacgactgtcggagactctgcactggcgcgcaacgtgggagtcgaccggtgcagcggtgcttttgtgtgcactctggatggagatgacctgattagtcgagactacttccagcggcacgtggaatactccgctggtatggcagagaacgctgtcctgcatccggagatggttgtcagtttcgggatgtacaacgcgtttaattggcagatcgatcagcgtggtcagtattactcgcgtgaatctttgctgctgatcaatccatggattagtgctgtttttgcacggcgcaatgtgtttagtgagatcccttatcttgcctgctacccgggtaccaccggtttcggctatgaagattggtactggaactgcgaaacgacggcggctggctatgagcatctggttgttcctggaactgcgtatttctaccgtcggaaattctccggttccgtcaacgagacgagcaaagccctgcaggtcgtaatgccgcctagcaagctctttgatttcgaggggctgtcgtga

SEQ ID NO: 506405 - DNA, 2202 bp, Stenotrophomonas maltophilia
atgaccacgactgacttgcaagaggtcatgcgtccagcacttccgtccctgctggcaggcgagcttgccgagtactacctgcaggcagtagggccgtcggactgcgcactggtcggctcagccttacagcatctgctgccgccactgcgtgcggcgggctgcgcggtcgcgcaccgggacatggcccttgcattcgagcgtccagaacgcggcgtcatcgcctggggcgagacactggaacagcgccagcaagcactggcactggacgcggctgttttgatgctagtcgcacctggagagcttctcaatgaagccgcgttatgggtgggtgaggcagcggcttccggctggcagcggcataccgctcagtttgcgttacgaagtgtcagccaagagctctgcgtgctgttgctcgcccgcgtcggtgtcgatcaagaatcagaccaaacgctgttgcgcgcgtgttaccacgggctggcctccgccttggtccgccctggcgacagggtgcttgccgcagacgcggcagaccacaatctctggcgaatcctgcatcagcaggcgcgctgcggctggcttggcgttgtcactgaccaacctgagccgtcggacctcgggccagacgttgcctggctgccgcgtgcgacatggcagcctcaagctgcagaagcggacgtggtcgtcacttgtcttggacacgacggatcggactgggcgcaggagctccacgacgtgcagacagcactcgtgcgcagtggccgtctcgtaatcgccgtgccgctggaagacggacgtcatattggtgagcgtgccttgatgcaggcgctgacccagcatgggctccagattgaccgtgcttggtggcagagcctgtctcgcccggtaggcgtcaatcagtttctggaggtgctgcgtgatgacagtggacagctcctgatcgatcccgactgcaaggcggtcgccgatgcgctggtgctgctggcggtgaagaccaaagggcccggcgtaactcgcaggtcggactgccagttgccaaatatcatcgcgttccagcgtgactacgtggatgctagtgtggtcaggctgatcgtggctgatggtctacgcattcattcggctcccctgcgcagacagttggcccgacagatcctggccgacgccccaagcgggtcggcggaccatggagccgcgctgtgcgttcttctgtacgatccggtggcagttcagagcgatgaccgcagacccttgcttgacgctgctgcgcgctacatcgaagtcccggcggataacccaaccgtactccgctggcaggtttcgctcacatatgcggcggcctccgtgcatcacgctgcgggggagcttgagcaggctgccgcgctttatcagcgagtgctcggtttcgatgtgctggctttcagtcctttgctgggaaccaaaacaaccgcggccgctacgaggctggggtggattcgtttcggccacggcgatctcgtcggtgccaaaaatgcctgggcacatgggctgaacgaagttcgcaggttgtctgcgcagccagactggagtgcggtcgtcggtgatccgcaggcaccggaaacattcgccatgcctgagtttgccgctgtcatggacgaggccgcctgtcttgccgcggccttgcggttgaccgcggagacaccgcttcgacctggtctggcctggcaatgggcgaatcggtcatggcgtgcgcagttggtcgaactacgaaccgagcagcagcgcaggcagaaatggcaagagcgtctacaggacgcgaaggactggctggacgggcagtatcacaatctaacctctgagctggatcgagttaccgaagagaacaataggtacagccaggatcttgcaggagcaaaagcggccttcaggttggcatcgcggcgtgccacagttgagaagatggagcttctgaacaggatcgagaggcttgaggacgaggtcagacaattggatcttgcttacggtcgtgttgtggacgctgcacgccggctcaccaacgctggccagttctttgtgagcattaatcatcaggcgccccttcctggtgatgtcgctgcagaggaaatgaaccgtctggcaacagcgctggaccaagttccgttcagaagaattgtgaggatgtctctgcgtatgttgtcgtacgtattcggtaggagatcggtcaagtga

SEQ ID NO: 506406 - DNA, 1803 bp, Stenotrophomonas maltophilia
atggaaacgaacacccccctgcgtcaagcggcgatgacgcccgcaatcctgcgcgtgacagtcgcccgtctgctcaactggctgccgtcacggcccgtgtcgctgctgggggatgaagtgccggctctcgcacgcgcactgcggcgggcgggagtcaacgtcactacggacggcgacggcagcgccgcagccgccactgtgcttgtgatggcgcacgcaagcgcttccccggctacggaggtgcaacggttgctcacaggcgttgccggaccggtttgtctggtagtgctgggtgacgcagctgcccagattgatcgcgcgacctgggagcacgcgctcatcaaggcggagtggcgcaagcacccgctcaacgagcgcgtcgcgccttacggcgaactcgaccgcgttaccggactgttgatggtgtcgttcgagcgtgttccggcaccggcgctggctgtgtatccgctgaaagcgcttgaggaagaacgcgacctgcacaccgatatgacgcgcgagccgggccggcgatcggatgcccacatgacccgctacgcacaggcggcccagttcatcagaccgggtgatcgtgtcatcgacgtggcctgcggccttggctacggttcctatcagttggcccacaacagcgacgctgcctcgtttacgggtctcgatgccagcgactacgcggtggagtatgccaatctgaattttgcgccggtgtcaccgacgccgatgacgttcgtcgtcggtgatgcgcagaacctgtcgggcatggccgacgcatcagctgatttcgccgtgtctgttgagacgttggaacatcttcccgaacccgaccgcctgctggccgaactgcaccgcgtgctgtcgccacacggacgagtctacgcaagcgttcccaacgactggtcggacgaaaccggcgaagaccccaatccgttccatttccatgtctacgattggccgcgtctgatcgcccagtttcaacgcaacggatttgtaatcgagaaagcctggctgcaggatgcaggcggtggccagaagcggcatctttcggcgcgctccatgctggagattgatccggcagtggggccgaccggcgacggcgagtggctgctggtgctggcgcgaaaggccagcgccgccgaccagccctcaacggatccgcttgcgcaggccaggacattgctggccgacggccaccccgaagcggccctggcactgctcgatgccgacttggatggatcggactccctgcgcgatgcgcgaaagcaggcgcttgctgctgtcatcctgatgctgcagggccagcgcgacggtgcccagcagcgctggcaacgcgtgcaggctgccgcccgtcaggcgctatcgtgtgccgggtcggaggcggcggctgccggattgcttcatctggccgctactcagtgtgatggaagccgaggtgaccggcctggtcatgcctacctggtgctgcgccaacatgccagcgtgctatccgacctgctgggcgcaggcgatacgatgctgggcgacggcgaggatcgcgcggtcgtgtctggacctgctgatggtgccgagcagatcaacatgggcgcgcgcgaggtacgtcagctgatcgatgcgaaggcatggctggacggcaagtaccacgagcacatgcaacgcatcagcgagttggagagtcatacggcagagttggaactggcccgccattggctggacgggcagtatcacgcgctgaacgcagagatccaacggttgaatcaggcccgcgggccggacgtcgacggcattacgtga

SEQ ID NO: 506407 - DNA, 1419 bp, Stenotrophomonas maltophilia
atgtcgtctgatgatctcgtcattgatatcgaaaatgtcagcaaagtcttcaacattttcgagaagccatctgatcggttgctgcagatgttgctgcccaggttggggcggatcgtgcctggcgcgggcgaatggtcgtcgcggcagcgcggacgtgaattctgggccctgcgcgatgtcagcctgagggtgaagcggggtgacgccgtgggcatcatcgggcgtaacggttccggcaagtcgaccctgctgcagatcattgccggaacactcgcgccgacgaccggccgggcacaggtcaacggacgcattgctgcccttctggagctcggtagcggtttcaatccagatttcaccgggcgcgaaaatgtgctgctgaacggcatgatcctgggcctgaccgagcgcgaggtgctacagcgtttcgatgccattgcggcgtttgccgacatcggagacttcatcgaccagcccgtgcggacctactccagcggcatgatgttgcgtctggcctttgccgtgcagacgcaggtcgagccggacattctcatcgtcgatgaggctctggcggtcggtgatgcactgttccagaagcgctgcttccagcagatggaagccctgcgagccaatggctgcacgctactgctggtgtcgcacgaccaggagtccattcgtactctgaccgatcatgcgattcttctgcgagacggcgtcgcgcgcgccgctggtccgtcttccgacgtcgtgctggagtatcgcaagcagttgcacgaggacgagcgtgattactatgcgtccatcagtgcgcagcatctgcagcacgcgcagaagatcgtggaggcgcaggccgctgctgatgcgcctgtcgagggagggccgcatgaaggatcccccgttctgggggcgcgcagcgacaagctttctttcggtgactacgattgcgtggtcgagcgggttcgggtgctggatggtcagggcgaagaatgcgcctacttcctgccgcgcgagaggctggtcatcgaggtgaccgcacgcccggtgcgtgacatggacaagctcaatgtgaatgtccgcttgcgcaacaaggaaggcgtcaagctctactcgtggggaacactcaaccaagacgtgcgcctgtggacggaggaaggtcggcaggatccgggggtttggggcaccaccttccgggccgatacgccgtttaccgtgcgctttgagttcgattgctcgctgggcgtgaacttctacgaagtgcaggtctcagtgtcggaagaacttgagcgctttggtggagcacaacgcatgctgcattggcgcgacgaagctgctttcttccaagttggaatgcgtcagaaggaatacacctttggcggcgtctgcgacctccgcatgcatgcggaagttgtgggtgcacaatga

SEQ ID NO: 506408 - DNA, 783 bp, Stenotrophomonas maltophilia
atgatggggcagcgcgtcgagttgatgctcagcctgaccgggcgcgacatcaagaagaagtacaaggattcactgctgggtgcgctgtggggcgtgcttgtgcccctgatcatgctggccatttacacgatcatctttgccaccatcttcagtgcgaaatggaaaggcatcgaaacgcacagcagggtggactatgccgttctgctgttcatcggactgatcgtctacaacttctttgccgagtcgttgacgcgtgcacctagtgcggtgctcagcaatccgaatctggtaaagaaggtggtattcccactggaagtcctgcctcccgtggtcgttctgtcctcgctttacaatgcgggcgtcgccagtgttgcattggtcgggttcctgatcttcagcagttttggcctgcactggcagattgtgctgttgccgctgctcgtgctgccgctgctggctctgaccctcggagtgtcctatctgtttgcttcgctgggagtgttcttccgcgacgtggaccagattgcaggcctgctggctcgtgtgctccagtaccttacgccagtgctgtacccgtcgatcattttcccggagaagatcggcacctggatgcggctgagccctcttgcggtgtacgtggagcagatccgcgcgctcatcgtcagcggtaccttgccggactgggggcgctacgcatgggccctgggctggtcgctggccatcctgttctttggatactggtggttccagcgtactcggagggccttcgccgatgtcgtctga

SEQ ID NO: 506409 - DNA, 1122 bp, Stenotrophomonas maltophilia
atgattcaggatccagcgaccggtaaggtctggggtacgcggtgtgaccgaggtactgtcgaagtcacctccggaagccccgggaagctgaagtcacagttgaaagacttcccgagtcccgacgaggcactgaaatgggccatcaaacaggagtggtcgcggctgaaaaagggcttcgtactggtaaaccctgtcgccgaggctgggcaaccgagcatgcacaggtacatcggcggtggctatacgggggcactgacgattgccgggtgccatggcaggatggtgaccaaccgttatcaggatgaggatgcgtctggtgcagcgaccgacatgctgctgctcgttggtgacgacgccgggatcctccatgattggcgacccggcaaaacggaccttgcatggtcggcactccctgcagatgacggcaaagggttcctgatccgactcgactccggcatttacctttggccatccgatggccgtactccccagcggatcagcgatgcaacggtaatgtcatcgccgttcctgacaacctcaaacggatacgtcgcgtggcatgacggtgatcatgtaacggtaatgagactcaccgatggacagcgcttcctgcagttggcacgtaccccagcgatggtgggtgggcattcgaggcagatgatgggcgcgctctctccggatgccacgacgcttgcctgctgcgccactcccggtgagatcgagtgcatcgatattgctcaagcggatactgtccgccgacatcgaagtgacttcgaaatgatcaccaagatggagtggagtgccgacgggcgttggctgctggcattggagcaatatggaaaatggcgcctgctgtgcctggatgcggcaacgggagaatgccgtcccgggtggccgaagttcgctgacatgacacgaactgactttgcgctggatagcgatagcaagcgactcgccatcctgcaccgtggacatattgcccttcatgacttcacggatatgagggaaattcgacgctttcccgtagatcatgtggtccgtaccgcgcatattgcatggacgggagacaatgccatttcggtgcgcaccgactatggatgcctttccacatatgcgatttga

SEQ ID NO: 506410 - DNA, 1461 bp, Stenotrophomonas maltophilia
atgtccgacagccacaccccatccaacgagcgtgcagcgtgggatgcgctgctggtggacatcgtcgactacgtgcgcgaggcgcgcatcgactcacccctggcgttccagaccgcacaccactgcctgctcgacacgctgggctgcggcctggaagcgctgtccttcccggcctgcagcaaactgcttggtccactggtgccgggcatcagcgtggtcaacggcgcgcgcgttccgggtacgcactacgtgctggacccggtgcaggccgccttcaacatcggcgcgatggtgcgctggctggatttcaacgatacctggctggcggccgaatgggggcacccttcggacaacctgggtggcatccttgccgtctgcgattggttaggccgcaacgcgcaggccctgcggcgccccccgccgaccgtgcgcgacgtgctgctggcgatgatcaaggcgcacgagatccagggcgtgctggcgctggagaattccttcaaccgggtcgggctggaccacgtggtgctggtcaaagtggccaccaccgccgtggttgcgcagctgctcggcctggatcgcgaacgcatgctcaatgcgttgtcgctggcctgggtcgatggccagtccctgcgcacctaccggcacgcacccaacaccggctcgcgcaagagctgggcggccggcgacgcgaccagccgtggcgtgcgcctggcgctgatggcggccagtggcgagatgggctaccccagcgtgctcagcgcgccgacctggggctttgaagcggtgtcgatgcatggcaaggcactgacgctggggcgaccgctgggcagctacgtgatggagaacgtgctcttcaagatcagctacccggccgagttccatggccagaccgcggtggaggcggccatcacgctgcaccagcagttgcgtgcgacggggcggcgggtcgaggacatcgcgcacatcgccatccgcacccaggaagcctgcatccgcatcatcgacaagcaggggccgctgcacaacccggccgaccgcgaccactgcgtgcagtacatggtcgcgatcgcgctgctgcatgggcggctggtggcccaggactacgaggacgacgttgccgccgacccgcgcatcgacgcactgcgcgcgaagatggcctgtcatgaggatccgcagctcagcgccgactacctggacccggacaagcgcagcatcgccaacggcctgagcgcgcgcttcagcgacggcactgagctgcccgaggtactggtggaatacccgctcggccacgcgcgccgacgcgaggagggcattccgttgctgatggacaagttccgccggcacctggcccatcgcttcccgaccacccagcagcagcgcatcttggccgcatcgctggatccggtggcgctggcggcaatgccggtgaccgactacgtggacctgtacctgccggggtag

SEQ ID NO: 506411 - DNA, 3117 bp, Stenotrophomonas maltophilia
atgcagaagactcgcccactaccccgtaatccgttgagcctcgcgctctcctcggccattctgcttgccgtcgccctgcctgccttcgcgcaggagggagaaactgcaaaggaaaccgctgagagcgcgaagaaggcttccaatgaagccgcggccacccagctggaccgcatcacggtaacgggctcgcacatctaccgtgccggctatgacaccctggaaccagccgctgtggtgtcccgccaggatatcgatgcgtacggacacaccaacctgatcgatgcgttgaccaagattcccggtgtgtccgccggcgtgtcctcacgcggtgaccaggccggcttcggcgcgggcgtgaacttcgccagtcgcttcggcctgggcagcaaccgcctgctgaccctggtcaacggtcgccgcttcgtgacctcggccccgccaaccgtgttcggcgccggcggcggctcgggcatccaggtcgacatgaacgcgattccgaccgtgatggtcgagcgcgtggaaagcctgagcatcggtggtgcgcccacgtatggttccgacgccatctcaggcgtgaacaacatcatcctgcgtgacaagttcgagggcgccgaggtcgagctgggttttggcaggaccaccaagaacgacaacgaccgctactcctggtctgccatcttcggcagcggtttcgccgacggacgtggccacttcaccattgctgccgaactggacaacagcgaaggcgtgaacgcgctccagcgcgacttctaccgcaacggctacagcctgcagaccaatccgacggcagccaacgtggcgcgcttccagccgtggcgcacgccgggcaacgacggtcgcatcgaccccagcatcccgttcaacaccgggccggccgacggcatcgccgaccaggtctggatccgcaaccggcgtatctccagcatgaccttcggtggcctgatcatgccgtcggacatccaggtgcggcgcagctaccagcgcaatgccacgggtgaactgaacggctttggcccgaacaacaagctctggcacttcaacgacaagggcgatctggttgcctacgatccgggcatctcctatcccagcggcaacgcgtccggtggcgatggcctcaacctcaacgagaccgtcccactgatcgccgacctcgaacgccgtacggtctattcgaccggcagcttcgacttcaacgacaacgtgcgtggcttcttcgaactgtcgcactacagcgccaccgcgcgcgagacactggaccagaacgtctacaacgctgccggcttcggcgccgcaaaccccgatggcagtggcgaccagagcggcgcgatgctgttcagtgcgaacaatccgttcctcagcgcggagtcccgtcgcatcctggccgagaatggcatcacctcgttccgcctgtcgcgctcttcgcgtgacctgagcatgaacaacgccagtaccgatacgcgcctgagccgtatcgtgctcggcctggacggcttcttcgatatcggcgagcgccgcttcaactgggaaaccagtctgacccacggtcgaggcgacttcgactacaagggcaccggcctgatccagcagaacttcatcaatgcactcaacgtgaagcgcgatgccagcggcaacatcgtctgtgatgcatccgcccgcggcaccactgcggatcccaactgccgtccgctgaatctgtttggcgagaaccaggcatcgcctgaagcactggcctatgtatcgacgccgaccctggccaaggcgcggacgcgccagaccgtgttcaacgcgtcggtgaccggtggcctgttcgacctgccgggcggcgagttctccttcgccgcaggcgtggaacatcggcgcgaagaaggctcgttcaccccgagcgagtaccagcggctggggcagggccgttcggtgccgatccagggcgccaagggcgactatcacaccaatgaaatcttcgccgagttcttggcaccgctgttcaaccccgactgggatctgcctggcctgcatcgcctggacgtgaccctgaagggccgccgcgtggtcaactcggtggctggtggcttcaacgcgtacacctatggcatccagtacgagccgttcgcgggaatccagctgcgtggcagcaagacccagtcgctgcgtgccccgtcgattgccgagctctatacctcgctgcagccggcgtactacaacatcccggaagtctgctcggtgtcggccatcaacggcggcaccaatcccgcgattcgccgccgcaactgcgaggccttcttccaggcctacccgggtgcggacccggcgaccttccaggcgtcgccgaccaacaccctcggctcggtcaacggctataccggcctgaagaacgagaaggccaaatcctggacagcgggcatcgtgttcgcaccggactgggcgaagggcctgcgcgtcgccgccgactggtatgacatcaagatcaccgatgtgatcaccagcctgagcccgaccgacatcatcactggctgcttcgacaacccggatttcaatgcgtccaacgtgcccaacgccaaccgcttctgcagcctggtcacgcgcaatccgttgacgggtgcggccaccgatatccgcaccgaatacggcaatggcccggtgctgatgttccgcggctggacggccgaggtggactacaactgggacatgggccggttcggccaggtggcactgggcttctacggctacatgccgaagaaccgtggccaggccgccaatgcggatgtgccgttcgtggagcgcgtgggtacgttcgaagagcccaagcgccagttccgctggacggcgcagcatgccatcggcaagtggagctatggcgtgacgtccaactacacgagcggctcgcagttcagcctgaccgcaaccccggaaagccggcagtacttcaagcgcgacagctggacgacctgggatgccaatgtcagctaccacctgaccgacaatgcgcgcctgaacctgtcggtgctgaacctgtccgacgacatcggcccgttcccgtacgtactggacgcgctgggtcgccgctacatggccagcctccgctacagcttccgctga

SEQ ID NO: 506412 - DNA, 3030 bp, Stenotrophomonas maltophilia
atggcagttgcatccatacatcgcgtgctcaagcgcagcgcactttcggcaatattgttttccatcgttggcagcgttgccgcgcagagcacgaccggcacgctgtacggcaatgctagcggctccgaaggcgcgaccgtcgttgcgcagagcgacagtggcctcaagcgcacggccatcatcgacgcccaggggcgctacagcttcggtgcgttgccggtggggcgctacagcatcagcctgcagcgcgacgggcgcatcatcgaacaacgcgatgatgtgcggctgcgcgtgggcagcggtaccgaagtgagcttcgccgcacaaggcccggcgaccacgcttgatgcggtcaatgtcacggtcgcccacatgccgaagatcgatgtgacccacaccgtctctaagtcggtcatcacctccgagcagctggacgtgttgccgctggggcgaagcgctgaatccatcgcgctgctggcgccgggcgtggtcgctggaagtggctccttcagcaatggctcgcgctcggtgctgtcgttcggcggcgccagcgtcaccgagaatgcttactacctcaacggcttcaacgtcaccaacccgctcaactatctgggcggcatcagcctgccgtacggctccatcgaccagcaggaaactttcaccggcggctacggcgcggcgtatggccgttccaccggcggtgtcatcaatcaggtaggcaagcgtggcaccaacgcgtggcggttcggtgcgcaggtcacctggtcgccggccgggctggccgagtctccggcatcggtgaactacccggacatgacccttccggaaggatatgccttcgagaatccgtccaagccgggcacgctgtaccgctaccggcgcggtgacaaggcaaccacgacgacctacagcggttacgtcagtggcccgttgatcgaagacaggctgttcatccaccttgctgccgaatcgaaccgtcgcgagggcgttgcaacagccaacgaggccgccgcgcagcaggtgcgcaaccactaccgcgttgacacgccgaagttctacggcaaaatcgattggaacatcaacgacagcaatacgctggagtacacccgcttccaggacacagatcgtactgctggctactaccgggagtttgactacaagacgctgtccgagcgggatcgcaccggtacgttccccaacctggtcaagtccagtaccgacgtcgatatcttcaagtacaccggttacctcaacgatgcattgaccttcagtgccgtgtgggggcgcgcgcgtaccagcaacctcgaattcaatccgctgggctcgggcaacccctatatcagtggtgccggcaaccaggatccctcgttgaacggcggcacgccgatccgcaacgaccagcccgatctctacagcaaggcacctgatgcgggcagcacgacccacgggctgcgcatggacctgcaataccgcatcggcaaccacgagttgattgctggcgtcgacaacatgacctaccgggccaacaacgaagggcagtccatgacgggccccggtcatgcctggatctattcgcgtggcaatccgggcgcatcgcccagcccgggcttcggcatcgccccgccggggggcgagggctatttcgtgcagaagtacattttctccactaccaccagcatgtcggtgaagcagcgggcctactacctggaagaccgctggcagctgacacccgattggctgctgacgcttggccttcgcaacgaccgcttcaccaacttcaacagcgacggccgcgcctacgtggagagcggcgaccagtgggcgccacgcctgggcgccagctgggatgtattcggcgatgcttcgttgaagctgtttgccaacctgggccgctactacctggcgctgcccaacagcgtggctatccgcggcgcctccgcatcgacctacacgcgcgaatacttcgcctataccggcatcgacgccaacggcaacccgaccggcctcacatcactggggccgggtccggtgtcggccaatggcgagtacgggcaggcgcccgatccgctggccgtcgcgccgaccgacctgaagtcgcagtaccaggacgagctgatcctgggcttcgagaaaactttgggcagccgttggaacagcggtgccaaggtcacctaccgcaagctgcagtcggccattgacgatacctgcgattcagaccgcttcgtcgacagacttgcgggcatgggtctggatgccgacaccttcgatctgcccggctgcgtgatcttcaatccgggtgccaccaacaccttccagctgcggcaccgtgatggctccggctacacaccggtcagcatgagttcgaaagactggggctacgacggcaagaaggcgaagcgccagtacgtggcactggatctgttcatcgaacgtccgatgtccgacggctggtccggccgcctggactatacctggtcgcgtagcttcggcaacaccgaagggcaggtgagatcggatatcggccagagcgatgtgtccaagacccaagactgggatgcggcggcgttgatggagtacgccggcggctacctcgccaatgatcgccggcaccagttcaaggcgttcggtgcctaccagatcgatgacgaatggacagcctctgccacggttcgggtgatgtcaggcatgccgaaaagctgtctgggctactacggcagtgatcagaccgatccactcaatggctacggctcggcctaccactactgcaatggcaagccttcgcgtcccggcgacgcgggccggcagccgtggacggcgcagctggacatgggcgtgatgtatcgccccgggtttgctgacaaccggcttggattgggactgaacatcttcaacgtgctcaaccagcggcgccagctgcagtccactgccaagtaccagaccgggccggacacggtctccaacatctacggtatgggcagctacttcacaccaccgcggacagtgcgactgagcgcctcatacgacttctga

SEQ ID NO: 506413 - DNA, 390 bp, Stenotrophomonas maltophilia
atgatcacgagcgcatgggcattcaagcagttgtgtgaaaacgagtcagatgcatcatttgcctggcagcaggacgaggatcaggcgtggatcgatatccttgcgacctaccctgagctggcgcgctgtgtcgccgggaacaaaacaattcccgagtgcatcatcgaacagctggcttccagccaagacgtcgacgttcgttggagcatcgcgtgcaaacgtcggctgagtgaggggcttatgtcccgtttggcgcaggatgccgatgcaagcgtgcggcatcgtatcgcctgcaatcccaaagtaaccccgaagattctagagtcgctctccgtcgacccggacaagatggtggcggcctcagcgcagcgaaggctgcagtccatgtga

SEQ ID NO: 506414 - DNA, 486 bp, Stenotrophomonas maltophilia
atgcgctggccctggactgcgacgcccatgctcaacgatgcccacgcccaggcgctgctgcaggacctgctgtcaggcgacggcgggcgcatcaccgacgccgcgcgtacgctcgcccgactgttcgatgcggcgccgctggatgcgctggcaccgcacgtgacgttgatcgagcagcacagcgcaggcatagcgctgggcggcatgctggtcagcaaccaggcgcacctgaaggcggcgctgcagcggctgcgcttctggcgcgcgggcaccggctgcctgtgtgcgctcaaccccggctatccgttcttcgacccccgtcggctgatcgaacacgggcagatgcagctgctgtcgctcgacgcagcggaggatggctggggcgactgccatcgcgtcgcctgcacccactgcggccaacactggcaggcgatcgaccgcgagtatcactacccctggtgggagtggaaaaccgtcgaacgatga

SEQ ID NO: 506415 - DNA, 843 bp, Stenotrophomonas maltophilia
atgcgcgcaccgcccctgcttcatggcctgaccctggatagcgaaccgtgcgcgggcccgtacccaccgcagggcttctggccgatcgccgaaggtgcactgggcaacggtgatcagttcggtctgtactggccactgggtcgggaggctgagccgcccgtggtctgcgaaatgttccatgacgaggggcgcatggtcttccgccattcctcgttggatgtcttcgcgcagtggctggatgccggtggcgcggaacaggacgacgatgacggctgcgagccgcgtgagcacgcggtaccggatgcgggatcgccgttgcccttgatcgagcgcgcgcagcggcatgtacaggccgccgaaccggcccaggcaattgcgttgctggaggacgcctgcagccgctttccggaactgccgcgcgcgtgggccctgctggcagggcagcagatgcgcctgggccagcacgcggcggccgtggcggcggcacgtgcggcgatcctggccaactgggctttcggcattcccgagcccggcgtgctgcgcatgctgcggaccaccgatgcggccggcgatcctgtgctggcgatggcgcagcagatggggttcgccttcggcggcgccaagaccaacccggactatgcgctgatgcaggcgtgcatcgatcagtgctgggatgcgggagatacgttggcggcactgcgcgtgagccagaaccgctgctacgtgttgagcagcgagactgtttccttccagcagcgcgaaggcttcgatctggaggcctggcggcgcgacttcgccgcacggtgccagcgtgcgctgcacgacgaccggcagcgcatgtag

SEQ ID NO: 506416 - DNA, 4527 bp, Stenotrophomonas maltophilia
atgaaccacatctatcgtcgtatctggagtaccgccaagcagtgctgggtggttggcagtgagttgagtgcgttgcgtgggaaaccgcacggtggcggagcacgcttgtcgggaaactgcgctgcattggctgcttgcttcttcttcctgccgctggcgcaggcgatggagcctgcgcactgcgagcccgaacagaccgagtgttcgtcggaggttgctgcgacgaacatcgtgcgcatgaactcattgttcaaggcaacagacgatctttcccgtgctggtctcctggccgtaggtgagacgctctggggtgacggcatcaagcgcaacggcgatcacaacactgcctttggctaccgcgtcgaggtgaccggtggttacaacaccgcggtgggttcgaatgcgcgtgcgcatggtctgggctcgacggcgctgggcaacaattcctgggcaagtggtgtcaacagtgtggcggtgggaagtggtgcgcaggtcaccaccaatggcggcgtaggcgctattgcagtgggtgttgacgcccgtgccgggacgagcgggttcacgggcgccgtgtcaatcggcaatcaggcggtggctcgatacgatggggtggcgctggggtatcgagccaacgctctgaccagtaattcggttgcactgggaaactcttccactgcctaccaggataatgtcgtttcggtcggaaactccagcaacaaacggagaatcgtcaacgttggtcgcggtagtacgtcctacggaagcaccgatgccgtgacgggcgggcaactatacgaaacgaaccaggacgtcagcgctgctcggagcctggctggcaccgccagttcgaacgccaacaccgcgctgagcaccgccaacaccgcaaagtcgaatgcggacaatgctctggccaaggccaacattcgggaagggcttctcaaccaggcgtccgtttcgggaaatgttcgcataggtgcaagcaacagcggcacgacgcttgatatccggaacagcgcgaatgtgaaccggaagatcgccggtattgcggctggcaccgtaaacgccgcaagtgccgacgccgtgaacggttcgcagctgtatgccacggatcagaccgcaaaggccgcgaaggcggctgccgacagtgcgttggcacagtcgacgacagcttcctatctgcttgccaatggcaatacacccaccgttgccatgcgtgcgcaggccactggtacgggcgctctggcgaccggcatctacactgaggccaacggcacggcggcgatggctgtggggcgcacggccaaggccaaggcggatggtgcgattgccctcggcgatcgtgccagtgtgggcaacggcacgtccaagaacagtatcgccatcggcacgaccgctaccaccggagtacaggaagacctgatggcgatcggacgcaatgcgactgcgtccggtggggtcggagccatggcgctgggcgcgaacagtgcggctggtcaccttcgctcggtcgcgctgggttcgggatcggtgactaccgcacaagaccaggtgtcggtgggtagcacgtcaatcaaacgcaagatcatcaacgtggccgacgcgacactgaactccagtagtactgaggcggtgaccggccggcagctcaacgcaacaaacaccaacgtcagtacggcgctgagtgacgccagtttggccaaggccaatgcgaataccgcgctgaccgaagtgggtacgctcaaagggttgctcagccaggacggagctagcggtgatgtccgcatcggtgagaagaacagcggcaccgtactggatgtgcgcaatagcgcgaatgcgaaccggaagctgaccggcgtggccgatggcgtggtcagcgccagcagctacgaggccgtcaacggcaggcagctcaacgccaccaatgacaaggtgacgactgtggagggtgtggccaggtctgcgggtgcagacgctgccgtggcaaagaccgatgcagccaaggcgttggtcgaaaccgcagcactgggcgggctggtggcgcaggtatctgcgtctggcgatgtgcgccttggtgagaagaacagcggtacgacgttggatgtgcgcaacagcgccaatgccaatcggaagatcactggtgtggcagatggaatcttgagtgccagcagtgctgatgctgtgtcgggtaggcagctctattcaaccaattcacgcgtctcagatcttgaggatcttgcgcagtttgtgagtatcggctctgcgcccttcagtgaacgcgccgaagcaggtgtggcaggcgttgcggtgggaaattcagcaaagacgggaatggagggaggaactgcggtaggcacgtttgcggaggcaatggggaagaactccaccgcaattggtagagcggcaactgtctctgtggattccgagaatgggttcgcattgggagtcggtgcacaggtaggcggagacactggcggtgcacgtggaggtgtggcgattggtgctggcgcaagcgttgaaggtggagctctcaactcgctagcacttggaatgggttcccaagctgatgaagttggggttgcgtcattcgggagtgtcggcatccagcgccgccttgtaaacatcgcccgtggcgctgccgaccacaacgccaccactgtctctcagcttaaggattccctcgccaccctcggcggcggcgcaggcatggatgccaatggcaacatcatcgctccgacctacgcggtgcagggcggaacgcagagcagcgtcgaggacgcgctgatggcactcgatggcgccgtcatcaccgcaggccgtcgcacggacaaggtggaaggccaactcagctccatcttccaggactcaccttccgcccgtgccgacggcatgaaccagatcgcgctgaatggcgtgaatggcatggtgctgaccaacctggctgacggccgagttgcgccgggaagccgtgatgctgtaaccggcagtcagttgtacgccgccgagcagaagatctcgcagaatcggaatgatctggaggcgatacgcaaggagcgggagatgggcgagcaggcaatgcgtggattggatgtgagcggctcgatcgattttgggggtgcgcgtttgactggcgtggccgatggttcggtttctgcggatagtcacgacgtagtcaccggtcgccagttgttcggcgtcagtgatcgggtatccaagatcgagcatcagggtcgcttcctcaaaattgacacggatcagctgagcgaagatgccttcgcaggattcttgggtgttgccattggtgactcggctcgtacgcagggtgagggggggacggcactgggggcctatgcgagagcgcttggtgttaactctgtcgctcttggtcgtggctcgggcgtttctgctgacgctccttacggttttgcggtcggcactggatctcaagtgcactccgcacgaggcattgcgatcggcagtggctcggtagttgactcagatgcagcaggatctctggctttgggcgccaactctgcggcaacagaagtcggagttgcttccttcggcaacgcgaccgcgcggcgccgcctcataaacatcgccaatggcaccgccaaccacaacgccgccaccgtcggccagctgcgcggcgcgctctccgccctcggcggcgaagtcgatgccaacggcaacatcgtcggccccagcttcaacgttcaaggccagtcccaatccacgctcaacggtgcattggaagcgctcgacggcgcagtcgtcagcaccacctcgcgcgtgaaccaggtcgaatcccagctccgctccgtgttccaggaaactccctcggtacgcgcagacggtaccgcccagctcaccctggccggtgccaacggcatggtcatctccaacgtggccaacggcctgatcgcggccggcagccgcgatgcggtcaacggcggccagctgcattcgatgcagcagcagctcaacggccgcatggatgggctggagcagcgcatcgacgatcagccgcaggcccgcgccatggcgacggcgtccacgccttcgccgtccaccgaagaaaccgcgccgacgccggaaaccagcggtccgccgcagatcgcctcgaccggtgaaggtgacaagccgacgccgcaaccgaagtcgaagcaggacgacacgcccaagccgcaggtcgataccgccgacctggaaaagatgctggcccgtgccaacgagtacaccgatggcgcgatcagcaatttcgagcgccgcctggacaagatggacaagcgcttcaaccgcatggcggcgatgagcagcgcacagaccgcgatggcgatgaacaccgccggcctggccacctacaaccgcctgggtgcgggcgtgggttacagcgagggtgaatcggcgatggcggtgggctaccagcgcgtgctgaacgagaagggttcggccaccttcagcctcaatggcgcgttcaccaacagcggtgagcgcagcatgggcgtcggcgtcggcatcggctggtaa

SEQ ID NO: 506417 - DNA, 1050 bp, Stenotrophomonas maltophilia
atgcgattccccctgccaaccgccctgctggccctggcctgcccaatcgccgcccttgccgcagccccggccagaagcctgtatttccagcaccacgactgggtcgtggcctgcgacaacaccctgacctgccgcgccgctggctatgcccccgatgatggcgacaccctgagtgtactgctcacccgcaagggcggcccgggccaggccatccagggccgcctgacgctgcagccggaagaaggccagagccagcccaagggtgcactgcacctgcacatccagcagcaggatctgggcgttctggccccggcgaagggcaaaggcacacacagcttgaatgtcgcgcagaccagcgcactgttgtcggcactggtgcgcgacggtggggtcagcgtgaccgatggcgccggcgatcgctggccattgtcggacaagggggcggcagcagtgctgctgaagatcgacgagtaccaggggcgcctcggcacacccggcgccgtgatgcgcaagggcagcacgcccgaatccagcgtccccgccgcactgccggtgccggtggtgcgcaaggccgctaccgtggactcgaccccggatgatcaggcgtttgcgcaactggccgcctcacccgccctgcgcgcggcgctgcgtaccacgctgaaggacgacagctgcgaaggcctgctggagaccgacgccgacgttccgctcagcaactccccgctgcagatccaacgcctggacgcacagcatgtgctggtcaacgtgcagtgctggcgcgcggcctacaacaccggcgatggctactgggtcgcccgcccgcaggcgccgttccagccgcagtgggtgaccagcgatgccatcgactacgccgacggccagatcattgccgcacggaagggccgcggactgggtgactgcatctcgcaggcaacctggacatgggacgggacgaagttcgtcgcgacgtcggaggcagcggccggtctgtgccggggcgtgcccggtggcacctgggaactgccgacgctggtgaccgaggtccgctga

SEQ ID NO: 506418 - DNA, 1071 bp, Stenotrophomonas maltophilia
atgaccgaccataacctattcaagattcaccggctcgaccagaggacgctaagctggtggcgctccagaagggacaaaattgacttcgacccaacataccagcgtaaggggcggaggtggtcaacaagcgacaagcagtatcttgtggactcgataatcaatggattcgacgtcccaaaattctactttgctgactttacctatagcatctcaaagctaaacgaaaagaagaaatcctatgctgtaattgatggcaagcagaggctggaagcgatattcgactttttcgatgaccgattcggcctgtcaaacaatttcaagctcctagctgatccaaagctagaaatttcaggaaagcgatattcagaactgaagcgagagttcccatcaatcgccgaggagtttgacaatttcaacccagacgttgttggcgtcattagtgacgatacgaagttcattgaagaactttttgtccgattgaatagaagcaaaccgctcagcggcgcggagctacgaaatgctgtaaccagccccatcaccgagatgataaggcgaattggcaaccatcaattcttctcaacaactgttcgattcaatacgaacaagggtcagaatctgaatgccgccgcaaaagttctgatgtttgaagtttctggtctacaggaaacaaagaagagcagccttgataaattttttgctcaggccaatgaaagccataagatggccgatgctgccgctccgcttgtctttgaaacgctagatctcatgtcagagacattccaattcagagacccgctcctacaatcagaaggaccacttccggtttactactggctgaccagaaatgcgtccgaagagagcattccttacattcgagacttcttggaggaattccaggaagccataaaggcagggagcgcgaagggaaaagcaaaggaacagattgtttcaaccgaatccatcaatgcatacaaactcgccagcagatctgtgaacgacaaatccagccacgagattaggtatgagatacttttcaaggcatttagccgatggctaagccttagagtgtga

SEQ ID NO: 506419 - DNA, 909 bp, Stenotrophomonas maltophilia
atgaacgacatggcaacacctgccgaaaagaaagtaggcaacagacccgcaaaaattccggtgaagagaagagatggcctaggggaagctaaggacgccgtagtagaaaccgctatcgagtcagctgccgacttcctatctgaattaaacaaacttgattatgtaaccaagaaattatggtaccgcggaaccggggactcaagtcacaaactgataccatccctattccgacataagacaataaaaagtcaagcgggattcaaggctctcgagcttgatttgaatgaaacttttgagatgcgcagcctgccctatacagagtccagaacttgggcgaaggatgagtgggagcaattattcttcatgcagcattttcgaattcccacgcgactcctagattggtccggcagtccgctggtgtcacttcatttcgccgcaacatcggttgcaaccgataaacatggaaaggccacgacagacgcagcagtgtgggtgctggatcctcatgcttggaatcaggcggcatatgcagacactggcttctccgggggcgttctgtccgcgaaagatagctggctcaaaagatacagcccctccgaggtctataccgtgaatggtgcgttgccgccagtggcaattcgcggcgtgcacaacagcgcgcgtatcgtcgctcagcagggatacttcaccgtgttcggcccccaagcggaagctcttgaatcaacctatctttggaaaaaggattcaaagagagttttccctaccgaatgccttcgaaagttcgtaataccgaaacttaagatagagagcatacgaaacgagattttctccctaggaatatccgagtccaccatatatcctgatctggaaggcctcgcggcggaacttaaaagaaactatggattctga

SEQ ID NO: 506420 - DNA, 750 bp, Stenotrophomonas maltophilia
atgtcacatttcagagacctcgaatttgatctgccttctgccctactacgggaactgattgtcctcttcgaggaaatggcaccggcagttcttagtgagcagaacgtactaccgcttgccgatgggcaaggtgtctaccaactctttcaccgcgacaagttggtttacattgggaagacagacaacgaagccggactgcgaaaacgactcttgcgccactgcgaaaagatacggtcccgactcaacttaattgcggacgaggtctcgtttaaggccgtaagaatatatgtattcactgccatggatttagagagcgcattgatccggcactacaaagctgtggcaggaatttcgtggaacaacagcggatttggttcaaacgacccaggtcgaaatagagatcattccgcgcttaaaagcgggcattttgacgccctctatccaatcgaccttaattatcctgtcacgattcattcaaatgaagaattgacagcagcgtcacttctggtcctacttaaagagcagcttcctttcacggtccgatttttgaccgcatctactcgatccaaaaagcctcatcctgatctcatgtccatcgacgttcgcgttgaaggctcagcacatactgcacgctcaattcttaaatgcatatctcgctcactgcctattgaatggcagataacagcgctgccagggtatgtaatagtttacaaagaaaaatcagattacatccatggcgaggtgatttag

SEQ ID NO: 506421 - DNA, 651 bp, Stenotrophomonas maltophilia
atgacggccaaagtaattccgttcaatcctctggataagaagaaccttggtgcgagcgtcgccgaggcattgctgactaaggaagtgcaccccctcggcgagctatcgccgttcgatggcgcgggcatttatgccatctactacacgggcgacttcgaggcttacgaacggattactcggctcaacaacgacggcaagttcatgttacccatctatgtcgggaaggccgtccccgccggcgctcgtatgggtgcgggcaccgatattccacctggcaaggttctctttaagaggcttaaggagcacgcagacagcatcaaggctgcgacgaacctaaacgttgaggattttttctgccgattcctggttgtcgatgacatctggattccgctcggcgagtcgctcatcatctcccgtttcacacctgtgtggaattcgctgattgacggattcggaaaccacaacccggggaaggggcgacatgcgggcatgaggcctcgttgggatgtgctccacccgggacgggaatgggcgcatcgcttggcagatcgacctgagactcagcaaagagtggctgaggatgcggcgacttatcttcgtgttttgccgagctgcctttcggacaagtttatcgacgcgtcgagcgactag

SEQ ID NO: 506422 - DNA, 1215 bp, Stenotrophomonas maltophilia
atgagatcggttgagcttttcgcaggagccggcggtttggccatgggatgcgaaattgccggtttcgagcacttggccgtggtcgaatgggacaagtgggcgtgtgacacggtccgcgagaatcaacggcgcaactatccccttgttcgtggctggacccttcatgaaggtgatgtccgatcattcgactggtcctccatcccgcaggacattgagcttttggctggaggccccccctgccagccattctccattggcggcaaacacaaggcgcatgaagacggacgggacatgttcccggcgactgtcgagatcatcaggcaactgcgaccgaaggccttcattgttgagaacgtgaagggactgactcgcgccaagttcgcgaattacttccattacattcaactgcagttggagttcccggatgtccctccccgcaaggatgaggactggtcagatcaccttgcgcgccttcaagtagagaagacttcgggaaagcggaagggcaagggtcacacctacaacgtcattcctacgctggtgaacgctgcgaacttcggcgttccccagaagcgtgagcgcgtgttcctggtgggcttcagagacgatctgggcgtggaatggtcgttcccgcatgaaacccatagctacgatgctcttctgcatgatcaatgggtgaccggggtctactggaagcgtcacggcatacgtcagcccaagatgcctgcaaaactggcagctcgggtcgccaagttgcagcagttccgtacgatgctgccgacgcaggcatggcggacggttcgggacgcgctgcaggggctgccagatcccgaaagccgcgaagccaagaagttcgcaaatcacgtctatcaggccggtgcacgctcttacccgggtcacactggcagtccactcgatttgccggcgaagacgcttaaggctggtggccacggcgtgccgggcggcgagaacatgctagtgaaggatgacggctcggtacgctacttcaccattcgagagagcgctcgaatccagacgttccctgatggattccagttccatggcagttggtcggaaaccatgcggcagcttgggaatgcagtccccgtactgctggggcagcgggtcgcggcaagtgttgcggagcagctcgcaattgcgggactgtcgcaaatcgccaagaatgaagcaaacaccaaaagaaggcgcgcatga

SEQ ID NO: 506423 - DNA, 798 bp, Stenotrophomonas maltophilia
atgcgcggtcgaggacgggggaagggtgtgagcaggtggactgacgacgaactggccgctgccgtcgaggcgtatcgccaaatggaggcgcgtctcgccgatggattgacccttgagaaggcaagggtctatcgggaactggctacccggcacggacgcacgtccaaggcctgggagtaccgcatgcagaacatctcccatgttctagatcaggcaggtaggccctggctacccggacttcttccagcatcgaacgtgggtgcaaaggttgagccgaaactggccaagctcctcggactctccggtgagacgctcacgtcggtctctggtcctacaagggaactgttggagcaggaggccaaagcggcggaggcatctggcagttactccccagcggacgaggtggacgagaggcagcgtgtgctggcagctatcgttcggcgccgcgggcagcctgccttccgtaaggcactgctggacgcatacggcggtcggtgtgcgatgactgggtgcgatgtggtcgatgcgcttgaggcggcccacatccgcccctattccggccagtcgagtagcgtggtcagcaacggtcttctattgcgcgcagacgttcataccctttttgacctctaccttatcgccgtggacccggtgtccctgcaggtgtctttggcccctgcattgcgccaatcaagctatagcgaccttgtcggcaaggaactggcgtctccagcatcagcgacactttcggccagccctgactcgctagcctggcaccgagcacaatgtgcctgggcgtag

SEQ ID NO: 506424 - DNA, 381 bp, Stenotrophomonas maltophilia
atgcctgctattgaagacaatgacgcactgttcgattctcaattgatcatcggtccctcgatcgtcgcgggaagcgccctgcttcgccacctgcaggcggcaggcgagttcgatatcaatacgtcacccaatcgcctctatctgcccatcgaccaggcactggccgaccagataggatgctcacgctatgcgaaggagccgcttgattcctacacgcaaggcatgctgcagcagttggctgccatcgaggcctcgccggacggacagggggcgctgagaggtgaccagggctcctccgttcgggccttggaggctatcaggatgctgcaggacacggtgaaggtggccctgatcaatggggatctagtattggcctgctga

SEQ ID NO: 506425 - DNA, 633 bp, Stenotrophomonas maltophilia
atgaacgatggaaacgtcccgaagctcggtgagttctacctcctcacgccagatacgcggggaggagggcgtgggcgtggcgtggtgatggaaaacaagcgggacgtcccgttggccagctatctcagcttgccgcctggaagtggggggctttccgcactgaaggaaacccctcgactgcgctatgacggcggcctgggtgaaatgccgcaggatctcgaggggggcttcagaggctattggctggtatccgagtcgcttcgacgcgttcttgaggggatagacggggcaggttttgacttcagacgctgcgcgttcactctcgaggatggatcagaaggcgaggcccgctttctttgcgaagttgtgcgaacgctggaggcgattgacgaggaggcttccaccgtgaaggtactgttggatggctatccaagtggaaagttctatgacataacgggtggagccagtcttgcatttcgaagggatgtaattgccggggcgcacgtcttcaggacgccatttactgccgatgtttactgtgaccgaatttttcgagacgcgctgattgagtctggttttggagtgccgccgacgactcggggcgtctggctcatggatgcagccagtctctaa

SEQ ID NO: 506426 - DNA, 3063 bp, Stenotrophomonas maltophilia
atgcgggggcggatcaggcgtcaagaatggcgtccaccggccgttgaggtcggggacgtggaggattcgttcgcgcatgaagccagccgactgcacaaggaacacccgccgatgcccgcgctgaaacgcgcgttggcccggccgctgcgcgccatcacctggggcggtgtgctgctgggcgttctgctggtgaccggcctgaccctcatgctggtcaatgactaccaccgccgcctggaagcggcacagcgccagagccgcgcgctggcggtgggcagcgagcgcctgctggcgctcgagctgcgcaacctggaacgcgccatgtccggcatcgccgccgacgccgccgaggtgttccgcagtgtgcccgtacaggcgccggccttgatggatgcctccatcggcggcgtgctgcgccggcatgccgagctgcacagcatcgtcgtgctcgacagccatggccgaccactgacggccggcacgggcgacctgcagctgccgctgtggaccgatccgcagcgccgtggcctgagcagcgcgctgtacatcggcccgccgcagcgggccagcgacgacggctgggtggtcccgctggcgctggcgatggccgacgggcgctggctgctggcgcggctgcgctgtggcgaactgcaacgcatcgtcggcggcctcgatgtcggccccaacggactggtctcgatcagcgatgccgagggttacatgctggcccgcgtgcctgatccgcacggcacggtgggccgccgctacgacctgccgcgccgtgacctgctcggcacgcaggcggtggtcgagctgggcagcgtgccgggtgcggtcgacggcgtaccgcgcatcatcaccatcagcacgctggaacacagcccgctggcggtgcaggtcggcctggccgacgaagacgtactggcgccgtggtggccgtacctgcaggcgtcggtggcgatcgtactggcttacatcgcggtgttgctggtgctgctgtatgccgtgcggcgcagcacccgcagccagcaggcgatggccgaggagctgaaaacaggccacgccgagctgcgtcttgcgcaccaggtcggtcgtgtctgtacctggtacgtggatgaggacgccgcactgctgcgctggtcgccgctggcgcgcgagatctttggcgtgcagaccgatgcgctgccggtggccgatttcttcgcacgcgtgcaccgcgacgatgccgcgcgcctgcagcatgcctttgaccaggcattcgccggcagcgccgtgctcgaccaggtgttccgcctggtactgccggggggcgaagtgcgctgggtgggcgcacgtgggcagcgggtggaagtggccgacagcgagcggcgcatgatcggcgcgctgaccgacctgagcgagcgataccaggcgcgcgagcaggtgagcgaggtcgaacgccgcttccggctgctgttcgaccgcaatcctgcaccgttctgggtgttcgacccggatacgctgcgcttcatcgaggtcaacgacgctgcggtgcgccagtacggctacagccgcgacgagtttctgtcgatgagcatcctcgacatccgcccgcgcgaaggctgggacgaagtgcgtggtgccatccagcgggcacaggtgggcgatccacccgacgcgaccgtgcgcctgcaccggcgcaaggacggtagtgtgttcgaggtgcgcgcacacctgtccaagctcgatttcgacggacaacccgcgtgcctcgtgctggccgaggatgtcagcgaacggctggcctacgagcgtgacctggcctatcgggcacggcacaacccggccactggcctgctcaacgtgcgcgccctgaccgaacagctggacgagcagcagcagggctacaccatcgccttcgtgcagttgcgtggcctgcagcttgtggccgatacgctgggccgtgagatcggcgatgcggtgctgcagtcgatggcgacccggctcgggggcctgggcgcgcgctatggcacgctggcgttccagccggccgaagatttcgtcttggccattggggccgagcacgatacccagcgcgtgctggatgacctgctgcagatcgtgtcagcgccgatgcgtggcaaggattcactgcaccagttcgaaccgcgcatcggtgtggccgtgcacactgccggtgacggccacagcgccgagcaggtgatcggcatggccgcgcaggccgcgcacgcggcgcgtgccgagggcaacgtggtggtctggttcgatgcggcagtgaccacgcggctggccgaccgcctgcgcctggccgggcgcatccacgccgccatcgacaacgagttccagctgtacttccagccgatccggcacgccagcgatggcagcccggccgcgctggaggccctgctgcgctggccgcaggccgatggcagcttcatcccgcccaacgagttcatccagctgtgcgaggacaccgggttgatcctggcactgggccgctgggtgatccgcgccgcggcgaaggcacagcggcggttggtcgaggccggttggggcgagctgccgatcgcagtcaacgtgtcggcagtgcagttcttcaacagcgacctggtggccgaattcacccgcgtccagcaggagttcggactggcccgcggcgcactgcacgtggagctgaccgagagcagcctgatgcgcaagccggcgcaggcgatgcagaccatgcaacgcctgcacgagcagggcatcagcgtgtcgctggacgatttcggcaccggctattccagcatgtcctacctgcagcacctgccgctggacatcctgaagatcgatcgcagtttcgtcgccgacgtggaaaccaatccgcgcaacgcttcgatctgccgcgcattgctgtcgctcggccacagcatgggcctgaccatcatcgccgagggcgttgaaacgccggggcagctggactggttggctgcgcatggctgcgaccaggtgcagggctacctgctggggcggccggcgccgctggagcgcatcatcggcgcgctggatgaagtccctgcctga

SEQ ID NO: 506427 - DNA, 345 bp, Stenotrophomonas maltophilia
atgcctgtaggggaggacgacgcccatgccgaggcggacagcttcgcgaccctcaggcaggccgcagacaagggctatatcccggcaatctatgcggtagggctgtgtctgttgacgggtgaccgcgtcgagcaggacgtcatgcgggcggccgcgtattttgagcgggcatcggaggccggctatccgtcggccatgtacgagtttggcctggcgttgttccatggcatgggtgttgccagggacgtgccgcgtgcggtgtacctgatccgggcttcggcgcagggcgggaatgagtacgccagggagttcctgttggcgtattcattggacgtggacgcgtag

SEQ ID NO: 506428 - DNA, 732 bp, Stenotrophomonas maltophilia
atgcgaacgcccttcttcattctctccgccctgtgccttggcctgctgtccggctgtgccagtggtccggaggagcacgcctcaagccgcgagatcaccagtgcgttcgtggccgacgacggccagctgtacctgttgccgcgctatgacgagccgatgcgcttcaatgctgcaccgttccgcgagtaccgggcgctgatggacagcccgctgcgcgaggcgctggcctgcgcgcagatgtacttccatgaggattggcgcgacccggccaacaaggccaaggtgcacggcagctatgcgctgctgctgcggccggagcaggtgacgccggaacaggccgcgcagttcaagctggagcggattgaggtccccccgcgcgaggccaaggccgtggaggagcgggcgcgctactacctgccgatggaccggacccgctacgcgctggcgtttgatcgcgcctgcaatctttcacggaagggcggcagctattacagcgcgctgttcgagggcgacggcgagcaggtgcagttgccggatgctgcggcactggcggagaaggggaggctggcacagccgatcaatgcgcgggcgcagcggatcctgccggagagggaggacaagccgggtgtgggttcggcggcgggcaaggtgctcggcgcggcgctgatccctgtggcggttccggtgtttgtgttgagcctgccgttcctggggccggatcactggaagtga

SEQ ID NO: 506429 - DNA, 3837 bp, Stenotrophomonas maltophilia
ttgcgattcttagcagacggaccgtcaattccagacgaactccttatcgctcgagatcagggaagagtgatcttcttctgcggagctggggtgtcgagagcccgcgccaatctccctgatttttttgggctcgcgcagagggtagtttcgaaacttggcgttgattcaaacagcccggcatgtaggctaatcgaagaggcgaaagagtttgatcggcgcgtcggcattcccggagttatatctgccgaccgcgttttcggcctactggaaagggacttttccgcaaaagatatcgaagaagcagttgcgctagctctgaagccacctgaagattgtgacctaacggcgcacagcattctactcgatctcgccaccacgccgaaaggatccgtccaactggtaacaacgaactttgacagactttttgatgattgcgggagaaatctcaaggcatggcagccaccaaaattgcctgaccccaggcgacccagtgagatcaacggaatcgtctatctccacgggagggcaaaagcagattacaccggagccgaaggagatggcttcattctctcaagctctgaattcggccgagcttacctatcagatggatgggcaaagactttcatccgcgagatccttgagaggtatgtagtagttttcatagggtacacagcagacgatccgccagttcactaccttctcgaggcgttgcgcaactcaagggggactagagataaagcctacgcttttcaggcaggcgcggagaacgatgcaatttcaaaatggattcacaaaggtgtcgaagcgataccatatcttgaagaaaattatcattccgcactgtgggacaccttagacgcctgggcggagcgcgcaagagaccccgacatctggcaggacaaggtaatacaaatgtcgcaaggggggcctgccaaactccaaccccacgagcgcggccaggtcgcgcacatcgtctcaactttcgaaggtgcaaagagattctgcgtttccaagagtcctccgcctgccgaatggctgtgcgtatttgacaagcatcgacgctttgaaaagccaggcacctcaggctcaccaggccagaacggacggtatgtcgacccattcgatatctacggaattgattccgaccctcccccaaacaaggatgaccctgaagaccactacgcaaaacgtgaggttcctgcgtattcttgggacgcgttcgaaatcagccgacttgatagaaccgctattcgggacgacaatctccctgcccttcgagggccgttttcaagtcaatcaccgcatcttgtgcagcgcgttgggcaactaggcgcttggttggcacgagttcacgatcattcagccgccatttggtgggcagctcatcagacagccctccatccaacagttcagcagatgatctcctgggagttagaacgaggggatcggcaagcacatccaagagtccgaaaaatttggcggcagatctttgaggcatggaaccgcaattccgacttccacttggcttggcactctctggttaacacaataaagacggacggatggagtagtgccgccgttcggcgccttggcgacctacttagcccctaccttagcgtagagcccagtatgtggagtcgtcccgtgccgccaagatcgagaaaggaaggcgaaatcgactcgggcatcattaatctggatgtcaagtaccctgagctacaggaagaaattgttattccggacgaatgggctattgcttgcaccaaggcgttgaaacgaaaccttgaactgtccattgcactggagcatgaaattggaggatatgggctctccaacatttccccaatcgcccaaggtgaagtagaggattcagactaccacaaggattacggcctatccgcagccgtaatcagattcgcacgaattttctctcaactttcgatatttgatattaaatctgcgcgaaacgaatatctatcgtggccgaaagatgacaacactgtattttcacgcttgagaatatgggcatctggcgacagaagagtagttcgcgaccatgaattctccagtgtcattcaatcgctgagcaatactgccttctgggacagccatcatcaacgagaccttcttcttgtgatctcggcacgctggaaaagactgaacaaggcctctagaggggctattgaagataggattctgaagggcccaaaaagacttcgccgagagagagctgaagactacataatccgcaaatcctggtctaccgttgagcgcatctattggctcaagcaagcgggatgcaatctaagcacctctgcaaaggctgagatggatcgtctccgcattagcatcccaaactggacagaggagctgggagccagagccgcagactcgctgcaagggcgcggcggctgggtgagaacagacacaagctacagcatacttgagaacattccagtatcagaaatactttcaaaagcgaaagaacacagcggcaggtcaaacgattttcttgttgagaatgatccttttgccggactggtatcggcccgaccagcacgctcattggcggctttgatttacgctgcacgtaacgatgaattccccgtttgggcgtggcggcagttccttagtcacgacacaagaaaagaggaccgcgctcgcctcactctcgttattgcagaacgattactccagcaacccaacagtaaattgtcatccattttgcgaccgagcatcgactggcttaagaatgccagcatgaaagttgagccaaagtgcatacccgtactatacaagttgcttgacaaacaattgaccattttgcatcaccatccggagaccggacagtcgggaatattgcggggatcccgcgccccagactggaccatggagtccataaattcacccgttggcaaactagcggaatgcctattcaacgatagccgtatagtttccatgaagaatagcgagggccttccctccgaatggatatccagcgccgagcgactcctttcacttcccggcaatctgcggagatattcattagttatatttctccaccatcttgaatggatctaccatgtggataaatcgtgggccgaggagcaactaatcactgccctagagagttcctccaaagacgatcacgatgctgcctggtccggcttcttgtgggcagcgaagaccccgaacagagatctatatacacgacttaaggccagcatgctggcgctatcaaaatcccgcccttcaaatcgccgccagtacactgaaattattgctggcatgatcttggcaggatgggctaccgcagatgcgacgacaggaactcgcctcatttccgatgatgaattgcgcagtctgctcgtagcgacagatgacgagttccgatcacaagttctgtggttagctcgaaaatggtcgaacgctagaaaccaaggacagtacaaacattggcagaaacaaccacatgatttacttgacatttggccaagacatctttccgccaggtccccaaatatttccgcgcgcctttgcgaagttgcctttgctagtggcgaacacttcccgaccatctccaccaaagttcttccaattctcggcagggtcgaaagatttaatctgattatccccgatattcgaaataatggaaacactgtctttgataaatatccacaacaggctctcgccatcctgtattcagcacttccaaccaacgctattgcgtggccctatgggatcgatgaagtactgcaacgtattgagcaagcggacagctccttgcgcactgacgaacgattaatttcgctcaaacagcaatgggattcgagatga

SEQ ID NO: 506430 - DNA, 213 bp, Stenotrophomonas maltophilia
atggggaggagcatcgtgggcaagcgttctaaccgatcgctgtgggtctatgagatcggccttcttgtgggtttgactctggcagctgcgttcatcacccggttcaatccggtggagacgctccggctgggtggatggctgttcctcttgatgcaacccatcatgttgggtgctcatgctgtcgaccacttctcgcgcaagcgtcgtcgatag

SEQ ID NO: 506431 - DNA, 255 bp, Stenotrophomonas maltophilia
gtgctgttgatcgcacccagggccttgtcgacgatttccatcgcctgctgggcgcccttcacggtgctgacgtccaggttgctggcgtacttggcggccggcgccgcagcgtcggtggtcgcggtgaaggtcggcgcagtggcgccggtccaggtgcccggggtcgcggtgatggccttgaacgagccatcggcgttggtgctgtccttgaccgaggtcagggtcacgccggtggtgccgttcacttccgcatag

SEQ ID NO: 506432 - DNA, 567 bp, Stenotrophomonas maltophilia
atggcgacgccattgatggacaggccggtggtgctgaaatcagcgttggtgcccgggtcggccagggccagcgagttggtgtcgaacttggcgccgcccagggcattggccttggcatcgatggtcttgtcgatggcgatggcctggccggcgttggcaccgacctggaacagctggctggagaacgaaccgtccagcagcttggtgccgttgaagtccgactgcttggcgacgcggtcgatttccgagaccagctgggtcacttcggcctgcagggccttgcggtcgctggccgagttggtggcgttggaggcctgcaccgacagctcgcggacgcgctgcaggttgttgccgatttcggtcagcgaaccttcggcgacctgggctagcgagatgccgtcgttggcgttgcggatggcgacgtcggtaccgcggatctgcgtgccgaagcgctcggagatcgccaggccggcggcgtcgtccttggcgctgttgatgcgcgaaccggaggacaggcgctggatggtggtggccagcgagctgccgctggtgctcaggttacgctga

SEQ ID NO: 506433 - DNA, 288 bp, Stenotrophomonas maltophilia
atgtttatcgcattgagcttcaccgatttcgagctgtatgcggaagagggcgtgctgctccccaacgttttctactatccaggttccgagggggtcgcatttggagcccggcgctggcacgaaagcggcagcaacacctcgacggaaatcgacgccgtgcgctccgttgtcgaggatgctggcctgctcgcgggttttcgcttctgcgaaagccgcaccaatggccctcccggttacgaagttgttcgtgtctttgcgattccaatgcatggaaacgaggcttgctga

SEQ ID NO: 506434 - DNA, 651 bp, Stenotrophomonas maltophilia
atggccgcgctctactcaaagctgaacccgaaaaaggccctggtgtggaggatcattcaccgggacaacgtgccgtgggtgctcgaacacgggctgcattgcgggaatgacgacgtcaaggcacccaactgggtaagcattggaaattcggagttgatcgataagcgctcgacccatccggttccggcggggccgggcggctttctcaatgactacgtgccgttctacttcacaccgttttcccccatgttgcgcaacatctcgagcgggagaggtggtgttcagaggcgctccaatgatgaaatcgttatcctggtttccagcctccaccacattgcagagctgggacattcctttctgtttacggatagccatgcgtactatcaatgggcgaatttctacacagacttggacgacctcggaagaattgattggccgttgctccaagctcgtgacttccgccgggatccagatgatccggcaaaattcgaacgctatcaggccgaggctctcgtgcaccgtcaccttcccgtaaccggtttgctcggaatcatttgctacaccgaggcgttgaaggagaagcttgagcttcaggtcaatgcttgcaacgtcgatctgcgtgtctttgctcgcacacagtggtacttctga

SEQ ID NO: 506435 - DNA, 1065 bp, Stenotrophomonas maltophilia
atgatcaagttcacacaaggtaacctgctcgaggccaatgccgaagcattggtgaataccgtgaatacggttggcgtcatgggcaagggaattgctcttatgttcaaagagcgatttgcggagaactaccgtctctactcggcagcttgtaaggccaacgaggtgcgggttggtcggatgttcgtcaccgaagttcgtgagttggatgggccgcgttggattgtcaatttcccaacgaaacagcactggcgaggtaattcgcgaatcgaatggatcgccgaaggacttcgtgatcttaggcgatttctaatagagagcgcggtgacttccattgctatacccccacttggggctggcaatggtggccttgattggtcggtcgtccgcgatctgatagaaggcgagctgggcgatctcaatgccgaagtgatcgtgtttgaaccaactgccaagtatcagaacgtcgctaagcgtagtggtgtagagaagctcactccagctcgcgctctaattgctgaacttgtacggcgctactgggtccttggcatggaatgcagccttttggagatccagaaacttgcatggttcctcgagcgaaacatcgagaaaaaagggctctctccgctcgacctacgtttcgcagcgcacaagtatggtccatatgcggaccggctgcgccacctgctggatggtcttgacgggagctatctgcattgcgacaagcgcatcagtgatgcggatccatttgacgtgatttggtttgatgacagtcgaaagcaattcgtccaaacatatattcgaactgaggcgaaggagtacctcccagcactggaggcgacggccgatctgatcgatgggtttgaatctccattcggcatggagctgctggccactgtggactggcttctcgtcaaggatggatccgaaccgacagtggactctgttcgtgaagggctgagacattggcgtggggggcaggaggctgcgcagcgaaaggatcgtctgtttgatgatcgatcaatttccatcgcgttgaatcagctgtgcttggtcgattgccactag

SEQ ID NO: 506436 - DNA, 2193 bp, Stenotrophomonas maltophilia
atggatgtctcccacctgcttgatggcctgaacccggcccagcgcgaagccgtctccgctccccccggtcaccacctggtgctggccggtgccggttccggcaagacccgcgtactcacccaccgcatcgcctggctgcatgaagtcgatggcgtgccgacccacggcattttcgcggtgaccttcaccaacaaggcggctggcgaaatgcgccaccgcatcgatgcccagctgccccatggcagccgtggcatgtggatcggtaccttccacggcctggccaaccgcctgctgcgcctgcactggcaggacgcgaagctgcccgaaggcttccaggtgatggattcggacgaccagctgcggctggtcaagcgcgtggtgcaggcgctggagctggacgacggcaagtacccgcccaagcagatcgcgtggtggatcaacgcgcagaaggacgagggccgccgcccgcagcacatccagcccgaaccgcacgacgcgtggctggaaaccatgcgccaggcctacatcgagtaccaggcgcgctgcgaccgcgccggcctggtcgacttcgccgagctgctgctgcgcgcgcacgaactgctgcgcgacaacccggcgctgctgtcgcactaccgcgcccgcttccgcgagatcctggtggacgagttccaggacaccaacgccatccagtacgccttcgtgcgcgtgctggccggtgattccggccacgtgttcgtggtcggcgacgacgaccaggccatctacggctggcgcggcgccaaggtcgagaacgtgcagggcttcctgcgcgatttcccgggcgcgcagaccatccgcctggagcagaactaccgctccaccgccaacatcctcggcgctgccaacgcggtgatcgcgcacaacccggatcgcatcggcaagcagctgtggaccgacagcggtgacggcgagccgatcgacctgtacgccgcgtacaacgagatggacgaggcgcgctacatcgtcgagcgcgcccgccagtgggtgcgcgacggtggcagctacaccgaagtggccgtgctctaccgcagcaacgcgcagtcgcgcgcgctggaagaagcgctgctgagcgagcaggtgccgtaccgcgtgtatggcggcatgcgcttcttcgaacgggccgaaatcaagggcgcgctggcctacctgcgcctgctgtccaaccgcaacgatgacgccgccttcgagcgcgcggtcaacacgcccacccggggcatcggcgaccgcacgctggacgaagtgcgccgagaggcgcgcgcgcagggcatctcgctgtgggaagcaacgatgctggtcacccaaggcaacgcgctggccgcgcgcgcgcgcaatgcgctggccggcttcctggggctggtcaacgagctgcaggcgcagaccgtgcacatgaccctggccgagcgcgtggaccacgtgctggcccgctcgcagctgcgcgagcactggagcaaggaaagccgcaattcgctggattcggaatcgcgcaccgacaacctcgacgaactggtctcggtcgcctcgcgcttcgtgcgccgcgccgacgacatcgaggaagtgggcgaggacatggacgagctggtcgcgttcctggcctatgccgcgctggaggccggtgaaggccaggcgcaggccggcgaggacggtgtgcagttgatgaccctgcattcggccaagggcctggaattcccgctggtgttcctggcgggcatggaagacggcctgttccccagcgcacgttcgctggaagaaagcgggcggctggaggaagagcgccgcctggcctacgtcggcatcacccgcgcgcgccagaagctggtgctgagctacgccgagtcgcgccgcatccacggccaggacaactacagcctgccgtcgcgcttcctgcgcgagattccgcgcgagctgctgcacgaagtgcgcccgaaggtgcaggtctcgcggccggcctcgatgggcgccagccgggtgatgggccatgcctcgatcgaggcgccgccagtcaagctcggcgcgctggtcacccatcccaagttcggcgaaggcatggtgaccgactatgaaggcagcggcgcgcacgcccgcgtgcaggtcgagtttgctgatgccggcagcaagtggctggtgatggcctacgccaacctgacggtgatctga

SEQ ID NO: 506437 - DNA, 906 bp, Stenotrophomonas maltophilia
atgacccattaccgcaagccgccgctttcgattcaggcgcagcttgatcagctacagcagcgcgggcttgccatcggcgacgtcgccaacgccaatcgctacctgcagcgtgtcggctactaccgcctcatgggctatctttatacccagcgtattcctggtagcgatcacttccgcgatcaagcgactttcgaggacgcggtcagcctctatgagttcgatagggtccttcgagacctggtgatggaggccgtcggccatatcgaggtagcaacgcggaccgtgctcacctaccactttgcccacgcctatggcgccttcggccacttggaaccgcgcaatctgacattcgctgggcaggagtatgcggattggctcggcggcgtcgaaagtgaagtgacccgctccagggaggcgttcattcggcactacaaggaaaagtacgtttcacccgcgtttcccagagtgccgatctggatggcgacagaagtcatgtcgctgggttcgctttctcgtttctacaaagcgctgcattccagagaacagaaggctgttgcgggtgagatgcagctggcagcgccagtcttcgcaaactggctgcatgtcaccagcgtggtgcggaatgtcgttgcacaccacagcaggttgtggaacaaggagctaggtgtttcggcggttcgccctcggtcggcgggatggtctgaacgtgaggcgccgtatgcgccgaatcgctgcttctttctgctgctcctgcttcgcagacttctggaagcgacgaccgctgattccatggattggcgtgaacgcgtcgatgtccacctctcggctggcctgacgaccgaagtccgaacgaaaagcatcggggctgcagcagggtggcaggaccatcgcctttggcgcgggtga

SEQ ID NO: 506438 - DNA, 171 bp, Stenotrophomonas maltophilia
atgacgatcttcatcgtcggcttgagttgttctttcagcgcaggcggcctgctcgaggtactgggctggcagcggatgaacatggtgctgattccctggctgctggccgctgtacttgcgcttgtctggctgggctggaaacagcgcgccgcggcaacggtctcaggctga

SEQ ID NO: 506439 - DNA, 402 bp, Stenotrophomonas maltophilia
gtgtttcaactcgcctatctcgttgcgctgttcggtgccgccactggctacggcatcatgatccttgcgatgacggccacgcccattgcgatggtcaagcatcatcatgcgctgggcagtgaagcaaccgtaatccagctccacgttcttggcatgttccttccgtcgttctttaccggctcactgatcgcccggtttggagcgatccgcatcatgctggcacgtgccttgattttcattggccacgtactgatgaagagcacagggaccggtctcggctctttcgccgctgcgctggtgatgctcggggtcggctggaacttcatgtatgtcggtggcacggctctgctgaccaccacctacacgcaagcggagcgcgcccgcgcccagggccatcaatga

SEQ ID NO: 506440 - DNA, 147 bp, Stenotrophomonas maltophilia
atgtgtcttgccaacgcctcgcgcgccaagaaccgcaagccgcttgcctttcaatgctacaacgacatcgtcccacttgacggcgatcgtggttccggcaagcgcggctgccacggcgactgctatccaaactgctgctataggtag

SEQ ID NO: 506441 - DNA, 273 bp, Stenotrophomonas maltophilia
atgagacacatcggcgtttggttggagacgcgcagatccaggccacatttcttcatcatcgggactcactgcgactttgacagcgagttcctaagtacatcgcccgaaaacatcggtgactatgtcgacaaatttcggcggctaccggtcgtcacggagatcgtcgcgcgtggaggcggcgcgcagcaggcaaaggtcgtgttgggcagcatgaagacggttcaaactaccgaggcgctggtctacaaaattttcatgcaggtgacgtcgtga

SEQ ID NO: 506442 - DNA, 582 bp, Stenotrophomonas maltophilia
atggacggcgggctcgctcgcccgggaacggtgcttgtgcagagtccgttcgactctgacagctacgaagaagcgtctctcgcgccccaacgctttgcgttggcaaagcacatgtatttttcaatcctctgcatgcacctgggggcgaagaaggtcagtgtcgagcagatcgatcttcgcactcgctccgggaagacctctgtcgatgtgaaaggtgaacgcctcggtgccggtgcgcaggttactgtcgaggccgaagaacttgagcgcttccgcgctcagatgaaccttcatgatgagttcgcaggcggttcgccggacatcgctgcagctgatcagctcttgcgacgtactggtctgctggcagatccgaatatgcgcacgttgctggagatgcgcagaagtggcgcgaaccagctgctgagtcgaaaactcgtgctgaatctatcaagcgaggcgaagagcaacttgaacgtggtagggaggctgaagatcccttcattcgttaaactctctgccgagtatgaccatgtcatcaaggagcagcatgattacactctcaccgtttgtgtgaaattctga

SEQ ID NO: 506443 - DNA, 1059 bp, Stenotrophomonas maltophilia
atgccttcacggttggagagcgatcggctaatggagacacaagaagtcggtcgttgcctttacacatacgtcgagctcaacagagacgtgcctgccaacgatcggaccgcatctttcgagcacatcgtcccgtatgcgctggggggcagtgatgatttcggcatctcgtattgctccaagcgcgcaaacaacgatctcggtcgcgatatcgatgctcgcttcatcgctctaccattggtgggctttaagagacacgaattggggctcaagggctattcgggcaaggttcctgacctagtattcaagggcacctgccgagagattgggcgagactgcaacatcgtttttccctacgagggcgaaccgtacgaggatttcggcataaacgtcacgggcagcttggacagcgggacgatgtcgttcgctggcagcgaggcgcgattgcggcaggccgtggcagggatgctcaagaaggccaaactcggaagttataccgttctggacggcaacctgcttccgatcacgtccttcgacgatgcacttatcacggcgcagcgcgaaactggcgagaccctttcctttcgggtagatttcagcgaggccgcgttcgcacatccttggactttgggcctagtcaagatcgcattgggcttgggtgcaaaggcgctcggtccaacgtgggcattcagtgccgaagccgaccggctgcgtgcatgcctgaccagtacgctcgtcaaggacacgcgtccacgaatccgtggaaatgcgctaatgaagttcactcctgaattgagaacgctcatgggtgttagatcgggtaggcacactcttgcagtgttgccacatcccgaaggaatgatggcgtacatatcgctgttcggcggtacgttattcgacgcaattatcgacttgggtaatggcccggcggacgtaaagatcgccaacgaccgactgcctgcggattggacgtgcgttttccatatcgatccgacgacccgtcgcctcgagacggcgacctatgctgaaatcgatcgaaacatcgatcatcttgcgaagtga

SEQ ID NO: 506444 - DNA, 1041 bp, Stenotrophomonas maltophilia
gtggaaaagcgataccaggtttttgtgagctcgacgttcgcggacctacagcaagagcgtcaggaagtgatgcaggcattgcttgaacttgattgcatcccatctggcatggagttgtttccagccgcaaacgaagaccaatggacgctcatcaaaaaggtcattgatgactgtgactactacatggtcatcctaggggggcgctatggcagcatcggccctaacggccatagttacacggagatggaataccgatacgcgctggaaaaaggaatgccaattcttggctttgtccacaaagacccatctcagatcgcaacgagcaaatcggagcagtcggagagcgggcgagagaagcttggagagttccgagagtttgtccagaagcgcatgtgtcgcttctgggactctccggctgacctcggaagccaagtcagtcgcagtctcgtcaaactgatcaagacacatcccagtattggctgggtgcgaggtgatcaggtcccgtcagagagtgctactactgagatcttgtcccttcgtaggacagtggatgaactggagcggaaactttcagcggtagcaactgaagcaccgcaaggtgctagcacgttggcgcaaggcggtgatcaggtctctctcgcttatagcttcatagcgtctacaacagagtacaggcacaacggagagacctattcgggggactctgtcctcacctgggacgaaatcttctcagcgcttgcaccgctcatgatcgacgagtctgatgagtctggcctgcagatagctctcaatagccttgtgagatcgaaggaatacgaagacctgcactcacagaagcgtttcaaaggccaaaagttctttgatttcgctgtgcttcgagacgatttccagaccgtgaagatccaacttcgcgcgctaggattgattaccaagagcagcaagaatcgcagcgtgaaagacacggctacatattggacgctgacgccctatggtgacaaccagatgactaagctgagagcgatccagcgtacagagatctaa

SEQ ID NO: 506445 - DNA, 744 bp, Stenotrophomonas maltophilia
atgacgctcgtggagttcttacatcccctaaggggctcatccaatcgcgacctctgtcttgctgccatgtacttccatcagcgctatgacggtgttgaggagttagccatcgaagccctgcgggcactcctgaagaaggcacttgtccccaaagcggccacgatgaacattgccgatgtgctctccaagtcggcacccatggtggacgcagctgggaagcaaggtagaagcatcctgtggaggctgacgaattccggacaggagcgcgtacggcagttacttgagttacctgagcatgacattgaagtggaaaacgatgtcgcatcgcttcaggcgttggtggacaaagtcgcggatgaggacactgtagattatttgcgagaggcgcttaagtgtctccaggtaaatgccctgcgagccacagtcgtttttacttggtctgccgctgtaaagaaaattagagatgacgcgtttgcatgcggtgcgagcctcgttgacgccgcagtcaagaaatatgacccgaaagctaaaacgatcactaaagcggatgatctagtgttagtgaaggagtcaaccttgttgcttgccgcgcaagaattaggagtgtttgacaagaatcaacgaggcgtcctggacgagtgtctcaatctgagaaacaagtgtggacacccggggaagtacaaactaggccccaagaaggtgagcagcttcttggaagatctaatagggatcgtttttcagtaa

SEQ ID NO: 506446 - DNA, 144 bp, Stenotrophomonas maltophilia
atgtccgcttccggccaggagcggacatcgggcaagcagctggcggcccggttcgacctccactactaccgccctatggactgctacctgcccagagatgacttggccgacgccaagcggtttgacagcctgaccttgtactag

SEQ ID NO: 506447 - DNA, 636 bp, Stenotrophomonas maltophilia
atgccgggctacggcaggcggccattgtatcgggtggcgatgcctgcggcaggcagaggcgtacggcaacagcgaactgcaacagccaaagcgctggcgcttcttggtgctgagggtgagccggggtgctgtggggtggcaggggacgccgtaaacccgtccatgggggcttggtcgccgcatccatgcggctcacacccctgccaccccacaccatcccggcctcgacaggttcatgaggcggagcggatggcaaaggcaggagcaagagcggtttctgatgtcggagaaaccaatgtagagccgagcccatgctcggctgggtctaccgcgagcagcagccgagcgtgggctcggctctacaaagagcgcccagccaagcagcttttgctcttcttttttctttccgtgggtggacgcacacggaaactgtcagaggccgggcgggtgggctgggcaggggtatccgcgccatggatggcgcggctaagcctccagggacggattcacggcgtcccctgcccagcccacccgctcggcccatccccgggatcgcgctttgcagccacccacgaggggctgcgccgttcgccggaacctacgccgaaggcgtcggcttctgccgaagcaggctga

SEQ ID NO: 506448 - DNA, 744 bp, Stenotrophomonas maltophilia
atgtaccgatgggtaagccggttcatcagctaccgcacgttctatctgtggcgggcgcggtacttctactacacccgcaatctggacagctgggtgctgttcaccctgctgtgcctgaccggcatggtgctggtgctctggtaccactggcgggtggtgagcgtcccgccgccgcgcgtgcacccggaggtggcagcgctgcgcgtggagaacatcaccggcgaggcgatccatcgcatcgtgctggtgcagcatggcggcaccacgcccggcgagccgttcaccacgccggaagaagtccgggccggtacgctgcgcacgatgcgggtgcgggagctgctggacagttcgatggtgtggcagctgaaagctcacatgctggccgacatggcgtcgtacatcgaagccacgggcagctgcttcccgtacccgtgctggcagctgaagcatcggctgtcactgctccgcgcagcccaggcggaaaacacggccatcaacgaggcgctggcgccggtgctggaggtgccgctggacaggatgcccaacctcaatgggggggagcgcgcgcggatacagacggcctggtccgacacgttcggcgacgtctacaaccagacctggctgttggctgacctgcaggacatgcacgcccggatgatggtggagtacccacggcgcgcgggtgcgccgtggctggcacgcctgctgaccggcgatgccaaggagccgcatgagctgcggtag

SEQ ID NO: 506449 - DNA, 4845 bp, Stenotrophomonas maltophilia
atgaacaagatccatcgtcgtatctggtctactgcacggcagtgctgggtggtggcaagtgagctgacccgaaggaagggacgcagcgcgggaggtgtccaaggcggcttgctggcatccattctgattggctcactttccaccactgcgagcgcggcggttttctatggctgtgacagcggtgcgtccggaattgtccgctgcgctccgttcatcgggcatgaggatgtgggaaatgcgaacgcttcgctgcgtagctcctactatctttccatgggagggggcgcatggaccgacggtctctactccaccagttttggaaaccgaacgtctgccgagggcgacaagaacgcagtctttggctacggagcagtagcgaaaaagggatatgcctcggtatttggtgcgcatgcggtgggcgatggtgttggtgcaaccgcgttcggccacaacgcgaaggcttacaccgagaattccatcgcagtcggcagcggctcaaggacaaatgagggcgcaggcgtgtcgaagattgccatcggcggcgatgcctatgcaggaaccggtggttggaccggcgccatagcgcttggcggcaaggcacgtgccgagttcgacggcctggccatgggctacgaggccagggctaccgcgaatggcacggtggcactcgggcgtggctcggtcgccaacgaaggcaatacgatatcggttggcaacagcaacaccaagcgccgtatcgtcaatgtgggcgatgcacgactgaatgccaccagcacagatgcggtaacgggaaagcagctgtatcagttgtcgactgcgaccagtggcttgatcagccaggcgagcacgggcggggcggttcgcattggtgcggagaacaccggcacgacactgacggtcagcaataagagtggtgctgcccgctatctcaacggtgtccgcaacggaacgctgagcgcaaccagtaccgacgcggttaccgggcagcagctgtttgccaccaatcagaacgtgacgacggcgaccaatcgcatcaatgcgagagcactgtcattgggtgaaggtgcaaccgccgaatcggttgcgtacggggtgagtacagcgcttgggtacaatgccaaaagctacaacggccagagtgtggccgtcggtttcgacgcccgtgctggtgtggatgccgctggcaacaaggtggccaacctgaacgcaggtgtctcgctggggtcgcgcagccgcagcggcaatggggcggtggcggcgggactgcaggcgagcgcggtgggagatcgtgccattgccattggccatgaggcgtcggcggacgtaattcacgccaccgcgatcggatatcagagcaaggccagcgccgggcacgccaccgcactcgggcgcggtacccacgcaagcggcctctacgcgacggccatgggcaatctggccagggcctcggccgaaagtgctgtggccattggtgatcgctccctggctcagcacaatggttcggtggcgttgggcaatggttcgcagaccagcgccgccaatcagatttccgtcggcagcagcgccatcaagcgcaagctggtcaatctggccgacggtacgctcagtacatccagcaccgaggccgtgaccggcaagcagctcaacgctaccaatgccaacgtggtcactgcacagaatacggccaatgccgcgcaggtggccgctaccggggcgaagaccgcagccgacagcgcgcttgccaaagccaccaccctggccggcctggtgagccaggtgtccaccacgggcaatgtgcgtttgggcagcgaaaataccggtactgtgttggacgtgcgcaacaaggccaatgccaaccgcaatatcagcggggttgccgacgcgacgctgagcaacagcagcaccgaggctgtcactggccgacagcttgcggctaccaacagcaacgtaaccacggcgcagaacaccgccaacgccgcacagacggcggcgactgcagccaagactactgctgacaatgcgctgggcagggcaactgcattgagtggtctggtcagccaggtatcggctacgggcaatgtgcgcctgggcgcagacaatgcgggcaccgtagtggatgtggccaacaaggacggcgcgaagcggcgcgtcaacaacgttgccaacggcgtgctgagcggtaccagtaccgatgtcgtgaccgggcagcagcttcatgccaccaaccagtctgtttccacgcagggccagtcactggtgctgcacggccagcagctggcaacgcatacccaggctctcgcggcacaggaccagcgcgtcgcggccaaccgcgccgacatcgatcagcttcgtacggacgtggacaacttcgatccggatctggatggggtggtgaagttcagtgccgatcgcctgcttgtggacatggaaggtgcgcgcgtatctggagtggcggcgggagatgtcagttcggcggccagcaccgatgccgtgaatggtgggcagttgtttgcgaccaacgagcgtatagcggagattgaaagcgctggacgattcctgagcatcggaacggatagcctcagtgaggcggcaaggtcgggctcttttggtgtggccattggtgattccgcacaggcaagcactgaccatgagggaggaacagcggtcggggcctttgctgtcgcgggcggtaagaattctgtggcccttggcagaggggcgcttgtggagaagggggcagaaggctcttttgccctaggtactggctcacgcgtagcgggagtcgaggcgactgcgattggcgcgaacagtagagctgaaccaagtgctgtcagagcggtcgccgtaggagctggatcagtcgcaagggaatcagacaccgtttcattcggcactgatgtttaccagcgacgcttggttaacgtcagtcggggcatagggaagggggacgtatcaacaatcgcgcagctcgaggaggctcttgctgcattaggtggcggatccggtctggacggtagtggttcagtcattgctccaacctataacgtgcagggcggaaagcagaataatgttggtgaagccttggctgtgctcgatggcgcagtgatcaaggccggcagtcgcgtagatggcgttgaaggccagttgcgcgcgacgttccaacagtcgccatcaatcagcgcagatggaatcggccaactgagcctggctggcgcgcgtggcatggttctgtcgaatctcgccgatgggcgtattgatgcgggtagtcgtgatgcggtgactggtagtcagctgtatgccacagagcagaagatcgagcgtaatagacgcgaccttgatgcaatgcagcgcgactggagctcggatcagaagagtccgctgactgaggcgagagatggaaacctcatcgacttcggcggtgcacgcctgactggtgttgccgatgcgcacctctccgctgatagttcggatgtggtacgtgggagccagctgtatgcaacaaaccagagactgaactctatcgaggaccacagcggcaacatcgcatttggctggattccagaggattggcggtatccagctgaagcgggcccagctggggtagccattggcaggaacgcaaaggcgtcgttgctttcagaaggtggcgtcgctgtcggtgcatgggccacagctgcaggaagaaattcggtggctttggggcgcgcctcctacgtccatgaacaagcggaagaaggctttgctgtgggtgtccggacgcaggtcgctgctaaaggcggcattgctctgggtgcagggagtgaggtccgttctaatgccagtaattccgttgccatcggctatcaatccatcgccaatgatgcagacactgtgtccttcggacatggctggctgaagcgccgcctcgtcaacgtagccaacggccgcaacgccaacgacgccgccaccatcggccagctccgtggcgcactgtctgccctcggcggcaacatagacgccaacggcaacgtcacaagccccggcttcaacgtccagggccagcaccagaacaccatcaacgaagccctcgccacgctcgactcggccgtagtcaccaccggcttccgtgtcgaccgtgtggaaacccagctccgctcggtgttccaggaatctccgtccatccgcagcgacggcaccgcccagctcaccctggcgggtgccaacggcatggtcatctccaacgtcgccaacggcttgatcgccgccggcagccgcgaggcggtcaacggtggccagttgcatgccgcgcagcagcagctcaacggtcgcatcgatggcctggagcagcgcgtggacggccagccgcaggcgcgtgcaatgaccacggcgtcggcagcgccgaccgaagagatcatgccaagcccggaagccagcggttcgccgcaggtcgcttcggcaggcgagggcgcttcgcctgcaccgcagccgaagtcgaagaaggacgattcgcccgcgcccacgccgcaggtcgacaccgccgatctggagaagatgctggcccgcgccaacgagtacaccgatggggcgatcagcaatttcgaacgccgcctggacaagatggacaagcgcttcaaccgcatggcggcaatgagcagcgcgcagacggccatggccatgaacaccgccggcctggccacctacaaccgccttggcgcgggcgtgggctacgccgagggcgagtcggccatggcggtgggttaccagcgcgtgctcaacgacaagggctcagccaccttcagcctcaatggggcgttcaccaacagcggtgagcgcagcatgggcgtcggtgtgggcatcggctggtaa

SEQ ID NO: 506450 - DNA, 699 bp, Stenotrophomonas maltophilia
atgaaacccctagtccgctgcctgctgccgctgtcgctgctgatggcgttgcctgcccatgccaatctcaccgtgcaccccatgcgtacgtcggtggacgcgaagaaaggcgcacagatacgcatctactcgcagtccacccaaccgcagtatgtgcaggcatcgatcaagcgcatcgtcgacccggcgggggaaggtgaacaggaggttgaggtggagccgaatgaggccgccatcgccatcacgccgggaaagttcgccctcgccggtggcggcaaccggctgatccgtgtgattccgctgcagccggtcgaaaaggaaacggcataccgcgtgtacttcgagggcgtgcgcggccccgaacgtgcggacccggcaggcgagggtgagaaggctcaggccaacgtcggcgtcagcctggtatggggcgcgctggtcaatgtactgcccgcgcaatcgacgatggacgtgcaggtggagggaaaccagctgcgcaacaccggcacggtacgcgtgggcatcaccagtatcgctgactgcgatggcgcgcgctgcaccgcgcatgacgtctcgcgcagcctgtatcccggcagcgcgctggaactgccatttgccctgcagccgggccacacgctgcagctgcgctatcggctgacccgcgatggctatcgcgagcacgtgcacaacgtcgcgctctga

SEQ ID NO: 506451 - DNA, 543 bp, Stenotrophomonas maltophilia
gtgctcaccaacacggtctccttcgatttcaccatcaccgaccacaacgcggtctccatctacttcccgcttttcgatcaggtcaccccgcacgtcggtctgaacctgcaatacgacccgatcgcgcagaccatcggtggccgtacccagctcgacatgtgtctgtacgacggacttggttcgcagagtgcctacctaggcgtcaccgtgcgtgacagcggcgcgcaacctcccgggccctcgggctattcggtatggcacgtcgatggcggcagtgatgccacccagcgcgtggactacaccgtcaccctggatcacaacggtggcgcgctgcccatgcgcaatggtgtggagcagttgctgcacggcatcgataccgcacggctgcggctggtgttgctgcccggcatgacgcagccggtgttctgcgtgcctacgccattgacgctggaaacaccgcgcgtgccggtcagcaccaagcgccccggctactacagcggcgatctcaaggtggaactacgtgttcccaccgtcacgccctga

SEQ ID NO: 506452 - DNA, 2724 bp, Stenotrophomonas maltophilia
atgaatgctcccgcacccgccgtcacccggctggcggtcgcgctcgccctgtcgctggccacacccctggtcgcggcgcgcggcgttcccgccggtttcgaggatctggtcgaaggccagaccgaacaactggagatccgtctgttcggtcgttcgaccgggctggtgccggtgcgcgtgaccctggaacacgtgcagctggaaaccccggccgaggcgctgcaggcattgcagctgtccgccgaagcgcaggcagcgctgctgccggcgttgtcgaagccgctgccgcgcaacagtcatctggcatgccgttacggcggtgccagtgccggttgcgggtacatcgatcctccccaggagcccactgccgtgcgcgcgctgtatgacgaaggcgagggcgctgtgcgcctgtttgtcgcccgccaatggatccccggcgagccggccgccgagcgctaccaccaggtcagtgccaatgccgagaacgccttcctgcaccagcacaccttcaatgtcagcggtggccgcggctaccaggcgctggccgcgcagggcatgggtgcactgggcgtgttccagcgcgggcacctgtccgccgactggaccttcagccagcagcactaccgcggcggtcttgccagccgccgtttccagctcgacaacgcctactaccgccatgacctgggccagcagcactacctgcaggccgggcgcatggaccgccgcaacctgagcagcccgcagggcggcaccttcagtttcagcatgctgccgatggatcgcttccagggcctgcggctgggcaccacgcaggcctacgtggactccgccgccgccgtgcaggccacgccgctcaccgtgctgctggcgcgcgatgcgcgtgtggatgcgttcgatggcgagcgcctgttgcagaccttctacctgcaggcaggcatcaaccagctcgatacgcgccggttccccatgggcaactacaccgtcagcctgcgcatctacgaagacggcgtgctggtacgcaacgaggacgcgccgttcgacaagggcggtgactggaccgacagcagcgtgcagtggttcctgcagggcggccgccgcaacgagcgccgcagcgaccgcttcaacgacgaactggcggccatgggcggtctgcgcgtgccgatggggcgcaacgtggccatgaccgctggcatcgctgatctgggcggtttcagctacggcgaactgcgggtggacctgcgccatgtgtttgccacccaggaagtccgcgccaccttcagtggcatgcacggcagcgatggcagccgtggccagcagcatcagctttcctaccgtcgccgtgcttcgtggaatgtgtaccaccagcgcatgcgcggccgtgcctgccagttcgaggatgacgcgcgcgaccggctcggctgcgccgattcgctcagcgcctcgatggcgctgccggtggccggcggcaacgcctacgtggcctatacgcgccgccagacctggcgtgcaggcaccgtgcggccggggctggatgatgatccgctggccggacttgacccgctgctgccgccgtggatgccacagcccacgcgcataccgcagctcagccgcacctggcaggccagctacagccgcagccagcgctggggcgagttcagtgtctccagccgcatcggcgtgtggcagcagaccagcggcggtgggctgcgcgacggccgtgaccgcggcatctacctcaatttcagcctcaaccgcctgcagcacgatgaccgcggcagttcgcagcgacgctatggcgtggacgtgcggcaaccacagcatgcgcgcccggacatcaactacagcgccgggcagacgctgcgccaggaatacgaggatcagtaccgcgaggtatcgggcgaactgcgcggcaacaacaacgagcgctacagcgccacgctgagtacccagctgcagaaccgcatcggccagaccggtgccacggtgtcgcgctaccagcaccagggtggcaacgaagtggcgtacagcgccacgcacagttccggcctggccatcggcaagcgcggcgtgtactggggcgctggcgttggcgccgacgcggggctggcggtgcaggtggatgacaccgacgacctggacctgaccggcgttgccgccgagctgcaggtgggcgggctgcgccggcagcggctaaagctgggcgagcgccggctgctgccgatatccgcctaccagtcgcaccgcgctgaagtgcaggacgccagcgccctggacagcatcgccgccgtgcgggtgagcggtgtgggcggcgcgcgtccgttgtttctgtcaccgggccggctggtgcgcatgccggtgccgattgaagtgacctacaccttcatcggcaatgcccaggacatcgccggcgcaccgctgcgcggtgcccgcattctcaacgcgccggtgcccggcaccggcagcaatggaggtttcgtggccgacttcccacgacgcgagaagatcctgtacctgctgcaggacgaccggttgctgcactgcccgctgcaggtgcgagagcgccgcagcgtggtgatgctggtaggcgccgtgcagtgcgagccgctggccgtggcccagctgcccgccgacatccgccaccaggcacgggtgacgcggttgctgcaggagcaggcgctgatcgccgccacgccacagaccgcagcagcgggaggtgcgaagtga

SEQ ID NO: 506453 - DNA, 507 bp, Stenotrophomonas maltophilia
atgaactccatcctgaagaaggccgcgctcgctgcagcgctggctaccgtttcgctgtccgccaatgcatttgacgccgacatcaaggtctgggccaacgtcgatccgaccctggccctgctcaaggccgatggcacggcgctggattcggtggtcaacatggtccacaacccggtcagtggcctggtgccctggtcgcagcaggtgcgcatctactccaacgatgaaagcaaggacatcgaagtgcgtgttggcagcaccccgcagctgctcaacaccgatggtggcggtacgccggtgccgctgaccgtcagcctcaacggcagggcgctgaccgtggcggcgcaggatttcactgcatccgatctgttcgatggcgccatgcccggtgcgtcgatcccgatggcgctgcgtatcgcgcagaccagcccggcgccgatcacccgcggtggccgctacgaaggcatcgtcaccatcgccatgcagcagaagaccaccagcccgtaa

SEQ ID NO: 506454 - DNA, 993 bp, Stenotrophomonas maltophilia
atgtcacgcactctttccgtcgcggcgctggccgcttcgctgtcgattgtcctggctgcctgcggcggcaaggaacccgcaaccactggcgacgccggcccttccagcacgcccgacgccagcgcggcgccgtccgacgcacagcagcagttgaccgccaagctcaacgcctacatcggctgcttcaacacgctggattcgaagacccacggcagcatcgagtcctatacgcgctggatcaaggacgtcgaggccggcccgagcgggcgcgagacccaggtgtacggtccgttcgagatcagcgactacgacatgaagcagtgcgatggccccgtgaccgaggcgatggctgccaagccggcgctggccgagctcgatgccgctgctggccattaccagcaggcgctgaaggcactggtgccgctcagcaaggacgcgcacgactattacgatcgccaggactacgaagacgaccagttcgccaagggaaagcagctgcacgcgcccttgatggccgccttcaaggagttcgtggctgccagcgaaacgttcaacgccgagctggagcgccagaacgacgccgcccagcgcgagcagctcaaggtattggaacaggccgagggacgcacgcgcgagtactaccgtctggcaatgatgctggaagccaaggccatcatggatctgatgagtgaggatgacttcgatcaggccaaggcgcgcgagcgtctggatgcgttcaaccgcatttccgacgaagcgcatgcgaaggtggctgatcaggagccgggcaagctggactggaacagcttcgagcgtgaagccgagaacttccggcgcgaaggcaaggagcggctgcagcgcgtcagcgagaaaaagccttacagcgatttcgaacggcgcatgctggattcgccgtcgatggcgccgcgtggctccgccagcaagctgatgcaggaatacaactcgctcgttttccagagcaaccgtcagtag

SEQ ID NO: 506455 - DNA, 645 bp, Stenotrophomonas maltophilia
atgcggctcacgcccctgcgcagcccacctgcccggccacggacaggttccgtgcgcatccacccacggaagagaaaagaagatcaaaagcaaaggcagcctgacaggccgctttttgtagagccgagcccacgctcggctgctttctggccggtccgtgaagccgagcatgggctcggctctacacgagcaagcgcagcgcgcgacccgcttttgatcttattttcttctccgtgggtgcaggccaccgaaatctgtcggaggccggtcgggttgggtgcgcgggggtgtcagccgcatgggcccgaggcatgcctcgggcgggttgggcaggacgcccaacccgggtcttgccgtgtgcgcaggacagcgcacacgagcaagcggctgccaagcctccagggacggattcacggcgtcccccgcgtacccaacccgaccggcccacccgcggcttctgctttccgcgaccacccagacaccacccacgaggggctgcgccgttggctggaaactacccgcgatggcggatcagcaactgactcatcagtgcccgcagggccggcggcttcaccggcttggccatcatcccccagccgcgttcggcggccatctcacgcaaccccgcatcgcgctcggcagtaa

SEQ ID NO: 506456 - DNA, 642 bp, Stenotrophomonas maltophilia
atgatcccaaagatccattacgacgcttccgaagaaatcgccagtcgcctggaacagttgggggtcaccgaggtggcgcttcgcgaagccatctatcagggtcacttgcagcgcacccgattgacccctaaccaccctcgcaacttcccgggcttggtcatgtggggcgaggtcgttgccgccctgagggaccagctgaggccgctggactggatccggcaggatgtcggcagcttcccggtaaccgtgaacgaatcattgaaccttgctatcgccgtggcctcgggcgacgaggggacgggcaacccgtatgcccatccgtcgaaccgttcgaagaagggtcgcaacaccgttgaggccatcgaggcgaatcgtcagatggtgctcttcgaagagttcatgcaagagatcaaggacgacgccgacggcaaccagacgtggatcttgatgcaccacacggatacggccaggggggagatccgctttgagctgtcattgccggctgaaatcggtagtgacggcaagatcacttcatggtcggaacgcatcgtgctcggtagtattccgtttgacgacgacctgacggaaatcctcgagccgagtggtcctgacatcgatattgagatccgccgcaaagcgtga

SEQ ID NO: 506457 - DNA, 1170 bp, Stenotrophomonas maltophilia
atgtttaatgctttacggcttaccctcgcccgcaaacggcgagggatgaaaaagcgtgagttggccgaaaaaattggggtaacagagaagtccgtgtccaactacgagacgggctcccaagagccagaggccaatacgcttagaaagctctcggaagcgcttcggttccccgaagcctttttctttggtgtggatccggaagttcctcaccccgatgtggcgagtttccgttcgctttcgaagatgacagccagccagcgcgacaccgcgcttggtgcgggcgctgttgccctgctgttgaacgaatggattgaggcgcggttcgccctgccagaccctgacgttccggatttggggcgtgagggaggggacagtcgccccgttagcgtgcacaaacacgcacaagagccagaagcctatccgacatcgtcttcttcccagacccctgagacggcggcagaaatgctgcgcgctcactggggcatcggcgagttgccgatcaagaacatgattgccctgctggaatccaagggcatccgggtctattccctggcaatcgatgccaaggaagtggatgccttttcgatgtggagtggcggccggccctacgtcttcctcaacacgttcaagtcggccgaacactgccggtttgatgccgcgcatgagctgggccacctggtactacaccaacatgcccaaccccatggtcccgacctcgagcgcgaggcaaatgcgtttgcgtctgcttttctcatgccgcgggcgagcgtgcttgccatggcgccgcgtgcgccgacgctatcgagtctcatccggcacaagaagcactgggcagtctccttggcagcgctgaactaccggatgcatgcccttggcctgacaactgactggacttaccgcacgctttgcatccagctggcgcaagcgggctaccgcaagtcggagcctgaaggtgtgccgcacgagaaatcattagtgcttgaaaaggtattcagagcacttcgcgaagaaggcgtgtcgaaagcggatgttgcccaacagctagcgatattttctgacgagattaacgagcttacgtttgggctaatgctcaacgcactgcagggtggagctccgagaatggctgatcccgcttcgagaagggccaacttgcgtttggtgaagggttag

SEQ ID NO: 506458 - DNA, 1338 bp, Stenotrophomonas maltophilia
atgatgactacggcacacgcggggtatcgttggacagcacttccgccaattgcgccgatcgatggcggcactgcccagactgaatcgcttggagggtacttccagaggatgtgcgacacaaccgggtttaccaagacacatctcgctggagtgcttgacacggtcgccggtcagccgataaatggactgcgtgagcgaaacagcttcgttggaccagggcaggtgagcctcaaccgggcgcgggcgctagagcagttgactaatcaacggctggtcggctgcacgctctcgcctttcattaatgttctgcagatgcgggatggtggccttgctggcatcaatcgccgctggtgtcctgagtgcctactggaggcaggcgagagtgatggtctgagtgagaggctgatctggaacttccttcactactcgcattgctccttgcactcagtcagaatcattgatcgctgccaagattgcggcaacagtcaacagttgcggaggagcaaggcggccttgtgcgcctattgcggttgcagcctggcgcgcgcagccacgcacgagagaccgagtgcacttcaatcgtgggccaacgcttcgatcgaggacgtcgtacgctggaccgcaagcaatcccgatgtggttattcctgcagagaactatcagcgcttctttgatgggctccgtcaagatgggacattggataggctgaagatcgttcacaacagattctggagggacgcaaatcgctttaggcgaactaccaccactttcagaacgctactcaacctatccgccatcaaatctgttgacatcattggaattttgaccgaaccagttccggcctcatcgacgtcgttgtttccaagccatgaggtggacggtgagatcgcctttgatcttgaagactggggagcacaggcgaggaaatttgaagtcgtactccacgcgctctgcagggccaacacgcgtgtgttccctagtcagcagttcctcagcctaatgttggtcgctaagcgaaaaagttctatccaccgtgcgccatcattcagcgcctacatagatcttcagatgcaacctggccaggatcttctggcgggtcggcgcgcggccaggagaatcatggatctgtctatgaccctgctggggaacggcgtacgcgaaaggggcgtggcgcgtgaacttctggagaaattcgctattacggctgaaacagctagagaatgcgcccggacggcgatggtcataaggaaagctatgctgtcccaagcgttctcagcggcgggcgaccccgtcgagtgccgcgggaagaagacgagacttgcccggaagagaaaatga

SEQ ID NO: 506459 - DNA, 807 bp, Stenotrophomonas maltophilia
atggccaatgaccgcggaaaattcaactccaaggatctcacgctgcgtctccatcacgccgtcgtggaacctgacttcagctggcttgaagcccaggatcgaacgatcagcaccgatgcgcaccatctccatgcggaggcggaggtgaataatgagctgtggaagaaagtgagggcaacgcaatcgcagccgagactgcagcacagcttcgaatcagtggcgaagcagcgccagctgaagtacatcttcttggaagaggcgggcaccttgacgatggtgcatcttcatcagaccagctatggctacatgtcgaacctagttcgactgatcgaagagatcggctgcgtcatagtgatgcttgctacccatactgcagagagcttgtgggcgggacaccccgacgtatggaatagatcccggttcgtctacatccggccgtacaacctgacgaacccgcaagacgagcgcgatttcgttgcggttctcaagggcatcgggaagaacttcaacctgcaggatcctaggatcctcgttaagaatgcagatctgatgtatgccaatggtgcaggcgtatttggccccacaatcgatgtcgtgcatcgagctgagcttcggcgaaggaatgagggggcaagcagcatcactgaagcgcacttgcacgccagctcctcaagcgagaaggagcttggaacagtgtggggcagcgtgttggccttcaacaagcttgcggatcagaagcccttgaatggcgagaagagaattgctgacttcctgaagcgagtcggtacggggggagtggagagatga

SEQ ID NO: 506460 - DNA, 2394 bp, Stenotrophomonas maltophilia
atgaatcaagaagaactggcccagcgtctgcgggagcaggagggcctcactgtcgaacagcgatggcacatccttgaggtggctagctcaagtccagcgcggaagtcaggaaagggggcgctgcacaacgttgtgactcacttcaattcagtgaaatgtggccagttgattacgctggagagtcatactgttgaacatctgtacgcgctgactctggagcttgatccggatgtgcttggctacttcccgcaagtcgcctgtaagggggtgagatttggcaatcatgtgaggagcgggacgctggattttctggtcgtccgcacccgtcgcgttgagctagtcgaatgcaaggccggctccgcgcgtgacaggttgctttcggcaaagtccggtgaatgggtcgatgtcaatggaaatcttcagaaccttgcctatggtccttgggcaagggagcgcggcatggagcacgtcctgtggctgagtccctccccagtcgacactctgctccggaacctgcaggtcatctataacgaggtgcgcgtcgtacctgccaacgaggctaaagccttgggcaggcggatccaagcacatctcaccgacggccccagaagcctcgattggatgatcgagacgatcaagggattcaatgtgagccaagcagcaattctgcttggaacccgttgcgccttcggcccagttgagcatgttccgctcacggatacgagcaatttctttctgaccatgagtcaggctcaggctatcgagataggtggcaacttctatgcggttgtcaggcaatcccgcaatcaactgagctcagcgtttgcaacggcgacgctggtcgacgccaccaacgccgaaaagcggctcgcactgattcaatctgcgcatgccaaaggtacacccgtccccaagcacctgcgtgagatagcacggaatgtggccgaggcacgaagaagaggtgacaacgaactcgagcagtgccttaccaggtttcatgcaagcggcaatcgaattagccggctgacccccgttcaggagaaaaggacggctgaggcagttcgcgcatacgctgctggcaaatacaggcagaagaaggacgcgtatgctgcactcaaggacgcctgtaagtctgacggcgagtcgccacagagtcgccaggccttccagcggaagctcgatgaccggggtatagaactgcggaagatccttgcaacgcaaggaatgcgcggctatcagaagaaccggccgcgctcggatgcgcgcgaccgatcgggtgcagccttagccaaacatggaaccttgcacgtggacagcaccaaagctgacgtcagggtcttgggcgacgatggaataggtgatagcgcagagtccgccctgctctacctaggaacggatgaggcgactgatttgccgatggcgcattcatttgtcttcgggccagcacggcgcgatggcttggccatcctgatccggaactatgtccgcagaaatggaagactgttcaacagcgtctttgtcgatcgcgccaccgagaatgagtcacgctttctcagagcgctggcagagcgatatcagttctcagtctttgtcagcccaacagcaggttcgaccttcaactcgaacgttgaacgatacttcgctaggttcaattcgcaggtgagccacgagcttgacggcagcaccgatcccgacaaggcgggccggggcgtggatgggaagttcaagagctacaaaactgcgaggcaccgctttgaaaccgttcaaagggtggccgaggagacgctctatgagcatttcccgactgtgcctttacaaggcttcgcgagcccggccgaacgtggagcccacgcagatcttctctttccgagtgccggcctgcacgcatcggttgacgaggagttcctcttcagaacggcgatcccacacagcagcaacaagtatgttcctggacgcggatttgaggtgtacggtcgctacttcaactccaacgaactaggggaactcgacgcatcattcgatgttgaagagcttcgcgttgacccagaagacccgagcttcatctgggttaggaccaatcttggaacattcaaggccttctgcaacttgattggtcctacagctcatacctccctacttgagcggtcgttcaagggcatgtatgaccggctctacgcgccatcgcttctcgaagcaaagcagatcgcgaggcacgctcaggcgatgcgcacggcagccgcgaatgcgaagcccatcaccccggctcatcccgtaccgagtgaggctgactcgagtagcgctccttcgccaccagatgacgctcttgttgaactcgaccttcgcgggatcaagaaacgagccgtggacgactttgactcaattgaaacactgtaa

SEQ ID NO: 506461 - DNA, 309 bp, Stenotrophomonas maltophilia
atgctcgcctacatggtgcccttgtcgatacaaacgctcgcacttcgcgcaacgactcctgaccagctcgccgagcaggtggcggaggagtacgggctctatgttcggctctcagaagtgtggatgctgcttggctacaacagcatcagcgcggccaggcgcgcggcgtatgacaaccgcctgggaatagcaacctcgaccattcccggcaggaaggggcgcatgatccgatccagggatctcgcccaatggttgttcaatgcatcacgcggcgcagatcccgtaaccagtcggctgaccgctcaatga

SEQ ID NO: 506462 - DNA, 765 bp, Stenotrophomonas maltophilia
gtgcagcagaatagtgcgatggaagggggagccgcacggtggccggagcggatctgggtggtacggcatggccaaagcgccggaaacgttgcgcgagaccacgctgaagcaaacaacatcaccttaatcgagttggaacaccgcgacgcagacgtgccgttgtcctcactcggggagcgccagtcgcaagcgctggctgcttgggtactcggacttgccgagcaccaacgcccgcagatcgtgctgacttcgccgtacgtgcgcgcaaggcaaaccgcccaagcggtggccgacgcgctcggccgcgactgtctaatcatcgacgagcgcctgcgtgagaaggagttcggcgttctggaccgctacacctctagtggcatcgttgccaccttccctgaactggcggcacagagacaactggtcggaaaattctattttcgcccacccggtggagaaagctggtgtgatgtcatcttgcggctacgcggcgttgtcggggatctccaacggaaccacgccggcgcacgcgtaatgatcgtcgcgcaccaagtgattgtgaattgcatgcgataccttttggaaggcatggacgagcatgctatcctcgaccttgaccgcaaaggcgatgtgcccaactgcggggtcaccgagtactacgcggccgaaggtgggcagcttgccttggtgcatgccaacttcatttcgcctgaactggctgaggccccaaccaccgcctcgtcggatcagcccgctggagccaggtaa

SEQ ID NO: 506463 - DNA, 825 bp, Stenotrophomonas maltophilia
atggcagctaaatatatgacatatgtgatttcttgcgtgaatctgaagggcggcgttggtaaaaccgccttggcggtcaatttggcggcctattgcggtgcgcagggtaaaaagactctgctagtcgatcttgatccacaaacaaacgcaacgttctcctgcgtgacgccgcaagcctggtcagagcactcggacaaaaaaggtagcgtcgctgatcttttaggtgctcgaaatcatgtcaaattcgactctgagaatattcagcctgatgatctgattataaaaaatgtctttccgagcgttgatcttttaccctcccaccttgacctatttactattgatctggacatcggtggagttgtttctcgcgaaacattgttgagtagggcgcttgaaaaaataaagagcaagtacgacttcataatctgtgattgccctccaaatttaactttgcctacgcagaatgcattggcgatgagtacgcactttgtcgtgccggtttcccctgactttttgtcgaccctggggatcgccctactaattacaagggtaaataagctggctaaggatttgagggttgagctaaaaaacgcgggcattgtgctttcgcgagttggtcgcacctcatactttaaggagcagactactcagtcgatccgagatgcgtttggggcaaatgttatcccccacgagatcaaggagcgatcggtagtggcgcaatctgctgcagagaataggccagtttttgacatgggaaatagcgacgctacggcggaatttagacttgtttgtaaagcgattgttgcgagagtgcaaaagccatga

SEQ ID NO: 506464 - DNA, 735 bp, Stenotrophomonas maltophilia
atgactaaaattcaagccccagtactcgagtcttaccgaaacttctctgatcgtttgcctgccgagcttgaggcagcattaagtttgactaagggaagtgctgcacttgagaaaagctacgcgagggttgccgcctttaacgccataaagagagatctgatttcaggaaaatttctcccgggcgccaaacgctttgttgatgaggcgcataatgacctccttgtatcccacgtctgtgcttctatggggtcctggcgtgctgcacttcaatcgctacgtagctttgtagagaatgtaatggcgggcctctattaccacgatcatcgtgttgaattggagctaaggagcgaggggggacggatatcccctcgtgagctcagggagtacttctctacccatccagacatcaggggtgcagcaggtgcttacgaactgaagaatagtctcgacaaggaatacgcagagctctcgaaggcagtgcacgctgccaataacttgtttcggatgtctgatgagaatggtgcgattttcgcaattgctccggacgttgctgagctaggaaaatgggcgaaaagagagcatgagatatttcagatatctatattgatcatatttgcttacttcaaagacaatttaaagggtgcagcgatgggcaatttgcgaggcgctcttgagccgctagtttcagagaaggttaagagagttttgctggagaaatgtgcgatcgtgatttga

SEQ ID NO: 506465 - DNA, 906 bp, Stenotrophomonas maltophilia
atggatcggattctggcgatgcaggcgtacgtgcgggtggtagaagcgaagagctttgtgcgtgccgccgaggctctctccatgcccccctccaccgtcacgggcttgatcaagggcttggaaaagcacctgcgcgtccgcctgctcaaccggaccacgcgcagcgtcagccccacttcggaaggcgagcgctactacctgcagtgccgcgggatcctcaaccagatcgaacaggcggaaaccggcctgaagtcgtcgccacagggcctgcgggggcggttgaggatcgacatgccaggcggcctcgcgcactcgatactcctcccgaacctggacagctttcgccgtcagtatcccggggtccatctgatgatcggcgtgggtgaccggccggtcgacctcgtccaggagggtgtggactgcgtgatccggaccgggccgctggaagactccagcctcgtagcccggccgctggggaacttccgctggatcacctgcgccgcaccaagctatctggaggtgtatggcgtcccacaatcacttgaagacctcgccgggcaccgcgcagtccaccatttttcctctggttcgaggggcggtggcagcctgctcttctcagctgatgggaagagacaggtagtaccagtggagggctcggtcgccgtcaatgagaccgagctgtacatcaagctgtgcatgaagggatacggcctggcacagttgcaaggcgtactggtcgagaagcagttgcaggatggcagcctggttgaggtgcttcagcggtggcgtccgccgtcggtgccggtttcgatcctttacccgcaccaccgttatggatcgcccatcgtccaagcattcatagcatgggctgcagagcttttctccgccaagagcgagaaagcatag

SEQ ID NO: 506466 - DNA, 1398 bp, Stenotrophomonas maltophilia
atgagcaccctcccgcgagacattcttcagcaaccgacaaccgcagcggccgaaaagacgctcatccgtggcgcaaccatcatcagcatggacccggctgtgggcaacctcgtgaagggcgacatcctggtctccggtcggaccatcactgccgttggcgagaacctcagcgccgaggacgcgttcgtcatcgatgccaaggacatgatcgccatcccgggcatggtggactcccaccgccacgcctgggagggtcagctgcgccggatcaactccaacgccgagaccttggagcactactccaacgccacgcatttctcgttcgccaagcattaccgtccgcaggacatgtatgtcggcaccttgctgtccgcgctgggcgcaattgatgctggcatcactacggtcatcgacaactcccacaacagccgcacagccgcgcactccgatgcatcggttgaagctctgctcgatgccggcatccgtgcgctgcatgcatcaggcgctcccgtgtccggcacttgggaccgcgcgcattggccgggaaacctcgcccgcctgcaggaaaagtacttcaaggacccggccaacgacctggtcacattggcgaccatggccaacatcgagccggagctctgggccgaagcacgccgcctgggtatcccgatcgtcaccgagttcttcggtgaacagatgggcgcccagctccctcagttgcatgcgcaagggctgctgggcccggacaacatcttcaaccactgcacctgcctgaaggatgagggctgggagatccttcgcgatgccggtgtgcacatcaatgtctgcccgcgctcggatgcccactacggtatcgaggatggcatgttcgcctgggatgcggcggttcggcacgggctgcgacccggcttcagcgttgacaacgagacgtcctacagcggcgacatgttcatggaaatgcgcgtggcctattacctggagcgcgtgctgcgcgtcaatgcacgtcccccgcgtagtgccggcaccccacaggatccgctcaattcccaccgcctgcttgaagccgccacgcttgatggcgcggcctgcgcagggctgcaggacaggattggcagcctgacgccgggcaagcaggccgacatcgtgctgttccgcaccggcgacatcaacctgtatccgtccaacaatgcgttcggaacagtggtgcatgcggcggagcgcagcaacatcgacaccgtgatggtcggcggccgggtgctgaagcggggcggcgaaatgtgcggcctggacatgggcaagttgcgcgctgcggtggacgaatcctgcgcgcacctgttctcggctgccggctacacgccggacgtgttcggcacttccttccccgttctaaccaatcactga

SEQ ID NO: 506467 - DNA, 480 bp, Stenotrophomonas maltophilia
atgaacagcttcggtgcctgggcctttccactggcaatggttgcgggaatggccgtcacattgcagaccacgttcaatggtcagttggcaaagggcctgggcggcgatcctgttgcagccgccatcttctccttcatggtggggctgttgtcgctcgctctcgtcggtctcgtacggggcaacaccctcggcctgcttgcaggcatcccggcgcagccggcctgggtgttgctgggcggagtgatgggcgcatttgcgctgctcagcaacgtcatcctggtgccccgtgtcggcatggccgccctggtggggctggtgatcgccgggcagctgctgtcttcgttggccatcgaccatttcgcattgatgggttctgcccatcgtcccgtctccctcatcaagcttgcaggcgcgctggtcatgctggccggacttgcaatctcgctgtttggagatcgctggtccaggttgcttgtgtga

SEQ ID NO: 506468 - DNA, 213 bp, Stenotrophomonas maltophilia
atgaagatcgaagtttcagatgaacaagttgccgctgtcattcgcgcacttcgtgaccgcataaagaagatcggggacacgtacactggctccgacatcgaagacaaggagattggtgccctcaaagaggttgctaaatcgcttggtcatacgatcgtagcgacgacacgcgcaagcgggttcaatattgaagttaccaagaacgacgcctaa

SEQ ID NO: 506469 - DNA, 279 bp, Stenotrophomonas maltophilia
atgcctctattcaagtaccaaccctactataagtacaacggccccacgttgtcgcagccgttccgcgaggagctgaacccagatcaagtgagtcgcaacatgagccttttcttcgacgagattggctcttacttcactgatgttggggcaacagtggaggcagttggcgatggcttcatcggcatcaccgctgacattacgcaggacgactgcgattcacgagtcaagcgctgcctcaacaacctagatttgttcgcgaataggatcgccgcacagtag

SEQ ID NO: 506470 - DNA, 915 bp, Stenotrophomonas maltophilia
atgtttgggatcgggatcgatgtgagcaaagccacgctggatgtggccgtccatggagagcagtttcgccaattcagcaacgacaagcgcggctttgtgcgcttgattcggtggctgaagacgtggccgatcaagcaggtcgttcttgaggcaagcgggggttacgagcgtgctgctctggatgtattgcacgccgctggcctgccgatggtacgaatcaatccggcgcgtgcacggcgatttgcccaaggcacgggccgtgccgccaagaccgatcggctcgatgcgacagtgctggcacagatggcccatttgttgccgctgacccgctacgtaccgcctgctccttggcagcagcgtctggctgaatttgcgcaatgccgcaggcaactggtgcagatgcgggtcagtgagatgcagcgcttgcggcgattggtcgatccggatctgattgcgatgaagcaacgccatatagctcagctatctgacgacctgaagcaactggacaaagctattgccgagcagcttgagggacagcctggctggaagaacatcggcgcgctcaaaggcgtcggccccatcctgatcagcacactggcctgcgagttgcccgaactgggcagcttgggaagcaaagccatagcatcgctggtggggttggccccgatgaaccgcgaaagtggcacctggcagggccaacggcggatcagtggtgggcgcgcggtggtacgcgaagccctttacatggcggccctgacggccatccggtacgagccaaggctgcgcgcgttttacgctggcctgaaggccaagggcaaagcgagcaaggtggcgctcgtggcggtcatgcgcaaaatgctggtgatcctcaacgcccgtaagcgagacgccgaggtggccctcggctgcccctga

SEQ ID NO: 506471 - DNA, 420 bp, Stenotrophomonas maltophilia
atggcgaaatcccatgcccagatcgtgactctgaactttgggcttggcgatgcctatctgttctcccgtccagagtctgggaagatctccgcatcaccacaggaatacaagcgcgtgatgggcgagctggttcgtattgcaagagaacatggcaaaaccgtggtgatctacgagcccaatccatcgtgccaccccgcccgagaaacagggatgccgtactacgtgatgcatctcgatcagttgggccacgagatgaacataccaatggcttcccaattctgggcattgcttgccacgcccaattggcgagagctgctgtctgactgtacacaccctactcccgagctctaccagctgaaaggtgagaacgcgtacaaggtgcttcgaccaatcgtgaagcagatcatcgacgccagctga

SEQ ID NO: 506472 - DNA, 240 bp, Stenotrophomonas maltophilia
gtggaacggcgcgcgttctccgtagggcgcgcgtctgcacgctcggatgaatcgattcccggcaagctgccggagcagggcattcccggtgaaatctaccgggtggaaaacctgcttcccgacggctccctgcagacgtgggaattcacctgggtggaaccctcgtccggccatggcggcggctgggatgtcaccgggtacacctacaagaagggcaatgacccggtaaacccgcgctga

SEQ ID NO: 506473 - DNA, 348 bp, Stenotrophomonas maltophilia
atgtcgccctttatcaacaccgcctggccacgcttcttcatcgtcgcgctgcccatcgctttttttgcggttctgttgaacagcttgatcgatgcgtcgccgaacggctggctgatgcaggcggcactgctgctgacgccattctcgcttctgctgttcttggcgttcggttggcagcgtctgcgcaaggcgcacgctgagtatccgattctgacaagcgaactggaccgtatgttggcggcgttgatcggcaacgttacggtggccgcgctgtggttcggcctgaccgtcattggtgtgttcaccctgatactgccatgggtgctgctgcgaacatcaggcggctga

SEQ ID NO: 506474 - DNA, 183 bp, Stenotrophomonas maltophilia
atgaccgcccagcttttcccccgcgaaccgcgccgcatgaagcagccggccaaggacgtgctgcgcgagcagctggccgtcgcggccgatgaagtgatccgcctgcgcgcggaggtactgcgcctgcgcggtcagatgaaccaggccaccgagcagctgcgcgctgcgctggccacgaactga

SEQ ID NO: 506475 - DNA, 915 bp, Stenotrophomonas maltophilia
atgaaggcaatcgatcttttctccggcggcggtggcttcaccgagggtgcggaacaggccggctgcgaggtggtgtgggctgcgaaccactggcccgcggcagtcgaaacgcacgctgctaatcacccgcgcgcgcagcacgtctgccaggacctgcagcaggccgattggaccctgcttcccgacttcgacctgctgctggcttcgcccgcatgccagggccataccccggcccgcggcaaggaacgcccgcaccatgacgccacgcgctcgactgcctgggccgttgtgtcggcgctggagtgcaagtcgcccgaggctgccctggtcgagaacgttccggccttcctgaagtggaagctgttcccggcgtggtgcgccgcggtcacggcgctgggctatgcagtgagcccgcacctgttggatgccgccgactttggcgtgccgcagcaccgcgtgcgcatcttcatcgtgctgaccaagagtaagcacccattggaactgaagctaccgaagttgccgcacgttcccgcgagcagcttcatcgacttcaacgccggcacctggacacccgttgagcgccctggccgtgccgcggcaaccatcgccagggtgcgtgcaggccgggcggcgttcggtgatcgattcgtggcgccctacttcggcaccggctccggcctgactggccgatcgctggaccgtcctatcggcacgatcaccacccgtgaccgctggagcatcatcgacggcgaccgcatgcgcatggtgtcggtcgaggaatccaagatcgccatgggcttcccgaagcactacctgctgccgacgaacaagaaagacggcatgcagatgatgggcaatgcggtgtgcccgccgaaggcctgcggggtcatccaggcgctgagggctgcggcatga

SEQ ID NO: 506476 - DNA, 195 bp, Stenotrophomonas maltophilia
atggacgcatacgcacaggccaagcacacagcgcgggtattcctggccgagtgccgcgcccgccggcatagcttcggctactggttctccttcaacgccgcgcagcgcgcacgcatccgcgccactgcccgcgccccgctgccggcaccgccgcgcgcaccggcgctgccggcccaactggatctgttcgcatga

SEQ ID NO: 506477 - DNA, 162 bp, Stenotrophomonas maltophilia
atggtgccgcccatggctgaccagctgctcaccgctgcaatggtccacgtgttcgccggcatcggcgtgctgctggtgctgggcaccctctggctggccctgcaggcctaccgcgccgcgcgcgccgggctgcgctggtgctggcgaaaggcggtggcctga

SEQ ID NO: 506478 - DNA, 780 bp, Stenotrophomonas maltophilia
atgaccaccgacaacaagaccctggcggacgtgcagcccggcgggagggtgaggctgggaggtcagcgctccgatctggtgccgggcatcgtgcgctgtgcgaagtgcgcgttccagcttcaccgcacgaacctgtatctgcaaagcgggactgtcggtgctggtgacagcaagacggagccctgcccgaatggctgcggcccgctctggcccgtgacgtgggagacgtgggcgcgcgaaggctgggccgaggccgaacgactgcacctggagaatgccgccctctccgcccagccctcaccgggtggtcaggatgcggcaatcaaagcgatggccgaaagcctgctttgcgccgagagttccgccaccttggaagatgcgcgcgaacaagccgcactcctacttgccgatgcgcttccgcacctcgccgcccaccagccgatgggggagccggtgggctatgcctgcaccaactgcgaccgcacggacgaggtggtcatctgccagacctgcgcagggatggcatgggacaacggccgtctgcatgagttccacgaagtccgcgagctgagcaccagcctcggtgagggcgttctggaccatctgctgccggacggatggcatgagaagccgctgctccgcttccagggcgcattcgacgaaggcgaccgcagcgtggggattggcgaacgatgcggaaacgtcttggccgcggaccaatccggcacggtgcttggcgactatctcgccgcgcgcgcggccaaggaaggtggccagtga

SEQ ID NO: 506479 - DNA, 219 bp, Stenotrophomonas maltophilia
atgaccagcatccacgtacagccgaccttcgacctggccacgcaggctgagaaggaccgccagcgggcagagatcgccgacgatgtttcccgctgggaagcagccggcggcaaggtccagaagctcggcaacagccccatcgatcgatccaccatcagctgccgccaggtggtcgagggtggccacgacggccgcacgaagaagggagcatccgcatga

SEQ ID NO: 506480 - DNA, 222 bp, Stenotrophomonas maltophilia
atgaagacctgcacgaagtgcgcggcccggctgcaactgaagtccttcccgctggtgaacggcaaaagccaagccgcgtgcggctggtgcctaaacacagatcgccgcctgcacgacccgctgcgccctctgcgccgcgatccgctgcaggtccatctgaacaatcacgtcaatctctggttcggcccagtgcggcgcgagcctttcaggagccaagcatga

SEQ ID NO: 506481 - DNA, 1695 bp, Stenotrophomonas maltophilia
atgatcaccgtcgagctgatccagggcaccccggaatggcatgcccaccgcgccgcccacttcaacgccagcgatgcgccggcaatgatgggctgcagcccctacaagacccgcagccagttggtgcgcgagttcgccactggcgcggcggttgagcacgacgctgccacgctgcagcgcttcgccgacggccaccgcttcgaagacctggccaggccgctggccgagcgcatcatcggcgaggagctgtatccctgcgtcggcgtggacgggaagttctcggccagcttcgacggcctgaccctgcttgaagacaaggccttcgagcacaagtcgctcaacgacgacctgcgcttggccatgccgttggacggcgccgacgcgtgcctgccgctgcactaccaggtgcaaatggaacatcaggccatggtcagcggcgccgagcgcgtgctgttcatggcgtcgaagtgggccggcaacgaactggtcgaggaacgccactgctggtacgtcccgaacccggagctgcgcgccaagatcgttgcgggctgggcacagttcgaggctgacgttgccgcatatgagtcggaggcggtcgccgcgccgattacctccggccgcgccccggagcagctgccggccctgcgcatcgaggtgaccggcatggtcaccgcttcgaacctggccgagtggaaggaccacgccatcgccgtgttccagggcatcagcaccgagctggtgagcgaccaggactttgccgatgccgagaccaccgtgaagtggtgcggcagcatcgaggaacagctcaaggcggccaagcagcacgccctgagccagaccgagagcatcgacctgctattccgcacgatcgatgacatcgctgccgaggcccgggccaagcgtctggacctggagaagctggtgaagcgccgcaaggacgagcgccgaaccgagatcggcaacgccgcacgccgggcggtgcagcagcacgtgctggccatcaacgagaccctgggcgagcacgccattccgatgccgacgacgctggttgccgacatcgccgaggcgatgaagggcaagcgctccttcagcagcatgcaggaagccgtggacgcggtggccgccaatgccaagatcgacgccagccagtacgccgagcggatccgcgcgaacgtggccatcctcgccgggcatgctgagcacgcaacgctgttcgccgaccgcgtgcagctgtgcgccagcaaggcgcctgaggatctgcgcaacctggtcgcggcgcgcattgccgagcaccagcaggccgagcaggcacggctggacgctgagcgcgagaagatccgcgagcaggaacaggccaaggctcaggaagcggcagctgccgcgcaggcggtacaggtccagccggtgccgactgcggatgcagcggcggcgcatgccgaggccgccaccaccgccagcgcgccgtcgccaagcgccacccagcggccggtcgtccggatcaagctcggccagatcgtggatctgatcgcaccaatgaagatcgacgccgagggcctgcgtcagctcggcttcgagccagtggccaccgagcgtggatcgaagctgtacgacgccgaccaggtcgacgcaatgcgcgccgcgatgatccgcagcctgcagcgtccactgtcgggcatcaatgcgcaggccgcctga

SEQ ID NO: 506482 - DNA, 975 bp, Stenotrophomonas maltophilia
atgaatgcccaggtacaggaaggccagctcgtccccgaggaggggatggccgcgatgatcaatcgctcggaaatcgagcagcagatcagcactgcccgccgcttcccccgctcgctgaagaagttccgcgacgaagccatccagatggtcaccctcagccagagcatcgctgagcagtgcgtttatgcgctgccgcgcgacggcaagaccatcgaaggcccttccgcccgcttcgccgaggtgatcgcctctgcgtggggcaacaatcgcgccggcgcccgcgtcatcgatgacaagggcgagttcatcattgcccagggcgtgttccacgatctggagcggaacgtcgccatcacctatgaggtgcagcgccggatcgtggaccggcaggggcgccgcttcaagccagacatgatcggcgtcaccgccaatgcggcctgctccatcgcgctgcgaaacgcggtcctaaagggcgtgcccaaggccttctgggaggacatgtacgtcgaagcacggaaggtgatcatgggcgacatcaagacgctggccaaccggcgcgctgatgccctcgccctcttccagcgtttcggcatcaccgctgaacaggtctgcgcgaagctgggcgtggccggcgtcgaagacatcggcttggagcaccttgtcctgctgcgcggcatcgtgaccgccatcaaggaaggtgacactacgccggaagatgccttcgccaccgaaggcgcgcccgctgcccagaagaagacgctgccaccctatacggatgaagcctttgccactgccctgccgcagtgggaggctgccatcaaggccggtaagaagacgcccgacgcgatcatcacgatggcgcagaccaagggcacgctcagcgatgcgcagaagaagcagatcctcgcgctggccgacaagccccagagcgatcagcaggccggcccggccgtggctgaggaggtgtccgaatga

SEQ ID NO: 506483 - DNA, 384 bp, Stenotrophomonas maltophilia
atgagcaataacaacgagccgatgccttgggagccgtcgaggtgcagcgttccgatgtggatggggggatgtccttccgggaactgcgataaaccggctttcggtcctcagtacccgcgcgagtacctcaggcacctgtgctactgggctgatcgaccggcgacctgctttggtcacgcctgccctgatcacgatggccccaaggaaggtgaccccatcatcttccaggacggcaccacccccgaaggtcggcagatgtggtgtgcggtgatgcccggcttcatcaacctgcaggaatcaccggctgggttctctggcaacccggtcaaggctgtggcgaacctgcgcaccgccatcgccgatgccacgggcggtgcgcaatga

SEQ ID NO: 506484 - DNA, 315 bp, Stenotrophomonas maltophilia
gtggcgctggacccaatcgcgttgaagactctggcaatcgaactggccgcggccctgcccccggctccccccgacagcaacgtcggcgccccgcttgaccgttcaccacgggcccggaagatccgggcaattcagcgcatcgcggatgcccattgctggcactctgccatcacgcacttccttgatatgaaggatgccgagtacatctcggacctgaccgacccgcagctggacgatctattggatcgcatgaacggctacgtagacgcggcctcaatgggctgcagcctggctgacagccttccggcgtactga

SEQ ID NO: 506485 - DNA, 444 bp, Stenotrophomonas maltophilia
atgcccgaccattcccggatgacttatctcgccaagaacctgcgctatctcgcgcgcaaggccgacatcaaacaggctgccctaggcgagcggctgggcgtccagcagtccacggtgcagcggatcatgagcggcgccaccgagtggccacgcctagacagtcttcttgccatcaccaactacttccattgctcactggacgagctggttcatcaggacatggagaacgccggcggcccgtctcagccggtgggattcagcgatgccaccatgacacaggcggtagaactgctgcacatgctggccgagcttcggccagatgaccagcgtttccgcaaggtgtcatggcgagcaatccaggtcacagccaaggccattactaaggccgaaggctcgcagaaggatgctgtgcgcatgattttggaggaactgcttcaggagtag

SEQ ID NO: 506486 - DNA, 204 bp, Stenotrophomonas maltophilia
atgaacccctccgacgccatcgcatccctcgtggctggcggcatgaccgagcaggccatcgccgctgagctgaacgtcaatcagaccacgatcaaccggatccgccggcaggtcgtgaccccttcctatgagaccggcaaggccctggttgacctcgccagcgccgtcgctcgaaaggctcgtcggcgccgcaacgccgcctga

SEQ ID NO: 506487 - DNA, 414 bp, Stenotrophomonas maltophilia
atgaagttgaccgagccgcagcccacgctgcttccgtgcccgttctgtggcagcgatgccgcctgctattcgtggcaggacgaagatctgtggagccacaacttcgttgagtggcagaaggttcgttgcaccggctgcgagtgcgagggccagagcagttgcgagggcttcaacaaatccgagacggcggtcgccgtatggaacacccgcgccccgcagtggcaggcgattgagtcggcgccgaagactacccgatccattttggtgtggtgcccggagcgccagaaccagtacatggtctattgggatgaccggtacgagggtgaatggcggacggttggcggcggtacggttttgaccgaatcgccaaccaagtggcagccgctgcccgctccgccggaggtggagggatga

SEQ ID NO: 506488 - DNA, 243 bp, Stenotrophomonas maltophilia
atgagcagcaacgtcaaggcatggccgaagccaaccggcacacctaaggatttgccgaggagaatcattcggccctgtgactacggacttgcgtctgcggtcatagctctggaaacacagctcgggaccatcgaggcatacaaccgattggtggaagccgccaaagccatgaagtctcggatcgacgctggcaagtcgaagccacaaaacccgatcttcgccgtcagcgtgaagggagaatag

SEQ ID NO: 506489 - DNA, 294 bp, Stenotrophomonas maltophilia
atgatctttccaatttcgcttcctatcgtgatgcctggaatcccggccacctgcggccatccagtcccccgggagcccggcaagttggattgggccaaggctcccgcatgggcgcagtacgcatgcgtcaacaccatcggcggttgggagtggtgggctgcacgccccaaatgggattggttcatgggttggtgggaaggagagatcctccgccaagctgcgctggtttacgtcgctgtgtacgacaggcgcgctcgcaagatgtctctgcatgcccgaccgggaggtgtgtga

SEQ ID NO: 506490 - DNA, 231 bp, Stenotrophomonas maltophilia
gtgagccgcgacggattcatcccgcacgcgcagtgcagagtcgcgagtggagattgcttcacgaaaggccggtgcctgcagaagtgcaacccccgggagttccacggcctcagcgcggagcagttgctggtcatggcagcgcaggcccagaggaaggcagtgggagatgactcgcggatcgccaagaggattgacgagctggcgcgcgatgccaggggcggcgtccgatga

SEQ ID NO: 506491 - DNA, 444 bp, Stenotrophomonas maltophilia
atgagccgcactggagaaatccgcgcttggtttgagcgcaacggcggagaacactgcctgtccgatgtgttgcagggcatgcgcgcacaaggcagggagaaggcgctcgtcgcagctaccgtctgcggcctagctcgcgacggcgtcctaacggcgaccggggagaaggggaggcggctgtattcgctgagccccggatacgtcttcgagccgagccgagccaagcgcatccgactgtggctggacgggaaccccggctggcacttcgccgccgacatctgcgacgggatgcaagtccaggaccccgccgagagggcgaggtacgcccgcagcctcagcaacatggttggcatcggcctgctccaagcaactggccgcgccaccctgatgaagtaccgcaaggcccgcaacgcctactaccgcccaaccgagggcagtgcatga

SEQ ID NO: 506492 - DNA, 459 bp, Stenotrophomonas maltophilia
atggccggtaagcagcccaaggccagcacgggcaagaagccgggcaagtcagctgttgggcggccaagcacctacagcgccaagctggcggcagagatctgcgcctacatcgctgagcataaaaccctgcgagacgccctgaagcagcccggcatgccttcggaggctacggcctatcgctggttggctgagcgccaagagttccgcgagatgtacgcccgcgcgcgcgaacagggcgacgagctggacgccgagcgcatgcgcgagatcgctttcgaccagagcatcgcccctgaccagaagcgggtgatgatcgacgtgctgaagtggcagatggccaggcgctcgcccaagaagtggggcgacaaggtccagcatgccgatgccgacggcgagaagctgccggcgccgccgccgttctacgtgatgggcgtggtcccggccaagcagggcgagtga

SEQ ID NO: 506493 - DNA, 300 bp, Stenotrophomonas maltophilia
atgaaccacagcaccaatgccgcctgttccccggccgacgagtacgaggccgaagggttgcgggaccgtttgcgggtcacggacagccagatcgcgcagctggagtacgcaatcggtcagctggccaatcgcctgcagccggttctgcggcccgtgatttccgagccctgcgggatctcctgcaacggcgacgcgcagcccgcgcgcagtcctgcagcgcaggaggcccatgagcagggccagcgcatctaccaggcccaccgcgacctgtactccatcgaacagcggcttgccctgtga

SEQ ID NO: 506494 - DNA, 321 bp, Stenotrophomonas maltophilia
atgaacgaaaaagtcacccagccgtctcccgctgaattcaccttcggccttggtttcggcagcgcgctggatcacctgaaggatggccgtcgcgtggcccgcgatggctggaacggcaagggcatgttcgtctatctggtgccgccggccagctatgccgtgcagacggccgcggccaaggcgcacttcggcgaaggctcgatggtcccgtacaacgcctacttcgccatcaagaacgtcaacgacaccgtcagcacttgggttccgagcgttaacgactgcctggccgatgactggtatgtgctgctggaggagggctga

SEQ ID NO: 506495 - DNA, 1227 bp, Stenotrophomonas maltophilia
atggccaatccataccaggccgggcaggctctcggcgccgcgctgttcggcaacacgcgcgatacctacacggatcagctgggccggaactaccaggtcgaacgggcgctgcaggaggcccgtcaggcgcgttcgaaggccgtgctggccaaccagatcaacgagcagcgggcgctggtgaatccggagctggtcagcggcgtgctgggcggcgacgacaccgcacgcgcgacgcttggcagcatcgcactgctggcgaacgaccgattcgacgccgggcagctgaacgacgtactgggtgccgctgcgcgtagctccgcccgtgatgccgcattgggcggcaactgggagggtgcgaacgcaaacctcatggccgtggccaacgggccgcaggagctgggggccgtgcagggccagaacctgctgcagaaccgcttcaaggagggcggcggcgggatctcgaccaccgagcagggtcaggccggcattgccgccgacgccgcgcgcgctgccgcctcctacgccagcgccaacagctccaatgccagcgcggcgcggacccggcaaggtatgggcatcgacgcggccaagttcggcctgcagcgtggtggccagtggaatcccggcggtaaggctgccggcggaacgctcggtgatagcagcaagccgctgccggtaggcgcgctgaaggaactgctggcagtcgaggacgcgctgggcggcaccaaggtgctgggcgacatcatcgacaagaatcgcacgcggctggacaacggcaccctgcagatcggtccgctgcagtcgctgatcgggaatgtgcgcacgggcctgggcatggccggcgacagcgacgtcgcgctgaacgagtggaattcggacctgacgaagatcgtcaacgagtcgctgcgcctcaacaagggcgtgcagaccgagggtgatgcccagcgtgccgcaaatgagctgatgaatgcccgcgatgcgcgtacggtccgcgcggcgctggggcgcctggagaccttcaacaaccaagcaatccagctgcagcggcagaagcagaacctgatcaactcgaactacggccgcacctcgacgctcggtgacccaccggcagcgtcgccgcgtgcgccgggactgccgtcaaccggcgccagtggcgcgcagcgcgctcgcaatccacgtaccggccaggtgctggtgctcatcaacggccagtgggtgcccgaataa

SEQ ID NO: 506496 - DNA, 2745 bp, Stenotrophomonas maltophilia
atggcgactcctccgcttccgcccggtttcgttctcgaaccagctaccgcacccgctgtggcgactcgcgctgtgccgccgccgccacccggattcgagctggaagacatcccaaccctcgggaccgtccaggccctgccgccggacttctccgaagtcaccggcagcgtatccagcaccgccgatgggcggcaggcggacggctggaaggcaggtatcccgcgcgatctggcgttcggagctcgttcggtgctgcagggcattggcagccttctgggtgcggtcggtggcgacgccctcggcgcgctggagaccaagatcaccggccggcctgtggccagcttccgcgacaacgccgcgacgctgggcgacgccctcgggctgcccaaggcgcagacctctggcgaccgcgtcctcggcgacgtgggcgaggcactgaccggtaccgccttgacccttggcggtggtgcggcgctcaacgccggccgaccggtggcttcgctcgcttcgggccaagctgcgctcatcaaccctgcgcgcgcggccggtggaggcgtgttggagcaggtcgccgggaacgcccccaccttgggccagcgtgctgccgacgtgctgaccgcccagccagtgctgcaggcggtgagtgcagcgactggctcggccgcatccggcgctacgcgtgaatcgggcggtggtgctggcgcgcagatcgccgcaggcttgctcggtggactcggcccctcgcttgtatcggcgggtacgccggcggcactacgcggcacactgcgtggtggcgaagccaatcggcagaacctcgtccaggccatcgatgacttcgctgtactcggtgcctcgccatcggttgggcaaggcaccggtgcctggtcccgtcagggcgctgaaacgctccttggctctggcccgaccagtgccggtgtcatggccaggtttgctgatcagcaggccaacgccattggggccgggctgcagcgccaagccgacgacctgttccgcaacccgagtgccgagcgcgctggccgcgcaattgagcagggcatccgcggcgaggagggattcatccgcaccacacgcgagcgcgggaaccagttgtacaaccggctggacgaactgctgccgcaggacgagcgcgtcggtatcgacaacgtgcgcgccgccttggccagtctcaatgaggagatccccggcgcgccgagcgtgtctcggttcttccagaacgcacgcctggaaggcatcgagagcgctctgtccaaggatgccggcggaatcgagggcgtcctgtcgcgacctggtatgcgcgagcagatcgaccagatgcggacggacctgaccaaccaggcgcagctgcgccgggctgagcttgctcaggaatccaacctgcagcgccagaacctcgtggccgaggccggagatcagcgtaatgcgctagccgctgagcaggaccggctgcgcgatcgcatggccagcatgattgaggggcgccgggcccagctgtatcaggaagctgatgagctgcagttggagctgcgcgcgcagcagcaggccgccattgccgaaaaccagcgccgttcgatgtacccggagactcgcaacagccttgtgccggtgatgacggacgaggagatcgcccgtcaggtcccgacccgggccagcatcgactcgcgcctaccgacgcaagccgacattgaggcacagatggtgtcgcgcgccgaactggatgcgcaggtgatgtcgccgcaagagatcaaccggcgtgtaacgccggattcggccatctcgcagcagaacttcggtgccgattacgtcgagaagcagatcaacgactacctgacgagccagattgacgggaaactgccctacgaggccctgcgaaagctgcgcacgctggtcggcggtgagctggagaacacctcgttggtgtcggatgtgccgcgcagcaagtggaaggcggtctatgccgccctgagccgcgatatggaggctgcagcgaccacgcctgaggcaaagcaggcgctcgaccgcgcaaaccgctacttcaacgcccgcgctaagcgaattgacgagatcgatcgcgtaattgaccgaaatggtggcgccgagaagatctatcaggccgtcatggggggcgttaaggacggcggctcaaccctgcgcgcggtgatgcagtcgctgccggaagaaggacagaaggcggtcactgccgcggcattgcgcaggatgggcttggccaaccctggcgcgcaggacgcagctggcgaggcattcagcgcggccaccttcctgaccaactggaacaaagccagcccggaagctcggcgtgcgttgttcgaccggtacgggcctgggtttagccgagatatggaccgcatcgcctcagtcgcggagcgaatcaaggatggtggccaggccatcgccaacccttccggcacggcgcggcagggggctcagttcgcctactggggtggcctgggtggatcactgatgacgggccaggttggcgctgccctaggccttgggcttggcggcgtcggtgcgaacctcggcgctcgcctgatgaccaacccgcgctgggtgaagtggctggcgaaatcgaccgatctccccattggcgcacttccggcgcagatcaatacgttgaagcggatcgcgacggagaatgacgacccggatattgcagaggctgccggcctacttgaacaggagaaggtaggccaaggcggcaactga

SEQ ID NO: 506497 - DNA, 210 bp, Stenotrophomonas maltophilia
atgaccaacgaccgattcccatgggacaagagcccggtgaccccggaggccgagcggctagttgccaggaatcgagccgagcgcaacctggaacgctcgtttccgaagaagtggtggcacgatatggctttcggctggggcggaatggcagtgattgccctgatcttcggatcagttgccgccttggcctaccttctcctgttcaagtag

SEQ ID NO: 506498 - DNA, 237 bp, Stenotrophomonas maltophilia
atggaaaaggacgtttggaccgtcatgattcgcgtgggtgacgaaatcagttccggggatatggtgttccgagatggagaggcctatctcatgtgggaatggcacgaacaggcatcgaatgagcatcccgggattacggttccgctcgagcgccgattcctacagaaggtggatggtgcaggaggctttgattttgtctacaaccagccgattcaagcgcccgactctgcttcttga

SEQ ID NO: 506499 - DNA, 492 bp, Stenotrophomonas maltophilia
atggcgcgcatcacagcacaggaggccggcggccagaacgtcgtggcgttcttggacatgctggcctggtccgaagggaccgacaacgggcgccagcccacgaagcacaacgggtacgacgtcctggtgggcgggggcctgttcacggacctcagcaagcacccggccaagctggtccggttgaacgcgaagctggcgtccaccgcggccggtcggtatcaattcctgtcccgcacctggggcaacctgcagcgccagctccggctgcccgacttcggcccgctgagccaggacaaggcatgcatcgagctgatccgggggcgacgggcacttgacgcagtcaaggccggccagttcgacaaggccgtggccctttgctcgaaggaatgggccagcctgccgggtgccggctatggccagcacgaacagagcctggagaagctgcgctcggtgtatcagaaggccggcggcaaagtgggcgggagcgcatga

SEQ ID NO: 506500 - DNA, 435 bp, Stenotrophomonas maltophilia
atgctgatccctgaccctctgcggccctacgtgggcctgatccgcgtggggctatggattgcggcagtcgcagcggtcctgctgatgggcgcccggctcgggtcagattaccgagcgaagaaggaccagaccctgatcgcagcagccgagaagcagcgcgacaaggccaaggccagctccgacgagaacctgcgtgcagccaatgccgccggccagctgctgcaggaggtcaaccggcagacccaggcatcgatcgacgctgccgaggcggcgcgcaaggcatctgctgcagcagccagccgggctgaagcggcagcggccgagagtcagcgccgggccaccgcggccgagaaggcgctgcaggccgcaaaatccacgccggcatgccggtcccaactggagatggccctgtgcgattccattcctttgctctga

SEQ ID NO: 506501 - DNA, 273 bp, Stenotrophomonas maltophilia
gtgcgattccattcctttgctctgatcctggtgctgccgctgtgtggattcggcacatgctcgaagaagcccgagcagccgaagctgcccgaggtcgtgcacatcaccgtcgagaagcaggtgcccgtcgactcgcgcctaaccaagccatgcccggccaagcgcgccgagtcgcgcacggtggaggcagtggtggacgcgtacaacgccaacctgatcgtcctgcaggactgcgacactcgcatgggcgagatccgcgcgctggggcggtaa

SEQ ID NO: 506502 - DNA, 1506 bp, Stenotrophomonas maltophilia
atggccaagaagcgcgtaccgctgcaccagaatccccgcggcttcgttgacgtcgaccccgacgcaaccaacggcgcccaggtgggcgtgaatctgcgtggacccgacggtcagatcctgaccgcggcgcaggtgatcaaccccaccggcggcagcagtggcggcccgagcagcatcgcctcgaccatctggaagctgatccgcgaagtcccatccaacatccagaagctggccgcgctgatcggcgccggcttcgctgcgaggcagagcaacggtgattgggcgttgcgatcgctccaggagggtaccggcatcgacatcgccaaccctgacggggatgcagggaaccctacgatcgggctggaggacgtcgcaaactcgggtactggcacgctcctagcgatctcccgcgacggaaagggcagggtgacaggaactcggccggccaccatcacggggaccgcgggccgagtcgcagtcgccaacggtgatgcgtctgccgggttgcctacgattgatcttgctccggttgccgactctggtgctggggtcctgctggcgatcaccaaggacgcgtatggacgtgtaaccggaacccgccaggcgacgattactggcaccgcgcagcagatcaatgtcgccaacggcactgcagccgctggcttgccgacgttgtcgctggcagcggaagtgactacctcgctcggaaaggctggcaccgcactgcagccgggggcagtgcacaacacagccctctccggcctgcaaggcgggtcgtcgactgagcgttaccactcgactgcaatccagaactccagcctcgcagccgtagctgtatcgggtgagatctgcggcctgcagatggtatggaacagcggaacctcgatcaccttcaccagcggattcgcggcgatccagtcgcttggagggctgctttccttcccgtcgccgattaccaaggctgggctatccctatccgccagcacctggtatcacgcctatggctattccaacgcaggcacgccggatgttgagattgtcaccacggcccccgctgccactgcgttcagcggctccgcccggtcgaaagctggcgacacatcgcggcgttacctgggtagcctgctgactgatgcaagcggcaacatctaccgattcggtcagaacggcgatgaggtcaactacgtaggaaacctggtcgccccgttccgcgttctttccggtggcacagccacgacacgaacgaacgtggcgctttctggcgtgattccggtgacttccaactacgtcatcgccaacacgatcaacaataccgaccagcaggctttcgttgacataccggaaataggaaatgttggggctgcctcgcgctacacgtgcctagcaaatcagcgcacaccaatccacgcctttgtgctgagccggacgctgcagtacttctatgcggtgtctccagttggatctggagcattcatcgacgtgtgggggtacaggtttgagcgctaa

SEQ ID NO: 506503 - DNA, 225 bp, Stenotrophomonas maltophilia
atgaccaaggctgaagtgcgtagtctctttcccgcattgcttgccgtatggcgtgccctcccggaaaaccgtcagactgacgagcggcagctcagattctctgacttctattcttggctcaaagcctcccatcctgatgccaccaagttccggtcggttatgggtcctcgcgaggatttggagcagtggtttgacgcggccacgcaccaaagttggagaaactag

SEQ ID NO: 506504 - DNA, 525 bp, Stenotrophomonas maltophilia
gtgagtggggatagccaagagaggcatcggatcgcgtccgagtgggaagttctcataggccgcttctccctggccatgggagaggtggagctgaacgtatctcagatgttgatgctgctcggacggagtacgcgaggctttctcaacgaacggttaggaaagttgtcgaacagcctccagtacttggagccttctcttgtcgacccgtgccgggcttgcattgaggaggcgaagcgactgaaggatcatcggaacgagatcctgcactcggcactgagcatctatgtctggtttgagggtatcccactggaagggacagtcgatgcggacgagattggcgacaaagagccgttgctaggctcgaagatcatcagtttcgacgagcgccggtcagaggttgatcaagtggcgatgaaggcgctcatcgctgacgtacgcgcgctcaaccgcgaactgacccgcctgcttctttctcagctagagttcaattccaattctgtctaccggtcgactagcgggcattga

SEQ ID NO: 506505 - DNA, 813 bp, Stenotrophomonas maltophilia
gtgaccgttcgcgagagaattgcggcaccggaaagggagggcttggaagccctttctcgcctcgttcagataattcaattcatcgacgagagccgaccaccagcggacctacgggtgacgatgactaacagcattattgtctccgcaatgtccactgcggaagaagcattccgggaggtattcattgaagcgctaaatatcctagaactgtatgttccgactcacgaccatctaaacaaccagctcaagaaggcaaacagtgaaaaatcgattgatctagtcaaaagacttctaaaggaaggaaagaaggccgatgcggctttagccttgcgtggacttagcaaatgccttaactcagagccgggctataagctagcgactacggaactaactgacaacaaggggaactttcgaagcggccagctaacggaaatcgcgaagtcaataggtattaacgagatttggaaactaattgcggatggacctattgtctctgaactactgggcggagagactgacattgaacgcgccaaaaccatactaatcaacgactggaacgcgctattcgatgagcgtgacctcattgttcatcgggtctcccgtgcaagcggatggggatctgatcgggtcaaagcggcgattgagctcgcgcaagtcgtgctatcgagattgtctgccgtgctcgcctgcgaagtaactgcagttgttgcaccttggctcgaccatgaactggtcgataaccgcgcacccaccgaggaagctggccaagacgatggacgagctggcgctccaggggatgggggcttgtggtaa

SEQ ID NO: 506506 - DNA, 1209 bp, Stenotrophomonas maltophilia
atgaaagggatcaacgtggccgacaaagtactgattgaacaagacttggttgaagaggattccgtagactcttctagccctacgcaggcttcggatgccgagatcgagaagctctattccagctcctcgttccgggtcatatatcaatcaaacaattttctccttccccagattcagatgctgatcgaggaaagagaaataatcaatcttcgccctgagtaccaacgccgccttcgttggacagtcaagcaaaagtctctacttatcgaatctcttcttttgaacgtcccaattcctccagtattcctgtatgaaagtgacttggcacgttacgaggtgatggacggacagcagcggctgagcaccgtgagcgaatacctgtccaacgactttgccttgagcggactggagaacctgggctttctacgaggaaagcgatacagggagctaccaccaaggattcgccgcggcttggcgagggcgtcgatcagcgccgtggtgctattgcatgagtctcaatcaccggacggtgatgcatcggcggtcaggcggtacgtttttcagcgtctgaacaccggcggaaaagcactgaatccgcaggagatccgcaatagcttctacagcggcccgttcaatgacttgattgttcgccttgcacgaactccaaatttctgcgatgcgtttggcattcctcgctacacggaaaccgacgagagcgagtactacgagaaccagagtagaaggagcaacagcctctacaaacgtatggacgactgccagctagtcctaagattctttgcgttcttagatcctgacaacatccgcgggtcagtgcgtactatgctcgacaacacgatggagcgattcgcctcgtcgtccgaggacgatcttaatgtgctcagcgcacagttccaggcgactttagccgccgcgacgcatattttcggcgacgagatctttacgttgccgcccaactcgaatggcgtgcgacggacctctgcggcgctgtacgacgccgttatggtttcgctggcaagccggcctgatagacatgagcaatttatagctcgtcgtgacgagataaagagcgctatagaccagctgtccgcagacaactcggggttgatgacagggcgtgctaatacggcagcgtctattaccgcacgtatcgccgcagtgggccacgctctggattcagtcgcgccgtga

SEQ ID NO: 506507 - DNA, 144 bp, Stenotrophomonas maltophilia
atggagattggcgtggacctcagcgtatggtccacgcacgcccttagcgcgatgctttccaagctgggcgcctccctaaccgatgactccaaggtccgccatccgaaggatgagcaggatcattacgagcgcttcttccactga

SEQ ID NO: 506508 - DNA, 201 bp, Stenotrophomonas maltophilia
atgggcgaaaaccgtagcgccagacactacacagataactactaccaggcggtgtgttgtttcgcgcacaccgcgcccctgctgcacgaggtgcatgccctgcacgggatgcaccccatgcgcccgctgcacccgctgcaccacgttcaccagtgcacgtcgttcaacaccaggagagcggccgatgccagacaacagtag

SEQ ID NO: 506509 - DNA, 513 bp, Stenotrophomonas maltophilia
atgagtgagcgagaagcccgcaagctggccaaacgacgcacgcggaccacgggccgcagcagcagcccgtatgtcccggtctcgccacacgttcgcatctattcctgggagctggagtgccaggcataccgaaccctcgatccggttgcacgtgcactgctgatcgaactgcgcgcgctgtatcggccatccactggcgctgaggtgttcctcagcgttcgggaagccatgcagcgggtgggagtcacccagcggcccgtgcagaacgccttcaaggcgctactggaacgtggatggatagaggaagccaaggccggcagcttcgatcagaagacaggcaccgggcgcgctagatccttcctcctgaccaacatcgggccagccggcgatgacgtggatgcgaagcggacctacatgcgctggaagacatacgccagcgaatgccaaaaaaacgcggtagcgccagacgctacaaaccgtagcgctgagcgctacagcgacaaggccgcgtaa

SEQ ID NO: 506510 - DNA, 201 bp, Stenotrophomonas maltophilia
atgaacggtgatcttttcgaagtcttggagaagagcaactccgcagcagccaagcgcgcgctgcaggacctggactccgctaagactgtggacgtgatctatcgctcccaggttggcgcctgcctgccctttaccccccttcccttgcactactacggaaagaaggtggccatcgtgatcgtaggggaggcagatgagtga

SEQ ID NO: 506511 - DNA, 222 bp, Stenotrophomonas maltophilia
atgacccatcagacgaaacagtcccaggcggagcgcctcagttacaccgttgacgaggcatgcgcagtcaccggccttaatcgaaacgccatctatcgcgccatcacccttggccagatcaacaccttcaaagtcggtcgccggcgcatggtgtcgacccgcgcgctgcgtgagttcatcgaggcacgggagaaggaggcgtcaggcggcgccgccgcgtga

SEQ ID NO: 506512 - DNA, 336 bp, Stenotrophomonas maltophilia
atgaatgcggagatccttcacagactggaagggagttttcaggaggccgcggtcacggatgggctgttgcggagccagttgctcaactttcagctttccgccgagctgctcaagtacaacccacgcatggtttatgccgtgagcaaactgctgtctggcctgtttgatgacgaggtagtcagggagcgcgtgttcgcacttgccgatgctggcgacgagattgccgccaaggcgagagaaacggccgtcgacaagctcccgagcatcctgcaggaccttcaggagaagatggcggctatccgcgacaagggcgatgacgcggcgtcagactcctga

SEQ ID NO: 506513 - DNA, 1299 bp, Stenotrophomonas maltophilia
atggcaacggcccttgcggcgcaacacatccgcctgaaaccccttgatttaccgtgtcattgcgtcccgctggatttggccgcacactgggctttgctgttaccgtgcagttacgaacccgtgaagcaatccaagcgcctcaatcccagcgtcgtcgaatcggccaagcccgaggctgcgccctaccgcctgtgggacaccgtggttccgcagctgcatgtccgggtgcagccatcgggcgtgaagagctggaacgtccaatggagccggaccagcacccgcgcgctgggcaagtggcctgccgttactgtggaggccgcccgcacccgcgcgcgcgctgtgcttgccgagacggaccagcacggcgcaccgctggcggtcatcgcccccaagagcgagctcacggtggccgacgcctgccgcgactacgtgaccgccctggagaaggatgggcgcaagaccgcggctgatgatgccaagcgccggtttgagcgctgcctctacggcgacaagctgggcaaggtgcgcctcaaggatctccatcaggatcacattgaagcctggcgcgatcgcgtggagaaaggcgacctcccgccgctgccagtgaagcgcggccggccacccgtagcgaagcccttggcacggtccagcatcaaccgcatccgcacgacgctggtggccgccctgaaccacgccgtggcccgccgcaaggtatcccctgatcttgcattcgagtggaacgccgtgaagccgctcaaggacgccggccagcgccgtggcctgtacctggagcgcgagcagcgccgcgcgctgctggaggcggctgaggggccggtgcgcgacctgatcgagtgtgtggcgctgacgggctgcaggccgggcgatccatcgctatgcctgcgctcggactatgacggccgaaccgccagcgtaaggttccgcagcaaggaccacgaccgcaagattccgctctcgcccgctgccactgcgctgttcgaccgcctggccaagggcaagctgcccaaggcacacctgttcacccaggacggaaaaaaggtgtggacgccaaccgactggagcgagcttgttcgggatgcctcagcgcgcgctgggctacctgctggcgtgacgctctatacgctgcgccactgctggatcaccgacgccatcgtgggcggcatggacctgctgaccgtggcgaagctggccggcacgtcactggcgatgatcgagaagcactacggccacctggtgcagggtgcagcgcgcgacaagctggcgcaggtgcagttcctgtag

SEQ ID NO: 506514 - DNA, 270 bp, Stenotrophomonas maltophilia
atggcattcccgaccgctgtaaacgaccagatcaccgattcggtcacccaggccaacaccaaggtgctgggcgacgcgcccgccgtggccatgggcaatctgtaccaggccactgcgcaggcgctggccaacgccgcccacaacgccaccaatgcgcagcagcagtcctatgtgacggcgcaggcggccaccaccatgggcgtggccacgctgtactcgatcgacaccgccaccaccggcgtggcgaccaagcagatcctcggcgcgtga

SEQ ID NO: 506515 - DNA, 951 bp, Stenotrophomonas maltophilia
atgagggccttcagttacgaacgcgcgaaatccccagccgaggccgccaaggccgtcgctggtaccgagggcgcgaagttcctggccggagggaccaacctgctcgacctgatgaagcttgaggtcgagacgccagcgcacctggtcgatgtgcaggacatcggcctggacaggatcgaaaccaccgacgagggcggcctgcgcatcggcacgctggtcaccaataccgcgctggcctcgcatgagcgcgtgcgccgcgactacgcggtgctgacccgcgcgatagtggcaggcgcctccgggcagctgcgcaacaaagccaccaccggcggcaacctgctgcagcgcacgcgctgcccgtatttctacgacccccatctgccctgcaacaagcgcctgcccggatcaggctgcggcgcgctcgagggattctcccggcagatgggcgtgatcggcacctcggacagctgcatcgcgacctatccgggcgacatggcggtggccctgcgggtgctggacgcctcgatccagaccgtcagcggtgacggcagtacgcgcagcatcccgattgccgatttccatcgttcccccggcgataggccgcagcaggacaacgtgctgcagcgcggtgagctgatcacccacgtcacgctgccgaagcccctgggcggtcggcacgtgtaccacaaggtacgtgaccgcgcgtcctatgcgttcgcactggtgtcggtcgccgcggtcgtgcagcgagacggctcggcgcggttcgccttcggtggagttgcgcccaagccgtggcgcgtcgaggcagccgaaccgctgctgcgcgacggcgtaaaggccgcggccctgcaggtgttcgccggtgcccgtcccacgcgggagaatgcgttcaagatcgcgctcgccgagcgcaccctcgcagccgtgctggtggaaggagagcgctga

SEQ ID NO: 506516 - DNA, 957 bp, Stenotrophomonas maltophilia
atgccgagttccaggttctttgccggggcatacccgtgctgtggctggagaggcgctcgcaccatctgctgttgcaggtctcactggacgcggagcagcgggcgcccgccattgtgcagcttggtacgttgcttcaatggcagctggagccggtgggctatctggagcaggtgctggctgacgtgccggaacctgttctgtcggatcgggtgctgcagatgttcgggggcggggtgcctgagggcgcgcgatgtggcccacactggtcacctgcgcgacaggcattggccaagtgaccatgcgggtcacctcccggcatcgatccagcccgcatcgcgcgcacgcgcaagatcttctggcgtatcgatatccaggcccagttccggtgcctgcaggacatgcaccgtatcgacaggaagttgccgcaggcgcgctccgaagccccggtcaccggctgtaccgacaggggtgaaccaggcgcgcggcacgactgcgggaacgccaagcgcatttgcgtggcgggtgcccgcgcacgttgacgctgcggcgcgggcacccgaaagcagcgcctgcagatgcaagctctcgattgcgggctggtcgcatgccacgaccatcaccgcggtcaccgtgggcagcaggtgtgcgccggcaacctgcagactgctcgccaggccgcgttcccagtggggattggttaccggcgtggcatccagcccggcaatgctggatgtcactgcctgtgcgttcgcgcccaccacgaccagtacctgcgctggtgcgagatcccgcgccaaccgcaccacgcgatgtaccagggtctcgccctgccgggtcagaagctgcttgggctggccaagtcgggtgctcccgccggcagcaagcacgacgatcgcatgcgcgtcagtcacctgccgtgcgcgcctcgccattgctgcagctgcgcggcgatgctga

SEQ ID NO: 506517 - DNA, 1833 bp, Stenotrophomonas maltophilia
atgcagtcgcggatgtcaaaatggcggatttcgctccgaaaatcgcgaggtgcgaacttttggaactacgggctgtcgactttaatgtctgggatagcgttagcttctctctttgccttgggaccacttgttcaagcaattgttgtggcgctcctgtcgggagaaacgtcgtcactgtacgacagcgagaacgtcggccaattagtagatgtccaaaactacctgacgtcgactttgtggattccgtatctcgcagccggattattctcggcaattgcaatgcgtcttgcatcgacaaagcgaacggtatttgcttctggaacggctgcgattggggtctctctaaccgtcatagacctgtcatcgggcgccttggacggactagtaatatcgattctttgcaactttgcagcaggtgcattcctcgcacttttgacgctagttctagtgctggacgagaaaatatttaggcacatcgctaacggcaacgccaaggtagagcgaatcgcttggctgctcgctccggcgacgggttatttcgccctcacgacgatgctcttcatcgcccttggattcttaaccaaagtacctacgactccaaccagctttcgactcgagccctctctgagcggccactacgtcacagcgaaagaggaggaatgtctgactggcaaccaaggcgagttgaagaaatgcgggtcgacagacgaaaagaacagcgaaaagttctcatttctagggaaatttagcgaagcagagggtaccaggactgaattcctaggcggcggatctggccttgaaattaaatggactaagaccatcaaaggcccaataaatggctctttatgggcgacgcagggctgcacaggaaaagattcaaactttgaagatgcaatcaagtcgccccctctatatacaggcgaaattcgcaacctagttatttcggcaaatgacggattaactgaatttcgagtcatcgatccaaaactcaaccaaatcacagtctccgacgacaacttcgctcagttctgggttaatccatcgcgcgatgatcctgaaaagattgacgtgagcagatttcttgggaatggaaccatccaggttgctgacaagttcgccagaactgtattcgtacttggcatcatccccctgactggaaatgagggaggagccgtattcaaggcaagaagcgcgaggtactcgatcaatggtgatcgcgagcgagtgatcaatttcagaatggcctcagagatgattgaggcggggcgtgcaatggcctgcgaaggcttacaggtagtggcaaatgaccagcaaatgtcggctacctcgaaagttccgtacgtcagccttgtagtgtccttggaggctccaaggcatctcagcctggaggaagttggcaagcccactcatgtcaccgtttcaggcgcaaatggctggataagtagcacaggttaccgcaaggaccggttccatgaggcgattactgcgggcaacgtctcgcagctgtcactagttggggccgtgagagacctagtcgtcgatggacaggtcatttccacgggtacgacgagtacgctccagttgagcggtagaatgttcgcccgcaccgatggccccgccatacttattgaaggccgcgccgactatataattcttaatgggaaacgacttagtagcactagatgggagcgcttggacacaggcataagagttccaataattcttggagtgccgactgcagcgtattttctactaagtttcgcaggtgctacattgcgaaggccagctcgtctagtgtggagactcccggggaagcggcgagttatcccttaa

SEQ ID NO: 506518 - DNA, 1470 bp, Stenotrophomonas maltophilia
gtgaagttaagtgaactatgtggtcacgccgcacgcctcaccggcttgaacaacataaatataattgtcggccgcaatggcgcgggaaagagtcgcttccttcgtgacattgaggcatcaattaaccagagcaagaatcaattttatgtccggtatgtcagcccagagcgagcaggctcattcaagcgcagtggaagtgtcctcaccaacatgagcgacaaccctgagtggctgagacagacgcgagcagtcaatcaggcgagcgacttcaaagctgcgtctgcgatgctctttcgcgaggctgaaacgctctatctgcgccgactcgctcgcacacctgaaattcgcctagatccaacacgaagcttcgaaacagaccggctgagaaagataaataacctactcactaacatttcactggaggtgggaaacacagatttcgaatttcgctcactcctcaatggcgaaactatacctccgcaaaacatcagcagtggcgaatcagaagccgtagctttggcagccgaaattctgtactttttcgatacgattgatcccgcgaagtttaacgtactacttctcgatgagccggacgtacaccttcacccagatcttcaggcacggctcggacatttaatcatctccatgcttgatgaattcaaagatcacgctgatagcatcgccgtatgcatctccacccatagctccccactagtctgctctcttgcggcttcgaagtatgtttcgatcggtacaaagatcttcgcggtcgatatggttgaactgaaaccagccagcgtcgagcttcgcaagatcgctccgttcttcggacaccctctttccctttcacttagcgatgatgtagccctgatcctcgaaggagaagacgacgagcgcgtctggcagcaagccgcacgaacttcgcaaggcaggatcaaggtctttcccgtgctttctaccagcgtggatcagcagggcgaccttgaaaccttctgcatccaattgctagacacactctacgacaatccagtcgcattctcgattcgcgacggcgatggcgtggcggaccagccgcttgagcaccgcccgcctctcaagcgctaccgtctccagtgctatgcgatcgagaatgctctattgactgactcatgtcttacagtaatgggcactaactggcaggacctcgtcgccaaatcaaggaaatgggttgaggacaatccaaatcatcgtgacaccgctctcattaaggagatcgccgaatcgagcgaccgcctacggcacaagaagataaagacagtccgtaaccttatctgcgacatcgccagttgcaagaagccctgggaaatcgtcgttggtcaagcgatcgcagcattgacaagagaagacctttcacattcaaacatgctaattgacttcctcggcgcagaattggtcaaggacatcatcttcaaagattcagcaaatccgtga

SEQ ID NO: 506519 - DNA, 480 bp, Stenotrophomonas maltophilia
atgcagcagctctacgcggccaatgcctcccgggccaacctatggcggttcatggcacacaccggaatccggcgcggcgatctgatgcacctgaggcacgagaacgtggttactggtcgcctgctggtcgagagcgatccggacgaggacggcgacggacgcacgaagtcagggaattggcgagaggtgccgttgaacgcccatgccgctgcacctctagccacccttctcgatccgctggtaagcgttcacaaggacaccgtgagcgactggtccaaggatgatgcgaccgcggcaggcgttggcgggagtcttcaccgcctgaggcacacgttctgcgcccatatggttatggctggcgtgccattgcggtgcgtgcagctcctggccggtcatgctgattacgccactacagagaagtactacgcacacctcacccctgagggcgatgatggcgcggtggcgaagctaacctattga

SEQ ID NO: 506520 - DNA, 915 bp, Stenotrophomonas maltophilia
atgtttgggatcgggattgatgtgagcaaagccacgctggatgtggccgtccatggagagcagtttcgccaattcagcaacgacaagcgcggctttgtacgcttaattcggtggctgaagacgtggccgatcaagcaggtcgttcttgaggcaagcgggggttacgagcgtgctgctctggatgtattgcacgccgccggcctgccgatggtgcgaatcaatccggcacgtgcacggcgatttgcccaaggcacaggccgtgccgcaaagaccgatcggctcgatgcgacagtgctggcgcagatggcccatttgttaccgctgacccgctacgtaccgcctgccccttggcagcagcgtctggctgaatttgcgcaatgccgcaggcatctggtgcagatgcgggtcagtgagatgcagcgcttgcggcgattggtcgatccggatctgattgcgatgaagcaacgctatatagctcagctatctgacgacctgaagcaactggacaaagctattgccgagcagcttgagggacagcctggctggaagaacatcggcgcgctcaaaggcgtcggccccatcctgatcagcacactggccagcgagttgcccgaactgggcagcttgggaagcaaagccatagcgtcgctggtggggctggccccgatgaaccgcgaaagtggcacctggcagggccaacggcggatcagtggtgggcgcgcggtggtacgcgaagccctttacatggcggccctgacggccatccggtacgagccaagactgcgcacgttttacgctggcctgaaggccaaaggcaaagcgagcaaggtggcgctcgtggcggtcatgcgcaaaatgctggtgatcctaaacgcccgtaagcgggacgccgaggtggccctcggctgcccctga

SEQ ID NO: 506521 - DNA, 321 bp, Stenotrophomonas maltophilia
atgccaatgaccgcattcgcgcttgccgccgcactttcgggcctgcccgacatcgactgggagcgccagcgcgccgaggacgcgcaccagctcatgctgtgccagatccatcgcgatgagttgcagcaggccgagggaaaagacgatgcctaccagcgcgcaaaagcggtctgcgacctgctggcgcgggactacaggaacaggtgggatttcgacgcacaggatgcactggcggcatcggcggtggatctggatgagctgatccggcgtggcgacgcggttgaagtcccccctgcaaagcgggatcgtgcctacgagtga

SEQ ID NO: 506522 - DNA, 783 bp, Stenotrophomonas maltophilia
atgagtgcctcgaatctggctggtctcatcttccagctcacccggcgtgaagtcagtggccgctacaagggctcagtgctcggcttgttctggtccttcgtcaatccgctgttgatgctcagcgtatacacgttgttcttctcggtgatcctgaaagttcgctggggcgatcagccacagcgtcaggcggattttgcgatcctgttgttcgtcggcctgatcctccatggattcatcgccgaatgcatcaaccgcgcgccgggattgatcacgggaaacgtcaactacgtcaagaaggtcgtgttcccgatcggcattctgccgatcgtttcctgttcatcggcgctgttccattggttcatcagtctgagcgttctggcgcttgcactggtgttcgttgggaacggtgttccggtcacttttccgttgattctggtagtgatggtccccctggtgctgtatgcgctgggcatcagctggatactggcgtctgtgggcgtttacctgagggacgtcaaccaggtggtgggtgttttctcgcagatcctgctgttcatttcgccagtgttcttcccggtcaccaagattcccgagtacatccgcccgctcttcctggccaatccgcttacgacgatcatcgagcaggcccgtgccgtcgcggtgttcggtcagctgccggactggtggcagctggcggggcagtttgctgccgcgtctgtggtctgcctgctgggaatggtctggttccgtcgcaccaagtgtggattcgctgatgtcctttaa

SEQ ID NO: 506523 - DNA, 606 bp, Stenotrophomonas maltophilia
atgagtcgcctgaagcaatggcttcttcgccagcgtttcttctatgtgcttatggggctgaagtactacctcggcaacaatgtcgttgcccgctttccgatcgaatgtgttcgccggttctatctgacccgcgtgctcaaggtggcgatcggcaaggacacgcacgtcagcatgcgctggttcgtcaccggttatccggtgcgcgcgcacgtcagcatcggtgacaactgcgtgatcaaccgggaggtgtatctggatggccgggtaggcgtggttgttggaaacaacgtcaatgtttccttccagacctgcatcctcagcctgcaccatgaccacaacgcaccgacctttcccgcgattggcggcgtggtcaccatccaggaccatgcctggatcggtgcccgcgccaccttgttgccgggcgtgaccatcggcgaaggtgccgtggttgcggcgggtgcggtcgtggcacgcgacgtggcaccgtatgaggtggtgggtggcgtacccgcccgaaagatcggtgaacgcaaccgggatatccagtacctcaccaggttctcaccgtattttgattcggatatcttcgatgaaaccgcaggttaa

SEQ ID NO: 506524 - DNA, 1248 bp, Stenotrophomonas maltophilia
atgaaaccgcaggttaagaaacaagtcctcgtgttcatgctggcgccttcgctgccggcggtgacggggggcgacatctatgcggtgaacgcagttctgccgttcgccgaggagatcgactaccacctgttctgctacgtcggcggcgacgccgaccgacgcaaagtcgagcagcatcgcgcgctctacgacaaagtgttccggtcggtccatctcgagcctcgtccgaaaatgccgttcgagctgcccaaggtgcagcgagccctgtcgatggcgcggcaggcactgcagggtctgcctttcatcgatgccagctactacagccgcagtgccgttgcggctgcacgtcgcatcgtccgggaacagggcatcgatgcgatcgaggtcaactcgacccatctggcgttcttccgtcgattcttgccacaggtgccgggcatcctgctgagccacaacatcgaagctgacatttttccgttctggatgccggcaggcctgaccggatggaagctgcgtttcatggaatgggttgccagccgaagccggcgagccgcgaaggctgtcgagatcgacaatgccttcgggttctcggcgatgaccttcatctctcgccatgacatgtcgcgggttaccgacaaggtcccgcgctacctcatgccgctgcactttccgttgggtaccacgcgttttgaagacaagccggatgatgtcttccacgtactgtggatgggaggctttggctggtacccgaatgcggaggcggtgacctggtttgccgagaagatccatccgctgctggcaggccagttgcaggagcggaagattgttctgcacttctgcggcggcaatcctccggaggcgctgcaggcattgcatgacggccgcaacgttctcgtgcatggcttcgtcgacgacctgcaatcgctgctggacaaagcgcatctgctgatggtgccactgctgtccggcggcggcatccgcgtcaagatcgtcgaggcgatgtctgccggcatcccggtactcagcaccagcaaggggtgcgagggcatcggcgcgaccgacggcgtggacatcctggtgcgtgatgacgcagaagggtttgcccgtacattgctggaatgcgcgcaggaccgagcgcgactggcagctctgtcggcggcagggcaggatctcatggcacgcgagtattcacagcaggcaagcctggacgccaagcgagccgcctatcggcatgcgggggtgatgtga

SEQ ID NO: 506525 - DNA, 1293 bp, Stenotrophomonas maltophilia
atgcaggcagcagatacgccgttgacggctgcgccggtggtttcggtacgtggtgtcggcaaggtcttccgcattttcgaccgtccggcgcagcgcctgttgcagccggcagcaaaccggctccggcgcctggtgggcatgcagccgcagccggcgcgcgtgttccatgcgttggacgacatcaacttcgacatcgcgccgggcgaaactgttggaatcatcggccgcaatggcagcggcaagtcgacgctgctgcagatcctggtcggtacgttgcaggccaataccggcagcgtgaccgtcaacgggcgggtatcggcgctgctggaactgggcgctggtttcaacccggaattcagcgggcgcgacaacgtctacctggcaggtgccatcatcggcctgggttcggcggacatgacccgcctcatgcctgaaattgaaaaattcgccgatatcggtgaattcatcgaccagcctgtcaagacctactcttcgggcatgttcgtacggctcgcgttcgccgtggcgatccacgtgtcacccgatatcctggttgtggatgaagcgttggcagtgggcgacaccgccttccagaccaagtgccttacccgcattcgcaagatgcagtctgaaggcgtcagcatcatcctggttacccactccaccaataccctgctggaatactgcgaccggggcatctacctgcgtcgcggacgggtcgtgctggacggaccgtgccgcgaggttgtcaagaagtatgccgacgacctggtggacgaagaaggcggagccgtgatctatgcggacgaggcccttgccagcttgcaggacgatggcctgcctgcagacgctgcggcattgccggcaagcgaaatcaccggcgtggagattctcgacctgcaggggcagccaaggacgacgttcggccatggcgaacaagtactggtgaaggtcgccatccatgtacgccggcgtatcgagcagccctgctatggaattcagttgaagagcgtggatgacatcgccctgtgggctggcaccacccagaacatgagcctttcgccgctgccgacggaaccgggcgattatgttttcgactggcagttgacgttgaatgtcaccggcaaccgctatgtgctggcactgggcatcggtgacctcgacacgggcgagtaccaccgtcactcacgcgtgccctacgcgggccatgtggatgtattgcctcagccccattccggtcatggctggcttgctcccgcccctcgcttcaccgcaccagtgagaactgcatga

SEQ ID NO: 506526 - DNA, 3558 bp, Stenotrophomonas maltophilia
atgatgacgcactccaagccagtattcagggccctggtcgtgggtttctatggggcacccaacgtgggcgacgaggtgctgctggacctgctggtccgtcgcatccgcgaactgggcggcgagccggtggttgccagcatcgatccctcgttgacccgccgcatgcatggtgtggatgccgtgcagtttgccaatgtcggggacatcgctcgtgcattgatgcattgcgacgtactggtgatggggggcggcggcatcttccaggaccatcatcccttcaacctcgacgcggtgtacctcccttatgcgaacgacatttccggctatgcacggccgatgctgctcgcgcggcaactgggagtgccgacaatcgtatgggggcagggggttgggccgctgagttcagagggcgcacgcaccctggtgcgcgagttgttccagcatgcggccgccgtatccgtgcgggatgaatcatccaaggcactgctgcgccagatcggcgtggatcgggatatcctcgttgccgccgatccgggatggttgttccgccgctatcacccattgccggcgcaacaggctgcgcatgatgcaggccagccgcagagcaaggtactggcggtggtggtgcgtgaatgggacaaggggcagtggaaaacgtccctggtggaggcgttgcgcactgcagttcctgcaggatggcggatccaatgggtggcgttccaggcccataccgaaggcagtggcgcgacgtccgacctgcccttgatcgaatcgctgcgccagcagctacccgggcgcagcaatgatgaactgatcgcaccggcaacaacggatgcgacctggcagacaatcgccagcgctgacgcggtgctgtccatgcgcctgcatgccagtatccttgccctgctggcgggcaagcccaccgcaggccttgagtacgacgacaagctgtcgcatgcccatgcgatggctggaatgccgtcgattctgaggctgtcgaccgacgatggcccggagcgcttcgtgcaggcgatcgaatcgctggtcaccgaagcctggcggccggatccgcaggtggtggacagcctggaagtgtccgccagcgcgcacctgcagctgctcgacggctgctcctccctgccgccggtgccccttcgcttcgacgcaacctccacagactggttgtcactgtggttgcaacaggcactggtcgagcttgaacagacccggcagcagagccaacgcgcccacgatctactgctgttccgggaccatcagcttgccgagcagacgacgcagaacacaaacctgacgcagcaacttgtcgagaagcaaaagaagatgaatgaagacatggtccgcctggatgcggctcaaggccagctgcaggagaatgcgcaggcattgcagcagatcaggcaggaaagtgcgcaggcactggagcagatcaaggaggaaagtgcgcaggcactgcagcaggtcaaggaggaaagtgcgcagatgctgcagcagatccagcagcagttggcaggcaagcaggcctatattgatgacaaggaggtctacattgcgatcctgctgcagcaaatcgaacaggtgcaggccgagctggcgcgcagccgtcaggagaccgcagatgcgctgaatctctggcgtcgcctgcgtaggttcctgcagttgcttcgccgcgacctggtgcgcctgctggccgcccccttcaagttggcttcggtctggaggcggcacgggttgaaggtcgcactgcaacagatcccgcgacgcatgaagacgctgggtgttcctcagaccgctgccacgcaacagatggcggaaccgccaccgccgatggtgcgaccggttcgccgcgaacgcctgctggtgatcgccaacacgttgaccaccgacggctggcccaaccgggcgatgcacttcgcgaaggcgggcgatcgtgccggcttcttcgtgcgcatcaccgcggtggatggaagtgcctggccggacgacggcagcggcctgccggcgcgtctcgctgtcgatgcgcacgcctggctgcaggaagtgcgtgccgagggtactcgcgttctgcttgccgatgcatcgccggaggcgctgggcctggcccggtcggcacgtgaacgcggtgccgaagtgatcgtcgacctcgctgcactcggtgcggattctctctccgcggaactgcgcgtccttactgatcgcgttgtcaccggaaccccggagcagaaggtcgatggcctgccgtcgcgcttcctgggcgcggctggagacaatgaaatcttcgactcctaccgcagtcatgggctgccgcaggcatatgaggacgggcgacaacatgtcctgttcgttgtcctcggcggagacggcgacgcctggcttgatgccgcgctgaaggcgtcccccgatctcgttttccatgtcacgggaatgaacgtggatggccgcgacagccgccaggtacgtgccctcgattggtcgtggcagccgcagcagatggctccgctgatcgccggcgcgcatgcggttgtcatcgtcggcggggccggggaccgcacgcgccttgccgacctgtcaatggcggcgctgctgctggagaagccggtgtttgtcgatgcgctgccgtcattcgcaccgtcgcccaacctgcatcgggtggatgccgtgcagctgtccgcacagctggccggcgccactgcgtcggaagactacgcattcatcgcccgccacgcctggctgggccatgtcgagcagttgatgcaaccggagtatccgctgtcggtaagcgtggttgtgctgatccacaacaaccgccgcatcattgagcgctgcgtgagcacgttgctggagcacgccggggaatggctgcaggaaatcgtggttgtcgataaccagtccagcgatggcggcgccgaactggttgaatcgctgtacgcagggcatgccaaggtgaagcttgtgcgcaacagtgagaatggatgctcctcgggtcgcaacctgggcgtcaagcattccaccggccgttatattgcgttcttcgactccgaccagtggttgacctctccgtcctgcttcagtgaagccgtgaacatcctggcggccaaccccggtgtcggcaccatcggctggaatgcaggatggttcgacgccacgcgtgatgacctgggtggacccatctccgactaccttcccaatcgcggcatgaacaacgaggcccgcatcaagggataccgcgatgacgtgggtttcctggggaccagctgcatgttcattgcccgtgacctgttcgagcgtctggaaggcttcgatgtgttctacgaccctacgtgcttcgaagacacggacatctgcttccaggtgaagaaggctggttattcggtggcgttccgtgacctggccggtgtccgtcaccagccgcaccagactaccggcgccagcgagggcagcgagcgctacaagcagctgttcaaccgcaacgcagcctacttccgcgacaagtggaaggggtatccggagttcttcgtggacctcaagtcctggcattga

SEQ ID NO: 506527 - DNA, 834 bp, Stenotrophomonas maltophilia
atgtatctgccggtcatacgtcgcaatctgcctggcccctgcatctactacggtcatgacatccatttccgccgcctgcaggcgatgcggcgcatcgacgcaatctcgggccggggcctgctctggcagcggtgggtgatgagcagggtcgagcgacgcttgtggcagtacgctgatgtggtgctctatccctcccaggaggaagcagacgaggtaaatgcattccgtcgtgcgcgcgcactggccggtaatgccgaaatgttcccgctgtggactctggatggtggcgtctgcgttggggcgcctggtggtcggcaaggacttctgtttgttggcagctacgcacacgcgccgaatgtggatggcctggattggttcctgcgggaagtgcagcccaagctgaagctgcacgcggaacaacgcacgctgaccatcgtgggttccggtatggaggcttacgtgccgccgccgtccacgacgcaggtccgcattctggggcgcgttgacgatgcaaccctggatgcgtgctatggccacgcccgcgtagtgatcgcaccgctgcgtttcggcgggggagtcaagggcaaggttctcgaagcgatcggcaagggagttccctgcgtgatgtcgaccgctggtgcccagggactggatggtctggaagccttcctgcccgtcagcgatgatccgcaggtgatcatttccgccatccagcagctggtagaggatgacgctgcctgggtggcggcagcgtcaggggcgtcagcttatcttcgccaacgttacgacgccggacggttccgcgagcgcctgcggcaggtgctgggtgcgtga

SEQ ID NO: 506528 - DNA, 1416 bp, Stenotrophomonas maltophilia
atgtaccacaaggtcgcgcttgttgcgctgcatgacggctggaatccttggcgattcccggagtttgccgactggctcaagacgcagtccgccttggaatacagcgacacggtgtggagcagcaacatagctgcttcctggatcagccactaccctaatatctcgtggctttttggtgccgcgctgatggactatggcttcgggtgggagtcgaccaaggcgatcggcaccatgatggccgtcgcgatcctcttccgttcattttccgtgttcagacagtggatcggacgagacgcggcaagcgccatactggcggtatgcgtggtgctctgccaaccgctgctggcgcagattacgacaaattatgtcgatggcatcacctacgcgctgttcgttttgatcatgctcgcgttgctggatcaagaacgaggtgcggcaaacaggatcacagtctggtgcagcctgattttgctggccggcctgaagttcaccggcgccctctatggtgcgctcttggcggttcccttccttttcgtctatcgcccacggttccgggaaatgctgctgtggggcgccatcggcctgaccacgctttcgcacccatacctcaatcacgtcgtttcgggtcttccgatcggctatccggtcaccaccggcaatcagatcctggcggggcaggctgagcaggcaatgcttgatcaatcacgcccccaagcgctgctgacctcgctgttctcgaaggtgtcgaacgatttcgccatgcctggactcaagattccagggagtgtccgctctcgtgaaatcgccatgtccggggtacctgatactcgctattcaggcttcggtccgctgttctcattggcggctctgctgggattagtggcgggtgttgccgcagccgtgcgggcctaccggatgaacggttggcgtgatcctacatggaagttgcatgcatgcatcggcttcttgctggtactgaccctgatccacgccgctccttggtgggcacgttatgtaccgttcctccagttcgccctggttgtcgcactactggccggcatacggaccggtccctcttgggcgcggggagtggcggttgccggtgcattcattcttgttgtcaacggcgcgatggtcctgatgggcgcgggcagctacatcaatcgcgcgtcgattgaaggaggcgtcgccgtcgaccgccagatcattcatcgtcatctccgtggcgagagcgttgtagtccgtgcacccgccttcatgggattccccgccatttaccacgcccgggaggttcttcatatggactcaatcgattatcaggcggtcagtctggataagcttgactgtgatgggcgcgaggagctgggcacatggattgcgctggtgaagttctgtcggggggaaatacagccttga

SEQ ID NO: 506529 - DNA, 378 bp, Stenotrophomonas maltophilia
atgtacttcacctacatacccacgatcctgctgtctgtggcactgaacgcagctgcgcaattgctgctccgccaaggcatgccgcaggttgcattgaccacgaacgaaggcggattggcactgttctccagcgcactgaagattgtgatcaatccttgggtgttctcgggacttgtctgtttcgccggtagtctcgtggtctggatgtacgtactttccaaggtacaggtcagcttcgcctaccccttcaacagcgtcggttacgtgatcgtggttgctgccgcgtactttgtcttccgggaacccatcagcgccatgaagctcctgggcgtgggcttgatctgtcttggtgtttttctcgtcaccaagggcagctga

SEQ ID NO: 506530 - DNA, 1428 bp, Stenotrophomonas maltophilia
atgcaacgaactcatcgcgcactctgcgtggatctggatggcactctgctgcgatcggatctgctctacgaatccctgctggcgttactggcgcagaatccactgtacatcttcctcctgcctctgtggctgttgcgaggcaaggccgcactcaagagcgagattgcatcgcgggtcagcctggccatcgaacatctgccctatgatgaccgcgtgcttgaattgctgcggacgaccgagcagcgaccgcgtgtgctttgctccgcgtcggatcggcgcctggtcgatgccattgcggaccacctgggtgtgttcgatgaggtaatggcaagcgacggcaaccgcaatctggccggcgaccacaaggccgaagcgctcaatgcccgattccggcctggacagtacgactatatgggcaacgccaacgtcgatctgaaggtgtggaagcacgccggtggcgcctacgttgtaaatgcaggggccgcgcttgctgcagcggcgggccagcggacgcgggtccacgcgcactggactgcccacggcggcggactgcgcacctggatcaaggcactgcggctctaccaatgggcgaagaatctgctggtactggttcctctgctcaccgcacatcgactcttcgaattgcattcggtgatcgatgcatttctggcgttcatcgcatttgggctttgtgcttccggcgtctatctactcaatgacctgcttgacctggccccggatcgacaacatgcacgaaagcgcaagcgtccgtttgcagcaggcaacctgcccctgctgcacggcctgcttgccgctcccgcgctcacagttctgggcttcggtctggcgttgtggaccagtccggctttcgctctggtacttgcgatctactacgtcatgacattgggctactcgttcgtgctcaagcgcatcgtcatgatcgatgtggtaatgctagcggggctctacaccgtccgcatcatcggcggagcggtcgcgatcgataccgaactatcgttctggctgctcgcgttctcaatgttcatcttcctcagcttggccctgctcaagcgctacaccgaactgggggcaatgaagaacagcggcaagcagaaggtcgttggccgcggctacgatgtggccgacctgtcattgatccagtcactgggggcagcggccgggtacatcggcattcttgtgttcgcgctctacatcaacagccccgaaagcctagagcgctaccacaacccacgcatactctggttgctttgtcccgtactgctttattggataagtcgtgtatggatcattgcccatcgtggccagatgcatgacgatccaatcgtattcgctgcgcgagacggcgtcagccgaattgtggcactggcctccatcatcatcatcggcgtggctacggtcgcctggtaa

SEQ ID NO: 506531 - DNA, 996 bp, Stenotrophomonas maltophilia
atggacagcaagatcactctgcagtcgcttcaggcgttaagaggcgtaggagccgtggccgtggtcgtgttccatgcgctgtcgctgcatccctttttcaatttccgggctggtgcggcgggcgttgatctgttcttcgtgatcagcggagtcgtgatgtacctctccctgaggaacgacgcatcgccctgggagttcctgaagcgccgcttcattcgcgtagttccaatgtactggatcgcgactaccttggccatcgcctatttctatgcgcgatatccgtacatgactccgtcgacggagcacatcgttcggtcgtatatattcgccccgccgccaccgggctaccagatgcctttgctctaccctggttggacgctgaactatgaggtcttcttctacgcgattctaggcacgttgctggtcaccaagcggctcgcggccgcgctcacaatctgtgtgattgtcgccttgggctcgctgacgaatgtcgtaccggccatcactggcgtttattacttccaccagatcatcttggagtttgctgcgggcatgcttattggcatggcaataaggcacggctaccggccgaagaagctggaaggattcatttacctggcactatccgtcatcctgttcgcagttcataaccactacaagccagaaggcgttctggcatggggcgttccgagtgccttgatggttgttggtgcactggcattcgaatcatccaaagcagtgaccaacaggatctgccaactcattggcagcgccagctactccatctatcttttccacgcgcttgcgatctggttggtcgattggttctggcatactcctcgcggcgtgagcgcagtacttttcgctatcgcactatcagtggtatggggtgtggttgcacatttcctgatggaaaaaccattactacgcctgatgctgagctggaatcgtggtggcaggactgccgccaccccgtcccgggccagcggctcctga

SEQ ID NO: 506532 - DNA, 1893 bp, Stenotrophomonas maltophilia
atgagcctgcgccagtcgctgttcccgttgctgcgcgccgtgttccgggccttgccgttgccgcaggcgcagcgcgaccggttgcgcacccggctgttggcacggcatggcgactgggtgccgccgccccccaaggggcagcaggatgaggggggcgcgcgcgccagtgcccagctgcgctggcgtgccgatgaaccggcgatcggccacgtgccatggcgtgagggagcattgccgtcacccatgccggcgacgctggtcgctttctacctgccgcagttccataccttcccggagaacgacgcctggtggggcaagggctttaccgagtggcgcaacgtcacccgcgccctgccgcagttcgagggtcacatccaaccccgcctgccggccgacctcggcttttatgacctgcgcaacccgcaggtgatgcgtgaccaggcacgcttggctgcggagtacggcatcggcgcattctgcttctactactattggttcagcggccgcaccctgatggaggacccgctgcgtcaatggctggccgatgacagcatcgacctgccgttctgcctgtgctgggccaacgagaactgggcacgacgctgggacggccgcgacgacgacatcctgatcggccagcagcacagcgcagaggacgatctggccttcatcgcacatgtcgcgccctacctgcgcgaccgccgtgcattgaaggtcgagggtcggccgatgctgctggtctatcgcccgaacctgctgcccgacgcccgggcgactgccgagcgctggcgccgctggtgccgcgacaacggcgtgggcgagatccacctggcctacgtccaaggcttcgagcgaccggatccgcgcgatatcggctttgatgccgccgtcgaattcccgccgaacatgagtaacccgcgctcgttgtcggcacagcagtggctgctcaatcctgccttcaatggcgatgtacgcgactggcgcgaactggctgcagaaatcgcagcgcggccgcttccggattatccgctctatcccggcgtgaacccgggctgggacaacgaggcgcgtcgttccggccgcggccgcgtgtacctgcacgcctcaccccgtggctaccgcgactggttgcgcaccacgatccatgaacgcctggccctggcgcctgcgcgccaacgcatggtcttcatcaatgcctggaacgaatgggccgaaggcgcggtgctggaaccggatgcccggcttgggcatgcctggcttgacgcgacgcgccaagcgctgtccccggcttcgcccgccggccccctgcgggcctgcctgctgattctcattgatgatcccgggctgatcgctacagcttgcgaggccgccagcggcctgggcgtgagctaccgtgttttcattccaatggcgcagcgccctcatgacgctgcggtcgatatcatcggccatgcgggcaatgccttgtccagcatcgtgcaggtcctggaggcttttggtccggatccatcgttgctggcctgctggctggacctccgcggaagcggcgaggcaagaccgcagctaccaggaacggcggatctcgacgctgtgcttcaacagttcgatgagcaacctgcgctgggcatgttcgcggcatccactccggaggccgtcgccgttacacgccgtcatctccgctgggcggcgcggctggggatggccgacacccctacgccgcagacagcaggcacgatgtggctgcgggcgtcggcgttgcggtcactgctggatgcgcactgctatcccagtgagctggacaacgacgatgcacttgatccggtcatgcagttgctgccggaccttgttgccaacgccggctacgtcgtcggaggcccacaacgccaaccctga

SEQ ID NO: 506533 - DNA, 2283 bp, Stenotrophomonas maltophilia
atgacgcctgaatcaattgcgaatgacaagagtccatcaataacactttcagcaattcttgagcgcctccaccaggtcgggccagacacgcaagagaagctggaagagattagtctatatcgcgagtttcacgaggctgtcttcaaggatttcgaagaagacataattgcatcgatggggctgttctataagcttggggagcccaacagcctgtactcctctctgatgtcacgtatgggagaagcgaacagagtgcagggcaatcaggttctgactcctgttcaagccagtcttgtttctgcaatacggaaccataagctggtttcaatttcagcgcctaccagtgccggaaagtcctactcaatccgagacttcatatctcagggggatggcgacgcgataattgtcgtgccgtcacgcgccctaatagcagagtacgttggtgccttacgcgaacacttcgctcgcgataagaaggtcatgatcatgcccttcgttgattcggtgttcaagtcaagagcgccgcggcgaatattcgtacttactcctgagcgagcaagggatatattcgatcctttgcttgatctagatattagggtcttctttttcgacgaggcgcaggtctcagatgaggggatgaggggggtggtcttcgaccatctggttcgccgtgtgtcaaagtactttccttctgcaaggctgatatttgcacatcctttcgtgaagaacccggaggcgcaattcaaaaagcacggattcctaagtggtaacgcgttctcaaaatcttacgaacagggtgcggtcgggaaagtattcattcaaaggcatgggaatggatctgattactactttagccccttctcaaagcatggggagcgccttcgcgattgtgttaagttcgaaggggatttctcgaagttcgcgctccattctggaaaatctatactggcttacgtaacaaaggggtcaatatacaatggaaaattcattgtagagttcgaggcttacgtggattcccttcccgttttaacggatgggaaggcgatttcaattgttgatagcgtcaggaagttggttggggctgatcaggtaaatcatcgatcaagaatgatagagcttctccaaaagggcgttgttattcatcatggatcagtcccgctagaagttagatttcttctcgaggaatacattagattgggttattgcaggatatgcttcgcgaccagtacgctcgcgcaaggcgtaaatatgcccttcgacgtggtgtggctgaacagtatgaaaattcatgctgaaaatgaagcgaagcgatctctggcgttcaaaaatctaattggtagagccgggcgattgtcatcatcgggtagttttgactacggatacgtttacaccaaaagcgcaaaacttttaatcaagaggctggaggatgagtactcattgtctgatcagtctttaattgagtccttagacgaagatcgctctagtgaggatcgggaggtaatagaggcaatacgaacagatcagttcaacgatgacttgcatattccgcagactagagctgatcgtctctccggagatgctgcgcttggagcaatgcgggccgttcttgaaattctctacgtcgatggagttcgcgtaagagatgcgcttaggggggcggataagcgttccgaaagagcgcaggttgaggcaagtttaaggcttatttatgaagcgtatatggggcggccattgcttgaaggagagtactccgtttttcggcaagcaattttcattctgattcagtctttctctgggagaactttcagagagatagttggcatgcggttcagttcgatatcgaggcgcgatgagaaagaagcgccctatgccgaattttctcagcccgccactatcctgccagattccaatctccacaaggcgttttcgctttttgaaaggaatactcccaaggagaaggttagttatgatgttgtaatgtttgacacgtatgactacttggacaaagtaatatcattttgtctgtttgatgtttttgttgctgcggctcgaatttattacagcagcacaaaggatgtcgcggctcttaagttcatggagcttattagattcgggacgaatgatgacgtgaatgtcatgttgatgaggtatgggtttctgcccgatcagattgaggagctcctgccgcatgttgttaaggttgacgagaatgagattgtcttcaggcccagcgttgagggcgttagtcaaaaactaagatcagtactgacctggtacgtgtaa

SEQ ID NO: 506534 - DNA, 720 bp, Stenotrophomonas maltophilia
atgtccgctagcgtgagcttcaaagatgatgattggggatgcgagcacatctcaatgattggtgatgatgcgctgtctattatctcttgcaaagtctccgtaacagatctcactaagctatccgcaaaactcactgagacggttgtagacacctcgtggatgtcggaccttgatcaggggactagacgggcatatcagaagaccgttgcagagacgtctcgggtgctttgcgaaatattcaaaaaagtgcccagctcacccgtggcagaggacttcggggagcttatggtttcgattgggtccgcgcgggctctgaagtcgctattgggacacacggaagttcctctggcggagctctggaaaccacagctgaagcagaatgaaggcttcgactttcacactgtctgccagaatgggttccttaactttggagaagcaaagtactcgggggtgtcctcgccacacggcttggcgatttcccaggcagccaattttgttgaggcagagaagcacttgagagattatgttcatctttcaagaatatgccccggtccggcggcgcttcttaatgacgacaaatttggtgtggtcgcggcattctctcttctaggcaaaaatcatgaagtcataatggggaacgctctgagatctgcgatcgatttttctaagtcgagagggattaagcagattttcctagtgggggtctccaatgacgcctga

SEQ ID NO: 506535 - DNA, 480 bp, Stenotrophomonas maltophilia
atgattgatcgtcgttaccggaagaagatgcaccgctactgggcgcgggaagaatccaaggcggatgcgatcctcgaccgagtactggaatcggagtggttcgactactggcatacccaccttgattggaaaggccggggcaatcggcacccgaccgatcgggcagaagtggctggcgcgttgctgaggctcctgcagcgggttgtgtccgcgtgcagggacgatgtccagtgctgggtgacgctggcagcggacacgggcaacagcgcgctgttcctgcattcgcgcaatccgcagggctccacgtggccacacccattcgagggcacgcgctgggatgtcgaaatgccggagtggctggcgctgcagctgccaggaggcatgcaggccgggtgctggggtgagggtgagcaccagatatggatagtgcgagagcgcgcgtcaggaaacgcaaacgatacgcaggagaggctggcatga

SEQ ID NO: 506536 - DNA, 441 bp, Stenotrophomonas maltophilia
atgacgctcacccgcaagggcaagcattggtatggcagcgaggacgacgacatccgcgcggtcatccagagcttcagtgaccgcaatggttacctcgcgaccgactaccgtgcttcggtctgcgtctgtggatcgaccctgttccgattgttcgatgacgaggaggcgggcgttgcgcgccgcgactgcgtgagctgtgggaagtcgcacctgatgggtgacagcgcagagtatgttgatgaggccgaactggaagcacactggtgtctgtgcgggaatgagtctctggcaatccattctggtgtcgcgctgtaccccgactcgcgcgatgtgcgctggctgtacatcggctgccgttgcccgcactgcctgttggtgggggtgtatgccgagtggaaatgcgaggcgggggatgcggagacgtttctagcccgcgtgtag

SEQ ID NO: 506537 - DNA, 756 bp, Stenotrophomonas maltophilia
atgccactatgtggccgagctgcattgatggaagggggatacatggagcgtacgaaaaagacactgacgatggccgatgttgctggatggggttcggcgctcgtcacctttggattgattcaaggcgccttctatctgaaggcgtactggggccatttcggactggatccctttcagtttgtcgccgtaagcgagcttgcgctggcgggccttgcgagcattggcatggtgttgttgttcctgccggttgcgttgctacttggtggctggatcgaaggaaaggtgacggcgagcaagtctaaatccagcctgctggcgtggttggcgatggtgctttgtcttgtgggtctggtggcagtgctttggtggtcgaacggatggtcccttctgataggtgcagcctcggtgggcatatatgcaatagctgtgcgcctgtcaccagtgctcccaaccgccgtaaaggactcgccgtggctgatctatgctctcgtaatgcttgtctacgtgtcgatttcttcgagttggcttggatcgcggcgcgccaaggagatcactgccagcggaaacccgtccacggtgagtgtgacaattgatggcaaagtacaaggcggcctgggacttgcgggtcgcttaggtgatagttacgtgctgtgggagccagcggggaaagttgtgcttcttgtgcctgcggaggacgtcaataagctggagatcgcgcaaaagcgtgtgatgcctgtcaagtcaacccaatcgtga

SEQ ID NO: 506538 - DNA, 1155 bp, Stenotrophomonas maltophilia
atgaagcaagaggttgcgggactaataaaagttcaaggggacggcgtcccccaaatctttgaatctaacgttagccaagccgcagatgacgaagagctttacctcgtccaggcctggattgacggtaataacctgcagcagtacgtgacagcgcccatgcccatcgacgaatcgctggaaattgcactgtcactagcgcgcattgttgaaagatgtcatgccaatggcgtcctgcatcgcgacatcaagccagagaacattattgttgacacagcagggaagctgcatctggtcgacttcggcatcgcctggctccccctcgaagatcgcgaggacgggtggcatacgcgagcagggcaggaactcgggaatcgctttgtgcgcctgccggagatgaccgctggccagctgcgcaatgaccccagatcggacgttaccttcgtggttgcaatacttttctaccttctgacaaacgaatacccgcgaacgttgtcgttcggcgggggcggcgaaccaccccataagcgcctgcgcaattcttttccgactacaactaaagatgaccccaggatggataggctaaccagcatctttgatgtcggtttccagcttgcgccaaatctgcgcttccaatcaatcgacaatctaatcgagcgcattgatgagattcaacaccctcgccagaccgctcaacccgtcgacatggcggaatcggtggcgcgatatcaggaaatgatgagtgagcacgagacggcacagcgccacatcgtcctcatgtccatgcgaggggccgctgttgcctttgagcagcgtattcgagagcttagcgaatcacagcaactcgttccgtcgatgatggcgggcagcccgcttcgagagaacgactcttgggttacgtccgtgacttttacacacgccacaggggggcaggaagtgtcatcacgacacgtgatacagatggacgaggcggatatcgtctgcacattcagcgttgacggcgagcgtagcgattactaccaagggcacgcagtagacaccatcaggttgaacgaagaggtgcgccaccacgcagacattttcttcgccctggtgctaggcgcgttcgtacggaaggtggctgcccagcgtgcattcatgaatctacttgagtactga

SEQ ID NO: 506539 - DNA, 822 bp, Stenotrophomonas maltophilia
atgagccctcgcctttcatttgcggactacagcggctatgtctcagccctcgcaagtagcgtcccgacgacgattgagcgcctgagtgatatcaccagcgggcgtgtagcgccatccgtagaggatctctctatcggttcagcgcgcagtgtaacggctgccgtgatcttcttcgacatccgcggcttcactagaaggacgtcctcgtcgcaaattgatgagctaaagaagactcttttcatgctgaactgcgtgattccttccatgatgcgcgtccttttcaggcacggcgcttacgttgagaagaatactggagatggcttgatggcggtgttgggcgttgctgaaaacgctgcctcgatcgcatctaaggcgctttccgcatgtagcgaaatgttgttcgtgctggaggatgttgtgaatccagtcctgaagcagcacgggatcgagcgagtggacgctcgagtcggtgtcgatctaggcgacattcttctcgcccgtattggggtgccgcgaggggctgctagtcacgatcgtagctcactcacagcagtggggcccgcggcaaatattgcatgcaagctgcagggcttggccggcaccaatgaaatattctgcggggaccgtcttcgcgcaggagaatcattgctgggtcaggcattctttgtcgatgttacacccccggactggacatgggtctatggcggcggcggacgctactcatgttggaggtatacccgtaaaacggtgagacctacttcaccgacaatattgggcggagggcttctaagaaattttgtgccgacggatgggccacggtaa

SEQ ID NO: 506540 - DNA, 738 bp, Stenotrophomonas maltophilia
atggcgactgatgatggcggaggctgtccctccgggcttcggccacccggggagtctcgtccacggcgaaatctagcgtcatctaccttgccgatgccctcagaatccgcagagaacggcagttgggcatgtgtgcgcgtccaatgtggtctacatgactcgtgggccgaggtcacgccagcgcgtgtaaggcgctctcgtgcggcgacgcccctacaccccaggagacgcggctgcagcccggtttggcgtaatctttccaaaatttcttttggggtgcccatggacaggcggaattttccatcgacggtaaacggatatctgaatcaatacgtccagttgatggatgtgaaggcaacggcggtggcagctgcggcgcttgtgcttatcgggttgggtctttccgatcaggcaaagagcgccgatccaatcctgcggatcgtgggggtttcattcgctggggtggcatcgttctacgcgctgcatacagtgcttcccagaacgcctcatagcggaaatgggcatatcttctggactgatgtctcgggctttaagagcgcagaggactactggaaatcagttgagaaattgacagacgaagacatcgggcgggagtacgcgcgccagaattttgaggtgagtcggattctcatcaggaagacgctccatgttcgacgagcgatagtctggttcggagccgcctgcgcttcaattgccctcgcagttgcggtgaactga

SEQ ID NO: 506541 - DNA, 711 bp, Stenotrophomonas maltophilia
atggcaaggcggccggaacgccgcaggagttcgaggtcaagtaggtcctgccgacctctctcccggcagggctcacgatggacgcagccgcgaggctgcgtccttttttattgggcgacgcccgctttagggaggctagcggggtacgctgaacggaacacggacaggtcgggggacagcatgctcagctggattgcgctcacactcgcaatgggccccgcgaatctctggagctacggctgcgaccactttctgtacggtgcctgcctgcgcgtgccgacaggcatgtccgtgacctacgaggctcctgttgactttggtctgcaccgcatcaggcatgacggtagggaagtcgccttgatctacgagggcgatgcccccgaaaagcctgcgtcaggaagcacgccggatctgcgcttcacggacggcggatatgtcgtgtcggggtatgcaagggcggaaggaggttccacccggtacgacgtctacgttcgacccggatcgtctggcgccggttcgctgcacatccgaggctctgcagcgacggctgatgaactcgccagcctggccgccgtcgttgggggattccgcatctgcaacttccagcaaagcaagcgctcgcagacattgacctgtccaaggcgtgccgagtggggcccgcgattgtcggagtgggtcacgcgtgcctcaatgagcgggaagtcgaactag

SEQ ID NO: 506542 - DNA, 915 bp, Stenotrophomonas maltophilia; identical to SEQ ID NO: 506470

SEQ ID NO: 506543 - DNA, 780 bp, Stenotrophomonas maltophilia
atgaacggaatgctgcacatcttgcgcaccatgttccccgacaagccgctcttgtcggtcgaagacgtggcgcgcgtgctcaaccgaacgggggccggcggctacgagcaaacccgcgagcaactggcggccggcgtcatcgttcccggcctgcgcaaactgggcggtagttggctggtgccggtgaccgcgctcgccgaggcgctcgacgggctcacagacaccgacgcggccgggcaggccaccccaaaggcccacccagcccggcacacggtcacccgtgccaaccccatcgtgccgcgcaagggggggcgggttcctgaccgggccaagcacatggcactggccgacatgacgtccctggcttttgcgttggccaccttcgatgcagcggagttttggggcgaggtgctggccgtgctggggcagcccttgccgcgccctgcgctgaccgcaacgcccgccgactgcttcgccgagcttcagccctgggtgcggcagaacgggcgtttggtgggccatgtgcaactgctgcccatcgaggagcgcgacagggccctggcagagggcgaaatctgggaggcccccctggccgaggcgctgctggagccttggaccagcgttgcggcgcgcgagccattcgatgacgcgatggaggcggcacaatccgcgttccaggcggcgtggagggaggtccgcaaccaagcccgtgctcaaggcttggacgacggtctgccgcccgcggcggacccaatcactcgcacgccgttccgcttctaa

SEQ ID NO: 506544 - DNA, 972 bp, Stenotrophomonas maltophilia
atgtcgtttgattcgaaagcaaagaccgaagcggcgctgatccgtcgctatgccgaccgctacgggcacgtggacgacacgttcgcgggcggttggggggtaacctggggaaagttgctgcgcgctctcgacaaagagctggccgatgagaagaagcaacgccaggaactggcggctggcaagcgggaggcggtgtggatggacacatggaccgccgccgaggccgcgggcctgctgaacatgacttacgaagccttcaacgcgtgggctcgcaaggtgggcgtggtcgtggacaaaccggagcaggcacgcacccatgccgccatatcgctggtggatcttattgacgccgctgaggacgagaaaaaccgtccgggcggccgcccgtggcgggaagcgagggaggcaggccatctcttgggggccacgcgaacgctgcccgaaggcttggcgacgtttcgagagcagctcaatggcgacctcctgctcacgattggggtcgatgagcgaggcgagcgtgtggtggcgtcggtaaggccaatcgaaacacggggcgcgaaggaccatgttcgtatgttcttccgaagcaagagcatcgctgaggttgatcaacacaactacttcaaactcgaggtcgagaagtgcggactggccgaagcgttcggcatgccttgggcacagcccgcactgaaagacgcgttgctccaatgccacaaggactggctgggtgccgtttccgacttcatggcgtgggaggaatccctggccatcaaagacgcatcggaagcccgggctgcattcgatgccgaagaggaccagcaggccgcgccagccatggtgctgaaagcgcgcgaagcagagcgactgaaggacgccgagatggcactcacggcccgcaacgaagcgagggcggagctgctggacgtctcgcttcccgcccctgccccgagcagaaagggaacgcccttctag

SEQ ID NO: 506545 - DNA, 249 bp, Stenotrophomonas maltophilia
atgcaaccgctcatcctctcgctcgacccctcgctctctagccagttgtctaacgtgacctcgcaggccctcgccgatgctctggccgacgtcctgccccacgcgttgggcctgcttgccgccgacaccagctcgtcggtcatcgtccccaaccgcgacctgcgcggcctccaccccgcccaggtgctcaccctgcagctggcaacgctggacagcttcttggacgtccaagacgacgctaacggctaa

SEQ ID NO: 506546 - DNA, 672 bp, Stenotrophomonas maltophilia
atgaatgctgttgctcgccccctccctgtttcgaccaagccgaagaagcccgcgaagaagcccaagcagaccacgctttcgctcgccgtcgccaacaacgttggttacgaccgggcaccggaaggcatcacgaccgaaacctggctcaccccgccggagatcgtccacggcctgggtccgtttgacctggatccctgcaccccgcagcagggcatgccctggcgcactgccacccggatgctgaagcccagtgacgacgggctcaggacgccctggccgaagtcggcgtttgtgtggatgaatccgccctacggcgggcacaagaactgcccgaccagccagcaccgctggatggagaaggccgcagagcatggcaacgggattgcccttgtgctggcgcggatggaaacgagctggatgcaggactcagtgctcaaccaccccaacgtttcagcggtggtgttcacgaaggggcgtctgtcgttctgccgcccggatggaaccccgggcacgagttgcccggcgggatcggtgttcatcggctacggtgctgcagccgcgcgcaggctcaagcgggcagtggcggaggggctgattggtggaacctactttgacatggcccgcgtgggccgggggttgggcgctgacgtgggggcggccaacgatgaatga

SEQ ID NO: 506547 - DNA, 1029 bp, Stenotrophomonas maltophilia
atgttcaactacagcaagcacaccgacgagcgcacccagcaaatccgcgactattcgcgggaacacggccaacttccttggcgagcagggtggaacgaccccaacgcggcgccaggcctcctggccggtgcttggaacccgaccactgggcgcagctatcgcggcatgaacacgatctcgttgttggccgagcggctcaataagggctacgacgattcgcgctggatgacttacaagcaagcgttgtcggtgggtggacaggtccgcagaggggaacgttctaccaccatcattttttgggatttctccaaggtctccaaggtgggaggcgacagtccccagccgcaggaaggcgagggcttggaggacgagcagaagtccaatcgccccatcccaaggccgggcttcgtcttcaacgcggcgcagattgacggactgccgcccgcgcccacgctggtcatgccggagagcattcgcaacatccgggtgcgcgagctgctggagaggcacgcaccgaaggtccaccacgacggcggcaaccgggcgttctacatgccactcaccgatagcatccatctcccgaagcgatctgcctttgaagatgagcagacctttgtggcgaccctgatgcatgagctctcccattggaccggaagccagcagcgtttggcgcgggatctgaccggcaagttcggcagcgagagctatgcgcgcgaggagttggtggcggagttgagctcggtcctgatccaggaccgccttggggtctcaccgggaaaggcccacttcgagaatcacgtggcctatcttcagcactgggaaaagctgctcaaggacgacagcaaggcgctgttccgggccgcggcccaggcggagcgggtcgttggcttcctaggcattcccgaatacgaataccccatgttgccggtcatccgcagagagcatgaatcaggtcacggtcaggatgcgcggaagactgaaaccggccgaaggtctccatcgcgacgcaaggaacgccaggttgcttaa

SEQ ID NO: 506548 - DNA, 303 bp, Stenotrophomonas maltophilia
atggcaatctatattatttttgttccggttggggtctttgtctgggacggcatgggctctttgccccgagaactttttgagcttccttttgacaaagttgctctcatttcgggggatacagcgagacagatcctagatggcatggaatgttccggggttgcaggagcattgccgaatgacgcccggttgcacgcgaaggtcgagctcccaatggcttggaatctgaagcccagccagtggggccagcctctcaccttccaggcgcgcccgctgaggagtcgcgcgggaggccgcccatggtga

SEQ ID NO: 506549 - DNA, 1470 bp, Stenotrophomonas maltophilia
atgacagactcgcgtgcgactgaagcagtaaagaactggatcaatggcagttggaacgaagggggggcgatcaggcaagcggtcagtccttcgacgggccagccgctcgggagctatttggatatcggccaggacgaagctcggcttgccatcgaggctgcacgcacggcctttgatacatccaactggccaacggagcgatcattgcgttcccgcgccttgcatgagttagccgacgaggtcgccaagcgcgcaaaaacaatggcggtccgcctctctcaggaaggcggcaagctgttggctcagaccgagtgggagctctcattggcgtcggagtggctccggtatggcgcggcaaccgcgctgctccaaaccggtggccgagctcttgaagcggcgccaggggtgcacttcttctccgatcctgagccgcttggcgttgttggcgtcatttcgccttggaactccccgatcattctctccgtgcgagcgatcgctccggcgttggcggcggggtgcacggtggtgctcaagctgcctcatcagacggcactcaccaacgcgctgttcgccgaggcggtcgcagccgttccatcgctgccgcctggcgtgctcaatgtcatcaccgagacaggaagcattggcgcagccatgctggtggactctcctcaagtggacatgatcagctataccgggagcacaaacgttggacggaccatcgccgccaacggcgcgaagacgctgaagcggctgaacctggagcttggcggaaaagcaccgttggtggtgttcgacgatgccaaccttgcggccgttgtcccacaaatcgtcatggccctcgtcgcgatgaatggccagttctgttgcacaggttcccgtgtcttggttcagcggacggtggcagaccggctgcgagctgccctggttgaggcctatggcaacgttcggctcggcgagagcgaggatccacaggcacaactcggtccgttgattgacaaggccagcgtcgcacgcgtggacgcggtggttgccgaagcagcgtcttatgcgaacgttctcgttcgcggcggcccaatcgaagagggaccgttggctgccggcgcgttctaccgtccaagtttgatcgaggtcgaagacttgaacgcttacgtcgttcagaacgaggtgtttggacctgtccagacgttcgagatttttgaggacgaagccgacgccattgcgcgcgcaaatgccaccgagtttggcctcgccgcgtcggtgttctcggaagacgcatcgcgttgccgacgagttggcaaggccattcgggctggccatatttggatgaattgttggggcgtcatgtccgagcagtttgaacagagcgggttcaagcaaagcggcatcggtgtgctttgcgggccgcgcgcgattgagcagttccaggaaatcaaggtatacgccaccgccgccctgccgtccggttcttga

SEQ ID NO: 506550 - DNA, 627 bp, Stenotrophomonas maltophilia
atgaatgaagggaaaggcaggccgcagctcggtcgccctgtgaatgagggggcgcgagaaaaacgcttgacgcaaattttggatggagcgcgggagtctttcatacgcaagggcttccacgcttcctccctttccgacataagcgccaatgctaaggtaagtgttgctaacatctaccagtatttttcgtgcaaagaagcccttatcaccgccctgatcgagctcgatctgcagcgccatcaggccctgattgcacggttttggagctccgattttagtcgacaggccgtcgaggagcttttggcagacctcttcctgaagcccgagggacatgcgatagcagttctgcgcgccgaaatcgcgagcgaaggtgcacgcaatgcccatgtggccggacttcttagaagccacgaattgggcttgatggaaatgttgcgggaaagagttcgacaggctcaggaaagggggcaaatagccagcgccctggactcagaggtcgttgccgatcgcctctcgcttgtctttgagggaatcatgaggttgtatctgttctccccggacgatggtgaagagctaatagacaagtattaccgccaattcgcggacgcccttcacgtggctcagtga

SEQ ID NO: 506551 - DNA, 441 bp, Stenotrophomonas maltophilia
gtgataaacagacagttcacattcaatcgcggcagttggcatgccggccacaatgtggtggggccgttggacggcgaaaacgacatggccggcttaacgcgggccgggtattcacccaacggtgcttactatggcggtgagcacggcctgcggctggaaatatttgagaactcagtagatggctcgttcttcgccttcatttcgcccaccggaaggacgacggtggaggtgctcatccccgacttcgagagcttcatgctcttcattaaggattacggaggctcatttgccgcaggggggtccgaggcgacccaaaaagtggttatggaaacgcttgcgaagctcttcggcgcgctccatggccacgactggagtgaagcctgccagctttgtgaccctgtaggatggcgacgctggaacggtatgcaggatagcggttaa

SEQ ID NO: 506552 - DNA, 708 bp, Stenotrophomonas maltophilia
ttgggtgggctggacgggatcccggacgagaccacgatcctcaacttccgacgtctgttggagatccatgatctggcgagcaagctgctgggccgggtcaacatgcacttgtcgaacaagggattgagtctgcgcggcgggacgatcgtcgatgccacgatcatcgccgcgccaagctcgaccagaaacgcccaaggcaagcgtgacccggacatgcatcagaccaggaagggcaaccagtggtatttcgggatgaaggcgcacatcggcgtggacgatgcctctggcctggtgcaccacgtgcaatgcacggcggccaaagtggctgacatcacccagacccagaagctgctgcatggcgatgaggacacggtgtgtggcgacagcggctataccggtgcggacaagcgcatcgaactgagccagagcaaggccgggtttctgatcgcggccaagccttcgaaggtgcgggccatcaggaaccagcgcaaacgtgcggttgttgaggactgggaacatttcatcgcccggctcagggccaaggtcgagcatccgttccgggtgatcaagcgtcagtttggctacaccaaggtgcgctatcgcggcctggccaagaacaccgcgcaggtgatgacgctgtttgtgctgtccaaactgtggatggtgcgccggcagttgatgccggccgcagggccagtgcgcctgtaa

SEQ ID NO: 506553 - DNA, 888 bp, Stenotrophomonas maltophilia
atgcatccggaccacgtttcctacgcccacttcaccagcccgtcgcagctcacccgcgcactgaactcactggcgggcatcatcgaaggaatctccatcgatgacgagatcaatgccgatgagcgtcgcttcctcgctctttggatcgaggatcatcttcatcagcgcagacagcatcccttcaccgaactgatgcctgtgatcgagcacgcgcttggggagggccgcatggacgaagatgcggcggaggacctgcgatggttgatcggccggatgcgttcaagtgatcgagtcaacactactacggccgatctccagcggctgcatgctgtactcggcggaatcatcgctgacggccgcatctcggagtccgagctgcgtggtctctcggactggatggaagagcacgtccatctgcagggatgctggccgtacgatgagatcggacatctggtggccaaggtactggctgatggtgtggtagatgcgcaggaacaggatctgcttcgccagttcttcagcgagttcgtcgtcctcggcgatgaccgcaccctgaccgatccgtcgttgcagatcgccggaagtctggttggactatgtgcggtggctcccgagatccaattcgaagagaggggattctgctttacaggcgcttcgtcccgaggttcacgtgccgatatcgaggcgctggtaacggaacgggggggacgggtgcacagtgcgccatcgaagaaggtggactacctggtgattggcgccgagggaaatccttgttggagttacgcctgctacggtcgcaaggtggaacgcgcagtggaactacgcaaggaaggattacggatcatgatcgttcacgaacgcgatttccacgacgctttggttgattga

SEQ ID NO: 506554 - DNA, 366 bp, Stenotrophomonas maltophilia
atgagcgcacgtatcttggtggtggacgattcggcgtcgatgcgccagatggtttccttcgccctcacctcggccggttttgccgtcgaagaagccgaagacggcgcggtcgcgctgggtcgcgccaagggccagcgcttcaacgcggtggtcaccgacgtcaacatgccgaacatggacggcatcgcgctgatccgcgaactgcgccagctgccggactacaagttcaccccgctgctgatgctgaccaccgaatcggccgccgacaagaagtccgaaggcaaggccgccggtgccaccggctggctggtcaagccgttcaatcccgaacagctggtcgccaccgtgcagaaagtgctgggctga

SEQ ID NO: 506555 - DNA, 246 bp, Stenotrophomonas maltophilia
gtggctcgcgcatttctgatcggggcgatactgttcgccagcacatcggcgtgggccgaacccggccccagcaacctgcagatccgcctgaccgtggtcgaagcctgccgcgatgaccccggcagcacccactgccccgcaccccaccagcgcagcgacacaccgcaacttccgccccaggtccgcgagctcgcgcctcccgccgacgacgaagacacgacgtccgccgtgaccgtcatctactga

SEQ ID NO: 506556 - DNA, 153 bp, Stenotrophomonas maltophilia
atgaggttgccggccagcggccggcactacctgtcggagggcgtgcggatgctggcgctggagatctgggccgcgcagtggttcgggtgggcgcggcgggaggtagtgccggccgctggccggcagttgcgggttcctgccgaaggttcatga

SEQ ID NO: 506557 - DNA, 537 bp, Stenotrophomonas maltophilia
atgaaccgtactctctccctcggcctgctgctgggcaccgtgctggccacgaccgcctgcgctcgtgccgccgaagaatcctccgcggcaccggtcgccagcgaagcaccggcaccggcccaggccagcccgtccaagatcgatccagccttgccggtcgccatcgtgcacaagaccgccagctgcggttgctgcggcatctgggtcgaccacctgaaggccgccggcttccaggtcgatgtgcgcgacgccgacgacatgaacccgatcaaggtccgcctgggtgtgccggtcggcaaggcgtcctgccataccgccgagatcggcggttacgtggtcgagggtcacatcccggccgaggacatcaagcgcctgctggccgaacgcccggccgcgcgcgggctggtgctgcccgggatgccggccggttcgccgggcatggaaatgccggacggctacgtgcagccgtacaccgtcgagctggtgcgcaacgatggcatcaccgaaccgtttgcccagcaccggcaaggtggctga

SEQ ID NO: 506558 - DNA, 225 bp, Stenotrophomonas maltophilia
gtgaacctctccggcggcagcagcggggcatcggcaagcgccgggcccgcagcaaatgcggcgatgagcgtgatgaaagccttcatgtcgctgcacatcccaagggagcggccgccgaaccgcaaactaagcggcgtgcacgtggggctcaaccgcagcggccagcacatcaataccccacgcggaacccgcaatctcctcgggctggcttctcttgaagcgtga

SEQ ID NO: 506559 - DNA, 2364 bp, Stenotrophomonas maltophilia
atgaccgacagtaccttccgcgtggccgatctggccggcgctggcgacgccttgcgcgccggtggcgagcgcgtgccgacctggatcaccaaggaggccggcaaccgtcgcctgccgttcgaggccgagcgcctgcagcgcagcatcgacgccgtgcatgccgagttcccgcagctggacgtgagcgactaccgccgcgtggtgcaggcgatggtcgagcgcaagcccagcatcagcgccgatgacctggtcgatctgctgatccgcgaggccgagtcgcgggtggacctggtcgcacccgagtgggaacagtttgccgcgcgcatctacctgcgccgcctgtacaagcgcgccagccgcaaccgcttctacgatgtcggcctgaagtacggctcctacgtgggcctgcaggaaagcctggccgaccgcggcatctacagcaacgacatcctgcgctgctactcgaaggaagaattgcagcaggccggcgagatgatcgatccggagcgcgaccgactgttcgcctacaacggcctgtacctgctggccacgcgctatctggccagcgatcgcagccgcgaggtctacgagctgccgcaggagcgttggctgaccatcgcgctgtacctcatgcaggaagaaaaaccgcgtgagcggcgcatgcagctggtcggcgaggcgtactgggcgctgtccaacctgtacatgacggtcgccacaccaacgttggccaatgccggcaaggtgggtgggcaactgtccagttgcttcatcgacacggtggatgacagcctgcagggcatctatgactccaacaccgatatcgcccgtgtgtccaagcatggcggcggcgttggcgcctacctgggctatgtgcgcagcagcggcgcgccgatccgtggcgtggccaattcctctggcggcgtggtgccgtggatcaagcagctcaacaacaccgcggtgtcggtcgatcagcttggccagcgcaagggcgcggtggcggtttacctggacatctggcaccgcgatatcgaagccttcatggacctgcgcctcaacaacggcgaccagcgcctgcgcgcgcacgatgtgttcacctcggtgtgcgtgcccgacctgttcatggaagcggtggagcgccgcgccgactggtacctgttcgacccgcacgaggtgaagcaggccaagggctggtacctgcaggacttctacgacgagaagcgcggcgcgggcagcttccgcctccgctacgccgaactggtggccgacgagcgcatcagccgccgcacggtgaaggccatcgatctgttcaagcggatcatgctcagccagctggagaccggcaacccgttcctgttctaccgcgacgaggtcaaccgccggaacccgaacaagcacgcgggcatgatctattccagcaacctgtgcaccgagatcctgcagaacatgagcccgacgcggatgatccaggagatcgtcagcggcgaccagatcgtcaccacacgccgcgccggtgacttcgtggtctgcaacctgtcctcgatcaacctcggccgggcgatcagtgcgccggatgacctgctggccaccgacgtgctggagcgcctgatcccgatccaggtgcgcatgctcgacaacgtgatcgatctcaatgcgctgccggtgccgcaggccacgatcaccaaccgcaagtaccgcgccatcggcctgggcacgttcggttggcaccacctgctggcgcagcaggcaatccagtgggaatcaccggatgccgaagaattggccgaccgcctctacgaacgcatcaacttcctgaccatccaggccagcgcgcaactggcgaaggagaagggcagctacccgatgttcgcgggtagtgactggcacaacgggcgttacttccgtgaccgcgactacagtggcgccgcgtgggacagcctggcccacgaagtggccacgcacggcctgcgcaacggctggctgctggcggtggcgccgaatatgagcaccgcgcagattgcaggctccacggcctcgatcgacccgatctacagcgcgttctactacgaggaaaagaaggacttccggcggccggtggcggcgccgggcctgtcgctggaaacctggccgtactacgagaagggtgcctacaaggtcgaccagttcgccagcgtgcgccagaacgcgcgccgccagcgccatgtcgaccagtcgatcagcttcaacctgtacgtgcccagcaccatccgcgccagcacgttgctggagctgcacctgagcgcctggcgcgagggcctgaagaccacctactacgtgcgctccaacgacatcgacatcagcgaatgcgagtggtgctccagctga

SEQ ID NO: 506560 - DNA, 588 bp, Stenotrophomonas maltophilia
atggtccgtcgcacccgcgccgagatggaagaaacccgtgccagcctgctggccaccgcccgccgcgtattcagcgagcatggctatgccgccacctcgatggatgacctgaccgcccaggccggcctgacccggggtgcgctctaccaccacttcggcgacaagaagggcctgctggccgcggtggtcgcccagctcgatgccgagaccgacctgcgcctgcaggcgatcagcgatggcgcggatgatgcctgggacggtttcgtacagcgctgccgtgcctatctggagatggcgctggagccggagatccagcgcatcgtgctgcgtgacgcgcgcgcggtgctgggtggcgcctcaccggaatcgcagcgccactgcgtgcactcgatgcagcgcctgatcgaacagttgatcgcgcagggcgtagcgatgccggtggatgcgcaggcgctggcatcgctgatctacggcagcctggccgaggccgcgttctggattgcagagggcgaggatggcgacgcgcgcctgcggcaggcgacgacggcgctggaaatgctgttgcgtggcttgaagtcggccgggtga

SEQ ID NO: 506561 - DNA, 423 bp, Stenotrophomonas maltophilia
gtgctcgatcacaactgcctgttgatcgatcacaacatcaacgcgcagcgactcgcactgcccatgccatctccccgcagcgccaaccacttccatcaggtccaatggcatgactgggccgacctcacctggcttaatcggcttggggaacagcggcatagtgaggtcgacggcggcttgctcacttcgttcaccaaggatgttccgcccgcgctcggcgccgacggcagcaacatgaatcagtgggctgctgacctgctgtgcgaaaagctgacctgcctcaccgtccttgcgtactttgcaggtgacgccctttcccggcagctcaccagtgaccaccaccgcatcgtgcagcggttcgctacgtatctggaggctctcggcaaggacgatgtactcctgcacaacgtgatcaggaggtga

SEQ ID NO: 506562 - DNA, 141 bp, Stenotrophomonas maltophilia
atgccaagccggttcaggagtaatcccgggccgggcatggcccgcaccttcgtgccgcgcggtagttccggttggatgctgccaccggccggggccggcggcagcatccccttctacgtctacgtctacgtcgatgcgtag

SEQ ID NO: 506563 - DNA, 606 bp, Stenotrophomonas maltophilia
atggaccgtgaaccgtgcgcccttcatcgtgaaggaccgatcggttcacatcagtccagctcgatgaccagcgccgccctctgcctttcagttgctttgcagcttccggcaatccctgccctcttgaccatggatccctattcccttgggacgcttcagcaggcgctgaagacgtttggagcgttccagcagccctactccgctccgatcgatgcgtacaatcctgacgcgggcgtgatcgattcagcagttgaagtgtccgcggggtgcgtgcaagacggcccgccagtcatcatccttgacgatgatgccgaacacgcaccgcgacgttatctggtccttgaagccccttggcatgggcttccaacgggagcgttgctgcttgtctccgcaagcaaggcaagcgccattccagcccagaaatcgaacctggagcttgcacgggccgagagcatgctgacatttctcaacctgctgccggtagcttcggaggccagggcccacccggagagttgctcggcagtcacggattccgtcgcttccggctccatcatgaagagcgttctggatcaactccagggccgcctgttactgaggccacgctga

SEQ ID NO: 506564 - DNA, 570 bp, Stenotrophomonas maltophilia
atggcgacgccagcacgcaagagcatgaagacggaaagtgagaccgccagtgaatcgctcaatggctggaccaggaagcgccgaaccatgcttcggttcattcgaccaggcgacgtgttctgctttactcgcaatgatggggcgttctacttcgggcagatcatatcgaaggcacttgtaggccactgcgtacagatcttcgatgtatgcagacacgcgcctgaaataggtaagagcgagctgcagcaagcccaagccaaggtgagcatccccccaatcattcttgacagctacgcgatatttgaccggaaggttgacgaccatggtgactggcgagtcattggcaaactggaaacgggtgacatatctcgctttgaaagttacttcttctgctatggagggaagaggaactggaaaaagatcaacgccatggggtcagatgagcagcccattccggacgaggcggcaatgactcttgagcctctcatcgcattgaccagcttcaaattctggttgtcatttgatgcctttcgggcttcagggagcaagagctggtcgcaccagttctga

SEQ ID NO: 506565 - DNA, 942 bp, Stenotrophomonas maltophilia
atgcaagtcattgaaaacatggaagatccagtagagcgaggcgtatcagcccttgtcgttccctgcagcgcaaggaaggcaaaactgtctgcccagaccctcaccagtggcagccttactgcagggaagcaggctacgttggctcagcagtggcttaggaaactgcagaaatccaatccttgcgccaaggccggccacctctattcaggggccgcgttccggagagtctatgagcatgggctgtcccatggcacgcctgtttgggtgatctctgctggtcttgggctcgtgtccgctgagcgacgagtcccgccctacgacttgacgctttctgccagttccccaacctcgctggtccacagggttgttgggcatttccgtcatgagaggtggtgggatcaggtacaagccggccctttcgccagccccctctcgtccattggagattccaacggccagggacgggttctgatcgccttgaccaagccgtacgcccaattgatcagcaaggcactggcggggttgccaaccgaactgaggtcacgccttagactattcgggcctggcgtagcagccagcctaccggcagacctgcgctcgcaggtgcttaagtatgaccaacggctggacctgattgtcccgggcatccaactcgacgcggctgcgcgagccttggtgcatttcgcggagttggctgcaaacatccagttggtcagcatggagtgcgaccaagagctaatcgagcaggcgctggcgcccgttcaggcccgcccggtcgtattgcgcacccgactagacgacgatgcacttcgtgagcatctccgtccttgggcttcggaagggctctccttcaggacggcacttcgtcggcttcgggacgacagcagggtgtcttgcgaagagcagcgctttcgtcgcctttacaacgaggtcagggcatga

SEQ ID NO: 506566 - DNA, 1128 bp, Stenotrophomonas maltophilia
atgagcaaggccactctggtaacaattcgcgccgttcggaccgaacaagctggcgtagcggtctatgcctttttcctgcccggatccaaggtacttgagattgccgacatttcgcgactggaacgaaccaaggagggtctggaagggttccagcgggatgcgatccaaaagcacattgccggtatggtcgactacctcaacagcggcccggttctgttccctaatgccatattgctggcgctctcgccgcgcgcctcgttcaccagatcccgcggcccaacaccggaagggctgatcccctccggcgacgccggcgtgcttaagctgcctattgccaaggacggcagcaagtgtgcgtggatcgtcgatggtcagcagcgctccactgcgcttgccagggcaacagacagtaccttgccggtgcccgtaatcgcattcgtatcagatgatctgcagacccatcgggaacaattcatcttggtcaacaaggcccggcccctccctaagcgtatggtagatgaactacttcccgaaattgatgcgcgaaggcttccggccgacatggcaacccggcagattcccagcgcgctggtggaacgacttgatgccgatccagagtcaccgttccacgggttaatcagacgaacctcatccaacaaggatcctggacgcatcgttaccgactcggctttggtacgcatgcttcagaagcaaatcaacaatccacttggggccctggcgtccttccgttcgcttgatggtggcagtaccgatcctactgccatgtatgcacaggtcctgagcttctggaatgcagtgaagaacgccttcccagaagcatggggccttcctccagagcaaagtcgactgcttcacagcgcaggtatcacggcgctgggtgccctgatggactatctcagcccgcgtgtagtacagcgaagcaatgctggcaagttctatgcaggtgtgctggaagctattgccccctactgcgcttggaactctgggcgctggatcgacatggactgcgactggaatcagatcgagagcaccgccaaagacatccgactgctcagtgaccaattgatccgcctctcccaacttcacaatttgaggcatatggcctaa

SEQ ID NO: 506567 - DNA, 1095 bp, Stenotrophomonas maltophilia
atgaccaagcaactgactttcaacgtgattgcgccaaagcaatctgccaacgcccacgtcgcgttctttgtggcaactgccacgcagatcgatcaagttgccacaatccagcgtctggcacgtgatgaagagggcatgccgactgggttccagcgtccccagatcgccaagcacattcgcgagattggcgattacctcgcccgtcccgatgccatcttggccaaccccattgttctaggcttcgtcggcggcgccaagatcaaaaagtccaaagacggctctacccagttggtagtagacgtaagcaaaggcgctccgggattgattgtggacggccaacagcgcttcagcgcactgcgcgagatcggccgtgaggactttcaagtgcccgtttcggtcttcatctgcgacagcctggaagagctcactcagcagttcatcctgatcaacaacaccaagccgctcaacaagggcatgatctacgaattgctgccactcgcgcgtcaaggtggcatgccgttccgactcgaatcgcgtcgggaggccgccgatttagtcggaatgctcaacttccggaagggctcgtctctcaaagggatgattcgcggccagaccacgccgcacggtgtcatccaggacacggtcatgcagagactgatcatgaactcgatgtccgatggtgcgcttcggatgtatcgaaatgaccataagctgcttcaaagcaagggctttgagctcattagtgagtactttcatgccgttgcccacatcttccacgatgcctggaaggaccacacaccgacgagttcgcgtttggttcacagtgtcggcatcacggcgatgggattcgtcatggagtacctgcactctgcactgggcgctaccacgcgcgaggatttcatccagccgctgaccgcgatccgacctgccaccgcctggacagagggagagtgggtgtttggacctgagacccgtcgttggaacgggctccaacaggtatcagccgactggaagctactctcgttctacctggtccagaaggcacgggaggcggtggaaaatcccaagggagccaaagctcatgtacgccgttaa

SEQ ID NO: 506568 - DNA, 633 bp, Stenotrophomonas maltophilia
atgtacgccgttaaagagatcttctacacccttcagggcgagggcttccaggctgggcggccggcagtgttctgccggttctctggttgcaacctatggtctggtcgggagcaagaccgccccaagtcgcaatgtactttttgcgatacagacttcgtcggcgtcaacgggttgaatggagcaaagtacggagacgatgggtccctgccatacgtgatcgccgacctatggcctcaccatgccatcgagaataggctggttgtcttcaccggcggtgagccattgttgcaactagatgaaccactgattcgtgcaatgcacgcacttgggttcaagtgcgctgtcgagtccaatggaacgatcgagccaccaaacggcatcgactggctgacaatcagtccgaaaggatcggcccccttaaaagttcgtcgggccaatgagctcaaactggttttcccgcagccagatgcgccccccgaagcattcgatgaattcattgcggaccagtacttcctccagccaatggacggaccggaccaagttgccaacacacaagcggccgtggagtactgtaaggctcatccgaagtggagattgagcatgcaaactcataagtacctgggcatcccatga

SEQ ID NO: 506569 - DNA, 384 bp, Stenotrophomonas maltophilia
atgactgagccaatcttcaacgtttgcaaagagttccgatttgacgcggcccatcagctggatgctggccccaatggcgatcctcgctatcgtagtattcacggacactcctaccaagtcgaagtatgggcacggggtccgcgcaatgcgcgtggctgggtaatcgatatgggggacttggaacgccgcatcgcactaaccaacgccaagatcgaccacgtctttctcaatgaaatagagggcatggggccacctacgatggagaacattgcttacttcatctggtgtgacttgagagatctccccctactacgcagggtggtagtcaagcgcggacagaatggtgaatcttgcgagttccacggagagtacgatgtcggatga

SEQ ID NO: 506570 - DNA, 762 bp, Stenotrophomonas maltophilia
atgtcggatgagcgttttgtcaatgatgacggcacgggagagagatcggcgctggtcgtgttctccggaggccaagattcggccacctgcttggcgtgggcgcttgatcggtttgatcgagtggagacgctggggttccagtacggtcaggtccaccatgtggagatgtctgtccgtcaaagtgttcgtgatgccatcagtgccctaaagccagagtggaccgagcgtctgggtattgatcacgtctacgatgcgggcgtcatcgggcagatcggccaatccaccctaacaggtaccagtgagacgaaacttcgcacagctggcctgcctgccacttttgtaccaggtcgtaacttggctttcctcaccttggcggccgcccttgcctatcgccgaggatcaaagcacatcatcacaggcgtatgcgaaacagacttctccggctatcccgactgccgcgatgacgcaatcaaggcggtgcagttggctgtgaatctcggcatggatgctcgcttcgtcattcacactccgctgatgtggatcgacaaggccgcctcttgggagcttgcgtttgacctcggaggccatagattggtcgaagtgatcaatgagaagacccacacctgctacgtaggcgatcgctcagatcgacacgcctggggatttggttgcggccagtgtgacgcctgcaagctgagagcgtccggttgggacaagtacctaaaccccaagcaccgacgtggcaaaggagtgcttcagtga

SEQ ID NO: 506571 - DNA, 1410 bp, Stenotrophomonas maltophilia; identical to SEQ ID NO: 504023

SEQ ID NO: 506572 - DNA, 1449 bp, Stenotrophomonas maltophilia
atggacaccatcccagagccgttctcacttcgcaatccgtcgggcaacccgctggcgcggcgtggcgggttccgcgtcccgtttggcctgaaggatggccgtgtctgggcccccagcgaggtgtccaaaggcaaggcgtgcggctgcatctgcccggggtgccatgccccgctgtcggccaaggccaaggagagtcgccgcaagcgcccccacttcgcccacctgactgacaccggctgccagacgggtcgtgaaaccggaattcacgaacgggccaagcagctgatcgcagaccaccagcggctggtgatcccggcctggaccggcgacccgatcgacatgcccaacccgccgcatgcccgtgacgacgatggccggctccactgggggcggaaggtcgaccagccgagccgcagcatgtcgttgcgcgacatcgagatcgagcgatcgctgggcagctacaagcccgatgtcgttgcccgggatgaggtgggcgagttgctgatcgagatccgcgtgacccatgccgttggcgacatcaaggcggcgcgcgtccaggcgcagggccggaggatggtcgagatcgacctgtcccagctgcaccgcgacactccccacgacctggccgccttcgagcacgccgtgctcgatgacgctgccaatcgcagttggatctcctgtcccgaggcggtagcggagtggggggcttccaagcaggaactggacgagcaggttgcggcgaggaaccagcagatcgcacagctgcgggagcagatggccaaggcggcccaggcccgcaaggaacgcgaggcccaggagaccagggacaaggagggccggaaggcctacatgcgccgccaggagcgtgcgagacacgctgaggacctgggccatctcatggaactgacctcgcctgagcggatcgagcggatcctgcgcgagtatcgggtcagcgcggaagaccgcgtcagcgagctcctggacgccgtgccagcggcgattcggtccgcctgccttcgagcccatgaagatgcctggatcttcggagtggacccggttctttggcagctcctggcccatgaccacttcgtggcaaagcggtccccgggtgatcgcttcaaccagagggacgtcgccgcgtgggtccggcgtagcttctacccagagagggcgctgtacaggctcttcgtcacccagtacgccgcccgcgccgaggcccagcgcgcagggttcgccaagagaaggctggcttactgggttttcaccgacgaagagaacgagcggattccgaacttctacacgcccgtcaacgacttcgtcgacaggctggagtccgcccgggtcatccgacaactgccggcgcccaggggcgagtgcgaagtccttccaccaccccgccggtggctggcacccggtcgcctacgtggatccgggcaacgattccggtga

SEQ ID NO: 506573 - DNA, 267 bp, Stenotrophomonas maltophilia
gtgaccgtacttgagactctgctcgacaccctgcgccagtcctcgatgaccgagcgcgagaagggcacctacttcgaagaattgatcctggcctacctgcgcaacgaggccacctaccgcgacctgtatgccaaggtctggacctggtccgactgggcgcccgcccacggcttcagcgcgaaggatgacggcattgacctggtcgccgaggaagccggaacgagggtcggcagggaatcattacgtacagggccaaaagctgcctaa

SEQ ID NO: 506574 - DNA, 741 bp, Stenotrophomonas maltophilia; identical to SEQ ID NO: 500129

SEQ ID NO: 506575 - DNA, 843 bp, Stenotrophomonas maltophilia
atgaaatccaacaagaagatgtgggtatggctcggtgccggcttgggattggttgcggtagccgcaaccgccacggtctctctgggcgtatacaacgtggccgccgacgatccgcatagtcgcccggtgtatgcgctacttgaaacggcgcgcgagcgttccattgaggtgcgcgccgccaagcttcaggtgcccacgaacctggatgatcctgagcgtatccgccagggtgcgggcaactacaacgccatgtgcgtgacctgccatctttcgccagaggcggcggccaccgagatgagcaagggcctgtaccccgcgccaccgaacctaagcaaacagtcggtcgctccagctgaggcgttctgggtgatcaagcacggcatcaaggccagcggcatgcccgcgtggggcggcagcatggacgatgagttcatctggaacatgtcggccttcctgcagaagctgcccacgctggacaaggccggctacgatgcgttggtggccagcagtgatggtcattcacacggcggtggtgagaccggcgggcactcgcacggcgaggaagcgggtgcagatcagcatggcagcggtgatggagcagagatgggtgatggccatgaccagggtcatcaagccggtggcatggacatggacatgagcaaagctaaggaaggcaccacgcacgtgcatgccgacggcaagacgcacgtgcatgcggccgagccagccaagcaacccgcgcaggccagatccgaagctgagcacgatcagcactcctccatgccagccaaatcagccgagccagctcccaaggccgatgacggccacgaccaccagcattga

SEQ ID NO: 506576 - DNA, 1677 bp, Stenotrophomonas maltophilia
atggcacgtacgaaagtggcgaggacagcgttggctgtcatgtgtggtctggtcatcgcggcctcggccgcagcacaaacaagcacctttgatattccagaaggggatctgaagatcgcgctggaggcctatgccaggcagtcgggcgtccgtctggtctacctgagcgaagacgtgcgcgatcggcgcacctccggggcgcgcggtgacatgtcccaggacgcggcgctgaaccgtctgctggcgggcaccgggttgaccgtcaagcgggatcaaagtggcgcattggccatcgtccgcgaggcggcaaatgcaccggcgcccagtacccgcagcacaccatcttccagcctagggcaagccggctccgacacgtacgcctccacagtctccggcggcgccgacgcctccacgacgtcgaccactgcacccaccacctttgatgcggtccaagtaaccggcagccatatcaagcgtgcccagatgtccggcgtgggccccaccacggtcattgatgccgagaccatccagagctccggtgccgtctcggtcgagacgctgctgcagcgcttgcctgcatcggccggtgcagccggctcgcaatccaacaacttctggacgggtaacggtaacggcaccacccagatcaacctgcgtggcttgggcgtcaaccgcaccttggtactgctcaacggccgacgcttggtcaacggtggtaccggcgccaacaattcggtggatctgaacgtggtgcccttggccctggttgatcgcatcgagatcctgaaggacggcgcatcggcgatctacggcgccgatgccgtggccggtgtggtgaacatcatcacgcgcaaggaaatggatggcgtggagctatccacccgctatggtcagactttccagggcgatggcgagatcggctccttcaacctcgccttcggtaccatcggcgagcgcagctcaatgtcgggtgccctgacctatgccgaaagcggcacgatcaccatggcttcgcgggcaccgtgtccgttgggtgtggtggccggcaccctgcagtgcgtgggcaactcgtccaccatcggtgggcgagcccggctggccgatggtcgcgtggtcaacttcaaccaggaccccaacggggatccacgctcctacgagctctatgatccggccaagcacaattacaactacaacttgttgctcaatgcggtcagcccgatcaagcgagtgggcttgagtggctttggtcaattcgacctgaccgagaacacccgtctgttcacggaactgatggcgaccaatcgccagtccaatcagcgcgcttcgcccaacaccttgggggtgtatcgcaccatccggatcgccgccaccaatcccaccaatcccaccggccagaacctgaccctggaacgtcggcgtctcgaagaagccggggcgcgcatcaccgagcaggaggtcgatacgttccgcaccgtgctagggctggaagggcagtggggcgataactgggcatggaatgtggcgttgaactgggggcgcaattcggccaccgacagctcgaccaacattgccaacctggaccgggtggaaaacactctcaataccagcctgtgcagcaaccccgggcgcggccattccttgcggcaactatctgggctacggcaatctgacgcctga

SEQ ID NO: 506577 - DNA, 462 bp, Stenotrophomonas maltophilia
atgcacttcggcacctttacgcccgctcaacgggtcttcctcgatgcggctaccgcgcgacaagcacttgcctcgcagtggctgagcgccgcccaggtcagtcaggggcttggctctcatgcgcccagcggtagccacctggtcagccggttgcgccgcgctggcaagctcttgggggcctacgtcacccgcccgtcgcccagttaccggtatccggcttggcaattcctgccgagcggccagcctgtggaccacttggccgagattttggctttgctgcgggagttcggtccttttgcgcgcgagttgggcggactgcggcgaagcacttattggggagaggtcgagtggttcctgtcgcctcacgcgacgctcgatggcgcggctccatcccaaattttggccgcggccccctgccgcgttctgcgggccgcgtgtatggagtttcagggagacgcctga

SEQ ID NO: 506578 - DNA, 378 bp, Stenotrophomonas maltophilia
atggactggaatgacttctttgagcggacccgcgtagcggccaaggtcgagagctattcaaagctggcgccgctgctggggattacggatggcgcaatcggccactaccgcatgggcaggcgtgtgccacaggtgtgggtggtggcggatgcgctccgtatccaagggcatccggagcctgaaaagcaggcgattgagatcatgaagcgtgcggcgcttacttcgccggaacgcactttctggaagcgcttagcggcgaccgcgatggccttgtgcttggctgttggctttgccctgccccacaaggctcaggctgcggtaacgggcttcgataacggccacgttgtatacattatgcgaaaaagtggtagttattga

SEQ ID NO: 506579 - DNA, 177 bp, Stenotrophomonas maltophilia
atgagcatccatacctttgccgccgaacttgcggaggccgatatgggccttttcgcatgcgctgcgctgattgtcgcttgcctcggcagtgcaatagcttcaatcgtgattgagcagtcatggcttgcgatccgtcgcctgtggaagctctggaagggccgcgccaatggtcggtga

SEQ ID NO: 506580 - DNA, 270 bp, Stenotrophomonas maltophilia
atggacttcagtggggtgttcctcgggctatccgtcgcacaggtggtggcagcaattgttggtgccggcacgttgatggcgctcccttggttcggacgatggtgtgtcgacaagatcgccggcttctttgaggaccgcgaggaacaggacgcggacgaacacgctgacgatgaggcgggagaggttgaagaggtcgtgtgcgctgacaccggccatgactatgacggcggcgagtgtgtcttctgcggcgcaccggaaagggaggagtga

SEQ ID NO: 506581 - DNA, 627 bp, Stenotrophomonas maltophilia
atgatcggtgacggttacctgagccgggacaaggcgcatttggctgccctgcagcgcgcgcgacgggaaaggatgcgacgcatcgactacatgccgggccgcgatgcacactcggtgttcgaagcgcggcaggcgcaggagcggcaagacagcgccgaggcgaccaacagcgcggtgctggatgccatcctgatcgagtgggccgagctgaccggaataaagtacggccaagtagaacagcccaagacttcggcaccagagccggagtttcgtgccaccaacacgcgggcgcgtatgacttcggagccgttgccggaattgtttcccccattgcgcgcgtgcgtgcgcgcgtatgactccggacgcgcgggtaaccacaagatcaccgcaagactggaaaagcaggccgacaagtgcggggcggctcgccaccgtgacggcctgccatgccaggctagaccagagccaggcaaacgacgttgtcgatttcacggaggacgatccactggccctacgaccgaggccggcaaagccaaggcgcaggcaaacctgcggcagaaccggccagccgaacagcccaagcgggagcatcgtggcggtaactttggcggtaactcgaaagactga

SEQ ID NO: 506582 - DNA, 390 bp, Stenotrophomonas maltophilia
atgcgcttgcacctgctggccctggccgtggatgaaggcatgaataccggcttggtccacgaccttccggataaggaagtggccggctgtgccgggcatggcgacgtgaccttgcgtgcttacctgggcgcgctgcaggcccgcacgtttctggatcgcggcattgccccgcccgcctggggcgagccggtggcggtcacctgtgagggctgcggcccggtgctgctgtggccggagtgcccgccgatggtgaaggcttgtccgtggtgcttccgccgtaaagcagaaaagcccattgcccggccaaggaggacgctgctgagggaagatgcacagaactccaatgggtcgccgtacttcctgccgcgtggggcgagtcatgatcggtga

SEQ ID NO: 506583 - DNA, 2034 bp, Stenotrophomonas maltophilia
atgcaaccggtcgggctgcacgtctacaccagcgccgatggtgccccgctgttctggcgcatccgctgcaagcatcccggcacgggcgaaaagtggattcggccgatgcactggaatggcagcgaatatgtcattggtgagccgcctgcaccggttgccgggaagtcgctgtaccgcctgcatgagctggcaagcgccggtgatgcagcgacggtgtacgtggtcgagggcgaagcctgcgccgatgccttggccgggctgggcctgctagccacgaccagtggcggcgcatcgagtgccgaggtcgccgactggtcgccgctggcggggcgacatgttcgcctgtggccggacaacgatgatgccggcaggaggtacgccgatgaggcgggcgcccgactgtgcacgctgggctgcactgtggaacgcatagacgtggatgcccttggcctggccgaaaaaggtgactgcgtggattggctagccgtcaattctgataccgatgcgggcgcagtgaacgttttgccgctggtacggacaccttcggaggcagcgcgcgcgggaagctctgtgcagcctttcgcctcagagccgctacccgatccgctcccagcggtgccggtactcgatcctgcgctgttaccggactgcgtgcgcacctggtgcattgacgccgccgacagcctgcaagtgccgctggactttacggcagtgcccgcaatggtggggctggctgcagcgctgggtgggcggcaacttgctgtgcggctcaaaacccatgggcattggtacgaaaggcccatcctgtggggttgtgtggtcgggcgaccgagcagcggcaaaagccccgctttgtcgccagcgcgccgcctgctggagagcgtcatcggcctagagcgcgaagaatacgaaagggctcgcaaggtgcacgagggcaatgcgatcctggccgatgcacgcagagcgcaggccagggatgcggcccgcaaggccatcaaaaatgggacacccatcgacgccggagccttgggtgaatccgccagtttcgatgatgacgcgcccacagaaccccgcctggtggtcaacgatgcaacggtggaaaagctgggcgaattgttgaacgagaatccgcgcgggctgatccagttccgcgatgagctggccgggtggctggcatccctggaccgggagggacgcgagcaggaccgggcgttctggctggaatgttggaacggcactggcccgtacacctctgaccgcattggccggggaactgttcgcatcgaggcgtgtgcggtgtcgatcctgggcggcatgcagcccggcaagctggccgagtacgtgcgcggcgcggtacgtggcgggttttccgacgatggcctgatgcagcggttccagttggctgtctaccccgacctgccggcgtcgtggcgctacaccgacaggccgctggaccgggaggcggaggagcgcgcgcgtgctgcgttcaaccggcttcgtgcgctgatccctgcagaggtcggagcagagaccactgaggcctgcgacgtgccattcctgcgcctatccggagacgcccaaggactgtttgtcgaatggcagaccgaactgatgcagcggttgcgcgctggcggcgaaccacccttcatggaatcgcacctagccaagtatcccgccctggcgggccggctggcgctggtgctgcatctggccgacaacggcaccgggccagtagccgccgacgccatgctcaaggctttgggctggtgcgagcatctggaaggccatgcgcgccgcatctacgccccggccaccgataacggactgaccgctgcccacctgctgctgcgcaaacgtgacagcctgcctgatggattcactgcccgcgacgtgtaccgcaaatgttgggccggcttggatgacccagacaccgtggccgaggcactggcgctgctgaccgaccatcgccaggtgatcgaggtggccgagacaaccggcggtcgcccgtccatctcctaccggtgggtggcatga

SEQ ID NO: 506584 - DNA, 378 bp, Stenotrophomonas maltophilia
atgatccagaaacgacgaggccccggcgggaaccggggccatgcacacgctggcaggctgggtgcacggcaagtttacggtaagaatggcctgaacagcgcgcgcctgcctgagaactggcgggaccggctgcccgaccccagaagctactatcacaagcgtgttgccaaattgggcaaggcgcaaggcgatggctgggcgcagggacaatgccctttccacgaagaccgtaatgcctcactgagtgtaaatctgaggcatggcggctggacatgctttgccggctgcgattcgggcgacttggtgagcttccatatgcgctataccggtctttcgttcaaggctgcagcgcgcgagctgctggggctgcggtcatga

SEQ ID NO: 506585 - DNA, 204 bp, Stenotrophomonas maltophilia
atgccccgcaagacgttactgcgcctccccggcgttgaagacaagatgggccttcgtaagtcccagatttatgcactcatcaaagcaggtgcctttccgccacccgtgaagctgtccgagcgttgcagcgcatgggtggaatccgagctggacgaatggatcgaaagccgcattgcggcttcgcggaaggaggcttctgcatga

SEQ ID NO: 506586 - DNA, 4920 bp, Stenotrophomonas maltophilia
atgaccacgccactgcagggactgctggaatcactgcgccagtcttcccagaccgagcgcgaaaaaggaacctacttcgaagagctgatcgtggcctacctgcgccatgaagccagctaccgcgacctttacagcaatgtctggccgtgggcgcaatgggctttggccaatggcttcagcggcaaggacgatggcatcgacctggtggccgaagtagcaggcacaggcgaaatccacgccatccagtgcaagttctacgcgccggactacaagctgcagaagaaggacatcgacagctttttcactgcgtccgggcgcaaaccgtttgcccgccgcatcatcgtggccaccaccgaccactggagcgacaacgctgaaaatgcgctggtggaccagcaaccgccggttagcaagatcaccctgcacgaccttgaagccagccagatcgactggagccgctttcagcccagtgcccccgtggtgctgaagccgaagaaggcgttgcgcccccatcaggaaaatgcgctcaaggccacgatggtcggtctggccgaagctgatcgcggcaagctgatcatggcctgtggcaccggcaagaccttcaccagcctgaaaatcgccgaatcgatggccggcaagggcaaacgcgtactgttcctggtgcccagcctgtccctgctatcgcaaaccttgaccgaatggacgcaggaaagcgccatcccgctgcacagcttcgcggtgtgctctgacagtgacgtgggtaaaaagaagggccgcaaggaggatgatgccgtccagacctttgcccacgaactgcgctaccccgccactaccgatgccaaacggttggcgcagggcgtggccgcccgccatgacgccgagcatatgacggtggtgttcagcacctatcattccatcgaagtgctgcacgacgcccagcacgcgcacggcctggacgatttcgatctgatcgtctgcgacgaggcccaccgcaccacgggcgcaaccttcgaaggtgatgatgaaagcgccttcgtccgcgtgcacgatgccgcctacctgcgcgcggccaaacgtctgtacatgaccgccaccccgcgcatctacggtaacgaagccaaggctatcgccgagcgcgacaacgccaccctgtactcgatggacaacgaggactggtacggtaagcagttgttcgtcatcaccttctccgaggcggtcaaacgcgggctgctggtggactacaaggtcattgtgctggcggtggaggaagcgcacgtcaaccgccgcctgcagacgctgctgaaggacgagagcaacacactgaaggtggacgatgcggccaagatcgtcggctgctggaaggcgctggccaagctagggctgcacgaggacggcagcgacacccctgagccgatgaagcgggcggtggcgttttgtcaggtaatcgagcctggcaagggcggcaagacccacaaggtcagctccaaggaaatttccggcatgttccaggccgtggtcgaggcctatcaagatgccgaggacattgaagacggtgcacgcctgacatgcgaggccgagcacgtggacggtggcatgaatgccggccagaaggaggcaaagctcgattggcttaaagcgccaacgccggaggatacctgccgaattctgtccaacgtgcgctgcctgtccgaaggcgtggacgtaccggcattggacgcggtcctgttccttaccccgcgcaactcgcaggtggacgtggtgcagtcggtcggccgggtgatgcgcaacgcacctggcaagcggcggggttacgtggtgctgccggtggtgattcctgccggcgtcgagcctgagcgcgcgctggacgacaacaagacctatgccgtggtctggcaggtgctgcaggcgcttcgctcccacgatgaccgcttcgacgcgatggtcaacaagctggatctggtcggcccggaccgcagcaagatggaagtggtggccattgccgataccgtgcagcgcaaaaccgcgcgactggtggacaacagcgccaagcaggccggcaaagccaaggggcagtatgccatcggtgaaaaagccgaacgctatggccccgcccccgaccagataggcttcgagtttgaagtcggtcaaatcgagcgcgcgctgtacgcaaaggtagtggagaagtgtggcaaccgccatcactgggaagactgggccaacgatatcgccaagatcgcccagacccatatcgaccgcatcatggcggtgctggaaaacgacagccagcccaaggcgcgcgaggcgttcaacgcctttgcccacgagctgcgcgacgacctcaacgacaaggtcagcgatgccgagatcatcgaaatgctggcccagcacctgattaccaagcctgtgttcgatgcgctgttcgccgattacagctttgccagtcacaaccccatgtccaaggccatgcaggcggtgctggatgtgctgcacgagcagaacttgggcaaggaggccgataccctgcaggcgttctacgacagcgtgaagctgcgtgccgagggcatagatagtgcgcagggcaagcagaagatcatcgtcgagctgtacgacaagtttttccgcaacgcctttccaaagatgaccgagcgcttgggcatcgtttacaccccggtggaggtggtggatttcattctgcacagcgtcaaccacttgctgcagaaggagttcggccagaccttgggcagcaagggcgtgcatatcctcgacccgtttacggggacgggaaccttcatcacccgcctgctgcagtccggcctgatcaagcccgaagagctggcgcacaagtacaaacacgagatccacgccaacgagctggtgctgctggcctattacattgccgcgatcaatattgaagccacctaccacggcttggccggcggagattacgtgccgttcgaaggcatcctgctgactgacaccttccagatgtatgagaaggacgatctggttgatgctctgctggtggacaacagtgcgcggcgcaagcggcaaaagaaactggatatccgggtgattgtgggcaacccaccgtattcggctggacagggaagtgcgaacgacaataacgccaacattgactatccggcactggatgcgcgcatccgcgaaacctatgccgtgcgttcccagatgacctccgtgcgccagttgtacgacagctatatccgcgccatccgttgggccagcgatcgcatcggcgatgccggcattatcggtttcgtcaccaacgccggctttacggaatccaatcaggccgacggtctgcgacagtgcctggctgaggaattttcagacatctatgtattccacctgcgcggcaaccaacgcaccagcggcgaaacctcgcgcaaggaaggcggcaaaatttttggaagcggcagccgcgcccccattgccatctcgctgttgctcaaaaacccgcaggctactgagcacggccgtatcttcttccacgacatcggtgactacctgagtcgggacgagaagttggaaaaaatcgtcagctacgccagcatggccggaatcagcgactggcgtcgcatcaccccggatgcgcatggcgattggctcaaacaacgtgacgacagcttcgggcaattcatcgtgctgggcgacaagaagggcgatgcggccaagctgttcgacaacttctctctaggcgttgctaccgggcgggatgcatgggcttataaccagagcaaggccaagctctcggcaaacatgacgaacatgatcggctttttcaacgccgaagttgcgcgcttcaatgcggcacatccggggctggacaccaagacacgacaggaacgtgtggatggttttattgacagcgacccaacgcgtatcagttggacgcgctcgctgaagcaggatctgggaaaggggcgcagctacgccttcgaggctgagtgcatcgcgcccagtctgtatcgcccattcaccaagcaatggttgtatttcaaccgccggttcaacgaaatggtgtaccagatgccgcgcattttcccgggtgcaggcgcggaaaaccttgtgatccagatatcaggggtgggctccggcagagttagtgccatcatctcgaatgttgttgctgaccttcaggtccagttcaatggccagaacttccctctatacctttacgaagaagtttcgcaatccagcgcagacggcctttttgctggcaatcccagcgacggcccgcgccgccgcgatgcgatcaccgatgccggttttgcccatttcaccagcgcttatcggggcgagacgatcaccaaggaagacttgttctattacgtctacggcatcctgcattcgccggattaccgcgaacgctatgcagacaacctcagcaaggaattgccgcgcatcccgcgtgtgcgcactgctgccgatttctggcgcctcagcaaggccggccgtgatctggctgcgctgcatctgcattacgaaatggtggagaagtatccgctgaccttcgagacgaggggggggctgactgacgccgactaccgcgtcgagaagatgaaattcgccaagaagaaggatccggaaactggcaaatcggtcaacgaccgcagcactgtgatctacaacaacaagatcacaatgagcggcatccccgaagcggcatgggattacgtggtcaacggcaaggccgcgttggactgggtgatggagcgccaggccgtgcgggtggacaaggccagcggcatcgtcaacgacgccaacgactgggccaccgaaaccgtgggtaacccgagatacccgctggagctgttccagcgcgtcgtcaccgtcagcctggaaacccagaagatcgtcaacgcactaccggcgctggatatccacccggagggctga

SEQ ID NO: 506587 - DNA, 1236 bp, Stenotrophomonas maltophilia
atgccggttaccgtcacgcccctctccgataccgccatccgcaaggctaagccgggccccgagccaatcaagctacgggatggcggcggcctgtatctgctactgaagcccgacggcgcacgctggtggcgctgggactaccggcggccggtcacgggcaaacgcaacaccctgagcttgggcacctacccagacgtgagtctggccaccgcccgccagcggcaagccgaggcacgcaagctgctggcgtccggcattgaccctggcgaggcacgcaaggcgaacaaggctgccggtatcgagcgcgcggcaaacagcttcgaagtggtcgcccgcgagtggctgggcaagcgagattgggttccgggctatctggataaggtggccgcatggctggccaatgacgtattcccctacatcggcggccgaccggtggccgagctgaccgcgccggagttcctgcgggtggcacgacggatcgaggaacgtggggcgattgagtcggcccaccgcatcctgcagaactgcggccaagtgatgcgctatgccatcgccaccggccgagccgagcgcaacccggtcaccgacctgcgcggtgccctcgcctcgcccaccgagcgccatcatgctgccattaccgagccgaccgccttgggtggcctcctgcgggccatcgacggatacaacggcgatccaaccacgcgcgccgccttgaagctggcaccgctggtgtttgtgcgccccggcgagctacgtcatgccgaatggtccgagatcgacctgggcaaggccgaatggaacatcccggccgagaagatgaagatgcgccagcctcacctggtgccgctatgcgatcaagcggtggcgatcctgggcgaactgcatgcattgaccggccgaggccagtacgtattccccggtggccgctcccctcgccgcccaatgagcaacaacgccttgacggccgcgctgcgccgcatgggctatgacggcgacaccatgaccgcccacggcttccgcgccagcgcgcgcacactactggatgagggcctgggttttcggcctgactacattgagcaccaattggctcacgccgtgcgcgaccccaatggccgcgcttacaaccgtacagcccaccttcctgagcgtcgaaagatgatgcaggcatgggcagactatcttgatgccctgcgagacaataccaatgtgctgcctttcaaggcgcgcgcaggctga

SEQ ID NO: 506588 - DNA, 726 bp, Stenotrophomonas maltophilia
atgcttagcagcacggtactgaatcagattcagacgcttggcatccctgtcgggatcggtactgtcatagttgtcctcgcaactatcgtgcgctggttcttcggacctcctatggacagtttccaccgctggagagagtcaaagcatcgggatcgcgagtacttgctgaagatcgcggatcattcagaggatgatctggaagcaagctgggtaaaggagtccacgttgcaggaggcatttcgagggcgctatggcctcctggtcgggcgcgaggagcgccgggcctacttcaacctcatgcgctgctactcgccaagcataaaatggcgccatatcaggggcataagcacactggcacggcgcagcatggatggcgccggcattgaatttcacatgcccaagcgagagcgccgctggcgatacgctgccgctgctactggcatgatcttctatctgttcggcagcgtgctttgggttgaaggcctgctttccgccatgcatggctcttgggcgggaattgttctgggggttccggtcgcagtaatgggcgctttcacaacgcgcgtatccctgttccctctgcagagctacgacgcagttggaaaagttatccagcctaatgagcgtaatgagtttcttttgattccgatccccgaagcaaagaagccagagccctcctctctcaagccggcgccaattgacgctattccgcgccaccgcgcttga

SEQ ID NO: 506589 - DNA, 168 bp, Stenotrophomonas maltophilia
atggccctctccaaaacacgccaaagcccttccatggtgctcgatggcgccatccatggcgccaacggttttggagagggccatccgccccctctcgacagtttccgtgcggcgcggacggaagggcggaatcaaaggcagaagcacaagcaaaaaaggcagccatag

SEQ ID NO: 506590 - DNA, 1014 bp, Stenotrophomonas maltophilia
atgagtcgacacctgggtgatctggactccacactgatgaaaatcgcagttccagctgcggttgctggaattggaatattggcgcctggcgctgtggacgccgtaattggagccatcaactcaattttccaccttggattggatctggtagttccagcttgggtagggtggacgttacttgcgattggtatcctgctggctgtattcgtctattgctcggccaatggctggcttccttcgcgtcagcaaaactacttcgccgtgacgcacacatcatttcccacccctgcacccatgcttggtcgggaggttgcggatagcggtcgagacactgtagtccaacgtatatgtgacctttctcccttcttcggtcaacatttggatgtcgtaggagctctccgccagcaggcgctaatgatcaatgatgttcgagctgcgcaacgttcagggcacgtggtgtgctatggcggcctggtgcacattcccctgcaacttcatttgggtagtgccatttcgacaggcgccaaagttaggttttttgagaagaatagaaatagtagtagttggatggagctgctcctgaagtcgccaccattaggtgtttccacggagtggaaaatggccgatagcccgacaagtgcggtgattcgtataagtattagttatcttgttgaggagtgggcgattcgatcatttgttgatgatgaaagtattcaggtgcacataaaggtgcccactccatgtgttgattgtgtcgtctcatattcgcagctcgatgaaatatctgctgagtttcggagatctctggatcgtctgcagtcgctattgcccaaagatgccgaagttcgcctcatgttcgccggaccttcttcactgggtgtttcaattgggcgccagataagccacagcatacacaacaaggtgtgggtctataactacaataggcagtctgatccgccatatgcgtgggctgtctttgttaactcggatggattcgaagtccgccacttgtga

SEQ ID NO: 506591 - DNA, 1359 bp, Stenotrophomonas maltophilia
atgtttgatgtaacggcgcttcttcagcaattttacgacgaacacgttcgcctgggtggcgatcgccgcaacaggctgcagcaggtgcgcgatttaaatctcgcgaagttaaatcggggcttggatgaccttgctcttgagagcggtagagccaagccgcacttcgtggaggcaattacacagggcggattcgcgatgcataccctgaatcaagatcctgcaggtctgaatgaatacgacatagatgtagcagtgatttttaactcagatgatctgcctgtcagctctcttgccgcgcgtcagagagtgcgagacgctctggggaagaggactgaacatatgaaggaggcccccgacctccgcaccaacgcagtcacactatggtatcaagagggatatcacgtagattttgcggtgtttcgacggagaacggagccatctgggcgaactgttttagagcacgcaagtacggattgggtcgagcgcgatccaaacgcggtcaataggtggttcaatcagtccgtgtcgctacttagtccaaagaatgagagtggccagccggacataagggttcgtccaaatcagttcaggaggattgttaggtttattaagtggttctgcaagtccagggagtcgtggagcctgcctggaggtatggtggtttcgagtcttgcggcggagtgctatcagttcgatcgctttcgcgatgatgtatctctttataatactttagtttcaattgtccagagattgcagcgatcattggaaatcgagaatcctgtttcagctggagtctggcttactggtcgtgaggaaaataggaatcaggtagcgcgattgaaagctcagttggaattgattatacctaagctcaatatcctgtttgagccaagttgcacggttgaaaaggccagaggtgcgtgggactgggttttcaatcaccagtactggggtgaggtgagggaggaggctctggctgcctcagttagagaagatgttgaggcgccgcaaatatatcagctgcggattcgttgcgaattggcacgaggaggggagcacggagagatctatggccagtaccgtaccgcgcagtatccccttccgaagggggttggattgaaattcacggtggcggcaacgaatgttccacagccctatgagatcgcgtggcacattcagaactctggcgacgaggcatcggcggcggggcagctcacttgggatagatacaatcaggccgaatgctggaccagtacgaagtacaaggggcttcatagaatgacgtgcgagataaggcgtcacggcgctgtggttgcgaaggcccatcatgttgttcgtgtgagggggatgtggcgctaa

SEQ ID NO: 506592 - DNA, 756 bp, Stenotrophomonas maltophilia
atggttaggcgtggaaagtcaaagtcggaggctaatgttaatggcttgtggtccagtgatctggaaaggcatctttctgaaaagatcgaaggtccggcgcagagtgcaatagaaaaaataaggctatttaaagggatatgcgattccgagaggcatgctcttgcagtctatctgctcaccatgtggaagcgtgtgccggccgcccgtgatagaacggcgtcacacatacctgggctcgctgcggcgcacaagatcgagtattttcgtgagattgacgccatgctggctgaaggagcgctttcctccgatgatgccgttgaactaaaaggcacgatatctgggacgctggatcgacttgtcgcaggatcacccgactactattggcaccacacgttgaaggacggggctacgccgagaatgatgcaggctcttcgtgcgatggattggaccttcttggtaacaaattccgatccctatatcacttgtgatgatccggtgtttttctttcgggaaattggtgtcggaagatctaattctgagcttagcattccgctatcgtcatcggttacgttgttggcccaccggagtggacgttactcaggcaagttccgggatgcgcgtaagggtatggttgttcagctcaatcgccgaacggcatataatgccagaagattcatttattcggatcagttgacaccttgggttctgaagttggggttgagaaagacttttccaaattttctgattctgaagtag

SEQ ID NO: 506593 - DNA, 1080 bp, Stenotrophomonas maltophilia
gtggatggcgaagcgcgcacccatgacgcagcgggcaacaccaccagcatcggcagcaaggcgttcacctacaacgatgccaaccgcatgaacgcggtgaagcagggcgatgccgtgctggaaagctacggttacaaccatcgcggcgagcgcgtgctgcgtactccagccggtggcgcagctcagatcacgctgtacgatgaggccgggcagtggctgggcaactactcggccacggggcaggcgcaacagcaggccatctggctggataactacccggtggcgctgatcaacgtgccgggcaccggcgtggcggaacttgcctacgtccaaccagatcatctgggcacaccgcgcgtggtgatcgatccggtacggaatgtcgcgatctgggagtggagcaacaagagcgaggtgttcggcaaccagattccgagtgccgacccggatggggatggtgtggcgctcgagctggcgctgcgattcccgggccagcaggccacggatgcgagtgggttgttctacaactaccagcgggaatacgacccggcggtggggcggtattcgcagagtgatccgatcggtttgagaggcggagcttcaatctacgcgtacacaggaaatgatccgttagactttgtcgatccattaggacttctccgctatcactcgtgggtcagcaagaagtaccccgcgacgacggaattcttgaatggaacgaaagatcgaatgaccagtcgcaaatatgatggattccagcgatacggaaacatcggacaggggcatcttgatcagcttctatcgaaatgcgatgggccagtcattacgccaaaatacatgaggcatgacgatggtagttacgcgcctggctcgggtgagatatttattcatgagacctattttgaccgcttcgaatcgggtggccgaagcccagaactcctgcagaagctggaaagaacactggagcacgagttggttcacttctcggagtatttctggaacaaaaatcagtacaagggcgaggagggttggagctatgaagagtacgtctatgggatcagaaggcctgcttcacactaa

SEQ ID NO: 506594 - DNA, 189 bp, Stenotrophomonas maltophilia
atgaatcgccccaagacccccgacccgttgttggcccgacagatggaagccctgcgcgcccagttcctggccaatgcgctgggcctgccgctgccgtatttctacgccacgtcggattttctggcagaggtgagttgctggtgtctaagctgcccgatgagcgccagcaggaagcgatggccgcgttga

SEQ ID NO: 506595 - DNA, 1548 bp, Stenotrophomonas maltophilia
atggcacttcctcactaccttacgcaggccgcgtcaggccgttacctcttccgcatccgcgttccctctgcattgcgtgaaagggttggacgcgctttcctcaagcgttcgctgggcgctgacctgctggccgcacggttggccgcgttggagctgtccgcccgctatgctgcggctttcaccgccatacaggacacagggatgagcaaggacgacgtggacgcgttgattgcacgcttgagcaaaagccgtctgccggaactcacgctggaacgcacgcaacgcgccgatggctccatcgtcgagcgctggcaactggacaacgacgacgacgtccggctttaccgccaagccacggccccacgcggtcgcaatgccgaactggcagcgatgtatgaaaaggacccgctcatggccatgctggacggctacgagccccctgccccctctccggcacctgctgcacctgcgccaacggctccggccgctactgtggccgaagccatttccatgggcaaggcgcgcgacgcatggctgaaaagccttgaggcgttcaccagccccaagaccctgaccatcaagggcacggccatcaacatgctggtggactacatcggcagcaaccaccaggtgcacaccatcggccggcctgacatggcgcgcttctatcaacacttgcgcgacaagggcaacagcacgccctccatctacaacaaacagtcctacctgggcggtgcgggcggcttcttcgattgggccaccaaatccggccacttcccgaccgtggacaacccggccaagggtcacgtgcgttacacggccaaggaaaagcgccagcggaaaaagctgggcttcaaggccttcaccctgccccagatccacactctctacgcgcccgagcaggtcgccaggctttcccccggcacacgctgggccgccctgctgggcctttacaccggcggccgggccggcgaagtcgggcaactactgctgacggacgtggcagaggccgacggcgtgcccgtcctccacgtgaccgacgaaggcgagaaccagcggcttaaaagcgatgtctccaaacgggtggtgcccatccacgccgacctgctggcgctaggcttcctcaactacgtgcagcggctgcgggaccgtggcgatacccgcttgttcccgcaagccgccaccaacgccaagaacgggcccggtaactggatttccaaagcgttcggctactacatgggcaagctgtctgccgattggccgaaagccaaacgcggcttccacagcctgcgcaagagcgtcatccaggagatgcagaccgctggcgtcgcctcggaaatgagggcccaaatcgtcggccacgaactggacgacgaacaccatgcgacttacagccgggaattcaccgccgccgagaaactgcacggtgccggcaagtctcccggcctgtcggtgctggcctatgcgctcaacttggacgccttgcgccccctgttgactgagctgcctgacagcaagcccagcaaccgaaccaaggaacgggcttaa

SEQ ID NO: 506596 - DNA, 1239 bp, Stenotrophomonas maltophilia
atgggattgatcacggatgcaaaggctcgcagcctgagccctggcggtcaggctgtcccgcacggaggcataactggcctgacgctgcatccgtcgccctcacagaaggggcagggtaagtgggtgctgcgctacgtcagtcctgccacgggcaagcgacgcaacgccggcttgggtgcctaccccgaagttgggattgctctggtgggtaaactggcgcgagaaatgcgcgagcagatcgcgagtgggcaggatccgttggaggttaaggcggctgaccacgctaagccgaagacaccgacctttcaggaagcagcggagctactccacgcggaactaaagcccgggtggaagaatcccaagcacgcacagcagtggcttaatacgctgactgagtacgcgtttccacggattggctccctttccatcgaccagttgcaaccgcggcacgttgcggatgtcctccgccccatctggctcgacaaggcagagacggcaagtcgcgtgaagcaacggctacacgcggtaatggcgtggggttgggcgcacggatttaaccaagccaacccggtcgatgtcgtaacacatctgcttccgctgcagccgggaaagtctgtccggcaggagcatcagccagcaatgccctgggcgaagcttccatcgttcgtgaaagcagaacttgcaggagctggcgagtacgaagtcacgcgaaatgctttgctgttcctgatcctgaatgccagtcgttccggcgaggtgcgcgggatgacgtgggcggaagtgaaccttcgcgcgaagctgtggacgattcctgctgctcgcatgaaggccaaacagcctcatcgagtgccattgtcggaacagtccgtcaagctgctcaggcgccaggaaggccatcacgacgaacttgtctttccctctgtgcaggctcgttcggtcatgtcggacatgacgctcacagccttgttgcggagagcgaacgcaccgagcgacacgcctgggcgtattgcgaccgcccacgggttccgctcgagcttccgcgactggtgcagcgagcaaggctatgcccgtgacctggcagagcgggcgttggcgcatacggtcaaggacaaggtcgaggccgcctaccaccgcacagatctcttggagcaacgtcgtccgatgatgcaggcctgggccgactttgttcacccacctgcaaagaaccccaagaaggatgcctcgccgcatgacgcctga

SEQ ID NO: 506597 - DNA, 948 bp, Stenotrophomonas maltophilia
gtgcgggctgatggcaatcaggcccagatacggtatttgcagctcgatacatcgcagttgcgtgacgttctcgaatatccccccgtcgcattgcaccaattcagtgcgggaggtctggaatccgcgttgacgcacgatggcattccttcaatcgatttcaagtatcgaaagggtttgctgggtttcctcttgcccaccgagcgggccatcgccgacaaggtgccaaccgagtttgatgccagctcgggtgctcctgtggtcgtgaagacgttgaatcgcatcagaagccagtattcgtacattcttcacggggtcagtttcaaggatgttttcgttgaggcgcccgcacttagtgacgccttggaaagcacgccgactgctaaggatgtgcttgtgccagcctgtggagatgcgccggatgacccctatgggctgaaagattcgtcgccattggtatacgagatcctccgcaaagcctatcgaaatcgagggagggcgcgcagtgagatcgatgcgccatcgcttgcggcagaatttcgagagttgaatgccggctacaagaagaatcccaagcctttcaacgacggtcggcatgagttcgcggcgacgctcgccaaccccggctacaactattcgtccgagggccttggggagattgatcttcccgaagaggccgtagaggttccggcggatacattcctcgatcaggatttcatcaatcacaagctcagaaaactcctatatgccgcctgccgttggagtggtgctaaggaaccaggactcggcggcgatcgggaaaaattggtggatctcttggttggtcttggcttctttgaccgggaagacagtgatcaggtgcagtcgttggtttacttcatcaccggtgaaaagtaccggcgcaacaagcacaagagcgactttaggcacatccgcagcgatcgagggtga

SEQ ID NO: 506598 - DNA, 7692 bp, Stenotrophomonas maltophilia
atgagcacgctggccgaccagctgaagacattgggcttacagccgaccgagcgagaggttgtggacactaggaagaccaattccaagaccggtggtcggccgctaggatctggtaagaagccacaatctgatgagggaatgctcttcttgaagctgccacgcttcggaactgtggccaggctcgacgaagaacggggcttcggcttcatctctggtggcgcgcgcgaggacgtgttcttccacttcaggggatatccgggccggctgcctgacggaaaaaagcttccccctgtgggatcgcaggtgcttttcattacgggcagcgacccacggcgtccacacgagcccaagaagggtgcagtcttgtgggcgcccgtcgaaatctcttcagcttcgctagggaatgcgcccacggatcagacatctgtggacgctttgcggcgcaagcgcctaggtgagttgccgcgggatgcgctgtggggcctgtttgaaacagcgtggtacgcgaagccgtggggtggaaatgcgccggcacccaccgacctggaagacgaggtactgggacaggtcgtctgcgaacgtctggccgagatgtcgccggctgatctggaagcacatcaggtcagtagccggctggcgaagtcgcactaccagtttgctgcctgcctgtcgccaggcagcccggcttgcgcgttcacgcggatgctggaagtgttcgagccagcacagctggccgtgctggggacaccagacccctcgtggattcaacgccagaggctttctccggacgcccgctcccgcctccttgaatggcacctgctcagccgggccttgtcggaaccgcgtggcaactgggagtcctgtttcccaggagccgaggcatccgaggtcgagctggcaacgcgtttcctggcctacgacatcccgcgggatgcgttcatcgatgcttggctggacaggatcgtgcgtaacggattgctgtccgaagtacaggctgaagcgtgggcggaccgtaatctcgatctatcggtttcgctgtttcatcgacttccagccgcgcgccaggtttctctggtgtcagggtggcggaagaatccggcagggctggacaagcaactccaacaggaaccatcacgtgcaaggacgctgcttaccgctgcgtcactggcgtttgacctggaaaccgacggtaagcgcatctgggaaatcggctgcgcacgcaacggacaggccagccttcttcacgatgagcgtagcgggaccgacctggatgtggccatggccgacctggggcagcgagtccacgctgcgccattggtggtaggtcacaatgccctggcatgggactggccgattgttgcccgccacatcgcgccgacttcggtgccattgatctgggacacgttgctcatcgggtaccttctggagccgcaggcggcgtcgcacgcgctcggtgggcggcatcatgcggaccgggatgcacttgacactttgcagctgttcaagcgacagctagagggcctgcctgaagatattgcacgcagtgtgttgatcggcgagttcaccgattctgcccgactgctggatgcggtcattgaggcccagcggggcgtccgcgattttgcccgcgagttcccgggcttcatgaccgcggagggaacctcgcctgcaaagctggtcgtcgtgcccgagagcaggctcggggagatcgactgggttccgggcgcgtcggtggtctcggcggaccccagcgaagggctggcggccgagtggcgggaagttgacgttgccttgcttaagaaggccctgccggcagacgccgcgtccgacccggctgctcgggtcctggtggctgttggggagctggctgccgcgcagggcatcgcgctgcggcggaacatgattccggtctggctgcttgaacgtgacgcccgcctgcggtcggcggtcgacatggcgtgcgtagtgccgaaggccggttcgggctggcgtatcgcgtcgttgcccgccagcgttgactggtgggccagcagggatccatcgtcctgcgtggtgaccgggctcagcgatgatgttctcgtgctcgatcgacggaaggttgcgcaaagcgatgttgcgcagatgctgggtgaaatgcccgcagcgccattcatgcgtatcggtgaaaccggatctgcgttgcgatggttgctcgtcgaccgtgccgcacacgtgctcgactctcgaggaggtctggctgcattcacgacgctccccgtcagcgatgcggcgatcgttcgtgccgagggcgcgccggttccgtcatgccgtccgaaggtcgcaacgcggcgccatcacgtgttgcatccgcgggccgaggaccagggcagctactgggccgaggtgcttcgtacgttcaaagaagtggcgacgtttggagcgggaaccgttccgattctcctgattgcgagtacccaaagcgaggcgctgcgtgatctattgacagttgggctggcggagatcgggcttggcgaggtgaaaccggaacaccgcagccaacgtgaacacatgcttcgcgcctcgagtggtggcctcgcgctggtcgacgtggtcgaccagtggcccgtctggcaatcgcttgcccagtcggcaggcgtggtgctgcaacctgtggtcgaggcactgccgatcgaggagtggcatgcctgtgcggagacgcgcattgccgcgcaggcaggttgtgattctgggcaaaagaccgagaaggcgggcggcgccaccgtcgttagtggcgctgctgtacttgagtctgcgcctgccttgttgcgggcccggttgcatggatggatggccgatgtggggctgtcagcgtcgcagctccccaccatccttattgatccgcgcgtgggcgacatggccaaggggctgtcgaacttggcggactcgttccagcttgtggagacgccattcctggctgagcaggcgcaacggttggagcttgtgttgtcgccgttcaagctggtgcgagaggtggctccttccggcatcgaggctatggaacgcttcctggtggcgaactggcagcctcgaagcgggggcggtgggaatcgcgtcaccggcttcaagccgtcgcagaagattgcgatggaagccatctgcgaacgctccgctaatgttctcgtctcgttgccgacgggcgagggcaagtcggtgctgtttcaagttcccgcgctctgccgtggcctacgcaatagacggttgacattggtcatctcgccgttgaaggccttgatgcgggatcaggtggagcgcctgcgggagcagggtttctccgagtcagtcgactatctgagcggtgatcgaccgcccagcgagatcgccgaagtgatccagggcgtactcgatcatcgcatcgtgctgctgtatgtcgcgccagagcggacacgcagcagtgttttcctcgatgtgcttcacaaacgcatgcaagctgacaaaggcttggagcatgtagtagtggatgaaacccattgcgtgaatcagtggggatacgagttcaggccggactactttcatgcgctgaatctgttgctgcgcatgtgtcgtgcaatggatttgagtgagccgacgcctttcctgttgctgtcggcaacgatcaccgcgtccgacagggtccgtttgcaggccgtcatgtccggagattccggagagacgggatctccactgccgctcttggcaaggccggactcgttctccaatccattgcgaacgcatattgccgttgagccgcgtcgtgtgcgtggcatgctcaacgaccggcggaactttgacaaggcactggcggagcgtctgcctcacatcgaagaagccgtatcggcggcacggcgcaaccgggcgtcgacgggtcaacgtagtgccgtcgtagtttttgtatccagccgataccacgcggaggtcgtggcgcagcggcttgcccgggccaccagcggtcaggtcgactactaccatgcgggcttggatgcaggctcgcgggaagagatctacacgcgctttcttgacggtgaccttgatgtcctcgtggcgacgaaggccttcggcatgggcatggatattccggatatccattgggtcgtgcaccttgcaccgccgggatacctcgaggactacctgcaggaggttggccggatcgggcgcggggagcgggagcgtaagaatgcgcagctcgaaaagctttccgccacgctgctattctcggatcaggacttcgagtcgatccggggtttgcgggcgcgcagcgccctatcccttccaatcatcagggatctccacgaaaaggtgtgcgagcacgcataccaggtggatggccagcagctcgcgatcgttcctgccgagggctacggcacgccacagaaccccgtggggcaaagtccggccgccagacgcgcggccgcgacgcgagtcagaatggggctgtactggctcgaacgggccgaacgcgtccgcctgtgcggttccgtcccggatctgattgaggtgactgcctacccgtcctcgcttgagcggatatcccaggaggatggtttggctgctgaagtagccggtttgattcttaaaattggttcggtggacacttcgcttgcaggtgcatcccttggaggcggctccgtttttggcgcttctccaaccccggcaggacttctcggcggcacgatcgacgtgctcggacggctgttttccagcttgtccgacacggtgggcatgctgttcgatggctcggcaagaactccggcgcggtcgcttccaagcccacgtcccgcacacgccgggttgtcgagcggtgaggccgccacggcaaagacggtgattctcaatctctcccagatcaagctgcgcagcagtgcgatcaagtcgatgggagatgtgctggcagtcctaggcgacctcgaaaagcgtggggctgtatcgctgaatcgcgagattgacgttgttccgcgcaagcttgcatctgagccatccaccaagatcagcgagctcttccagtacgtcgatggcggagtagccgaactcatacgccggctcgcgaagaacggacgaatcgagttcaatccgtttgagatggtcgaggacgtagaggggccgcgggtcggcgatgacaagcgccggatgtatgaaagattgttcattaacggcttcagaagccttgcgcgtgcatccggagtcaagcttcgccagctggttcgggccgacgataaagtcatctgggaggcagtgcttccgcggtcgtcatggtccaaagcagattccagacggcaacgtttcctgcagggggcgaagtccctgttcgcggccgtcgcaaaccagagatcgatcccgatttcgaaacttgtggatcagctacgtgccggaagccatgacggccgtttccgcgaatccgacttgaacaaagtggccgcgctcttgtcggcaatgagccttgtcagcatttcgccggagttggttccgctgtcacatgtcgtagcagtatccaatgtcgatggcaggcttgaggatcaggcggatatctgggacgagctcaggcaggtcaatgaacttgcagaggcacgaaatctggcaatggaggtgttcgcaaacgtgaacacggatgcccacccggtcttcatcgaagggtatttcgatgccgctgatggccctgcgatcaagcagttccttgattcgcaactgggtgaaatagtcagcgaggatcgggacggcccctccaccttgctcttggagatgcaggagaagctccgcgccacgaaagcggttgagttcttcgagagattcaggggctcggaagaatcagcgcaatgggaggtggccaaggcgccgtttgatcagcacatcatggtcaacgcgggtcccggggctggcaagacctttgtccttgtaggaagaatcgcgcacctgatccgggagcagaacatcgatccctcgcaaatcatcgtgcttgcgttcaatcgcgcagtcgtctttgagatcaggcgacggattcgcgagctgttcaagtcgctgggctatgcagcctacgcggggcgtctgcgggtctcgaccttccactcgctggctatgcggagcctggcgcgggagggggttgagattactagagacagtgtgcaaaccctgctttctgatttttccagtcggctgtcgaaagatccttcgttcgcccagagggtagccggcggcgcacgttgtgtccttgtggacgaattccaggacgtgacggatgacgtgtatcaggtcatcaagtatctccactccggcagcgggtctagggcaggggtcatggtgattggtgacgacgaccaggacatcctgcgctggcagcggaagaatgatggtagtgctcaccagttctccgagaagtactttgatcagtttacgcacgatttcgggggaggaagtttccaggagttcctgctgggcgtgaatttccgatctggcgagagcattgtcgaacgcagccagttgatgatctcagggttcttcgagcgcacgagccgctcccggcgtctgaagtcctcccggttgagatcacgtgcgggagccagggaaggggcgtgccaggcgatcgagtggagcggtcgaacgtggggcgaggcggtagaaggcactgcagctttgctaaaggacctgaccggccgcgaaggcgagtcgaccgccgtgctctgtcgttcgaatgctgaggtcgctgaagcgcacagactgttgagccaggcgctgccgaaattgagggtgcaggggggcgccaatctgcgcgtagcccagctgaggcacgtggcgctctggttggaccatcttcgggaggctgctgccaaaggcgacgccgcactttcagaggatttgcggcgagagatcttcaaccggacggtgcaagctggaggtgttccggaatactccaggccggctacgtccgacgtcacgctggacgatctgtgggagctgtgctgccgcgagcgttcattcccccatctttcctcgctcgttcagtttgtcgatgaattgagaaccgatgaactcgtgcggttgctggggacggtcgatgaagcgtcaacggcagtagtttcgacactgcataaggtgaaggggcttgagttcgacaacgtagtaattctgccgtcgatgattcagttcggcgttgcagggtgggatcgactgggaccggatctccaaggcgatgccgcggaagaggcgcggctgctgtatgtgggaatgacccgggccaagaggaatctgacgtactaccgcggtgatcgcgagcggagctggggaaggaaggatcctgtgccgtatgacggcctgcgcacagacggccatgtgttgatcggttcaatggaggatgtctcgctcggttgggccatgcaacgcaacgcattcaacccaactccggatgagtgtcagcgctatatcgagactgaagtcgcgataggtgatccaatcgtgcttggcgggtgggggggcggtgcgttcaagtctttcatgcatcgagggagttcaggacaattgacacaggtcggctttcttgcgaagcaacatgtagtcggcggaccgaatgcttcgctgaaagtcagcgcggtcctgcggttccggccggactcaatcgacgagacgctggcagactgtgttcgtgatcgtggctgggggtacgttgtgcttgtttcggggcgcctccgctga

SEQ ID NO: 506599 - DNA, 1284 bp, Stenotrophomonas maltophilia
atgaatgagatcgatcagtccacctcatacacccaggcagtcgccttcgactgtgacctgctccttgagcagatgcccgaccttcccattgtccccaagtccaaggctccgctgatgcccccggcagagcaggaccaccacctcttcgtacgtaagaccagtcaacgctacggacagacctatgtcgggcaggaacacgacttcatctactggctgctccgagcagagaaactcgtcgacgccatcgcccggagcgatgaccagccggttgaagttgtgcacgatcgaagggggcagccgcgctatcagctaacccagatcggcaaggcaatcttcaacgtatgcaagggctacaaccaagacagtgcggagtactacaagcaccaccgctttaatcctcccctgaccgttatgctgaaggtcgtcgaccagtgttcgcctgagctctgggctcacacccgtaacggcgatccggtactgagtgatccacgaacgcgtgagattctcgagaacgcggctgcttccatccgcgcatcatgtcggagccaggcctacaaggacgaagtcgacaattacaagcgcaacgaagagaagaacatcaccagctgctgcgagtatctggcagcccagttccagcgtcgttcgcagctgctgatcctacgggttgatctctacttccgcccggcgttcaagggctggggctacactcgcgaagcggatggccactacgcgaggttcctgcgtgctctgcgcgaaaatcgaatcgttcccgacgtcctcggttacatcagcaagcgcgaggacgggatcgatcgtggcatccactttcacgtcctcattgtcctggacgggcacaagcaccgtgatgcggccaatctgacccgcatggtcggagaggactgggtccgccgctgcggccatggagagtacgaggatggggtggatgtcggcgagacgggcaagaaggccaaggcgagctatttcaactgctacacccggacggaccagtaccgtttcaactgcctgggtctgatccatccgacggacactgacaagctgcgcggcttgcgcctggcgatcgagtacctgtgcaaggaaaccacgcagctcaaacccagcccgccgaagtccctggcaggcgacgaggacgccgacaccgcgagcaagaaggggatccgcaacctgcgcaagggaatcatgccgaagggtcacagcggccgtggcgcgcccaggagcagcggcctggacacctcagccattgatcgagagttgctgaaaaagtga

SEQ ID NO: 506600 - DNA, 303 bp, Stenotrophomonas maltophilia
atgaaccttcactacaactgttcaacccacacgccccattcgaacaccgataccaagggcatcgcgcccccactgacgcgctccaagcgagttctgcgtaagaaggacctggcgaagaagctctcgtgctccgagagcaccatcgataaccgcctgaacccgtcgagccgctggcacgacgagacgttcccgcgccccgttccgctgggcgctggcggctcgcgcagttccgccaagggctggatcgaatacgtcatcgacgagtggctggaaagccgcatggagggtgcccgccgcatgtaa

SEQ ID NO: 506601 - DNA, 957 bp, Stenotrophomonas maltophilia
atgcatctagttcaatcgatggcctacgccggcgagaagccgtggcatggcctaggcaacaagctggcaccccgccagccgatcgacgtttggagggagcaggccgggatggactgggcggtcgaagagtccgaggtgcgctacatcaccggcagcaacaacgttggcctcatcaatgccttccccgagcagaaggtgctttaccgctcggacaccaaagcgcctttggcggttgtcagtaagcgtttcaaggtggtgcagccgggagaggttctggagttctaccgtgacctgacagtacacagtggcttcgagcttgagactgccggcgtgctccgggaaggccgcaagttctgggcactggctaagaccgggcaaagcaccgttctcaaggggcgcgaccgcgtggacgggtacctgttgctggccacggcgtgtgacggaacgctagctaccaccgcacagttcacatcggtgcgcgtggtctgcaacaacacgttgcggattgcgctgggtggcgccagcggtgcgatcaaggtgccgcatcgcagccatttcgacgcggacacggtgaaacggcagctgggcatcaccgtctcggcctgggatggttttgtcgcccggatgaaggcgctcgccgaatgtccggtggatccagactcggtggagggcctgttgcgtcgcgtgctgacctacccggttgcagagggcaaggcgaccgtggtcaacgagcaggcattggcaaacgcccgggccttgtacgaaggcggtggacgcggggcgatgctggcctccagccgaggcaccgcctgggggctgcttaacagcgtcacggagttcgtggaccaccaccgccgcgcgcgcagcgacgaccaccgtcgagacgcggcgtggttcggacaaggtgcgcaaatcaagcagaaggcttgggaaagcgtcctggaactggtgtcctaa

SEQ ID NO: 506602 - DNA, 987 bp, Stenotrophomonas maltophilia
atgaagaagcagaacgcgctgcgacttgtcgatacgcgcacgctggaccgcgggcagtggcttgaggtgcgccgtggtggcatcggcagctccgatgcggccacggccgttggcctgaacccttacaagagccagctggagctgtggcttgagaagaccgggcggcagccggccagcgaccaacagcccggcatggacgatccgcgatattggggcactttgctggagccgtatgtggccgtggcctaccagcagaagacgggccgcagggttcggaagctcaatgccgtcctccagcatccgaccctgcctttcatgctcgccaacatcgaccgcgaggtcgtgggcgatccggacgtccagatactcgagtgcaagagcgcgggggaattcgggtcgcgcttgtggaaggacggggtgcccgagtacgtccagctccaggtccagcaccagttggcagttacaggcaagcacgccgcggacgtggcagttctgctctgcggccaggacctgcagatccaccggatcgtccgggacgaggacatcatcgcccggctggtcgtgctggaggcccgcttctgggagtgcgtcgagaccgacacacctccggccgcggacggcagcgagtcggccgcccgggccctgcgccacctgtaccccggcaacgacaccagtctggatttcacgggcgatgtggcgctttgccaggtcttcgacgagctggccgggctgcgctcagagctcgacgcccagcagcaacgggccgaaacgctcaagcaggcaatccagcaggccatgggcgatgcatccaaggcgatcttcgccaatggctcggtcacctaccggcgggccaaggacggcacgtcgttcgacgccaagcggctgaccgccgagcgccccgacatcgcggcccagtactcggttgtgcgtcccggcgcgcgccggttcgttctggccgtccacaccgacacccccaaccaaccttag

SEQ ID NO: 506603 - DNA, 903 bp, Stenotrophomonas maltophilia
atgttgaagggacttgtgattaccccgcccgtggtcgggcggatttccatcgggcgcgtggtcgagcgcaacggcaagcgcctgccggagaaggacgaccagttcaccctgaccagccagatccagaatcgggacggctgggttctgcacccgctggacgaggcgctgcgccagcaggccgagggcaagcttaggtcgatcccggtccggctgcttttcaacgatccgggactgaaccttcgggcggactactccttgttcgaccgcgacaccggccgaccggtctgtgtcggcaacggcgaaagctgccgcaggtccacccaggagggcatcgcaacgctcgcatgccccggtccgaccgcatgtgcgttcgcggcgggcagctgcaaggcgtacgctcgcctcaacgttatggtcggggacgcagaggacgatgcgttgggcagcttcgtgctgcgcaccacgtccttcaacaccatccggaccctggcggcgcgcatgcagtactacagcgccgtctctggcggtctgctggcttgcatgccgctggaactgaagctgcggggcaagtcgaccacgatgagccaccgcgcggcgatctactacgtcgacttggtggtgcactcggggatgacgctggagcacgccatcgccgaggcccgggaggtggacgccacccggcgggcagcggggctggaccaggccgccttggacgacgccgctcggcgcggattcgccaatggtgcgttcgaggagctggaggaagacgtgccggcggtggtggaggagttttatccggaagccctcccggaaacggccgccagcacaacggagccatatgcaacgcggcccccgctaagggcgcggctgcaggagaaggccgcgcgtgcggggaccagatga

SEQ ID NO: 506604 - DNA, 498 bp, Stenotrophomonas maltophilia
atgacagacgaacccatgccggggctgtatgtgcgcagcaaccggcgccgctacgcgccggccgacccggacgcggtgctggcggcggcgaggcgcatcgtggatgcaaggacccaacgcgggatgagcttcaccgatcatcaggtcgccgcacggttcttccaagacaagctcgtcggcgccgagcgggaaatcttcgccgctgtgttgctggacacccgccaccgcctgatccactacgcggagctgttttacggctccatcgacggggccgaagtccatccccgggaagtggtgaagcaggtgctgcggttgaacgcggccgcgatcatcctggcgcacaaccatccttcgggtgacgcggagccctcagccgccgatcgggcgatcactgcgagacttaagcaagcgttggcgctagtggacgttcggcttctcgaccatgttgtggtcggcggacgacagacggtgagcatggccgaaaggggatggttatag

SEQ ID NO: 506605 - DNA, 906 bp, Stenotrophomonas maltophilia
atgtcagaagaaccgcttcgtgatctgacccagccgcaacgcgaccggctcgcgttcgtcgagttgcggctccggttcataggggagattcgccgccaggatctgatgacgcggtttgccatccaatccgctgccgcatccagggatctcgcgctttacaaagagatggcgcccgggaacctcgattacgaccccaagggcaagtcctacgttctaggaccagcttttgacccggtgttcgacttcgcgccggagcgagtgctctcgtggctggcccagggattcggtgacggtgagcctttgcagcgcaaggcgtgggtagctagtgaaagcccctccaggctcgcgctgcccgatctcgatgtcctcgccaccgtgactcgcgcgatttaccaggaaagcccattgagtatcgagtaccactcgatctcaaatggccgcacggagcgggagatcgtcccattcgcgctgatcgacaacggcctgcgctggcacgtccgcgccttcgaccggaaatcccaagagttccgggatttcgtcatcactcggatcaagcgcccggtccttatgaaggatgcagatgtgcagccccatgagcgcagtgatcaggacatccaatggacccggattgttgagctggagatcgtgccgcacccggaccagccccgccctgaaattacggagatggattacggcatggttcgcgggtcactgcgaatgaagctgcgtgctgccaccgcaggatacatcttgcgtcagtggagtgtggactgctctccggaccacagtctgcgcggttatgaattcaggctctggttgaaagatcacctggcgctgtacggcgtcaagaacgctgtgttggcgccgggttaccgctcgcccgaccaaaacaagggagagcaataa

SEQ ID NO: 506606 - DNA, 2079 bp, Stenotrophomonas maltophilia
gtggcctacgatccaaaacgcgcgctggaacttcttcgcatcggctccggacgcgccgatgccactttccgcgacggccaagaagatgccattcgtcatatcgtcgaaggcaaaggccgcttgctggtcgtgcagaagaccgggtggggtaagagctttgtctacttcatcgcgaccaagttgctgcgggaagctggagccggcccggcgttattgatctcgccgctgctggcgctgatgcgaaaccagatcgcagcggcagaacggatgggggttcgcgccgccaccatcaactccgataaccaggatgaatggaaatcggttgaagccaagctgcgtcgaaacgaagtggacattctgctgatagcgccagaaaagctgggtaacgactggtttaacacagaggttctagctggtatcgcagggcagatttcgctgatggttatcgatgaggctcattgcatttccgattggggtcacgacttccgtcctcactaccgactgctggaacgtatcgccagaacgcttccagccaatctgcggctgctggccacaacggcaacagcaaacgatcgcgttatggaagaccttgtggccgtgctcggccccaacatgaaggtgctgcgcggtgacctgaatcgaagttctctgacgctgcagacgatgcgtttgcccagtcaggctgtccgtctggcatggatcgcgcagcaactcagttcacttccagggcacggcatcatttacacactcactatccgagatgccaatcaactggcggattggctcaaggcccagggctttgctgtagaggcctatacaggtaagacaggtgatcggcgtgaggagctagagcaggctctgcaggagaacaaggttaaggcacttgtagcgaccaccgcattgggtatgggctacgacaagcctgatctggcattcgttatccattttcagatgccaggctcagttgtcgcctattaccagcaagtagggcgcgcaggaagagcgctggaatctgcatatggcgtgctcttgagcggagatgaagaagaaggaattaccgactggtttatccgtagcgcgttcccaactcgccaagaggtagacgatgtcctgggggctcttaatgaggcaccggaaggactttcaatccctgacctcatgacctgcgtgaacatgagcaaaggtcgcatcgagaagactatcacggcactgtctctcgaatctccagcgccgatcgccaagcaaggtacgaagtggcagcttactgcagccgagctaggagacgaattctgggcgcgagcagaccggctcaccaaattgaggcgtgccgagctccagcaaatgcaggaatacgtctctcggcctttcgggcagcacatgggctttctgattgatgcgcttgacggcgattcaagcaccgtcagcccaccgtcgttgccgccgctgtcagaagaagtagatcagttgctggttcgggaagccgaggaatttctttgtcgcacaagtctgcccatcgagcctcgcaaaaaatggcccgtggggggaatgccgcagtacggaattcacaccgcatccaccattccctatcaagcgcagccaggcaaagccctctgcgtctggggtgatgccggttggggcggcttggttcgacagggtaagtaccacgacggctacttttccgatgacctcgttgctgcgtgcgtgaagatgattcaagagtggaatccgcagccgagcccgacctgggtgacctgcgttccttcgcttcggcatcccgcattggtgccgaatttcgcgcaacgcttggctgctgcgctgggtctgccgtttcatatggtcatcgcaaaaacagacgcaaggcccgaacagaaaacgatggcaaacagtacacaacaggcgcgcaacattgatggttcgctcgcactcaacggccagcccattcctcccggcccggtcctcctggtggatgacatggtcgactcgcgctggaccctgacggtggctgcatggctgctgcgcaaaagcggtagtggtgcagtttggccgatggccctttcacagacggggcacgacgaatga

SEQ ID NO: 506607 - DNA, 1209 bp, Stenotrophomonas maltophilia
atgattgacgagagccgcctgcagaaattgctggggcgcggattcctgctgagccaagtgatcgagcgctggcaagcgcgcgccatttgggtggtcagccgcgccgatgccgagtatccgcgtcgtctgaagacccgcctgcgcgaagatgcgccggcagtgctctacggctgtggcgacatggctttgctcgaaaccggtgggcttgccgtcgtcggatcgcggcatgtggacgacgccctcatcgactacaccatggcagttggccggctcgctgctcgggcaggcagaacgcttgtctccggtggcgccaagggcatcgatcaggccgccatgcgaggtgcgcttgagggaggtggaaaagtttgtggcgttctggcggacagtctggaaaagaccaccatgaaccgcgagcaccgcaacctgctgctcgatgggcaactggtcctgatttcgccctacgacccgagtgccgggttcaatgtcggcaacgccatgcagcggaacaagctgatctatgcgctggcagacacctcactggtggtcagttccgacctcaacaaaggtggcacttgggcgggcgctgtcgagcagctcgacaaactcaaattcgtcccggtcttcattcgatcgacgggcgaggcttcagccggattagatggtttgcgaaagaaaggcgcacttccctggtcgaacccgcaagacgtggattcgttcgaggacgtgttcaacgtggcaatgcccatgccgacggcatccccacaggttggttttacgctgttttcaaacgaagagccaacatcggctgacgccaagccaacggcgcccgtgccacccgacaccgcgccagcgccccaggccgcgagtgagccatcggcaccggtcgacgttgtttccgatgcgcagccacccgctgaggcattggaagaatcgccgccagtcacgccagaggccgtggcgcctatagacgaggccaaggaatctccgcagccggaatcgacccctgccgaagcgatcttcgctgccgtgcgcgctgcgattcagcaactcttgagtgcgccgatgaaggacgccgaagtagcagcggcgctggacgtttccaatgcacaggccaaggcgtggttgcagcgcctggttgacgaaggcgtactagaaaaacagaagaaacctgcgggctacatcgtcaagcaaaagcggctattcgagtaa

SEQ ID NO: 506608 - DNA, 1194 bp, Stenotrophomonas maltophilia
gtgtctgataacaagaatttgaagccaggctggaaggtctggcgcttcgatcagatggcgaccaacgtcaatgcgcgcatcgacaacccgtccgagtcgggcatggagcactacgttggtctggaacacctggatgccgattcgctgaagatccgccgctggggtacgccagacgacgtggaagccaccaagctgatgttcaagaagggcgacatcattttcggtcgccgtcgcgcctaccagcgcaagctcggtgttgccgattttgatggcatttgctcggcgcatgccatggtcctgcgagccaaacctgaggtcgtccttcccgagttcctgcccttcttcatgcagagcgatctctttatgaatcgggcagtcgagatctcggttggctcgctgtcgcccacaatcaactggaaaacgatggcagtccaagagtttgctctgccgcccctggatgagcagcagcgcatattgcagggactcaggtcgtccaatgcgcttgtagagtcctatcagaatctgatttctgcatctgagcagttgtggaagtcaaggacgacagatttgttcgccacggacgctgcaggagaatttgtacccctgggggcgttggttgactactcatctgatggcccgtttggaagcaaactaaagactgagcattactctgaccaaggggcccgcgtcattcggttgaataacattgatcttctagagttcaacgacacggactccgcgtttgtcccaatggactacttcgatgagcttcgtggttatgaagtaaaaggcggggacgtcatcatcgcaggccttggcgatgatcgcatcccgatggggcgtgcttgcatcgtcccattgaaaatgggaccagcaataaacaaggcggattgctactgtcttcggaccaatgaacggatatcggcaaagtatctcgtccattttctgaatagcagcgtggggctaagccaagctcgcgcgatggcgcaaggcaccacgagaaagcgactgaacctttctaacatcaggcgttttggaattccgttcagatcgttggctgagcagattgaagttgcggaggagcttgattcatacctggcatccaaaaaggaagcagtagctcgattgcagttatcacttgttgttcgcgatcagatgcgtaaatcagcgtttgcggagacggagcatgtttaa

SEQ ID NO: 506609 - DNA, 2223 bp, Stenotrophomonas maltophilia
atgaccactcagacgatagatagtgcaccgcatgcaacctggtttgtcggcgccagctacggcggtaccgatgatcagatgccgcgatttcttgcggaaggaatttgggagaacggctacgacgacaagctcctcgaagtggtgcgttccatgcgcccgggagagcggatcgccatcaagtcgtcttacacgcgaaagcacggtctgcctttcgatagccgaggccgagcggtttcggttatgggcatcaaggcggtcggcacgatcactgaaaacctgaacgacgggaagcgggtgaaggtggactgggccaaggtcgagccagtacgggagtggtacttctacactcaccgagcaacgatctggcgtgtgctgcccggcgaatggatgaacgatgcgctgattgcatttgcgtttgacggcaagccgcaggatgtagatcgctttcgcaacgagcccttttggcgggagcgttacggcacgacttcgccagaaaagcagcgcttcgagtggacggacttctacgaggcagtggccgaaaagctgctggcccacgcagacgatcgaacgccgctcatcgagggcatccacgagatcgcgtcccgggtgccggggctgacctatctccaggataagtttcctgatggaaccagtggtccgctgcgggacatttgcccattcaccacgatgggcacctttaaccgatccatgaccgatgctaaccgcaagaccatcgcgggcgaacttgccaagttgctgggtgtgacggtgccggtcccgccttcattcgaaggcatccccgttctcaacaaccaacgttcctggtttttcgcctatgccgacaagcgtggtgcgggcgacatcgacgcgctatggaaggtattcgttgccgcgagcaagatggtcgatggcgatcagttggacacccgagatgccttcatccgggcttatgacgaggcaacccaagtgtggggtgtcgcatggaacctttcgacaggtctctactgggcgcatccgtgggaattcctgacgcttgatagccagtcgcgccactacatcaacaagcggctcggcctgaatgttcccatcagtggtcagcaaggtccctgtgatggacgcgagtatttgaagctgctagacgatttgcggtcgcgcttcggcgaagacggctatccggtccacagtttcccagacctgtcgcttgcgtcctggatgtacaaagacccggttgacgagcctgtgccggctggcgatatcggtaccaatgccggagccgaacaggaaactgaaggtgaagttcgcgaagcctttcaggtggcagcgccaatcgttccctactcggtggaggacatcctcaaggacggctgtttcctggagcgggccgagattgaccgcttgctcgatcgtctgcgcacaaaaaagaacttcatccttcaggggcctccgggcacgggcaagacctggctagccaaacggctcgcgttcgcgctcatggggcagaaagacgacagtaaggtccgcgccgtgcagttccaccccaacctgtcctacgaggactttgttcgagggtggcgccccactggcgaaggtaagttgtcgctggcggacggtgtcttcatggaagctatcaaggccgcatcgaaggacccttcgtcgaagtttgtcgtggtgatcgaggagatcaaccgtggaaacccggcgcagatcttcggcgagttgctgacgctgcttgaggccggcaagcggacacccaacgaagcgctggaactctgctatccggatgcggacggcaaacgacgtcccgtccatattcccgagaatctctatgtggtcggcaccatgaatatcgctgaccgatcacttgcactggtcgatctggcattgcgtcgccgctttgctttcgttgggctggagccaagactgggccaggtttggcgggattgggtggtcaaggagtgtgctgtcgatccgggcttggtcgcggatatcgagcgccgtatcgccgagctgaacgaccagatcgcggcggacgcgcgccttggcaagcagttccggattggtcacagctatgtgacgcccgcacaccgactggaggcgggagacacgaagaagtggttccagcagatcgtggagacggagatcggcccgttgctggatgaatactggttcgacgcgcccgacgaagcacaaaaggcgattgcacggctgacgcagggctggtga

SEQ ID NO: 506610 - DNA, 1140 bp, Stenotrophomonas maltophilia
atgaccgccgtcgcagaacaggtggaaagtgcatccatgagagctgagggtttcattggacgcattccggtgcgcaacctctggctgctgatgctctacgcctctgacctgttccgcactcgcggcatcggcaagatcggcttggaagacagcccggacgatctaccggatctagtcgcggagatccttgcccacgcggttgaggtgcgacagcgtcgccgcttgagtcttggctatcgatctcgtaacgcagtcatcaatcgcgtgcgcggtcggatcgacgtcttgaccaccgaacgccatcagttgatggatagaggcctggtggcttgccggttcgacgaactcaccatcgacaccccacgcaatcgtttcgtccgagcagccttggagtccatctccaggatcgttcagaggaaggacgttgcccatcggtgccgcgcacttgcgggtgacatgaaggcaatgggtgtatcaggggacgcaccgacccgcgcccaaatgagcactgatcgtttcggccgtaacgatgcggacgaccggttcatggtggcagccgcaaagctggcgttcgacctagtgctacctacggaggcgtcgggtgcgaatgtgctctctctgccggaccgagaagcaccgtgggtacgccgtttgttcgagcgggcggtgggcggcttctacgaagtcgtagtgagtccgcagggctggcgggtgctatgcggcgggacgttgggctggcagatcgagcagaagacggcggggatcgacaagatcctgccgacgatgcgaactgatgtcgtgctcgaccacccgtcaaccgggcagaggatcgtcatcgataccaagttcacctcgattgtgacgagcggttggtaccgtgaggaaaccctgcgcagcggatacgtgtaccagatctacgcctatctgcgctcccaggctgggtgcggcgatgcgcttgcagatcgcgcgagtggattgttgttgcatcccgcgatcggccagatggtcgacgagacagtgctgatccaggggcacgccattcgatttgccactgtggatttgacggcaactcctgcggacatcagggcgcagctgctgcgactttgcgtacctgaccacacgatgaaggcaggcgcgtga

SEQ ID NO: 506611 - DNA, 1014 bp, Stenotrophomonas maltophilia
atggacagaatcgaaatcgacacttgggcaaacatcagcgcggaaggttggagttccctccttctgggtaacggcgccagcatcgccatccacaaggagtttgcatacccaacgctccacagcgtcgctgatgcagaagggttgctcgcaaccaccgcgccaatattcaccaagctcgggacgaccgacttcgagcatgttctgcttgcgtgctggtatgccgagcacgtcaacgtggcactgggaactccgtctgccgacatctctgcggcttatgcggaagtgcgcaccgcactgatcgaggcggtgcacagcgtgcatcctgtacatgcggatatcgccaccgacttacaaaaggttggtgcattcgcgagcgcgtttccgactgtcgtcagcctgaactacgacctcacattgtactgggccatgctgctgttcaatgcggcaagcggcagctggttcaaagacgcgttccatcatggggaattccagacggactgggggtatctgcgcaggccgcttcccccggccggtggggccacgctagtgttttatcctcacggcagtctcgccgtggcgcgtgactacattggtgatgagacaaagatttctgttggtgcaggggccgcaggtgacatgctcgacacgataactctctggtggtcgtccggaaactacgtgcccgtgtttgttagcgagggaaccagcaagcagaaggtcgcagcgattcgtcggagccactacctgacgaacgtgtatgaagaggttctacccagcctcggagagaatctggtcgtgtatggctggagctttgacgaaagggatcagcacgtgcttgaggcaatcgcgacaagtccacccaagcgaatggcggtctccgtgttcactggtcaaccagaaccggatcagcaggcgttctgccaccaggtgctcaaggccgctggccggtccttgccagaaacggttgtgacgttttttgattcgaagagcccaggttgttggaacaatccatga

SEQ ID NO: 506612 - DNA, 1467 bp, Stenotrophomonas maltophilia
gtgaacatgcttacgccgctcacgaccttccaggcatccgaccacaacttcggcatgctcccgccgctggccgcagctgccgcgagggcagtttgcgccagggccacggaagcctgccccgccttggtccggacgcacctgctttcggtcctgtcctccgcggttgcgcctctctacgtaatgtcgcccccaaactggacgcccattcccatcagcgtcaacacgctgtgcatcgccgatgttggtggaagtaagagcccggtacacgagtgcatgatccagccgctcaaggaccacgctcgagacagcttcgctcggtatgaggtcgcgcggaccgaagcgagcgccgcgtcggccgagcaacagttccatatcaagctcctgaaggccgagatcgcgcgctgcctgcgcaagcaggagcccgcgcaggaacttcttgcgacgctggccgagctgcaccgtacggccgcagcggcccccaaacaccgtccgcgcctcgcgagcaacctcgacctggaaagcctgcttcaccagctggatggcgagcacgaagccgtcgatttccttaccgacgaaggtgacaagctgctgagctccagcttgatgcgccacgtgtcggatctggttgatctgatcgacggcaagccgctggagtttcgtcgagagaagaagaggcatctctatgccagccaaccacgtggcacgttcggcttgctggcgcagtccgccgcgatcgagccgttccgcccccggtgcaagcgcaatgagtacaccgagcacaaggccgtcaggctcggcttcttcgcgcgtttcctcgtctgcgtcgcccagccgtcgcccatgggcaatcgatacgcacccgagggcgacgatgacgaggctctttcgaatctccacgaggcgctcaaggagctttacgacctgcaccaggacaaccaggaggccggtggcattgcacccatcgaactggccttcgcacctgacgcgctgggctactgggacgagctgtgccgcatcactcacaatctcaagttcggacagctcgcgcatatcgccgacttcgtctcgaagatgctcaacctgaccgcccggctggctgcggtgctgcatgtatgggaaagccagacccactacgtctcgatctcctgcctccaacgtgcctgggcgcttgtctcctggcatgccacccagtacgaactcgtgttcgtgccgccacctcccctgccccaacaggaggccgacgtggcagccgtaatcgagcacttgaagatctttcgccttgaaaccgactacaaggaagttcccacggagcctattggcctgttgcttggcattcccagcaatcgtctgcgcgccgcccttctacgcatggagcagcgagacctgatcgagttgtgcggcggcaagacaacgtttatcaactgcatgaagatgttctcgcgatcgcgcaacattacgtggcggtga

SEQ ID NO: 506613 - DNA, 342 bp, Stenotrophomonas maltophilia
atgccacccggcaccgttaacgaaatggccgcgcagttcaccgcagcgtaccaggcactcaaagacaagaaagatgccgaacggctccttacgcttatcaagccgatgatcctgaccgccaaggcggacggcatcagcgacaaggagttgattgacctgatcaatgccttgggtctgcgagagaagttctaccccgcaaagctcaaggagctgcgcggccgactgggcaagtctgaatcggacgcgcccgccagtggcgaagaggacccgtcggcgagcgaggtttccctccatgcgctcgcagccgcgctcaacggccgtcttgagagggccgcagtgtga

SEQ ID NO: 506614 - DNA, 957 bp, Stenotrophomonas maltophilia
atgggcatcggcaacgggatgcgaggaatcggactggcgggcatcggcctgctggccgggtgtgtgcagtcaacaccgactgcactgggcacgctggagtgggaccggatcacggtgccggcgccggcggccgaagtgatcgccacggtggaggtgcgcgagggacagcaggtcaaggccggcgccgtgctgatgcagctcgacccggcccgcggcgacgcgcagttcgccgcagcgcaggctgatacggcgcgtgcgcaggcgcagctggaagaactgaagatcggcccacgccaggagcagatcgcgcaggcccaggcgcaactggccgcgctgcgcgcacaggctgccgaagcaagtgcctattaccggcgggtccagccgttggcacagcagcgcttgattgccgccgctgagctggatcgtgcacgtgccgccgccggcaatgccgaggccagcgtgcgtgctgccgagcaggcctggctggagcgggtgcacggcagccgtgtgcaggatatcgcccagggccaggccgccgccgatgccgcgcaggcgcaacaggcagtgcaggccgtgaacctgcagaagctgcaattgcgtgcgccgcgcgacggcgtggtcgatgccttgccttaccggcagggcgaccaggcgccggtcggcgcgccgctggcggtgatgctggtcggcgagcgcccctatgcgcgcgtctacctgccgcagccattgcggttgcaggtcaaggtcgggcaggtcgcgcaggtgcacctggaagggcaaggcactgcgttgaaggggcatgtgcgctcgatccgcagcgagccttcatttactccgtactacgcactgaccggtgacgacgtcgcgcgcctgagctacctcgccgagatcgaagtggacgctccctccgacatgcagaagctgccggcgggaatgccggtgcaggtgagcttctga

SEQ ID NO: 506615 - DNA, 240 bp, Stenotrophomonas maltophilia
atgctgccggcattgcgcacgcccacgccgtgctcgttgccgaccagccagatcttgttggcgaacatgccgccgagagcgcccacgtccagcgcgaaggtcggtgcctcgccgttggccgggatcaggctggcctggctgtggtcggcattgaccacgttgttgcccagcgtggcctgcaactggttggcccagatgctggcgttgaccttcagtgaccgggtgatcaggtcggtgtag

SEQ ID NO: 506616 - DNA, 4248 bp, Stenotrophomonas maltophilia
atggtcaccgtagatgcgcccggtgccgagattgtcgatctcgccggcctccaggtgcgtcagcgcgccatcgatcaggccgcggttggtcagctggccacgggcattgaggtgggtcgtaccctggctggagatctcacccgaggctgcgttggtgatgttctgggcgttgaggtcgaggttgccaccgcgcacgacaccctggttgtcgaggtcgccggacaggttcagcgacagcgtgccgttggcgatccattcgccacgatggcgcatgccctgctgcagggtaaggccgaggtcacgctgcgcatgcacctggccgtcttcgctgagcacacgtgccaccagggtctggctgccatcagcgcgcagcaggccaccgctgttggcgacgttgtccgcctggctgtccaggttgccgccggtgctgatcacgccgccggtgttctgcagctggccgttgatctgcagccgcgcactgccatcggtgacgacctggccctggctgttgtccagccactgtgcaccgaactgcagctggcccgcctgcagcccacgcgtgccgtcgccgccacgggtgttgcggttgtccacgctggcggccgtgagggtcaaccgctggccggccgcgatcgcgccggcggcgttgtccacgtgcccgtcgagggtcaggtcgaggttgcgtccggcctgcacgcgaccaccggcattggccaggctcgccgcccgcagcgaaagatccgcagcgctggcaagtgttccaccggcgctgttgtcgacgcgggccagcagcaaacgcgcatcgccttgtgcattgactgcgccgccacggttgcccagcacaccgccttccagctgcagcttcccggccgccagcagcccaccgctgccggccgtgaaacggttgtcgatgtcctgcccggccgtgttgatggtcaggtcggccgccgactgcacgcgaccgccctggttgtccagaacgccactgtgcacactcagcgcgcccttctgcgtacccagcgtgccggcgcggttgtccagccgctggccgcgggtctcgatgtccagctggccacccagcagcgtgccccgctggttgtccaggccgttaccctgcagctgcagccgttcggtggcctgcatcgcgccgtcgctgttgtccacgcctgccgccgtggtcaccgtcaggtccttgccagcgaccagggtgccgtggcggttgtcgagactgccggcgtccagggtcaccatgccggtgctggacagcaggccctgctcgccattgtcgagacgaccgtcaacgcccagcaccagcgcgctgccgcccgcgtgcactgtgccgccctggttaccaaggctggccgcggtgaccgtgccggcaccgccgagcaggatgcggcccttctggttgtccagcgcctggccgatcgccagcgtggagtgcccggcgcctgcgccctgcagcgtgccctgcgcattgatcagctgctgcgcgatgacatccagcgcgccattgctggcgagcgaaccgccgcgattgtccagcataccctgtacgcgcaggcgcagcgcatcttcaccggttgcggtgagcgtgccaccggcggtggtcagggtgtcggcgctgatggcgacgcgacgcgccgaggtggtcgctccactcagatcgagcgaggcgccatccagcacgaagctgccgttgctgagcacgctgccgcccttgcccagcagggcctgcgccgagacctgcagctggccactgccggcgtgctggatcctgcctgcactgttgtccagcgtccgggccagcagggtcaggtcgccattgctggccagcgtaccaccggcattgcccagcgccgtcgccttgacgcgactggcgccttcgccgctggcgatgatgcggccaccggcgttgtcgagcgtggtggcctcaaggtcgaagcgatcggcgcccagcgtcgcgtcacgatgatccacgtcgtcggcgcgcaaggtcagtgtggccgaggagaccagcgtgcccttgctgccgtccaggcggccggtggtgatgtccaggccctggttgccggcctggcggatgctgccgccactgttgtccagccgtgcggcggcgatcgtcaggcggttggcgttgctggcgatcgtgccttcgtgattgtccagcgcaccgacgatctgcaacgtgctgtcggccgttccggcgccgctgagcgtgcccgtgcggttgatcagttcaccggcctgcacatccagtgccccgttgccggcgatcgtgccgccactgttgtccacgccctgcgccacgtgcagccgcagcgcgtcgctgccggtcgcgctgaggttgccaccggtgttgtccaagcgctgcgcatcgatggcaatgcgctctgcctgggtagtgctgccggcccccagcagcaggtcgccgccctcaagttccagcgccgactggctgaggatgcggccgcccgcaccctgcaggctgtctgcgcggatctgcaacgtaccgccgccggcgtgttcgattgcaccgctgcggttgtccaggcttgccgcctgcagccgcagatcaccggtaccggccaggcggccgccgttgctgttgtccaagcgctctcgggcctgcacctgcagcgcgccgctgcctgccgccagcaccttgccgccctggttgaccaggctgccaacctgcagctgcacctggccattgccggagatgccgccgccgctgttatccagcgtgtcgcgcaccgtcagcgccacgccctgcgtaccggccgactgcagcgtgcccttctggttgtcgatgcgaccggtgtcgatgcgcaggccgccgttgccgacgatctggccgccctggttgtcgagcgcatcgcgtacgtccagtgccagctccgagacaccctgcgagacgatctggccctggcggttgcgcagtgccctggcgtggatctgcacactctgcgccgacgtcgtaccgccgctcacatccagctcgccgccggacagcaccagtgcaccgttgctgagcaggcgcccttcgctgccacgcagcgtatcggcctgcacgctcaagctcccggtgccagcctgctgcaccaggcccttgctgttgtcgagcgtggtcgcggtcactatcaggtcgccgttgccggccaacgtgccacctgcgccgttgtccaggttcgacgccttcaccgaactggcaccggttccgagcgacagcaggctgccgccgcggttgtccagcatgccagccacgatgtcgaatcccgccgcactgagcgcaccgttgcgcaggtcggcgttgccagtcgtccagtgcaggcgccccaccgtgctcagccgtccaccgggaccagcccagtcacccgtgtccagcgtgaggccaccctcaccggcatgttcaatgcggccaccggcattgccgacctggcctgcttgcagcgccaactgcgcggcgttggtggccagcaggccgccgtcattgttgaacagaccctgcaccgtccacgacgatgccgccttgccggcgtgccgcagttcacccccgcggttgtcgagcgactgcgcatccagccgcaggccgccggctacgctcagcgcacccttctggttcgacaacaggcccacatgcaacgcggcatcgccatgcacctgcagcgtgccgccatcattgcgcagctcgcccccagcctgcagcgcgctcactcccaggcgaccgccgctgttgtcgagtccggcacgtgcggcgagcgataccgcaccaccattggcgatgctgccgccgtcattgtccagcatgccggcgatggcgatcaggccctcggccatcggtaccactggcgaggtcggcgtgccggtcgagccgccgccggtacccggcgtccccgtacccggggcaccggttcccggcgttcctccgccgctgcccggcgacgtgccgccccctgggccaccgccgttaccaccggacgcgacggcatccagcgcacccagcagaccgttgctgcggttgcgggccgcttcggccttgagcgccagcgcctgcacaccagtctgttcaatggtgccgccatggttgcgcaggccctgcgcctcgacctgcaggcgctgtgcgttgagcttgccgccgctgttgtccagcgtgccgccggtggtgatcgcaacctcgcgcgtggcggcgatggtgccggcatttgcaagatcaccgcgcgcctgcaagtgcacgttctgcagtga

SEQ ID NO: 506617 - DNA, 165 bp, Stenotrophomonas maltophilia
atggccgaaccgttctgcacgttcggtgccttgcgcccctggttgaggttgctcaggtcaccgacatcgatgacaagcgtgccaccactggtgatgctgccgccgatcctgccgatctcctccgagatcgtctcattgctccaggtgacccgttcgttgctgtag

SEQ ID NO: 506618 - DNA, 1725 bp, Stenotrophomonas maltophilia
atggtcctctgcggcggtgatcaatacgttgttgcccgcccccagaatcacattaccagtggcatcgaccaccgcaccaaccgcagtcagatcgcggccggcggtgatgttgatgcgctcgccctggatcgccgtaccgatggcataactgtcgctgttgtcgacgctgcgcgtggtggtggtactggaaagcgtcttctttttcttgtcgtagctgtccaggctgtagtcgtgcgtctcgttggccgagagcaggttgacgtcgcggcccgcggccacgcttaccgcgccgtcattgctgtcgaccaacgcggctgtcaggttcacgtcccggcccgcggtcagcagcagattgtccccggcctgcaacaggctgccgcgcaccgtctcatcacgctggctgacctgcagcgagctgcgcttgcccgcactggagaagtcgcggctctcactgtccaccagcgcctggctgttgatgtcaccgccggcctgcaatgccagacctcccgccgctttgatctgcgcggcggccaggttgatgtccttgccagcggccagcaccacatcgccagcgccctgcaccgagctggcagcatgtgttgtcctgctgctgcgctggtggttgcgctcatcgaaggtggcgtcgcggcgttcttccagcgcaatcgcgccaacatccagagtgccgcctgcggccagctgggtaaggccgtcggcgccggcgttgcggatctgtgcggcctgcaggctgatgtcaccgccagccaccaccgacagcatgccgtcgccactggggttggtcacatacagaccagcaacccgatcgatgcggttggtctcgtactggtaggtgccaccgccccgctgtgtctccaccgtggaggccaccgtgacattgcccgcggccttgaccgacagcgcatcggtggccgtcacggtggcaccggcaatgcggatgtccttgtccgacgacagcccgacgtactggccggaaatgctgccacccagatgctcgatgttgcctgcatcgatggttaccagcttgcggccggcgatgttgccggtgttgaccaggccattgcccagtttgatatcgacattggcgccggccagcagtgcaccctgcccgtccagatcgcccgggcgcaggcgcaggtagacctgcggcaccagcgcggtggtggtgctgccatcggccagggtgacggtctgctcgaccagccagacgatgtcgctggtcagctgtgccatctgcgcttcggtcagcgccacgccgggccgcaggccccattcgctggcgaccgtggcaccggcctccagcagcgcgcggtattgcgcctcgtcactggcgtagccgtcgaggaagcggcgaccggtcaactggccgatctgctcacgcaccagcttctgctcgtagtacccatcacccaaccgcttctgcacggtatcgggcgagtagcccatctggcccagcaggtggtccgagctcagccaggtcttgtggtcggtgaagcgcggatcggtctcgaccagatagtggcccccgttgggattgacgttgaacaggctggcgctcggcgcgcgcgtatccggcgcccccattgcgatgcggtccggcgatccgccactggccgcgaccacgcgcggcccggacgtaccggtgttgccgctcacgccgccgacgttgccgccctgctgggtgccggcggcatcggccgcctgtga

SEQ ID NO: 506619 - DNA, 1863 bp, Stenotrophomonas maltophilia
gtgctggcgggcacggcgggcgtggttctgctgtcgctgccgctgggagcgatcgcggcactgccgctgacggctgtgctggcgctggcctgggccgggaacgcaggcttgccgttgccccacatcgtgctggctgccatggccgtgcttgcgctgctgcatctgcgtgccgtcgcccgcatgctggccgggtaccggacggaagccaccgatgtggaaccatggccggtcatgcggagagccgatgcccatgcgctgtttgcggtgctggattccgtggcagcaacgcggcggttgccacccatcgatcaggtctggatccacgatgagtgcaatgcatccataagcgtcgaacgtcgctggcggcaggggaccacgccagcgctccgcgtgacatttggttttccattgctggtgatgctctctcccgagcagctgcgtgcggtcattgcgcacgagctggggcatgtcgggggaacgcgtgctgtcctgcattcgctgctggccagactactggcagtgacatcgggcgacgcgccgcacaatgccgatacgcgctacgcacgatcagtgtggcgtctggtggcgtgggtgggccgactctgtggcccggtgaccgggagatgctggcgtcgtctctcgcacagctgcgagtaccgtgccgaccgtgccgctgcgcagtgctgcggcggtgcaagggtcgcgcagacgctggccatgatcgggttggcaaagcatacgctgtcaacgatttggtggccgttgttcttccccgctgatgccacgtctgccgcgccggaaggcaggccttttgcaggcttgctgctgggggacctgcgctggccggacgccagtgagcggagttattggctcgacgaagccctgttgtgcggtgtcgcgccgttgccgacgcacccgagattgagcgaccggcttggcatgctgggaggcacgaacatgccggtgctgcatccgatcggcgagggatgctcggcgctgtcagtgctggtgcccatgcagacgtcaaacaggttggctgatgcacttgaccgtcggtggcctgccgatgttgctgacgcctgggaggagcatgtggcgcgctgcgagcgactgcgtcaggagcgcgaccatctgctctgtcgcaggagtacccaggtgctgcctgcgcgcgcgctggagcggctgggctggctgcagcgggagctggcggatgcggggtgctggcagaccctgaacgatgcattggcttctggcgatcaggatctcgctgttgcgcggtcaatgctcattgagcgggccattgactgcggagaccgcgcggcggcgacggcgttgcttgacgagtgtgcaggccagtccattgacatggatcgtcattgccgtcgctggcaactgcgtcttctgcatggggaaggtgcagaagattccaggctggcaccgctgcgccgtgccgtggccgccgacgcgcttgcagaccatgccgagagcattgaatggggcggcgttggggccgacagtatctttgagccgttcgagatggccgatcatgtgctcgaagacttcaggtgctcgatgcagcgagtgcaggcgatagcgaggtcggtgagtctgttgcggcaacgttcgcggtggcggagcgatcgccatcggctggtggtcgtggttgtgcccgatgcaggccttcaggaaaccctgctggaccggctgcgtatccgcgacagccaccagaggctacgttgcacgcaccttcttgaggcggtgcagtttcctggtgggcttgcgtgggtgggcactgtcgaaatgcctgacagccggcttgcgggtcgcgtcgcgcgaggcaaggcctttgcccggatgatctga

SEQ ID NO: 506620 - DNA, 2091 bp, Stenotrophomonas maltophilia
atgacccatgaacgtctgatcgccccccatgaacgcccggaagtggctgacgccgtcagcgtccgtaagatggctcgggagctgcttctggccggtcaggggcaggccctggacgccctgtttgtcagtcgtgacgacgaggaggggccgcggaccgggctgggctcagcgcaatggttgatgcagcagttgatcgcgccttggcttgaagaggcccggttgatggaactgctgcggggttggattgcggagtgcccgcagagctaccatgcgtggctggtgctgggcgctgcctgggggcagaccgccgcacgcatccgttcagcacggtgcgcgaaccaggtgggccgcagtcggtggatcggcgccggtctggccagagaccacgcagtagcctgctttctgcaggcgctgacctgtgacccgcgcgggcgacaggcctggcatcgactgttcagggtcacgtgctatctcggtgagccgcaatggctgctggatcagcaggtcggcaaagtgccggatgcctacccggacactgatggccatgatgagctgatctggcaggcaggattggcgcatgtggcaacccttggcggggctctgcaacagattcccagcctgccggcctgccttgcaccgcggctgccgcacgagttcgaggacggcaagatctactggctgcggcaggcattggcagtcagtcccaacgacctggacctgttgggtgactatctctatttcctctatccacgctggggaggaagccacgagcagatgcagggattcatcgacggtccgatctgcacggggctgaccgaggcgcagcgcaatgatctgcgcgagctgaaggagaatgactggatcgggatgatcgatgacagtgaggatgcggaggacatcgcccaggtaagggaaagcctcgacgccctgctggcctcggacctgctacccgaaacgcgtgcacgcgcactgcgggcctattcccggcatattgcctatcagtcacggacggagatggatggcaaggtctgctggaacaaggctgaaatgcagcgtgcgtacgcgatgttggcggaaatgttcgaactgatgccttacgcattcgccgaacggagtctgtatacgctggagcagtgcgtcgtgcatgctggaatagaggacagcgctgacctgatgcgccgctgcctggagcttgaggagcttctgcacaacgatgcgtgtgcgctgttgtggctggacgtcgctcgccagtgcgatgcctttggtcttgctggcgttgcgcccttggcggctggctgcagcgaaggccgcttcgacatggcgttgcggatggctgaggcgcaaggcacggatgtgggccagcacgcgttcaatctgtatgacggcatcgattcggatgccggaatcgcattgttcgagcgccttgtcgcacgtggtcacgcgggtgccatgctggtgtactccggcgagctatcgccagatgcaccgcccaccaagcgcggtcgtgcggtcccggacgcggcgcgaagcgcggcgctgctggaacaggccgcagccgcggatcacccggttgccctgtgcaactgggggctcagacgtgcaaaggccttttataacgatggttgtcccgaggcgcgcgccgaggcgctgcgttgttatcggcgggtcaacgacgttgcgctgccgcacgaagaggcatggtcctacgcaatgaagaccctggtgcggatgctctgggaaggaacaccgaaagagcggcatgaggcagtgcataccgtgctgcttcgtatctggctgcaggatgacgccgatctggaggcatgggcatccagattcttcgccgatgccttcctttcgggcattggcgtcaccgctaaccgctggctggcgagcgtatggctggagcgcgccttcgagcgtgaaccggacgatccggacgttgcagacctgcagggtcgacttcagatgaaaggggagtggctgggtagcctgcgctggcgccgcgcagtcgaacgtgaccgccatcagattgatcccgtggcgtatgcgttgacgtttggtgaggcgccgcccgattccgatgcaggctga

SEQ ID NO: 506621 - DNA, 1551 bp, Stenotrophomonas maltophilia
atgtcttccctggctcatcccaagcgttcgcccctgcgcttgaaccgttttgtcttcctcagttcctcggtgtcgatcggcatcctcgggctgctcaccgttctctatcccgaaggcagcgagcactggctgcaatgggcgcaggccgaagtgtcggccgcgttcggctggtggtacatgctgctgatcgtgctgtgcctgggcttcgtgctgtggctggcgttctcgccgtacggccgcatccgcctgggccacaacgaggaatcaccggccttcggctatgtcgcctgggtttcgatgctgttctcggccgggatcggcatcgcgctgctgtactacggcgcctacgagccgctggaccatttcctgcatccgcccgggcaacccggcggcaccgtggccgccggccgcgaggcgatggtgctgaccttcctgcactggggcctgcacggctgggcgctgtatgcgctggtcggtgtggcactgggctacttcgcctaccgccgcgacctgccgctggcgctgcgctctgcgttgtacccggtcttcggtgagcgcatccatggccgcatcggcgacatggtggatggcttcggcatcctggccacgctgatctcgatggtgaccaacctcggcatcggcgcgctggtggtgcagtccggcctggtctacctgttccacatcccggatacgccgcaggtgctggtggcgatcgtgctggtgatgatggtggtggccaccatcggcgtggttgcaggcgtggaaaagggcattgcctggctctccaacctcaacgtgcgcctgctgtgcggcctgctgctgttcgtgctggtcaccggcccgaccctgcacctgttcgatggcttgatccagaacaccggcgattacctcggtgcgttcgtgcgcaagagtttcgacatgtacctcaacgacccgaaggggcgtgagtggatgggctcgtggacgctgttctactgggcctggtggatcgcctgggcgccgttcgtcggccttttcgtggcgcgcatctcgcggggacgcaccatccgtgaagttgtcatgggcgtgcttctcatcccgctcggtttcaccctggcgtggctgtcgatcttcggcaacaccgccatcgacctggtcctcaaccatggccaggcgatcctgggcgacgtggcccagcacgatgcggcgatgacgctgttcaagctgctggaatacctgcccggggcgccgtacgtggccggtgctgcggtggtgattggtttcgtgctgttcctgaccccggtcgattctggcacgctgatgatcgccaacctgtgcacccgtcgtgttgacgatggcgtggaagatgggcatgacgcgccgatctggctgcgcgtgttctgggccgtcggtatcaccgtggccagcgtcgggctgctcctggccggcaatttcagcgcaatgcagacggcggtggtgctgtgcggcctgccgttctcgttcaccctggcgttctacatgtggggcctgctgaaggcgctgcgcaccgacccggacgcaccgcgccgctga

SEQ ID NO: 506622 - DNA, 1872 bp, Stenotrophomonas maltophilia
atgctcacttctcgactgacatcgaaataccgtgacgtccctctgcctagcgaccttgccagcattcacgacgtgccacccgatttcgtagtgtcctacaaatcagatggctcgccttgcagtcggcacggagacaaccgctggatattctccgcataccactcgtcgtccatctccatacggttcgccaacgatgggagcacggatgccctagagcagagcaacgcagccgcggcgaaggtcgtagtgctggcactactctatattggacaccatcccctaggcgccggcagccttcaaacaaaattgtgccgtctaagggaaatcctcaaggcttgcaactcctcacgaactccgatttctgagttcggaaactcaaaaatatgccaggcggagcttcgaaagcacatccgccccagctcacttggatccacgccactgcttatgcatgaactggccctgctgagtgaagaaataggctttacactttgcccacccgcgcttatcccaagcttctacccagcaggatattcagccaatcaaaccctctacatccctaatcggatccattcctacgtcttgaatcaatgcgatgcaatcgtatcgctagcgaccactcatatcgacctacttaagaattcaatacgtagccaactgtatgaagcgttcaacctcgctcctccactaggcagccaacttgccacggaagatccttccatattacctgcgagactcgtgggcatcttcgattccgtatacggcacactagatcaccgatacccattcctgacttacatcacggcgatacgggatgccgccatgattttgctgtgcgcgcatagcggcatgcgcatttcagaggctcgcacactcaagcgcgggtgcctccgtcagcatcaggatcctgccattggacctgcaaatttgatagtcggagtacccgcaaagatacaccccatgacggaatcgacttggatatgtagcgacttagcagcaaaggcaatccatgtgctggaagccatttccgcggtacaccatgaaatgcgccacactaggctggtctcaggaagcttcagcaactggctatttacgtccatcctgggctggaagaagaagcagcatagtatcgacccaccgcgggtttcgatgatcgagaggatggactatccgtggctatttgatcctgaggccctgaaggtcactgcagacgatcttagagtgtccgaactcatcaacggtaactctggagggcgcgttgtacttggagagccgtggccgttcgccttccatcaactgaggcgcacattggtggtgaattccgttcgctcagggacagtcgctctcggctcgatccagcttcagctgaagcatcttcatcttggaatgaccgagtactatgtgcgcggttaccacagcctctcgctcaacgaatcgatgcgcattgaacttgcggaggaactggccaatgaggcggcacgagtcgcgaatgggctcgctgactcgaagcacttttctccccacggctcggcccataagagtcgccttcttgagttgatcagcacctcggatctcaaggggcttgcgaagctcgctagtcagggcacgctttccgtgagacctaccctgctaggcgtctgtctgaagaagggcgactgtgcgcatggcggctacgacacgctgtcccattgcgtaacgtgccctgaagcactgctggacaagggacatgtagtacgtgcagagatgttgattgctcacagcgagcctctgctggaagcacttcgcccttccggcgacagtcctagaatgcgagcgctcgagggtcaggtcggggcgcttagagagttcgtcatcagagtgagatccaatgagtaa

SEQ ID NO: 506623 - DNA, 663 bp, Stenotrophomonas maltophilia
atgtacccgatctgcattaggaccgagtcatcaatcattccctgcacttcctcatataaccgaggcaagtctggcaccgccaagatctgccgctgctcattggcagtgagccgccatgcctgcgatatctgcttgaaagtccgaactgcggaacctttcaagtcttcgattagacccaccggtggcagtggcatactccgtggacctccccgtgatctggtccgagaagactctcaaaatccaaccatgtcctgcccaggtgcgagaccggacaaggcaaatgctcatatgacaacccggaacggaagcgcaagactccatccaagagaagaagggcgtacccgctacggcacaccctacagtcaggcccttcgagttctcaagaattcggacagttcgtcctcaagattcaccagaactattaccacgcttgcgcgcggaccagaaactggcagcggcattcacgggcccctggtattccagaaccgcctgcgccagctcctcaggagattgggcagacaagatccgttcctccagaccctccatgccagactggagatcatcgatctcttggtcaactggaccatgaaggggatgagcgctgttcatctcgtcctgcagagccttgaggttggtccacatatggctcttggtaccttctag

SEQ ID NO: 506624 - DNA, 993 bp, Stenotrophomonas maltophilia
atgagctggcttaagacactcggaacgatgtttaggaggaatggcgtgacccaagatggccttatcggcgcgaagagccgaaccaatgaccttagcttcttctggtttcttgtggatgccccaatggcaatggacacgctcctcattgagcgcttccacgatgctgtcatccggccagagagcatagtccggaccgagtccgagatgacggcaaaaaaggaaacagcagagcgccgactaggtgcggaaggaagggggtcgggggaggttccgttcgtggtcaagctcgccttgaagggcaaatttgagcatcgcgcaactggtgaggacgccgcctctcttacccgacaactggacatcccccgtacacacgagcgtctgcttgaggagatcgttgcgttctacctgttgaacttccctgagcgtgtcctaagggttgatccggttagtaccaaagtgttcactgccgactcaacgaccgaacggaagtacgagatcctagacgaaacctgcgctacgcctggtccccggccaatcgttctcatcgacgctcccaagttcaccaagatcatgccgatagctggcgagttcatgaatggaaagctcgatgtggtctatgactcactgatccaagcactatcgactgcagatgatccgcttaagcgctttgcgcgaggcatggatcaggacaagaaagcggaacgctggaaggaactggccgatcgtttcgatgcgagcacggccatgcaggtgctcgaggatgcggcacgaaggaatgacaactctaggtttgattgggttgacttccgaatggcgtggggtgagacaggattcccttctccgcttcatctgcatgtggtgcctaacggccgatatccgactggggtgttcgggcatgcgttcatacgcagggcgttcagtaacggcgttcgcatcgttggaacgctcaaaagcggtggcgacatcaacgtactagcgatctatgagcgttga

SEQ ID NO: 506625 - DNA, 822 bp, Stenotrophomonas maltophilia
atggccgcatacgcgcgtgctgaagccgcggtcaatactttggggccattcctgtttccgctgatcgctgatgccgagaagaaggtgatcggtacgcgctccatccctgttcaggccacgtcgccggatatgcgcgctggcaggtatgagttgcacggcgtaattgatgtggtgacccagatacaattgagcgcagtcgatacgaacaatcccctccgcaaagcgattgaggatggttgcgaaaatttgccgcctgtgttcgagattcttgccgattacaagggagcccctaggcctgccctgagcgatgagcactgggaactcggcgactggcaggtgcagacctatgcctggctaaggcgccatcaagccaagggcgtacccatcatcgctggcttgctgatctatatcaatgagcttgccccgggtagcaacgacatgcccaacatccgcaagcagattgagacgggcgacactgacgtgatgcctgtgcctggctctatggatgatttgatcattagaaactggaagccggggcaggatacagaccaattgtctgcagaattccgctttaggcgcgcactccgggttgttcctgtaacggagcagtctctccagtatgcaaccagtcagttcgacgaggtggtggctgagatcgagttgagcattcggaaagaggctgaagtgggcaccatcgtcgggacttgggaggggaactgcaaagaggaagaaacatgcgcggcgtgtgattttcgccactcgtgtactactccagccccaacgaacacggtacggccaattcaggcgccgatagcaccatga

SEQ ID NO: 506626 - DNA, 1911 bp, Stenotrophomonas maltophilia
gtgagcaagtccacggtttatgactgctggagctggacggtcccgtcgagcatcgagccaagccgggccgtccgctattggccccaggccctgctgtctggggcatgcgtcgcggcgctgacctatcccgcggctctctggctgggctggcaaatcccatcatcacattcactgatgaacttcggtcaggcactgactggcagcctggcggcgctggggaaccttgccaccggcacgatctcattccgagagcctgccgccgcattctgggaggtggccaaggagcaggcaacgtttggcacgttggcacgggtcggcgttgcggcgggcttggcagggtgggcgtcgatttgggcgacgcggcgtgggctcatcccgcgctcaaatacctggcatgtgtccggcgctcaactgttgcaggggaaagaggccctgactgaagcccggcgtcgttcgcttacaaagaaggagcagaggggcgagcggcatgcgttgtcactacatccggcttgggtggtcagcaagaagctgctggcccgtcacatgttcatctatggagccgtgggaatgggcaagtcagtcatcctgaagcacctgctggaacaggttgttcggctcgacaagaaggctttcatctacgacatcaaaggagactttacgtcgatcttcgagcgcccggtgatcgtctgccccttcgacaagcgaagctggatctgggacgtgggccgggacgtagcgacgcaagcccaagccgccgcgttctcccaaagcatcatccccccggaggagggcagcggcgcattctgggcgtctgcggcgcaagccttgctggaagggtgcgtgcgcgaactccaggccacgaagggcaagaactgggggtgggcagagttggccgcgttggttgcccgtcccgctgaaccgatggctaaagcactgtcgctctactacccccgagccgccgctctcatttccaatcccgattcgaacaccaccagcagctgtatcgccgtgctcgccaacggcaccgcggttatcgagcgcctagccttggcatggcccgagcgcacgcctgggcagatgttctccatgctggactggatcaaggacgactacacgggatgcaagcaggtcattgttcaatcaggtcctgatgaggtgctaaccaaggcctacatctccgccatgatcaacgtcgcggtgccggaaatcatcggcccctcgctgccagatgacgaaaccgggcgattcctggggttcttcttcgatgagcttacctccgccggcaagctcaacatcgagctgttgctggccttgggacgctcaaaaggcgtggtggcctgcatggccgtgcaggattggtcacaggtcgagagggtctatggggacaagaccgcgcaagccttttcagggttggtcggcacacacattatttgccatctccaaatcggcgagacccgggaaaaagtctcccggaacctgggcaagcgcaccgtggcgtggcgcacgcatgatgacaaggcgaccgtccacgaggagtcgaaagccgttgttccgccggggcggctcactgacgacttgggcccacgcaatggcagcgcctatggctccgagagttggggcatccgggccattgtgcagacaagccgggacccactcttgctggactggccgggcgtcagctacccgcacgcgcgcgacggccaggaacgcgccgcgtggacccaacagggggcgcgcccggtggagcaaaagcccatgccaccgagcgacgcgcagagcgctgcagaggtccagcgggtcttgaagatgaccgccgaccaggccgccgcggagctgcgaaaacgtggtgccacgccgccgaagctccgcgccgtttcagacgacgaactggaagccatcttccgcaagtag

SEQ ID NO: 506627 - DNA, 2928 bp, Stenotrophomonas maltophilia
atgttcaacgtcaccgcattgaccgctcaaggcacggacagcaagtccggcgcggcggtggtcgagtatctgatgctcaccgagtattacctcgacaaagacgggaacgcgcagggcaccatggcctggggcggcaagatggccgcgcacctcaatctcttgtccacggcggtaacacgggagagcatgagcaagctggccgaaggattcgacccccagacagggagggcgctttgccagaacgcaggccagaaaggcaaggtgcggccaaaggtggacaagaacggggatcccgtcctggacgcccaaggcaagcccgaggtcgtggtggtcggcggccaccgggtcggctacgacgtcacggtgtcggcgcccaaggacgttgggattctctttgcaatggagtcgccagaacggcgcgatgccgtgctcaaggcgcaccaagccgcctctacagaagcgatgaaccggctggaacagatggttgagactcgacggggaaagggcggcaaggacgtgatcggcgtgaagggcctggtgtggtcaagccaccagcacttcgccgggcgtgacctcgacatggatctgcacacccaccatctcgtttatggggtggcgctgggagccgatggcaaggaatcgaccttcgatgccgtcgaaatctatcgccatgcccgggccatggatgaaatctacaagctggagctctacaagaaccttcaagggttgggctatcaggtcgagcacgtccgagaactggacgacgacggcaaggagaccaaccgatcctacgcacgccttgcgggcatcgaccaggacgtcatcgaccacttcagcaagcgccggaaggccctgctcgaatacgcggagcagcatggggtcagcacccaacaggcgaacaaggccacgcggaagcacaagaacgagcccacttacacggagttggtcgagcactggcaggaggctttgaaggacttcgagctgacgccggagacgttgaaagcagcgcgggggaacctgaacaaggtggaacacaagagcgacgccgagctgctggaactgctccacgagaacgaagccgtgttcaacgacattgatttggtgcgggtgctgggaatggaatacgccggcaagttggacgcggccggactccatgcccgcattgagcagttcaagcaagacaatgggctggtgctggtcaacgccgagcgcttggcagacgaagaccgggggcagacactggcccgcaagcacacggaagaccggttctgcgcgccatggatgttgcaagcggagcaagcggtggtggacatcgccaaccgccgggccaacgagacccagcaccatgcttcgcaggccacggtggatcgcgtcattgaggactaccagaaagccaagggcttccagctctcgcaagagcagttggtggccgtgaaccacatctgtcgcggcagtggcggggtggcaaacttgagcggcttagcaggcaccggcaagaccacgatttccgagctctacaaggaagcgctggaatctgaggggatggtgctgctgggggtgtgcgtgtcgaacaaagccgcccagaagttggaagtggaatcagggatgccctcaacctccatggcacagatgcttcacgacttggccgaaggcaagcgcgaactccagcccaacgacgtgctggtcattgacgaagccggcatggtggacacgcgggacacccgagccttgttggcctacgcagagaaggcgaaatccaaggtcatccttcaaggcgacgccgagcaactgcagcccatcggggccgggtccggttttcagctcaccaagcaagcggtgggcgatgtgaagttgaccgagattcgccgacaggcgcggcaggaggaccgcgagacggcgatggggttctacgccaaaaacgagaacggtgaagtggtcgatctgaaaaagggcacccgcagccggcgcgaaaccttggagctgggcgatgagcagaaggagcgcctgatggactccatcgtggaagcccactcgcaggagaaatgcatcgagcgcctggtgaacgactacttcaagaatccagcggcgctggacgacaagctggtgctggcccacagccgggccgaggtcggcgctctcaacgcagggattcgaaaaggcctcaaagaacgcggcgagatcggcacggatgaggtggtggtggaggggcgcgtcaatggacgaaagttcgatctggccttggtagagggagatcgggtgatgttcacagccaaacgcaaggacttgggtgtggtcaatggcacccaggccaccatccaatccatcaaagcgtcgcgctctggcggctacgatatcgtcggcaccttgcgttcggagaacccaaaggagaatgggcgcaaggtggtgtggaacacgcacgagcacaaggcggtggtccacgactacgcggtgaccgtccacaagagccaagggcagggcaagcgcgaagtgttccaccttatgaaccttgggatgatggacaacgccagttcgctggtggcctttacccgtttgactaaagggagctacaagctgtatggcacctacgatgacgtggagcaactcaacacccgcttggggttggagcgattgaaggcgaccgttctggacgcggggctaaaagacgatccgcaacggccggttgtccagcgccttggggcagctgcacgccccaccgctcaacgcccagccgctcagcgaacgcgcatccaaggcaagctcgacgcgctgctgaaggagcacgcggaacgcccaaaaccgcagaggagcgagggcgagcgcaaggcccgttggctgctggaagtgctggagccgttgcggcgggcgcgcaaggcgtctcccaagctgccggcgcagtccccgaaacacacgcagggcttctcgttgtga

SEQ ID NO: 506628 - DNA, 762 bp, Stenotrophomonas maltophilia
atgcagccccgcttcaccatcgccgccgttctggcttgcctggccttggccgggtgttcgaccgttcaacccaaatccaaacccaagcccagcagcccctgggttttccaaaccccgaagccgcacggcgccatttaccgattcttccacccgaaaagcgaaaggacgtggaaaggggtttccccagcgctgcgggaaaaggtcgaagccgtccaagcccaactggccgcggaagggtttgatgtgcggcccgtggaagggtatcgaagccccgagcgccaggcggccctgcttgcctccgggtctggcgtgaccagcgttggggcattctccagctgccacaacttcggactggccttggatgccgccgtgttcgtcaatggggagcccagctggaacttggacgatgcccatgtgatggccggctatcaacgctttggggagctggcggagatcgtggggctgaactggggcggccgatggaccagcccgaaagactatccgcacgtcgagatgaaagccgagtgcggccaagccaagtgggcctaccggcaggggcgcaagccgggcgcgtttccttcggtgaccggagagccctcttcggaagtgctggcccgtgcgctggcgccggcttggtgccctgcggggatggaaacgtcgtgtctggcgtggggcaatgaaaaccggatgacctggaactggacgctcccggctcgggtttgtgtcggcaccttccctaacaccttgaaaaagatcgcctga

SEQ ID NO: 506629 - DNA, 1257 bp, Stenotrophomonas maltophilia
atggcccgtcccaaaaaaaccgcccgcacaaagggcgtctacgaccgcggttcggcgttccaagtgaagatcaagcgcaaggatgcagcgggcaacctgcacgccatcaaccgcactttcccttacagcgaagcgacccgagccaaggccctcgcccaggccgaggcgttcgcttctgcagagcgcgccgcgctccacgaagagaagcaacccgcctccaacctgatgagcagccagagcctgggggtctggatcgagcgctacatcgccgaggtgctctcactcaaggccaaggatggcaagaagaaggggagcgacaacgatgcgcgcctcttgcgcctgctcgccaagcgcttccccgccaccttcagcaagccggtggacaagctcacgccccaggacttcggcctcgccaacggcggcatggcccggtctttggaagatgactactacctcgccccggccaccatcactcgccaactcgccgttctctccagcgtcttcacggcagcgatcaagcgctggggcttcaagatggacaaccccatccacgccacgctcaagcccaaggtgaggaacgagcgcgagcgggtggtcactgataaggagtgggcggacatcctgaccgcccttgcccccatgtccgcggccacccggggcgccattgccttcctgcgctggaccgcggcccgccgcagcgaagccatcaagctgcgctgggaagatttggactacagcaagcagcgccccgaggccacgttccgggacaccaagaaccccaagggtggcaagcccatccatcggaccatcttcctcactcctgaagcggttgcggtgctggacaccctgaccaaggagctccacgccgccaagctgcgcaaggatcgcatcccgccctctccccagaacccgcccgccgtgcgccccagctccggttttgtcttcagcttggacgagggcaagacctcgattgcctcggacacgctcacccaggcctggggacgcgcccgcgaacaagcgggggtgaccgacgccaccctgcacgacctgcgccacacccgcatcaccgagctggccaacttgctgcccatgcaccaggtcatgcaactctcggggcacaagaccacccagatgctgacccgttactacaaccctgacatgcaagatttgggcgagctttttgaggtcacgaaagcagcggctgaaaaagcccagcgggactacttgaaaaagacgaggaagaaaaaaggcagttga

SEQ ID NO: 506630 - DNA, 507 bp, Stenotrophomonas maltophilia
atgcccctgatcaccgatgctaaggcccggagtttggggcctggtggccaggcggtggctcacggcggggtaactggactcacgctgatcccatcggccacgcatagggggcgcggcaaatgggtcctgcgctttgtcagtccagtgacaggcaagcgccggaacgcgggcctgggcagctacccccaggttggcatcgccctggcgggcaagctcgcccgggagatgcgggaacaaatcgcggcaggaagcgacccgctggaaaccaaagctgcggaggatgccaagcctaagacgccgacgttccaggaagctgcggcgcagctccaccgcgaactaacgcccgggtggaagaacgccaagcacgctcagcaatggctcaacacgctgaccgagtacgcgttcccgactgttggttctcttccaatcgatctaatccagcctcggcatatcgcggacgtcctgcgccctgttggctggagaaggcggaaacggcgactcgggtga

SEQ ID NO: 506631 - DNA, 600 bp, Stenotrophomonas maltophilia
atgccttgggctacggttccgtccttcgtgaaggcggaactcgtcggtgcgggcgagctcgaggtgacgcgcaacgctctgttgttcctggtcctgaacgccagccgttctggcgaggtgcgagggatggcatggagtgaggtgaaccttcgtacgaagctgtggaccattccagctgcacgaatgaagtccaaggtaattcatcgggtgcccttgtcgctgccagccatcgagatcctcaaacgccacgcaggtcaacacgacgagctcgtctttccatccgtacaggctcggtccgtgatgtccgatatgacgctgaccgctttgctacgcagggtgaatgcacccagcgacacacctgggcgcgtggcgaccgtgcacggattccgctcgagcttccgggactggtgcagcgaacggggctacgcacgcgacctagcggagcgcgccttggcacacgccgtcaaggacaaggtcgaggcggcctaccaccgtactgaccttttggagcaacgtcgtccgatgatgcaagcatgggccgactttgttctgtcagccaagaatgagctcaagaagaacaccacgactcatgacaactga

SEQ ID NO: 506632 - DNA, 228 bp, Stenotrophomonas maltophilia
gtgttcagcggccgcgatacctcgttcaacgcctggttcaacggcctctccggcaccgagttcgacgtcgctggccagcaggtctccaaggacaacgttcgggtgttcttcggtgccgcctacaccgccagccccgtgttgtccgtacacggcaacgtcaccgccgagcgcggcggtacgggccagtcgaacgcagcaggcaacgtaggcttccgctgggcgttctaa

SEQ ID NO: 506633 - DNA, 606 bp, Stenotrophomonas maltophilia
atgggcgaagcgaaacgtcgtggatcgaaggagttcagggtgagtcacgcaattgagagtggcaagaagcgccaagaaccgatcggacagattgaatacattaatcgaaccaaagcgatgttcgatcccctcaccactccgtcggaaattgatgcaattgttaaagacttctgcgcctcactgagcgaccacatgcctgtgatgcttgagtgtcagccagagccgtggagccgccaacagagttgcgacgggaatgtcttccgatacattgaactcaatggcggaagcgccctttgtgggtacatcatttggtacactgatcgactgtacgttgaagcggaacgccatatggtttggaccgacggcagcgtgctccgtgacgtgtcatttgttgcttcaggtgaaaagtcaattctattcttgcccgaccaactcaaatttgacgagcgaccaggcaaggttcgtcacgcagtcaatgctagggatgcagaaatcattcacatgattgaagcccacgaaagccgcgtgcaggtcttgagagcatccacagaggaatcgtggaacatgatgccttcctacgagcaattgtcgcgaagagcgaaatag

SEQ ID NO: 506634 - DNA, 168 bp, Stenotrophomonas maltophilia
atggaagccatggcttcggatgcccagtggattgagggtgtaacggaatcacggcgggtcggccagttcgagatcatgatctcgagccatgaggaactggaggtcgtgaaggagaagcttgttccactcctccgtcactattgggactacctccggatcgtcctgtga

SEQ ID NO: 506635 - DNA, 477 bp, Stenotrophomonas maltophilia
gtggcgagaaagaacaagcgggtaccgcggtcggattttgagacgggtgcgagagagctaccaaagagcctcagcttcctgaatggtgagcgctacgtttcggtgattgaagtcacggagaccggagtgctcaaccggactgtagagctcaaaccgaccaccttgaagaaactcattcaggccaagagtaaggtcagtcaacttgaagtgctgctcgcaaaggcagcagctgagaattgtagattgcagcacgatctcgatcgtgcaaatgcggcgttgagagatgcggagctgcgggagagtaagataagaagcgtggctgacgtgctgaagcagaaggtggacgcaatgcctgaagttttgcctacagagcgtagccccaagagccaccacgacaggatcaatgaggtcggggggatgaggggctacgtgcgcggggctaatggcggggctcctgggctcggcaagcgtaggtag

SEQ ID NO: 506636 - DNA, 174 bp, Stenotrophomonas maltophilia
atggccctgcacgccgaacagctcaccctgacgtcggcggcagtggagaaaaccagtgtatccgcctacgccatgctggcgcacgcgctgcccctcattcgcgcgaaggcgttgaatacgggaaacgtcgactggcccgccgaagaggcggcgctactcacggacgatcagtag

SEQ ID NO: 506637 - DNA, 558 bp, Stenotrophomonas maltophilia
gtgccggggctgcgcgggataggaagggacgacaggggcgcgttcaccgcggaactctgcaaccgcatcgccaccctggcaccgacctcaaccaagggctggatcgttgatcttcgccagaacaacggtggcaacatgtggcccatactcaatggactgcactccctgctgggtgaccgcgatgcaggcggcttccgagataggcagggaaagacgaggaaatggcgatcatgcgccagccctgcgtgcagcgccgatctgtccgacagccgcgtcgccgtgctggtagggccgaggacggcgagttccggcgaggccgtcgccgttgccttcagggcgcgacccggaacccggttcttcgggcagccaaccgcagggcttgcgacgtccaacacgaccttcccgcttcccgatggtggcgcgctgttgctgacgaccgcggcaatggctgaccgtgagggtactgagtaccccaaggggatcgtgccggaaagcaatgttcgcggggatcaggatgcgatcgagatggcgctggacgggctccgttcggcgccttag

SEQ ID NO: 506638 - DNA, 1635 bp, Stenotrophomonas maltophilia
atggccaccccgacagaatccgaacaacctaatctcttatccaagaacgaccctacgaatagtccgtcggggcttcccccatcaaagggttcccccaagcggaagtggttgcgacaactgcactggcaagcccactggcttctgcccaatctgatcccgggtccataccggtcggatcgtgactacgaacgcgagcacgaccggaagcagaacgaacgcatccgcgtgccactcgagctggatctcagagtaaacgtgatctggggcgtcgaactctatggatcggcggaagtagagggcctgtatagcggactggaaaagcttggctggaaaggcgtgggtgccaggaacgagaaggacagtgtgctgaggtgggtccgcgagaggcggtcctttggtgcagaggcttggttgaacgtggggtcggtgctaggaaaagaacgtcgcagcaacacctcattgatccacaacttcgcaacgctgccgccgggagtggagtcgttgatggttcgtgtccatcagatcacctcgtccctcactgcgatggtcgtgggattcgagctggatgagtccttggcccagcgctatgcgacagagctcaaccgggaccgcacgacctaccgccggcgcagctttcggtctcgccgatcgatcgaatccataggcccagagaaccagaagcgcgaagctatcgaggtagcccggagggaccttcgccgcatggtcgggaactggttcgggcagcacattccaggcttcttcagcggactgaatcgccgcgagaggtttccaacaatggaattgctgacctcccagagcgggccaatctttcatgaaccagagcattcgccaaacaacggatttcctaactggcgctgggcattggccaatgtttctcggcatgaaacatggacctacaaggacttgcctgggcttcagctatcgatgggaggattcagggcggaagaggaagggttgcatatcctgactgccttggatgtcgcggccttccccgaggagagggtgaagttctacggcgacaagaccatgaatgccgttctctatgtgtgccacgaggaacttcagggaattctcattcatgcatcgacgctcgaatatctgaaggagcaactgcgcgacatcaacgttacgcgcgagaacctaaagaaggcacgatcaggtcgacgtagcgtcaagcgctcgctgcacgagatcagccaattcttcgatagaacactgggatcacctgcagtcgcaagggagcttgctcggaagtccaaagatatgggctggtacaatcacgattgcccatcattcaccacaccaggctggagggatggtgacaagccgcgagagttgcctgaggaaattcgcggcggagtcaattacctggcgaatcgactaaccgaggaggaggtttcgatacgtgagcatttcgagcaagtatctgcagtcctcagcgttcgcgagagcatcaaagcccaacgccgtatggaatggctgactgttctcgcactggtggtagcattcgcttcgctgatggtcgcattcctgccacgggacaagctcgccagggatctcgacgccctgaggaaagacgtcgtctcggcattctggcaagcgagagagggatag

SEQ ID NO: 506639 - DNA, 468 bp, Stenotrophomonas maltophilia
atggtttcgggtaatttcaatggtcggcaaggagtatttgttgattttgtttgggtgggcgcacgcagcaaaaagtacagggatgcggtaaaggcgaagtgggagatgcgagatccgggtcgggatattccggccaatttgcacgtggatcatatagtaaataggggatgtttgaagaacttcctagctgcaggcctgaatccttgggtcatgctgtttgaggttccgtggagctcaaacgtcggcttcggaggcagcattgagagagggcgcgaccagatagcaatcactgagtcgcgcataaacctcagcggcctattgctctacaaactctatgcaacggacttccctaaatcaaaagaggatttctgcaagacgttggagaacattagggggcaaattcttaatgagggctggctaaataggattgaagaggaaattactccatacatgcccggtaaggtctag

SEQ ID NO: 506640 - DNA, 603 bp, Stenotrophomonas maltophilia
gtgttacgccgcaatcgacttcttctgtctgcgggtctgctcccgcttccgtggttcctgttctggaccagcgttgccgccctgttcgcgccgggttacaacccgcttgcccagcacgtcagcgagctgctgcaggcgccaacgcttgcaagcatctgcggcaggatcgccgccatcggctctggcgtaggcttcgtggcgtttgccatcgggacatggcgggagtccggtcggcggattgcagtaggtgcaatctgctggttggtctttggcatttccatgctgaccaacgggctctggcccatgggccatccgatgcacggcttctacaccatcggtatcgccaacatcattgcaccggcgatgtcgcacatcgaattgagcgcgtggtcggccaaccgaagggcgtacgccgtgaccgctatggtgagcatcgcgggcatcgtctatctctggttgaacgtggtgggagcggatccggagggattcagggggctgacacagcggctgttctcgtcgatcaactcgctgtggccattcctggttgcgctatatctgctacgaaggggctcaggcgtgctgaaggcgcagcctgtgcattga

SEQ ID NO: 506641 - DNA, 660 bp, Stenotrophomonas maltophilia
atgaagcagattctgggtgttaagtatgcatcgccgctcgagcgggaatatgaggcgtggattgtcgctggcattgaggcctatctgaagaacgtggggcttcgatatgccatctgggcaatcggatcttcccaagagaaggtctggccagcagatgagaagctctcagttggctcgaagatcgttgggttgcagttcaagcgagccaagcttgctaccagcggggcagtcggaaaagatcgcctgaagtggacctttgatcagccggcaggccagctcgcgttggtgagctccacgccagagatcttttattgcttgcctacgtttatcaatcgtgatctgcggtccgaggcgctccatcattgcctgttctggcggcctgatccggcaaaactgaacaccaacgcgtggtatgacaacggcagcaagaaggtgaaaacgccatacaagaagctagatgacagcatgcgctgggggctgttcttcgaacggttgatgtattgcaatgtcggcaagaaggtccgtggcgggggggatgtggacagcctcaccgcaaagctcgctgccttctacgcacgtaatgagattccggaatcgcccgacagcgacctcgatggcgaggatggaacctatgtccttgtcattgagcgaccagagtaa

SEQ ID NO: 506642 - DNA, 393 bp, Stenotrophomonas maltophilia
atggtggtcacgtgtatcggtgcaacggtcaatgcctatgctgcgcccacagcggcccagctcgcccgtgagatggctgatgcggttgcgccttcgctgcccatgcgtatcaaccaaaacttgacgatgcagaccgtggtcgccggcggcaacacgatcacctacaccgccagcttctcgtatacccgtgaacagatgaatcaggttctggctcagtccggaaaatcggatgccgaagccagggcgatgatgcgcaacgcggcgaagggtggggtctgcgctcaaggcccagagggacgtgcgttcgtggccctgggcgggcgtgttcgctacttgtatcgattcgtggatggcagcccgtatgagaccatcgaagtggcgagctgcgactag

SEQ ID NO: 506643 - DNA, 378 bp, Stenotrophomonas maltophilia
atggaagggtatctgcctttagcgattctggtcgtcggaacgatcgtgttcttcgtccatcgatcaagcaaagacaagcgggttctccaggtggtggccggggcgctgttcgcccaggcagatttgctggccgcccgcggggagcagaggaagtccgaggagctgcgtgagcagtggcatgcattgaatcgtgcgcaagcgtctctgagagctaagccgagggtcgctatcgaggatgccgagcagcttgcgctcctccggctcactagcccgtttgatcttgaaaagctgatgatcgggtatggctctcacttggaggcctatgactctctcatgcgactcgcagggaagatggaaaagattcgcaacgcacggtag

SEQ ID NO: 506644 - DNA, 1383 bp, Stenotrophomonas maltophilia
atggttaaaacatttcgatgtgagaccgttgaggcgctagaggccgctattgccgaagctgggccggacgcaatgtatcggggacagtgtaagcattggccgcctacaggcggctccacatcgctcgtgacgtcattctctcggtccccttgtgttccggatctgatgatcaggtggagccactatgccaaacgaatgctgcggcgacatgttcagggttgggaagacagaaaagaccttgctactgaccaggcgattctgcagcactacggttggaggtcattcttcttggacgcaacgggcgatgcacgggtcgccgcatggttcgcgagccatgagttcgtgtctcgtccacatggtgaaatggttgaggattgtcacgaagatccagtggtgttgatctcagacctggccgagttcatccctgccgagggggatggtcacgtgtatctgatcagcaagaaggcgtgcaggtctgcgggcatcggctacgtgcatctttcagagatcgcgaccaaggagggacgtcctcgatacgtgtgccaggatgcctatatggtgggtcacttggagccgtcgggtttgccagaggccgttttgcttgcacatctggtcgttccggtggcggtcttgttgagctatgcgaacggcctttcgacagaagaccttttccccgagcccgaagttgatccggtattctctgatttgcttgagatgccctgggtccgcgtgggcccagaggatgattcgataccgtttttcaaaaggtcgcttcctctgccggaatacaaactgcatgtccgaaagcacatgccacctacagcagcgatgtatcgaccgttttggctcggcgaccttcgcgatccggccgacccggaacgtctaacccatttcctatgcagtgccggcgtctattacgggaccagttcgaagccctcgtccctcccgcgtcttacgcggattctggaggcgtgtgatggcctcgtggtagaggtagatggacttgtctactttggcggacgtggacggtatgtaaaaggagtgattgttcaaaaacgcccggacaatctaatcgccgtgtccgagattggagtagagcacccaggactccagattcgagatattggggtctttcaaggatggcatttccgcgtccaagcagatgggatttggctcagggaggtgcacgaagacgattgcgactgcggttctgatgagcacgatgagcagcttaagttgctcggtcgagtggaagaatgcttggcggacggttccatagagcatcaatctccaggcttctacgtcgaaagaggcgtcaggagagactccgatccctcacttgtgagagaggttcacgcttcccgggcggaggtggatccgtga

SEQ ID NO: 506645 - DNA, 216 bp, Stenotrophomonas maltophilia
atgaagatgcctaagctctatgccatccaatccaagcaaccggccccgcgccggttgtctggaccgaagaaagagctgatctacgtcgatgcatccaacgttctgattgaaagcgatgcgcatgtcctagatatgcgagagcttctcaagctccacaaagaagatttaaaaaagaggagcaatagcgttttgcaggagatcgctcgtggttcgtaa

SEQ ID NO: 506646 - DNA, 225 bp, Stenotrophomonas maltophilia
atgaaaacccctcgccgccaaaccctcgaaaaccgcgccgcccgtttggggctgcgactctccgaagctgggctccacgtcaaaatggaagccgccaacaactgcgaagccatgccgcggtgggagctttcggacgggaaataccaagacagtctttgcgggtatgccaccctggccgaggtttccgaggcgttggatcacaaggaaatcatggcagagctatga

SEQ ID NO: 506647 - DNA, 555 bp, Stenotrophomonas maltophilia
atgctgcccctgccggacctcatggctgccaagaagacccccgccaagaacgccgttgccaaagcccgcaaagacctgtccaaggccgcgaaagtggtccacgccaagccgcaacgcacgtatgcgccgctcattgatctggaccagttttccgaagagcagctggcagagctgatggtggctgcaggggacgcgcctgggcggaagacctacttcgactacagcgaagagcagccgtttactcggtcggggaagaaggtgtatctcgaagtgggccgcggtagccagatgttcgattaccgggacgtcaacggcgtcaggaccgagcgaacgatggtgaccgtgccgcccaagctccgcgatcagctccaggatttgacgggagaagagagcccggtgatcaccactgcgatcatcgccttggcgtcctgggcctgccaggaactaaaaaggagcaagcggcgcttggtggtggcgacggcgaccgacgacctggatccggtgcggaaacaggtccggaaggcgattgtggggcgggcgaggaaacaacggtag

SEQ ID NO: 506648 - DNA, 489 bp, Stenotrophomonas maltophilia
atgacgttctaccaccaccgattggaaccccccaccggcccggccgccatgatcctgcccaccatgttgctggggccgttggggctgctcgccctgggcggcggacaggaggccatgcggtccagcgtgttgctgggttcgctctactgcgccgggggcctggcgatcttcgcgttcctgggtttctgcctggcgctccacatccgtgctcagcggctctgggactggcacgtccgaacggggcggatgccgcattttcggaagcacggcttcctgaaaggggcgctgctcgggggagggttgggcgtggtggcggtggtggcggccgccgttctggggttcaagtatgcggagcatccccagtttggggagatcgctaccgcagcgttttacttggcttggctctggggtgtgctgttgatcggcgtgctggccgtggtgtttgggtgggtcaagcgggcgtgggatagaacggccctccccagatga

SEQ ID NO: 506649 - DNA, 186 bp, Stenotrophomonas maltophilia; identical to SEQ ID NO: 501404

SEQ ID NO: 506650 - DNA, 252 bp, Stenotrophomonas maltophilia
atgaatacccgcagccaaacccaagcgcccgcccggtccaccgtcgccaccacctcagcgctcctgcgattcctgttcgacgccatgtcggggatgggggcggccaagctgggatgggagatggtgaccgaccccaaggccaagctgtcggacattgccctcggcgtgtcgctctgcctggcccctgcagcgattgcggccacctgggcgctttgcttgttcggcatcgcccaacaccaccagcttttttga

SEQ ID NO: 506651 - DNA, 366 bp, Stenotrophomonas maltophilia
atgaccaaacgctacattctccgccccccagaacgtttggtcgaaaccatccacgagacgtggattgacgcgcccagcaaagccgcgtttcaagccctggccgccgcgcaaggcctgagcatgcgcgctgcactggctcaactcatcgagcaacacgcccagattcgagaaccgttttcccctcgatgcccgacgccgtggaccggagaggcaacggggcgagagcgctataaaaccgcgctccccagtgtgcaggtggctccccaggtcgccatggccctcctcctcgacgccaaccgggttgggattcgtcagccagaagccgttcgccagttggtctggcgatgcatccaatccagcgcctga

SEQ ID NO: 506652 - DNA, 225 bp, Stenotrophomonas maltophilia
atgaagacgccagcaacgagtcgccgcaaacgcttctacgcataccagcgccgctcgggtggtcagtgctacttcgataagaacatgcacgcccacctccagcggtatccccataccatcggccattaccacctcacgcgcttcctgggcacttccgcgttgctgaccgctgaagaagcggccgcccaaggatggatggccaagccgcacgggagccctgcatga

SEQ ID NO: 506653 - DNA, 297 bp, Stenotrophomonas maltophilia
atggcccaccaccacgccagccctatccaactcaagacgggcgagtggggcgcccgggtgcccacccagaatgttcagaacggcgacgggctcaccgtggttgcccggagcggcagctcgtgggaagccgtcgtggtcggcgtggtctggcaaggcccggaggccgcgatttgtcaaaccgcccgggggctcatgcggtgtgggtgctgcggggaagtggggcagaaaggggcctatcccttctcaacgtatccggcagaaatgcagcgttgcgacgattgcgggggggcggcatga

SEQ ID NO: 506654 - DNA, 333 bp, Stenotrophomonas maltophilia
gtggccgcgctggaaaaggcagagcaagaagctgtggccgccgaagctggcgccagctttgcaggggtctacgagaccttgcagcagtttgggcagcattacacgacgaagcagaagaacgatctgagggcgctgcttgagccacgcaagtcggttcccgcaagcgccggcatcagtcgcgccccgaagttccagatcccggatgggaccacgtgggctggcactggacgtcagccgaaggccttccttgcgtgggccgaaaccgctgaaggcaaggcgtggaaaaagaagcacccggaccaggaatggccggcgcacccgttcaaggcctga

SEQ ID NO: 506655 - DNA, 708 bp, Stenotrophomonas maltophilia
atgacgaacgcaacgccgatgttccccctgtcccccgaacaccgggacctggccatccttggcttggcctgccatggcacccacgctcgggccatcgctgctgggttggaggtacacacgtccatcgtgtgcgaggtgctcaccgatgcggggatcgatccgattctgccgcctcgcacgttccgctttgacaacattgattgggacaccgatgaggaggtggtggagaggcttccgcgctcgggggaagtcacggtcgaagactgcgctgagtttgatgatgaggagatggagtacgaggcactggacgacttcactgagttgcatggctattgcatcgaaggctgcactgtcaccgaagtgtcgggcgcttcttggcccaccacggcgcgggatgcggagaccctggtgaacgaggcgaactggacgggggagctgcgcatgggcaacgggcactacgccttggtcacccatgagacgttggcgcttcgctaccccaagcacctcgcttacctccggctcaaagtggggcccagctacgccgaaatcgcgtcggagtgggcatttacagtcattgaggtgcagaacgccgagggctttcaaatgtggactgacaacctgttggacttggtgtcgctggcactcggataccatgaggaaggagaacgaaaggcccttgaagttggcgatggtcgagatgggtcttaa

SEQ ID NO: 506656 - DNA, 243 bp, Stenotrophomonas maltophilia
atgaccgtcgcccggaaaggatggcctgaggggccgttgctgcatggcgcgtatggccgccactggatcatcgaatcgaccgcgcgaaagagggaagatatcctgctgcaggacatcggattgcgggtgtgggccgagacgatggccatgaagaccaatcgcgccacgcagcaggacgctgcgcccgatgacacgccgatttctaaagggttccgggtaaggcacgagaccggcaactgctga

SEQ ID NO: 506657 - DNA, 1377 bp, Stenotrophomonas maltophilia
atgggcctgctcgctgaccttgctgcccgtttccgtcgtgaccgggtgaccctgaacctcgatgacatccaggcgctcatcctgcgatcgcgtcctgagccttacgtcgggattcatgctttgctgcacgtggaacaggcgggcggtgggcgcgatctgctgcgccggctcgccccgcatgtccccactgcttccggctggaccgaggagcttgatacctggatcggcgtggccatcagtcacgaagggctcaaggcgcttggattgccgccgtcctcgctggagagcttccccctgtcgttccggcagggaatggcagcacgcgccgaacagctgcgtgacttcggggaaaacgctccagagacttgggaggaagtgttcacaccgggcaattgccatatcgccctgaccatctatgcgcgcgatgaagtacatctggatgttgcggtggacaaagccatgggcgagctaaatgcctgcagtggcgtgaccttgctggcaacgcaccgtttcggcgccgacgccgatgcccagaatccattcggcttccgcgattcgatttcgcagccaacagtggctggcgctggcgtggaaccacagcccgggcagcagcgtgcgatcgctgcgggagagttcatccttggggaaaacagcgaagccggttcgccgttgcgcatgccccagccggacgtattggggcgcaacggctcgttcgtggtgatgcgcaagtacgaaagccgggtgggtgcgttcaacgatttcatgcgcatacatgcaggcgaggacaagcaggcccagcatgctcttgccgcgaagatgttcggacgctggcgctccggcgcgccgctaccgctagcgccggaacgagacgatcccgagctcggcgccgacccgcaacgcaacaacgatttcgactaccagcatgatgcccttggtcggatgtgcccgcattcggcacatatgcgccgcctcaatccgcgggggagccagctgacgatcctcagcgacgagcacattcatcgcatcattcggcgttcgtccacgtttggaccaaagtggagcgatgacgtgaccggcaccgacgatgccaaggcggatcgcgggatcttcttcatcttcatcagcgcccgggcctacgacacgatcgaattcctgcagcaggaatggatcaatcgcggcaacttcatcgacctgggttctgaacgcgacccgatcgtcggcctgcacgaggagcccggcagcttcacgattccccagtcgccagtgcgtcgacgcgtggccgatgtgagtaccttcaatcgcctgcgcggcggcgagtacatgttcatgccgtcattgagcgcgctgcgctggatcggcgaggggaagttcgattga

SEQ ID NO: 506658 - DNA, 696 bp, Stenotrophomonas maltophilia
atgaccacgtcgaatgatccacgcctcgccgatgagaccaagccggaggagatccggcgccgtgctggcgaactggcgcaggacttgccaaagcttgccaggatcgcgctcgaagccttgatcaagcaacacaacgatgcctacaagggcagctcccaaagcgccggtcgcgccggtcggcagtcgggaaatgtctccgagttgtcggccatcgccacgctcaagcccggtggcgcggatcggctcaagcgcatcttcggcctgaccgggggcaatttcgacggcgcgcaacgcgtgtccacgcttcatgacatgcggtttgtgttgttcgatgacgacacgcggatcctgttcgccacggcctacgatggtgactgggatacctacatcaacgatttcgccaccaagattccaggcttgatggacctgttgttcgccaacgtggagggctggcctggcatcgacagtccgcaggtcaaggatttcatcgccgatcaccagatcgacgcggccggttggtttgtcgccaatccccaggtcacggtagtggacgtgcgccgttaccaacgcatggacaaggcgttgcaggccttcttggatacgatgtccgaaaatacgcagatggatgcgaccacgcgtgcagcgctggagacgctggagcaggccatctccgtcccgcagggggtggattactga

SEQ ID NO: 506659 - DNA, 1092 bp, Stenotrophomonas maltophilia
atggtcgatcaacccgttctttacagcgaagcactggaaaacgtcgacgaagacgaggatcgtctgatcgaggagatcgtcacgcagatggccgaaggtaaccgtgctgcctatgagcgccatcggcatgccattcgcgatgcgcatgcaaaatcgcacgcggtcctcaaaggggagttgtccgtccattcggacctcccgccagcacttgcgcaggggatattccgcaggcccgcgacctacggcgtggtggcgcgcctgtcctcggcgcccggcgatatccactccgatgcgatcccggcgccgcgcgggttcgcaatcaagctgatcggtgtggacggcgaacgtctgtcaccgcagatcggaggccgcaatcaggatttcctgatggtgaacttccccgtgctcgcctttggcaccatccccaagtacaagacactgctgggcgtgctggagaagaacgcacacgcgccggacatcttccagcggatcgtcgccgggctcgcacgcggtaccaaggaagcagtcgaagcgctgggcgggacgcccggtgcgacgctcgagggcctggggcgcgacaaccacaacccgctgggagagtcctaccacacgcagggcgccctgcgtttcggcgactacgtggccaagctttcgctggtgccagcgtccaacgatgtgcgcgcactgaccggggtggccgtggaggatgtcggcttctcgacgatgcgggatgtgatcgagcagcatttcgcgcgtcatggcgccgagtacacgctgcgggcgcagttgtgcaccgacgtagcgaagatgcctgtggaggatgcagccgtgcgctgggacgaggatgcctcgccgcacatgccgcttgcgacgctgcgctttgccccgcaggcgccctatacgcccgcacgccgggtctacggcgacgacgtgttgtcgttcaatccctggaatggcgtgcaggcccatcgtccgttgggcgggatcatgcgcatccgccgcgccgcgtatgagcgttccagcagtttccgccatgcgatgaacacccaaccgcgggtcgagccggagcatctggccgatatcccggattga

SEQ ID NO: 506660 - DNA, 513 bp, Stenotrophomonas maltophilia
atggctcgcttgtcgggagttttgagggatagactgatttcaggcctttcgggcgtaaataataattcgggtgcgaggggtgttgttgaagtgctgatccaatgggttatggaatgcgaaggcgaggttcgcagagagcccttcctaagctatggctttgacttgatggtgaacatggatggtcgattggatgaatatccattcgcagagatcggggaggcggatgttgagcgcgtgtattcgcgtgcgacccagttgagaaacgcaagtgatgacggtgtcgcccagtttgtcagagatctgatggaggagttggtcgccgtcgagattgacagggtgtgttcccgatgcggggaggcatatatgcgggcatatatggggttgatcagttttacgcccgcatttcagtgtgatgtatgtggctatggtgaattcttgaatggtgcggctttgaaaggtgaaaggcttcgattcattacattgaaggagctcgagtccttcgagatttattag

SEQ ID NO: 506661 - DNA, 1065 bp, Stenotrophomonas maltophilia
atgggtgctggcaatcgccccgcccaccagattcacgtgaccggcatccacgtgatagccaccgtttcctgcaaacaagccgctctgctggccgacgccctggtagttgccctcggccttgcctgcgctggcgtagccatcggcgttccacgcgttgccgaaggccacctgcacgcggccgcccacctggctgttcctggacatgctctcggcaatgtcctgcagcgattcgatggtcagcgtgccgccggtcttgacgtcgatgcggtcagccgtggcggtcgcgccgcgcaacatggtgtcaccctcggccttcagcgagatgttctggccggtcagcgtggtgttctgccaggtattgctgtccgagttcgccttgctgctgcccacgctggcttcggcatacacatacacgcccgtctgcgcccccaccacaacgccaacgcccacttcggcgccggcattgctgctcttgctgcggtctgccacgtgcgccttgcctgcttccagcagaatgtcgccggccgaatccagactgagcgtgttgcctgcactcaggttgccctgcaccacatggatgtcgccctgggtgctggtgaggttgacgttgccgccgccctggatggtggagccacgcgaaaccatgctgctgccatctgcactactgttggcggtcttgaagccgatgcctgcttcagcacggaacagttcgccactgccgccacggccggacagtgccgagatcgcactggctgcctgatacgcgttggcgcccgctgccatgccctgcatcttctgcaggcgatcatcggactgacgggccgcgtccacgttgttgatcaggtcgatcaacggcgacttcacccgcgcgaacacgccgatcttcaagtccttgtcgctctgcgagtagtggccgctttcgtcggcggtcagaagctcgatctcggcggcggtgatgttcacgtccttggccgccaccacgttgctggcggtctgcgtgtacttgccgccagccgtcaggttgacgctgccgcccaggctgccgatgctgctggccacctgtga

SEQ ID NO: 506662 - DNA, 645 bp, Stenotrophomonas maltophilia
gtgaaaacgggggtgaaccccgttgacttcactgacatttacgttgaagaggcggcgatcagcgttgcacttagcaccgaaagccaggacgccccacccggagaggagctgccacctgatccttatggcatcgagcgctcgtcaccactcttattcaagatcctcgaggcggcttacaaaaatcgggataaagcgcgcgaggaaatcgacaccccatcgttggcggcagattttcgtaagctcaatgcttcctacacaaaaaaccctaagccgttcaacgacgggcgacatgaattcgccgcaacacttgccaatcccagctacagctattcgaccgacggccttagtgaaatcaatcttcctatcgagaccgtagaggttccggcaaatacgttcctcgaccaatcatttatcaatagtagactcaagaaactcttatacgcagcctgccgctggagcggcgccatggagccggcactccacaacgatcgagagaagctggttgatctcttggtcggtcttggcttcttcgacagagaagacagtgatcaggtgcaagcgtcggtctacttcattacggggaagaagtacctgcgcaacaaatacagaagcgaattcaggcacatccgaggcgatcgtatgtga

SEQ ID NO: 506663 - DNA, 354 bp, Stenotrophomonas maltophilia
atgccactgccccccgacttctactggacgacacgttcggccagcttccccagcgatcctctgacggtgatcgcctgcgagggggtgtgggtggtcgcgctgacgcagcgtgtggacgacgatagctgggtggccacattggatcggcatcgagacgggcctggcgggccgggcgggtcatgccggcgctgcagcagctacgagcagggccgcgccggcgctgagctatgggtggcaaggcatgaagcgcgtctgcgcgaggacgtggccaagatcacggcttaccgggcggcggtgcgcgcgaacaggttggccaagctgcacatcccgccgccgttcggctgggacggttga

SEQ ID NO: 506664 - DNA, 2781 bp, Stenotrophomonas maltophilia
atgtctgggaaccccggagaacgccatacagggccggggctgggccgctccgcagggggtgcagaaaaagcaccctatgaagtgcgcaggcgtggcggggagacgagtgcccgcatcaccatcaggcggacactcgagaccaccgcaggccagcatcgaccaccgccttgccgcgaatgttctgtcgctgatgttaagatcgcgcgaacaagccggcctactggaaggaagatgagcaaggaagtagtggacgcgctcgagcgcttcttcgcgaatgcagcacaccccgtgctttttgcaggggcaggtgtatcggttcaagccggcctgccaatttggtcgagtcttctaaagaagatggttgaacccgtcaggctgacggaccccgccttccacaacttggtatctgacgcaattgcgcaaaaccaactgaccgctgccgctggatacattcaggcataccaccgtatgaccgccaacgaccgggccgcctccatccgagcctctctgaaaggcggtcttgcgaaagaactggtacctctgattcggcttccatttcggtcgtgcttgacgacaaattttgaccgagtgctatacgacgcgtacgcgatcgcttaccaggcttccgctgttgaatacaggtatggggattccgggctacccaacgctgtctggtctgaggacttccacataacgcgcatacacggcggagtggaggtttatgaatcgatcgtccttagtgagaacgacttcaggcgtcttcttgatgatcctcattactgggatttattaagcgtcaacttcacccagcgaaatgtacttttcgtaggattctcgttctacgacccagcaattcgccacatcatgaccgagctagagcggcgctttggtgcgtccagcccaggcaggcacatggctctcgtccccgacgacataaactctgagttcctcgccaaggcgagcgctttgaacattgaagtaattgcctactcacccaaagggtaccacgccgacctttggagttcgctagcagagttccaaccgctaacaaagtcgatcaaggcttcgaacgcaccattagatttaacaaaaaagtacttggccgcgtgcttcactcgactcaaagccaaaagttctaacggcgcgctgaaggacgctctgggggaagggattgtctcttatctcttgcaggacagctatccgagacccttagcggtaggaaagataagagagcggctgacagatgcactgggaattaaacaaggtgtggagcagatagtcgatcttgccctcaattccttggtcgctgacgatctctgcaaaagagttcccatcgagggtgggcgaggcaaaggatatgtctggtctactccggctaagagcaacgacacactcgcctctgctattggtcgcctctccgagtcagtggtagaccgagcgatggtgacagaagcctggacaatccctgcttcaatccaagcaaagctaccggaactgtttgagcacatcgtccgctccagaggatgggacctaggtgcggcgttcgccgaaaaaattccaccagaacctatctcgatatccacactgattgaagaattcgacctctgtccgaatgcacttgatcgagagcggcttgagaaagttcttaccattatgttccaacgacccgctgctgacgagtctaagctattgatggagcttggaatggtgagctttgggcttgaaatggcctttaacctaccgaacacaactctccttcagagcgcaacacttccgcgcactatttacttcgacgcgagtgtaatccttccagcgtgcgtctatggccatccactgcacgtcacatacaatgacaccatccgcagattgaaatccgccgcccatgaaggcgcctattcgatctcattaaagatctgcaagggctatctaaacgagataattagccataaaagacaagcatccgatttttatgaccgtctcggcgaggatgcacgcggcgctgcaatgaatgcagcaatgtttcacggccccgccaattcgaacgtctacatcgccggattcgcccaccaccttgaatcacacccagactgcactctggaccaatatttcgaccaatttgcaaactacaaaaccgagagcgacctgttccggtggctttcagcaaaaggcttcgaaatttgcgaccctccgaggagggacagcgtgtggagtgacattagcctctatcttcagaaggcctactcaagcgaccttgctcgcggaaagaccccaatcctaattgagcacgacgtccatcagattcgtattctagaagacgatgttgagcgcggtcaccgctcagtctttgtctctgcggacaagcaactgatcaggcacgttagaagccgatcacctgccctggccgatcatatgatgagcagcgcatcaatagtccaattcataatcctgatgcttggaggaattccagctagtgccggaatcaccgaacttctgtggagttcgcgcctctcggaccgaactacacaaattcgttctcacctgaccgcatcggcccttcgtcagtacaacagcatgctcacgaagagcatgccagaggttatggatgaggctgccgacgcgataacacaggagatgaacagacgagcactggacctcgatgcagcagatccagccaagaaggctgaagcgttccgcgttttcggaaatctatctgaagagtattacttcaagaagatgcgccaggagattgaaaagctcgaccggagtctggacgagcgctag

SEQ ID NO: 506665 - DNA, 1695 bp, Stenotrophomonas maltophilia
atgggctggcgcgtgtgcgatatcgccagcctgattggcgagaaagagaagacgatccatagctggaaggcgcgcgacgaatgggaccgcgccgacgccgtggagcgcattggcggcgcactggaagcacgcttggcgatcctgattcacaaggaagggaagaccggcggcgacttcaaagagctcgacctgctgcatcgccagcttgagcgtcaggcccgcatccagcgctaccaggggggcgggaatgaggccgacctgaatccggcggtggccaaccgcaacgcgggtccgaagaagaaggcgcgcaagaacgaattcagcgaggaagagatcgagcgcctgcaaacggcgtttgtggatgggtgtttcgactaccagcgcgattggtaccgggcgggcaacgaacgcacgcgggtgatcctgaaatcccgccagattggcgccacctactactttgcgcgtgaggcgctgattgatgcgctgaccaccggccgcaatcagattttcctcagcgcttcaaagagtcaggcccatatcttcttgggctacatgcgcggctttgtgcgtgaggtgctggaccgtgatttgactggcgatccgatcaccctggccaacggtgccgagctgttcttcctcggcaccaatgcccgcaccgctcagggctaccacggcaatttctacttcgacgaattcttctggacccatggctttaaccagctgaacaaggtcgccagcggcatggcgatgcacaagaagtggcgcaagacgtacttcagcacgccatccaccatggcgcatgaagcgttcgacttctggacgggcgagcgttgcaacaagggacgttcggtgtcccagcagatccagatggacgtgagccacgcgcggctgatgggcgggcgccgctgtgaagacgccatgtggcgccagatcgtgactgtgctcgatgcggctggtcggggctgcgatctgttcgatatcgaggaactgcgccgcgactacagcgcagaggaattcgccaatctgctgatgtgcgagttcgtggacgacagcgccagcatcttcccactcacgatgctacagccgtgccaggtcgatagctgggtggattgggcagacgacttcaaaccgcttgccattcgcccatacggcgaccgcgcggtctggatcgggtatgacccggccgagacaggcgatagcgctggcatcgtggtggtggctccgccgctggtgccaggtggcaagttccgcgtgctggaacggcatcagttcaagggcatggactttgcggcacaggccgctttcattcagcagatcaccctgcggtattgggtgacctatatcggcatcgacgcaacgggcatgggcaccggcgtggcccagctggtgcgccagttcttccccggcgtgacgattttcaactactcccccgaggtgaagacccggctggtgctgaaggcgttcgatgtcatcaagaacgagcgtctggaatacgacgcgggctggaccgacctcacgcagtcgttgcttgcgatccagaaaaccatcaccccgagcgggcgccaggtcacctacacggccgggcgctcgcgcaccacaggccacgccgatctggcgtgggcactcatgcacgcgctgcagaatgaaccgctggaaggcggcaccgctgcgcgcagcaccatggagatttgctga

SEQ ID NO: 506666 - DNA, 870 bp, Stenotrophomonas maltophilia
atggccggtaagaccgacaaaaagaagctgcgttccaagttcttccgcgtcgccgtcgagggcgcaaccaccgacggccgtgtgatcgagcgtcagcacatcaccgatatggcggcgtcctacgatccgcagctgtacggcgcccgcatctgggtggagcacatgcgcagcctgatgccggatggcccgttcaaggcgttcggcgacgtcctggccgtgaaggccgaagaggtcgaagtgggcggcgtgaagaaactggccctgtttgcccagatcgaaccgaccgacgcgctggtggcgatggtcaacaacgacaagcagaagctctacaccagcatcgagattgcgccgaagttcgccgacaccggcaaggcgtacctgcagggcctggcggtgaccgacaccccggcgagcctgggcacggaaatgctggccttcgcagcacagcatccggacaagaacccgctcacccaccgcaagcaggcgccggagaacctgttcaccgaactggaagagacggaaatcaccttcgatgaggtcgagcagccggcgccgcgcgtcagcaagatgcaactgctgctttcgggcatcggcctgctgccgaagccggcaccggaacccgctccgaaggatgatcctgcgaccgatgcctccaagttcgccgaacaacttctggccaccttcaccgcacaggaagaccgcatcgagcagctggccgaggagaaccgcagcctggccaccaaggtccagaacctcaccgcgcaggtggccagtgtgcgcaagaccctcgatgacaccccgcagacgttcagccagcggccgccgatctccggcagcggcggcaacgtcggcgacgccaccgactgctga

SEQ ID NO: 506667 - DNA, 222 bp, Stenotrophomonas maltophilia
atgatcgacggcagcacccggctggtgcatctgttcctgcgcgcggtcggctgcgccaccgctgtcgaactgcacgaacgctaccgctcctatgacgccaccgcacagggcaatcagcgtgcggaggaactcaccccgaccattgacgagatccgccgcgatctgcgcaacgccctctgcgacctgcagggcctgccgcgcgtcacggtggaactgatctga

SEQ ID NO: 506668 - DNA, 3207 bp, Stenotrophomonas maltophilia
atgcgcatgaagatcaccactgccggccgcgccaagctggtcaacgccaccaataccggcaccaacacggtgctgatttcccacattggcctcaccgctaccggcttcacccccactgcggccatgacgcagctgccgggcgagttcaagcgcatgaccaccttcggcggcaagtccgtcgcggccgataccatccacgtcacgctgcaggacagcggcgcggagaagtacaccctgcgtggcttcgggctgtatctgtccgacggcacgctgtttgccgtgtacggccagagcgaggcgatcatggagaaggccagtatctccacgctgctgctcgcggccgacgtgacgttggccgacatcgacaccgcgcagatcaagttcggcagcactgaatttctgaatccgccagccactgaaaccgtgcccggtgtggttgagctggcggacagcaatgaaaccatcctgggcgccgatgccgtgcgcgcagtcaccgctcgcggattgaaggcgacgctggatagccgcttcggtgccaatgcaccgacagcgttcgtcaagacgctgctgtccatcgccacggccgcggctatccgtactgcccttgaagtgaagggcgctgcgctcaaggacatgggtcatggcaacgggctgaacgccgatatgctcgacggcatgcacgccaccgacttcccgcaagtcggagaggtgcaaccctctttcctgatcccaatgaacaacgcgcaaaagcgttggatcaaactgggcaccttgccgtgggccggcaacgggccgagtgtgctgatgcttgagattacctgcggaggaattggcggccgtcgcttcgtgaccgacttcgtttccgcctccgtgcgcggcttcgatacttcgctgaccgcactcacccaggcgaatgccgatgcgatgatctatcaggcacggctcggtggcacggatgccctcaacgatgccgcgaagctcggcgttgtcctgacccgcaacggcacaggcgattccacgggcgttgagctgtggatgcagcagggcggctacaaccacggtcaccgcgtgcggccagtgaatgtcttgaatgccacctatcacggcgtcaaacagttcgagactgtcgaaccaagcggaatcgtctatgcaaccgtcgagccagtcgcctctgtctcggatctgcggcgcctggtcgaagtcaccgagaaccgctggggccgtcggcagaccttcgcccttggcctgtccctgcccagcgatcagaccatcgatctcgggaagggtggtggcggcttgcgtggaacggacaccggcagcgtggtgctggcggcaggcgcaggcgacacgggcgaatccggcggctatgtctacctacgccccaatggctcggccaaccccgccgggcagtttgccctctacaagaacggctttgccgagatgacgggcgcgcgcatcggagctgcctcgggtgacggcagcgtgctgcttgagctgtattcccagcgcccttggcagttcaagcaaggcggaaccgagggcaatacggcactggagcttcacgatgttacgggcgggaaggaactccgccttaccaacgtcgccaatgacaggaagatcattttcaacccaaccggtagctggatctatgctgccgaattcaagggaaagctcaccggcaacgcagacacggccagcaagctcgctgcgccgcgcacgatcaatggcaccgcattcgatggctctgccaacatcgtgagcacggcatggggcgcttcacgcaaggtgaccatcggcaacaccgccaaggatgtgaacggtggcgtgaacttcggatggacactggccgaaatcggcgcaggctcagccgaggatgttgctgcgcgcgtggagtttgcgccgcgtacacaggatggcaccggctggctggctgcatacaacacgtatcgttcgcacttgcgcagcgcagcagctgatgattcgatgccgagcgcgtacacaaacgccatttctctacccacctacgacaatgcgcgtggtttggctctggcgagtgacttcagcagttccaatcgcttttggctgcgatcgcgtcatgactcggctggcactacgccagagagtcgctggaagccttgggccgaagtctggacgaacgtgaactttaagcccgccgacaagctggaccgtgctggcggcgtcatgaccggcattctgcagtttgaaaccgcgagtgcacttcgcttcaaggcgactaccccaacgtacttccaaggtccggacggcgctggcgacaacgtcatcaacttcacccgcaacggcaaggccgattacacgatgaacgtgttcggctcgctgaccgtgggcggtgagcgtgtgtggcatacgggcaatttcacacccagcaccaaggccaaccgcatccccggccaggtcatcatgttcgcgggcaaggccgcccccagcggcaccctgctgtgcgacggcgccgccgtgtcgcgcaccacctacgccgagctgttcgccgccatcggcacgctgtacggcgcaggcgatggcaagacaacgttcaacctgccggcgatgctggaaggcaccgtggtcacccacacgcagaagccggagactgttggtagcaccaccagcggtgaggtgatccggcacgcgcatggcgcatcgtccgccagcgccggaacccacacccacaccatctcggtggcgggcggtggtgcccactcgcacagtgccagcgctgccgccgccggcgagcatacccacggcgcatggaccgattcgcagggccaccacgggcacaccggcggcacctcggcggcaggcgagcacaaccacgtcgtgccattcggcgacaaaatgggctatccgtggggaacctacggcaatcaggatcaagcaggttcacgcgcgagcggcgtggactacgacaacaactggccatactccaacgcggcgggctcgcatacccatgcgttcagcacggatggcgctggtgcccacgcccacaatatcggcatgaacaacgccggcaaccacacccacaccatttctgtcgcgcaggtgggcgatcacggacacagcgcatcggctgcagacagtggcgcgcatacccacgcggtcacggtgaacaacactggcggcgaccgcaacctgccggccggtctgcgaatgatctactgcatcacctactga

SEQ ID NO: 506669 - DNA, 573 bp, Stenotrophomonas maltophilia
atgtccaacgaagcccgctttgcccacgccttcgatcccgccaaccgcgcctatatgggccctgtgcgcctgcagccgtcgcccgacggcatctggcacctgcccgatggcacggtggacgtggcccccacgcagaccgccggccagtgccaggcccttcgcctagctgatgacggcagccgctgggagctggtggccgacttccgcaaccgcatgctatgggacacgcgcactgcgatggccgttcccaatcggctcgcgctcggcgagcctttgccgagcggcgtcacgctggccgagccgttccgtctggatggcaccacgccgcagtgcaacgcttgggatgccgttcgaggggagtggacgctgcagcccgactacagcggccggccgatctggaacaagggcgatggcagcttcgccacgccgctgcagcgtggccagccgctgcccgccaccgtgaccgatcacgccccgcccatggagcgcagcgggccgatcacctatgacgacggcgcgggcgcctgggtggagtctgcaggcggtgataccaccgcagcacagccaagctaa

SEQ ID NO: 506670 - DNA, 330 bp, Stenotrophomonas maltophilia
atgaataccgaatccaacaccagcaccaccgccgacgaaaccaccggcaccaacgtgatcgtgctcgaaacccccatccagcgcggcgagcaggtgatccgctccgtccgcctgcgcaagccgaccgctggtgacctgcgtggcatcaagctgttcgacctggcgcagatggacgtgactgcgctgaccactgtcctgccgcgcatcagccagccgatcctgaccaccgccgacgccggcaagctggaaccggccgacctgatcgagatcgcccgcgtcatcggtgattttttcgtgccgaaagcggagaaggaatccctgcctgcgtag

SEQ ID NO: 506671 - DNA, 207 bp, Stenotrophomonas maltophilia
atgatgcgacacaaaacccagcgtgacggatggtctaccgccactcagccgaactttgtcaccagcccgagtggcgttgaatacgttccgttcaccgagaaggcccgcaaagcggccgagctgcgcgccctggtcgaagcccacatcgccgccggtggcgactaccagcagctgccgtccagtgccgccgaacaggtgtccgtatga

SEQ ID NO: 506672 - DNA, 243 bp, Stenotrophomonas maltophilia
gtgacccacggcgccccttccacgcccggcaatccttccgcgcgtcaaatctcgctcgccttcggcctgatcgccgacaccctcgaatggcccaacgatgcctaccaggcgttcattgcgcgcctgatcgccgtcggcgtgtgcccgctcgccatcaccctgggcgacattctcaccgcctacaccgccacccgtgatgccaacggtggcgctcccagcaccgacgacaaggcggtgcactga

SEQ ID NO: 506673 - DNA, 2700 bp, Stenotrophomonas maltophilia
atgcaagaagagatccgccaacaggtactgtcgcgcgtccagcgcgactatggcctcaaacaccgcagtggcaccgagtacatgcgcggcggcaagtgcccccactgcggcaagaaggagctttacaccagctacctcaagccttgggtgctgcgctgtggccgacaggccaagtgcggccaagaggtgcgcgtgcgcgacctctacgacgatctgtttgacgactattccaagcacaacccgcagacaccgcaggcgccacatgctgcggccgacgcgtacctggccaccgggcgtggattcagtatcaagccgttgcacggactgtacgtgcaggagagctactacgactccagcaagcgccagggcacggctactgtccgcttcccgctggtgaagggcggctggtgggaacggttgatcgaccgcccacaccgcttcggaaagatgaaggcgcgcttcgctccgggcgagagctacgccggcgtctggtggagcgctggcgcgctcgaccagctgcgaaccgcccgtgaggtctggatcgtggagggtatcttcgacgccatcgcgctgctgcagcgggggatctgcgccgttgccgctatgtcgagcaatgcctatcccgaactgtccctcaaggaactgagcgccgcacgtcccaacgacctccccgtgttgatatgggcgctggacaatgagccgggcgcgcgcagctatacggtcaaacacattcgccgtgcggagaagctgggatatcgctgcaaggccgcgcagatcgaacagaccggcgaccggaagaccgactggaacgatctgcacctgcgggcacaggctgccgaagatggcgatagcgtgtgggcggaagacctggagctggcccggcacaacggtgcattgctgctggcacgcaccgcgatggacaagggcctcatcatgtatgagcgcagcaagaacgtggagttccacatcgaacacggctcgcgcctgttctggtttcagtttgacccgcttcgcttcgagaagctgtgcagggagcgcgtggttgaccgtgacctggccgacgaggacgaactcgaagctgaggagctggcaaagctgcagcgggccagcgcatccgttgtgcagatcgccaactgctatcccgaagcgctctatttccagaagaacgatgcgaccgatgaaagctggtacttcttccgtgttgatttcccgcatgacgccccgtccgtaaagggcacctttaccggcgcgcagatcgccagtgccaccgagttcaagaagcgcttactcggcctcgctcagggcgcgcttttcagtggaacggggaagcacctggacaagctgatggacgcgcagacgttcggcatcaaggacgtggctacggtcgattttgtcggctacagccccgagcacaaggcgtacatcttcggggatatggccgtgcgcgatggcgtgctcacctttgccaattccgaggactacttcgaattcccgaagctgcgcgtaaagaccacgcagcggtctatcaggctggacattcagcgcgaccatgaagcctatcgaaccgaatggctcaactggctttggacgtgcttcggcaccaacggcatcgtggccctgacgttctggtttggttcgctgttcgccaaccagatccggtcttcccacatgtcattcccctatctggaagcaacgggcgaggctggcgcgggtaaaaccaccctgctcacgttcctctggaagctgctggcccgaagcgactacgaaggcttcgatccggtcaagtcctccaaggctggccgcgcccgcgcgatgggccagatttcgggcatgccgattgtgctgttggaggctgaccgcagcgacaacggcgacaggtctcagtccaagtcattcgattgggacgaattcaagccctgctacaacggtggcagcctggccacgcgcggtgtacggaatgccggcaacgaaacctacgagccgccgttcagaggcacgctggtgatcagccagaatgcgccggtggacgccagcgaggcgatgctggggcgcatcgtgaaactgcatttcaagaagcccaacgcaaccaccgcgagccgccaggcagctgaaaacctcaacgcgctgcaggtcgaggatgtgagccatttcctgctcaagtcggtgcgtgccgaagctgctgtgatggataagttcaacgagcgcgtgcgcttctacgaagcacggctgcgcgagaacaaagatctgcgaatggaacgcctcatcaagaaccactcgcagatgctggcattgctcgatggcctgcgcctggtcatcgacgtgccagaggaaatggtgatcgaaacgcgcaaggtcctgaccagcatggcgatggagcgccagtcggccatcagtgccgatcatccgctggtcaacgagttctgggagacctacgagtatctggagagcattggcgcgggcgaacgcccggtggtcaatcactcccgcgaccctcagcggatcgccatcaacctcaatgacttcctggcacgggctgcgcagcacaaccagcctgtgcctgacctcaaggtgctgcgcaactatctgcgtgactcacgccgccacaagctgatcgacgccaatttgaccgtgaacagcgcgatcaagctggacagcttgggcaaaggtgcagcaattcgctgctgggtttttgggaagtag

SEQ ID NO: 506674 - DNA, 420 bp, Stenotrophomonas maltophilia
atgcaacagatgacaggccaagccatgaccaccctcgcaaagtcgctggattccagcaccggacccggagcggaggctatcacgggtgtgtgggactgtggaaatgttccacacgcccccgacagcagcgcgaccatcaccattcacgttacccacaacaaggtgatcgccacggttgaattgtgtatggggatacctaagaccgcgcagtgtgtcttcgagcggcggcgtgggagccaggccggctgggtccataccaagggggccgagttcagcgacataacggactggatctcgcccgaactggcgaggctggccaacgccatcccgttcccgcatgacgttgcaaacatgctgccagggcgccgtgcgagcgtcgaagcggtcaacctggccgcgcaggaggtggccaatggctga

SEQ ID NO: 506675 - DNA, 231 bp, Stenotrophomonas maltophilia
atgaacctcgaccgcgtgattcaggttgccctgcaggcaaagcgcatgggtgaaaccggcccattgtcaaccggggaggcgttgactgccgccctggtgctcaaccgtcatgattggctgcaggagatggactacaccatcgcgcaggcgctggatcggatcgactctgactccatcgagcacttggccgatgctgcacgctgcattgcggagggcgtcgatcatggctga

SEQ ID NO: 506676 - DNA, 1806 bp, Stenotrophomonas maltophilia
atggctgaggtgtttgagattcgccacgccggacttttcgctggccttggcgcaggtgcgcgcggcttcaatcaggctcggccggatattggctcggcgcgagccaagttccgctgcattggtggcatcgatgtcgacccggctgcggtggcggacttcgcgcacctggctggcgtgcccggcactgtgctggatctgttctcgctgcagcagtaccgcgcgttctggggctgcaacccaccaccgggctggcgtgaggcaggcacggccgacgtgcaccgcgcgttcggtcatgagcggccgcacgtggtgttcctgtctgccccgtgcaagggtttttccggtctgatgtcggagagtaagagcaagaccgccaagtaccaggcattgaacgagctgacgctgcgcggcatctggctcacgctggaggcctacaaggacgatccggtcgaagtgctgctgtttgagaacgtgccgcgcatcgctacgcgtggccggcatcttctggaccagatcacggcgctgctccgtgcctacggctatgtggtgaacgaaaccacgcacgactgcggcgagcttggtggcctggcacagagccgcaagcgcttcctgcttgtggcccgccatgccgagaaggttccgccgttcctgtacgagccagtcaagcgccccctgcaggcggtcggtaccgtcttggaccgcatgcctcttgccggcgatgtggagcgtggtggcccgatgcaccgcgtgccttctctgcagtggaagacctgggtgcgcctcgcgtttgttgaggcgggcagtgactggcgcagtctgaaccgcctcgctgtggaggacggtgtgctgagtgactatctgatcgtccccgagagccgcggcggattcctcggcgtacgcggttgggacgatcacagcgggacggtagccggcgaaagcctgccgtcgaatggcgctttcagcgtggcagatccgcgcgcagctgcaggtgccgctcagtaccagcaatacggcgtcatgcaaatgaccgacaccgccggtgcggtcatcggcgtgaagtcacctgggcaaggcaccttctctgtggcagatccaaggcacgggtggtctgacggtgcccattccagcaagtaccgcatcgttgccttcgatcgcgctgcaggaaccgtgacgggatctgatcgggttggcagcggcgcggcctgcgttgcagaccctcgctcccatggtggcttccaaggcgctggcaagtatccggtcgcccaattcgacgccccttcgcgcacagtcatcgctcgcagcgacacgggccatggagcgtacgccgtcgccgaccctcggccggccaatcagcgacagcagggcgacgcgtatctgaccaacgggcactacggggtagtggcgtgggacgccagcaccggagccgtcagcgccgccgctggccatgacaacggtaagtggtcggttgcagaccctcgcctgcccgacgcacgcaagaacttggtgtgcgtcatccgcagcatggacaacacctggcaccgcccgttcaccaccctagaactggctgccctgcaatcgctgatcgacccggaagagacgctggaactctacgggctgagcgaccaggcgtggcgcgagcggatcggaaacgcggtgccgccggcagctgcatgcgcaatcgcggaggagatcggccgaacactgctgctggcatggaccgggcagaccttcgcgctgtctagcacacccatctgggtgcgcgacgtcgccgtcgccatggccctgccgggggaggtgcgccagtga

SEQ ID NO: 506677 - DNA, 186 bp, Stenotrophomonas maltophilia
atggctgaattcgtccatgacatcggctggaacttgaaggattcagtcgtgcatgaagtcaagagtgactactcgtgtgatatccgcgccttcacagaggaggccgctcgtcgagcacatcaagctcgcctggatgaagtgctttcagagggtgtgcagttccctcagtcgcgtgtgcgcctctaa

SEQ ID NO: 506678 - DNA, 1446 bp, Stenotrophomonas maltophilia
atgctcgcggtcgcccaagccatcctctacgtgcgtgacaaggaaggggcggaggcagtggcggaagccgcggtgacgcgctcggaggctttatcccttgcaaggcgcgtcgcggccgaacaagcctctcgcattggacagccgccttgctccgccaccgacattgactcactgaaagagatcgcgttccgctccagctacatgaacgacatcggtcgcatccgagacggacgccttgtctgcagcgctctctgggggcgctcgcgcccctacaccctccccgccccacgcttctccagcggcgctgtccggctttggcacgcatcggatctcgttggctccccctacaccgggtccaatctgatcgcccaaggcgacacattcaccgtgtcctccccgtctgccttcgagagcttggaccctgcgcgcagcagctccatcagcatcgaaacgaaggaccgatcgtttacattccgcaccttgtccccgaccagccgcgtcggcaccccgtctctcgtccaagctcaacattgcagccgggtggccgacgtttgcgcgttcgttaccagccctaggcacgtggtgtccgaactgccctcggcgttgctcaccaccatcctgtcagcgggtgcctcggtagggcttttgctcgcgttcttgctgatcaaacaccaaatcacggctcggcaaaccatccagcaacggttggtgcttgcactgaagcgcagcgagatcgaactggcctaccagccactgcgtcgaattggcacgcgggagctcgtgggatttgaagcgctcagccgctggcgcccgccgggagacgatgaaatcccgccggccatcttcgtgcccatcgcccaccgattcggcctgagtcctgatctttttcgatacgtgctggcccgtgccatgaatgatctcgcccccgcgctgagggagcataggaacctctacgtaagcatcaatgccgagcccgtggacatggcccaagagtgcgtcgttcgctacatcggcagcgtcaccaacgattttggcgtgttgccagagcaaattcgcatcgagatcaccgagcgggaagaactcgtgtccgctgccgcaaagagcaacatgcaggccctctcagttctgggataccggttcttgatcgacgacttcgggaccggcagcgccaacttctcccgcctcgcccaatcgccgtttcgaggaatcaagatcgatcgcatgttcgtggccgctatcaacgaggactcccccctgcggcccgttttgccagggatgtatcgcatcgcacgtgagcttgggctggatgtcatcgcagaaggcgtcgaatcagaggcgcaagatttgctgctctaccggattgctccagaggctattggccaagggtggcactatggctgccctctctcaaccaaagacgcgcttgccgccatccaagttgggtag

SEQ ID NO: 506679 - DNA, 234 bp, Stenotrophomonas maltophilia
atgcgcacgctggtgaaagaggtgctgagcagtttgggccaccgcgtgaaggcggctgcaaacggcagcgacgccctcactgtgcatgccagcgaaaagcactttgatttgctgattacggacgtgggcctgacgggctcgctcaatgggcggcaggtggcggacgcgggccggcagcgccgtccgacacgccggtgttattcatcaccggctatgcagcaagcgtcgcggtag

SEQ ID NO: 506680 - DNA, 1053 bp, Stenotrophomonas maltophilia
gtgccaatcctaggcgcaagcgagcggcccctgggggcatttgtggccgcggccacccagtcgcgttactcaatctcccccgattggcagcaggagcagatttatcgccaaggggacatggccgagctcaaggccactgggggcaactggcgtcaacagctgatccaccccgaggacaggcccgcggtggaattggccattgctcatgccgcggagttggcgtcgccgttggaggtagaacaccgcgccttgttgccagacggctccgtccgctggatacagttgcgggcagtcccgttgatggacagcgaaggcaacgtgagcgagtggttcggtgcagcctccggcatcaccgatcgccgcgtggctcaagagcgtttgcagcagttgaccgcaacgcttgaagagcgggtgcaggccggcactgacgaactgatggcgatggaggaacggctgagacagggccagaagatggagtcccccggccaactggccagcggcattgcccacgacttcaacaacatgctcaccggggtctccatgggcttggagctgttggagatgcgcgttggccaaggccgtttggaggacctgggtcgctacgtggagatggctcgaacgggggccgaccgagctgcagcgttaacccaacgactgttggcgttctttcgccggcagacgttggcaccgtcggccatccacgtgtcggccatggtgaacaggacgctccacatcctggcccgctccatcgggccctccattgagatcgagacgcggtcggatcaagtggaggacgtcgtgcgggtggatgctccgcagctggaaaacgcccttctcaacctttgcatcaacgagcgcgatgcgacgccggatggagggcgcatctcgattgaggccgagctctcacacgtcgatggcggactggcggagcgtttggtgctgacgcctggaccctatgttcgcttgtcggtccgagacacgggaaccggcatggacgcgagcgttgttgaaaaggtgttcgagcccttcttcacgaccaagccgatcgggtag

SEQ ID NO: 506681 - DNA, 447 bp, Stenotrophomonas maltophilia
atggccgatgaactcgtggccaaaatccacgcgcaggggttggattgccaggacgtggaggtcgagatcaccgagggagaatggctgcgggtcaactcgctgccgggcgagcaactcaagcggatggcctcgtcaggcattcggctcggggtggatgacttcggcagcggctacagcaatttcgggtacctgaccgagttgcccattcacacgctcaagctcgacaagtcgctgatagacgatatttccgaagaccaacgcgcattgctcaaggtccaagcgatcgtcggtctggcccatgatctgggctactcgaccgtcgctgaaggagccgagacgaacggtcaggtcgccaagctccaaggccttgggtgtgacgaaattcaaggtttcgcgctttccagacccatcagcgccattgagttggccgagctccttgcgccctga

SEQ ID NO: 506682 - DNA, 234 bp, Stenotrophomonas maltophilia
atggagaaattcgacggagcaacgtggttcccactggacaggtttgaagtcggcattgacgccgaaacagcagtggttgcactcgggctttaccaagttcgcaacgcggccggtgactcgaccatgtgcggctcgacgatgactccgacgcaagcggagcgaactggcaatgcccttttgatcgccgccaaccgtgctcgcctgacgatcccgggctcaagcagcagccactga

SEQ ID NO: 506683 - DNA, 1113 bp, Stenotrophomonas maltophilia
atgctggcattcgccataacgaccagcatgaccttggcgttgggcatcttcactattgtccgcgcgtcacattcgaagcaggagttgtccaggattgagtccgtctgggcgcctggcagctatgccatcggagagatgcgtgcgcagttcggcgatctccgcatctacgaaacctcccaggtcagcgaagccacttccgctgaggccgtcaagcaatacgaacagcggatcgtggcgggcaaggccaagatcaacgagctggtgaagcaatacctgcggtccttcgccgatggcgaagatgccgcgttgttcaagccggtcagcgctgcgttgagcgattactttgtcatccacgatcagcttcacgctgcgctcctcgctggcgatgccgaggccgcgcagacgatctcggtgacagaatccagggcaaagcgcgtggcgctgttcgacgccatggagaaagtcagcgaatacaaccttcgcggcatgaaggctgaactcgcaaccaacgcagcaagcctcaacaacctgatgtcgatcacaggcttggtcttggcggtgctgtacttggtcgcaagcgtgctggggtgggcgatcagccgttcggtcacccggcccattggtgaggcgttgcccgctatccgcagcgtggccaatggcgacctcaacgtgcgaaccgactaccagagccgcgatgaggcgcgccagatgctgctctccctccgtcaaatggttgccaccttggagcgtttttcgaacgacaccaaggtcatggtcaagcttcacgaggccgaagacatctcgcaccggattccggaggacctgcccggtgtctacggcgagctggccaagggcatgaacacaatggtgttcgagcaccttgaggccatcctggatgccatccaagtgctcaacgagtatgcggccggtgacctgcggcgtgacgcgcgacgcctgcccggctcccgggcgtgctccacgaatcgatggacgctgccaaagcaagtctgctggcgatcaacacggagatcaagcggttggcagtgtcggctgccgacggcgacttctccgcccgcggtaacacgtctgcgttccagcacgactttgaattga

SEQ ID NO: 506684 - DNA, 810 bp, Stenotrophomonas maltophilia
atgtctacgttagctccccgggaaaaacgaaaacttgaagatctgttcggaatgagcagtggttacgttctcgacttttcgaacagcacatttgctcggttctttgaagaagtggtttatctggacatctacggagggaagtacagcgaatatggctcgtcgaaagccaaccatctgcgcagcttttggaccaaggaagacgatttcctggtaggtcgggtaattctggggttgctagagcattgcggggacaccggtcaccccgccttagagcggcaggctctgttcaaggagtgcgaagctatagggacacgtctggcgcaagcgaaggcagtggcggatatagaggccatcgaaggcgactcggaggacttccagaaggtggctaaggccgcaagggagtgctttgagcgaaacgagcccgaacaaggcctggaccggttacatacgtttctggtcaagtttcttcggaagctatgcgaggagcacggcatacctagggaccgttcggtgccgttgggcggtctgatgggtggatacgtgaagcgcgtcaaggaggaaggtctcctcaaatccaagatggcggagcacatcctaaatggcgcgacttcgatattcggccaatacgactacgttcggaacaatcacacgatggctcacgacaatccagtgctcgcctacgacgaggcgctgctgatcgctagcaacgttgccagcactgtgcgattcatcaaggcgtgtgaggaacgatggcagctggcgcggcggcaagaaacggttctccccgaggatactgacatcccgttttaa

SEQ ID NO: 506685 - DNA, 1071 bp, Stenotrophomonas maltophilia
atggaaaagccaagggaagtccagaaagtcgtcagaaagacggccagcagtggcaaggtggactacgcaccacccgtggttctcaacgagaccagcaaaagcaagctgcaagcgttagcttggttcatcccccatagcgatggtcgaaccactttctcgctgaagctagaaggcttggtgaagtcgaaaggccagccctttatcgaggacaagaccaagaccctgacgttgtcggaaacttcgtccctccagctacttaaatacctacagacacatctgccccttgccgctcagtcggaaacgggggagttcatcttgattcgggtggccaacggcgaggccaacctgacgggccatgatcctcaagaactggtgggtgccctgacaaaggttctatcgcagtcagagttgctgggtcatttgtccagcactgaactcacgcatgagctaagcacggcgctgcgtgggtcaatccgcttgagcgagatgcgatcagcggtggccgaactgcgctccaacctcacccggggagaggcggttgaacagacttaccaggcctggtgcgaaaagcactgctgggcctttggcagcgcctacgtggtccgggatgaggttaggggcattaccaccggtgacaatctcgatctgatgttgcccaatgtcattgccggctatcgggacatcgtcgagctcaagcgaccggacaaggatgtgctgctctacgatgcagcccacaagaaccactacttctcagcggacgtatcccgtgccatcgggcaatgtcatcgctacctggacctccttcatgaggcagccaggcacggtttgctggaccacaaagaagtagtcgcctaccacccgcgggccaccatcgtcatcgggcggtccaatgagtggtccgatgagcaacagcgtgcgctccacggcctcaatcagcgcatgcacgggatatccgtgatgacctacgatcacctgctggctcaaggagagcgcctgattgagatgatgagccctagcgatggggatgaagatgctgagacatcagctgacgatgacgacattccttggtaa

SEQ ID NO: 506686 - DNA, 198 bp, Stenotrophomonas maltophilia
atgtcgcaggtgctgcgaaagtggccctctaccatggggctgaacgatacttgggacagatacagggcggataagtggatcgtggacgatctccgggcgaccaagggcaagggctgcggaatccaccggatggctgtgttaaagcaagaggcgggaaatagcggcaccgagcaatggaaggcggcgatcgggacatag

SEQ ID NO: 506687 - DNA, 501 bp, Stenotrophomonas maltophilia; identical to SEQ ID NO: 502940

SEQ ID NO: 506688 - DNA, 816 bp, Stenotrophomonas maltophilia
atgagcacgttctcagaacgccacaactacagctcgcccgatgcagacatcaccattcgtgaagatgcgcccgaggtgttgcgcggagccgttgttgccatcgctggcaaagcggggattggatacgaaaccctgcgcaaggaagtctgcggtgcgcttggcgtggcaccagacacccggggcaactggagcgaacccaacgtgatcgcggaggtgcagcatcacctggaagagtgcgaatggtttgaggtgtatgacgtcatcgaaagcatagcagcgtcccttcaaggtcgcccacctgcctatgggcagcccaaagcaccttcggacgtcttctcggacggaatcaacaaggtctttcggaagaacggaatcggttggcagctgttgggcaaccgcattgagtttcgcggctcagaggcgtttgaagttgctataaggaagggcaccaacgagttgcgcagcgcagggaagaacacgacggccaatgaactccacgaggcattgcgcgatctgtctcgtcgccccaaccccgagctcaccggcgccattcaacacgggatggctgccttggaatgcttgtcgcgggacgtcactggatcgaaagacaccttggggaaattgctcggaagaaaccccaacctgtttccagcgccactcggagacgcaacggaaatgatttatggctttgcttccaacaatggccgccaccttaaagaaggcggcgatccgacgttggaagaggcggaacttatcgttggactgtcaggcgtgctgtgtcgctacctgggccgcaagcattccccgagcaggtaa

SEQ ID NO: 506689 - DNA, 141 bp, Stenotrophomonas maltophilia
atggtcgccttcgtgccgggcgctccctatctctttgcctgcaggaaatgcaatcaccatttccagcgggagatcaacttgggcctcttctgtccggcatgcaagtcgctgtccgtgaagcctcgtttggtctgtaagtag

SEQ ID NO: 506690 - DNA, 357 bp, Stenotrophomonas maltophilia
atggaaagtgtgatcgtaaggacacgggatgagctggaagtggccaagaacgcaaaggcccacgagattgtcgctgtgggaaagttggctgacgacctcaagaagacgcgcaagtttgcaacactcggggctgtgggcgttgcggcaatcgccgctgccgttggcttggctccggttaccggagggctcagcacgctggggctggcggcggtagccacagtcaccgggctggaaatagcggcaattatcaccgcagccagtttgggcatcgcgttgatcttggcgattcacaaggattacgacgtggactttagttccaagggggaggcgaaatttcggcgaaaggaggggaggtga

SEQ ID NO: 506691 - DNA, 477 bp, Stenotrophomonas maltophilia
atgaggaccagtcacgggcggttccgcccagacgccgtcgacgcccgccctcgccacgatgggctttttcagggcgaaggcacgggcgaggaagctcatcaagagcgtgattcgttgcttcaagcgctttacaccgaatcgctccatgcccgcggggacgtggacgcggttgatcgcttgctcgatgcccaccgggaggcgcttggggagcccgagcaagtcgcctatgcgcgtgagcaagacgaacgccatgatcgggcattgcccttgcccaacatcggtcggccgttgaggccgtccctggagcgctacctggacgaacaccggtcatggaacccaccaaccgccaaagaggtcgccatcgcactttccagggcccccgccatggtgcgcgaagggaaggtgtggcgtgcgtcagacgacgttgtggaggctctggtggaggcgcccaaagacgtcccgcggcagcggatgtga

SEQ ID NO: 506692 - DNA, 129 bp, Stenotrophomonas maltophilia
atgtgccagattttaaacatgttgatgaagctgacttctctgatgttgaacgcatcacgaactcaacgcttgttgatagagagcttgaagaactcggaggcggtggatttgaaggggttggttttttag

SEQ ID NO: 506693 - DNA, 543 bp, Stenotrophomonas maltophilia
atgatgaatcagattaaatccagctcaactttaaagagcgatgaagaaatgaatataaattttgacaaagacgctgtaaccgtattgctaagcattgcaacaatccttatagccctatcgcaaatgaagattgccagttcaaaagcgagactggatctgtataacaagcgctttgccatctacaccacggcactggaatattatcaaaccttgtggggaaagactgacaccccgctcaaggtctgcgaagccaacatgataaaagccttccgtgaatcaaaattcttattcaaacagtcagacgggatttacgaaacactagaaaaaattaaagatgccggagctatggctacaggcctcaaggtaaatattgcgaagatggaaagtgatccgacaacagatggccggattttgacaaaaagccgcgaaaacagatcagccgcccttcaacgctttgaagacaacttgaagctacttgaacagcagcttgaaaaataccttagattcaagactgccagcggttggacttttctaccctggtaa

SEQ ID NO: 506694 - DNA, 411 bp, Stenotrophomonas maltophilia
atgaagatctttaaaacactattcgcgctatcgctttttatagcgacaagcgccatcgcggcacccaataaggaaaacctcaccctaatcaagcaattggcaattcagccagtcgccctagttgaagggaatttttgccacatacgtggcgcagtctggctcgataagccgattcccaatgcagaagttgagatcctggatggcagtcgaatctggaagacaaaaaccaattcaaacgggatttattcagcctcaattccatttgaaggcgatgacaaagcattactcgaaagaccaaccaccctccccattcctgcagatgcctcacaggtaaacatcctcaaacctacatttctatgtagcaaatccaccaccaccaacattatggcaaagcccaaaggagcaaattaa

SEQ ID NO: 506695 - DNA, 768 bp, Stenotrophomonas maltophilia
atggaatgcctgcgtaaagaagaggactacctggagcagcgctctgcggcactggatgctgaactaaacaaagccgccgcgggcttcccgcctccgaccatcagcagcaaggcagcggcgcgttacctgggggtccacttcgacacgcttggagagtggcgccgtcgaacgcctcctgcagggccgccgttcgtgaaaggagccggccgcgttggtggaggggcgaacgagcacgttcgttacccctacacggaacttgtcgcttggcaggcttcacgcgtggggcgcagtgtcaaagagcgtcgcttgatcgacgaactggacgcagcccagcaacgggtccgtgagctggaaatcgaattggccttgcggcaggcgcgggacgatgcaagccggctgcagaagaagttggggcgcatcgcatcgctggccacgcttgatgacatcgccgtggttacccatgagtgggcgttggtggatggcgaggtggcggggcatgtcttggtggtggacgaccaagtgctcagcggtgcgctggaacgtggtgaggtgtgggatgccacggttgaatctgcattgcaggcactctgggtcgacggggaggcgcgtgagccttatcacgctgcctacgccaacgtactgaaagcggtgatgcaaaagcttttcaaagcccaggccgcccagcgagccaatgatctggaggtacgttggacgacaacgacggtggctgatcgctacaaacgtccctttgccgaagatggaaggtga

SEQ ID NO: 506696 - DNA, 432 bp, Stenotrophomonas maltophilia
atgtattcatcaactgcacaggccatgggctactcggatctctatcgcttggatgaggcattcagggagcggttcgatgaaatgtgcgctgccgtggatgcgctgccgccagctttgaaggaacgaggtaaggcgcttggttaccctcaattgcacaatgcatgcgtcttgggtgagctggacttggtgaaggcactcttggccacaggccttgatccggatgcttacacctacacagatggcgacgatgatcagccgccgctggtttggattgctcgcaccgctgatctcgatcatccgcagaaagttcagatcgctgacgtcttgatcgtgtcaggcgcgtcggttgaagagggcgagccatgtcaggaagcagaagatgctggtgatcaccagttcgcgacctatttggcttcaaaagccgcggtgtag

SEQ ID NO: 506697 - DNA, 2523 bp, Stenotrophomonas maltophilia
atgctggtgatcaccagttcgcgacctatttggcttcaaaagccgcggtgtaggtcttttatcaggaagaatcgcaggtgcgctggcgtggctatccagcagcaggcgcgccagcggcgcacatgggaatcgatcagtcgggtacccgattggtccagttcaacattgcagttgaccacggtcacaggggaccaagaaatgctggcatggctaaggaagtggtggggtccaaacaaagatggttccgcaggatcgaggaccagcgccgatgagcccactcatgcagacctggacgcaggtttggagacggaagacgcggaagctcctcccagtgatcagttcctagatgatcagcccatcaccgatcgcttgtctgaccggttcaatcgtgcgccgttcgcgtcccgattggctcagactctagcccagcgcgctgatccgtccagtatcgtcgttggtctctatggcccgtggggggatgggaaaacatctgtccttgaaatgatgggggaggcactaaaggagtatccgcgggtcattcttgtgcgctttaacccgtggcactttcaaagccaagacgccctgctgcgagggtttttcgccacccttgctgaggcgatggagaagtccctgcctaacaaaaaagaggtgatgggcgaccttctgaagcaatacgcggggcttctctctctcgcgagcgtgacccttggtggtgtggtccagatctctgcgggtgaggccgcaaagagtgtgggtgagtcgttgtccactgtgagtctggaagagttgcgatcgcgaatagatcgaatgctgggccaatccaagcgccggctggtggttctcgttgacgacatcgacaggctggatcgcgaggaaacccatgccatctttaagctggtcaagctgtccgccagcttcaagcacacttcgtacgttctggccttcgacgatgacgtggttgcagcggcgttgggtgaacgctacggagagggcggggccaagggggggcgagcgtttctcgagaaaatcatccaagtgccactcaaccttcctcctgcagaccccaacagtttgcgaatgattgctttagagggcgtgcagagggccgtgaatcaagcgggattggtgctcgcccagagtcaggtggatgcattcattaggccatttgatgacgtcatcgcacccgcgctcggaacaccacgtaagtcgaagctcctttccaacgctctcctgtttgccctgccgatcctcaaagacgaggtgaacacggtggaactgatgctgattgaaggcattcgggtgatttacccgggcttatacgccgcgatacggtctaatcgaaacctttttctcaagggcggacgcgaggatgggcgtgatgatcgtcaaagaaaggaagcagatatttcagccttgctcgagaaagcacttccaggactgtccttggacgatagggacagggtgcgccgacggctcttggagccactcttccctcggctaggaggctctatctacggaagcgattgggatttaacgtgggcgtcagagcaaaggatcgcctctggtgactactttcaacgatactttgcctatggtgtgccgctgggtgacgtgtcggatcggatgatcgcggaattcattaaggctgctcctggcctgtcggcctccgattcgagagctgtgctccagcgcttcagtgaaattcatgctatgccgcgcttggttatgaggcttcgtcagagaaaggaaacgatcggagcttctgaagcaaaagcgatagcgctcgcgtttgcaaggaatggtgatctgttgccgcgcgagcgaggcatgcttatgctggtggacacccgaggatcagcggccattctcatcagcgacatgcttaaacagttgcagataggtcccgagaggcagagcgcggccgagcagatcatccgtgaggcttcctcagttggattcgcttctgaatgtctgcgttggattcatcacaacaatgatcggcccgaagatcggagggtgctttccgacgacggcgataacgcgctttctagactggctagtgagcgcatagaggctgaaagcgccaaagctccattgttcctcaccgaacccaaggacgcccccacgctctactggctatggtgccaagagacatcggatgcacatgtgcaacaggtgctacgtgcccagttggataagtcgacagaccgagtggatgcatttctggcgtgtttcgtgggagagtcttggggagttgagagtgggatccctaggccgggagattttgaacgacgccaatacgactcagtttctaagcttgttggcgcggactacattgctgtcaagctaaaggagcggtatggggctgaattggacagtcctgaggaataccctgctgaggggatggatcaaccccgccgagtcgcgcatcagttcatgaacgtacatatcttcgttactcaggaaaagggctcgtcgagcgacagcgacgcaactcatacaagcgaagaatccctgaagtag

SEQ ID NO: 506698 - DNA, 768 bp, Stenotrophomonas maltophilia
atgtacgatgctgcggaacgccttaattgttatcagcgtttttctgcttggtgggagaaccaatcgctagcaatcaaagtctacttggtaggtttagcgcttctgctgatggccatcgcctcctttcacgcctccccgcgcggactgctaaccagctgcctggcctacgcctctagcggccttctcgcttttggttttctgcgcgagacatacatgtgggtcacacccaagctccagcttcctctcgtgaagctgttggtgaccggcgcgagcgtgatggcactggcagctgcaacgggcatcagcaaaatggcagtgaacgaggcgaccggccaagacccctcgcacttcccaacgacaattgcgttgctgctgccgctttctgtgctacgggtcgtgtcagtggtggcgattgtcgtcagcacactttccaccgcaggactaatgctctgggctggagcgagaatattcctgacgtggggcccgctggaggacaaagacgtcttgctcctcgtggcacgagtccttgcaggtctttcgatcgcactaatcatctccaatacgagcggcgccgcgatcgtgccatcttggatgcaagctctggcccggaagtcagcactcttcttggacctccacgatgaccccgcctgcactacaaaacctgacgaaagaacgcatcgcatcaacgacaacgtagtcatagtcggcgccgcttctggcacctatcccacgtacgttcgacgcttgtgtgccatcgcacccgaatga

SEQ ID NO: 506699 - DNA, 1119 bp, Stenotrophomonas maltophilia
atgctcgcaccgaagaagaggcgttgcgcccgcctcctaaagtggatgcaaactatgtctaccgagtggccaagcagcgagactttcacgaaggttaagcacctgatcaatgcttgcattggaccgatcgaccaacactttccgcctacaccactggccggggcgctgcagatagcgaccttccaaatcttgaaggcgcatatagaaaaaaagcagcaggaagaagatcttacgtcaatgcttttaggcgcttatatcagcgcgacaagctggattcttaacgtcattgaatcgggcagcagcggtgagctgacctggggccaccacaataagcacggcagcagcgcgaaaagcgagggctccactggtgcagatttttccttgctgatcaaattcggcgataattttgctagggctgctgtatttcaggccaagtgcagcgacagcgacaccacggtccaaatacaccgtattgccccataccgcgccgcttcccgcaaggaacccgagcggctgcctgagccccaaatacttagattggtcagtcatggcctcaagataattgcgtctaccgacgagaggaatctggactggcttcactactgctcatacggaccgacgtcttttttctgcataccgctgacccaagcggccagcaacctcgttagataccgacagaccaagcctatggccgacactgctctactacagttcaaggcggataacttgagcgaccgttctctccatggaaagttgaagatcgaggctgaacgcctttacaagggccatctagccgaagaaatggaaaggggcgaccatgcgcgcgagcttcttcatctgctagcagctggagcttctctcaaacctaaggacgatgtgcccgggtggcttacgttgcggacagcatctgcaatcggcggttttgtagagacgttctcgaatgatgtcaagatcgttgagctgaacggaagatccgccccgaatcccacttcgaacgctagtatcatcagcaagctcaatgacgccttgaaaaactatgattcggcggcatcttcccctaacgccacacaaggcatggcctcaccagacataaactttaccaaaccactaaaaccctaa

SEQ ID NO: 506700 - DNA, 264 bp, Stenotrophomonas maltophilia
atggaactttctctagaacagttggccgcgcgccttgaggcatgcgaggtcgacctagaagcccaccgcggctacatcaaggcactggaatacaggctgcgggcggtcatcgccagccatccgaacccacaggtcctctcaatggcatggggaatgacgctagctggcgctgcagacgcccacgcaggggaagaagggtttgccttcaacggcgctatgcagcaggcaatgcgcgatttgaccagtgaagggaatgccctttag

SEQ ID NO: 506701 - DNA, 651 bp, Stenotrophomonas maltophilia
gtgcaactggaaaaactccttattcgttatccgttcgtctaccacatggctgaagcgggcacgtggcctagcatccaacagcgcggcctgctgtccaccactgcttcgttggatgcgcttggaatagccggtgcacagcgcaatgcccttgagagctcctatcggccggagatgtcccacttgcgtccaggtgcggccgataacatcgttttgcgagaccagcgtccaatgccccctagccggctggagcaagcgctgccagccggccttagcactgatcagtggtatcgcctcatcaatagcaaagtattcttctgggtgagtccggagcgactgggtaggttgcttcgatcctatggagcctctcagcacgacgttctgcgagtaaacacggctagcttgctggatgcgcacttcgcgcgcacctggctctgccacatgaactcgggcaacaccctgcccattcctcattaccgtgatgagaccatcttcaaacgcattccggactacccggtgaaccgagtcggcaaaccggtaaaagaggtggtggagctggtcgtcgactactcagtgcccgacatcgcgaaccacgtagtcgacgtgacccgggtccaaggcgatacccagctagcagtggtgtggacgcggtga

SEQ ID NO: 506702 - DNA, 1665 bp, Stenotrophomonas maltophilia
atgaagaagcatcatgtcgtcatcattagtggcaagacctgcacagggaagacagggctagccgagaagctgcggcagacgtatggatttcgggtggtttcctcccgcgacatcctcaacatgcagctagagctcgacggcaagggtagccgccctgtccttatcgaggaggcgcgcaaacaggatgaacaaagcaactccaagtggattgtggagggcgtgctgcctcagttcgagctgttgcaggatcacgagccaggcatcgtggtcgaccacgtcagcagtgccgaacaggttcgccaatttcgggagtgcttcagcaccaacctggttcacgtccatctctatgccacccaagccaccttactgaagcgctatgaagaaacagaatcttcgtctgatgctcccaattactcggacatcgaccacctaacacccgagtcggtggaaagcctgaaggcggacgccgacgttcgcatcttcaccgaacgcacggacagcgaagacacgctagtgcgtgtcgcagcccagctccatttgctcaccccacccgaactgcgatgcgtggatgtgttggtaggaggtcaatacggcagcgagggcaagggtaacatcgtggcttacttagccaacgagtatgacgtgctggttcgggtcggcggcccgaatgcaggccataccgtggccaacgcagacggcaagatcgtccaccaccagttgccctcaggaacgcgcttttccaatgccaagatccttctgggacctggcatcactcttaacgttaaagcgctgctggctgagatcgcgagatcggagattggaccggaaaggctgttcatcgacccgcaggccaccatcatcgatgcggaggacatcgccaacgaagagggtggagtaaaaggcaccattgcttccaccggcagtggtagcggcgaggccaaggcgaggcgcatccgtaaccgaggcaagccggatcaaccaaagttagccaaggacatccccgagctggagccctatctgggttcgacggtggaacatttggaattggcataccgacatggtcactctgtcctgcttgaaggcacgcaaggcagtgccctgagcctgtatcacggcgagtatccctacgtgacctcccgcgacaccaacgtggccggatgcctagccgaagcaggcatctcacccagccgggtgcgcaaaatactgatggtggttcgcacgacgcccattcgagtggctgatcccgatgggaacaaggggaacatctccggtcacctaaaggttgaaaccacgttccgcatcatcgccgagagcgcgggcctcaaccctgacgatgtcgaggcggccgaaaaaacctcgaccaccaaccgtaagcggcgagtgggctggtttgagtggagtcagttccgacgtgcctgcgacctcaacgcgcccacggacatcgtgctgacattcgtggactatctaagcgcgagcaaccagaaggcgcggagatttgagcagttgtcctccgacacgattaagttcattgaagaactggagcgtgtggcacaggcacccgtgtcattgatcaacacgcgattccctcagaaggacggtgatttcaaggatctccgctccattattgaccgtcgcaattggacggcccgctctcccattaggtga

SEQ ID NO: 506703 - DNA, 570 bp, Stenotrophomonas maltophilia
atggggattctgcggattgttctgctcagcggtcctttcaaggttgggaagtccactgtcaccggcgagctagttcagcagtttggctacctcaagatcagctctagtgactaccttcgctcactgagtcccggggtggagcgattagagcctgcgcaggctcgcttgagactgcaagaagcaggtgacgacttggaccggaagactgacttccgctgggtggtggatccgggtgcgacttctgctgtcgccaatgccccagacgcgttcaactggcttttcgacgcagtgcgtaagcgacggcaggtcgagcactttcgagggaagtttggttccgccgtcatgcatgtccacctgacagccccggatgacgccctgaggatccgtagcggcttgtccgacacggcctacggaattgcggcctctcatcccaacgaagtcaatgcacgttccctcatcgacattgctgatcgtgtcttcgacaccactgtgcagacggcacacgagattgcgatgcagatcaatcaggcaggaggctggtatgaagaagcatcatgtcgtcatcattag

SEQ ID NO: 506704 - DNA, 327 bp, Stenotrophomonas maltophilia
atgatcaccccaaattcctcactgagccaactgcaggctcacgtcgcgcaagctgaacttgcccgtggcttcctcacccagagtgctgcagacaagtgcctgctcctcggcgaggaaatgggtgaactgttcaaggcgattcgtaaaacatcgggcttggccattgaccctcaatcccaagtcggcgaggtcggcagtgagctggccgacatccttaactacctgctcgccatcgctaaccgttaccacattgacctgggcgaggctttcgtctccaaagaggcggtcaatgaaacaagaacttggaccgttggcccagcttcttga

SEQ ID NO: 506705 - DNA, 318 bp, Stenotrophomonas maltophilia
atgttctctcacccacagttccaaatcgccagccaactgcttatcgggctcatgtctcagggctcctctcgccaattgagcgatcgcgtcgaagacgtgaggcatgccttggacgtgtccgccgaactgattcgacagtgggaggaggaccagccacggcgtggcaagttcacacccccaacgccggcgtcccaaacgcgcacacgtgaagccgtggtggaccgcactttcatccctacagatgagtggcggcgtagtcgcgccaagaagagcacttcaccttcagtgtcgcggaactcggggccttctatccattga

SEQ ID NO: 506706 - DNA, 486 bp, Stenotrophomonas maltophilia
atgatcagcaagaagcaggaagccttcatcgaaaagccgtctggggaagttaaaggcccttaccaagccacctttgcgggaaccaccgtcatcttgaatgacccaaccgcagacgtggactctggcgactacgtgacccgaacgctcccaggcgggaaaactgagcgctcctacatccagagcgcccctttctatgatgtcggcatcggtggctttggccctcacttccaactgaagattggaactccccctacaaaccagcagcgagcgaataccatcaacattcaaggctcgcactccatccagattggcgaccacaacacccagaatgtcgttggagcgatccaggcattgcatcaagctatcgatgcatcgagtgcgacagagggacaaaaggtagaagccaagtcacgcttggccaagctccttgaacatcccatttttgtcgcgatcgctggcggtgttgcgggcggcctcgctggctga

SEQ ID NO: 506707 - DNA, 237 bp, Stenotrophomonas maltophilia
atgccgaacacaaccgacgcggccgtcagcgaggtcagcgccggcggcggctcggtcttgcccttgatatccgtgagcacgctcagcgttggctgcgacaccgcgtttagtgcattgaccgcacgcaccctggccaggtacttgccagcgtatatgccgcgcacctcgcagctggtggtccctaccctgttcacccgcacccagttcaggtcatccctgcgccattccacgtcgtag

SEQ ID NO: 506708 - DNA, 741 bp, Stenotrophomonas maltophilia
atgcaacagaccaccctgcaggccatccaggcgcatgccgtggccgaatacccgcgcgagtgctgcggcctgatcgtggccggccgcgatggggagacatacatcccgtgccggaacctggcgaccacgcccagcgagcatttccggttgccggcggaggactttgccgatgccgaggacgcaggcgaggtgctggccgtcgtgcacagccacccgaacgcgtctgcggctgcctctgatgccgaccgcgtcatgtgtgaggccagcggcctgccgtggcacatcgtgagcgtggggcagtgcctcggggctgatcctgagtgcggcgacctgcagaccatcgagccttgcggctacgaggcgccgctggtgggccggcagttcgcccatggcgtgctggactgctacagcttggtgcgcgacttctacgcccgcgagctgggcatccagctcagccagtacgagcgcgaggacgactggtgggagaagggccaggacctctacagcctggaccggctgcgcgctgaaggcttcgagctgatcgatggcgagccgcaacgcggcgacatgatcctgatgcagatccgctcgccggtgccgaaccatgccggcgtctacctgggcgacgggaagatgctgcaccacatgcacggccggctgtccgagaccgtcgtctacgggggcatgtgggtcgagcggacccgccacatcgtccgccacaaggaggcccgccatgactga

SEQ ID NO: 506709 - DNA, 975 bp, Stenotrophomonas maltophilia
atggcacttcagccaattgacatcactactccgcagcccaatggcaagctcggcgaccccgcgcgcgtcatgtcggagaagatcaacgccaatgaccagtaccttgagcagcttgcacaatcggccaacagcaaggcggtcgccgcaaaaactactgcagacgctgcgcttcccagagtgggagggaccgttactggtgcgatcataatgccagggaagcctgtccaagacatgttccgggtctacaacgttggaagcgaggcgggcatcggcggttccttcgcgggctgggcggatcagaagaacccagcgcttcaggtcgatgcccagttaaacactcaggcgtacatgccagtccgggtgacgcattggggagtgaagcatctgtggggtctggacgtgtacgaggggggctccttcgtcggcgcgcagacgtcagtgcacttccattttgcagcgggtgcaagccgtcaccagttcattgacaacggcaacgtcatcatcgctggtacgttgacccagaactcggactaccgaatcaaagttgacatcgcgagtatcgatcccagttccgccgcatcctcgctgcgggcgacccgcccggtggagtacacagatgcgcgggatgcggccggtccgcggcgttctggttacgtggcccacgagcatcaggctcacttcgggcttctcgtagacggcgtcaaggatggtgtgcgggaagagctggtgttggtgggagacgcgacgccatatgcacctggtgaggaacccgtgggatatgtgccgccacggcaggagctgaaggaggtccctgttctgcagagcgtcaattacgtcgggatggtgccctacctacatgcgggttggatcgagcacgaccatcgaattgcggccttggaaaatgagcgcaacgaaatgctcgccacgatcgccgggttgtctgcgcggctcaaagcactggagccatcgacatga

SEQ ID NO: 506710 - DNA, 348 bp, Stenotrophomonas maltophilia
atgaccgagacatttatctggcaggtgtatagccagcaaccgcaggtggactacgcctatgcggaaagcacagcccgatttggcgacggctacgagcaagtagctcccgagggaatcaacaacgagcggcagacctggagtgtcgagctgtgggggcatcttcagaacgatgacatggcagctgtccgcacattcctgcgcctgcgcaagacacgtggtgagagcttcttctggacaccgccgaatgaagctcaggccaggttccgctgcacaaaactgtctgcgaccgatgaagcggaagggtacatccgcatcagttgcaccttcgaacagacgttccagccgtaa

SEQ ID NO: 506711 - DNA, 2778 bp, Stenotrophomonas maltophilia
atggctgatccttcagcaaatctgcgcgtccgcatcagcgcggacttggccgacattcggcagggcttgggcgtgctcactcgccagttgcgcgaggtgcgcacggaggcggccaggccgctgccgacgaagaacaacatcacggagctgggggtctctgcagggcagacggcgcaggcaatgcgccagctgccggcgcagttcaccgacatcttcaccagcctgcagggcggcatgcccttcttcacagtgctggtgcagcagggcggccagatcaaggacagcttcggcggcgtagagccggcattgaagggggtctcgtcggcactgctggggatggtaaatccgtacaccgtggccgcggcggctgtcggcgtgctggtctacgcctggtacgacgccgagcagcaggctcaggcctatacgaaggccctggtgctttcccgtaacgaggcagccgcaaccaccctgacgctcgtgacgttggggcagcgcaccagcgaggccctgcaggtatccgctggcgccggccaagaggcagcgctggcgattggtaaaaacgggcgaatcgccgagaagaacctgctggccgtggccgaagcagcggtggccatgaaggaactcagcgggcaggcagtggaagatacggtcgccatgtacggcaagctggctgaggatccggtcaagaacgtccagaagctcaacgagcaggtcaactttatgaccgtggccctctacgagcaggtgaaggcattgcaggagcagggccggaaccaggacgcggtgacagtgatcacccgtgcggcggccgaagaaacggtgatggcgctcgccagggtccgcgccagccagaacccggtgatccgtggcttcaaggatctctgggcagaggcaacgaaggcgtggtcggcgatgcaggcaaacgtgggcctcgggcctgcggcagcgcaaatgcagcagctcgtggcagagaaccagcgggagctggcgaagctgaacgatcttgccaatggcacccagcgtggtctgccgctggcccgaaacccgattgcactggcggcgttgcaagagtcaatcaagaaccggtctgagaagatcaaggcgctggccaccgacctgatcaaggaacgcaaggacgccgaggttaaggccgctcaaaacgcaagcgcagagttcgtgcagcagcaggacgcgatcatcgacgctcaggcgaccagggagcagaagaagaaagacgagatcgcgcggatcaacggtcaggcagacgcggtgcgacgccaggctgaggcggcgggcctggtcgaagatgtcaaggcaatcgaagagcggcgtgcggcagccgtagccgcggtcgagaagaaatatgccaagaagccgaaggccggcggcggcaccgggtctgcaacacgctcagccggcctgcagggctacaaggacgatctgctggaggaacaggcacagatcacggctggcacccagctgctcagggctcagttcgcagcacgtgaaatcaccgctgccgagtactacagccgcatgcgggagcaggtgcagaagggcaccgacgcccaggcgaagtcgctggagcatcagatctcgttcctgcagaagcaggccgtgagcggaaaggacgccattggcgtgaatcgccagataggcgagctggaagcacgccttgccaagctccgcattgagggtgccactgcactggaagtgctgacgaaagaggaacaggcggcagcgagggcccgagagagcgccgtcaaagcatacggaagcgcgctggatgccagtaatgaggcgcttcagcgacagctgactacccaggctcagcgcgttggcatgggggaccgcgaatatgaagtacagcagcgcatcaatgaggcaatcgctgacgaggccgacaagcttcgggagttgagcctgcagcggaatgcagaccagattgatcaggtcacgtttgaggaagagaaggcgttgctccatgccaagaccatggaccggctccagatcatcaagaacgggtactacgaactgtggcaggccgagggtgactggctggcaggcgctagcgctgcctgggcgaactaccagcaggaggccagcaatgccgcgcggcagatgggcgacgtggtcggcaataccatcggtggcttcgaagacgcatgggtcaagttcaccacgaccgggaagctgagcttctccgaccttaccaagtcggttctggccgatctggcgcgtatcgctgcgcggcaggcaatcctgggtatcgtcaactcggtggccggcgcctgggccggcggaggcatcactgccgccggcaaccaggccgtcacctccggcaccagcagcatcaacaaccagcttttccagaacatgcggctcggcggtgggtactccaccggtggatataccggcgacggtggtgtgaatgagcctgctggtgtcgtacacaagggcgaagtggtttggtcccaagcggacgtcgctcgagccggcggcgtgggtgtagtcgaggctatgcgccgtggactcccgggctacgccgacggaggcgcggtcgggccggcaccgccgggagtggttggcatgggaccgtccaccgtgaatgtcagcgtggttgtgaacagcgacggttcgacgcaggcagatggtgacacctccctgatgcgccagttcggcaaggaactcggtgactttgtcgatgcgcgataccgcgaactccagctgcgcgacatccggtccgatggtttgcttgccagaacgatgatgcgttga

SEQ ID NO: 506712 - DNA, 561 bp, Stenotrophomonas maltophilia
atggtgagcatcgaaactgtcgccgccggcatggggttttcccatgaccaggcccttgcgctggagcaggcctgcatccgctttggcatcaacaccgagctgcgcgtttgtcatttcctcgcccaggttgcgcatgagagcggcaccggccgatggctcagggaactgtggggtccgacgccggctcagtcgcgctacgaaggccgaaaggacttgggcaatacccagagcggagatggatttcgattccgcgggcgcggtgcaattcagctgaccgggcgtcacaactatcaacggtacagccaggccatctacggggatgacagggctgtccgtaatccggatctactggccagcttgccagacgcggcactggccgctggctatttctggcgccgggacggcctcaacgccgtcgccgaccgggacgacatcctggcagtaagccgggcggtgaacctgggcaaccctaacagcaaggcattgccgaatggtctggaagaccgaaaggcaaagctgaagctggccaagtcgttgtacgcgaagttggtgtcccaatga

SEQ ID NO: 506713 - DNA, 360 bp, Stenotrophomonas maltophilia
atgggaaaggcaaacaacaaagatgctcgcgtcaattttaatatttcggtagtggcggatgcagctaacagcgtagcggtagtcggccaagcggtcgcagctgtcgagcgctcgattgatggctgcaccgtaaccatccttatgacttgcggaaagagttactcattcaagttccgaactcctgaggaagcacaggcgttctatgacgaagttttagcatttctcaggaattggcagtcaacacatgacgtgctgagcatcagtgttaccccgcctccttcgactgaggatgacaatggatgcgggccgaccgctgctgatgaagaggccacgcaaccaaagagccgtatccatatctga

SEQ ID NO: 506714 - DNA, 765 bp, Stenotrophomonas maltophilia
atgtccgcagtaacgacgcccgcggtggaactgatgccgtgcggcaactgcggcagcggtgaggttcgcatgcgcgtgcggggcagcgtcagcagccggcgcaccgcgcaggtcgtctgcgcgcgctgcagcgcccagagtgagctgtgcgtcggcgtagaggcggaagctcaggcgaccaaggcgtggggacacaaaacccacgcgcccccggcaccgccagcagtgaggatggtgggcggccgtgtgccggtgccagaaccaaccctgcagcgtgacccgctcgaactgatcgcccgcatgctggttggcgggagctttcgtgagccgtcggatggccgttcagccatgcagcctctgacggcggcagatatctccggcgccgtcggcatgatgcgcgattccgtggccaagcaggcggtgatggcagtggcactgcgcgggcaaggcgtgtccctttcggcgctggggcgttctctcgccaggcgggtgatgcggcatattcagtggcagcggcgcagcagcgccaagcctgcacttcgaatggatgatccggccgaccggtggcgcatgaggctagtgctgcaggacgcggtgaacgacctggtgtggccggaacggaaggtcgccgcgcgagatgccgccaaggcggccaagatgcgaaaaggggactacctgcgcgtgtacgggatcgctgcagcaatgctgcgacaagcgctggaagacggtcggaaggaattcagcggcagggtgttcaatgcgtag

SEQ ID NO: 506715 - DNA, 678 bp, Stenotrophomonas maltophilia
atggattggcggaaatcgttggtgttgctggctcttggcgcagtcggaacagttggtgcccaggccccggacccgagcgaggtcaaacggcaggctatctctgtcgaaaaagcgaatacgtcccgccgatcagatgaaaggccgaacaccggctttgagttcatgggaatttttgtcggtggacgactggtgcgtgagtgccccgtaaagcaactctatggcggggcaatttacgatctgtcatcgctggaaacggcgtgctgggcgacctcggacatgcgccgagacccgcgtcctaacctgcggaacaacgatgcgctgactgttgtgcctgtttcaaagaagagacctacaggcacgcgtaccgtcacagcggttgttgtagatggcagaatcgaaggactgatggttgaaacggatgggtttcaacatgcgcagcagctttttgagcagctgcagcagaagctcgggaagccgacgacccagggaaccagcgacgttgtttcaggggtaggcgcaaagttctcaagccctgaggcagtctggaatctgccaaacgtctacgtccattttagtgggatcgtcggggctatcgattccggtctgattttggtctatacccctgagcagcaggcgcgtgaggcgcagcgccagaaagcacagaccaagtcgttctaa

SEQ ID NO: 506716 - DNA, 285 bp, Stenotrophomonas maltophilia
gtgatcaccggcctccttactgaaccccgcgccgcgatgatcggcgcacagcgcctgccgctgagccccaccgaatctaaggtgctgcagctgatcatcaatgcaggtgacaccccgatcagccgctccgcgctggaagagagcctgtatggcggtgccggccgtaaatcgaacaccgtcgaggtgaccatctgccgcctgcgccagaagctggcccagcacggctaccgcatcaatgccacccgcagccgtggctacacgatcagccaggccggtgcagcatga

SEQ ID NO: 506717 - DNA, 171 bp, Stenotrophomonas maltophilia
atgagggcgccagcgatcaagctcccagcacctgacctgacgccggaccagcgcgcggccttggagcgcgcgaagcgtccccgccggcatccctaccgcgtgtattgcacgcaccaggcgagcgcgcagcgtcagcgcgtcgcgccgaacctgcacaggttggtgcgctga

SEQ ID NO: 506718 - DNA, 270 bp, Stenotrophomonas maltophilia
atggtttcattcatcagattcggacgcttagccatgcctttcacccgattggtttccggatggcatctggacatcgactctcagtacatcgctgaagggcgaccgctgccgttctggcgcgcggaagttgaggtctggcgcgagggtgatgacgtgcctgcgttccgtgaccacacgatggcgcaccacgcaagccaggacgaagccgagagaatcgccgaaggcctggggaccgactacgcgctggctcatccgttggatctggactga

SEQ ID NO: 506719 - DNA, 687 bp, Stenotrophomonas maltophilia
atgccgctgcagctgcgcaatggcgaggtttggcattggcagggtgacgagcacgacttccctgagtcgcttgtctgcccggtgatcatgagcgcggagacgctgcgcgcactgctcgccgcccgccggccggtgggggagccggtggctattccggaaggctgggcgctggtcgatttggccgagtacacggttcttccgcagattcctaccacggccatgatggatgccgggtggcctataggcgagcagataacggatcgattcgacgtaaagggagcctacgcagaccttatcgctgagcatgatgcgaagggccaaggaatcatccacggcccgagccagcagcccgcgcaggccgtggacctgccctactcgctcgatgccgaccaggcaggcatccgcgcccgcgtgtgcgacgtgatcaccggcacgctgatggttgccgcgcagggccacacgccgccgccggctgggcattgggcacaaccgttctggcaggccgccaggcacgatgccgctcgcgcgctcaacgtgacactgaagctccgtcagttggtggctgcctccaagtacatgcgcgaccgcgtcgtggaaacgcgcggagcgaagtgcatggacgacctcgactatgcgatcgatgaagccgagaaggccctgaccgaaagccaggcggtgcaaccttga

SEQ ID NO: 506720 - DNA, 321 bp, Stenotrophomonas maltophilia
atgtctgaccagctgctcaccgctgcaatggaggaggccgagccgatcccgtccgcctactccgatggccccgtgtggaatgccttcggcctgacccgcgccgcatacctggtcgttcctcgcagaacgcttcagtccatgccgctggaatggcaggagcgcttcgtcggcctgatggccgaggcgtacgagcgccttcccgactgcgcctttcccgagtacagcgtgctgcgcaaggaacacggccgattcatcactgacccgctccgtgactaccgccacaccggccccattgctcccaaggaatccacccatggctga

SEQ ID NO: 506721 - DNA, 1977 bp, Stenotrophomonas maltophilia
atggctgacggctctcgcgctttcaacttccccatgccgcagcgctcccgcctgcgccccggcgagatcgtcgtggatctgttcgccggcggtggcggcgcatcggaagggctcaagcaggcgctgggcatcgatcccgccctggcctacaaccacgacgagctggccatcggcatgcacgccgccaaccaccctctgacccagcaccaccgcgaggatatctggcacgctgacccgcgcgtggacgtggccggccgccccatcggctggttccatgcctcgccggactgcacgcacttcagccaggccaagggcggccaaccgcgcagccggaagacccgcgccctgtcgtgggtggtgctgaagtgggttgggcagctgctgcgcgctgatcgcctgcacggcaccaacaccgcgccgcgaatcatctccatggagaacgtctggcagatcctgacctggggcccactggtggccaagcgctgcaagaccaccggccgcgtcatcaagatggatggcaccgttgcagcgcgcggcgagcgcgttccggtcgagaaccagcagctggtgccggacaagcgacacagtggccggacctggcagcagttcgtgaacgcgctgcgtgcgctgggctacgtggttgagtggcgcaagctggtggccagcgactacggcgcaggcaccagccgggaacgcctgttcctgctcggccgccgcgacggcgaggcaatcgtgtggccagaggccagccacggccccgcaccgggccagcagccgcgcgtaaccgctgccgactgcttggacttctccatcccctgcccgtccatcttcacccgcgcccggccgctggccgatgccaccatgcgccgcatcgccaagggcgtcatgcgccacgtcatcgagtcggccgatccattcatcgtgccggtcacgcaccagggcggcgaccgcgtccacgacgtgcgtgatcccatgcgcaccatcaccgccgccaaccgcggcgagctgatgctggcagcgccggagttggcaccgttcctcactgagcacgccaatgccagccgccagcgaacgatggcggccgacgagccgctgcccacggtctgcgctggggtgaagggtggccacttctctgtggtgactccgatcctggccggcgtcggcggtcgggccggccagtccgagccgcgctcctgcggcgaaccgctctacaccatgaccaccaaggcagataccgcgctggtggccccgcacctggtcaagttccgaggcgacagcatcggaacccctgccaccgagcctgtgcccacgatcacctcgggtgctggcgccgcgcgtccggccggcgccgcgcacgccctcggcgtagcagctgcctcgctggtgaccctgcggcggaacatggtcggtgccgacgcacgcacgccgctcacgacggtggccgcccaggccgagcaccacgcgctggcgactgccttcctggagcaggccaacggcggttattaccaaggcgcgggcaatgatgcgcgcgacccggtcagcaccatcaccgccagcggcagtcagcaacggctggtgagcgcggggctcgccgagctgtcgcccgatcaggaggctggtgcgctgcgcgtcgccgccttcctggtgaagtactacggcagcggcatcgcggtcgatctgcacgacccggtggataccatcaccaccaaggaccgcttggccttggtcaccgtccacattcagggcgtgccgtacgtgatcgtggatatcggcctgcgcatgctcaagccgcatgagctgtaccgcgctcaggggttcccggccaactacatcatcgatcgcaccgccaacggcacgccgctcagcaccagcgccgccgtgcgcatggtcggcaacagcgtcagcccgccgccgctgcgcgccttggccgaggccaatctggaccgcgtgcccaacagcatggcggcagccgcgtga

SEQ ID NO: 506722 - DNA, 189 bp, Stenotrophomonas maltophilia
gtgaccggcttcaatcaggccaagcacaccgcgcgcgtgttcctatcggaatgccgcgcacgccggcacggccccggcttctggttcgccttcaacgctgcacagcgcgcacgcaagcgcgccaccgccccgctgccggtgctgccgcgcgcaccggctctgctgacccaactggatctgttcgcatga

SEQ ID NO: 506723 - DNA, 294 bp, Stenotrophomonas maltophilia
atgagcgagaacacggtgaacgccgcgcttcggcgccttggctatggcacggacgatatgaccggtcatggcttccgaagtatggcttccaccctgctgcatgagatgggctggacctctgatgccatcgagcggcagttggcacactccgagaggaatcccatcaaagcggcatacaaccgtgcagagcacttgccagagcgtcggaagatgatgcaggcatgggctgattacctggaccgcttgcgtgaaaaacagcccagagctacccagctctgcgctaagcgcgcctga

SEQ ID NO: 506724 - DNA, 606 bp, Stenotrophomonas maltophilia
atgaacattgatgcagaaaatttcatggttggagagttggtctccattcaagcgggctacccctttcgcggctccattgaggagtcggccgatggtgaagttctggcggtgcagatgagggatgttgaccttgaccatggggtcaaatggtctgacgtcacgcgcaccacgcttgcaggccgcaaaccacctgactggctcaaggctggggacatactgttcgtcgctaaaggtgctcggttctatgccgtatgcattgatgagccgccgagccctgctgtgtgcagccctcacttctttctgctccgagtggcctcccaaggtctattgctgcctgctttcctggcgtggcaaataaaccaaccgccatttcagcgtcagcttcagcaagccgctgaaggcagcagccagttgagtatccgccgccccgtactggaatcgctcacgctgtgcgtgccctcgctggcggaccagcaacgcatcgttgccctggctgaccttgcccgtcaggagcgccacacgctcaatcaactcattcaaaaccgcgagcagcaacttcaagcgctcgcagagagtcttgcgcatgctgcgcaggccggtcactga

SEQ ID NO: 506725 - DNA, 1527 bp, Stenotrophomonas maltophilia
atgaacagtacaaacaccaaaatcgtctctgtaagccaggacgagatcaacgccgccgtctgggccgcctgcgacaccttccgcggcaccgtggacccgagcatctacaaggacttcgtcctgaccatgctgttcctcaagtacgtgtcggatgtctggcaggaccactacgacgcctacaagaagcagtacggtgatcatcctgagctgattaaggaaatgctcaaaaacgagcgtttcgtgctgcccgccagtgccagcttctatgccttgcacgccctacggcacagccccggcaacggcgagcgcatcgacaaggcgctgcacgccatcgaagaggccaacatcaccaagctgcgcgatgtgttccaggacatcagcttcaactcaaacaagctgggcgacgagcagcagaagaacgacatcctgcgccacctgctggaagacttcgccaagcccgagctggacttgcgccccagccgtgtcggccagctcgatgtgatcggcaatgcctacgaattcctcatcaagaactttgcctccaccagcggcaaaaaggcgggcgagttctacaccccgcccgaagtctccgctctcatggctcgcctgatggcgccgcaagagggagacgaaatctgtgaccccacctgcggttccgggtcgctgttgatgaagtgcggccgcctgattcgtgagaacaccggctctcgcaagtacgcgctctatgggcaggaagccatcggcagcacctgggcgctggccaagatgaacatgttcctgcatggcgaggacaaccaccgcatcgaatggggtgacaccatccgcaaccccaagctgctggatggagacgctgccctcaaacacttcgacatcgtggtggccaacccgccgttcagccttgaaaagtgggggcatgagggtgccgatgccgacaagttcagccgcttccggcggggcgtgccgccacgtaccaagggtgattacgccttcatcctgcacatgatcgagaccatgaagccaggcaccggccggatggcggtggttgttccgcatggcgtgctgttccgtggcgctgccgaggggcgcattcgccagaagttgatcgaagagaacctgctcgacgtggtgattggcctgcccgaaaaactgttctacggcaccggcatccccgccgcggtgctggtgttccgcaagaacaaggccgacgacaaggtgttgttcatcgacgctagccgtgacttcgaggccggcaagaaccagaacctgctgcgcgaagctgacctgcagcgcatcctggataccgtcgccacacggcaaagcgtggacaagtacgcctacctcgccacgcctgccgagattgccgagaacgacttcaacctcaacatcccgcgctatgtggacacctttgaggaagaagccgaaatcgacctggtggccgtgcgcaaggagcgcgagcagctcaaggccgagctggccagcctggaagctcagatggccgtctacctgaaggagctgggctatgagtaa

SEQ ID NO: 506726 - DNA, 1158 bp, Stenotrophomonas maltophilia
atgagtaaagcgtcaaaatccagcaagccgaccaaggcgatggctgcatcggtggagttgcaggcatcagccagcgccgaaagccagggcgaattcgttctctacaccactgacgacggcctcacccgtgttgaaatgcgggccgatggcggctcgctttggctcagccaggcagaaattgccacgctgttccagaccacgccacagaacgtcacccagcatgtgaaagccatttacgccgagggggaggcagaccccgaggcaacttgtaagtccagcttacaagttcgccaggagggtggccggctcgtccgccgcaatgtgcgcttctatagcctggaggtcatcttggccgtgggctaccgggcgcgctcggcacgcggcactcagttccgccaatgggccacggccaacttgagcgaatacctcctcaagggcttcgtgctcgacgacgtgcgcctgaagaacccgcctgtgggtgagtcggtgctgcccgaccgcttcggcgagttgctggagcgcatccgtgacatccgcgccagcgagcgccgcatgtacctgagggtgcgcgaaatctttgccctggcggctgattacgcacccacgctgcccgagaccaccgcctttttccgcgttatccagaacaagctgcactacgccgtatcgggccagaccgccgccgagatcatccgcacccgcgccgatcacacccagcccaacatgggcctgaccaccacccgcaagggccaggtgcagaaagctgacgtgggcgtggccaagaactacctgaccgagcaggagatcaccgagctgaaccgcatcgtcaccatgtggctggactttgccgaagaccaggccacacgccgcaaggaagtcttcctgaaggactggaccgagaagctcgacgccttcctcagcttcaacgaccgccaggtgctggtgggtgcgggcaaggcgtcgcataagcaggccgtggcgcacgcgcagagcgagtatgagcagttcgcggcgcagcggagggctgcgttggaggcagcaggcgagggctatgcggcgcgcatgctggcctcggtctcgaaggacgacagcgccatggaagcattggatcaagtggcaaagcgactgaccaagaagaaaggagggggagatgctgcctaa

SEQ ID NO: 506727 - DNA, 1236 bp, Stenotrophomonas maltophilia
atgctgcctaagggatggaagtcggtcttgattgaccaggtggcaaagcgaggcagtggtcacaccccgaacaaaaatcatcctgattactggaatggcggaatcaagtggatttcgttggctgattctggtcgcctagataaaggggtggtcactgaaacagataaagagatttctcttgcaggagtgaaaaactcatccgcggttgttcatccgtcggggacggtagttttgtcgcgtgatgcgggtgttgggaagagtggcgtgactgcggaagacatggccgtcagtcagcacttcatcgcttgggattgctcaaaatctaccgcattacacaactggtatctctattattggctgcagctacagaagccgcagttcgagcgtgtcgctgtgggatcgaccatcaagacgattggccttccttactttaagaagttgaaaatcacgttgcccccgtgccgtgagcagcgtcgaatcgcccaagtcctcatcacctgggatcaagccatttccactgcggagcggctgctggcgaacagccagcggtgcacccgtgacctgatggtgtcgatgttgtcaggccgccgccgttttcctgggttcacgggtaagtggcgttacgtagatttcgatgccgtctttgaaagggttacgcgcaaaaactgcacgcagaacaccaatgtgttgacgatctcggcggagcatgggctcatcagtcaacgcgactacttcaacaagtccgtcgccagtgccaacctcagtggctacacgctgctgtatcggtatgacttcgcttacaacaagagctattcgacaggctacccgatgggggccatcaagccacttctggactatgacgcgggtgttgtgtcgagcctgtacctctgcttcaaattgcgcgacgacgtggacgccgacttcgacttcttccgtcattactttgaagcgggcctgctgaatcaggagattgaaggcgtcgcacaagaaggtgcgcgaaaccacggcctgctgaacgtgagcgtgacagacttcttcaaactgcagctccacattcccaccgcgccagagcagcggcgcattgccgaggtcatcaatgtcgccagggctgaggaggcgcggctgcaggctcaagtgcaggccttgcgacaagaaaaatccgccctgatgtcccagctcctgactggcaaacgccgcgtcaagctgcccgaagccgaaaccgaggcgcaggcatga

SEQ ID NO: 506728 - DNA, 3312 bp, Stenotrophomonas maltophilia
atgaacaccacgcccaactcccgagagcagtacagcgcccacctgcccgcgctgcacctgctgtgcaacctgggctggaactttctgaccacggcgcaggcgctgactctgcgcggcagcacgcgcgaggtgctgttcaagccccggctgatcgaggtgctgcaaacccggcgctacgaatacaagggccagtggtatccgctgtcacccagcggcatcgaccagatcgtgcgggagttgtcggcactcagcctggccgaagggctgatgcccgccaacgagcggctgtacggcaagctggcgttgggcatcacggtgacggagttcatgcccgatggcaaaaagcaccagccgaccatagcggtcatcgattggactgacgccacggccaacctttgggatgtgaccgaagagctggaggtgctggccgcgcagggcacgcaccaccgaacgcccgatgtggtggcgtatgtgaacggcatcccgctggtggtgatcgaggccaagcggccggagtcgggcggcggcagccaccccgccaaggcgatggtgacggagggcatcagccaacacctgcgcaaccagcggcctgatgagattcccaacctgtttgcctatgcacagctgctgctgtccatcagccagaccgaggggcgctacggcaccacccacacggcggccaaattctgggccaagtggcgggaagaggagtttgacgaggcccacatgcaggcgctcaagaacaaggccctcaagccggatgtgcgtgcggagctgttcgacggcaaacctgccgcgctggcggcgtacttcgacacgctgtggagcgccgccatgcaggctaccgagcaggaccgcttgctggtgagcttgttgaccccggcacggctgctcgaattcctgcgcggttatgtgctgttcgaccgcaaggtgggcaagatcgtggctcgctaccagcagttcttcggcatccgtgcgctgctggcgcgcatcagccagataaagcccgaatcacaaggtggtggccgcgagggcggcgtggtgtggcacaccacaggctcgggcaagagcttcaccatggtgttcctgaccaaggcgctgctgttggtggatgccttgaaggaatgccgtgtggtggtggtgaccgaccgcattgacctggaaacgcagctcgcccgcaacttcatgaccggtggcgcctttggctccagcatcgccacgcagaaggagggcgaaaggagccgtactctgtctggtcgtgacctggcccagcgcatcggcaaaggcaccgagcgcatcaccttcacgctggtgcacaagttcaacatggcatccaagctgccggagtgccgcaacgactcggccgacatgattgtgctggtggacgaaggccaccgcagccacggcggcgaaacgcatgagcgcatgaagaaggcactgcccaaggccgcctacatcgccttcaccggcaccccgttgctcaaggacgagaagacggccaacaaattcggccccatcgtgcatgcctacaccatgcagcgcgcggtggaagacgaaaccgtggccccgctgctatatgaagagcgtgtgcccgagttggacatcaacgaagaggcggtgaaccgttggttcgagaagatcaccagcaacctcagcgatgcccagcgcaccgacctgaaaaagaagttcgccaagaagggggccatctacggtgcagccaaccgcattgagttgattgcctgggacatcgccacccacttcaacgagaacatcaaaaagctgggtcttggcctgaagggacaggttgccaccgacagcaagctcgacgccattcgttacaagaaggcgctggacgacaccggcttggtgaccagtgcggtggttatctccgccccggacacgcgtgaaggcaattccgatgtggacgaggacacgctgcccgaggtgcaaaagtggtggaagcaagccatggccacctgcggcaacgatgccgagacctatgagaagcaggtggtcagtgactttggtgcggacggtgctcctgacttgctgatcgttgtagacaagctgctgacgggctttgatgagccccgcaacacggtgctgtacatcgacaagcccctgaaaggacacaacctgattcaggccgtggcccgcgtcaaccgcctgcatgacgccaagcgttacggcgtattggtggactatcgagggatcttgaaggaactcgacactgccatccgctcctaccaggacttggaagctcgcacccaaggcggctttgacatcagcgacctggagggcctgtaccgacagttcaacacggagtacaagcgcctgcctgctttgcacgatgcgctgtggtcgttcttcaagtcggtaaccaacaagctcgacagcgagcagtaccggcaggtactggcaccgaaatttgtgaagggtagcgatggcgaggagtatgacgagcggcagaagctgcgagacgacttctatgtggcactgacagcatttggcctgtgcttgcagacagcgctttcatcccgcagcttcttcgaggacaagagcttttctgaagcgcagatcgcccggtacaaggctgatctccgcttcttcaccgagctacgccagaccgctcgtcgtgatgcgatggagacggtggattacagcgtctttgaagagcaaatccgaaagctggtggacaaacaggtcatcggaacggaagtgcgagaccctgatggcgtctatctggtgcaccaattggggcaggcggaagacccgaaggactggtcggaagagaaaacgcgcaacgagacggacatgatccgtacccggctgcgtaaaaccatcgagcaggagctggcggccgacccctatgcacagaaagtgtttggcgagctgctgcgtcaggccatcgctgaagcggaggccatgttcgaccatcctttgaagcagtacgccctgttcaagtcctttgaagaaaagctggacgcccgttccgccccggatctgccggatgctttggcagacaagccaaatgccaaggcctactttggcgcaatgcgtctcgtgctgggggacgagacctttgcagggttgaatggggatttgaaggacaagctggtgcaaaaagcgattgccatggacaccgtggtgcgcgacgcagtggcagagaactcactcaacccgcagaacattgaggctgccattcgcaagggtctgttgcccctgttgtttggcccgctgggcttggacaacgccaagttggtggtcgagcaagtgatccagatcacgcgtatcggtttgatgaggtcttga

SEQ ID NO: 506729 - DNA, 750 bp, Stenotrophomonas maltophilia
atgccgatgtgtgaacaactatcccagcaccgcatcgcttatggcgatgaagtcattgcgtttcatctgcgccgtcagccatcacggtcagtgacgcgtgtcgccattcatgtggagccggacgcacgcgtgctggtggatgcctccgatacggcaccattggcagaggttttggctgcggtgaaaaaacgtgcgcgttggatcagtcagcatgtcagtgctgccaaggtgcgaatggcccatgtgctgcctagagagtacgtgagtggtgaatcattgcactacctgggccggcgttatcgcctgaaggttgttatcgacgcaggctcaaaggcccaagctaggatgcggggtgctttcatcgtcgtgacgacaccagagcaagcaccagccacgatcaaaaaagcattggatgtctggtatcgccagcgagcgcgggaggtgtttgctgaccggcttgcggtagtttcagctcccctccggtggatcaagcagcttccatcaacacgtctgcagttcatgactgtgcaatggggaagttgctcacccttgggccgcatcacactgaacccgttgctggtgaaggccccacgtgagtgcatcgactacgtgctgcttcacgagttgtgtcaccttcttcaccacaatcacagtccaaagttctatcggacacttgatcgacacatgcctaactggagagctgtcaaggagaagctcgacaatatggctgaggaagtatttcgaatctag

SEQ ID NO: 506730 - DNA, 219 bp, Stenotrophomonas maltophilia
atggttggcgccggcggcggcatgatcaggtcagttccacagggatcgcgacagagcctgttcttcgcgccagggcacgaacccgcgcaaggccacgagtaccaattcaacctcgacagcgacgaaggccggcagacgctggcagcaatgctggccttcctgcaggcccacgtgccgtcgccactggcctcgcccacgggggcatcaagcagcgggtag

SEQ ID NO: 506731 - DNA, 180 bp, Stenotrophomonas maltophilia
atgatccagagtgcctacaagctctatggggcaagtgacggtttctggattactttcaatatcatcacagaagcggttactcaaagaagcgattgttccgggaaggaagtgacagacatggtcaagagtgcgttcaaagagtgggctcgaacggacagcgcgttcgatgaagcgttttga

SEQ ID NO: 506732 - DNA, 624 bp, Stenotrophomonas maltophilia
atgcattccctgttttcaggtgcagccagatcccggcaccggccattccgagcagtagtaccgcccacaagcccatccatgggaattcccagcgcggcttcggcagttcgggtaggtaatccggtcgttcgcgttccatacggcccccaaggcgtcctgcgctcattctatccggggtgtaggggcagcgcccctacggatgcgcctcacacgcgctggcggcgtgtcggccccggtaccggcaggactgccacaggtggctcggcgtcgggaccagccatcaccccggataaccgcttttcggtgcgtcgccggatagcatctcggagatctacaatttcggcagccttgtacgccaagggtttccggcgatctcgagctcgaatcttcgagctcgaagcatcctccatcaaccttcgccattcctgcgcctgcgcagcagtgagcgacagccaggccagatcttcgggcagcaactcgcggccttcgggtgtgaccagtcggccagccttaaacgaaaaaccggcccaagggccggttaggttccgatcacgcacaatcaggttccatgccgcaacagggtcagggggcgaggcaagagccgtgccagccacgcccagatga

SEQ ID NO: 506733 - DNA, 177 bp, Stenotrophomonas maltophilia
atgagcatccatcccttcgccgccgagcttgcgcagaccgatatgggccttttcgcatgcgcggcgctgattgtcgtcagcctcggcgccgcaatggcttcaatcgtgattgagcgggcatggcttgcgcttcgtcgcctgtggaagctttggaagggccacaccaatggccggtga

SEQ ID NO: 506734 - DNA, 414 bp, Stenotrophomonas maltophilia
atggacgtcaactcgctgctcgaccaagcgaaagaggcgtgcggagtgagctacgacaaggacttagcgccgcgtctcggcgttcggccgtccgcgattagcaactatcggaagggcgtttctcatccggacgccgtggtttgcgcaactttggcgggcttgaccggtgttccattagcccgggtgcttggtgtgattggcgaggcgcgcgcgatcagccgcgaggagaaggccgtttggcggaagctcgcagccaccgcgatggcggtctgccttgcggtaggttttgccctgccccacaaggctcaggcagcggtcatgggctttgataagtccacggtctatacattatgcgaaatgctgtatcgggcggccgcagccttcgtgtcctccgcatggcaatggctgggctga

SEQ ID NO: 506735 - DNA, 963 bp, Stenotrophomonas maltophilia
atgtctgattctctcgatattggcgtggacgtggactccaaggagttcgtaccggcagtggccgaccgcaaggccggcgacaggatcgccaacacccgggccggcatagcccagtggctcaacaccttgccccagcgatgccggattggcatggaggcgacggggcggtactacgagttgttggctcggatggctggccaggcaggccacgttgtctatgtgatcaatccacgtctgatcaagcactacggccgggcgacgggctcgcgtggcaagacggacgccatggacgccgaagcgatcgcccggtacgtgaagaaggagaacgatcgcctgcgtgaatacgtaccgcgtaccgatgagcagcagcagatgcacgatttgctgcgcaagcggcagacgctggtaaagacacgcgcgcgcctggagcaatccttcggggtaagcaaaagtgcccccggggagctgtcagatctgttctgcgctctggctgggacgctgtccgagctggaaagcgaactgcagcgcttgggtcgcgatggagagcatggcgcgctctacaagcgcctgttgaccatccctggtatcggccctgccgtcgccgctcacctgatttactacatgacgcgctggccgttggccaacgccaacgcgtggatcgcctgcacgggcctggatccccggcctaacgagtctggcggcagaacgggacggcgtcggctgtccaaacagggcgcgccagtgctgcgccagatgctctacatggccgcaatggggctcaagcggtgtcgccaggggcaaccgctctacgacgagctgtcaaaacgcggtcaccccagcaccgccgtcttcaacatcctggccagaaagctggccaggatcgcctggggtgtcttcaaaagcggccgggacttcgatccggccatgctgaaggtgggtcaagcctgcttccagcaggcttga

SEQ ID NO: 506736 - DNA, 801 bp, Stenotrophomonas maltophilia
atgtacggcctaaagaacttggccaactcgccgattgccacagtgggcaatccacgtttcggagcaaaattggaaatcaggacacgcgcaaaaatctacgcttggctattgctggctgctgcaatcagctacgtggcgtggtcatcattgacgatatatacgcccttggtctctagtgaaacgggtcagacgtcgctgaaggaaatacgcgactacagcaatgaactggcagaacgaatgcagaagacacgcgccgagcacaacctccccttcattggcgagcagcagcttacgattgatcacgttacaggcatcaatcatctggcggccgacgcagcaagagcgaggcaaagatacttcgaccctgagcacacttacgtttggaagggcatactcgacgacatcagtaactacgtccaacatctggacggatttggatcctcagacccaaatgattccaagatgcgccttcaggaactgaactcagcactcctgcaggtcttgaccaatcgcgacagggctgtgaagacgatggagggaaccaagcaaatcttcagcgttcatattggcgaagccaagggctcgctgtatacggacatcctgatgacgaagactttgctggatgccggcgtgaacgaacaccttctgctgacgacacaatcaagtgcaccgccattcgaggatatcgtccgcttgcagaatgcggagtgggcagtattcgagctgcatcaacagttgggccgcgactacgagcaagccaatcgaatcccaactgcgattcgcctgctaatcgggcgttga

SEQ ID NO: 506737 - DNA, 861 bp, Stenotrophomonas maltophilia
atgaacctgccaccgccgggccgctggttggccctggccatcgccttggcaagcagcacggcctgcagcaaggccccctccaaggaaccggagcaccgggagacccccatgaccgacaccgcacagtcccacaccgtggacggctacacctataccaccgcccccgtggaagccacgctgggcccacaccgctacgccttccccgccaacctgtacgacgaccagatgggtccggcggtgggcggcggcatcggcctcaccctcctgtggcccgacctgcaggcggcaccgccgggcacgcgcgcctcgcgcagcatgtccgaccaccaccgcgccatcagcctgtcgctggattacatcgacgccctccccatcgccgagctgctgccgcgcaagaccagcaccgaagcgaccaccgaggacggctcgatcaaccgtgacgacccgcgccgccggctggacctgcgcaacgccggtacgccgcacttcgggctcaccccgtacgtcatcgacgaagcccgcatgacgcggttttccgaggcgtatgccgcgcagcgcggcgcgccgccggtgcgcacgcccgaaaccgaccaggagtggtacatcgcccgcgacacacagggcgcgctggccaccttcatcacctgcaatccgccgcaggatgggcgcgaggggctgaccgtgcagggcaccacgctggtggatgaccccgatgtgccggtggccacctgcacgcataccttcaccgacccgcaggatgggctatcggtgcgcgcgatctacccgcgcgtgctgctcaaggactggaaggccgtggaggacgccacgcgcgtcctgctggcccgctacaagctgcggtaa

SEQ ID NO: 506738 - DNA, 1293 bp, Stenotrophomonas maltophilia
atgggtgaattgacccgcaaggatctggagatcctcagggaatacgcagacagcggaaaccgcgagcgctactggagctacctggcgcacaaggaacattccgatggctacggtctgctggccctgggcgtggtgcgcaacgacaacctgccgggccaggtcgccaacgcctacgcgcagtcgcaggcccgtgaccagcacgaccgcaacccggccctgcagaaccgcaacctgaccgagcgcgaatgggaggccttcggccagaccctgctgcaccgcgacctggaacgccgcgagcactggatggaggccaagcgccccgatctggccctgaatctgcccggccgcgatgtgcagcaggcgcacgatgaagccttcaagcgccaccacctcgaccccaactgctggaccccgcgtgtgctgctggaagccacccgcaaggaacgcggagagggcaaggccgaggaagtctggaaggagatgctcaacaacgatgtcggtggtacccagcgcgcggccaacacgctgggcagcgcgtacctggccatgcccttctggagcgccaccggctatgtcggccggctgggcctgtacgaaggctcgctcatggctgaggcactgcccagcagcgatcccaatgtcatcggctcgcgcagttcgtaccacatgtattcggaaaaggagcaggcctggtacctgcaggtgccaggcagcatcccactgcgtgagcacaacccgaggatcatcgcctcgctggacgacgcccgtgccgtgcgcctggagcgcgcggagaaggccacgcacttccaccccgaggacagttaccgcacccgccttgaaacgcccaaggtggtgatgaacgagccgctggagcgcgatggccgcgaaacgcagctggccgccaaccgccccgaccacgccaacgatccggtgtaccagcagatccgcggccaggtggccagcctgcaggccgagcacggcctggtactgggcaacaaccctgatggcgtgaccgcgcgcctggcggtgctggccaaagagaacaacctcagccaggtggaccacgtgatgctcggcaaggccaacggccctgggggtgcggggcagaacctgttcctggtgcagggcgcgctggatgatccggcccacctgcgggtggccatctccgccgaacaggccgtgcaggcgccggccgagcagagctaccggcagctggacgcactggcgcagcgtcagacgcaggatgtggaaagcgcgcagcaggtgcagcgggaggggatgcggatggcgtga

SEQ ID NO: 506739 - DNA, 3213 bp, Stenotrophomonas maltophilia
atgaacaggaatacagatctttcggatccgacccccgttcttgagcggctgaagggcttccagcgtaggacggtgaactatgcgttccgacgcatgtacgaagatcacgatccggcactgcgtttcctggtcgccgatgaggtggggctgggcaagacgcaggtggccaaaggtctgatcgcgcgcgtggttgcccataaggcagccagcaaagagcgcatggacatcatctacatctgctccaatgcttccatcgcatcgcagaacctggagcgtcttcggcttcgttcgaccaaagcggttcgcgctacccggttgaccctgctgccgctggcgcttgccgatggcggtctggaaggcgacggtgtgaacttcatcagtttcacaccaggtacttcgtttgaaacaaccagccgtggaggactggcccgcgagcgcgtgctcatccatcgcatgctgcagggcgtatccaggctcaatgccaacggcttggcctgggtgctgcgtggcggtctgggagatggctggcggcagcattttgagcacgaggacggcgtggatgaaccggatgaggccatcacccgtacgtttgtcaagtcgttggacaagaagcgattgagacagcttgtcgaagtctgtgacaggcacgccggtcggcggacgcgtgcactggacagtgacgagcgcgccgaagccctcgagctgacgtcctggctgcgcaccacgctggcgcactgttgcctgaaggcactgaagcctgatctggtggtgctggatgagttccagcgcttccgcgagcttcttgccgtgcaggatcctgactccgatgacgaggctgccccggcatcttctgctgcaaagctggcgcaggagttgttcgaccatgagaacaagcctcgcgtgctcctgctttcggccacgccctacaagatgttcgtcgcccagcaggagcaggaggatcactaccgcgacttcctggcaacggcgtcattcctgttcaatgatccggaagaggtgaccgcgctccgcgctgacctcgccgcattccgtgcatcgctggtgggcgtgggggcatcgcaggatgatgcacgtgtgctcaagggtgcaatcgagagtcggctcaagaaggtgatgtgccggaccgagcgcgtgggtgtaacccggggccgcgatgcgatggtgagggatgtcccgcttccgttgtcgctgacatcggaggacctggcggactacgcctgcgtggatgcgcttgcaagagcggcggggacgaatgatgtcatggagttctggcgctccagtccctacctgctgaacttcatgcgtgaggacggatacaccttcaagcgccgcatgatggatcgacagggcaaggcggctctggggcgggcgttgtcccagcatccgcagtacaggacgctggatcaggatgcgctgcagcggtacagcccgttggtggcggcaaacccgagaatggacgtgctggccaaggatatggaggaccagggcagctggcgcttgttgtgggttcctccttccatgccttactgggcaggagagggtgcgtacgcgcaggtatcccatttcagcaagacgctggtgttctcaagctggaacatggttcctgatgcgattgccggccttctttcctaccatgccgagcaattggccatggcggggcatgcgctccagcccggatacgacgcgcctggcaagagcctgagtgctcgcttgcgcttcaacagcggcaagagcgggcatgaggacatgaacgcgctcactctgctggttccttccctcgcgctggccacaatggtcgatcccttggcgatgtcggtcgctgcaggtggctcgctgcacttggcagatgccaggcgtgaggctgccggtcggatcagggagaggatggagtcgcttgacctgccagcgtccaggcactcggggccgcctgacgtgcgctggtactggttgacgctgcttctgcttgagcgtgcgcatgtccaatcgcatgtggacccgtgctggggttcggaggacctgacgattggtgcgggtgaggatgaggaagacggtggcgccagcgtttcagggcaggggttctcccgtcatgtggcttactggcgacaggtatgggggcgcggttttgacgagccctctctgcagacgcttgggccacgtcccgacgacattgccgaggtactggctgatctcgcattggcggcaccaggtgtgtgcgctttgcgtgcattgctgcgcctgctgccgggagacaatgaggccgaccttcgccaggccgccataaaaattgcggacgtgttccgccgacagctgaatatgcccgaagcggtcgccatcatcactcacgaggaaggtggggtgtattggcggcgggcggtggcctactgcgcagaaggcaatttgcaggctttgcttgatgagtacctgcatctgctgcacgagcagaacgcagcggacgagaaatctacccatgctcaggccatcgcgaagggcgtgagtgatgcgggccacgtgcgcgcaagccagcttcaccctgagggtgtgaagctgttggatggaaagctcgtgcgcgacgatgcgctgtcattgcgttgccggtatgcgatgcgctacggaaatgccaccgaggacgacaaggtggttgcccgcaaggacgcgttgcagcatgcattcaactcgcccttccgtcccttcgtgctcgcatccacttcggtggggcaggaagggctggacttccattcctggtgccactcaatcgttcactggaacctgcctggcaatccggtggatcttgagcagcgggaggggcgcgttcatcgctacaaaggactggccgtccgccgaaacgttgcgcggctggcagggttcgtggccgaccaggccgccggtgacccatgggcgggactattcaccaatgcagagttgcctcacaaggacacgccattggcgggcttgattccctactggatctgcgaggcaccgggcggtgtggcggtcgagcgaaaggtgttccattttcctctgagccaggacaagcatcgctttgatcggctgaagagcagcctggcgctgtatcgcatggtctttgcacagccgcgccagcaggatcttctggggcacctgcaagcgcgtgcggaaggcggcgaggatgtgcaggcattgctggatacctggcggatcgaactgctgccggactga

SEQ ID NO: 506740 - DNA, 1839 bp, Stenotrophomonas maltophilia
atgatccatccatctgcacgcagtactctgaccgaggccttgcagccccccagcggctaccggtttgatgccggcgtcgccactacgtacagcctgtcgctgggcgcgttgctgggattgcctgcacatttcgccttgctcggcgaccacgacaacagcgccgaagaagatcctttgcgcctcgtggaagggctgcgccgggcaagccgcaggcttgcggtgttctgcgaacggggacggatggaagcaccgccagcaggcagcgcattggcggtgctggctgagggcatggtgcatgaggtctgcgccccacacggcggcgccttccacccgaagatctgggcgctgcgctatgtggccatcgatgcggccgccgaacctgccaccgtcgtacgtctgctggtgctgacccgcaatctgacctgggaccgctgttgggacgtgagcctgcgcctggatggtgtgccgggaaaggccaaggaggccagcaacaagccgctggcggacttcctgcgctggctgccgctgaataccgaaggggcgtcgccggacctggagcggcaggcgatgatcgtatcgttggcgaaggacatcgagcgcgctgactgggaaaagcctccgggcttcacccagctggcgttccacgtgctgggtactgcaaagcgggcagtgccgtggagtccgctcgagggcggtggcaaggcccaggatgtgttgatcgtctctcccttcgtacgcgctggcgcgctgcagacgctgcgcgagcactgcaacggcgacttcatgctggtgagtcgcgccgatgagctggataggcttccggccggcgcctgcctggccgatgacagtgcctacgtgttgaagcctgacacgctgctctccgaaggcgaagaggctggacaggccgatacgctgcagggcctgcacgccaaggtggccgtgttccagcgcggccaacgggtgcacgttgcagtcggttcggccaattacaccaacgcggttgtgcagaacggcagcaacgttgaagtggttgcggagctgagcggtccggtgagcaggattcccgcgccgaggcagtggcttgacgagcatctccagcccttgctggacacgtacacgcccggtgagggcgaagatgcggagggcgcagagcgtcgccagctgcaggaccagctggaggccatccgtcgccagattgcagctgccgcctggacgctgcactgcgaaacccatccggtctcgggatggaacctcgcgctttcgtgcccgggccttccgcttgacggtgccacgctgcacgcgtggccgttggcggtggtttccgagcgggcccgtgctgtacaggcgggtcaggttgatctgggaacctttgccggccatgaggtgagttcgctggttggcttccaggtcacgcccaacagtacccgcgccgaggagctggccgtcccgccgttgcgcttcgcgctggaagtttcactggaaggcgctccagacgaccgcgcggacgcgctggtggcacaactcctgggtaaccgcgcggcgttcctgcgctatctcgcgctgctgctggatgatccccaggccgcaggctgtggagcgcgcaatcgatccgaaggcagcggcggcggcagcagggatgcgagtggcctcatggcgaactacccgctgtttgaacagctgctgcggatctattcccgcgagcctgaacgacttgaagcgattgatcgcatggtgaagcggttgaaggacaagcagttcgatgggcagccctgtctgcccgatgatttcctggccctctgggaagttgtgggaaacgctattggcaaggaggctgcgtaa

SEQ ID NO: 506741 - DNA, 1191 bp, Stenotrophomonas maltophilia
atgccttccagcctgacatggctcgaccatgacgctgcggcacaggcacgcagcgctacgctgctggctcttctggaccagcccggcacccgcgacgagctcggatttggcggtatccgcgatgcgttgtccgaccagctgttccccggcacctccgtcatccagacgcggctgcgatacatgcttctgctgccgaggatgttcatgggcctggaggcttcttcggtacgccccagggattatgcagagcgtgcgcggcaggatgagctgaagctaaatgattgcctggcggcggaggacggggcgttcggtcgtgattccggccacacgctcaagcgccttgccagctccgtctactgggcgggcatgcgctcctggggcatcttcgcgcgatcgggctcccagcaggactacttctcggccatcgagcagattcgcagggagcgcagctggaagcagcaacgcgacgacgggatggaggacgctgagctgattgcacagacctggcatccctcactggagaagctcgtaccggtggccgcactggaagagggatcgctgtccctgaccgcggacgaggcggagttcatccgcgagcaatggaaggttcatcacccgcagaccctgctggtgtggctggcgcaggacaaggggcgattgggcgactgtgccgacgccgggttcccatggctgcatccacagatccgccaggctccgcagccgctgcgtgagctcgtggaacacgcgcgtcagttctcccgtctcgccaacggtgcgtcgctggtctacaaccttgccctggcggaggcgtcttccaacgatgaacgtcgtgaggagtacggccaggaactgaagacctggatcgacggcgttccggcttcgcagctgggcgaatgggacatggtgcggttctgggagcaggtggaacgggtggggcgtccgattcatccgcgcacccgcgagttcgtgagcagctggcttgcgctggtcaaggccggccaggccgacagcccgcaatcacgcagtctcgtgcgtgagcgggagcgctcgctgaaaggcaatctctcgcgcttcaatcctgaaaacctcgatcgctggagcggtgcgtccggcctcggaatcctcaattaccggtggggcatcacgcgccgtcaccttgccgacctcctgcacggcctggaggccgcatga

SEQ ID NO: 506742 - DNA, 1866 bp, Stenotrophomonas maltophilia
gtgagtggtgacaatggcaggccgttgttcgaaggcaccagcgcgcagcaccttacctacctcgccgggtggaagccgtggggccgtcggccccacgtgaccgccatccaggagcagatggatgcagccagccagcgttggatctccatcgtggaggaccatcgacggctcaacatcacggcggagcaacgcgcgcttgccttggcagagcgggaagctgaactgaaacacgcatccggggctctggcagagcgcgagaccgaacttgaacgcgcatcggaggctctggcggagcggggaactgagctgaagagtgtgtccgaggccctggccgagagtgagaccacccgtagtcgcgagcgtgacgatgcgcagacccgcgagcaggcactggctggcgaactcgatgcccagaggcaggtctcgcaggagctgcagaaggagcttcaggaagcgggcaggcgcgaactggacctgagccagcgctacggcgccgagaagatggcccgggcgcaactgacgacgagcctggtggatgcccaggaccgccttaaggtgcagtccatgcagcatgctgcaacccaggctgcgcttgaaagcgagcaggagcagagccgtcagttgggtggcgacctggatcttctgcaggccgaacatgccgcaacgcagatccgctttgcgctcgtttcgcgcctgcttgctgtgccgccgccgcgaaatgagggaatcgaagccttccagaagctgctcgatgatgactacatgcgctttgctagtgccgaggcgtccctcgctgacgaagcgaaggcgctgaggctgttgcagtccatccagcaggagctgcacctgatggcggccaatccggacatcttccgccgcacggtcgtgggggtggtcggtggcttcagcagcggaaagtcggccttcatcaatagcttcctcggcaaggatttcaagctgctctccagcgtcacgccggcaaccgtcatccccagctacgtgtatcccgcgcagcagacgcagatccaggcgtattcgttcaatggcggctgcattgatctggatgccgggttctaccaggaaatgtcccgtgcgtttgtcgagaagttcagctttgacctcaagcggatcatgcccttggtaagcgtcggtaccagcatggacaccgagcgcaccggcaacatctgtctgatggatacccccggctacaacccgggtaccgagggtagtttcagtcagagcgatcgcgcggtagccgtgtctcactcgcggaagtcggatgtgctcttctgggtcatcggaattgacgccaacggtacgactccggattcggatatcgaattcctgaaggagattggtttcgagggacgccctgtctacgtggttctgaacaaggccgatctgcgatcagctgatcagattgaagagatcctggggcagatcgaggacgaaatcgagctgaatggaatcacggttgagggcatcagtgtttactcctcaaagtacggcaaggagtacgaattccgtggaaaatccatgcaggacttcctgcgtgaacgtcccaagggtcgtctgccgatggagcatgtcgaggatcggatcaacgaggtgttcgagctttatcgcagtgccatcaccgaatccatcgcgacggcgaaggcctgccgctcggccgcgcgtgcgcttgcattggacctgatgcagggagatgtccaggatgcggcaaccatgcgttcggcaacccagaacgtggagaccatcaacgcggcgatgaacctcgacgccctgtccagacttcttgtcgatgcggaccagatcaatgccgctttcctcgatgcagcaagacgggtgctcacgcccgcttga

SEQ ID NO: 506743 - DNA, 2214 bp, Stenotrophomonas maltophilia
atgagtgctgaagtgatcctggaccgtcagcagaagttgatcacgtggcttgcagcacacgccgacattctcaatggcgccgtcggggcttcgtcgcagtgggagatcgacacgatcgatagcctgaaggaagcgttgttgcgactggacgacgaaaatcgcctgatggacattggcattgtcggccgggtcaaggccggcaaatcgacgctgctcaacgcgctggttttcaacggggagtcagtactgccgcaggcggcgacgccgatgaccgcagcactgaccacgctgacctacggcgaccggttcaaggcgaccgcgcgcttctactccgaggcggatcttgccaacatcgagcaggccgctgctgcgtacagcgacctgcttgagaagtcgctgatcgaagagctgcgacgcacggaagggcgtgcgggcctggaccctgagcgccgcagggagctggccgagcggggtgcccgacgggcactggccacccagcagccgtccttgcaggcctcgcacgagcagtgggagaagatcacagcatccggcctttcgttggcccgcctgaaggaggacaagccgctggaggctgacgacgtacagggcctggcggcgctgctggcggactacgttgccgcggaaggtcgctacatgcctgtaaccaagagcgtcgacatcgagatgccggtggaggcgctgcgcgggctgcgcatcatcgatacgccggggctgaatgacccggttgcatcgcgcgaggcacgcacccatgatctcttgaagtgctgcgatgtggtgtttgtcgtcagcccggcagcgcagttcatgagtcaggaagatctggacgtgatggcgcggatcaccgctgccgagggcatccgcgaactggtgctggttgccagccaggtggacaacacgctgcatggttcggaaatgcaggcacagctgcatgcttcgctgaccggtctgcggcgggagcttgcgggccatgcgggcaaggtgctggataagctgaagctctccaaccccgaggttggcgatgtattccagagcctggtggacaagggtgaggatgcgatcatccacagttccggcatgtgccattcgatgtccgtcgagttcgacagcgtggcggattggcaaggtggccgcctgacggcatggcagaacctcaaggaaacctacccggactacttcagggatgacaatccagggctgtcacgcaccaatctcgatcagttggccaacatggccggtctgcatgaggtggtggaacagacccgtttagcgaaagcgcgcgtgctggccgctcggcgccaggacctgctggatgccaaggagcggaagcaggtcgagctgctgcgtgagctgcgcagacagttgtctttgcgcagaggggagattggtgaggccgggctgacggagctgaagaagaacaagcgagggctggaacgtcgcaaattcaaccttacggtggctctggatgatgagctcatgggtatcaagactggtttcgtgaatggcctcaggaaggccatgaaggaggtcatcgatggcgcctacgacgctgccgattcgggggtgagcaggacggtaggtaccgagaaaaccacccgccgcactgagtctcctggcgccttcaattgggtggcaagaaaactctgggatggcggctaccgggagtatgaggagaacaaccgcaccgtcctgcctgctgctgtgaagtccgccgtatcggcatttgctagtgggctgcgaacagatcttgacagcagagcgactgagttgcaggccaaatttggcaagcggctgtttgcagaactgctccagacggcgcgacggcagttggacgatgagctggacatcgaggcggtttattcatcgctgaagagcatcgtcaatggcgtggagtttcctccggtttcgcttcgggcaccggtgctgaaggcatccaccatgaagctgaagggtagcgaggccgatacgttcctcgagcaggcgcagcacgccattgagacactgcgagaaacggctgaggctgcggtctacgagtatgttgagacagtaaagagggcaattccaaagtctgttgcagatgacttcattgggcacattcaagctcagttcgatgcactgcaggcgctgatggaagacgctgaaaagacgcgggcgacactgaccatgatggatgcggagctggaggcaatgcagtga

SEQ ID NO: 506744 - DNA, 1764 bp, Stenotrophomonas maltophilia
atgttcgctgttaagaatcaatgccttggtctgttggaccggattacgacgctggctgacagcgcagcgatcgaactgcctgaaaaccactcgctcgccgaagaaatgcagcgggccgaactgttggtaccgatcatcggtgcgttcagtgcaggaaagagctcgctgatcaacaccttcctgggcgcggacatcctcccggtcggtatcaccccggagactgagctggccaccgagttgcgcttcagccgggatccccacgttctggcgcaccgtgccgatggtggcagtgatcggctcgccgtggaggacttgctgtccatcaagccgcgggcctcgtcgtacacgcacctggaactgcatctggacgacccgcgcctggaagcgctgtatccacaggttctcgtggacatgcccggcttcggctcctcgctggacagccacaacaaggccatcgcccattatctgccgcgtggcgcgcacttcatcgtggccgtgagcgtgcccgacggtactctggccgagtcgacgctgcgccagcttgaaaccatgcagacctatgaggctggattctcgatcctgctgagcaaggcgaacctgcgttcggccgaagaagtggatgccgtggaagtggctgtacgggagcagcttgagctgcgcctgggcgttgcgccggccatggcacgcgacgaccgcaagcagggcaatggactggccagtctgctgcccaagatcagtgcaagtgatctgtggatcggccgcttcctgccgcgaatctcgcgccagcttgcccacgctcgtgcccaggtgaaaatggcacgcaaggcgttggatcagagcgatgcggatattgatcgcagcgtacgtcagctgaatgatgccctggatgatctgaacgcccagcgcgacgccctcgtcgccaagctgggccgtagccgcctgagccaggtggtcgaacagtgcgttgaggaagtaggccaggcccttcgcgaggcctccagtgagctgcaggcggccgctgccggtggcaacaacccgcggtttgcgcaggtcgtcagcgatatttcccgccagcgcttgagtcgtgtggtcaaggaacgcatggaagggctgagccagcaggcgattggtgatctggccaaatccctgtctcagcgcgaggtggatgaggttggcagtgtcggcggaccggactggacgcagcagatgcagacgcgcgtgcaggagacgctgacccagaccggtcaagcgctcgagcgctggcagggcaacctgcagaaggcgcgtgaagacgagaagctgctgcgtccttatgccggtgatgacgagaatgatcgggagaagacccagagagcccgagtcgccttccgcagtatcaccaccgttctggcggtcaccaccagcgtcgtggctccggcgatcgagctggtcgtgatcttcctgccggagatcctcgggtttgtgtcgcgcaagctccgcgaggaggagctgcgcaagaccatcgacaaccaggttattccgtcggtgcagcgcgagttccggaccaagctgcccgagctgctgcaggcacaggttgatggcctgatcgagcaggccgtgcatgagttcaagacggccatcgaggaaaaacggcagctgctggaaagtgttgtggccgagcagagcagtcctgcccgcgcggcacgcgtgaaagcacttgacgcagcggaagctggtctgacctccgttgcgaacgaagtcgtcgcgctggagtccgcccgatga

SEQ ID NO: 506745 - DNA, 1005 bp, Stenotrophomonas maltophilia
atggacaccgataaccgctcctcgctggcgcgccagtggcgtctgctgcagctgctgcagcctgctccgcactaccgcaccgtgaaggagctcgcccagaccttggcggcggagagctacaaggggggtactcgaaccatcgagcgggatctgaacgccctgtcgctgcagttccccatcgagagcaatgatcttcagaaaccctatggttgggcatggatgcgcggcgcggccgccttcagcatgccgggcatgtccgtctcacaggcggtggtgctgctcaccgcgcagcgcaacctgcagggactgttgccagccaatcactggcctgcactgacgccgttctttgaccaggcagagaagacgctggcggcggtccgcacgacgcgttccacgcggcgctggcacgagaaggtcgccgtcgtgccagccagccagtccctgctgccggctgcggtggacaccgacgtggcggtcaacgtgcaccaggcgcttttcaacgagaagcagctgcgcttgtactacgtggcccgtggccgtagcgatgccagtgagtacgtcttccatccctacgggatgatccagcgtggaacgtccagttacctggctggacggattgatgggcgcacggagaccactacgctgtcgctgcaccgggtacagcgtgcagaaatgctcgacgccgacaccgaaggtgctgagtccttcgaactcggaaactatgcgagccgggttgccgctggcttcgagagcaagggacctctgtccgttgagctggagcttgatgaagccctggcccagcacctggcggagacaccgctctcccgtgatcagaagctggacgtcggggacggtcttgttccccgtctgcgggccaccgtcgatgactccgcccaactgcgctggtggctgctcggcctgggcgcatcggtacgcgttctggctcccgcagcactggccgacgatatcgccgctcgccaccgaagcgccgcacagcgttactga

SEQ ID NO: 506746 - DNA, 648 bp, Stenotrophomonas maltophilia
atggattcgactgctctgaaggaagtgcatcgtcagattcgcgatgcacaaccggactcgacgcgcgtgcgcctacaccgcgccatcagctggctcaaccgcgccgaacaggaagacgaggatacggacgcgcgattcctgtttctgtggattgcgctgaacgcagcctatgcccaggagttcggattcgagaatgccgagcgcgaacaactgcgcaagttcttcgatgctttgctgaggcatgacaagcaaggaagcctgcaggacatcctgttcaaacagtttcccgggcctatccgaacccttatcgggaatcgctttgtctatgcacgcttctggaaggcactgcgggaacatgacagcagcgaccagtgggcagagcgctttgccaaggaccagcgctcggcgctgcaggccgtagttgagcggcgtactgaagtcgtgctctccatcgtgcttgaccggctgtacgtactgcgcaaccagctggtacatggcggggccacgtgggacagccatgccaatcgtgagcagttgcgagatggcgccgccatcctgggccaactggtaccggcaatcctgcatctgatgatgagggacgacgcgcccgacctgggtgaagtcgcctacccgatgatccacatctga

SEQ ID NO: 506747 - DNA, 282 bp, Stenotrophomonas maltophilia
atgcggggccagcagaagaccgttctcgtcatcaacgcgctcgctatgagtgctatccgcccacggtttgatatgactcgcgcgaaggaaccttttgcccatcatctgaaacactacgagcgtcttgccatccttggcgtgctcgccaattgctcggttgcccgccacatacttcatgtctccgacttgaccctcgccgaagtaatgaaagacttcgtcgtcgttccagaagtcatggtagccatgagacacgccagcctcgccagtgaacgcgatgactag

SEQ ID NO: 506748 - DNA, 1218 bp, Stenotrophomonas maltophilia
ttgagaattcttgttgttgaggatacacaagccaagttgaagcggatcgttgccgttctcatggagacaggaattcctcgggatcatatcgaggtggcagtatgttcatactctgcacgccagtttctacgaaataactactacgatctgctgcttcttgatgtgcttatccctttccgtcaagaagatgatccagatgcccaggtctgcgttgacctgcttgaggatatttctgagggtggtgagtacaaaaggccgggaaacattgttgggctcactgcgtacgatgaaggcattgctgacgctgtcgatacctttaatgagatgctgtggaatgtaattaaggtctctgaggccgacaatgggtgggtggagagagtcaaaaattgtgttaactacctccgctctgcgcgcaaagaagacgctacgagaacatctaaggcagaggttctcgtaatatgcgcgcttcgtagtcctgagttggaggccgtgaagaagcttccctggaactgggaggcggagaccccgttcgatgatgtttcgttcatctcaaagggcgtcgtaagtacggcgaaaggtaatgttagggtcattgctgccgctgctccgagaatgggtatggtggcgtcagctgtgctggcgagcaaactgatcgcggatgttgttccagatatttgcgcgatgccaggcattagtgctggattctctggaagggtggagttgggcgatgtggttttcgcagatccggtttgggactatcaggccgggaagcgtatcgtggatggcaacggtgagcctggttttgagatggcacctcatcaaattcagtcttcgccggaactgagggcgctgattgagcagttgtcggaagataaggagattctgagatcgattagagatgcttggcaaaatccgccgcgaaatgatcttagaattcgaattggtcccgttgcgtctggctcagctgtggtagcagatagggcttttgcgaaagaggtctcacaccaacagcgcgccgctttagggctagaaatggagctttacggcgtctcatccgcgtgcgcaatggcgacatctcctcgtccaaaatttgtaggattaaaggcagtatgtgattttgcagacgcggataagaatgatggacttcagtcatactctgcctacacaagtgctgccgttcttgatcatcttgttcgcagatatttcgatatctgttaa

SEQ ID NO: 506749 - DNA, 3393 bp, Stenotrophomonas maltophilia
atgtcagccattaaagtgcgcaaagcctcatcaaagtatgggactctccgtgggcttgttgggagtatcaaggagcgggcatatggggtcgaccagagtgttcgcactttccgtgcagttcgcggtctaagagatgtgcatgggaaggcgagagaaactctatccccattatcctatagtgcttacttcgactacataaattcgttcgctgccgagatgcttcggctggttcccttaaaaggctattcaaatgttgcagctctcgtggaaatgccggagctctctctcgccgatgaagtgctttggaacattgcgagaataaaggctgcggcaggtgaaatctccaagacgattcagatgaatcaagagcttggagagattgtttgggcgggagcgagaggggcgctagaaaaggcacaagagatttcggacgagttcggggagtcaatatttcttattgaaaaaaggatattcctccatcagcaagctggcggtcttgaggcacagaaaaagtacgtagcgactgtcaagcgggcgctgcaagggggggttgccccattcttgtctcatcatttcagtgtgcgcaatgagccgtctacgtcagttgcaagattcactgcagatgtaaagaagcgatgtgagaagataaaggacagggagcttgcagtttatcttgaatacaagcttaccaagcagtggccttcagatgaggctgaaattgcgagcgtacttagagttgagcagaacaacgctagcattgatgtttatgaaacatttgtatgtctgttgagcgcagttcgctcaggacggctgcaggttggcattgatgtcgacgcgatcgtacatgagttgagctgcattgaggatcgcagactcagtacgtcagcatcctctttagggctgagcggcaagactatggattcgctggtgtcaggtcactaccgccaagccatgaaggaatgtctagggcgtcaatgcctgaatatagaggacattatcactgcatccatctgtcgagcgcaggctgctcaaggccatggttgtgagagggaagcgcgttctttgagaaaccaggtcgtcagcagatttgccgaggcattgctggcaactgagcgatcggttgctgcaaaggccgatctgagaaagctacatttgaactggtatgatggttatcttgtaagtgcaagtaccaggctcgcagcgacagatatattcgattcagttgccatgcaagttgcagcgcgaagtgtacctggctgcgttcagagcacacgccttctatcgcagctgtcggagcatggggacttagttagattgattaatgatatctcggtttccccgcgaccaagtgacggagtggccctgagctcagatgctcgagcaattgctctgggagcgcagcattccgtcgcccgtgatctgccaagggttcttgtcgagctaactccccttgtacactccgatgttgggttcatgagtcatttcgcaacgctcatggcattggaagctgctgcgaaaaaccgaaatgtatctgcattcttggaggtgctttcagatggggttgttcgactgggagcggtagctctctcaccaaacgcactggcgttctccgctcagttgaggtggaaggatatacggtcatgctcctctgatatccgactatccatcgccgcccactacctaaacaaaaggaatgccgggaaatactggagcacatgcttgcgcttcgcgatcgacgatttcctgaagatccattccattgagcgaccctcgcagattgatgtggcggtacacggaataaatgcagttaggcacttctggcgggaggtctgcgaggagcatgtggtagacatgatttactccatagacggggtgaagtctcttcgaaaggagatgagagagatactttctgtgctgcgagagattgatgtcgagcacaaggagttctatgactctgagattgtatcaatcactcatctgttgatgattgaggatggtcggcgcatagttgatcaaagtcgaatatatgtagacgaggcggcgctccgacagcttcttcgtgaggagttgacagagccattcagtcgatatcgcgcactagctcccgtttccgtggaagacacgagagagtttgatgaggttctgaggcgggttgctaagggagattctggcgctggagatcttgcgtttcctaagagtgaggcggaccagctcttggttgaaatgataaatctgagctgcaacagatttcttttcgatgctaaacatggccttgatagctatctcagtaagcgtatccgccacggctctatcgtcgggcatttgcggggtgcgatcgagcagcacgaaatgattttccaggctttgggtagcgggttaccctacgtcgagccggacgattggcgggatagctacgttagagttccatacatcgaacagcttgaggtcgtcagagcgatgtgtgacttcagtgaaaaaatcgatgcagaacttctctatgcaaagaacaacgttgttcagattcgtactgctgagaaagtaagtggacttcttggtattaatctcggtgcgggggagtatcatacaatcaggtcgtttgtacggcgggatctctctttcgatgggttcctggattcaatgtttgcggcattctgggggttgctcaacccgtcattgagtgcggttcgtaggcacctccgggaacgcactgctgaatcgatatctagggagttctctagggtcagagctaccgtagtcgcgaagcgacaaaaatatcctgagttgtccttgctgctcagtaagctggatcaagcctgtcgggatgtgttgggagaagttgagtcggtggcacaatggtttgaaaagtctgggcttgatgccgcccatatgagatgcaaactggcggatgcattcgcaattggtatagagtcgtcgaaggccacttacaagaattcaaaccttaacctctctgagtctacagtcccagacttcgatataaccgcagcggacattcccgtgctggctgacgtgcttctggttatatttggaaatattcacaccaagtctgaagttcaggacggagcgattgttagcctacattgctccgtcaatgatgcagaagggacgcttaggatcgtcgtaaaaaatgaagttgcagttggtgtgcgcgatcgaaaccagtttcgtgtttctgagatactgaatgaagttaaggctgggcgaattgaacagggtcttaggcgcgagggcgaatccggctttaagaagttggctgccatcgcgagccaatccgcgaagggttacttggattttggtttctcatctgcaacggatttttttgttgatatgaagctgtccttgattcttcaagagggaggttgctgtgaagagtag

SEQ ID NO: 506750 - DNA, 636 bp, Stenotrophomonas maltophilia
atgaaacgtttttcccttcctctcactctctgcctggtggcttgcatgccgctccaggtttccgcccaggccacccctgatgcggtgcatgccgcggcggacgatggcaagcccaaggccgataagaagcgcctgttcaaagccggtggcatcggttgcgtggccggcggagccatcgccttgctcacgggcaagaaagacaaagccctgggtgcttgcgccgcgggtgctgccgtgggggcttccgcgtcctacgtgaagcagcagcgggagcacgccgagcaggccgccgaggccgcccgtgcggctggcatgaaggccgaagtggtcaccaagaccgaaaccgtggagggcaagcaggaagccgtcctggattcgttgcgcttgaactacaaccccaccgacatgaagcggttggacagcgatacacgggccttcctcgacaagttcgcgggtcttttgaacaagtccagcaacggtttgacggtggtgttccaaggagccgacaaggccgcctgccaagtgcccatcgtggagctggccaagcgtggcgcgctgtccaaggtcacggtggacgaccgctgcggcagcggtgagcccgtgatcgtcgtgaccccggtgccggacgtccgctga

SEQ ID NO: 506751 - DNA, 1059 bp, Stenotrophomonas maltophilia
atgaccccagaagaaaaaatccagaagcgcaagcgggacgagtggctgaagcgtgccaaagcaaccccgaccgcttcgcccacgcaggaagagcggctgatctccgacggcatgaaagagaacctgaaagctgccagtcactgggcgggggtgatcagcaaacgcactgccgagttgacccagaagggcgttgctgccggtgccgagaaggcgaaggaggtcaaggcgaccgtagacgccaagcgggcaagaagcgcagagggaagagttcaggcaacagaagccgagtctggccccaccgtccagccgacggaagccgaggacctggtcggtgcgttgtccgcccgggagccagcggcaattgctgtcgaagcagaagcggttgacgtgagcgaagcgaatcttgagccaagagtgagggaacaatcgcctgtcgtggaagcgcccagatttgcaccggaggcggacgccccatcgtatcagccagcagatgctgtcaatgagctgcaggtgaccgatgacatttcgacaggacagggagagttggccgccattgccgcagaggagcttggcccctcacccgacgccaaggcttcagaggcagcgcgagcgacattgcattccattccccgctctcgctggcccttggttgtggccggcgtggtggcggtggcattggtcggggggacgatctacttcttacatgggaaaggcgatcaggtgccaccgagcacaccgcagcccgtggcaccggtagccactccagccgctcccgagcagttgcccgaggtggtggaagcccccgtggttgcgcctgctccagcagtgcttccagagcaggccgagccagaacctgcgatagagaagccagaaccggacgccactctccatgtgaaagcgtcagcgccgattgcgacccagcccaagcctgcgcagaaacgtgcgaccgcccccttgccgaggatgacctccgcaccagccgccgacccaaggaacgactggcagcaaaaagccgacgcagacctggacgcctgggcgaagaagtcaggcatcgaatga

SEQ ID NO: 506752 - DNA, 1452 bp, Stenotrophomonas maltophilia
atgaaacgctccctcatccactgcgctttgctggcaggccttgttgctggcacggcgcaagcccaggttcaagtgggcaacggtgcagatgcgagtgagttaggtgccacggcagtgggcgatctggccggtgcaaaaggaggcggcaacaccgcgcttggctactccgcagatgcggatggtgggcccacccctactggccactgcattggtgcgaccgcagcgggtgcttacgcctctgcacaagggtgcaatacctcttcttttggggcttttagtcgtgcgacggtggggaactccacggccgcgggagcgtatgccgaagcaaccgcgagcgacgctgcggcttttggtcagtatgcgaaagcaacggcactcagcaccttggcggttggtggacacgcccttgctgctgaaattggaggcaccgccgtaggccccggcagtcaagccaacgcagaaaatgccgcagcctttgggctcagcgcgaaagccaacgccaaaggctgcgtcgccttgggcacgggcacgacctgcgaacaagagaacacggttgctgtaggtaaccgacgcttgacgcaagttgccctggggcaggcgaacaacgacgccgtggtcgtcagccaactgcggaccgccgtggaaaccttgggcgctggcgctaccgtagtaaccggtgtgatcgtggctccgaattaccagctgatcagcgggaaacattacagcaccgttgccggcgccatctacgatctcgatgggcgcgttcaccaactggagcagaaccctggcagcggtggtggcggcaccggtccacagggacccgccggtccgcaaggcccagcaggccaggacggtaaggacggaggaagcagcaccacggtggccggggcaaacatcgaggtcacggacaacggggacggcacccaaaccgttgccttgaaagacaccattgagctttccgagcagggctcggtccaagtggccaaggccatccacaacagcgacggcttcaccgtccagggcggcccatcggtcacccgatccgggatcaacgccggcaaccagcgggtaaccggggtggctgcaggagcgatcgctccagggtccacggacgcgatcaacggtggccaattgtgggattaccagcgggagcaagacgaccgctggaacctgacggaccgccgttttcgccagctcggcaagcgggtgagcggtgtgtgcgccatggcccaagccaacgcccagatggccacctcgacgtcggctatccacggagaaaaccgaaaccgcctggccgtgggcgtcggtggctgcagcggccaagccgccatttccatcggctacacccgcgacgtgaccaccccacgcggatccccatcggctttctcgatcggggtttcccgcagcgggcaggacacggccgtgggcgcagcctgggccattggctggtaa

SEQ ID NO: 506753 - DNA, 462 bp, Stenotrophomonas maltophilia; identical to SEQ ID NO: 498158

SEQ ID NO: 506754 - DNA, 2583 bp, Stenotrophomonas maltophilia; identical to SEQ ID NO: 497800

SEQ ID NO: 506755 - DNA, 381 bp, Stenotrophomonas maltophilia
atgggtcggctcaaggccggcgatcgtctcccctcggtacgtgaggcggcggatgattggggacaatcgaaggattcggtccagagagcgtataagcacctgttgaacgagggtgtcatcgtagatagcgacgaacgcggcaatttgcccaagtacatggtcagcctggaagtgaaggagccggccgagtccgagcgaatcgccaagcttgacgcactgatggttcagctcgtggccaaggcccgcaagctgggctattcggtagaggaagtgcaaagcgcgtcagagcgcgtcattgatcggatcaatacgccacgcacgcggaaatcaccgagcccctgtgtcgcaggcggcgtgggcaaagtcgccgaggcgatctag

SEQ ID NO: 506756 - DNA, 255 bp, Stenotrophomonas maltophilia
atgaacgatcatttccccgccctggacgccctggatcaggcggccaagcagaccgccccactgactgtcgaacagcgcgtgcagctggctcagatccgtcagcgcatgcaggagctcactgcagccgctggccacagcagcgccgctctggcgccgatcattgcagcgcaacccgcagattctgtcctgcggactgagagccgcagcatccgccgcctgcatcttgccgtcgccgcgatgctccggcccgtctaa

SEQ ID NO: 506757 - DNA, 366 bp, Stenotrophomonas maltophilia
atggctgacatggagaccatcacctacggcggcggcccgcttcctggccgcaagggccgggtatcgctgccccgtgctgagctgcgttttgccccggccgaggacgggcgctggatgtgggctgtttcctatcagtccgccggcggcttcggtttcgggtcgacccccctgccgaagtggggccgcttcgctgccgaccgcgccgcggctttggccgcggcggtggcggacctgcgcgagcagctgcagcgcgcagctgagcgcccgccggcggcgcttactgcctggctggactcgcttagccagcggccccaaccctcccagctcgaactgttttccctggaaattcccggcgagaccgcatga

SEQ ID NO: 506758 - DNA, 537 bp, Stenotrophomonas maltophilia
atgcgcctgagcaaacgcgatcgcgagttcgttcgcacgcgctacgacggtcgctgcgcttattgcggcgaggtgctcggtccccgttggcatgccgaccaccttgtcgctgtcgtgcgcgatttccgattcactgagaacggtacgcgcgccacgggcaagctgctgcgcccggagaacgacaacctggccaacatgatgccctcatgtgtgccctgcaacatcgacaagcactcgatgcccttggaggcctggcgcgcgaagctggcgcgcgcgtgcgccgttctcgccaacaatattcccacgtatcggcacgctgtccgctttggcctcgtgcgtgagacgcacgcgcccgtcgtgttctatttcgagcgcatgtcccattcctgtgagcgcatcgcctgcgagcactgcgacgcgacggccgatgccggcgagctcgaagcggcggccgaatccggctggacgtgtggcatgggtggctggcggtgcccacgtcacagtgagacctcgcccggagcagctggccatggctga

SEQ ID NO: 506759 - DNA, 1278 bp, Stenotrophomonas maltophilia
atggccagcagctacctgatcgataatcagaccttcactaccagcgaccacggcgcgcaggcgttgctggccaaggcctatgccgcgaagaaacggcctgcgtgcccatgcaccaggccgcccatcccgatgtatatcgccaagatcgaggggcatttctacgtcaagcggatgcccaacaccggcgcaaagcatgcccccgtgtgcgacagctacgagccgcctgctgcgctttcaggcctgggcgaggtctctggcgcggcgatccaggaagacaccgaatcgggcatcacaagtatcaagctcgatttcgcgctgaccaagacaggagctcgcccggcgccggcggccaccggtgccgaaagcgcctctgtgcgcaccgatggcaagaagctgaccattcgaggcctgctgcactacctgtgggatcaggcgcagttcaatcgctggtcaccgaacatggacggtcgacgtaattgggggaccatccacaagtacctcaccgtggcggccagcaacaaatcggccaagggcgagagcctggcagaaagcctgttcgtacctgagccctactctcccgatcgacgcgctgaaatcgatgggcggcgacgcaagctcctggcgccgctggttccatcgggcaagtcacgccgcctgatgctggtggtcggtgaggtgaaggaaatcggcgcggcgcgctacggcggcaagatcacgatcaagcatctgcccggcatggcgctcctcatcaatgaggatctgcacaagcgcctggacaagcggtttgcttcggagctggccctgtgggacacgcttgcagaatcaggcgtccgcctgatgctgatcgggaccatgggccagaacgacggcggaacatactcgttgcatgaaatcgcgctgatgctcgtgaccgcgcagtggctgccgttccagaccaaggacgaatacgacctcatcgatgccatggttcgtggcaaccggcgcttcactgtcgggctgcgctacaacctcccctctgatcgaccgctggctaccgcggtattgtccgacaccacccctgctgcagtggcgatgtacgccctccccatccaggctggcagcgcctatttcgagcagctggccgagctggtggacgaggcgcagatgccggcatggttctggcgacagggtgaggcgatgccggcattgccctcgccggaaaattacgtctcgatgccggtgccgaccgaggacgaggtggcctccgagcacgccgacgcggacgactacgcgtcctga

SEQ ID NO: 506760 - DNA, 423 bp, Stenotrophomonas maltophilia
atgaagaacatcgacctgtcgcgcctgagctccagggatcttggacagctgatccgtgatgccaagcgccagcaggctgtcgtggcaaagcgcaagcccctggccaccgtccgcgcgaagttgaccaagctggccaaggccgagggctactcgatccacgagcttttcggcggcgctaccgccccggccgccaagcgtcccgcagcgcgcaagagcaaggccgtcaaacgcgccggggccaagattccgccgaagtaccgcaaccccatgaacgctcaggagacctggaccggacgtggccggcagccgcgctgggttgagaacgcgctgaacgttggcgccaccctggaatccctgctgatccagcaggaagaggccagtgctgacaccgcgccccggggctgggccaccgcccaggcctga

SEQ ID NO: 506761 - DNA, 858 bp, Stenotrophomonas maltophilia
atggcgctcccgaccttgcacgacccacagccaaatgtcgggatcttcagcagccagccgctcaagggccgcaacgccgtcccggtccagctcggccatatcagtgccggcatctgcaaggcctataccgaacgccatgccaaacgcggcggcaagcccggcggatgcttcggccgggccctgcacgagggcgagggcagcaaccgaaactgcaccgcagatcattgtcacgggatgcgaggcgattgcccgcgcggtgagctctacacagccaggtggacggccgaaagcgcgaaggcgggccatcagtggagcgttccagacgcgggtgtgggaatactgtcgagctcgtcagattcgtcgtccgggaacatcatctccatgagctgtcgtgcagccgcctctcgttcggcccgttctgcatcggcacccacgcatttgacacatacgccatcgatgctcaccgacctcaaaggcggcgcgggaggactgtccggctcgtcctttacctgcaggtgctgggaaatctcgtctgcatcgatagcgcccgccgtagcccgaagaggcgtgccgccagccgccaacactgccgggtcgtcgtcaaaccatccatttcccgacaggccgagctccgcgtcgatcgccacgcagatccgtagcgcggcgtcctcgggatcatgtgcagactcaaatgaatgcttgactgtcgcacgcagcctcccgggggctacgcacgctccggcgatgggcggcctcgggccgtcaagcatcggcggtgaccagggcagggtgacggaattgccttcgggtgccgagtgcacaccgtcgtcgaggcgaatagcaccttcttccgggtga

SEQ ID NO: 506762 - DNA, 273 bp, Stenotrophomonas maltophilia
atggagagttttgctgatcgtgccctgcacgtcgccggcttgtgttccgccacgctcggagctctgcttcgcgtgttcgccaaggtcggtgcggtcttgaccctggggtggtggatctatgagctggcagtaaccggtggattgagttttaccacgatcattcctgtagccctgttgatggcctgcggtgtctcgttcctggtcggcagcgccatcaagaacgtgggtgtctcgctcatgggtgattgccgccccgacagggaacggtcgtga

SEQ ID NO: 506763 - DNA, 369 bp, Stenotrophomonas maltophilia
gtgctgctggtactgcacaacaaccaccccgaaacgcctgtggccctggaacgtgtcgaggtacccaccggcatggtcaggaagcgcggtgggctcgttgctctcgaccaccgggttattcaaaagggcctcgctattggcgaggccagtaccgtggaccttggcagcgtcgagcaggtgttcgatggcggcggcaccgccgaggagtccaccgcagttcttcgcagcatcacgacggtaggtgccgatcgatgcctcaccaggcatacccccgtgacagtgcacatgcgattggcaggcggctcgatccggctgcttcatggcgtaccggttagctattgttacccgcgcgccgacgcttccaggtaa

SEQ ID NO: 506764 - DNA, 651 bp, Stenotrophomonas maltophilia
atgagacgtctttatgcgctgctggcgcttcctttttcggtcgtcggcacgctccttttcgctatgacgggcttgattggattggttgttcccttgattttgatatttagtcagacttgggagcaccacttaggcgagaagctctacgtaggcgagtggttgcgtggacttattcccggtcctgctagctggagtgagccgagggtgattggagttttgtttttcgtcggcgtcacttcggtggtagccgccagcctgctggaaggagcggcgtggcgcctgaataagcttgcgtttgctgatcttagttccgaccactcgggcgctgtcgccgagcgaggtttggcgtcgccgcgccggcgtgcggccgcgttggatgtgatcgccaacgggactgcaggcggtattcacaagagaatcgacgagaaccgagagttacttgaactactggatcgcgaagctcccgtacttctgcttgagcatccctacatcattcactggattcgatctaacgacgaattcttgagcgctattgaagaaatcgtgagcgctgaggacgcaccctttaagaagcgtgcagcctcgcactaccttggcctctacccgcgtacgtggccagacattgcatgccaacacaaggattcaccatga

SEQ ID NO: 506765 - DNA, 486 bp, Stenotrophomonas maltophilia
atgagtagtcagagtcagcaaaaggccactgaaatcgtgcaggttttgttcggcgaagggcgtcatttctctttccggaaggaagagaatgcacgcgatgataacggcctgaaaggccttcccgatattagccatctgcctgcggatggagaacacgttaccagcctcgcgatgagtgagtggattgacgcggttgccgagcgcatccgacaggctgtcggcccggggccagtcacttgcgtgctttggagctaccgccttggccggggcgataacagtcactgcaacattgcggcggattggcatccttcggatagcgtagctactgacgccgggtactcaatgaccttggccattgatggggtgccgtacttccgagtgtcccccagcctcagtgatccattgatgcctgacgttgcggaggcgatgcactgcattgctcggctcgccaatatgctcggcgcaacgatcaagctcgcgctgtaa

SEQ ID NO: 506766 - DNA, 417 bp, Stenotrophomonas maltophilia
atggacaacacttactacatcccccttttcgtccttggctgttttctaacgattgttctgtaccttgcgattgaagccttctttgtgggcaggccgaacgctaaacgtagagtggctgcacttaagcgccggttgtctgaaaggcttgagcaatccctggatgacgtcagacggtacgaagcaaaggccgctcagggagtggccggatacacgccgggtggcaacgtagcgatcgtcaaaatcgagtttcacgactggttcgaggggttcaccaccggcttgcatgattctgttccattcgcgatccgggaggaattggacctgcacaggtatgacgacttgcttcgcgagattgatccaaaccacgacccggctctgtggaagcaggatctgcaagttcgagctaaccgctggtga

SEQ ID NO: 506767 - DNA, 579 bp, Stenotrophomonas maltophilia
atgaacagttccaacgagcaaccccaggcccgacgcgtattgatgaggcaagatagttccgccaccacggtccataacgtaccaacttcatccacgaaacctcgcccgagcgctccgcgagcggtggccgcttattgttctctgtcggccgctattaccgtcttctggttgagtggcatcaactatgcctccctgctattcaatgctgcgtttacacgcgctttctatgccgtcgcgggagttgagtttgtgccggaccgatttgaccatggcgtcgttggtcctctgatcgggacagcgggctcgatcgtcggttggatggtgttcaaacgattgattgagctgctagtgctgggctaccagcagtggcgctcggcaggcggccgaaagtcccgtgaaaagcttacgagtgattctctagatgctggatttgcaatgatcaagccggattggttgagcaatgttgtccagttggttgccaccgtgattcccatgattgcggcggtggtagggctgactgcttacaagatatacgcagcgggtctgtggccttcggtcgccggagcactgttcacatga

SEQ ID NO: 506768 - DNA, 594 bp, Stenotrophomonas maltophilia
atgagcgtattcaagatgatggccgtggcgtggctggtactgagcaccctgccctgcttggctttcgccggcactgtgatcgagacgaagcccagcagcggatctgcagcgccggagaagactttcatgacggtgcccggggtgggtcggttgccctacctgcagctgttcgaggagcacagcgcgcccggcgaggagctggacgcgttcgtggtccgggtagcaccccggttgcgcgaatatagccgcgagactggctttgaagcttgtggtgtgctggccagcgatggtgcccgcttcgcggtgatcgtaggcaccaatcaggcccataccctgtgtgtgaatgatgcaaccaaggttcctgcagggctgacgcactctggccataccctccattcccatcctgtcggcgaatatcgtgtcaatgcccaggacaggctggtcctcggcgctctcactccgctcaacagccgccagaagcgaggcccggccgggttcagtgcggaggatattgccagcgggcatggctatgtcgtggagcgcgaccgcgttctgcatcaggccgggcagaacgcggtgcgcgaagtccgctag

SEQ ID NO: 506769 - DNA, 1281 bp, Stenotrophomonas maltophilia
atgaataagctagttccaacaacgctgctgctggccatggccgcggtggcaggtgcccagcaacgtcctgccaagacgtttgacggggctgtagttgtcgatgggcggccgcagcaacaaggcagcgaaagagcgggctccgcaccaccgcttgttgtcgtaagcggatcgcgagtcgacccgacaacctggaatcctgctgacaccggccaggtagtcatcaagggcgtcaacagtggggtatcgcagtcggtgctggtaaaccctggtgctgcggcaaagctctccggttccggtgctggccagccggcaacgatcgttcggactggcgccaacaaacgcgtggtgaagtacaccagcgcgtgcccggccttccattcgggaaccatcacctgggatcaggaggagattcggacggtcaatgatccgaactggaagccgatcgggcccaagatgaacttggtggacacctgcacgccgatcgaggaattccgctgggttgctgaagcccaggcttgcccggcgtactacaacggctcgatcacctggcaggcagaagagcgtcgcatcggcggcgggccttgggccaggaccggccgcacgcagaatcgcgtggagagctgcacgccagttgtggagactcgatgggtgccggcgtcccagggctgtccggcctattacaccggcagcatcacgtggcaggcagaggagcaacgggttggcggaggcgcgtggacgcccaccgggcgcacacagaaccgggtcgattcatgcacgggtattgttgaaacccgctgggtgggagcctctgcaggctgccctgcaggctacgccggctccaacacctgggaagctgaggagcgtaggactgcgggcgggccatggtacccaaccggggccacgcgaaacgcatccaacacctgcgcccccgtcgctaagccttgcaacgccagcacgcgcactgatatggcgggcttcacctcactctatccatacccttggactccactgcgagcgtgtgacgcttccaatcaggggcagaaagcggtggctagcatcatctcatgcggccaagctggctgcggtggtggccagctctggcgcgcgatgatttgccaaggtggcggttgggcaatcactgcaggcgtcggaagcacgccatacgttgggcaggttccggccgactacaagggtttggagagtcagttggtttccgactacaaccagctcggccaaggtggttatgtcagcagaaccgtaacgagctaccagtgtaactag

SEQ ID NO: 506770 - DNA, 570 bp, Stenotrophomonas maltophilia
atggcagtgagcctgtccgatctgcgctttgaccacccacgcgctttctggacgggctcgctattgctcgcgggagggctccttgccgggggctttcttgcgttacctcaaaatcccttctttgaggccatcggtatctccggcgcgcagcggcaggtttctgcagtcagaaacgctgcctactggtacggccgagccatgattcacgcctctgcggaggatctgcacttcgagacacgctttggcaacgtggtccgttacgacggtgctctagttgcgcgtttgcctgatggcgactcgttcagagaacgccgcctgctctttgctgacgtggttgttgtctcagctacggaagccgatcgcgtggtccacgccatgcgctatcgcaatgcgaagtttgaaatctacggtgacgccaagtcagtcgtgtggattgatggcaagccgctaaacatcacgctgatcgagtccggtgcagccaagccagaccctgatccgcccaccaacattgtcgacctggcattcgcttcctactactggaatcaggtccgtggagagtccgatgaataa

SEQ ID NO: 506771 - DNA, 516 bp, Stenotrophomonas maltophilia
atgaagatcctccagtcgtccattgtgcaaatggcaatcgccggtgcgggtctgacgctgatttggtcagggctggatgcgctgaacggcaacatccggtcgctgccgattaagcaggttcagcggtccgatgaccaggtggtagcggaggctgtgccggatatcttcccggtgtgggtgacaccgcgtcgtgcggcgcctgtcgcgcagggggaggagctcctggacgcggcctttggtccgcaggccagccagaaggaggaagacgttcccgaggtgccggcgtatacggaggccctgtcatccacggtccgagtgcagggcacgtccggcaacggcgcttttctcaacggccgcttctatcgcaccggagcggaagtcgccgctctcgccgttctcagcccggacggcataccggtcgtacccctgctgacttcggtgggtgacgacacagtggtgctgtcgatccagggacagatggtgaccgtgaagaagggggacgccggatggcagtga

SEQ ID NO: 506772 - DNA, 540 bp, Stenotrophomonas maltophilia
atgaacaaggcgatcctgattgcactggttggcgcagggctgctcggctacgccggcagcctgggcatgcaggccttcaacgagaaggccagtcagcagcaaaccgagacggacgtggttcaacgttggaagaacagctaccaggctctggcaaagagccgcgcgatgtgggatcggcggtatccggagctggccaagtacaacgatctgcttggcctgttcaggggtttgcgccttgagcgatacggcctgtctgcggaccccgatcaactctccacctccaagatcgagagcgttcgccacaacgacatgcccgtcgggctagttcgggtctgcatcgcatcgagcgcggcagcgacgagctccggattgcaggtgcgcgcacccacatactcggcgctgctggccggcgtcggttcactcgcgacgcgaaaggacgtggagatgagcgcgataaccgtatccaccactgcggctggtgagcccgaggccaatcttgccgacttctgcatgctcctgcgcaacgaggtgaaagcatga

SEQ ID NO: 506773 - DNA, 1407 bp, Stenotrophomonas maltophilia
atgaagaataagctcacaggaattatcggccggttgcggcgtcccaaggccagaggttggctggacgacgatctgcctgagctgactgcagaccgcgcagtgcccgaccaggtggacgtagctgcagcgcctgcagggcgcgaagagcgtgccgcgcagcccgatatcgacacgttggtaccgcgccgccagtcacgcttggcaggaaagttcgccgcccggcgtgaggcacgccaagagcgtaagggcgggccagggcctgagtatttgactatcgtggccccggaggatctcggcgctgttaccgggcgtaggctgctggtctgcggccatgggctttttgcctccttgcaccccaatgcggctcggccaagcgatggcttcgtggatcagcctcctcggcgtgcgtccacccagctgcatgccttgaagtccaagggccgcggtccgcgtctctacattgctgtggacgagcgccttctgcatcagcccaaggcacgctacgccctggcactcgattactaccttcgctggggtttggcccacgccaagggagacgtggttctgctgggtggggcagaagctggtggaactagctacatcgatgcgctggtgttctcgggcggacagctgacggacctgtttgagcacgagctgcccgcctcggacgatcgtgagttcattccgtctctgaaggtgctgctgaagaagctccacgacgcgtacccaacggcgaaaatcctcgcgtccgccccactgccggactggaaacaggacggcatcgagtacctcgggctgaagccactgaaggggctgactttcaagcctctcggctcgcgcggcgaagcggccacgggcatgcgagccgcggttgtcataggcgttcttggactatgtgcgtacggcgctcagcttgcgcttggatggcgggcatacaccgacgcaggcttggcctatgaagaggctgtgaccgacccggttctggcaaaggctggcggcatcagcaatgcccggctggagctgctgcagcagcgcgagttctacatgcaggagcagcgtccgcaggaggccctcgccaagcggtcgagccagattgttgccggtatcgccgggctgccaggcgtccgtattgcatcgatcacatttgccgcgcggaagaccgcccaagcggccatgcccggtgaggtatctgctccaggtgatccatcaaccgctttggaaccagacgtggccatggagctgcttgtccagcaatcggccgattcggcgctgagggatgccgaagcacttatgaccgcgatcagtgcgaggactggcatgaggcttcgactgaagaaggcgcaaggctggtcgaccgaggaaagcacgggtgtgcgcaaactggccatcgaggggtttaccgaatga

SEQ ID NO: 506774 - DNA, 1059 bp, Stenotrophomonas maltophilia
atgcaacagacaatgcctttgcttgaacagcaggcatcggtggccgctctacgttcctgcttggcgacgggcatgcctgccgccgaagccgtagagaagctcgccgagttccaaccagcctacgccgatcaatggctcgaaattgccaaggatgtgagcaacggtaggcagctgtcagccgtgctgcagagcgtatggcccgacgccgcgatcagtgccatccgtgccggcgaggagagcggcaagatcgttcctgttttagagaaccttgcaaagaccatccagatccagcgcgaggttagggcggaactgagcaagctgctctacccggttgcagttttgctgggtgcgttcgttgttttcgccacaatgctcattaccttcgtgccgaatatcaccctccagctgcagcgggcagtaggcaactatggtgagctcaaaggcgcagccggattcggcttggccacccggcacttccttgttgagcattggatcgtctccatcgtcgtgctggtggctggcatctctgccctggtgcattggctcaggcagccagccaccatccgtgagatgaccagggttctgtcggatcttcccttgatcggccccggtttgtatcagctttggttcgggctgtgggccagctatgtcgctatggcatttgccgccggcctcccgacaatcgacgcgcttaaggccacaatcaacgtgttgccggaagccatgagggccggtgtccgaagtctcatcacggatctgtccgttcggcacatgccaatggatcgggctaccaacgtaaaagagatgcaagaagctgatccccgccggaaatggccgttctttctccgccgtgcatttgcggttgccgcacacaatggcgagttggatctagagctctatcgtgtcgctccggaaatgatcttcttcggtaaggaagaagtaaaaaagaccgtcaagtacggctatgtcgtggccatggcagcggcggcggcgatgatcgccagcgcgatgatcctcttctacgtcccgatgatggacgttttcagccgagttatgtga

SEQ ID NO: 506775 - DNA, 1845 bp, Stenotrophomonas maltophilia
atgaaagacactgacctgatcgccagttggggctggcaaaatcccccttcagacattgccgcacaggcggccttggcggcaagcgtgggcggcgacacgttctcggcctatgccgcactggagctcatcgattccgcaacgctcatgcacttgcgggaacgttgcccggccgacgcagacgcgatcgattttgccacccaggcgttcccgaagctccgcgcctacgaagaccaggttcgctcgctgactgtcgctacgccgtactacgagcgcctggcgccgatgacccggcatccgtgcatggacaaggcagaggtggtgcgcgaatgcaaagccaaagactgcgcggtgatgcagatcgagggcaagcgcgctgtcgttgtcttctcgtcctaccaatcgatgatgcgattcaagttggccggccgcacggccaagctgactgacccaatcgaagtggcgcttggcgatgagagtcgcctcgtagcgaccggcgaccgagatgatatctccgctgtgttgggtgacggtgtgcctgccagcgcggtaggagaagagcaggtcgaccgggtttgggactctcgttccaacgaaacccgcgaggacgaggagcagctggagctcgcccgccttctggaccacgctatcactgcccaggcgaccgatatatccatcgccccatggcagcaagggtaccgcatccttatccgtcgcctcggacggctcgtcaaaccgcgtacggcggccgcctgggacagtccagtagcccagcagatcatccgcacattggaggcgaagtcgggcgcaaaccccggtgtctccgcataccgtgaaccgcgggatggcgcctttacgtaccgctccgccgccggcgaagtgttcctgcgcctgagctttatgccgctcaaccatcggcgggacacgtccaacaagaagagcgtcagtatccgacttctgcccaccgctgaggacgcgatcgacctcgcggagttgcgcctgccacaagaggtgtcgtctgccgtggaggatgccgtccgcatgccaagcgggctcatgcttgtggtggggccgatgaactccggcaagtccacgaccttggcagctgcccttggaaggcacgcccagctgtacggcagcaccaaaaagcgggtcagcgtggaagatcccattgagcgcatcatccccgacgtcgtgcaggtagaagtgccccacgtgatgagtagcgaaatcgatgagaacaagcgattcaatcgcattctctccggcagcaagcgacacgatatcaacgtctactgcgtgggcgaggttcgtgatgcacagacggcatctttctgcgtcagcgttgcgagctcaggacaccttgcaatgtcgagcctgcacgcgaagaacacaatcctcgcctttgacattctcgccaaactcgtacccgaggacatgcggttccagctggctgagtcactgacactaattgtcagtcagcggcttgtcccagcgctctgtccgcactgcaagaagaaggcaaagccaactgccgctgagaaaaagcagtgggcgcactaccaggacatggaaggtgagaccactggacttccggcgacgatctatcgcgcaggggaggggtgcgatcattgcgagaacgggtatctcggctatcgatccgtatgtgaggttctgcctttcacccgtgctgtccgcgatgctgcatccgggattctcgacggcggcgctgtggcgaaggcttcccgcgatgcgatggccgataagcgcactctcacgctcgcaaagtccgccgccttctacttgaaggctggcgatattgatttcggctcggctgtgtatctctga

SEQ ID NO: 506776 - DNA, 801 bp, Stenotrophomonas maltophilia
atgtacgccacgtttatcgctgcggtcctcttcctgctggccacggtgactacgagcgtggcggtcaggtatgaagcgcgcactgaggccatgaaggaaagccgcgcccgggttgagcagactcggatcgcggaggctctattcgcctatcgggagcagttcgggcgtttgcccgactctctcgatcagttggcgtcctccccggggtatgagcagctgcgctcctatcgcaatgaatggcagcggtatatgcgcgcttcggatctcagcgatggcacatggcgcttcgagcgagcggcaagctggaccgtcgcgcggcgcgatggggcgaattctgtcagttccgagaacagctgcggggcaggggatttcactacggcggccagctggtgtggtcccagggacggcgtgtggcaccgccttgagacccgggagctgttctcggaggaaatcgcacaggagaagcttcgccagcgccgcacgctgcagctgttctctgactactggaccacgcgccaggcgtttcctcgcgtggcggccagtgggcagcagctaggcaccgggcagatgctcccgctgccggtgatggccggttatgccggcacagccgacagctgcagcggcgtgcacgtctggatgggaattcccctcgactgcgccgcgctgtttgacgtttggggtagcccggtcggctaccagtaccaaagcgacacctacgtgattcttgccagcgaagctccattctccgcagcagacggccggcgcgtcatcgtcgccagccccctcaacatccaaggctga

SEQ ID NO: 506777 - DNA, 579 bp, Stenotrophomonas maltophilia
gtgaatctcagcaacaagaacaggaaggtccgtggttttaccctggtggaacttatcgtggttgtcgcgctgattggcatcgtcgccgcgatcctgctgccgaagctgctgggcaacaccaacccggccaaggcgaccctgcttagccgtacgtcaacctcgatggttcaagcaatcaacctgatagcgatggaatgtggtgtctccaccaccgtcaacggcagcgtgattcccgctggtggcaagaacctggcagatgtgctcttcgagggcgagtcggccgttgcaccggccaagcagagctgctaccgcagggccggtgtgctccccatgcgagattccgtggcccgtgctggtaccggctgggaagtaggtgggttcccggtcacggtaaccggcggcggcagcagcaagatcagcatctcctatgccaacgttcccaatgaggtggtgcttcctgcagcacaaccgtacacggcaggcatgatccagctcgctgccagcgataccacgagcgatgtggtcaattacagcgtggagagcggcggcaaccgcacgctgacctacaagctgaactga

SEQ ID NO: 506778 - DNA, 1005 bp, Stenotrophomonas maltophilia
atgaagcgccagcgcggctttaccctcatcgagatggtgatcgcagtagccatcatggctctgtcgctcattatcctggcaccgatcttcggcaagttcctcgccgcaatgtcccgtaaccatgcagaacaggcgaagctggacaacatgcgcatcgccgacgcgatgcttgctgtctcgcagaatgagggtctcggtgtcctgccagcaccctataccggaggaggcctcaactcggccatcgtcaacacggcagacaactctgcagtgggtatcgcattccggcaatcgctcgctgaatctggcatcacgccaacggctataaatgacgacggtaccgacgccaggaatgctcgcgtctaccagcggctcagtggccttcagctttccacgcccctttactttcgttccgggccgttggtgacgctgacctacgactatggcgtcgtgtacctgacccgatgccccgcagctgattcgtcctgcaaggcgtcgggcaggcccggcgcatcacagacgatgacagcggcaaatagacagacttgggaggtggcgggaactgacctggcgccagtgttcgtgtcgagtttgcccgtgcagaagtcgatgctcgcggccactacccgtcgggtggaccgcgtgcgtgatgcgcttctgtcctattaccgcggcaagcagctcacggcaaacgcaacggataccactaattggtatccaggcaccggcctcggcggagcggcgccggcatccaaccaaggctgccgagatggctggtaccccttggacagttcagacgtcctccccctggccggtctctcccaaggggagttcggccgaaccagctggggggggcggatcgaatactgccgcgactttgatcctgcggcatcaaaaagtgcaaatgctccgcctcacgcagcggccatccgcttccggagcgacatttcacagggcgcggcgcccgacgccgcagttcttggcaacaacgtaatcctcactctctaa

SEQ ID NO: 506779 - DNA, 1722 bp, Stenotrophomonas maltophilia
atgcgtgtcatcaaccatgttgcacttgccgtcgcggtttcctttgccctgagtggctgcttctcgcgtgaagtgcgccgatccatcgatgatcgacgggaggaggcgaagaccgcctttgaacgcccgaccatcaccaacgatcgcaacacgattcaagcctctgagcgcctctatatcccgctgcgcaaggtaacgctggcccaggggcgcagcgcatggctgaccagccgcagggtcactctttcactggatgccccggtccccctgccgactgtgctccgctcgatcaccgagcagggtgtaaacgtggtctccggcctgccgctggacggctattcctggtcgggccaagtcactgccgcagacgcggaaactgctttgagggttgtgctgggaggcgttggcctcgactacgacgttgacgatgctcgccgtctcgtcaccattcgtccggttcagtccagaacgtggacattgaatctcggcaaccgctctacgaagttctccagcggtggtcagaactctgtcggattgaacgacaacgataccagcgtcaccaatgccggcaatggcgctgccacgggcagcaatttcaataaccttgggcggtccggatcttctaccgaggaaggggcgaagatcaccagcgaagacaatttctggaagtcgctcgaaaaggagctcgaatctcgtttgcaggtgcgcttgccgggtgctgcgggcggcgcgccggtcggcgtggcgaccgcacccgcagccggcgcggccgttgccgacgacggcctgaagaaggtgggcagcttcgcgctgaatccggaaacaggcgcagtgacggtttccgcgccgagctggttgttgcaggacttggacggctacatgtcccgcgtccaggcgatgtataacgccgaaatcaccttcaccggcgaactgctgatggtgtcgcgtacacggtcagacagcgagggtcttgacgtttcagcattcgctagcttcgcgaaggggcgatacggcgctgtagtgcgcaacaacgcgctcggcggggtgacgctttccttccccgagggagccaacaatcttgcgaatgttgtagctgagggacagacggtaccgggtgcccttatcggtatcgcatcgaaggcagattcgctgcagattttcaacgcttggctgtcggcagtcggtcgggtaagcgtggtgcagcgccccatcatcaccactacctccggtgtgccggcagagttcagcaagcaattcccatcctacttcaacttggtatcgcaggacgtggctgccggcggaatcagcggcgccgtcagcgctacgcggaatacgttgcaatccaagacgtttggcacgcagctcacaatcaacccgcgttatgactacggcaccgggctgatccgcgctcacatcaagctcaaccatgtcctgccgaatgggcagcagtcggtcagccagaccatcagtgttggcgattccttcaagacgatcaccaccacgattccacttgatacgaagcatgcgtacagcggcgaagcgctgttgcgtgacggtgatcttgtcgtcatcggtggtcagaaggaagagacccaatccctggacgagaatggcttgccggcgaagcagggcactatcagtggcattgcaggtaagaagtcggtgcgccgcgacgaggcaacctactactttgccttgcgcgtgtcggtaaaggctcgctga

SEQ ID NO: 506780 - DNA, 456 bp, Stenotrophomonas maltophilia
atgagcacccgaaccaccaaacgcgcggttgtcgccgcgctcgctgtttcattccttcaggcagccggggcaagtgccgccgatgcgcccgtggttgccaagtcgaagggcttcacagtggtagagaacgcctcgtacacacgccctgcgccaccgcccccgccgcgcccggccgaacgccgttacgacgttccggcggagacccctctgcgccaagtgttgcagggctgggccgccgccgagggctgggccgtctactggccgaccgcagctgatggcagtgagtgggtcacggagattgcggtcagctacaccgcaaccgacttccagcaggctgtaaccaagctgatgggcgcgctgcccggcaaggtcggccttgccgcaactttcaatcgcgcgaactcacccatgctggtgcatgtgagcgaatcgaccagcatgcaggagattccgtaa

SEQ ID NO: 506781 - DNA, 291 bp, Stenotrophomonas maltophilia
atgagcatgcccccttatgtgcatcatccattcttcctcgccggccgtaatggcgccttgtcccaagtgcagctggacgatctggcccgggccctggccttgtcagaggaagtatcgccgtgcccggcggcagcgcacaccgctttgctgatccttcgcagcacgctcgcaaaggcactggacctctccgtcaccgatctttttaccgccaccggcacgcaccgggcggatctgtctgttctaccggaaatgaccctacccacccaagaagaatccgaggccaccgcgtga

SEQ ID NO: 506782 - DNA, 675 bp, Stenotrophomonas maltophilia
atgggcgaattggcgcgcactgtcgcacaattgcgacacgaaggcaaatcgcgtacgctggcgcccccaagcccaaattcctttccgcgcatgcgttatttcggtggcatcgcgtcggcttctgccgcgctcatgcttgcagctgcccctggggcacatgcaggccctgctgtggttatcagccgtgacatgctcgccctggtcacggagcagacgaactcgtgtccaccggaccgggtgatttttgtgacccgtgacagccgggtggtagccacatgtgatggcccgccggagccagagccgcgcatccttgctgaggcactggacgtgaccggcgatgccccgtcagttctgccttcgccacaacaagcaggcgcgccggatcaaacgccggtgttcgttgcggcgccgatgcccaagtggtccgtggagcagggcgaaagcattcgagacgccatcgccgcatggcttccttcagattggacgctggcttgggacacggattccacgcccttagcgaatgcccgctttgaataccaaggcgattccatggcggctattgcggatctattcgaccgccgctcactgtggccagaaatgccgctgaccgcatgttcgttcccgaaggaacggatattgcaggttcgcgcaggtggggagtgcggcgccccatga

SEQ ID NO: 506783 - DNA, 369 bp, Stenotrophomonas maltophilia
atggccatcgaggcaatcaagagcgacgagattttcctgtttggttctcggcataggccgcgaggagtgatctatgaggcggaattggccgagcttgtcggccgcaaggcaattgagcagatcaccgtaactgttacacctgcgggctactggatcgctgttcttccaagcgcccgcgcgaagttcctgacccgtgaaaaacaaaaagtagtgaggataaagccgactgaagaaaaaggatttcttgtactgcacgcagttaaacggtcgcaggtgcgctactacaagtcgctcgacaccttcatccgttccgtaaccaactttggaccactcccaaaaatgctggtccgtactggaccgccgatctaa

SEQ ID NO: 506784 - DNA, 300 bp, Stenotrophomonas maltophilia
atgagctcgaccaccaaaacgattctgatgtacgcagttgtcagcaccctagcggtgctgtttttcgttttcccggatgtggcgttcgctgacggcggctcggccgttcgcggcaagctggattctgcgcgctccagctacgccatcccgatcgccggcggcatcatcgcgctcggcgcggtcggctcggtcgtcatgtgggccctggatcttgtcgagtggaagtccatggtcaagtggatcatcgccgccatcctggttggcgccattgctggtatcgccatcgaagtgatgagctga

SEQ ID NO: 506785 - DNA, 318 bp, Stenotrophomonas maltophilia
atgacggatcacgtgttcggcggtatgacccgtccggccacggtcgcaggagtgccccaacttgtctttggggtactcctgatcgtcgcgatcctggccatcatcctaccggtccttttccgactgtccttcatctggagcatcggcggtgcggtattcggcgtgctcggcttcatgtcggcccgcattgtttgcgcggaggacccgaatgccttcgagtatttgaaggtcgcattcaacttctggagaaaggcgcaaggccggaccgttgcgcgcggcattgaaacgttctccgcatcgccgctaaggaagcgctaa

SEQ ID NO: 506786 - DNA, 2394 bp, Stenotrophomonas maltophilia
atgggcgaactcgacattctcagtgaaccaagccttgcgctggccattccttatgaaagccatatcgagcgagatattgtctccctggacaacggcagtctgctggccgtattgaagttcgaaggcgttttcgctgaaacggccagtgacgaagaactgctccgctggcacgacagtctctgttcaatgctgatggcgattgcatcgcccgacctcgcgctgtggcgtaccacgcaccactatgcgttgaaggacttcgcgccaggggtatttgaccctggtacgttcgcgcatcagttcaacgaagcatacaaggcgagatgcctgaaagaaccgttgttcgccaatgatctatacctcgccgtactcatccagggggccggcagtctgtcccggatgggcaagggaaaaggcggcttccgacaggcacgcgacgaacaggcagcgaagctcgatggtgtttgcgtccgcatcgaggagtctctgtccagctacaagccgcggcgtctcgggatgtaccgtgagcgaaatattgagttctcggaaatttatgagtatctgacgctcctgctcaacggccgcaaattcaagacgcctgtcaccccgcatcgcgcgggtgatattctgaatcgatcccgctactacttcgcaaagggcgccgacacgttcgtgcggcagtgctccggcgagcgcgagtacggagcattgatatcggcaaatacctaccccagcggatacctcaacccagggcgcctcaacaagacactttcactgccgttcgaatacgtgatgacgaacagcttcacgtttatggggcagcaggaggcaaagaacgcggtcatcctccaagagcgccggatgagcgctaccgctgacgacgccgtcaacgagatgcacgcgctgaaggagctgaaggagggtcttaccacgcgcgcaattgcgctcggccgtcacgatctgagcatctgcatcacagcgccggatcagaagaccttggccaggcgcgtagcgactgcggaggagaattgcacggacaacggcttcatcatggcgcgtgaggacctcgcgctgaaggctgcgctgatggcgcagcttccgggcaactacaagttcaggccgcggcgcgctcctatcaccacgcgcaactacgccgcgctcgcggccctgcacaacttccctactgggcgtcgcgatggcaaccagtggggagcggccacgacgatgttcctcaccgaaggcggcagtccgttctttgcaagtcttcacgacatgcgtaaaacgaagacgcgcggtggttcggaatccgaggaagacaaggcgccaggcaacacgctgattctcggccctatcggcggcggcaagacgacgctgcagacaaccctggttgctcagtcggacaagacgaagccgacagttttcacattcgaccgctcacaaggccagtacgtgtttgtgaaggctatgggtggtgtgtataaggttttgcagcgaggtacagagactgggttcaacccgttctctctcgaaccgaacgcagagaacattgccttcgcctcgggcctcgttcaacgactggcagctggcaatgtcggtatcacgtcaggtgaagcgaacgaaatccataagcgcacactgtttgtgatgacggacgaggttttcgaggctcgcaatctcacgcacctgttcaacgggctaaatggcctatccggcgaggctcttgaacgactgtcccaatggactgaaagcggatcgaacgcgtggtgcttcccgtcatatgccgatcaggtgaatttcgttggcaatcgccacttcggatttgacgcgaccaatttcttcagtgacgacgccacacgtggcgccatcatgtcgtacttgttccatcgcgttaattccttcatgggcagtggcccttcgatcatcaatatcgacgagctgcgcgcctttgtgaaggatgactacttccgcgatttcatcgaggacactttgctcctcaacagaaagcgagacaacatcgccattcttggcacgcagcaggctaatcaggtcttggagtcgaagattagcgagacgctgatcgaacagaccaccacgaagttgttgctacccaatactcaagccaaacctcaacactacatggatgaagggctgggtctgtccgtcagtgagtttgatcttattcgtgatgttctgccaaccaccaatccacgagcgttcctatttaaacagccaggcatcagcaccgtttgcaatctcaaccttgcagggatgaacaaggagctttccgtactaagtggcacggataagttgaacgccgtaatgaagctcgcaattgctgagtccagtgacgatcctcgctcctggctccccatctactacgacatgctgaggaattga

SEQ ID NO: 506787 - DNA, 675 bp, Stenotrophomonas maltophilia
atgcgctactcatattctgtgttgctcgccgcacttgcattcatcgcacccagccaggccttcgcccagctcgtcacgatggacccgaccaacttggtccagaacatccaacaggtcaagcagagcgtcgagcagatcaagaagctcaacgaccaggtgcggaacacaaaatcccagctggaaagcatgaccggaagtcgcgggatgcgccgactggtcacagatcagacccgcgccgtcattccgcgaaactggcgcgaatcgctggacacgctcggctcagaaggccagcagatcaagggaatggtcgactccattcgccgtgatattggctcgattggtagcgacaacttgaagttcgcaccgggcaagatttcccagcagttggagcagtcagcgagatacgaccttgaggcctggggacgcgcgacacagctctacaacaccagcaacgcgcggtttgcaaagctcgattctctcggcgatgcacttgacggtgccaccgacctcaagggcgtcatggatctgatggcgcgccttcagattgagacaaatatgctcctgaatgaaatggtgcggatgcaagcagaaatggctgccaccgatcgcgagcgcacgttgaagaacgaacaacgcatccaaggcgaacacgcccgagccatgaattcattctaa

SEQ ID NO: 506788 - DNA, 378 bp, Stenotrophomonas maltophilia
atgaagatccgcaccctcctgattctctcctctctcgccatcactatcagcgcatgcggcagcggcagcggcagcggcagcggcagcggcaaggacagtaccgcggctccagaatcggcgcccgcgctcgcgccggcaacggcgaattccatcgtgctcgattcggggagaaagatcgtcgtaccggagggtgtggacgtgttgcgcagcggctggacgtaccgcagcttcactgcggctgaggcagcggagattctctcggcctgcggccgggaggaacatcggcttcttaaggaaggtaagtccccggatctgcagaagccgcttctgtgggtttgccgccaagccgctgctggcgccgagaacttcaaacagtaa

SEQ ID NO: 506789 - DNA, 1131 bp, Stenotrophomonas maltophilia
atggctgctgaagcctgcaattttgacctccaggtcgctgagttcctaatgagcgactccatgatgaatctgagcaatcaggtgtccactgtatccgggcaggtcggatcatgggcagcgggcattgccactgccggctgcgcgctatacagcgtgctgtgggtggtcgcgttcgcaacgggatcgcagaatggagatttgttctccttctttaaatggttcgcgcgtgccctgttcctaatcgtcctgggcggaactggatcggtctacaacgagtatgttgtaactacgctgtgggagacacctgcggaggtggcgcagattgtgtcgggctctggcatgggcaatcaatcaatccgctatgacgccgagggcaagatcaacatgggcacggcattggaccaagccgcgtcaaaaggaatctgcgccggcaccgcgctctggaaagcaacttccgcatggaagcctattgagtcccagcagtattttatcgctggcctggtagtcatcatcggaacggtcatctttgtggcgctcgccgcaggcctagccttcatgggctacgcctcgctcgccattgttctgtcgctgggtccgatgttcatcatcgccgggatatgggaggcgactcggcctatgatggaatccttcctgcggaccgccttcaactacgccctctatggcgtggttctgatggttatcgttggcctcggtatcgggctcgttcagcagttcggcagcagcacgattggaagcatcggcgagaacacggtggtcgatctagctgcagcaatgagcgtgtcgattcgtgccctattcgcgtttggtatcgcgtcagcgctgcttttcaaagcggacgacataagtgcctcgctggttggcggaatttctatgggtgccgctggcaccctgagtcgcgccatgaacaccgcaacctcgccggcgaaggcagcaatggccgccggccgcatcgcaatgaaccccgcccgcgcagcgggcgagttcatgggcggcacattcttcaacgatccccggacgggtgctgcacgctaccgcggcccgatcgataccgcgagaaatcacgcatctgcgctggccagtgctcgcgcaaagaacaccatccgaaagtaa

SEQ ID NO: 506790 - DNA, 762 bp, Stenotrophomonas maltophilia
atgacggaccacgacaacaacagcagccatcctgccgatcaggtgacactggatggatttaccgccgaactactgaaggacgcgaagcgcttcgatgtgagcgcattggagcggtctgaccgcatagtcaagcgcatgacaatcatcacgctcggcgccttcgcggtaacggcagttgcagtcgtggtggccatcatcgcgaccatgagcgttcgcgaggtgcagccgtatgtgatgatgattgacgagtctaccggtacagcgaaggagctcgtcaaggttgaatccgaagagtggtcgcacggtcaggcgatggatgccagctacctcggccagtatgtccgggcacgcgaagaatacagcgatgcccaggcgctctttaactacgagcaagtggagctcatgtctagcgggccggtaatggccgagtaccgtcaatggattgacccggagtcaaacaagctgagcccgatggcgctctatcccaggggtattgtggatatcgagattacaggcgtggtgcgcatggggcgcggtgctgcgcaggtgcattacaggcgaaatgtaaagggtgtaccgaacccgcccaagcccatcagctatatcgccacgatcgagttctcctatctgacgaagaacatgaccctagcggcacgagtgcgcaacggcctgggattcaccgtcagctcctacagcgtggatgagtcggtggtcgggacgacggttcagcccatgcagaatgctgcaggaggcgagcgctga

SEQ ID NO: 506791 - DNA, 870 bp, Stenotrophomonas maltophilia
atgcttcatcgccaagccattgcgctcgcgctgcttttctgcagcgctgctgccgccgccgcgccggccccgagcctggacaagtatcagcgggagtcaaagtctcgcttcgacccccgtgtgaagattgtcgagtacaacccactggcaattgtcacgttgaagcaagccctgggttactcgacccatatccagctcgcggcagatgaggaggtcatcgatgttgctgcgggcgacacgttggcctgggaggttgccccttctggcaaccacgtttttctcaagccgaaagaggttgatgggcgcacgaacgttgcgatcgtcaccacaaagagaccgtatcagttcgtggttgatgtgttgccaaaggagaagcttccggacagcgaaatgacgctgtttctcgttttcatgtatccggaagatccactcgtaaaggtcactgagcaacaggggaaggacgacacacagtcgatcagagcggcgctcaaggattcagttcaggtgaagaacacccgctatgaggcctgtcgtagaaatcggcagatcaatccaatcagtgtttgggatgatggtcgtttcacctacatgaagttccgggctggccagtcacttccgaccgttcaagccatcctgcccgatggccaggagggcatgctgaatttcaggatgggtggtcaggagggcgacggcatcgctgatagtcgcaccatgatccttttcgagacagcgaagcgcttcaccgtccggtacgggaaaaccgagtcctgcatcatcaacaggggcgaagttgctgcaccggaggatcttcccagcgatgactcaggctctaccaagagcggcttcctcagagtgttccggagcaagtga

SEQ ID NO: 506792 - DNA, 1251 bp, Stenotrophomonas maltophilia
atggcagataatatcgaagaactcgacgtcccaccgctgaagtcgggcggcggaatgagcaagaaactccgcatcatggccgtcgcggtcgtcgtattggttatgctctgcgtgttcggtgtatacacctggaattgggtgaaggaaaagcgcgccgaagaggcgagcgacagccctcagacggcaggcgaggtaaagagcgagaaccgcgacacggatgtgaaggctccgccagcattcgtcgcgcaggcaatggctgatcgagctgctggaagcccatcagaggcagcagatcccgcctctgccaatagccctaacggtgtcggccaagtgggcggcgccagcgactcgctaccggcgccgcccgctgccggaggccggcctgcaggtgcggagggccagtcggacgcggagaaggctgaggccgaccatcaagcaaggcgtcagcacgcaccggtgctggcgttttcccgcactgccccctctctggccaacggcatgggccaaaagcaagaagcacctgctgaagaggccgacccgtaccaggaaatgatggcggccgcgttgtctgcaagcacgcgaggagacaagcccgaggcgcaggcgacacaggtctccctgaaccagcagctgaagagtgaggcacgtgtgccatccgtggcgtcccggcaaaccaacaggtcgttcatggttcgacaggcgacgatgggccgctgcaccatgcggactgccttcaactcgcagctctctggattcgccagctgcctgttgtccgacccgctctactccgcggatggccgcttcatcatggccgaagctggctccgaggtgatcggtgagtatcagaccggccaggtaaagccaggcataagcagggcgtttgtcttgtggacgagcattgagacaccgcacggcatccgcattggtctggatagcccggccacggatggaatgggccaatccggcattactgggcgtgtaaacaatcacttctggaagcgcttcggctcgggcctgctgctgagcgtcgttgatgacgccattgctcagacggcgaacagcacgaccaactaccgctccacctcgcaatccatgaatgaagcggcggcgatcgcggtgcaatccaatgtcgacataccgccaacaatcaaggtcaaggcaggtgcagtggtgaacatcttcgtcgcccgcgacctcgatttctctagcgtctactcaatgcgtcttgccgatggcgccccaggccgttaa

SEQ ID NO: 506793 - DNA, 1044 bp, Stenotrophomonas maltophilia
atgagtattagtcccgagaagtggaacagcgtccgggtcagcatgcgcgagctggccccgatcatcgagaacgctgtcggcgaggtcgtaatcaatcgaccgagcgaagtgttgctcgaaactcctgcaggctgggagacgcgtgagattaagagccttgacttcgacaggctcatgtcgatcgccaagacaatcgccacggccagcaagcagacgatcagccaagaatacccaatcatttcaacaagcctcgacactggcgagcgtgtccagatcgttattccccctgttgttccagaggggacggtcagcatggtgtttcgcaagccaagcaggatcgatatcccgtttgaggcctactgcgatggtgacttcttcgcagacgcgcggcgcagtggtgggctcaggcgagagcaactggcatcaccacaactgttgccccacgaacgagagttgtctgaggtgttcctggacggcagtttgggggacttcttccgactggcggtagaggtcaggcagaacatcgtcgtcagtggccctactggttctggcaagacgactttcatgaagtcgctagcgaacctcattccacaccatgagcgcctggttacgatcgaggacgcgcaggaacttcgcctgccgcttcacgccaacaaggttcagatgtactacacgcgtggcggccaagggatcagcaaagcaaccgcaaaggatttgctggaggccaccttgcgaatgtacccctcgcgcgtgctgctggcagagcttcgtggtgaggaagcctggtattacgtcagaaacgtaatgtccggtcatcctggtagcgtcacatccatgcacgcgtcggatgaactaaccatgtttgaccagctgacgctgctcatcaaagaaagtgccgccggcgcaaccatcagccgcgacgatctgaaatcaatgctggttgctgcgatcgatatcacgctgcaggtcgagaaaaccaagaaagggcgccaatgtgttggtgtctactacaaccctctccggaagcgaggaattgatggctga

SEQ ID NO: 506794 - DNA, 1983 bp, Stenotrophomonas maltophilia
atggctgatagggcgacagtgaagcgttggtttggcatctcacttttgattccatttctcgcgcttgccacgtgttggatcgcgggcttcgcatttgtgctctggaactggagggagttggcattcatgccaactcccctcacgtacttccagtatctggaaaagttctggcacgcgcgcgaactgcgtctctcattcgtagtttcaggtggtgcacctgcactgctgagtctcatactgattacagccgcattgctgtatcggccgcgtcccaccctttacggtgacggtcgatgggccaacctcagcgagctggaagaagcggagatgatcgaacaaccgcagggcgttcccctgggcatgttcaaaggaaaagtcatcacatcgcatcctgagcatcacgtcgagctcaaggctgcaaccggtaccggcaaaggcgtttcactggtcatcccaacgcttctgctctggaagggctccgttgtagtcaacgatattaagggcgagaacttcgaactcacctcgaagtatcgccagtcccgtggccacaaggtatttgtgttcaatccctcggacaaggaacgccggacccaccgttggaaccctttcgagtacgtcgatcgcgacgtgatgctgaggaacaagggcattggtcgaatcgccgcaatgttctggaatcccgccgaggatgaaggcgagccctggaaacctggtgcgcgcgacctgttcctgacggcttctctgtggcacttggagaatggcttggaacttacccttcccaacgtggccaggttcggggccatgatggacgaggaggaaattaaaaaggcggtgaaagcgcgagaggcggctggcgagccatacccggagaatgtcgttgagggcttcgtcaagttcttctccaagcccgataattaccgagaatccgtgcgcggtgagttcaacactggtatggaaatcgtcaccaatgaccccttggtaagccttgcgctgagcggaaacgacttcaacctgcggcggttccgaaaggacaagatggcgctgtatgtcgtgacacctggtccggatcttggccgcctgcgtccgctgctcaatctgatgtggcagcagatcgctgccgagaataccgaaacagagttcgcgcaagaccctgagtgcaagcaccagctgatgctgctgaacgatgagttcacctcgctgggcgatgtgtctgaggtcgttgacccgatttcctactaccgctcctatggcgtcaagctggtcactatctatcaaacgcagagtcagatcgttggcgtttatggcgagtcgcgcgcctctacctttcgagacaatcacaagacacgtgtggtctacacaccgacgtcgaaggaagaagcaaaactcatcagcgaggagctccccaccaccacgagctacagtaagagtgagtccggccgcaaattggagcgcaagacgcactccaagaacgaagcggcacgagccttgatgatcccggatgaagtgcgattgctaccctccagtgaggccatcattttcttcccgggttactacccagcgagaatcaagcgcctgacctacttcgagcggaaggaactgtactcgcgtctgcagagtgtcagtcccattcttgccagaaagcggatcttcaagccgaaccgaaaggactacaacaaggcacgtcaagcgggtgagctgcgcattactgtagctcccctggatctaccggctgctcccacccccaaggcgagcagctgggctgcgcagtccactgccactttcaggcctgccactgcagccgaccttgcgaccttgggtcaaaggccagccaacgaaattcgtattaatggcaaggagcttcccgccttggcagccctgaacgcctccccacaggaaaagcgggcgcacgccgcctcgttggtgagcatgatgttcggaaatgaagagggcgaggatgaggatagcgaccttatagggtcgtga

SEQ ID NO: 506795 - DNA, 678 bp, Stenotrophomonas maltophilia
atggctaccagtaaacctgccgcaccccggcagctgaacgagcttgttcgcacggatggcgcaacgtcgcctgcaggtgctcagggcatctcttccaagtacgcgaacagcttcctgcaggacgggaacgcttaccgttcggcaaaattccccgaaaagatcgagttcatcgaccgcaaagaccgtctcgcgacgttcggccgtgtcagcgacttcaccgtccgtgcgatggtcgacaccgcgatcgagcgcggctggaagtcgttcgatgttcgcggcaccaaccccgtcttcaagagcatggcctacgtcgagggcacagtccgcggcgtagaggtcactggccacaagcccaacgacaaggatctgcaagcgatcgaccgccggcagacgcgcgaggcagctcgcgccaatcctgtggtccaagcgtttgcagccgccaagaccgtcaaagaacagaacgctgccatcaagcagtaccctgaattggcggccgccttcgatgcccgtaatgcggctcaaaagatggtgaaaggcagcggcgcaagccccgaagaccaggcggatctcatgaatcgtgtgaacgacaagattgcccgtgccgttcacgagggcaagccgatgcctcagatggaagtgaagacgcaggttcagctgcacgaggttgagcgcgagtaa

SEQ ID NO: 506796 - DNA, 1641 bp, Stenotrophomonas maltophilia
atggctaagaatccgaacaccgcgctagcggagctggtgaacccgctcgacggactgaacaagcaacaggtcaagcagcttgggcgcgcggttcaacgcgttgcagagctgaccgcaaagctggaaaaggcgcaaaaactgatcgccgattcccgctttatggtgaaggcgaacatttctgcgaaggagagtgccaaggctgttcaatccgctcgatcggcgcagacggttgtcgaaaggtccgaatccggtttgaaggggctcgcagattccttcaaggacaagccacagctgcaggccagcctatcgctgtatcaggccctggagaaagcagctggcgagaacaatccagctgcccgcagcatgctcgatgaggtcaaggctgacctcactatcgcaactgcgccggtgaagcgcgagcgcaaggttgatgggcctgcgcccagcaaaggcccgatcagcgggctggagcgtttgctgaacggcatcggcgcggcggttgctgccaagaccacccccaagatcggcgagctcaccgaacgcgctcggggtgaagctgaggacgagcttgccagcggccggaagcgacgggagcctaacgagttccaggaacctgcccggcagcctgttccgtatccgccatcggtcctggccaagttcaccctgcgcgggaacgaggtcatcaacaagcgtacggaagatgttgcgttcgttgacagcggccgggagctcagagtcaagggggacgtcagcaaggacgtcgttgatgcgttgctcgatacggctgtgtcccgcggctggtcgccagtaaagctgtttggcgaaaaggcgtttaaggccaccatgtggatggcttttgcgagcaagggtatcgagacccagggatacacgccgtccaaagaggagctgtcggttgctgctcacaaccggactctcaacggcgtcgacaaccgaatcgccggtgagccggggaagcaagatcccattacttcaaccaagctgagcggacgtggcgaagagctgcccaagaagggagaggccggcctggcgggcaagatcctcgaacacggcgaggccaactacaacttcgacaaggatgagaacctcagctatttcgtgaagctggccacccaagccggcgagaagaccgtatggggcgtggatctgaaacgcgctctggaggaggccggcgccaagacgggtagccaggtgaagttggaaaatctcgggaaagcagctgtgtcggttgtgggtgcactgcgcaacgaaaagaacgaagttgtcggacatgggaccatcgatacccatcgcaacagctggaaggcttccgtggtcaaagaagtggccaaggccctcacccacaacgagaagctgtccaaggcattcgaggaagccacgtcgaccaggcagcagagcaaagccgtcgagaagttcccggagctggcacaggccttcgcagctgtgacggtcttcgagaagagcttgaacgtcaccagcatgccgaagggtgaggcgaaggatttcacagaccaggtgcgcgggttgatttcggagcgcttgttggctggcaagccactgcctgaagtccaggttatggatcaggagaaggaacgtgttcgcaacgacggccaggaaaggtaa

SEQ ID NO: 506797 - DNA, 261 bp, Stenotrophomonas maltophilia
atgaacgcaaccacgattgacaccccgatttcctacggcctggcgctagaggtcctccgtggccatcgtatggaacaggttggcatggcgcgacggaaagtgcgggagctgcgcgcccgtgcagcagctgctggggatatcgagcttgccgagcaggcactgcaggatgctcgcgaagcggttggccagtgccagcgcatgagtgacgaccaggcccgaaaggttttggccgaagaggggattgacctatgcaagagttga

SEQ ID NO: 506798 - DNA, 1107 bp, Stenotrophomonas maltophilia
atgcaagagttgacgaaggaagcacgcgcagagctcatcgataccgcgtactactccctgagcggcctcacggaggccgcaaccaaaccctcgctgacgattgttctcggtcaagccggcacaccgaccgcgcttgtccagcgcgaggtggaggcgctgcgtcggccagagggtggtgcggtgctcgtcagtggatacgacatggaccggcttgccgctggtgaaggcttcgaggccgatcaggttgattctcaggcgctcaccattgagctggttgagcgcgctatggctgagaacgtcaacgtcgtcgttacgccatctccgaccactgaggaaatgccgctggcactgatcgcagctgcgcgccgcaacggctacgaagtcgagattgctgccctggcggtcaatccacgggctgcagctgcgcagactttccagcgcagcgtgatcggcggtgctggcttcagccagctcagcgatagcgtcctcaccgctgaggctgccaatgtgggcaaagcgttgcgaaggatcgaggccaacggtatccctgccaagatcacgttgtacgacagggccgctcggccgctggaccgcgatccgagccaaaccgcctcggaagcgtttgaaatggcaagaggcgttatgcgcggagctgacaagatccggatagcggcggcttgggaagaagtggttgaggctcacgagcgagctggcgctagcctgccggagaacggggaacggctgcgccagcaagcgcactacgtactgcgccagagtggcccggccgcgatgaacttcgatgacaagttccccgaacatatgaccaccagcaagaaccttgcggagcgttacggcaggactctggcgagacatttcgaggctgacgacagggccgctgtctctgcgtatcccgaactgacacgcgcgtttattgccaagagcgtcgccgaacgagtgggcaatgaaatgaagatgcctgaaatgatcgccgaggcgaacgaacgtatacgcggcgcactcctaacaggagggaagatcgcagcgattgaagtacagagcgaagagcgagaagccgccaagcagtacgcgtttgacctggaacgctag

SEQ ID NO: 506799 - DNA, 324 bp, Stenotrophomonas maltophilia
gtgatttttccaatcgtcgccaacgtaagcactgcgcccgccgaaatgtcgagtgggccgctgaagctgatgccgttcctggcgaactctgcaggtggtattgatcctggcaagctggtgctcgcgctcacattcgccagcatcgctgtccttttcatacagttcgtgatcgctaagctggtgtggcgggcttcaaccatgcagatcctcaaggtcggtgcgatcagcttggtaggtctgctttgcgctgctacgccattcacgctcttcttactaccggtggcactcatcggttcccatttctgggttgcctatcgcggctga

SEQ ID NO: 506800 - DNA, 156 bp, Stenotrophomonas maltophilia
atgctcgcgagcaagatcacccagcgccgccagagcctccccttgaccctcgactccgaacggggagcccagctggcgcggaagagcgtggcgatgttcggggaacttgggcatcttggatggtcaactcagaatcggaatcgcatgtatagctga

SEQ ID NO: 506801 - DNA, 1167 bp, Stenotrophomonas maltophilia
atgagtggtgctgagctttcggatgcagagaagacgcttatttttcggcaggacatcctgcctgatttgattgcggacgaagaagatcgcaccctgccagaagttccacatttcgtagtgttgggtggacaacctggatcagggaaaacgggggttctagcagcaacgtttcgtgatcttcaaacgcaaggtgctacctgggcaatcaacgcagacgactttgccgcgtatcaccctcgctacggcgctctgcaggatgagcatggcatcgaagcggcggatatggttcgcggggtaactggccagtggatcaagtccacgatcgagaaggcccagcggaggcgggtcaacgtcgtgttcgagtccaccatgaggcagtcgggcgtagtgcaagatacgctgcgtcagtttcgtgcgcaggggtacatcacccatgcaaaagcgctggcagtacgaccgatggagagctggctagggaaccacttccgtcgcgagcaacttgcagctgccggcgcgttgtcgcgcttggctacgcgggagtcgcatgacgccgcagtgctgggcagcgttgaaacgctgcgagatatccagaagctgagattggtcgaccgagttatgatcgttgatcgtagcgatcggcctctctacgaaagctctttgaccgaaacaggatggagtaaccctgtctcggcagcggagcaaatggaggccttgcgtctgctgccgatggatcaggctgaagcttctcgccacatggagagatgggaaaaggtagagcaactggctcgggcgcgccatgagcggagctctaccggatcacgtccatcaggctccccgggagaagctcgcgaggatctggcgcagattgcagctgcccgcgcgagtgatgcgtttgggctagtcatggcgggtagccttcccgagctaagggccactcgcgaactgcccgctgttggcgaggcgcttttggcctacaaagcggcgtgtggggtcttttctcaactggcccccaaagatcctgacctgcagcgagagctgatccaccaggcacgggatgcactacaggctaggctcgctgccgggcaagttaagaactttatcgatacagaccgcatctctgtccgcgcggaggagatggaggatgatcgggacgagccgcatcgctaa

SEQ ID NO: 506802 - DNA, 261 bp, Stenotrophomonas maltophilia
atgagtgagtttggttacgagcagacggtgaagtacgaagtggcgcgcgacttggtgaacagtcggcgtgcccgcgttgcggcggagctcggcgttgaacgggctcggtcaacccaggacgcatctacgatcggtcggctgcaggccgacatgcgcgcgttggctcgcaccatgcgccatctcgatgtgcgcaatgaaagggctttggatgaggttattgctgcctacaagcctcacgctgggtacgcgtctgttgcatga

SEQ ID NO: 506803 - DNA, 957 bp, Stenotrophomonas maltophilia
gtgaccgaagaacgcgagtcgtccatgaccgttgcccgtaagggcaagcttcagcgtctcacgacagccattactgaaattcgctgcgccgagcccgagggcgacgatatcgccttcctgctgccgacgctgtgtcatgtggcaatgccgcgctcgcgacagaccaagcgagtctttgagcggcacagcggtagtgcttctttgcgattggaagcaggggcgttgtgggatggcgagcgctggattgaccagccgctgccctacggcaccaaaccgcgcctgctactgcttcacatcgtccgctcgtatcttcggactcaggaccgctctgaccgcatgatcgacctgggcaagagcgcgaaggacttcctagaaaacacattgggcatcaacgccagcggcggccggaacggaggcctgaccggtttccgcgagcagatgaacgccttcgccgcatgccacatgctgctgggctacggttccccggacggatctgcgaagacccagcgtgctgcgcccatcgtggaggagtttgaagcttggccgagccctgctggcggcagtggtcaaaagcatctgtggccgagaggtctgcaaatctccgagaagttcgctgcgtccatcgcggaaagctcagtccccctggacatgcgcgcaatccgcgctctgcagaacagtgcactatcactcgatcagtattcgtggctcgctcaccggctgtggcgcttgaagaggccgcagaacctctattgggcgaatcttcgtcagcagttcggtgaagaaatcagcgatcccaagaacttcaggcgaaatttcatcagctcgttgcaatctgtattggacgtctatccgcaggccaaggtgtccataatccagggcggtatccagttgaagccgtcgcagccaccggtgccaaagaaggctgtggtaatacctttcgagttgaagaccgcatag

SEQ ID NO: 506804 - DNA, 798 bp, Stenotrophomonas maltophilia
atgtcggatgggtcaatggtgattgggctggatgaggtgaagggtgtagccaaggagtggtttgcccggcgggaggtcggaccgaacgggaggcagcagttctccaaggagaccgtgaacatcgttttttctatgccttcaggcacgcctcggggcccagttacagaagcgacacgtgcggcgggcgctcgtatctttggtggccagtttgactatgtaatggtcacccacaccgatacagatgacccgcacgtccatctcactgtgctagccaggggggtagacgggaaacggcttttgcctaaccccgaagaccttcaccgctggcgcgaagtgttcgccgaggagctacgtgagcgaggggttgaggcggaggctacgccgcgagagattcgtggagtggttgaggtgactccgcgcaatgcgatctatcagatcgagaaacgattgaccaagaaaggcgagctcgccgacatacgcgttgaggagctccatgaggccgtactgacggtcactggtcagttggaacgcggcgaaaggccttgggaaagtgctaccaggaagaggttggcaagagtgcagtccggctggttgctctatgcagagaagatcgagcagctggacgatcctgagctcactgagcaggcacggcagattcgtgccttcgtcgcgcaaatgcctgagcctctcactaggcgcgaacgtgttgagctcgaagtggcgcgggccgttgaaatatcaaaggtcgctccagataggtccaatgctcaaggtgagaacgaacagggcaggggataa

SEQ ID NO: 506805 - DNA, 591 bp, Stenotrophomonas maltophilia
atggacaccacttcctctactgttctgaccgacgccccctccaacacccccgaggcgcggcaacgtcgctcgctgcgaatggctccgcagctgtggcaggccttggatgacttggcgcgggctgaggggatttcgaccaatgcgcttcttgaggtgatcgtcagccgacttgtggaaggaagtagcaaggccgaacccgagcggcccaaggcgaccgtctcggcggatgactacggtggttcgtacaagggggtctacatcaggttgaagccgatggaccgggccgcgttcaaggaacaggcggcagccgctggttacacgatgacgggatggctgaccgcactcgcccgcgcttcagcgcgaaaggggccgctgtttgtgcgggcggaagtggaagggttgatcgaagcgttacggcagttcgccgcagtggggaggctcttgaacaccgttgttcatcaactccaccggtcggggcgctgggccggcaacctggatctttacgctaggctcctggagaacgtgaagcggagcagggcgcgcattgaggatgcgatcgcacgcgctcatgagcgcgctgagggaatttga

SEQ ID NO: 506806 - DNA, 1134 bp, Stenotrophomonas maltophilia
gtgagcaacaacaacaacaagcagaagagcggtcccaagccggcgccgactgcacttgcagggtctcttgcgaggctgggcaaagtttcagacatgatgaagcgtaaagatccggtcccctcccctaccccatcgggcgaggccgctgcgcctacttctttccgtctcgatcaggtccaccctgatcccaagcaacctcgtggggaattcaacgaagagaagctgcaggaactcgccgagtcgattcggcagcacggcgtcattcagcccatcgtggtgcgggagcaccctaccctccccggccagtggatggtcgttaccggtgaacggcggtggcgcgcgtcgaagctggctggcaaggtcgagattcctgccgttgtcaccgagctcactgaccaggaaatcgttgcagtacagctgatcgagaaccttcagcgcgaagacctgagccctatcgaggtcgcggagggttatcggaagctgcagcaggaattcgaccttacccaggaagcggttgctgagactgtcggcaagtcgaagcagaccgtcagcgatttcctcaaagtgctggagatgcccgccgagtttcagcgtttgctctcggaaaagctggttcgtggcgctgccgacctgaatgcactgtggcgcgccaacgggaagcagccggatcgggttgcagcactgatcgcgggcgcaacgcaggactcccctatcacgcgggtcatgatccgttccattaccaaccccgatcccgtcgatactccgtgggacggtaccggcagtccggccggccggactccgccaagtgacccgtcggcgaccaatcccggtcccaacggcggggcggttacacctccgccgacggagactggttccggttccggctccaatggcgagggcagcacgccgggagccgcgccgaaaggcaagcccggcgctggtgaatcgggcaaggtttcatcgggcaatgaactggtctacacgatcagcacggctcagaagaacggcgactggatcgcgacagttcgtctcggcgtggaccggttgttcggaaccgagccgacagcaactgccgccgaggcggtcgccaacgctgcaacttggcttcgagacaacgccgaagctcccgcctga

SEQ ID NO: 506807 - DNA, 786 bp, Stenotrophomonas maltophilia
atgcttagtctggccgtagcaaatcagaaaggtggcgtcagcaagaccaccatcgttacccacctcgcgtggcacttggccggtcagggcaagagcgtcctcttcatcgataacgatcctcagaagaacgcgtcgtctgtcatggaggcgtatagcactcctgctggaatctcgacctctcagctctaccgctcgaccgaactacctgacctgattccggaaccaggcgtgatccatctcatcgcggccgatgacgagctcgcggatatcgagccccagggtaccgccgtgttggattcgttcaatggcaacgttcgcgccttggctgagagctttgactatttgctgatcgacgtcgccccgaccattggtaatcgaatgctcgcagccctcatcgccaccgatgccctgctgagccccatcgatcccgagcgcttcgccatcgatggtgtggcaacgatgctggaaacgttccgcaatgcggaggaaatgaaactggatgccaatgccaatggcgccaacttcccgccgacgcggctcctgggtgtgttcctctccaaggtcacgcgctctttcccacgccaccgcgcgaccgtgcaggagctggcggatacctatggcgggctgatcttgccgaagtggctgccaacacgctccgcaatcggcgattcgcagaacgccaacgtcccggtttgggacttgggtaccccggccagcaaggaggccgcgaaagagatgcgagctgcatgcgagtacatcactgagctcttggagggcaaggcgtga

SEQ ID NO: 506808 - DNA, 153 bp, Stenotrophomonas maltophilia
atggtgccggtttcctcgcgcatccgtaagggcctgtggcaggacatgcgccgagaagcgttcgagtcgggcatcccgttgcaggatctattcaatgaggcgtgccgccggctgctggatgagcgtgccgcatccaagaaggagcgcaagtga

SEQ ID NO: 506809 - DNA, 288 bp, Stenotrophomonas maltophilia
atgggtttgtggatcttcgcgtacgacgacgcggaccatgacgaaatcgagaaagcctgcggcgtagccgcagagtttttgaagaccggcggtaccacgccggctgaagcatacgacgcagcagagatagcagcagacctcagctttgagcacgacggccctaccccgaatggtgacctggtagtgctgtggttcaaggccgaattcgctgcgttcacttacctgcagagcgtcacaaacgagtggccgaacggagcgagcttgatctatgtcgaagacaacatctga

SEQ ID NO: 506810 - DNA, 708 bp, Stenotrophomonas maltophilia
gtgagccggaacctgcggggtcatgaatacgcgtggccggcgatctggccagcgcccctgcagctgaggggtgggggtgcaatttacgcgtgcgctgctgcaccgcatgcaatgaatacgcgcgtggcctccctcggggctagggcgccgggccgccgggggaggggtgcaatttacgcgcagccagaggagcgccaggcagggagccggagcctatggggtcatgaatacgcgtggcctgacggtctggctagcgtccctgcagctgaggggtgggggtgcaatttacgcgtgcgctgctgcaccgcatgcaatgaatacgcgcgtggcctccctcggggcagggcgccgggccgccgggggaggggtgcaatttacgcgcagccagaggagcaccaggcagggagccagagcctatggggtcatgaatacgcgtggcctacacctggccggcctgcttcccagctaggggagggggtgcaatttacgcgcggccccttgcccccccgctggtgcccgcggggcgagcacgagggacatgaacacgcggggcctgcacctggcctgcctccttcataccccgggaaggggtgcaatttacgcgtgcctgcgcgaaggccttctacccgacagaggcctgcagcagcgaggacgatcccttgccgctgcaggcagcgcctatcaagaaccgagtaccgatgccgatag

SEQ ID NO: 506811 - DNA, 354 bp, Stenotrophomonas maltophilia
atgaacatgacctaccgcgcacaaggcgaagcaaacacctacaccctttcccagggcaaccggtggattgcagcgcttcgcttcaatggggagctgttgccgatcacccaagagcacatcgtccaagcgttcgccatggcgctggataatccgctggccgatcggcaagcctgtgccgctatcttggccggcctacggctcctgcagcggcaggatgttctcccggccgacattgatgacgtgttgactgacggtggccaggtcgaccgcattaccgagtgtgacattgaccggatctgcgaaaggatcggagtgccgcagatcgagctatcggcatcggtactcggttcttga

SEQ ID NO: 506812 - DNA, 333 bp, Stenotrophomonas maltophilia
atgctccgcacgatactgagtggtggcagtcaagcggacatggcggcagcggagcagctgctggcggagtacgcaacgtacacacgctcaccggtcgtttccatacgtgcccaggacgagctgcggaacgtcgcttacgtgacgattcgcggaagtcgcgtgtcatgcaccttggccaatggcacccctgccgcgctgagctacgccggcgtgccgcatggcatggagaccgaaattaggctgcgcttggagaatgccggcgctgctgaggcgctgactgccctccaggcggtgggccgaaagggctttgaatacacccttttcgcgaagtga

SEQ ID NO: 506813 - DNA, 399 bp, Stenotrophomonas maltophilia
atgccagttgtgaatctgacggtactgcggaacttcatgcctgccggcgagctggcggcaatccgaagctgcctgactggtgaagaggcgccctacttccacgcaaagctgatcgaattcagcgagcgaattcggcgcatgccgaaggtatacgagcaggatggcaagggcgactccgcgatagctcaccttcgctacttccgcgggggaaacacctggtacatcaccgagcgggatatcaccccggagcaaattcaggcattcggcatggtggtccgccatggccaagagcctgagctttcctacatcaacgtggccgagctcatcgctgccggcgcagaactggatctgcacttctcgcccacttgcctcgcccagctggaagccgtggccgcctga

SEQ ID NO: 506814 - DNA, 183 bp, Stenotrophomonas maltophilia
atggagcagctacgcatgaacactcagccgaactggaagaaacggtacgaagagttgatggatctgctgagcatcgcatcgccgctactggccgaggtggagcgcgatgggctcacgaatgagctgcagagctgcctgggggggctgcgcgcattgatggatgcagagctgacccctgcgtga

SEQ ID NO: 506815 - DNA, 675 bp, Stenotrophomonas maltophilia
atgacgaacaccgcaaccaccttcgatcactcgcgacagcaggagcaacagcaacagccgaagccggctccaggagctcgcaaagcagccatcaaggcgcaagccaaggccgacaaggcgagggcgttgcgatcagcgcgggaagggaaattgtcagtgggggagctgatgtacctggcggcggatgatggtttgaccgcagtgattctctacaccaacaagcagggtcagccgtgcgcttgtggcttcaggaggagttcgctgaaggcagcttttgcctaccgttactgcaacgcgcaggagcgcgagaagtacgtcagcgactggctgacggctgagaacacccgcattgctgagaaggcagcaatcaagggctcccactctttgaaggtcggcgatgttctctataccagttggggctatgagcaaaccaatgtggacttctacgaagtcaccgccgtgcggggagccgtagttgacctggtggaaatcgcccaggaccgaacctcatgcgagcacggcatgcagggcaagtgccggccacgcaagggtgagcacattggctatgcgcagatcggcaagcggccgaacgcgcataaccaggtgcgcatcacaagcttcgccaccgcttgcgtgtgggatggccgggagaaggcatggagcagctacgcatga

SEQ ID NO: 506816 - DNA, 465 bp, Stenotrophomonas maltophilia
atgacgatagatcacgaagtgcagaagcgggtcgccgcgatcgtggagaaggcagcgaaggcacgagggcagaggtacgaggtcgaggcctgcgaggccgcgatctacgccatgcacgaggaaggcgcgatcagcgccaactacagggatttgctgttggcgcgagtaggaaacctgttggtgccctggtcggtcgagtcggtcgagaactaccgggccgagacggagcggcagattgcagcgggtgggttgacgcctgccgacattgccgagctggggctggtattgctgcagctggtcgagcggcggttggtgacagcggacgacgcgatggcgatgcaggcaaaggcgctggtcgcgctgttggccgcgccgccggcgccgcacgttactgtcgtgcatgggaacctggtgcaaaacggcatgaccatcaacgtcggcggccgcgggaagcggcagccatga

SEQ ID NO: 506817 - DNA, 663 bp, Stenotrophomonas maltophilia
atgagcatcaccgcgcaggaggtctttgccgacgagcgggcggcggtactggctgacgcagcagcagccggcgataagcaggcggtcgcagccctcgcgcgcgccggctgcaatgtcaacgcccgcggggaccgcggcgtcaacctggtgcagtgggccttcctgcaccagaacatccagggcatgacggcgttgctgtcggtgggcgccgaccccgcaggggcggacgaccacggcaacaccgtcgtgcattacgcggcagcggccgagaacccggagccgatggccgcgcttctggcggccggggtgtcgccggatctacggaatccggcgaccggcgagacgccgctgttcaccgcgatcatgcacgatcgcgagccgcagttccgggcgctgctggcggccggtgccgacgtggatgcggtcgatgccgcaggcaatcggcccatccaccaggctgcaaaggtcaatgacccggtgcgcgtgcttgtgctgctcgaagcgggcgccgatccgctggcgatcaatggccagggcgtgacgttccagcgatacctgaacgcgatggaggaccaactgcggaccgtgccggtgcgcgaggccaaggctgcggtggacgcctggctgcgcgtccatgggattgcaattgaatccgggccgtag

SEQ ID NO: 506818 - DNA, 489 bp, Stenotrophomonas maltophilia
gtggccaagccccatcgttggacacgggcgcagctggcgcgcctggggaaggtctatgaccgcgtgctggccgcggaaatcggcgtcggagcggacaccgttcgggaggaacggaaccggcgcggcatcaagccgttgcgcgtcaccgctgccaagcatcgcgaggttgaccgccttgtcggcaagctccccgacgtcgagattgccgagcggctgaaagtgtcggccgcgctggtataccgccggcgcatggcggtcagcgataagcggggcgagctggtcgaaagcccgcgcgtggcgcggcgtttgctcacgctccaggacgcgcgtactgcagccgccgaacacggcggcagatgcctcgcatcgaagatgggaggcacgatgcggtggcggtgtgcagagggccacgagttcgaggcgaccgcgcaccgcgtcatccgccggcgccaatggtgcgggcggtgcagcgggcaggtgaaaggttga

SEQ ID NO: 506819 - DNA, 471 bp, Stenotrophomonas maltophilia
atggaaaacctcacgctctggaacgacagcaccgcggccgagaacgaagtcctcgcacaggccgaagccatcctgcggcgcaggatcaacgacgggcagctgctttcagatcccgcagctgcagggcggatgcttcgctaccgcctggcagggcgtgaccgggagttcttcacggtcatcctgctcgacacccgccacagggtcctcgcggtggaggagcttttcgccggcaccatcgacggcgcggaagtgcacccgcgcgaggtcgtcaagtacgccctcgtccacaacgcagcagcctgcatcctgggccacaaccacccgtcggggaatcccgaaccctccgccgcagaccgcgccgtgacggcgcagctgaaacaggcgctctcgctcatcgacgtccggctcctggaccacttcgtggtcggaagcgagggcgccacctcgatggcggcgcgaggctgggtctaa

SEQ ID NO: 506820 - DNA, 996 bp, Stenotrophomonas maltophilia
atgaccaagatatcaccactgccgcaggcgatcgaccgcgaactggccgatcttgccgctgcggtctacgaccagagcatccagcaggtcggtcgctggcgccgcgactacgacgccgcggtgtcggccatcccggccggcatcggcccgacgtcgaagcctgacccgacctccgggttcaaggccgctgtattcacggacggcgacacggcggtcttagccttcgcaggcagcgagcgcgagacgcgcgactggctgaccaacttcgcccagggtctcggcatggacacggcgcagtaccgccaggccacgtccttcgcgcaggaatgcaaggtccagtacggtgacaagctgatgctgaccggccactcgctcggcggaggccttgcctgcgtcgcggcggccgcgacgaacacgccttgcgtcaccttcaatcccgccggcgtccaccgcaagacgctggaacgcgctggcgtggaccctgacggcttccgcgaggccgccgagaacggcctggtgcggaagtacgtcgtcaagggcgagattctggaccgcgtgaacaagctcccgctcgtacccaaggcgcacggcgcggaaatctcgctcgaagacccgggcaaagcctggagcttcaacaagcattccatgaccaccatgcagcggtcgatggacgcggccgacctcagccgcgtcagcgtccccgagtccgccctgccccacgctgacccccggcaggcggcgatggccgccgctttccgcaaggacccgtcagggtccagggcagtccgggatttccccggcctggccaccgcctacaagatgctcgaagcggccgaggccaaagcctcgggcatggcccagccatcgaaggaccggctcatgggcgccatgcgcgagaacctggcacgccgcatcgagcgcggcgagcagatcccggcccccaagcagacgcagcagctcgtcgctgccacggtccaggctggtcccgaacgctga

SEQ ID NO: 506821 - DNA, 372 bp, Stenotrophomonas maltophilia
atgaaaaggaagtttcttgcagctgtgacgatgttggggtgcgtgttcgcggtgggactggcgatggcacgggaaccggtgcagcaggtcgatactagcgtcctgccgccggagtaccagcaggtggccaacacgcagatgagcgacgacgacacctgggcgtgcgaggtcgcgctgtgcatggcgaacccggacggcccgatggccgttaccgagtgcgtcaagcccatcgaaaagctctacaagcacctggccaaggggcgcagcttcccgaagtgcccgttcgtgtccggggggaacgacggcggcggtagccccggcggcccgggcggcggcgacgggcgggaacgcgaagcccagcagatccagtaa

SEQ ID NO: 506822 - DNA, 786 bp, Stenotrophomonas maltophilia
atggaactggatcggaaagaactgcaacgcatcgcgcaggcggaatacacagagatccgcgagaaagtgccaagcaagctcgcggtcttgtcgagtccaaagctgctggtactgccggatcggttcatggcgaaactcggcggagctgcggcgatttacttctggctctgcgtcagcccgaccttgttgaaggccccgcaagacgtcaggcaagccgtcatcgcccacgagtggggccatatcgcatccggtcactgcaacgcaacgatcggctctctggtgatggcgctgctgtacgtgcttatcacgctcgcgacgccgccaggtacgttctggccagcggtcaacctggtgctgctgggcatgatcggcgcggtgatttactgggccttgaacgggctgcgcgagttcgaggcggacgagaaagctgcggaagccgtgggcgccaagaacatggcgcacgcgctgcgttggatcgtcaacaagatgcgcgacggcgtgcagacggacctggtgcaggaacggctgcgtcggctggatgagcgcgtcgcgcgcgaggacgccgaaagcgggacgtggcgtccgatgaaagcgtggccggtggatttcgccggattcacgacggcagagcaggtgcgggcgcggctgcaggagatcgagccgctggtgctgcgcgggcacgaggacatttgctgggcggcctgggaggccgagcagctgcgcgtgctgctgtgggaccttgaagcaggctccaccgacgaagccacggaggaacgccgtgcgtaa

SEQ ID NO: 506823 - DNA, 573 bp, Stenotrophomonas maltophilia
gtgcgtaaggacgagctgcaggacaaggaccacacgctgctgttcgggccgtatacggcgccggcctgcaaggtcggcgacgagctggacgacgcgcactatgggcgcgtcgtggtagcgggcttcactgacgcgcccctgagctggccacggccgcggcggaaagggccgccggcgccggtcctgaccggccagctcctcgatgccatccgccaggagagcgcctatgcggtcgcgtactggtggggcgtgagcatcacgcaggtgcagaactggcggagctggcttggcgtcgagcgccgcacgccgggcaccgcccggctgctagccgagaacgccaaggcgatgcccgccgacgttcgcgaggcgatcgcggaacgccggcgaggcaagccgcagccggcgcacgtccgggccatgctcctggagcacgcgaagcaacccaagtcgcccgagtggatctcgcaggcgacgcaatggctggcagacgcgcgcgagcgcgccaggggcgacccaaggcagcgggccgacgcgcggaaaaatgtcaatagttcaattaaatcaatgacttag

SEQ ID NO: 506824 - DNA, 507 bp, Stenotrophomonas maltophilia
atgggcgctatgagcaagccgaagaagtcagccaacaagccgcggccagggaagaagccgcccaagccagcgccatcggcgcaggccaagcgcaggaagcccgagataccgcccagcggggaagcgcaggcggtttctttgtttatgccgtcgagccacgaggagcgcgccaagttggcgcgctccaggccgttgacggcggcggtgctggaggagctgctgcgcgaggacaaggggctggcgatcaagttgatcgagctgcagcagtccccgctgatttacgaagcggacctggcgcaactgctgcgccggaacgaagtgcgccagctggtgctgacacagactaaggacggatgggaggcgcaggtcctcccgatctggaagggagattttctgacgttggtatcactgaaaaaggagaagcgccgctacaaagacctggaccgactgataagcaccatcaccatgcacgggccgttaccgcccaccatcctcataggggaataa

SEQ ID NO: 506825 - DNA, 342 bp, Stenotrophomonas maltophilia
atgaaccacagtattgcaatgcaacgcgccaaccgggtggcggacctgctggaccgcaaccgtggctacttcatgatcgcgctgacggtggtcgtcggcctgatgatgctgttcgctcccgacctcgcccacgcgcagtcgatcatcgacgagaaggccgacagcgccctcgcgtggattcgtcgtgcggtctatttcatcctggtcgtggcggtgctcggttccggcgtgttggccgcgttcggccgcatgagctgggccacggtcggccaagtgctcatcggcgcgatcgtcgccggcgttgcgacggaagttgtgtcggccctgtacggcgacggctga

SEQ ID NO: 506826 - DNA, 354 bp, Stenotrophomonas maltophilia
atgtccgagcacgataactcggcatcgggggtccgcccggaccccctgttcggtggcctcacgaggccaccgacgttcctgggactgccggtggaggtcctgctggcgatcgccggcgccgcgaccgtggtgttcctggtcgcctcgctgttcgacggcgggatcggctggaagatcgggccgctgggcttcggcgtcgtgctgtacgcgatcgccaggctcatgtgcgcgaaggacccgcggtccttccgctacctgttcctgcggtccctgacgaagaacctccaccggaaccgggcctattggggcaccggctcctactcgcccctgccccaccgcaaacggaagcactga

SEQ ID NO: 506827 - DNA, 2424 bp, Stenotrophomonas maltophilia
atggcattggctttgaagcaaccgcaggcgaacgcgacccggcccgttggcgagtgggtgccgtatacacggcactccaccgagcacaacgtgcggacggacaagggcgatgtgctgaccgtgttcaaggtcgccggcgccgcccacgaggccgcggacagcgacgacctgcaggcgtggcacgaaggcctcgccggcatgatgcgcaatctggccgacggccaggtggcgttctattcgcacgtcgtgcggcggccgcggaacgagtttcccagcggccacttcgaggacgatttcgccggccatctcaacgaggcctacaaggcgaaagtctccgacgcctcgctcatggtcaacgagctgtatttcaccgtgctgctgcggaaggccacgggcctgtccggctggatgcagggcggcggcaagaagaccatgcaggaccagatcgaggcgatggccgaccaggacgcgcgcctcgatgaaatgtcggacaccgtgctgtcgagcatgggccgctattcgccgcggcggctcggcgtgtacgaacgcaacggcggcctgtattcggaggtgttggagttcctggcgctgctggtcaacggggaatggcagcgcgtgcccctggtgaggggacgtgcaagctatgccatgaccaccagccgcctgtcgttcggcgccgagcagctggaggtccgcactccgaccgaccgctatttcggcaagctgctggcgatcaacgagtacctgaccgagcgcaccgagacgggccatctgaacaacctgctgaccctgcccttcccgttcgtgatgacgcaatcgttcgcctgcctgggcaagctcgatgcgcagaaggcgatgaagaagcagcagaccctcatggagaacgcggaagatcctgcggttacgcagatcaacgcgatccgcgaggcgcaggacgacctggcgtccaatcgcatcaccgctggcgagcaccaccagagcatcctgctgctggccagcgacacgaagacgctgaatgatcgcgtcggcatggcgcggtctgcgctggccgaggacggcttcttggtgtcggtcgaggacgactgcaacgaggccgcctattgggcgcagctgccgggcaatttcgaggtgcgccctcgcccggccatgattacctcgcggaacctggtcgccttcaacagcttccacaactacccgatcgggcggatgagcgggaaccagtgggggcctgcgatcacgctgctcaagaccagcagcggcacgccgttctatttcaacttccacctgcccccgaagggcaagcgggcggtggacgaggagaacaccgacgagcgtgtgcctggccacaccctcatgctcggcccgaccggcgccggcaagaccgtcatccagacgttcatgctggcgcagtgcgagaagtacaagccgaccgttttcaccttcgacaaggaccagggccaggagatcttcgtcaaggcgatgggcgggaagtacctgaccctgcagaacggccagcccagcggcttcaacccgtgcgcgatgcaggacacgccggagaaccgggtgttcctggagcagctggtgaagcgatgcgtccgcggcgacgatccgacattccagttctcgccgaatcgggagcgcgagatcaccgaggccatcaacggcatctacggcgcgatcccgcacgaccagcgcaggttctccacgctgctgcagttcttcgacccgaccgatccagacggcgtgtatgcgcgtttccgcaagtggtgccagggcgggtcgttgggttggctcatggacaaccctaccgaccagatcagcctgaccggcacgcggcatttcggtttcgacgtgacagccttcttggacaacgacgaaacccgcaccgcgacggtgatgtacctgttccaccgcatggaacagctcatcgacgggcgccgtttcattctcaacatggacgagttctggaagatgctgctcgatccgtacttcgagaagaaggcgctcgatgcggtgaagacctaccgtaagcggaacgcgatcgcactgttcggcacgcaaagccccggcgacgtgctgtcgtccggcatcagccaggcgctcatcgagcagtgcgtcacgcagctctacctgccgaacccgaaggcggccaagaaggactacatcgacgggttcaagctgacgcaccgcgagtacgaaatcatcaaggatgaaatgcccgagcagggcatccgcggtttcctgttcaagcagggcacggcgagcacggtgtgcgagttgaacctgcgtggtttcgatgacgagctggccgtgctgtccggcacggcgtcctcggtcgagatcgccaacaaggcgatcgagctggccggcgagaacccgcaggcctggctgccgatgttccacaagctgagggtcgagcagtga

SEQ ID NO: 506828 - DNA, 690 bp, Stenotrophomonas maltophilia
atgaagatcaaggcactcgctctctcggtggccctgggcgtcgcggccatcggcggagtcgtttccacgccggcaatggccacgggcatcccggtcatcgacgccgccaacctggcgaacgcgatttcgcagtaccagcagatggtccagcagctgacgcagctcaaggcgcagctggaacaggcgcagcagcagtacgcggcgctcacgggcggccgcggcatggccaacctagcgcgtagcaccggcgccatcccccgcaactggcaggagacgctggagtcgttgcagtccggcgagctgggcaacctgtcgaaggaaatccgccagacggccagccttctggacgaggatttcttcgccgacgtggaccaggcgatcaaggacggtttcgacgcaaggatggcgtcgcataccgatcagcaggccatgaaccagaccttctacgacacggccacccagcgggcgcagaagatggagcagctggcgaaccaggtcgattccgcatccgacctgaaagcgatctcggacctgcaggcgcgcatcgccatcgagtcggcgcagctgaataacgagcttatcaagctgcagtcgctcaaccaggtcgcacagcagcagcgcgagacgcggcagcagcagatgcaccagcgggcgttccagacgtccttcaagtacaagtccgccaactga

SEQ ID NO: 506829 - DNA, 360 bp, Stenotrophomonas maltophilia
atgaccaccaggatcatcctcgcgtccgcggcagccctgcttgcagggctgctcgctggatgcggaagcgagccagagaacgccaccgacaagccgtccgagcagcctgctgcgcaggtcaacatcctcgatggcccgatcccgtcgtgcgaacggctgacggcaatggacgatccagcgatgaaggcctaccgcatcgcggcacaccgggaatgcgccaaggcgcgcagcttccaggaaaaaatggacaacgtgggctgcatggtcacgcataagaagaccacggagtgcgccagcaagatgaagggaagcgagctgcaggcctggacggcagagcggaaagaggctttgggcgaataa

SEQ ID NO: 506830 - DNA, 1077 bp, Stenotrophomonas maltophilia
atgatcgcgcggttcctattcgaccaggtaggaaccgcagtaacgagctttgccaacgagggttccgcctcgctcatcgcgttcatcggccccttggccgttgtgctgctgacgatctacgtcctgctgtggggcgtggcgatggcctcggggcaaatctccgagccgttcaccgacggcatgaagcgcatcgtccgcatgtgcatcatcgtcggcttcgccctgacggccgggatctaccagagcacgatcgtggatctgttcaaccaggcgcccgcgcagatggcgaatgccatcacgcaaggcaccgatttcgcgcgcgactacgacaacacgaacgacttggccgaaatgctcgacaacacgctgcaaagcggtttcgacattgccggcgagacgtggaccaagggcgaggaagaaaactcggagagcatgatcggcttgagcggcacgggcctgacgtaccagttcctcgcgatcctgctttgcctcatcgccgtgctcatcgtggcggttgcggcaggcatcatcttcgtggcctggctcgcgctcgcggtcctgcttgcggtggggccattgttcatcatgatggccgtgttccccgcgacccaacgctggttcgaggcctggcttggccagaccgtgaactacgcgctcctgttcgtgctcatcgccctgtcgtgcgccttgatctttcaggtcctggaaacatacctccagaccttggccgactacgacgcgcccatgtacgaactgctcatggtctgcctgcgtgcggtcggcctgaccatcgcttgcatcgcagtgctcatgcaaatgtcctcggttgccgcctcgctcgcgggcggcgccgccatccaagccgccaacgtcgccggcaagctggccggcatggggatggctgccgcggccggcgcgcagtggatgttcggcaagcaccgcacgggtggcgagtcaatgaacgatccggctcggagcaacttcacccgtatgcgtcaaggaatcaccagccccgtgcgctcgggattggaaatggcacgtcgccgctttacctcgaacaccgctagacagggataa

SEQ ID NO: 506831 - DNA, 234 bp, Stenotrophomonas maltophilia
atgaaacttacgtcgattttggtggcgctcgcgggtgccgccgtgggactggccggctgttcttcgatgccgaaggcaccgaaatgcccgcgtggcgagtatgtccaggtcaatacgccggactgctacgtggtgatcgaggaggggccagcgaacgcgccgcggcggaccagctgcccggtaaagactactgaaacgaggcagctgcagctgatccaggagacgacgccatga

SEQ ID NO: 506832 - DNA, 699 bp, Stenotrophomonas maltophilia
atgaagcccaagatgaagccggaaaccaacctgcagcactacctcgacgcggccaagggctgggagagcgccgagatcgccgcggtcaagcgcagcgagaagcgcgcctggcgtgtggcgatcggtgcgggtgcgatcgcaggcctggccgtgctggccgtcgccctgctgacgccgctcaagacggtggagccattcgtcgtccaggtcgatcggatcgggtcggccagcacggtgacgctgctcaacacgaagtcgatcagcgccaacgaggcgctggacaagtattggctggccaggtacgtcaactaccgcgaggaatacctgaaccagacgagctacgggaacttcatggcgacgcgcctgctgtcggcgcagccggtcggcaccgcgtatttccagcaggtcaatcctgagaacccgcagtcgccaacggcacgctatggcacgcgcggcacggtggagatcgaggtcacgagcatcaccttcatcggcaagaaccacgcgcaggtccgcttcatccgcagggagaagcggcaggccgatgcgctgccggtcgagtcgcgctggatcgcgacggtggcgtaccagtacctcaacccgccgttgaaggaagccgatcgcctcatcaacccggtcggtttccaggtgacggactacaggctcgatcccgagacgatcggcgcgggaggcaactga

SEQ ID NO: 506833 - DNA, 936 bp, Stenotrophomonas maltophilia
atgaagacgcaccttgccattgccctgggcttggccttgctggcgccggtggccgcaacggcggcgaccaagccagtgggtggcgcctacgatcctcgcgtcaagacggtggcctacaacgaggacgacgttgtggtcatcgtcggccattacggtttctccacgaacatcgagttcgcaccgggcgagaacgtgcagagcatcgccctgggcgactctctggcgtgggaagtcgcgccgcgcggcaaccagctattcgtgaagccgcgcgaggacaacgccacgacgaacatgaccgtcgtcaccgaccagcgcagctatcagttctggctcgatgccgcgcaggcctcgaacaagggtcgcggcgccgaaatgttcttccgggtgaagttcagctatccgcgcgaggaagccgcccgcgcccgggcggctgccgaccgccagcgggcagcagccgcgctcgccgagaccatcccgccgaagaactacaactactgggcatgcggcaatccgcggctgcggccgacggaggcctatgacgacggccgtttcacctatctgcgcttccctggaagccaggagatcccggccgcctacgtcatcaacagcgacggcgcggagacgctggccaacggcacgatgcgcggcgaccagctggtcctacagaccacggccgccaagatcatcctccgcaggggcaaggccgtggcctgcctggagaaccgcagcttcaactggtacgggatctacaacactacgggcaccaccagcccgtcggtgcgccgcacgctcaagggcgacgtgcaggaggctccggtgctgccggcgacgccggcggacggcgcgccggcccagccggccccggccgcgggtccggccctgcccctcccgcttcaacagctgatgcgtccgacgacggagaacgacgatgagtga

SEQ ID NO: 506834 - DNA, 1170 bp, Stenotrophomonas maltophilia
atgagtgagaagaacaacccggcgatcggaccggatgatggctcggtggcctcggtcggtgaggtcgaaggcgatcgcggcattccgcaggttgggcgcaagaagccagtcacgcggatctggtggatcatgggcgtgggcgtgctgattgtgtgcctggtcgcgctcgccgccgtcgcaggcctgaacaaggtcaagaaccggaacaagggcgcggaaccggagaaggcaaacgtcaccacgaacgtgccggagctgtccgccagcgccttcgcgacggacgagccgccgccgctgccagaagggacggcaccggctcaaccggcgccgtcgtccgcgcctggcgcccctgcagcgcaaggcgagccgaagctgaccccggagcagcagaaggccctggacctggcggagcgccgcaagcgcgctcctgtcttgggcgtggccgggtcggtcagctccggccagggcgacgacgagggcggcgacgaccgtgcgcgaggcaatggctccggttcgttgggccaggcgttgaaagcgactcgcttgggcgcggtcagcgccacgcgactgccggaaccggacctgaccatcactgcgggcaagctcctgcagtgcacgctggagacggccatcgccaccgacgtgccgggcatgaccagctgcgtgctcgcgcaggacgtgtattccacgaccgggcgcgtgctcctgctggagcgcggcagccggatcatcggccagtaccagagcggcacggtccgccgcggacagagccgcgtgttcgtgctgtggacccgggccgagacgcccaacggcgtcttggtcaacctggactcgccggcgacggacacgctcggccgctccggcgtcgagggcaagatcaatcgtcacttctgggaacgcttcgggtccgcgctgctggtgtcgctggtggacgacgtggcgtcgtacatggtggccagggaacgcaacaactcgggcaacaccacggccatcaacttcggcaacacggcggactccagccgcgacgcggcggcgatcatcgtggagaactcggtgaacatcccgcccacgttgaacaaggcacagggcgaaagcattggtatcttcgtcgcgcgggatctgtatttcggcgacgtgtaccagctgcagcccacgaggaccttgcgatga

SEQ ID NO: 506835 - DNA, 1071 bp, Stenotrophomonas maltophilia
atgacccctaccggccgcgataccaacggcaacgtgctggccatgcccggcaccgagtctctggaagcctatctgcggccgctgcgggcaattctggccggtgagatcaccgaactggtggtcaaccggccgggcgaagtctggacggaaagcagcaccggctgggagcggttggaggtgccggagctgtcctatccgcacctgcgccagctggcgacgctcatcgcgcacacaacgggcaaggggatcaacgaccgcaacccgcgcgtctcggccgcgctccccaccggggagcgcgtcgaggccttgatcccgccggcgtgcgagtccggcaccgtcagcctcacgatccgcaagcccagcacgacccgtttcacgatggatgactacgaggcgatgggcttcttttcgcactggcagctcgcgccggcgtcgatcaagctcgatgttgaacacccgcatctgctggaacacgagctgcagctggtcgagcacctgcggcagcgcaacctccgggccttcctggagctggccgtcacgacgcggcagaccatccttgtgtccggtgccaccggcagcggcaagaccaccttcatgaaggcgttggtggacctgattccgtcggacgaacgcctcatcacgatcgaggacacgccggaactgtccatccaccagcagcccaaccgggtccacctgttctacaccaagggcggcggcgaaggggacctgagcgccggcgacctggtgtcggcggcgatgcgtatgaagcccgaccgcatcctgccggccgaggtccgcgacgaagcggcctacttcttcctggaagcggccaacaccggccaccccggctcgatcacgtcgctgcacgccaatagtgcggtggcggcgatcagccgcatgattaccctcgcccgcaaggcacaggaagccaagggcatgggcgacgacacgctcaaggaaatggtgctgtccaccatcgacctgaccctgcaggtttccaaggtgcccaccggccgcgcgatcacggatatctactatgacccaacaaggaaaagcgcctttctggattag

SEQ ID NO: 506836 - DNA, 1824 bp, Stenotrophomonas maltophilia
atgatcgtcctggtgctgctggtggcagcagtcccgggctggctgtacgcggcgggctacctgaccacggcaatcctgttccgcggcgccgaatcggcgccgcaggtgcagctgaacacctggccgaactactacaagcaccatcgcgaggtgaagaaagtcgccggcgcgttgaagctcggcgggctgggcgcgacggtgccgttcgccatcttcatcgcgctcatgttcatgcgaccgaagcaatcgctccacggcgacgccaagtgggggacgcggcgcgatgccatgaaggcgggcctgctcgaacaaccggacgacggcatcatcgtcggcaagctcggcaacgactacctgacggcgagcctgcagcagtatccgcacgtcatgcttgcggcgccgaccggctccggcaagggcgtcggcgtggtgatcccgaacctgctcaactggaaccattcggtcatcgtgctggatatcaagctggagaactggacgctgacggctgggttccgcaagcagcacggccacgaggtgtatctgttcaacccgctctccccggagcgcctgacgcatcgctggaatcccctggcctacatcaacgaggacccgaacctgcgggtggacgacgtgcaggcaatcggccaaatcctgttcccggacattgacggaacggacccgatctggagcgcgtcctgccgttcgctgttcaccggcctggtgctgtacctcatcgagacgcccggcaagccggtcacgctcggccaggtcgcgcgcgaggcctactcgggcgacgacaagcggtggaagaagatcgtggaggcgcgccaggccgagggcaacccgctgtcgcaggcctgcgccgcgtccctcctggactacgtgaacacgtcggacaacacccgcacgtcgatccgcaagaccttcaccagccggttcgacctgttcaccaacccgatcatcgacgcggccaccagcgccaacgacttcgacatttcggcggtgcgcaagcgccgaatctcgatctacctgggcatcacgccgaacacgctggaccgcctggcgcccctgctcaacctgttcttccagcaggtggtggatctcaatacgcgcgagctgccggagcacaacaaggcgctgaaataccagtgcctcctcatgcccgacgagttccgttcgctgggcaagatgaaggtcctggtcaatggcatcgccttcttccgcggctacggcctgcgcgtgctgccgattttccaggcgccatcgcaggttcgggaggtctacggcgacgacgcggccaagaccttcttcaagaaccatcacgtccgcatcgcctacacgccggcggatattgatgacgcgacggaagtcagccgcgagctgggcaatttcacctacaaggcgacgtcgaagtcgaagccgatggcgttctcgaagggaacgcagagccagagcgagtcggaccaggcccgcgccctgctgctcccgcaggaggtcaaggacataggcgaggacgaggcgattatttttgccaagggctgcaagccgctgcgagtgacgaagatccgctggtacaaggacccgacgttcaaggggcgcgtggtcgatccgccgaagctctcccctgctccgctcccggtcgcggcgccggtcgaggactcggactggaccgaagttgacgccagcgacgtggaaacgctatatgatcggcctgcatcggatttcagcctggatttctccgatgtggacattcccaagggagagttgagcgacaccgaagccgaagcccttgccgacgagctatatgcgagtctggtgaggtaa

SEQ ID NO: 506837 - DNA, 744 bp, Stenotrophomonas maltophilia
atgaccgagcaagcccaacccgcgggcaatccgtccgcccagcccggcgccaagtcgccggtgcgcaagcagcccctgaacgagatcatccgtagcgacggcgccaagggccgtcccagcacggagatccccgagcacatttcccagcactacgtccaggacggccgcgcctacaagtcggcctaccgccaggacaagatcgagttcatcgaccgcggcgaccggctgcacgcctacaagccggtttcgacgttcaccatgcgggcgatggccgagattgccgagcaccgcggctggaagtcgatggaagtgacgggcgtcccgcagttcaagcagggcatctacgtggaagccgcgtcgcggaacatgcaggtgtccaagggttacgagccgaccgagcgcgacggcgagatcctgcagcgccgccaggaccggaaggcggccgagcagaacccgatggtcaaggcctacctcgaagccgatacggtcaaggccaagaatgcggcggtgaagcagtatccggagttgaaggaggccttcaacgagacgaagaaggcggagacggtggcggagtcgatcgactccaagcgcgccgccgccaatttcgtcggccggtacaaggattcggtggcgatcgccctgcacaccgggcgagagattccgaaggtcgccggcgtcgaggcgaagcagacgaagacagcagaacagccacagcccgaccaggacaagggccgttcccgctga

SEQ ID NO: 506838 - DNA, 1782 bp, Stenotrophomonas maltophilia
atgacgatcgagaccagccctgcgaacaacctgttcgcgggattcaacgatgacgagaagaagatgctcgccgtggccgtgcgccgcgtcgaggagctggaagaaacccgccgcatcacggcaggcctggccggccaggcgcaggccatccagtccgacctgaaagcccgcgacgtcgatgacggcgacgtgctgcgcgaggcggccgaggcggtcgccgccacggccagcgcgcaaggcaagctggccagcgaggtcgacggctaccgcaagctgttcgggccggatggccgagcggcggcggccgtgggccagtacacgcagctgctgcgcaacgcgcacgccggcgacgtcgaggcgctcaattcagtgcaggccgcccgccgcgagctgtacgaggccagggacgcctcggcgcagcatcgcgaagggtcggacgccggcgccggcatcgaggccgaaggccgctaccaggttcggcagaccaaccctgccacgctcgaaacgacgacgatgctgaccaccgcgagcgcgctggcggcgttcaaggagttcaacggcaaagccgaccgcgaggtcctggatcgagagagcggcaagctggtcggctatgtcagctgggagcaggacggttcgacgccgcgctggaagatgcgcgagagcttcgcggccgccgtcgaggcggcgcagtcgcgcgagacgacgttcgagttctacgaggcttacggctcccggccattgcgccagttcgattccctgcaggacgcggtgatcgcgtacagccgcgaaggcgggggccagctgcgcgccgtcggccgcgacgcaagcgagcaggtcgtcatggccaggaagggcgaaggcgccgattacgaaatgacgttcgccacgcaggaggtcaaggatctctacgtgatgacgcagaagatctccaacgccggccgacccggcggcgaggtcccgacgtcggcgcagttgcaggaggcgaccgccgccgcggcgaggtccctgcagccggagcgggaaacgacggccaacacgatcgagcaggacggccccgagcgggccaagcgagtcgatcccgccctggtgcaacctgaccaggcggcggtcgcttcgcgcgacgacaagcggccgcagctcgatctgcagcacgcactgccggagtccttcgccggccgttatgtgaaggacggcgacaagtgggtagaggccggcaacgccgcgcacgtcatcgtcgtggacaagggatcgaagctccaggtcccgcgcgagttcgacgccgagtcggtgaaggccgcggtggacctggccgaagctcggggctggtcctcgatgaaggtcgccggcgaccagaagttccgccaggccctctacatcgaagccgcgtcccgcggcatcgaggtcaagggctacacaccgaacgaggcggaacggaagtggaccgccgagaatgccgccaagcaccagaggacgaacctggtcatggaaaacgacgttgccaaggccttccacgacgcccgcacgccggcggagcgccgggaggcggccgaacgccatcccgagctgaaaaaggcgttcgcgatcgaagccgcctactcgcagctcgccaagcagatccacggcaagtccgggcaggatgcgttcatggcgcgcatgcgcgacaacatcgccacggatctcgcgcagggtcgcgagctggtggacgtgcgcctgcgccggcccatgttcaagcagcaggagttcgatcgctcgcaacaccgcgatcaggaccgcggccgctaa

SEQ ID NO: 506839 - DNA, 1995 bp, Stenotrophomonas maltophilia
atggcagaggaacagtccgccggcgccggcagctcggccgcgctcgcgcggcagctggagcgcctggctggcgtcgtccaggacgccacagagggccgccgcgcgaagctggcggccgacgagcacgccaggatggtggccaccgccgaacaggcggtggccacgcgcaccttgtacgccctgggcgacgaccccgtggtgcaggcgatcaaccgcaccccggaacgccaccagctggccgcctcgggcctggccagcgcgctggccagccacgacggccgcgagcaccccaacccgttccaggacaagcagcttgcaacggcttatgcacggcaacaggagttcgatgcctacttggccaagcgcgaagccgagcagaacgacgtcgccggcggccggtgggtggtgcagcggtggaacgtagggcgcggggtttacgaggaccagctgcagacgccttcggccaccgccgccaatgagctgttccgcaagggcagcgattaccgcatccacgatgcacggttcaacgacgtggcggcggagtattcgccggcgtcggacggcaagcccgagtattcggtgagatccggctttcagcgcgcattggccaacgaacaggaccgccctgccccgctccagatccaccgcgcacagtacgaccacggcgatcgccaggccgtgcagctgcaggcgatgaacgcggtcctcaacgacacggcgcggatgatggaccgctaccgggaactgcccgaggcgcatggcggccgctatgtaggcgccgacctggccaaggagctgttcgccgactacaaccagtcgcgcgaggccaggaaccgctataacgcgcccgtgcacaacagcgcggccgcgctggctggccagctgttcgagcaggcggtgctagaccaccggcatccggagcgcgatcgcgcggtgttcctgaccggaagcccgggcgcaggcaagaccacgatggtgctggaacagggcgagctgcaggcgaacatcgccgtcgtgtacgagggccagatgttccggcccgaacagtcgttcgccaagctcgatgccgcgctcgcgcaagggctgaaacccgagatcatcgcggttcagccacgccctgagacggcgttggagaatacgtttaaccgcttcgatcacgtcggccgcggagccagcatccaggtcatgtcgcagattcagggcgagctggccgaaggcctgcggaagatccacgcgcagtacggcgaccgcgtggatctccgcgtcatcgacacccgcgaagtggcgcacaatggccaggccaccgagtacaagggctggcaacacctacagattcttgaatcggagggcacacgcgatgcaatcaaggaccgactcgcagcagaactcgaacgccatcgagctgccggcaccatcaccgatgcctgctaccgacaagccgcaggccgcgcacctttccaggaacagctcaccgatcgacggatgggtccagggcatgacccggacgcagagcgagttgagcaaagaccccatccgtcgctatcacgcgagcaagcgcgggttctagtcgccaccacggccgatcgtccggcgcttcgctcggacgagctggccagggcgcacttcatcgcgcggcaagacaaggcctgggccgaaagctacgaccaggagcacggcccggacattgcccgacgcagccagcagctcgcgatccagcacggccaggtcctcgcgcgaaagctcctgcaggaagatccggtgaaggcctgcaccgtctatcccgagttggttaactcccatcgctcgatcgccggcgccaccgcccgcctgcgcgaggaaggtcaagcccccaagaccatccagatcgcgcaggaacggctcaagcacgcactggccgatcggctttcccacggcttcggctcgcccagcgtcgcagtgaaacaagccgagcagcagacgaaccggacgcaggacagcgaggggcgaggcaggtag

SEQ ID NO: 506840 - DNA, 414 bp, Stenotrophomonas maltophilia
atggacatgcaacctgctgttggccagctctggcgcgaccaggacggcgccgcccgcatctgtgggatcgtggcggtcgaggacgtgccctacgcggtcctgcttcgcacccgtggagcaacgggcaagcggaagcgccggccgttcctgttcccggtcgcctcgctgctcgccggcgatgacggctggcaccatgagccggagatccccccggaggccggggctgtggacgtcgatcgagaacctactgccgacgaggcggcgggcattacctggtggaactcgctgccggagacgatgcgcctgtactggtgcgagttggcggggagctacgtggcggcggatgcttgggcgcacttcaagcgagccaggcccgaggaggccgcagcgtggagggctgcgtccccatcctga

SEQ ID NO: 506841 - DNA, 651 bp, Stenotrophomonas maltophilia
atggccatcacccgtgagcagatttgggccgcagcggacgagatcgacgccgcgggccagaacccgacgctcgccgctgtccgcaaggcggtcggcggcggcagcttcaccacgatccaggacgcgatgacggagtggaaggcgaagaaggcggccaaggcgtcgccgctgcgcgaaccgccgccggcgtcgttggccgagcgcctgcaggaactggcgggcgacgtgtggaccacggcgatggagatggccaccgcgcggctcgaagtcgagcgcgaggcgctggaaaaagcccgggccgagctggatgccgcccggctggaggctgccgagctggcggaccagctgacggccgagctggacgaggcacgggcgcgggtggtcgagctggagcgcggcgcggccgccatgcagtccgagagtgccggtctgcgcgagcggttggcggttgccgaggccaaggaggctgaaacctcccggcggatgcacgtcgagcgccaggctgccgaccaggcgcgtctggctgcggccgcggcgcgtgaggatgccgcgcggctgcagggccaggtggaggcgctggagaagcagcagcgcgagctgctgggcaagctgggaacggcggccggcaagaaagggcagggggcgcgctga

SEQ ID NO: 506842 - DNA, 780 bp, Stenotrophomonas maltophilia
atgaacccgcaccgcaaggaggtggtgcgcctcatccagtcggtgggctaccggcacgacacctacaggctgttttccgacttctgcgaactggcggcgctgtcgctgtcgaacgcggtggacctacggaagcgcgaggagcgggaagcgcgttacctggcgatcgtgaagggatacgagcgcgaggtggtcgagctgttcccgcggatcttcgccgaggtcgtgatgggcctggagctggaggcctgtgatctgctcggtggcgtcttccatgacctggagctgcacaacaagcagcgcgggcagttcttcacgcccttcgaggtcagccggatgatggccagcatgatcgtcggcgacgaagccggggcgcgtcgccgtatcgagcagcgcggctacctgaccgcgtgcgagccggccgtcggcgccggcgcaatggtcatcgcgctggccgacgtgatccgcagcatggggatcaactaccagcggcacctgcacgtcaccgcgatcgacattgaccctcgcgcggtccacatggcctacgtccagttctcgctgttgcacatccccgccgtcgtcgtggtcggaaatgccttgaccctggaggagcgcgagcactggttcacgccggcgcacgtcctcggcggctggacgggcaggctgcagcgcgacagtccttcggagccggtcgaggtcgaggcggtcactgcaggggcgccgaccttgccggcggcacgggtgttcgagacgccgcgagctggccaactcaccctgttctga

SEQ ID NO: 506843 - DNA, 420 bp, Stenotrophomonas maltophilia
atgagcgttcggaatcaagagcaacagcaacagcacaagcaagagccggctctggcaactcgcaaagcatggggtgaagggcagcggggcaggggagcggtcgaggcgcaagcgttggccaacgcgataggcgggcagagcgtggcgaactatgccgcgatcttcgccggcttcgaggcccagggcattgacctggccgagatccgtccgagggagaacgtctttacgttcaacgcctggcgggcgctgggccgggtggtgcgcaagggccagcacggggtcgccatcgtgacagtcgtcccttgcgccaagcgggaccggaagaccggcgaggcggtgccggtccggaaggccaagcggacgacggtgttccacgtctcgcagaccgacgcgctgcaggtgcccggggtgcaggcatga

SEQ ID NO: 506844 - DNA, 1080 bp, Stenotrophomonas maltophilia
atgagcgctggctaccaggacgagccggacctgatcggcgccgccggcttcatcttccaggggccagttcgcgcgaagcgcagccggcccgcggaaccggccgacagtgccgtgaagaaggtacggaggagcaaggcggtccggcggatggtcgctgccgccatccgccggacggcaggcaagaagccggaggtcatggtgaaggtcagcggctcggccaagggcgcgaagcacctgcgcgagcacctggcctacatcacccggaacgggaagctgatggccgaagtctccgacgcgagtaatggaggggacggctccctgctggtcggcgccgatgaagtcaggcagctggccaaggaatggttcgcccgcggcggcgccgaccggaaggccaacgcccgcgagacgatcaacatggtcctgtccatgcccgccggcatcgacagggaaggcttggcgcgcgcggccgcggctttcgccaagagcgagttcggtggcaagttcgattacgtgctcgtccaccacaccgacacggaccacccgcacgcacacctcacggttcgcacgcgcaacgaccgcggacagttcctcaacccgcgcaaggccgacttgcagcagtggcgcgaacgattcgccgtccaccttcgtcaggccggtatcgacgcggctgccacgccgcggcgggcgaggggcgtagtgcagaagggcacccgccaggcgatcaagcacatggacaagcggcaggcctcaacgcggacccgctggggcatccagcaggcggtccgcacgctgcgcgacgagaagccgggcaaggcgccggacgagccgtggaagaaagccatcgccgagcggcagcggaagatccgcgccgcgtgggggacggtcgcccaggcgctggaagggcagggcgacgtcgccctctcggtccaggtgcgcgcgttcattgcctcgatgccgcccttggccacgaagcaggaccaactggtcgaacgcatcaagagcaacccgcaactgctggctcgggtcgagcgcgccttgccggtggaacaggaccaggcgcgcgccccgaagcgcaaatag

SEQ ID NO: 506845 - DNA, 531 bp, Stenotrophomonas maltophilia
gtgaccgttgccaagccgctgatcgccgccaaggtagagccgaacgtcaaggcggcgttcgcggacctggcacgccgctccgggcgctccgagtccgacctgctgcgcgacatcctcgcgaaggtcctgggtagcaacccctcgcccgctcccctgcaggcgggcttcaagaacggcaccggcaagttcgtcgtccgcctgcgcgccgacgagctggcggccgttggcccgctcgcgaaagccgacagccgatccatcccggcatggatcgtctcgctggtccggcgggtcgccctgcaggcggtccccttcaacgagagcgaactgcagtcggtcaatcgggccatcgccgccctcggcccgctcggaaggaacctgaacgtgctcgccaagcacttccaccagaccggccgtgccaggcccgacgacctgccggttgcacaactgacagaagcggtcgcgcgcctccgcgcggaggtcatcgccttggccgagcgcgccagtcgccgttactccgagacggacgaatga

SEQ ID NO: 506846 - DNA, 471 bp, Stenotrophomonas maltophilia
gtgtctggctttgcagcgttcgtcactgattacgttgtcgcgctagcgaaggctggccggcacggattctgggaaaggtttggcgaacaaacaggagtcccggcgcagcgctggcggaatatcgcgtcagggcgccagcagattacctacgacatggtggacgccctggtggtgcacgttccgggatttgcggaggccttggccgagcatgttgtaagtgtcggaagccctcgccagcacttcgatatggcttcattgatccggtctcgtcttgcggatattcgtgaccgtgatgggcggaatgcatgggaatccctagcgaagcggactggcgtggcggcccggaagtggaagaacgtgcatttggaagcacagcagccgacctttgaggttctcgatgcgctgttgactcacgaccccgatttcgcgcgtcaggttcaggcaaacatcggcactttgaccaaaccgtga

SEQ ID NO: 506847 - DNA, 1110 bp, Stenotrophomonas maltophilia
atgattgacttttctcgcctggacagcttcaacgacgtgatcgaggcgcctgccgatcgggctggcgttcgcgagattgcactggcgctgatcgaccctgatcccgaccagccgcgcaagaacttcgactcggccaagctcgccgagctggcgcagagcatcaaggtctatggcgtcatccagccggttgtcgtcaagactgcagggtctcgcttcatgctggtctcgggcgagcgccgctggcgcgccgctgccctcgcacagctcgaaaccatcccggtggtggtccgcgatgacctgtcggttcgcgcccaggttgtcgagaacctgcagcgagacgacctcacgcccttcgagttgttccgggcaatcgcagccgaactggatggaggcaccacgcagaaggagctggcggaggcctacggcaagagcaagcaatggatctccgactacgcatcggtcgcgaagatgccccctgccctgcaggatgccctgcgcgacggtcgcgccaacgacatttccgctctcaacaccctttcccgcctgcacaagcaggccccggagcaggtcgagaagctggccagctccgaggctcctatcacccggcacctggtcaaccagctggccgattccctggcgcgcaaggcaaccggcgccgatgacgccggcgccgccgccggcgcggcaccgggcaaagcagccccgaagaccaagccggaacccaaggcagccggcacgcagggcggtgtcgaggatgacaataacgacggcgagggcggcggcgacgtaggtgccctgccctcctctggtgtcgccgacaacggcgaaggtctggacgttggcggtcgaggtcctgcggctgtgccgggggctggggagggttccaccaaagccgacgactacacgccgccgaaggcccttccgcaggaccttccggtcgggatcaaggtccagtacgaaggcgacacctactggctccgctacgaccgccagaaggacgaaggtgggcgacgcctggtcatgatcgccacccataccggcttgaccctgtacgcaccgatggccgacatggtgctagccgcgatctacccgcatcacatggctgattga

SEQ ID NO: 506848 - DNA, 756 bp, Stenotrophomonas maltophilia
atgaagaccgtcgtcatcaccaaccagaagggtggcgttggaaagactactctatccgtccacctggcccactacgcagccgagtccgtgccgcgggtgctggtcatcgacctggatagccaaggccacacgtcgtacagcctcagcgagttcgactcgggtaccaaggccagcgacctgttttccgacaagccgttcaagctggccagcgagggtcgcaacatcacactcgtcgccgcagatccggggctggatgttgtcgcgaaggaaccgacgtcgatcatcggccacctggtcaagaacatggagctgatcgctgccgagttcgatttctgcgtcatcgacacggggcctgcgaagggcaacctgcagaacggcgccctggtcgttgccggatatgtcctctcgcccgtagacctggagcaatacagcattctcgggctggaaaagctgctggccaccatcatgggcatccagaagcactacaacccgaagctgaccttcctcggcatgctgccgagcaagttcaactcgcactcgccggcacagaaacaggcgctcatggagctggccaaggcctacggcaagttcatgctgcgcggctcggccatcgtcctgcgaaccagcatcggcgaggccgcggccgagaagaagccggtgtggaagatgacgaagacctcggccagggaggcgggcaaggagttccgtgcggtcctggccgtgatcgaggagaagatgggaggattcaatgattga

SEQ ID NO: 506849 - DNA, 249 bp, Stenotrophomonas maltophilia
atggctgccgccaagaaagcgagcaaggcacgaaaggcgccggccaagaaggctccggtgaagcgcgaggcctccgcgggtgaagcgaagaaccggcgtgcggcattgcgcatgacaggcgccgacttcgatcgaattcgctacgagatccttccgagcgagaagaccagctggcaggacatgctggaaacggcggtcaactcctggctgcgcgagcgcggctatgacccgctggagaacgtcgaatga

SEQ ID NO: 506850 - DNA, 330 bp, Stenotrophomonas maltophilia
atgagcatgaagctgtggttgtggtacgtgcccggcaccgaggcgcagatcgccgaggcctgccaggcggccgaggacgagctgcaggcccgggatatcgcgatcgggacggcgttcgctgcgacggtggcggccaacgagctggaggattcggctaccgatgcagcatggagcgaatcgtcgggcgccggcggtacaccctcccctgccctggtcgatggacctgccgtggcggcgtggtacgcggcggagttcgccgctttccagaagttgtcggagctgactggcgaatggccttcccagggttcgctgatcgtggtcgagggctga

SEQ ID NO: 506851 - DNA, 915 bp, Stenotrophomonas maltophilia
atggccaagccgcccgtgccccgcaagaaggacagcaagctgatcgaggcaagcgcctcgatcatggggacggcaccggaaggcgatgacattgcgttcctgcactccacgttctgccaggtcggcctgccgcggagtcggccgaaagccgatgttttcgagcgccgcagcgggaacgccgccattcggctggaagcgggcgttctctttgatggccaggacttcgtaaagcagcccctgccctatggcaccaagccgcgtctgctgctgctgcacttgacgcgctcgtacctgcggacgggcgatcgcaccatcgacctcggcgacagcgtgcgggatttcctggcgaacacgctgaacatcgacgccagcggcggcaagcgcggcggcatgaccggcttcaaggagcagatcaaggccttcgccgcatgccgcatggtcatcggttacaacatgccgtccggcgccgtgcgatcgcgtcctgcagagcgcatcgttgaggagttcgaggcctggccggagttgaacgtctcgacaggccagcgcagcctgtggcccagctccatcacgatctcggccgacttcgcggcctcgatcgcgaaggcgtcggtaccgctcgacgcacgcgcgatccaagccatccaggacagcgcgctggccatcgacttgtacgtctggctggctcaccgcctgcaccgtctggaccggccgacgatcctcaactggtcgaacctgcgcgaacagttcggccaggagatcgccgactcgcggaccttcaagcgcaatttcatcaaggcgctgcgcgacgtcctggccgtctatccgaccgccaagatcgaggacgtgttcgggggcatccgaatccatccgtcactgccgccggtggccaagacgctcgtcgcggtcggcaagtag

SEQ ID NO: 506852 - DNA, 228 bp, Stenotrophomonas maltophilia
atgagcgccatgaaggaagtgtgggatgccttgcgcgccgtcgtaggcatcgccgacaagatgcaggatctcagcaccgaggtgcgcgagctgcgcagggagaaccaggcgctacgcgagcgcctggtgcgcgtcgaaaccatcatcgaaggggcctacgccgccagccgcggcggtgggcctgcagctgctccgcagctcccgtccccacccaccaaagaccgataa

SEQ ID NO: 506853 - DNA, 375 bp, Stenotrophomonas maltophilia
atggccgtcaccgaacaactcagcattcgcctggaagctggcgagaaaaaggccctgtcggcggctgctcgaaagagcaacctgaaggtttcggagtacgttcgcgggcgcctattcggctccccgttctccgaggccgaccagctgctcctcgatggcctggtggatctgcgtccgcggctggaggcctcgttggaccggatcaacgccaacatgaagcacatcgcgcagctgcgcgaggcggccgcggattccgacgcccaccggccgcgcctgcctgacgacctcagtcccgcggatctcgcggccatcgccgccaacctcggcctggcggcctcgccggccgcgcccgcgccggcgaaggctgctcgatga

SEQ ID NO: 506854 - DNA, 567 bp, Stenotrophomonas maltophilia
atgttcaaagacgcgctctaccaggtggaataccggcgcgcgacccgggcagcggtgagggcggcagcgcccgccccgccgcgcctgtctaggcgcgatcgagggatggtgacgtgggagctggccatgccgacaccggcgccgacggtcttcatgtgcgccgagggcgatccgaccgacggcgatgccttcgtggtccacgtcgccggcgatgcgttctacctggcgatgctgcgggcggtgcgcgtgctgcgcacgtcagcccacggccgcagctgcatggcgcgtgccgacatgcaccgcgactacaagttccaccacgcggtcaacggcttcgcccggaccaatggcaaccccgttccgctggccgagccggtcatcgggaaggatcgacgcggccaggtggtcgtgagcgacttccagaacggaatcacccggacgtactggttgctggccaacggctgcccggcattcccggtgcttgtccagggcgaggcacaggccgagctgctggcgacgcaggccggcgtcggcctgcaggcgttccgagagttgtttgccgcgtag

SEQ ID NO: 506855 - DNA, 198 bp, Stenotrophomonas maltophilia
atgctcatcctcacccgtcgcgtcgctgaaaccctgatgatcggcaacgatgttgccgtcaccgtcctcggggtcaaaggcaaccaggtccgcatcggcattgcagcgccgccgaacgtcccggtccaccgcgaggagatctatcagcgcatcgagcacaaccgcgcggccgcccaagaagaaacgcctcacgactga

SEQ ID NO: 506856 - DNA, 303 bp, Stenotrophomonas maltophilia
gtgaacgtggccaagccctacgccccgccgccggcggtccgcgacctcctggagcgtttcgcggtcagcgtcgatgccgcagtcacgccgaaggaggctgagctgatcgcccaagccgaaaccgccttcatggctctcatgccctgtcaactcaccctcgctcggcgctggtacgcgcctgcggcacgcctgctggtgctcggcaccacgcgcgcaggcctgtccggcaccgagctaaccgcgtgccgtggcattatcgtggaagcacgaaaagcactgcacgaagcaaccgcccgccgctaa

SEQ ID NO: 506857 - DNA, 1992 bp, Stenotrophomonas maltophilia
gtgaataccctcgtcatcgttgagtcgcccggcaaggtcaagaagctggccagcatcctcggtccgagctaccggatcatgccgagcaagggccatgtccgggacctgccggagaaggaaatcggggtggaaccgcccgagttccgtccggcctacgtcccgaccaccaagggcaagccgatcctggccgatctccggcagcaggtgcctcgtttccagcgcgtgctgctggccaccgacccggaccgggagggcgaagcgatcgcgtggcacctggccgacgccttgcgcctgcaggacccggaccgcatcaccttcaccgagatcaccgagacggccgtgcgggcggccgtacagcggccgcgcaagctggacatggcggtggtccgtgcccaagaagcacgacgggtcctcgatcgcctggtcggctaccgggtcagcccggccctctccgaccgcgctggtcagaaactcaccgctggccgcgtgcagtcgcccgcggtgcgcctggtggtggaccgggagcgagagatccgtgcgttccgccagacggagcactacggcgccgaactgaccttcgatgccggcgacggccgccagtggaaggcgacctggcagaccgagccgcatcttgcgcccggccagaagtacgtcctggacgacggcttggccagccgggtcgcggccgtgcgcgacgtgacggtggccagcttcgaggacacggaagccaagcgagcgccgccggcgccgttcacgacctcgacgctgcagaaggccgctggcgacaggcttggcttcaagccgaaacagacgatggagctggcccagcggctctacgagcaggggcttatcagctatcaccgcaccgacagcccgaacctgtccgaggatgcgatgcgggacgtcgcggcgatcgcgtcggccgatggcttggccttggccgagaaacggcgcacctggaaagcaaaggcgggcgcccaggagggccacgaggcggtccggccggcgcacatggccgaccgtgacgttggcgaggacgaggcgcagcgggcgctctaccggctgatctggacgcgcacctacgcctcccagctcgccgatgcccgctacgcggtccgtaccgtcgctctcgccggcgacgccgacgggctgccggtcacgtttctcgcgcgcggccgaactctcgcttacaagggctggctgtccctgcaggccgacgctgcggatgccggtgacgacgaagaccaggtagctcccaatccggtgccggcgctcgacgtcggcgcggcttgccgcgcggtcgatggccagctgctcacgctgcacaccaaggccccgtcgcggtacaagctcaccacgctcgtgaccgagctggagagcttgggcatcggccggccgagcacctacgccgcgatcctggacaacatcaccgcccggggctacatcatcgagggcgtcaaggacttcctctacccctccgcggcgggcgaggcgatccgtgacgcgctggttggcacgttccagttcgcggatctcgactacacgcgcgagctggaggcgcagctggaccggatcgcagatggcgccctgccctacctggccgtcgtgcgcgacgcctacacgcagctcgatggcgagctggccaagctgggcgaacgcgcgcccatcacgatcgaggacccggacgcgatctcgtgcccggtgtgcaagcagggcacgctgcgccggcgcaaagggaccaagggcttcttctggggctgctcgcgctggcaggagggctgctcgaccacgttcccggacaaccgcggcaagcccgcattcggtggcaaggaggcgcacgactgccccacctgcagcaagggcgtcctgcggccgcgccaaggcgccaacggcaagttttggggctgctcgtgctaccccgagtgcaaggcgacgtttcccgataagcgcggccgtcccgacctgaccgcgcgcaagggaggcggtcggtga

SEQ ID NO: 506858 - DNA, 198 bp, Stenotrophomonas maltophilia
atggccgttcccgccggcgtcgatgccgaactgcaggagttgaccgacaccctgaccaagctcgatgcgctggtgcgcaaacccgagctgcgggcgctcatcggcgatggcctggcacgcgagctgcgctatccgatcgcgtcctaccgccagcgattcccgcagctgtggccaaccgcccagccttccctgttctga

SEQ ID NO: 506859 - DNA, 189 bp, Stenotrophomonas maltophilia
atgaccgcgactaacgctcccaacatgcccctggccactgctttggcgctggccgaccacgcttctccgtcgccggcggaggcacgcgctggcctgcaggtcctgcgccaggcgctggccgatgcgctcgccatgtcggtggacgagctgcagcagcagtccgtcggatacacgcccgaccgcatctga

SEQ ID NO: 506860 - DNA, 231 bp, Stenotrophomonas maltophilia
atgaccaggaccttgcgtgccgtgcttgccgccggcgtgctggcttgcctggccggctgcgcttcgaccacccactactacagcgcgagcgactaccgcggcatccgtgtcggcgatgcccgcgttaccagcggcgtcagcgtcggcgtgtcgccctcgggcgtctcggtgactccgcgcgtccgctactacctgcccaggacaacgaggaagtcccatgaccgcgactaa

SEQ ID NO: 506861 - DNA, 180 bp, Stenotrophomonas maltophilia
atgagtgagttctacgttccacagaagatcacccggctgcagcgcgaggaggcctgcgccttccacgaccagctggcggccgcgttcgccggcgacgtcgccgcgctgctcgatgcgcagcagcgggaggacgatgcccgcaatgcactgctggccatcgcggagggcaggcggtcatga

SEQ ID NO: 506862 - DNA, 315 bp, Stenotrophomonas maltophilia
atgagcgaccaagcaaacagcctggagatcccggtgccgacggtgggtcctggcggcgtgctgcgcgcggtgcggagcgagtacggcaactactacgacttcgagcttcgaggctcgccggagcatggcggcagcgacaacatcgtcgcgttgttgtccggctacgccgcacgcctgcaggtctcgcatgcggcgggcggcacgctgctggtcgttggaaatacgagtgttctattgcctagggagagcggtcagcagttggcggacttcctgggcgttccactggagacgaagcaacagacaggagaaggatga

SEQ ID NO: 506863 - DNA, 537 bp, Stenotrophomonas maltophilia
atggaaatggccatgaatgacgctgcgatcaacggctccaccccagtggctggagccgacgtgcgccccccctacagggtgttcgttccgtcctggctggcatacgtccaccccttcatcgtgctggtctgctttggcgtggtcggtgggctgatggtgtccctcgttcccctggctggcacggtgatgctggtcgccgccctagcgttgttcgcctaccaggtcctctacatccacagcttcaagctgttcacccaggaggacggcgtttgggtctacagcggggtgttcccctggaacaagggcgtgtacggcgtgaagtggcgcgacctgaacgaggcgaccttccggcagggcttcatcggttggctgttcaagtcctacaaggtgacgttgaccaatcgttataccgccaacaacgagatcatcctgccgcacatcaagaacggccacgaggcggcggcgcacatcaacgacctgcacatcggccgcgtccgcgctggcgacgtgccggagaacgaggtcagccagggatga

SEQ ID NO: 506864 - DNA, 195 bp, Stenotrophomonas maltophilia
atgtcggagaatctgaacgtgtacgtcaccgaggaatacggcgacgacaacaagaagctctacacgaaggtcggcacggccttcccgcacaagcagggcggcggcttcaacatcgtcctgcgccagggcatcagcgtcagcggccgcctggtcgtgttcccgaagaagccggacgacgccgccggcgaagactga

SEQ ID NO: 506865 - DNA, 567 bp, Stenotrophomonas maltophilia
atgagcgacgtcggttgccccgactgtggcactggcgtcgaaggcgctcccgtaggctcaccctgcccctcgtgtgggaagccgctcatcgacggcgcggaagcctaccgccaatggaaggccgccaaccgcgaggctctggcggtgtttcacggcgtggatctcccgcgcagcttcattcatcgccggcggctggccgccggcatcgtccttgccgcagctgcgctcgcgggcctgctgcccgagctggctgcattcaacatccccacgcgggtcatgtgcgtagccgcgatagcgaatgcttgcgggcattggctcgctggccaacccacgaagatcccgttccccttgtcgctggcctccctgctcgcggttctcggccctgtcgcctcatcgtcggcatcgtccaccgggctgcacgcggcgctcgacctggccaacgacctgatccgctacgtcctcgcagcgggcttcctggtcatcgcctcgatcctgctccggcgggccgccttggcggccaagcgcgacgcctggcgcgccgcgcttggccgcactgtcgtcatgtag

SEQ ID NO: 506866 - DNA, 258 bp, Stenotrophomonas maltophilia
atgcgtagcccatcgacgttccagtttctgcttcgctggtaccggggtcatgtcatcttcggattggcgttcctcggcatagccgcttggggcttcctgcgggatgtgcctgcgacgcctaatcccgccggcgccgctttcagctcgccactggcggatgccgccgggatcgccacctggttcgcgctcgccttcggtgtgctgctcctggtgcgtggctggatgaaggcctccgatttgcgcaacggcaggccatga

SEQ ID NO: 506867 - DNA, 366 bp, Stenotrophomonas maltophilia
gtgggaacaaaaccgaattacgtcaagcggattgccgtcgtcgccggcatcgtcgtggcgctgctgctggcgtcggtctatatcggtcgccgcgctggcgaggccgccggggacgatgctcgcactcgcctggagctggtgtggcctacggtcatggaatggcccgaggccgaccgcgcgttcctggtcggccttgccatgacctgcgacctgcatacccgccccgccacgcgcgaggccactgttgcctgcctgcgcgaagccgcctccaatcccgacgcggaactgcccgtcggggtctccgcggccgaggcgcccgcgcggctcgacgccctgctcaatccgcgggcctcgaccaccatctga

SEQ ID NO: 506868 - DNA, 435 bp, Stenotrophomonas maltophilia
atgaccgacaccaccaccatcccgcgcggcacgccttgcggccgcgccgtcctgctgaccggagccggcgtcgccgcaggcggcggcgcgatcgcgttcgtgatcgaccactccgcgacgatcctcaacggcatcttcctggcagtgaccttcggccacttctggcctggcgtcatcgtccacttcgccgcagcgatgctctgcgcctatgccgtatgcaagttgagcgcaggggcgcaccgcggccgattcggaagcctgctcgctggggcggtcgccctttacttcgcgagcctgttttcagtcaccgacctcgcgacggggcctggcgacctgaccgtctaccagacaaccgccatgtggattctctggctcggattcgccggcgtctgcctggccattgtctgcactgttctagccgagacgttggattag

SEQ ID NO: 506869 - DNA, 357 bp, Stenotrophomonas maltophilia
atgaaccgcatgaccaacaccctgcgcaatcgcgccccccgtcccgatgcaggcctgcgccggcggtgcggcactgccgccccaggcctcgttttcagcccgggcggcgtcgccttctccgactcggcaatggccgcgctccggcgcgtcggcttggacgtgatggacctcgttcgcaagcactgcatggcggactggacggacatgatgccgcacgaccgccgcgcgaacatcgaggcgctggcacgcggcggccgcatcttctcgtcgttccaccttggcgaccaggtgcgggtatgggttatcaccgaagccgaccgcagcagcaccagcgtgctgctgccgggcgagttctaa

SEQ ID NO: 506870 - DNA, 1872 bp, Stenotrophomonas maltophilia
atgcaaagcaccatgaccccggccgccgcgccgaccctgatacccctgaaccagctgcaccgttccgacctcaacgtccgcaagacgggcggcaccgacgtgacggagctggcggccaacatccgcgccgcgcagcgcctcatccagaaccttgtcgtcgtgcccgagaagcgcggcaagaaggagggctatggcgttgtcgccggcggccgccggctggcggcgctgacctcgctggcgaaggagaaggccattccgaccgactggcccgtgccgtgccagatcgtgacccgcgaggaagccgtggagttgagcatggccgagaacatccaccgcgaggacatgcacccggcggacgagttcgatgcttgggccaagctggtggacgccggcaccgacgtggaggaaatcgccgcccggcacggcaccaccgccgaggttgtccgcaagcgactgacccttgcgcgcgtgtcgcccagggtgatgaagctgtaccgcagcggcgacttgaagctggaacaggtcatggcgttcaccctgaccaacgaccaccgcgcacaggacgcgctcttgaagggccgcagccattacccgcaggcctacgagattcgccgcagcctgaccgccgaggccgtcccggacaccgacgagcgcgcccgctacgtcggcgagaaggcgtatctcgcagccggcggcacggtcacgccggatatgttcgaccagaacggccgcacctactacaacgacgcggccctgctgacccgcctcgctgccgagaagctggaaaaggcggctgaaaagctgcgcaaggatgcgccgtgggtggacgtgtacgccgaggaactggactacacgatccggggcaactacgccgacattccgaccatccggcaggaacccgatgccgcgagcgcgaagaagctgaccgccctgcaggcgaagctgcagggggcggaggcgaagctgcgcgagttggaggacggcccggagccggacgacgaggaagccggcgacgccgcgtggatggcggccagcgaagcggtcgaggccatcgaggcggaaatctccgccatcgaggacaccttacgcgttccgcacccggaaggcgcgcagctcgccggcatcgtggtcggcctgtccagcgacggcaagctcaagaagctggtgaacgtcatccgcgccgccgacaaggccaagctgcgcaagcccgccgccaacggcgacgccgcccagggcgaggccgcccctgccgacgacggcgacccgcagagcgtgcgcagcgacctgtccacctacctgacggccgtcacgcagaacgcgctggccaacaacatcggcatgggtctgcgcgccctcgcctaccagctggcgctgcgctggatcggcgaggcctacaaccaccacggcgtccgcattaccggcgaggaccatgcgcgcctgccggtgtcggcgacgctggaaggcagcgcagcggaaaaggcctgcaacgaccgtcacgaagcatggcagcgcgaactgccgacgaacgccgaggcgctgtgggcgtggtgcctgtctgcccccgagggccagattcacaacctgctcgcttacgcggcttcgcgctcgctcgctggcacgcagttcaatgccggtcgccagtgcatcgccccgctggtggaggcgctggaaatcaagctgaccgaccactggcagccgcgtgcggactacttcgcccggatcaagaaaacgacgacgctccgcatcctcgcagagcatggccacgccgacccggcgctggccaagttgaagcgcggccagctggccgagcgtgctgccgacctgctggcgggcagcggctggctgcccccgaccctgaccctgaccgagtaa

SEQ ID NO: 506871 - DNA, 207 bp, Stenotrophomonas maltophilia
atgcgccagcgcgacaccaccccgtacttcaccaccgctcgcttcgccagcgtttgcccggaaacgggcaagcgcatggcgaagggcgagcgcatcgcctacttcccggccagccgcaaggcctacgccgagagcagcaaggccgccgagcaggtgcgcggccttgatttcgcccgcgcctacgcgatgccggacgcggactactga

SEQ ID NO: 506872 - DNA, 363 bp, Stenotrophomonas maltophilia
atgagcgttcggaatcaagagcaacagcaacagcacaagcaagagccggctctggcaactcgcaaagcatggggtgaaggcggacaggcgggagtgccgctgttccagcttggccagctggtggcgacgccggcggcgttggagttcctggccaccgtgccatgcggcgtgctgccgctggtggcacggcatgtccggggtgacttcggggacctctgcgacgaggaccgcgaatcgaaccggcaggccatccagtacggctcgcgcgtgctgtcgtcctacgaattgaagggcgggaaggtctggatcatcaccgaggccgaccggagcgtcaccacggtcctgctgccttccgactactga

SEQ ID NO: 506873 - DNA, 1167 bp, Stenotrophomonas maltophilia
atgaagatcgcaattgcaggtaccgggtacgtaggcctatccaacggcgtgttgcttgcgcggaaacatgaggttgtcgctgtcgacatcatgcccgctaaggtagaagcgctcaatgcgcgcaggtctcccatcgcggacgccgagctggaacaggcattggcacacgacgcgctggatttccgcgcgacgctcgagccccgggaggcttacgaaggcgcgtcgttcgtcatcatcgccacgcccaccgactacgaccccgacaccaattacttcaatacccgttcgatcgagtcggtcatcgctgacgtgctggccattaatccatcggccacgatggtgatcaagtccactatcccggtcggctacgtgctcaaggcacgtgagaagttcggcgtggacaacatcatcttctcgccggagtttctgcgcgagggccgcgcgctgtacgacaacctgcacccgtcccgcatcatcgtgggcgagcgttcgccccgggccgaggcgtttgcacgcctgctccaagagggcgccatcaagcaggacgtgcccgtcctgtttactgaaccgaccgaagccgaggccatcaagctcttcgccaatacttaccttgccatgcgcgtgtcctacttcaacgagctggatagctacgcgttgacgcatgggctggactcgcggcagatcatcgaaggcatcagcttcgatccacgcatcggcgggcactacaataatccatccttcggatacggtggctattgcctgcccaaggacacccggcagcttttggccaactaccagagcgtccctcagacgttgatccgggccatcgtcgattcgaacactacgcggaaggacttcatcgcggccgatatcctgcggcgcaatccccaggtggtgggtatctatcgcctgatcatgaaggccggttcggacaacttccgctcatccagcattcaagggatcatgaagcgcttgaaggctaagggcgttgaggtgatcgtgcacgagccggaacttcatgaagacgcgttcttccgctcgcgggtggtaaacgacctggaatccttcaagcagcaagcggacctgatcatcagcaaccggatggccgacgccctgctggatgtgaaggacaaggtgtatacccgcgatcttttcggcgacaactga

SEQ ID NO: 506874 - DNA, 2034 bp, Stenotrophomonas maltophilia
atgagtgccagtaagagcgcaggccgctggcgcaacgacctgttcgctgcctcggtcttcctgctcgtcggggtcgtgttctaccaactcaaggcgaacgcatatttcacggcggtccccggcgatcttatcgacgcccgtttcaactcggtggtccttgagcatgtctacctttggttgaccggcgccacgcccgatgtgtggagcccgggcttcttctacccggtggccaacgtactggccctgagcgacaaccatttcggctcaatccttccttatgcggccttccgctggtgggggctggatcgctcggaggcattgtcggcctggctaatgctggggggcgtactcaactacgcatgcgcctacgtcgccgcccgtagtttggggctgcgtccttccggcgcgggagcggcggcattcgtatttgcgttttcccttcccgttctggcacagcaggcgcatgcgcagttcgcattccggatgttcgtccctctgctgttcctaaccttctcccgatggctgcagcacggccgcccctcatccctggcctggagctccctgctgttcgctgcccaagtctactgtgccatttacacgggtgtcttcgcggcctacctactgctggcgatgacggccgcttggttgctgttggggcgtggccgaaccctagcagcgcaagtccgggccagtttcggcaggaacgagttggggcgcacgttggccagccttgccgtcgtgctcgcgtctgccatcgcagtactcgccctgctgcgcagctatcacgcggtaactgaggtacaggggttcgtcaggccgcgcgacgaaatcctggggatgttgccgcgggtgtggagctacctgatcgcggacttctcaccgctgacgcggttcatcggcggctcgattggtgacatctcgatgcgccacgagcaccagctcttcctgggcctgggcgtcctgctgttcgccgtcgtggggctgctcctcgccctgcggcgcatcgccgatgcagaactgggcatgctggccggcttggccacgctggtgctggtgatctgcacgctcaacgtcagcaatgtgtcgctctatcgtgtcttcctgcatcttcccggcattgattccatccgtgccgttacacgcgtgatgctcgtcatggtgatgccgataggcctgcttgccggcatcggattccagcgtgtcctgctgctggcctcgcgtcgcggtacctggacgggcgccctggcctgtgtggttgcctttgtgttgctgactgccgagtccgtgaccttccaggctggccatgcgacctttgcccaatggcaacaacggcaggtagcgttcgctgcccgcgttcccgcttctgcacggcagggtgacgtcctattcgccgacaggtcggccgaggccccgtatcttgacgacctagatgccatgatttacgcgcaggaccacgggatgttctccgtgaacggctattcgggttacgtgccgaagggcgcgggcgtgtcgggcccctgtgagtcgcccgaagggtttgcgcgcgcgttcggcgccgtcaacggcctcgctgctcctgccatcgaagcgcttagccaccgcctagtactagtgccgctcggggactgctccggtggccgcatgagcaggatgtccgggcgagtggcgtccggtgttgcagaacacctgcgcttggacatcactggcaccacgatccagccgggtcaggttgcgttcacgctcacgttggccaatggctcggatggcgtcctctcgacccgcgaggtcctggggcgcgacgtgctgctgtcgtggcggttcatccccgacggtcgcgacgaacgagccgtcgactgggatgcacgccaagcgctggtgttggagttggcgcccggtgaccaggcggagctgcacgtcaaggcgcccgtcgcatcggggagctacaccctggaggcgtcgctggtccaagagacgatgttctggttccacgatgaaggcatgcggatcccgtcagtccacgtcgaagttccttga

SEQ ID NO: 506875 - DNA, 600 bp, Stenotrophomonas maltophilia
atgaacaagctggtcaaagcgttgctcctgacgttggcgtacgtcgttacactgattgtcgtctacatcgtgcacatgcgctggttcaaggtcgatgtcgtcctgtacgccagtattttcgacggcttcctggcggctctcatcgtcggcgtggcggcacgaggggtgggcgcgctttccgggttctcggtgctggagaaagtccagctgatcacgatctggctgttgggcggctacctgttcgccatatccgtcccgactgtgattgatcgatcattgtccttctatattctggagaagatccaacaacgcggaggcggtatccgtgaggatggtttcgcacgcgtgttcactgatgagtacctcccggagcaccatttggtggaggtgcggctgacggagcaggaacagtcgggcaccatcgccatccacgatggttgcgtgcggctcacgccccgtggccaggctttggcaaccgccagccgtttctatcgacagaacttccttccacgccaacgtctgctgatgggccagtacacggatgcactgaccgatccgttccgctccagcaagcaggtgaccgactatgagtgccagtaa

SEQ ID NO: 506876 - DNA, 399 bp, Stenotrophomonas maltophilia
atgcgcgcactgagtgagcgcatgctggccagcgaggtcgtccgctatgggatcaacggtttgctggcgaccgcgctgcacttcatggtcctctactgcgcgctggaagtatggggctttcgatcagcgggacttgccaatggcgccgcagcctgcgtgggcattgccgcgtcgttcctgggcagccgttacttcgtcttccgcgcctcctcgggcagtttcgtcggccagggtgtccggttcgtagcgctttacgccgtcatcgcgctcctccatgcactcgtgctctacctgtggtccgatcgagcgggctgggattaccgtctgggcttcctcgtggcgacttgcgtgcaggtggcctgtagttttcttgcaaacaagttggtggtcttcaaatga

SEQ ID NO: 506877 - DNA, 948 bp, Stenotrophomonas maltophilia
atgaaaagctcgtcgctggtcgtcgtgatgcctgtttacgaagatgtcgaggcttcgtccatgttgttcagggctttggcacgggaccagggcaatgatgtctacatcgtcgcagccgacgatggctccgtgcggcagccggtggacgccgccgcgatcgccgctgcgggtctcgatggcgtggtcctgaagctgcggcgtaatgtcgggcatcagaaagccatcgcgatcgggatcggctacgtatccgaacacttcgtcgataggcagcgcgtggtcgtcatggactcggacggcgaagatacgccgcgcagcatcagcgagctcctggaggcgttggagtcccccgacgtcgatatcgtcgtggcctcgcgcaagagccgggtggaaaccttgaagttccgtgcgttctacgtcgtgtacaagtggttgttcgcgatgctcagcggccggcgcatcagcttcggcaacttcatggcggccaagctgcatgcgatcaagcgcctggcggtgatgcaggagctttgggtgcacgttgcggcctgcgtgctgacatccaagttgcgggtggcatcggtagctgtcgaccgtggcccgcgctacgccggcaagagcaagatgaacttcgttgggctggcactgcacggttttcgcgcgctgatggtgtttgccgaggatgtgctggtacgcgtgggcatcgcctgcaccgcgatcgccggattgtcagtgcttggcactgtccttgcactcgggctcaaggcggtcggattcgctacaccgggttggttctcgctggtgaccggcatcctgttgctggtgttcctgcagaccggtgcgctgacgctgatcatcctgatgctctccggaacgctgcgcaatggcggcattcttgaagtcggtggctacagggcgttcatcgccgagatcctgcatgcgcgcactgagtga

SEQ ID NO: 506878 - DNA, 939 bp, Stenotrophomonas maltophilia
atggcacgagtactggttacaggtggtgcgggattccttgggtcgcacttgtgcgatcgattggtcgaacggggcgacgaagtcctgtgcgtcgataatttctacacgggctccaagcggaacgtcgagtccctgctctcgaactcgcgcttcgagatgatgcgtcacgacgtgaccttcccgttgtatgtcgaggtggaccggatctacaacctggcatgcccggcaagccccgtgcactaccagcacgatccggtgcagacgacgaagaccagcgtccacggcgcgatcaacatgttggggcttgccaagcggacgcgtgcacgcatcctgcaggccagcaccagcgaggtctacggtgatccggagatccatccgcaggtggaggattactggggcaaggtgaatccgatcggcatacgcagctgctacgacgaaggaaagcgctgtgccgaaactctgttcttcgactactggcgccagcaccagctggaaatcaaggtgatgcgtatcttcaacacctacggcccccgcatgcatccagaagatggccgggtggtcagcaacttcatcgtgcaggcactgcgcggggatgacatcacgatctatggcgatgggcagcagacgcgcagcttctgctatgtcgacgatctcatcagcggcatgatcagcctgatggacagccccgcagagctgaccgggccggtcaacatcggcaatccgggcgagtacagcatgctggaactggccgaaacggtcatccggctggtgggcggccactccaagctcgtgttcaagcccctgccctcggacgatccccgccagcgccagccggacatctcgatggcacgggcggcgcttggctgggagcctcgcgtgagcctggaggacggcctgaaggagaccatcgcctacttccgcaagcgcttgcaggaatga

SEQ ID NO: 506879 - DNA, 1200 bp, Stenotrophomonas maltophilia
atgaaagtaggcatctataatcgttactgggccacgatgggcggcggtgaaaaacacgtcggcacgatcgcggagatcctgctggccgaaggccaccaggtggacctgatccgcgtcggccccgtcgacgaagcagagttcagtagcaggatgaacctcaacttggcgggggcacactgggtcgagtggcccggctcctcctgcagcgagctcgcgccacgctcggccgggtacgatgtattcatcaattccacttactgctcttcgatggtcccgcaggccagaaaatcgctgtacctggcattctttccccatgaactcatcgaggccgcgccgcttcccaggctttttcagcgtgcggcgggaagatttgatcgtaccggacacccttggctttcgcgtatgtcgagtttggcgcagcgcacgctgcgtcgtggcgtggcgtccagtcggcgcccgttcatcgacagttacgaagatccgatggcgaactctgaattcacggcagcgtggattcgcaagcgctgggcgcgtgatgccgtggtgcttcctccgccaatcgacgtggagcgcttcggctcggtggacctgtcgaacaagaagaaggtcattctgagtgtcggccgcttcttctccggcggccacaacaaaaagcatatcgagatgatcactgctttccggcaaatgcacgacaagggcctcgtgccggagggttgggagtaccatctcgccggcagcgtccatgcggaaagcgaggagcatcgccgctacttccagaaggtcaacgcactggcggagggctatccgatccgtattctcggaaaccttggatcacgggagctgctgcaggagtatgcggaggcatctatcttctggcatggtgcgggctggggggagcgtggtgaccaggagcccgagaaactggaacacttcggaatgaccgcctgcgaagcgatggccgccggcgtcgtacccatcgtgcagccgttgggcgggccacgcgaggtcgtcaccgacggcgtcgatggctattacttcagtgacgccagggaactccaggagcgcaccctttccttgatgaagctctatgggacgcccgaactggcgcagtgggccgcccgcgcacgtgccagcgtccagaagtattcgcaggcgaatttccgggccgtcttcatcaaattcttcaacacgatcgcttga

SEQ ID NO: 506880 - DNA, 2520 bp, Stenotrophomonas maltophilia
gtgagccatgatcgttcccaggtgcctgacggcgagatgagcttcaccggcgaacggtttctgccgggcgttagcggcgaaatcgagatggagcactaccaccgctaccagctcgcatcgcgcattgtcgccggcaaggatgttctggatatcgcctgcggcgaaggatatggatctgccctcctgtcgatcggtgcggcgcgtgtcaccggcgtggacatcgatgccgtggcggtggcgcatgcggcagcgacctatccgcgcgaggggttggagttcaagctcggctcgtgcgccgccatcccggtgcccgatgcgagcgtggatgtggtggtcagcttcgagaccatcgagcaccacaaccagcaccaggagatgatggcggagatcgtgagagtgctgcgtcctggtggcgtgctcatgatgtccagcccggatcgctacgagtactccgatcgtcctggtttccgcaatgagttccacgtcaaggagctctacaggcaggaactggaggcgctggtgggggattacttccccaactaccgactgctcgggcagcgcaccacgatggcctccatgatcggccgcgttgccgatggcggtggcgcggccgagccggtagcgccaggaatccattactggaccgagagcgaagggctggagagcgtccgctcgggcagcatgccgcgcgagccggtctatttcatcgtactggcgtccgccggagccttgcccagcttgccggactccgtgtttgaagttcccggctattttgaatcgcgcgtgcagcaggtcgcggacgattaccggcgggagatatcacgtattggccaagagcgcgacggtatgctgcgcgacaaggatgtggcgtgggaagcgcgggtcgagcaggtggctgccgattaccggtccgagataagccgcatagcggccgagcgtgaccaagcgctggccgacaaggacgctgcctgggaggcagagctcaggaaagtcgctcgggagtatgaggatgcccgtggtgctggtaccgcaggcggcgacagcgcggggccgacggcccgcatggaagccgcgccggcgacggtgccggcagggcatggtgctgggtcgctggcgatcgattccgacgatggtgctggcgcgggaggcgcgggcgattggaccggcatgttgcccttggtcagtctgatcgtagtcaactacaacggcatgcgttatctccagcccttgttggcgagccttggcgccttgaactatccgcgctatgaggtcgtcatggtggacaatgcctcgtctgacggctcggtggacttcgtccgctccgccttcccgtgggtaaggatcgtggagtcgggaggcaaccttggattcgcaggaggcaacaaccttgggatgcaagtggctcgtggcgacctgatcggcctgatcaacaacgacaccgtcgttgatcccgattggttgtcggcgcttgtccgggcactgatggacgagccggatgtcacggcggcgggttcaaagatcctgttcttccggcgatacgtcgagctgacgatagaaagcctgccgttccagcccagtgcggggggccagtccagcgatacgcgcgagcttgggatgcttgttgacgaagccagtggttttgtcgaaagtggctacaagaagcctttgtacggggagggcttctggggcagggaacagcacggagaccggagcgtgcgctggacgagcgggcggggcacgatccgcctgccgctaccgccggatccggttgatggacggtatgttcttgagttggatgtctccgggacgaatgccgcagcgggccgtgaattcacggtgagcctcgcgggtacggtgctgggcacgggtgttcttgcagcggattatgcaaagcatgtgtttacttgcccggccgccctgctcgatggcgctgcctgtgacgtcatcaataacgctggcacgctgctcgatggcaatggcgaggcgggtgaccgtggaatctacgaggacgaccgtggtcagtatgatgagccggaggacatgcaggccctttgtggcgccgccatgctcatgcgccgctctgctctggtacaggcggggctctttgattcgaactttttcatgtactacgaggacaccgacctgagctggcgcctgcgcaagggcggggggcgcctgcgttacgtgccggccagcgtcgtacgccatgtgcatacgggatccagcgtcgaatggtcgccagtctttgttttccacgtctccaggaatcatgtgctgatcaagatcaaacatgccccggccgccgtcgcgggccgggcctacggaagggaagtactgagatgcctgcgctctgcagtcgcggcagcgcgtcgcggcttcactgacaagcgcctgaacgcggagttcgggctgcgtctgcgcatccagcgtgacctgttcaagctgcttccagtcgtactgcggcaacgttggggcggcctgccgtcctgcaaggatcgcatcggggccgtccccgcatga

SEQ ID NO: 506881 - DNA, 1428 bp, Stenotrophomonas maltophilia
atgtcatgtgaaaatccgggccagcccgaactcgccatcgaagtgaccgggttgggcaagtattacgagatctacgccgatcccaaggaccggctcaagcagttcgtcctgccggtgcttgatcgggcgctgggtggcgaaccgaagcagtaccaccgtgagttctgggcactgagggacgtttccttcaaggtccgtcgcggcgagaccgttggaatcatcggacgcaatggctccggaaagtcgacgctcctgcagcttgtctgcggcacgctgacgccgtccagcggacaggtgagcaccacgggccgcatcgccgcgttgctggagctgggttcgggcttcaatccggagttcaccggtcgcgagaacatcatgttgagcggagcgctgttcgggctgacggcccagcagatggaggaacgctacgacgacatcgtggccttctccggcatcccggatttcatcgaccaaccggttaaaacttactccagcggcatggtcgtgcggcttgcgttttccgtgatcgcccacgtcgacgccgatatcctggtcgtggatgaggcgctctcggtgggagatgcctacttcacgcagaagtgcatgcgtttcctgcgctctttcatgaagcgagggacgctgctcttctgcagccacgacatgggggccatcatcaacctgtgcgagcgcgcaatctggctcgacaagggtgtcatgcgcatgaacggcgcgcccaaggaactgtcgcaggagtacctggcgtcgctgttcgaaccggaggatggcagcatggcagagactgctctggtcgaaggcggtggaggcgaagtcgaagtcgaagacacgtccgcggatggccagccttccccgttggagttgaccgcggaacccgcctatgtggatatgagacagacgctcatcgatgcgtcgatgctccggaacgacatcgaggtcttccagttcgacgagaaccgtgcttcgttcgggacgggcgctgcgcgcatcaccgcggtgcatctactggatgcgcagggccagaaggtgaactgggcgataggcgggcaggacgtcaagcttcggatcatcgcgcgcgccaacgaacagatcagccggcccatcgtggggttcgtcgtgaaggacaagctggggcagataatctttgccgacaacacatacctggcgcaccgcgaccgtgccatcgtggttccgcgcaacggcgaggtcgtggcgacgtttgatttcagatttccggtacttccagcgggcgaatacagcatttccccagccatcgccgagggcacccaggccgaccatgtccagcacgagtgggtgcacgatgcgctgatcctccacgtgcagtccagcgccgtctgcctggggctatttggtgtgccaatgcgaactattgaactggaggcaacgtcgtga

SEQ ID NO: 506882 - DNA, 816 bp, Stenotrophomonas maltophilia
atgaatgcgataacacctgctgccatgctccggtcactctggagcaatcgcggcatcatctggctgctcgggaaacgcgacgtccagaacaagtacaagggatcgttcggcggcttgttatggacactgatcaatccgctgttgatgctgctcatctacaccttcgtctttgcagtgatcttcaaggcccgctggcatggccaggtaggggacagtcgggcccagttcgcgctcgtgatgttcgtcggcgtcatcatccatggcttcttcgccgagatggtgaatcgtgcgccgggcatgatcttcgagaacacgaattacgttacgaaggtcgtcttcccgcttgaagcgctgccggtgatcagcctcggctccgcgctgttccatacgctggcaagcgccttggtgctgctggtgggcctgttgatctgcaatggcggcctccattggcatgcgctgttgttccccgtggtgttggcgccattgctggtgatggctgtggggataacttggatactcgccgcgctgggcgtgttcatccgagacctgaagcagaccaccacgttcgtcaccactgcaatgctcttcctgtcgccggtgttctatccgcaatcggcgtggccagagaaataccagaaactcttcctgctcaacccgcttaccttcatcatggagcaatcgcgccaagtgctggtgtggggcaagctccctgatttcgtcggcctggcggcatacctgtcgatcgcgctgctcgttgctttcgcagggttcgccgtgttccagaagatgcgcaaggggtttgccgatgtcatgtga

SEQ ID NO: 506883 - DNA, 1491 bp, Stenotrophomonas maltophilia
atgaagacttcgatcctgggactgatcgcccatccattcgacagcaatgccaaggacgcgttcggcgcagctcttaagacaccactttcaaatgtttttaagctttcgactacccacgacaccaaagactacggatacacggtctatctcgatacgcctaaaggcctgctcgccgaaaaagtaagtatctattgggtagcaaagacgaccaaccgtcaccggatcgtcgtttctggcgcagaaaaaggcgacggcaatttctcatacaacaccaccttccttaacctaaagcgactgtatccactggtggacaccaaagctaagccatccactagcgcggtccttagtgccagcgaagcggcagatctgatcgatttctacgaatcagtatttccaagcactgaatatagttcttttaccccagtgcaagagcgtgcattgaagacgaccttcggtccgtctggtgctgctgccacgtatgactggagttcgatatcctcaggcgaggacaacctaggcgcgattttcaacagacttctaggattttcccgacaaaagaagactgccggactgggcaacggaattctttgcattgacgagatggagtgcagccttcatcccgtcgctcaaacccgcctcatggattacctttatagatggtctaagcgcaattccgtacaggttgtcattaccacccactccctccatctaatccagcacgcctacgccactcacgccaaagatctagcagccaatcgcatctgcataaacttcatcagcaaatccaaagcaacggcaaagaataccccaatcctacacaatccaccgcaagaaattgcattcaaggaactgacatttacggatccggaagacgccgccaaggccaggaaggttgacatcttctgtgaggatgatcacgcaattcacttcgccaaaaggcttataaagaagcgcaaacttcttgacttggttcaattccatagctctctggcgccggaaagcaatcggcccggaacttcgtactccgatctagcggcactctgcataagattcccgttactgataaaggactcgttagtcctgtttgacgccgacgttccagcaacgcaaacagatgccattgcggataagtccatgtacttccagctccccgacaaggatgcccttgcaatcgaaagaaggataataatattcattatctctcttttggacgatgacgagttcttttccaaatttaagaaggaaaaggaagtcttccttgcagaattcaaggatgtaggaattaaggccctcgcagtcgacaaggtcgctgacgagaagcaggtcgacataaagacttgcaaaaaatgggctgactcagacccagcgaagttcagaatgtatgttacgcattatgccaacacactggacggaacccaattcaggaagacttttattgatcgcgtaaataatataaacttgcgactcggccttccccctgtatcggagtga

SEQ ID NO: 506884 - DNA, 864 bp, Stenotrophomonas maltophilia
atgtactccaataaactttttactcccttgcgctatccgggcgggaaggcagcttttgcgccatttatagcagctgttcttagtgagaacgggcttctcggcggctcatacttggaaccctatgcaggcggtgctggcgttgcgcttgatctgcttttcagcggcgccgctcggcatatccatatcaatgacgccgatccagccgtctaccacttctggctggccgtcaaggaagatcctgagggcatgctacggcttgtgagagacacaccaatcaccatcgaagcttggctgcagtggcgggacgtcctacgcggcaatgtcgacgcctctcctttggagctcggctttgcgaccctgttcatgaatcgaaccaatagatctggaattctgaagggcggagtaattggtggtttaaagcaggatggcacatacaagcttgatgcacgattcaaaaaggatgtgatttcaggccggatcagtcgaatcgcctcgcacgccgaagctatcaccgtctcttgtgaagacgctctggcaatcctcgccagagcagaggaaattgtgggcccgaagggctttatatatttggaccccccctactacattaagggcaaagggctataccgaaactactattccgaccaggaccatcggggcattgctgagtatattcagtcggataccttcaggattccatgggtagtctcttacgataacgtagaacctatccatcgcatgtacagcaggtccgcgggcctggtgtatgacctcaattacaccgctcatcggaagtatcgagcaagcgagtgcgtgtttctctccaaaggtcttaagcctcctaccgccaaaacgaaggcggcatag

SEQ ID NO: 506885 - DNA, 375 bp, Stenotrophomonas maltophilia
atgcgcggggaggacgggtcagtcttctatgactcgaggcggaaggggttgcgtgtgctgcaggttgtgccgctcccgccgccgccggtcaacacgccgttggttgaggtcggccagttcttccctggcaccaagattggcattgccatcccatctcccaggttctattacgcatcaatatcccaggaccggtgtactgcctacgccgatgctttccacatgacgagcgacaatagaatcttcatgtcgaagcatgagacgttctcgcagaccctgatcaccaacaccttcccggtgggcggggtgacgatggggccgcagaacgccacgatcttcatcgtggacctgaccgaggtgccgctggggttcgggtaa

SEQ ID NO: 506886 - DNA, 1110 bp, Stenotrophomonas maltophilia
atgctcggcgctgtactgcgcgaccaggccgtccacccggttgcccaccgcggtgaccttgccatcgatctccgtaacgtccagctccagctgatcgattcgcccggccaacgcaccggcttcggcgacggcgtcgcccacgctcttccacttcgtaccgggcggctcctcattgccgggggcggcgtcagtccacaaccagatcttgccgttgcgcaccaccgtctggcccggctcgtacgtcgcatcggcgacccagatcaacgggacgatgctgctgatgctctcgatctccgacagcagctcctgtcccagcgcgctcttgttgatgaggccggagaagtacgcgtcgtactcggtcacgtcggcgctcgattcgcccaccacgcctgcaccggccggataccacggcccgatgttgccgctgcgatccaccagccggccccagaagtagaacttcgcgccggcggccaggccatcgagccggtgccggttctggggataggcgaaatcgcccagcttcgtcgcgctttccagactcggtccggggctgcgccagatctcggtgcgttcggtgtcggttgccccaggcgggaacgcccaggccaactggataccgaacaccaccgacgcggccgtcagcgaggtcagcgccggcggcggctccgtcttgccctgaatgtccgtgaggacgctgagggccggctgcgacacggcattgagtgcattcaccgcacgcacccgggccaggtacttgcccgcgtagatcccccgcacctccgcgctggccgtgcccacgcgcccgacacgcacccagttcaggtcgtcccggcgccattccacgtcgtaggcaatggctttggcggctgcgtcccactcgatggtcagcaccggtgtggcgatgccctggtcgatcaccacatgggacgacatgcgcacattcgccggcggcggctgcacgctgggcggcacggtgctgaccggcggcggctccagccgggtgttgctgtaggtgaaccgcccgatcgtgaaagcgcaacggcacacctttgcgagaagtgcgtcttggcagcgctcagcgcctttgccgcagccggggcgcagccatga

SEQ ID NO: 506887 - DNA, 1149 bp, Stenotrophomonas maltophilia; identical to SEQ ID NO: 504017

SEQ ID NO: 506888 - DNA, 360 bp, Stenotrophomonas maltophilia
gtgtggctgcgcctgagcgaaccggtgggcgatgcgccggagctgcaccaggcgctgctggcttacgcctccgacttccacctgctgggcacggcgaccttcccgcacggtatcagctactaccacccgcacgtgcagatggcctcgctcgaccacgcgatctggttccaccgcccgttccgcgccgacgactggctgctgtattcgctggacagccccagcgcgcaggattcgcgcggcctggcccgcggccagttcttcacccgcaatggcgtgctggtggccagcaccgcgcaggaaggcctgatccgcgtcgttcccgaccaggccgcggccgctgccgtgccagccaaggagtaa

SEQ ID NO: 506889 - DNA, 558 bp, Stenotrophomonas maltophilia; identical to SEQ ID NO: 503995

SEQ ID NO: 506890 - DNA, 612 bp, Stenotrophomonas maltophilia
atgacattgaacattctggcaatcggtgcccatccagatgacatcgaactcggttgcggtggcagcctggcaaagctcgcccgcgccggctcacgcatccatgcactggtactcagccgtggcggccggggctgccacgccggcatcgaccgcagcgatgaatcgcatcgcgccctgcaccggctcggggtggccgaggtgatccagcaggatttcccggacacacgattccccacctgccgcaacgacatcattgcgtcgatcgaacaggtctgcacgctgatcgaaccagaccgcatctacacgatgtgtggtgaggatcatcaccaggaccatcgcaccgttcacgaagcgtcgatcatcgcctgccgccacattccgcagatcctctgttatgagagccccagcaccctgccgcagttcgcgccgcaggtgttcgaggacatcagcgcgcagctggagctgaagatccacgcgctgcgcgagcatgccagccagggcgatcgccactacatgcaggaaagccatctccgctgccatgcgcagttccgtggccagcagatcggcatcggtcccagcgagggcttcctgccctaccgtctggtgctttga

SEQ ID NO: 506891 - DNA, 186 bp, Stenotrophomonas maltophilia
atgtcaaagcgtcgcaagttcagtgccgagttcaagcgtggcgcggtggagcaagccagtcggcccggtgtcagctgcgcccaggtggcccgtgagctgggcatccgcgacagtctgctgacccgttggaagcgggaggcggagacggtggggaaagccgcctttggaccggccagagttccgtag

SEQ ID NO: 506892 - DNA, 816 bp, Stenotrophomonas maltophilia
atggcctggctggcacgtcagctgcgggcggcgatgctggcctgggtgggtaaaaaagccgggacgttgcgtagcgtgccggtacggcagatgctgcatggggccaatgcgctggccgactggttgtcgcgcgccttgctgctggtggcggtgctggtgctggccgaggaatggctgcgctatgtattccatcagttcgactacacccagccgtgggcaacgacgatgacgttgtggctcgctgcccaggccaaagcctggttgtgggcgggggtggcggccatcccggggctggtgacggcgctgatcattttcctgctggcacgcctggccagccagatcatcggcatcctgttccgcggcgtgcagcatgggcgtttccagttgttcggcatcgaccgccagttggccgaacccagccgcaaactgatcgtcgcgggcatctggctgtttgcgctggtgatggcctatccctatctgcacggctcgggcagtgatgcgttcaagggcctgacggtgctgctgggcgtgatgatctcgctgggcggatcgagcatcgtcggccaggcggcggcgggtttcaccctgctgtattcaaggacgatgtcggtcggcgatctggtcaaagtggcggaggtggaagggcaggtgatacagatcggtttgttcaccacccgcatccgcacccttaccggggtggaggtcagcctgcccaacatgcatgtgctcagcggcaagctgctgaactattcgcgtgatccgcaggcggctggcatgtggctgggggttctaccccgaaatcacggacggttgtga

SEQ ID NO: 506893 - DNA, 363 bp, Stenotrophomonas maltophilia
atggtgattcgagcggtgcagatgactgtctggcagcgtcagggccgccatctggtaatcctacattccgatcgtggcagtcaatttcgaagtggcgattatcagagctacctgaaagccaatgcgcgggcgtgctcgatgagcgcggtcggacattgcgacgacaacgctgcatgcgaaggtttctttggcatgctcaagcgcgagcggattcaccgaatgagctggccaacactcgatgcggcaaaagccgatgtgtttgaatacattgagcggttccacaaccgccggatgcgacggaggaccgccaagcgcgacctgaagttctcaaccctttcacaaccgtccgtgatttcggggtag

SEQ ID NO: 506894 - DNA, 252 bp, Stenotrophomonas maltophilia
atggtttgcagggctggccgcggcccaagcgtcgcggccagcgtagccggcctgcgctggcgcccccccccgggcgtgcgtaactggttggagcgggacttcactgcgctggagccagaaactaagtgggtcaccgacatcaccgagatcaagacgcaacagggcaagctgtatctgtgtgtagtcttggacttgtttgaccagcgtgtcgtgggctggtcgatgcatcaccgacaagaccagagatggtga

SEQ ID NO: 506895 - DNA, 603 bp, Stenotrophomonas maltophilia
atggtctggcccggaatggcctcgcactcgcccttcttccagtcggctacgccgaacggcatgcccagctcgttgggggtgtcgtgcagggtcggcaccagcaccaggtccttctccacacccagcacgcccggcgccatctcgctcacggtgcgggccacctccttgaagatgtcccagtcactgcgcgattcccaggccgggtccaccgccttcgacagcgggtggatgaacgggtgcatgtccgaggtgttgaggtcgtccttctcgtaccaggttgccgtcggcagcacgatgtccgagtacagcgcggtggtgcacatgcggaagtcgagcgtgaccagcaggtccagcttgccttccggcgcctcgtcgcgccacttcacctcctgcggcttcactgcgcccatttcgcccaggtccttgccctgcagcccgtggcgcgtacccagcaggtgccgcagcatgtactcgtggcccttgcccgaggaacccagcaggttcgagcgccagatgaacatcatgcgcgggtggttctggctggcgtccgggtcggcgaaggcgaagtccagcgagccgtccttgaacttgcccagcgcatag

SEQ ID NO: 506896 - DNA, 681 bp, Stenotrophomonas maltophilia
atgccacgttgccgccgccaaagccacggtcaacgccatactgggccagcagcaggtcgtagaccgtggccaccagcgtctcgccgccatcggccgtggccagccggcgcaccggaatgttgcggtccagtacttcttcggccggtgcagcggtccagccatcgctttcaatgccaccgaagtacgggaagctcactgcctcgatgccgtcgttggcctcggacaagctcaggcgcaggcgtgtgtcggcgccattgcttgccttctcttcgatgttccagcggcccttctcaccccagcggaaaccgatcgagccattgggcaccacgatctggccgctgttctcgtcgtaggccagggttttccaatccgggttgttggcttcacccagcccgcccagctcactggcacgcaggaagcggcccgccaccaggcggccatcgtcgcgacgttccaggcgcaccagcatcggcatgtccgagtattggcggcagtagtcctggaaatactgcgagggcgaatcgacatggaactcgcgcaggatcacatggccgaacgcaaaggccagcgccgcgtcggtgccctgcttggggtgcagccaatgatcggtcagcttggcaagctcggaatagtccgggcagatcgccactgtcttggtgccgttgtagcgcgcctcggtga

SEQ ID NO: 506897 - DNA, 213 bp, Stenotrophomonas maltophilia
atgatctcgttggcctcttcccactgcaggcgcacgaagccgcccatgccgcggcgggtcttgtacgaacgcgccttctccttgtcctccacgatgctggcccaggcatcgaccggggccttgctcttgcgtgcttcgcgccacaggcgcagcagcgtgccgcggatcagcgggtacttcagccggttggcgctgtacaggtaccaggaatag

SEQ ID NO: 506898 - DNA, 1572 bp, Stenotrophomonas maltophilia
atggaacgcgagcccccgcatcgcccgcatggcgctgaacaccctgcgctggatcgcgtccgccgcgaaggccgctggtggtggctgcaggcacgtcatgcgcggcgggtctggcgatgggcgctggtcgcggcgctggcggtgttcgtgctgctggtgctgctgcgcaagccgctggccgactggttctgggacgagccgcagatcgaacagctgctggtcgaaggcgatcgcgcgctcgccgccggccggctgagtgcggccgacggcagtggtgcgcgggagcgctaccaggcggtgctggcactggatggcgatcggccgcaggcgcgccagggccttgcacgaaccgccgcggcagcactgcagcaggcccgcgacaagctgcagggcgacgatctggagggcagcgcgcagtcactggcgctggcccgcgagctgcaggtgccgcagggcgacgccgacgccgtggcccgccaactgcaggcgcggcgtagcgccggcgccggtatcggcgcgttgctggcccaggcccgcaatgcgttcgcggccggccggctggacgatggcgacagcagtgcgttgccgctgttccagcgcatcctggcactgcagccggacaacctgcccgctctggaggggcgcgaggatgcactgagcgatctgctgcagcatgcgcgcgcgctggccggacgcggggaactggctgaagccgctgcgacgttgcagcgcgcgcgcctgttcgatgcaggccacgccgatcttcccgccagccaggaggccctggcacgggcggtcgacgagcgcttgcggcaggcacagcgcgcacttcagcgacagcagctggaacgtgccgcaaaggggttcctggccgtgctggcggtggcgccggacgatcccactgcccagcggggccgcgagcaggtgctgcaggcggtgctggcgcgaagccagatccaggccgacgatttccagttcgaggcggcgcagcgtgatgccgtgctggccgaagcactgggcgcttcgcaggcggcacgacagcaactggtgcagcgcctgcagcgtgcacggcaggcccgggaggcactgcagcagcccgcagtgagcaacgcgcagcgtgaacgcgagctgcgcgatcacctgcgccggatcgaacgcgccgagcgcgcaggccaatggatcagccctccggggcacagcgcattcgatgcccttcgcgaagcacaggcgctggcaccgcgcgattcacgggtgaaggccgcggccgcgcgcctgctgcctgccagtcgccgttgtttcgacgacaacctccggcagaacagggtgcaggctgcaggtgcctgcctgcaggcctggcagacgttgtctcccaccgccggcggcctgcctgcggcccgccagcgcctcgcgcagcgttggattgcgattggcagcgaacgattgggcaacggagatgtcgcctttgccgaacgcgcgctccagcaggcgggcgagcttggcgtcggcccttccagcagcgagtaccagcagttgcggcagcgcctgcgcgacatcggggtgtcgtcgccctga

SEQ ID NO: 506899 - DNA, 264 bp, Stenotrophomonas maltophilia
atgaaccacgacaagtctcgtgacctcgaaatagcccgtactatcgaaggcactatccgtgccagcgtgctcaaaacctgcgtggtggttctgattttgttcggcaccgtaggcatgtcagcggacttgatagggcctctccctactgccctggttgtgctgtatcaggtctgtcttggtgctgccgtcgtagcgttcattttgtatgcgctgctgcattggcgaactcggcgcgcaattcggcgcctgaacgatccgcgctga

SEQ ID NO: 506900 - DNA, 1362 bp, Stenotrophomonas maltophilia
atgaccctgcagcacatccaggacagcaacagccacagcgaagagccggctcttgaagcccgcccggcagatgttgtcgaagctgagagctaccggagcgatttgaccgctacctattccccggacgacaacaagctgaggctgtatgcggccggtcgactcgatcaggagaccaaagaccgtgtgatcgctgccgggttcaaacgggcacccaagcaaggcttgttcgtcgccccgatgtggacgccgggccgcgaggatctgttgttgagcctgtgcggtgaaatcaccgatgaggacaccagcctgaccgagcgccaggaagatcgcgccgaccgcttcaccgagtacagtgccaatcgacagaaggacgcagacacggcacaccgcgctgtagatgccatctgcgaacgcatcccgctggggcaacccatcctcgttgggcaccacagcgagcgcgctgcgcgccgcgatcaggcacgcatccacaacggtatgcgcaaggcagtgaattgctggaaacagtcggaatactgggcacggcgcgctgccgcgtcgctcgcgcatgccaagtacaaggagcgccccgacgttcgcgcacgccgcatcaagaaaatcgaggcggacaagcgtcgcgcagagcgtgaaattgccgaggccacccagctttgcggcatgtgggagcggggcaatctgactgcggagcaggcgttgaagctgaccggcatgcacagtctgtggttcacggttgaagtggacggcgcaaaggttcagcgctccacctggtcgctgctggaatcgggccagtggacagccgagcaggtggcgcagcggtcgaccgcctcctatgcggccaacatcgcgcggctgacgcgctggattgcccactactccctgcgcttggactacgagcgcgcgatgctcggggaggtcggcgggctgcccgcagaccgcttcgatattcaggcaggcggctctgtgcttgttcgcggggcatggcacacggtggtgcgtgtgaataagcggggtggccgcatcatcagcgttcggactgatgcgcagttcgtccctgtccgtcccgtcgaagaagtacgcgactatcaagcccccgccgagggcgcaggcgaggaggccaagggtgcaaagctcttccttgggccgatcatcaatgtcccaggcgcgggcgttgttgaaatgactgccgctcaattcaaggccacccatcgggattacaagggcgtccagcgtgtagaggccacccccaccagcgccgcctatcgctaccgctcggtggtgcatcaaggcgccctggttcaggtctacctgaccgatgcaaaaacggtcacgctaccagtcaagtaa

SEQ ID NO: 506901 - DNA, 489 bp, Stenotrophomonas maltophilia
ttgcccacgattaccgacgccgatcgcagctacaagcttcccacccggcctaccgcagatcagctcatcgcggtggcctgcgaaatcctcgccggccgccaccaggtcggcgccgaagtccgcgaccccacctacaccaagcagcttttgcagctgcgcatcggcgacaacgatcgcgaagtcgtctatgcgctcttcctggacagtcagtatcgaatccttcatgaggagaccctgtttctcggcactatcaacaccgcgcccatcttcccgcgcatcgtcgtgcgcaccgcgctggcttggaacgccgccgcttgcatcatcggccacaaccacccgagcgggcatgcctacccatctgggtcggacgttgaaattactcgcgagctccgcaaggcgcttgagctggtcgacgtgcgactcctcgaccacatcgttgtatcgcgaaccgacgccgtttccatcgccgaacgcgggctgctgctatag

SEQ ID NO: 506902 - DNA, 381 bp, Stenotrophomonas maltophilia
atgtccgatacatcgcccctacacgtgccaaccgcctatccgcccgcagacgatgcggccggatacatgccgctgtcagtggtctatgccgcgctcgatttcgttgttcactgcgccggtgagaccgacaatccgcccgcctctgcggccgccgcccgcgacttcctcacacactggatgcggctcggtccgagcccgagtgcggcccagctcgatgcagcgcgacaagccatgaccggcgcctccgttgagctgatcgccggcctgcacaaggctctggcgggattcatcgccgacctcgaccagcacccgagctcgcgtccgggcaccgtgttcggtgcttaccatgccccactgcaagagttgcggcttgggcaatag

SEQ ID NO: 506903 - DNA, 840 bp, Stenotrophomonas maltophilia
atgaacagcaccgacgacaatgaccaggccgaacgagtcatcgccgcactgcactccgtagcacgcccacgaatctatgacgtgcgcatcatcagcgcgcatgcggatgaaccccgcgtcgatgagccggtgaacatgaattacgtcgtggagatgcccggcgtgccggggtgcatcaccctgccctccgcgcaaagtgcgctttccgatggaaacgtgggcagcattggctaccttgtggcggccaagcatcacggcagcgtcttcagcggcagaaaggtcttcttctacccgtatatcgatcagacccttcgccgcgaacccctgatcgacggagccgaggggctgggctggacctgcgacaacaggcattttcctttcattgccccacaccatatcgtccccggcagttccggtcagttcgtgccggatgccaccactccggtgaccatccacgtcccctccgagttcgtggaaatttgcgcacaattccagcagtcgcctgatagtgtgctgcgcgctttcatcgctgactcggcggggctcatgaacttcttcaactgcccccgcgctgatggctacagcagcaacggcagtgatgagcgcgacctggccgaacaatacctggaacggacattcgctcatctccggttggaaccggaagagcaattccgccgcgaacgtcagcaagaggaagccgaggagcgcgaaggtgtcgcatccgatcttgcggcagccctggacgactacgtagacgctggcggcgatgccaatgccctcatctcccaagtcgaggcgatagtgctggcccagcaaaagaaagcgcaggaggaagattga

SEQ ID NO: 506904 - DNA, 1749 bp, Stenotrophomonas maltophilia
atgtctcgactgcctgactccttcatcgaactgctgctcgacaagaccgatcttgtggccctgatcggcgagaagctgatgctgaaaaaagtgggcaaagagtacgaggcgcgttgccccttccacgaagaaaaatcggccagcttcaaggtcacgcccaccaagggcttctaccactgctttggctgcggtgcgcacggcaccgctatcaagtgggtgcaggagatggaccgcctcgatttccgcgaggccgtggagattctggcccgccgcgccgggcttgccgttcccgtccaggaggccccaagcggcggacgcggccagcgcatgagcggcaccgccgctcaactgctggccgcgtgcgcacaggccgccgcattcttccgcgaacagctgactgccgatctggaagcgcaggagtacatgctgcagcggggtatcaccgccgagatggccgagcggttcggtatcggctacgcacccaacagctgggacggcctgcgcaaggaattgaagatgttccgccgcgacgtgctggtgcgcgcaggcctgctgtcgcaagccgataacggccacgcctacgacaagttccggggccggatcatgttcccgatccatgaccgcaggggcagggtcatcgcctttggcgggcgggccatctcgcccggcaccagccccaagtacctcaacagccccgagaccgaccttttccagaagggcagcgagctgtacggcctgtcggtggtcctccaggaccatccggcaggcgctcccgagctggtcgtggtggagggatacaccgatgtgacctcgctccacaaggtgggaatcaccacggcggtaggcacgctcggcaccgccgtgactgccgatcacgtccagttgatgttcaaggctaccgatgatgtgacgttctgctttgacggtgacaaggctggccgccgcgccgcgtggggcgcggtagaggcggtgttgccggtgatgaccgatggccggtccgcatcattcatgatgttgcctgaaggcatggacccggacgaggcggcccacgccgagggtggtgaccgtttccgcgagcgtctggcggcggcggtcccgctgtcggaatttctgttcgccgagctggtcaagtcggtggacatggccagcatcgagggccgcgccaagctggccaagaaggcgatgccgctgatcgagcaaattcccgagggcgtctaccgcgagctgatgcgcgcacggctgtcggatctgaccggtgcccccacgcccccgccgcccagcgtgaaggccccaagcctcgccgaacgcaccccgatccggcaggccatcgcactgttgctgcgcaacccgcgattggccagccagctgccggtctcccgtgcgttccgcgccgtcccccggcctggtgccgcgctgctggcggaaatgctcgaatacgccaacctcaacccggacgccaccaccgccgccgtcctggactacttcggggaccgcgatgaggcctctgccctgcagaccttggcggcggccgcgctgccggaagatccgaccgaacagctggcggatcttcgcggggcactggaacgcatggacaagcaggcgcgccgccgccgcatcgaactgctggaaacgaagacagaaatcacctccgaagaggccaccgaattgcgggatctgctgcagttcgaccgcgacccgcgtaagcgccgcccggcgccggcgccggccacttcccgcacccgccactga

SEQ ID NO: 506905 - DNA, 387 bp, Stenotrophomonas maltophilia
atgaccaacacccatgccaccgatcacgtcctggaatctcgcgacgccgccgccagcggccacggtgcggccgccaacaacggcggcccggcaccgcacccgctggcgcaggtgccgggcacgatcgccgatttcgccaatgacctggtgcggctgaacgccgagcttgccgccatgggcaggctgcatgaccccgaggaactgcgccgccgcgcgggctgggccgccgagacggcccagcgcgccgggctggacccgctgcacacggagttgctggccctgtcccggctccaggacgacgacgagctgcgccgccgggctggctgggccgctgccgaagccgatgaactgctcggcacctgcggtttgaacgctccccgccgctaa

SEQ ID NO: 506906 - DNA, 2028 bp, Stenotrophomonas maltophilia
atgagcaccgaaactttcaagtccttcaagatcgccgacctgaccgtctccccgcacaacgtgcgctacaaggtcactccgaagccggaggtagtggaggcactggcagacaacatcattgccgtgaacaacgatggccgcctcatcaacccgctgaccgtctacgagtctgagcaggctgacggtggcgtggtcgcaggcaagacgcgcctgctggccctgcagctgctggtgaacgatggccgcctccccgaggacgccgagaccctgtgtgcggtggtgttcaatgaggcgcaggccgtcctggtcagccagtcggagaacaaccagcgcaccaacatgcaccctctggacgagtgcgaaggcttccagacgctgatcgacaagggcatgagcatcgaaggcgtcgccctggcattcggccagaccgcacgctacatcgagggccgcctgcgcctcaacagcgccgcgccggtgctgctggatggcttccgcaaccgcaatttcccgtcgatggaacagctgatggcgctgaccctgaccaatgaccatacccgtcaggtggccgtgtgggagagcttcaaggactatccctacaactgcacgccgaagcgtctccgcgccgcgctgaccgagccggacgcgatcgatgccagcacggaccgccgcattaatctcgtttccgtggccgagtacaaggccgctggcggcgaggttcaggaatcactgctgaccgatcacagctacctgctgaacccgcgtctttttgcacagctggtggaggacaagctgcgcgccgtcgctgccgacgtgcaggccgagggctggtcgtgggtcgaggtggaaacggagaacgtcgataccgcagcggtcaagtattcctacaccaagcccgagcatatcgacatgaccgaggccgagcgcgatcagctgggcgcgctggaagaggcgcgtatgcaagcctccgaggtgtacgaagacaccgcgaatggtagtgacgaggaaatagcggccgaggctgccgttgaggcggcacgtaatgcgatcaccgcgttctgcgacaagttcaagaccttcaccagtgagcagaaagcattcggcggtgccctcgtcggtttggatagcgatggctcgctggaaattcgtcggggcttggtgcgtccggctgaccgccgcgatctggatcaggccgccgccgctggccgcctcagcagcgccccgaccggtggccgtgtgaccggggacgcgggtcgcccgaaggaagaaatgagccgtgcgctggtcgatgatctgcgcggcctgcgcatcatcgccgtgcagaacgcggttgcgaagaatgcccgtttctccaaggttctgatggccttgtgggccgtggaggaactggcaggcgactcgtttgactacggcagtgatggcctcccgaccgacctgggcatttccggcatgggcctgcggggaaggctggggcagctgggccgggcagtgcaggccgcccgcgatgagcaggaagaggccttcagcgcagttgtcgctggtctgccggacaacgccgtggagcgttgggctgcactggcgcagatgagtgatgaacagctggattccatcatcgctcacgcattcgctaccagcctgtgcccgagcgacaagcacgaaggtgtcaccgcgctgctgctggacgcagtggaattcgacatggccgaccatttcaccgccacctccgagaacttcacttcccgcgtgtccaagaagctggtggtgcaggcgctgggtgaaatcggtaaggcaactgatgccgacgtgctgctgacgatgaagaaggacgggctggccgatgtggcagcgcatcgcctgaacgggtccggctgggtgccggaactgatccgcaccccggcccgtccgcagaagcagccggaagtggatggcgaagctgaggctgacggcaaggctccggccaagaaggcggccaagaaggcgaccaagaccacggccacgaaggcggccaaggctccggccaagaagaagtaa

SEQ ID NO: 506907 - DNA, 237 bp, Stenotrophomonas maltophilia
atgtggaaaacagactggcgaaaggcagttctgaaagacctcaaccgctacggattcggccttaccgacgacaaccgaatcgtgctgaaaagcggcaatcactccaccgtcgtcatccaccacaacaacaacatcagccgtctccaagcgcgcagcacaacaggaaatctgctttggaccggcaagcgcatcagcgcctttcttgaagccttttggcacgcaacaccgaatcactga

SEQ ID NO: 506908 - DNA, 360 bp, Stenotrophomonas maltophilia
atgaagaacaacgcaacccccctcgatcactcgcgcaagcagaagcaacagcaaaagcagaagccggctccaggagctcgcaaagcagccatctccaagcagagccagagcactgctgatttcaaggaaatccccaagggctacgtggtgcgcagcggcgattccatcaccgccaaggctgtgcggaacgtggggccgaaggacatggaagttctggaacacgccatcgccgcgttcggccacctgttgaagccgttcgcggtccagacgctggcgggcttcgcttcgatgatcgagctcgcctacgcccatcccaaggcccgctctgtggccgacaccctgcaccgcctttcggcctaa

SEQ ID NO: 506909 - DNA, 1881 bp, Stenotrophomonas maltophilia
atgaactacgaggaaacctaccgtcgctcgatcgacgagccggaggccttctggggcgaggaagccaagcgcatccattggcataaaccgccgcagcaggtgctcgactacagcaacccgccgttccggcgctggttcgtcggcggcgaaaccaatctctgctacaacgccgtcgaccgccacctggccgagcgcgccgaccagctcgcactggtcgccatctccaccgaaaccaacagcacacgcgagatcacctatcaccagctgtaccgcgaagtgaacgacttcgccgcggtactcaagcacctcggcgtcggccacggtgaccgcgtggtgatctacatgccgaacatggccgaagcggtgtttgcgatgctggcctgtgcgcgcatcggtgcggtgcactcggtggtgttcgggggctttgcggcgcacaacctggcgctgcgcatcgacgatgccaagcccaagctgctgatcgcggccgacgccggcatgcgcggtggcaagctgattccgtacaagccgatggtcgacgccgcctgcgccgaagcggcgtcgccgccaccgcatgtgctgatcgtgtcgcgtgggctggatgccgccgaaccccgcgtgccgggccgtgacgtggactacgccacgctgcgtgcgcagatcggtgaagtcgacgtgccggtgcagtggctggaagcgagcgaaccgagctacctgctgtacacctccggcaccaccggcaagccgaagggcgtgcagcgcgatgtgggcggctatgcagtggcgatggcgcagtcgatggagaccgttttcgactgcaagccgggccaggtgatgttctccacctccgatgtcggctgggcggtgggccactcctacaatgtgtacggcccgctgatcggtggctgcacctcgctgctgtacgaaggcctgccgaccaatccggatcccggcatctggtgggcgctgtgcgagcagtacaacgtgcgcacgatgttctcctcgcccaccgccatccgagtgctgaagaagcacgacgcggacttcatccatcgccacgacctgcgcgcgctgaagtacctgttcctggccggcgagccgctcgacgagccgaccgcgcactggatcagcgaagcgctcggcaagccgatcatcgacaactactggcagaccgagaccggctggccggcactgaccctgttgccgggcctggagatgaagccggtgcgcttcggttcgccgggcttccccaatctcggctaccggatgaaggtgatcgacgagaacaccggcgaggaagtcgcaccggggcagaagggcgtgctggtggtgtcgccaccgctgccgccgggttgcatgagcaccgtgtggaatgatgacagccgcttcctgcagagctacttcagccacttcaaggaactgctgtacagctcgctggactgggcgatccgcgacgacgatggttacaccttcatcctcggtcgcaccgatgatgtcatcaatgtagccgggcaccgtctgggcacgcgcgagatcgaggaggccatttccagccatccgcgggtggccgaggccgccgtgatcggggtcaaggatgaactgaaggggcaggtgccgctggtgttcgtcaccctcaagcagggcctggatggcgaggatccggcgccggtggtggccgagatgatggcgacggtgaccacctcgctcggcgcggtcgcacgcccggcgcacgtacacgtggtcaatgcactgcccaagacccgctccggcaagctgctgcggcgctcgctgcaggcgctggccgaacagcgtgatccgggcgacctgtcgacgctggacgaccccagcgcgctggaggagatccgccgcgcgctgggccgttga

SEQ ID NO: 506910 - DNA, 441 bp, Stenotrophomonas maltophilia
atgagcgcgcttccctccgcctatgcgacgtggaaagcggtgacggaccgctacgagcaggttgcagaaggagacgaaattggcgtgatggcccgccacgtgtcgtatgcggatctgcctggacacattgcatcccatgagttggatttcgcggggggcaacgtgtggggtctgtcgttcttccatgtgagcgatgagaaccccattgatcctgctgaattcatcttgctggccatcttcggcgaagagcttgacgtgctggtgtactaccccggttgcttcaaagtatcgcagcaccgcgacgaagatgcggaatgcgactgcggcgtgatgctctgcgctgatccggccgagatggatgagatggacgccttcggcctgttccaccagctcgggcaaccgccgcttgccaacatttcattcggttacatcccgtggtga

SEQ ID NO: 506911 - DNA, 297 bp, Stenotrophomonas maltophilia
atgaccacgcggcacgtcaccagcaacagcaacagcgcaaagccggcttctgaatctagcactgcggctggctttcacgtcgtcgggcgctatcggaacgcggacggttccgttggggttgaaattcgcgtcaacgctggcagcagcgatggcggcgcactgtcctacatcggactgtggggtgtaggccgaccggcgaaccgggaggggatgcgggacatgctgcgcgtcatgctcaacgcgcaccgtggcgctatcgccgagattccctttggcaacatgggggcgcgcgcatga

SEQ ID NO: 506912 - DNA, 249 bp, Stenotrophomonas maltophilia
atgctctcctcccctgcctactggtggtcgcactctgacactggctcgtacctgcatttcaattgcagatgcgtggcctacgctcagccgcaggcggacggaaagtggaaacacgtgcttcgctggcaggggcgcgagtttgagagcatcgccggcagtcgcgatcaggccgtgcgctggatcgaggcatggatcagtgcccgccctggagagctccctgcattccccgcgcgccgctctcggcggtag

SEQ ID NO: 506913 - DNA, 669 bp, Stenotrophomonas maltophilia
atgtatcccctcgcgacagcaattatctccgcgttcttttgctacaaaattttccgactgctctatcaggctgagcatgcggaaggggtggcaatgtccaagcttccagggctcgtgcttggttgggcatgcctcaccttcgccgcgttgctcccgatagggatcgcctatttcgacgccttggcgcttggctcaccacggggcattccggccaaccgctcgatgacgccatcggtcgtcatttcaggcgtggcagggctagtgcttgccgctttcgcccttgggtcaatgtggcgtgactaccgccactctcgaaaggtgagcttcctggctgtgggcatgaacatcgcccttgccgcagcaggattgcttgtttctgtcgcgggatataagcatgtccagttcgcctccgacgaagctggatgggccgacgtagaggcgcttcatgagctcaactatgccaccgacgttgcgtgtgctgcgggcgtggtcatcgtcaactggccgtccgaggattccaccgttccagcccgctatcgctgcccctccggctataccttcggccctcgcgcgcagctgccattcgtcccttggccagactaccaggagggtgaaagcctgcagcttgccaaagcactcgccgacctcaagtcgcgggctactccgtag

SEQ ID NO: 506914 - DNA, 501 bp, Stenotrophomonas maltophilia
atgacaaagaagcgtttgacgcccgctcagttccagcaagccgtggatggcctgagcgttggcgagcagacgctcgccattgcgcatggagttctcgtcaaaggactgccacagtcgcacttcgtcagcacgctcggcttgtcgaagggggcggtgtcccaggcagttcaccgcgtttggtcggccgtcgaggacgatatgcgtctgacagacgctcagttcaatgcggcaacgaccgggctgaacgtcgggccccaaacgctagagattgcgcatggtgttcttgtccagggcatcccgcaggcccactacgtgacaaccttggggctcagtaaaggcgcggtgtcacaagccgtgcatcgtgtgtggtctgccgtacagggcggagttccggagggctatgagcgcgtggaggcagttctgccccttcaccaagcgcaaaaggtccgcgagtgggacgctgctacccggaaggaaatcgatcggctgcgcaacacgtag

SEQ ID NO: 506915 - DNA, 951 bp, Stenotrophomonas maltophilia
atggctgttaaacctgtcggcacggcgccggagccggctactgtcgtgcagcacgctgccgacacctttaccgtcgctggacttggggtcgggcctcaaatgtctgagctcaagcagcgcgagaccaggtggtggcggcgcggtaagaccgtggcgctgatcggcggcgttttcggcatccttaccgttgttgcgttgtgtgcgatgccaatcctctggcccgctagcctgtccatgagtgaattggacgtaccctcgcagattgcagcggccctgccctcggaggcttcctcggcgctagacgcgattgacctcgcgacaaagggctcgaccgaaatgcttttgaagatcggcatgtacctgggcattctgatgttcatcgtgggcgtggtgctgtggttgctaattgaggccccattgacactacccatggccgccctttcgttctctgcgctttcatttcttcttcaaagcacgggcgttttggattctgctgattcggctagggggaaggaagtgaatgtagtccgcctggtcgaggcctcggcgttcgcaagcactcccgcaggtttgtatgtacgggcgcaggaagcgctatcgcgcgaagagctgaacgccaaggacagggctctactgaaggctgcggcagactcgatgcagggtgcatcgcccggcttcgtaccgcagccacgcgtggccgccctcatcgaacaggctgcttacggcaaggcccgttctccggccgcagttcaatacgccgaggcccggtccgtaaaaagcaatctgttccgtgcgctgacctcgatctttgctgttctggcaggcacaggcgcagtggtttccgtaaccctgtgcctgcttggcagttcggtgggccgccgccgccagcgtttgtcggactccatccggacccgtcgtgccgaagctgtcaaatcgggtggagcagaatga

SEQ ID NO: 506916 - DNA, 975 bp, Stenotrophomonas maltophilia
atgaaggtcgacgaacaatcaaccgtgcaggtgcatgtggggggagatgatctgtccgcccgttctggccgctcccgtgatttgcttacggtaaaaggcctgggcgttgactctcacatgggtgagctcaagcgccggtccgcgatttggtggaagcgcggcaagggagtggcgatcttttcaggtatcgccggccttgccgcattggcggcgcataccgccgtcagtgtgctctggcctgccggtgtgtccattaccgacctggacgtgcctgtgcagattgcgaaggtaatgccctcgcccgcttcgttctcctatgtgctgcagagtgatggagcgggcttgtccggagccatcgtgaagatgttcggtctgatgggcggtgtcggagccttcggtcttctttctatgggctgctatcgctgggtttttgaagccggtgacggggccaaacctacggtggcaggcttggcactcggggctgtcgccagcgtttgcactctaatgtggaatccttcagacgctggggatagccgtcagctggcccaggttagctggctggaggcttcgtcctgggccacctccccggccggcatatacgtacgtgcacaagcagcgctgtcgcgagacgaattgagcgcccaaggcaagtccctcgtcagggctgcagccgatgctctgcagaacgattcaccggcgtttgagccgtccccacgtatcgcggcgatcatcgagaaatccgcgtatggcgaggaacgctctccgatcgctgttcagtatgccgacacgcgcgcagccagagctggcctgttcgatggtgtgtccactgcgctctctgtccttgcaacgattggcacggcggtcgcactgaccctgatcctgctgggatggctggtcgaccgacgcaggcggcggctgtcccgcgctattcggcggcttcggtccgagttggtcagcctggacgcgctgcaatga

SEQ ID NO: 506917 - DNA, 1143 bp, Stenotrophomonas maltophilia
atgaataaccagctgcagacctccaacaacgtcgccggacgcgatctgctggccacagtggattacgaaggccttggcctgagcgcccacaccgacgccatggcagtgcgccagctggcggaccgcatccagccgagtgaccccgccacagtggccgaatttggtcgtgacgtaggcgcgatcacagagagttacagcgatagcctgctggaacaggtccggaatagcgatctggacgatgccggcgacaagctgacgcaggtggtcaacgtcgctcgaaatctgaacgtgggaccgctgtcggatcgtcgctcgcgcgttcccctggtagggccctttatcgaccgcatgcgcatgcgcgccggcaacttcaagggtaagttcgagagcacgcgtgcgcagatcgacacgctgctcgccgaagtcggtaccacacagggcaatctgcagcagcgcaacgccggtctggaggagatgttcatcgccgtcactgaggagcggcgtatgttgggcatccacattgccgcggggcgcattcgcgttgcggagctgcgcgcagaggcagacgcgctgcgcgctactgtcggcaacgatccggctcgggtccagcaattggccgacctggatatgctggttgcctccctggacaagcgcgtcggcgacctgcaggcgatgcagcacgcggccatcctggcgctgccgatgattcgcatgctccagtccaacaaccgcatgctcgtggacaagttccacacgattcgtcagatcacggtgccggcatggaagcgccagttcacgcttgcgctgagcctcaatgagcaaaagaatgccgtgcagctggccgacacgattgacgacaccaccaacagcctgctgaaaagcaatgccgagttgttgcaccgcaattcggtggccacggccaaggccaatcagcgcttggtcattgacgtggaaacgctggccagcgtgcagcagaccctcatcggcacggtcgaggaggttatccgcattcagcgagacggcgcgcagcagcgccagcaagcagtcaagcagatcgaggtgatgcgcgaaggcctgcgcacggcgatttctcgcaaaaccgctgcatcatcggcgccaatgctccgccacgagagcgagtaa

SEQ ID NO: 506918 - DNA, 771 bp, Stenotrophomonas maltophilia
atgagcaccgaaaccttcagcatcgagcatctcaaggcagaggtattgccgaagctgttcgccgatcccaaggcagtgggtcagtacggcactgccgaagccgctggcttggcaaatgagctttcttccctgatggaagccggtgcggcgaaagggctggccgacagtattcaggccatcgttgcgggcctgacagacgccaacccccagcagatcgcccgaaagccttcactgatcgacagggtgctgggccgcgagctcgaacgggaagttcgctaccgcatcgcccggcagtccctggataggctgatcggtgaggctgagacccatgctgtaggggtacggcacacggtcagcaccatcgacaggatgctcgaacagcacgccgatgaagtcgagcgtttgaaggtgatgctgcaggccggacgcgagtatctggccgagaatccccaggctgggatctacgcaaacccggaaatggaattcgaccggccgcgcgagcgtttcgcgcgcaagctggcgaacatcgccaccttgcttgcctcccatgagatgagcgcaatgcagatgaagctggcgcgtgcgcaggctgtggacatgctcgaccgcttcaccgaaaccgtttcggtgctggtgcctgtgtggcgtcagaacacattggcccttatcaccaccaagaacatgagccccgagctgattgcctcggcgacgaaggcgcaccaggaactgatgcgcaacttgtccagcagtctggacacccacagtcattga

SEQ ID NO: 506919 - DNA, 255 bp, Stenotrophomonas maltophilia
atgcctcgcgggtgcagaagcagtgaaccggaagttatggccaagcgcgccatgacactgcggaaaaggcgggagcagcgctgcgccgtcctggccgaacgattgctgcgcaatgtggtcggagacgagggtgatattcaggcttgcagggcatggctgcgtgccaatggcctgaacatcgccagcacagaggttggccaggccacgcggcggcgttgggtgtaccgcgcacgcagggcgatgtgcggtcgctga

SEQ ID NO: 506920 - DNA, 603 bp, Stenotrophomonas maltophilia
atgacgaacaccgcaatacccctcgattcctcgcgacagcaagagcaacagcaacagccaaaaccggctccaggagctcgcaaagcagccatgaacagcgaaggcaggtgcagcgcgcaggcagaatcgccagctaccgccactgaccgtagcggatgggcgttcgtggcggggggcgaggttctgatccgtgggaagtggtccttgattacctgggtgaacaagcgacgggaccggacgaccagcctgcgcctgcaggactggcgggaatggacaatgcccctggccatgttccactggatcgaagactaccggcagcccagccaggaggctgcacggacggccaaagccaaccgggcctgcggaccaatcgtcaacatgcccactgacggctgttccagcatgaccacggctgaatacaaggcgttgccgagaggtattgggggtacgcagtcctatccggctaaagatggagtcggcgcgcaccgctatcggttggtgatctgcggtccgaggaaagggcgcgtatatctcactgacgccaagatcgtgaacctcccgcgcctgtcaggtggcagcgcagacgtcaacgatgacagttga

SEQ ID NO: 506921 - DNA, 1203 bp, Stenotrophomonas maltophilia
atgccacttctcaccgatgtcaaagctcgaagcatccttcccgggagtcgcgcagtacctcatggagccgtcacaggcctgagcctcctcccctcatcgaccctgaagggccaaggaaaatgggtatttcgatacgtcagccccacgacggggaaacgcaggaacgctgggttgggcggctatccacaaatcactattgccgcagcagggaagctggctcgagagatgcgggacctgatcacgacgggacaggaccccttaacagtgaaagctctggaagccaccaagctccagataccgacctttcaggaggctgccacacaggtccacaccgagatgaagcctggctggaggaatgagaaacatgccaagcagtggatcaacacactggtcgagtatgtcttcccgaaaattgggaacctgccgatcgaccagctacagcctcggcacatcgccgaagttctacgccccatctggcttgaaaaggctgaaactgcctcacgcgttaaacagcgtattcatgccgtaatggcttggggctgggcgcacggattcaaccaagccaaccccgtggatgtggtcaaccacttgctccctcagcaacccagcaagacgatccgccaagaacaccagcccgcaatgcattggcagcacgtccccacatttgtcggagcggagttggcaaccacacgtgaattcgacgtgacccggcgcgcgttgctttttctgatcctgacgggcgcccgctccggcgaggtccgagccatgacttggagtgaggtgaatctacgtaacgggctatggatagttccagcagaccgaatgaaagctagacaagttcacagggtcccactttccaagcaggcagtggccttgctccaacagcaagtcggccatgacgaagaactcgtattcccatccattcaagcccgaaaggtactgtcagatatgacgctgactgccttattacgtagactctcggcgcccagcgattcagagggccgagtagccacagcacatggatttcgctctagctttcgcgactggtgcagcgaaaaaggatatgctagggacttggctgagcgcgccctagctcacaccgttaaaaatcaggttgaggcggcatatcatcgaaccgacttactggatcagcgccgaccaatgatgcaggcgtgggctgactacattcagccagagcaataa

SEQ ID NO: 506922 - DNA, 450 bp, Stenotrophomonas maltophilia
atgacgaacaccgcaatacccctcgattcctcgcgacagcaagagcaacagcaacagccaaaaccggctccaggagctcgcaaagcagccatggaagcgctgcacccgcaacacgttgccagagagctggaaaaactggccatcggtatgaaagcggccagaacgcacaatgcagcggtccgagcgcgtgtggctttcatcgtgcgcaccattgagctgggggccacccagcacctcgatgagctgggcgcgctcctgcctttcgcttggctatctaacagcctcttgatccaggtgtttgacgatggcgacatgtcgcacgacgtaatcgccgcactggtctcgcgggcagacacggacgcagaattcgctcgcagcgtatcggctgagatgggcgtagacaccgtggccggctggcgcgctgctcagcgtcaaggtggcctcctgtga

SEQ ID NO: 506923 - DNA, 747 bp, Stenotrophomonas maltophilia
atgctggccattgaactgtcgaacgcggtggaccacctcaaccgggagcgccgtgcggagcgctacgcgctcctgcggcgcaagtatgacgatgcagagtgccagcgattcgtgcagatgaccgcgtgcctgatctgttcacttgaagagcaagcgggggattgcctcggttcgctcttcatgggaatggacctgggcaatgccgggacaggtcagttctttacgccctaccccgtatctctgctacttgcgcagatgacgctgaccgatgcgccggagctgatcgcccgcaacgggttcatcaccctcaacgagccagcatgcggcgctggcggaatggtcatcgcggcggccgagacacttcgctcgatgggcatcaactaccaagagcgcatgcacgtcattgccgtggacattgacagcacggcttgccacatggcgtatatccagatggcgttgctgcacatccccggcgtcgtggtccacggcaatgccctggctccgcaggacagctgggatgagtggatcactcccgcgcacgtgctcggccagtgggacgcacgactggcgctgcgacgttcgttcgaggcgatgcgtgcggcacttgcgccccccgctgataccaagcctgccgagcccgggcgcgaagctccgcgcgagccttcgcctgcccctgtgccagtcatcagcaacgagcacattgaacagcgccgcaagcttcgctcggaacaactggcgctgttctag

SEQ ID NO: 506924 - DNA, 195 bp, Stenotrophomonas maltophilia
atgcccgagaccgtcaccatcaacgttgaagttcctgccgacttcctggatttctgcgccctcgaaaacgtcgacccgggcaaggtgcttggccagttcgcatgtgacttggcagaggccgagcaatgcgctgggcaggcgcagcacgatgcggccgaaatttggttcgacgcaggcgtgtggcctggccgctga

SEQ ID NO: 506925 - DNA, 852 bp, Stenotrophomonas maltophilia
atgcacgcgcacgaccgggagttccgtctggtagcgatgtgccgggtgttgggtgtgcaacgcagcggctactacgcctggctgcaccatggcgccagcgctcgcgagcgcgaggaccagcgcctgctaggactgatcaagcatcactggctggccagcgggaccgtgtatggctatcgcaagatcaccctggatctgcgcgaggccggcgagcactgcagccggcaccgtgtcctgcgtttgatgaaggccgagggcctgcgtgcgcaggtcgggtatggccgcaagccgcgccatcgcggtggccccgtgggcttggtaaccaatgtgctcaaccgggacttcgcgccgcccgctccgaacaaggtctgggtcacggacatcacctacatccgcacttacgagggctggctgttcctggcaacggtgatggatttgtactcgcgccagatcgtcggctgggccacggcgccgacgatgaccagtgacctggtgttgcgggcgttggtggcagcggcgtggcgccgcaagcctgggcctggggtgatggtccactccgaccagcgctgccagttcacaagcagcgattggcagtcgttcctgaaggcacaccggatggtgccgagcatgagtcgtcgcgggaactgccatgacaacgccgtggccgagagcttcttcagcgtattgaagaaggagcggaccaagcgaaggatctatccgacacgggccactgctgcatcggacgtgttcgactacatcgagatgttctacaaccccatccgccgacatggttccgctggcggactgtcaccggtagagtttgagaggcgctacgcgcagagcggcgactga

SEQ ID NO: 506926 - DNA, 135 bp, Stenotrophomonas maltophilia
atgcggttgccggccagcggccggcactaccggtccacggtctcccaaggggaagcgtggcagggcgtccaccgcctgttccagccgcagcagatgcagcaggtcttccgcgccgtggccgaagcgttgggttga

SEQ ID NO: 506927 - DNA, 207 bp, Stenotrophomonas maltophilia
atgatgcgttcctgggcgtggtacatcatcgccatgcccggcatcacccgctggctgaccaccgcacgtgcagcaatcgcaccgttgacgttgaacagctcgatccagtcgttgtcctcgatgccggcgttgcgtgcgtcgtcctcgctcaaccagacgatggggccgccacgcgacagcgtctgcatgatcaggttgtcgctgtag

SEQ ID NO: 506928 - DNA, 135 bp, Stenotrophomonas maltophilia; identical to SEQ ID NO: 506926

SEQ ID NO: 506929 - DNA, 150 bp, Stenotrophomonas maltophilia
atgattgtgtcggaaagccgacaccggggaaagccgtcggccgacgatggcggcgtgatcgacggcgtttccccgacggggttcagcaatgtggcggcggcgttcaggcaacgcggctgccctgcggtcgcttacttgaccttggcgtag

SEQ ID NO: 506930 - DNA, 600 bp, Stenotrophomonas maltophilia; identical to SEQ ID NO: 506631

SEQ ID NO: 506931 - DNA, 1944 bp, Stenotrophomonas maltophilia
atgcttcaccccgtaccaagcgcgctggcactggcgctggcagccttcctggctgccggcccggcactggcagacaccgccacctccgcgcccgccacggcgccgccttccaccagcggcgataccgaagccagcaataacttcagcattgtccgttaccgcgccgactaccaggtgcggccggatgccggcaatgtgcagaccgaaacctacgaagtgctgctcaagaccaaggcctcggtcgagcagttcagccaggtgcggctgagctacagcgagaagatggaaaccctggaggtgcttggcgcctacaccatcaccgccgacggccagcgccgtgacgtgccggccgaccgcatctacacccaggaaagctactccagcgcctcggcggcgatgtatgccgaccgcaaggtgcgggtgatcgtgttcccgaacctggccccgggcacccgtctgtactaccaggtgcgccgcacccaggccacgccgtacttcccgggctatttcggcctgtgggagaccttcaatgtgttcaccgagtacgaggacgccgaagtcaccctgagtgcgccggccaacctgccgatgttcatcgacagccgcggcgtgcagggcagcgatcggccgacggtgaagaacggccaggcgcagtggcgctggcgctaccagcgtcgcgaggcgatgccggcgcagaactggtcggcggcgggctgggagttcggcccgaacatcatggccagtacctatcgtgcctggtcgcagatgggtcgcgcctaccagctcaaggcgggcccggcggccgaggtgaccccggcgctgcaggcgctggctgatgagatcaccgcgggtatcagcgaccgccgcgagcaggctgatgcgctgtatcgctgggttgcgcagaacatccgctacgtcgcggtgtacctgggcaatggcgggctggagccgaacagcgcgcagagcatcctcgacaaccactacggtgactgcaaggaccatgtgacgatcctggaggcgctgctggcggccaagggcatcgccagctcgccggtgctgatcggtgccggcggtggcccgacgttgccgaagattccggtgctgggccgcttcaaccacgccatcacctacattcccgagtttgatctgtacctggattcgaccaccgcgtgggcgcgcttcggtcagctgccagagggtgacctgggtgcaccggtgatgcgtacccgtgacgccacgctggcgcgcaccccggccaacacgccggagcgtaacgccacctcgatggaagtacgtttcaccttcgacgccaacggcaacctgcgcggcgagaccattccgaagctgggcgagaacgccgagatcggcatgcgcgcccagttctcccagctcaacgcgcagaaccgtgcgcgcgctgaagagcagatcatggccgcctccggtttcgatgggcgagggcagctgcagatccagggcgtgccggtcgatctgacccggccgtttggctatcgcatggcgttccaggccgaggactatgccgacttcagcgtggccggcggcatggccgtgccggacccgccgggtggcgagtcggtgcgtggcttgtacgccaccgcctcggcgccggccaacgaaacgccgttctactgcaatgccagcctgcgcgaggaaacctatcgcctgcagttcccggccaatgcgccgatcatcgccatcccggccagccagcgtttcgccaatgccgccggcgagtaccgggtggactggagtcgcgagggccaggaggtgatcgtgcaccaccgcttgcagcagaatgcagtgcgtgggccagaggcgttgtgccagccgcaggactatccggcgttccgcgcgctgtatcgcgaagtgcggcgtggcttccgcggccaggtgctgtacggcaagctgccgggatccggtggctga

SEQ ID NO: 506932 - DNA, 849 bp, Stenotrophomonas maltophilia
atggccgcgcgctacgcgatcaaggagcgctttccagagaatcccaggatctggaactcaaaaggagatcgcatctacgccaggcgcgactatgacgacgacatcaacagccgacccctgctggcaaatcacgtaggttccgaggtcgcactgcacctccatacaaacggtgttgatgaccagcgtgtgacaggcgcccgcgttgtcgtgcagccggggcgcccgcaggacgcggagctggggcgcaacatcctctgttacatgaaggagctgatccgaagtgtcgacggttacgaggaatttcaggtcaccagcgagccgtttcttgaggacaaaggcgagaatcgccttgcggagatgccgtcggctattgtggagatggccttccatacaaacccaaccgatgccgcagccttgctggacccggcatttcgcaccgcctcaatgaagggggtcgagaagggctatcggctgttccgcgaaggtgagggttgtgtgccgttgaaggtggagcccatccagtccatcgagctgtccgcggggaattcacggcgcgtcgatgtggtgtttgagggccatccccggtacccgattgatctggtcaccaccaatgtgggttgcccgcccggatggacctgcaccgacggcaaggtccacatcgctgcgccggatgagaagcccagtcagatcatcatgaagtgcgagaacgctggcagcgcccccttgttctggaacacccaggtggtcgatgccgatggcgtgaagtcgccgccggtcaggcacagggtgcagtgcatacggcggccgggtgggttgagtgttgcggcgacagctctggccggctcgtga

SEQ ID NO: 506933 - DNA, 171 bp, Stenotrophomonas maltophilia
atgaccggctatttcatcggcggttcgctgggttcgctgctgtctgcgcaggtctaccagcgcttcggctggacgggcgtctgcgtggccggcgctgccgtggctgcgctggccctgctgctgtggctgcccggcgcgctgcgcgcgcgccaggcgtcgctgcccgactag

SEQ ID NO: 506934 - DNA, 1725 bp, Stenotrophomonas maltophilia; identical to SEQ ID NO: 506618

SEQ ID NO: 506935 - DNA, 1038 bp, Stenotrophomonas maltophilia
  misc_feature (198)..(198): n is a, c, g, or t
atgcaacaaccggtgcatcgctctggtgggtgcctaccttggttggggcgaaacccacagcgccgaccagggtcggcatctaccagaaacggttgccggccagcggccggcactaccccctgcaacaactggtgcatcgctttggtaggtgccaaccttggttggcacgaaacccacagcgccgaccagggtcggcanggtaggtgccaaccttggttggcacgaaacccacagcgccgaccagggtcggcatctaccagcaacggttgccggccagcggccgacactaccccccctgtaacaaccgccacatcgccctggtgggtgcctaccttggttggcacgaaactcacggcgccgaccagggtcggcatctaccagaaacggttgccggccagcggccggcactaccccatgcaacaaccggtgcatcgctctggtgggtgcctaccttggttggggcgaaacccacagcgccgaccagggtcggcatctaccagaaacggttgccggccagcggccggcactaccccatgcaacaaccggtgcatcgctctggtgggtgcctaccttggttggggcgaaacccacagcgccgaccagggtcggcatctaccagaaacggttgccggccagcggccggcactaccccatgcaacaaccggtgcatcgctctggtgggtgcctaccttggttggggcgaaacccacagcgccgaccagggtcggcatctaccagaaacggttgccggccagcggccggcactaccccatgcaacaaccggtgcatcgctctggtgggtgcctaccttggttggggcgaaacccacagtgccgaccagggtcggcatctaccagaaacggttgccggccagcggccggcactaccccatgcaacaaccggtgcatcgctctggtgggtgcctaccttggttggggcgaaacccacagcgccgaccagggtcggcatctaccagaaacggttgccggccagcggccggcactaccccctgcaacaactggtgcatcgctttggtag

SEQ ID NO: 506936 - DNA, 351 bp, Stenotrophomonas maltophilia
gtggtagatgttgagaagcaaaaactaaaactctccaaactgctggaggtggctgcaaaggagcaagccaaactcttgctggcggagaagcaacagaaagcacgggaggcccgtcaggtcgcccgggagaaagccaaggagcgtgccaagctgttccgctcggccgatgcacaccgaaaaatcgtgctgggcgggctgacgattgccgccgaagccgatggctgggacccggccgaaatcgtcgggggcgctgctcgtgattggcgagcggatggccacgcacccgaacgtgcggggccagctccgcgaaaagggtattcagcatctggaggcgcgggcggcagcccgtga

SEQ ID NO: 506937 - DNA, 252 bp, Stenotrophomonas maltophilia; identical to SEQ ID NO: 506650

SEQ ID NO: 506938 - DNA, 231 bp, Stenotrophomonas maltophilia
gtgcagccgttcctggcagcgaactggctgcgtggccagcgcgatgaggctatgcgcttcaacagcgagtcgttgagcgcgaagacgccggagaaccgctacgaagtgcaggccggtgcccagctgcagctgggccagcgttggagcgcatggggtgacctgcgtgtgcagcgcggcgacagcggctaccgcaaccatggtgcccaggtgggtctgcgcgccgcctggtaa

SEQ ID NO: 506939 - DNA, 600 bp, Stenotrophomonas maltophilia; identical to SEQ ID NO: 506631

SEQ ID NO: 506940 - DNA, 1080 bp, Stenotrophomonas maltophilia; identical to SEQ ID NO: 506593

SEQ ID NO: 506941 - DNA, 309 bp, Stenotrophomonas maltophilia
atgtcattagaatcagtttttgaagccctttgcatgctcgctatcgcaacgttgttgatagctttcgtttcgcgaatttttctggtttgggagttaaggagaaattcccctgagctgtgggacacccttggcagacctgcgatcctggagcgagatcatttcttaaccaagtatccgatctgcggatggaagcgggttcataacggcgcatcaggagtgcgcaagttgttcctcttggtgttctggttctcgttccttgtgtatctcatatcgctgattcccctgatcgtgatctggattatgcgctga

SEQ ID NO: 506942 - DNA, 1056 bp, Stenotrophomonas maltophilia
gtgcaggacgaccacgacgacaccgacaccccaggctgggacgcgatcaatgcggcgctggcgccgctgtatgctggccaggaaccccgtcactacggtacggcgttgccgtacacgctgggtggccaggatccgctggatggcatcagcgtgtactgggcggatgcgccggtaccgcactggcattacatcacctacggcttctccgagctgtacgccaaggagagcagtgatgcagatgccagcggctatggattcgagctgaccttccgcctggctgctgaagccggtgagcacgccggcagcaccccgccggtgtggccgatgaacctgctgcagaacctggcgcgctacgtgtttggcagcggcaacgtgttcgaggatggtcaccatctgaacgccaacggcccgatcgcgctggagaccggcacgcgcctgtgccacctggccttcatcgccgatccgcagttgcctgcgcgcgacaccgccaatggccacctgcagttcctgcagctggtcgggctgaccgatgaggagatggaagcggtcaagcgctggtcgacgcgcggcgtgctgcaggcgctgcaaccggcgatgccgctgtggatcagcgacctgcatcgcggcaacctgttggaggatccgacactcgccgcacaggtgcgggccggcagcgagcgcgagggctccagcaccggcatgttgttcatcgagacactggattggcggcaggaggcgggcgtcaccaccctggtgctcggcgccgggcaggtggccagtgtgtgcgagctgctgccattgcgcctgcgccacggcaaatcgctggaactggccagccgcgagcggcagtgggaattcattccggcagcgcgcggtgaaaccggcgaggtatcggccgacagcacgcgctgggcgctggacgagacggggctgcaggccctggcgggcgtgcgtgccgaacgtggcatctacccggtggcgggagcgctgcgcatcgaagtggtgccgacctacctgcgcgatgccaacggtgaagtgatccgccagatcggctga

SEQ ID NO: 506943 - DNA, 225 bp, Stenotrophomonas maltophilia; identical to SEQ ID NO: 506646

SEQ ID NO: 506944 - DNA, 1818 bp, Stenotrophomonas maltophilia
atggcgctggttttcagtgacgacatctgggaccgctggcggttgccggccctggcgctggcggccgcagcgatcatcgtggtgccgtggttgaccctgcgcaaactgcagcaggacaacgagcaggcaatggcctgggtcaaccatacccaggcggtgggcgtggccctgcagcagctccaggctgatgtgcgcgacgtcgaatcggccgcattgacgctgtccaagggcgtggacgcacccgggctgcgtgagcgcatggccgcagccaacgacattcccggtcgcttggccgaactggggcggatgacccgcgacaaccccgaccagctgatccgcatcggccgtatcgaatcgatgctggaaggaaggatggcgcttgcccgcgagctggccagatctgaacccaacagcgatcaacgcgagctggtgaaggacctgagcacgcgctatccgatccgtggcctggtggaagaactccaggccagcgaacagcgactgttgacactgcgggccgagcaggcggcgcgccagcgcaagcagaccgagctggtgtcttggagttcgctggtgatccagctgggactgctcggcctggtgctttggctcctgcagcggcagatcgggcggcgcctgcacgccgaacgccaatcgctgcgctcggcggcacgcgcggcatcggtgttgcagaccgtgcgcgaacccatcgtgctgctcgaccgcgacctgcgcgtgcagttgcataaccccgccttcgccgagttgtacgggctgcaggacgaacgcgccgatggcctgctgctggaaagcgtcggcgacggcgcctggaaggacgccgtcgtgcgccaacgcctgtccgacgtgctgctgcgcggccgcgagctgtgggatttcgagcacgaacagcgcaccgccgacggcatggcgcgctacatgctgctgaacgcacggcgcatgccgctgcccgataccgatgatgaagtggtgctgctgacagtcagcgatgtcaccatgcaacgcgcagtccagctgcgcgttgaagagctcaaccgccagctggaaggcaaggtcgcgcaggtgtccgaggtcaaccgcgagctggaggccttcagctactcggtctcgcatgacctgcgtgcaccgctgcgccacgtcgccggattctccgacaagctgtcgcgccacctcggcgacgccgccgatgacaagagccgtcattacctggacgtgatctccagttcggcccggcgcatggcggcgctgatcgatgacctgctggtctactcgcgcctgggccgcgcggcgattcgccagcaggcggtggacatgcagtcgctggtggccgatacccgcgccatgctcgattccaacctgcaggccgaggcggagaacagtggccatgtgcatcaggtggagtggagcatcgcgccgctgccgatcgtggtcggcgatgagaacatgatccgccaggtctggctgaacctgctcggcaacgcggtgaagtactcgggcaaccgcgaaccggcgaagattcgcgtggactaccagccgcagcctgacggcggtcatcagttcacggtcagcgacaatggtgcaggctttgacatggcttatgccggcaaactgttcggcgtgttccagcgcctgcacaaggccagcgactacccgggtaccggcatcggcctggccagcgtgcgccgcgtgctcacccgtcatggcggccgtatctgggccgaggctgaaccggacgtcggcgccaccttccacttctacctgcctcccgcgatcgatgcggacaaacaagggccttctgcatga

SEQ ID NO: 506945 - DNA, 1359 bp, Stenotrophomonas maltophilia
gtgctggactaccttctgtttacccagcgtggctcgggtggcaacagccagcagggctttagcggcaccatttccggcgccctgttcgatctgcccgccggcagcgtcgccttcgcctcgggcgtggagtttcgcaaggaacgcggttggctgtatccggacccgctggtggtcaacggcagcgccaacatcgtgcgtcaagatccgatcgaaggcgagtactcggccaaggaagcgtttgtcgagttcgccgtcccgctgttgcaggacattccgctggtgggctacgccaccttgaacctggccggccgctattcggactacgacctgttcggcagcgacaccaactacaaggtggggttggattggcaggtggccgaacctctcaagatccgtctcaactacgccacggcttttcgcatccccagcattccggagttgttcggtggcatcggccaaggcagcttgactacgctggatccgtgcagcaactggagcacgttaccggccgactcggtcattcgggccaactgccaagccgcgggcgtgccgaccaactttcgtcagttgggcaacaccatcctcaccacgaccggcggcaatcccgacctcaagcctgaagatgcgcggaccttcacggcaggctttgtgtggaccccagggtttgcgccggggctgacgctcacggccgattactaccgtatccgcatcgagaatgcgatccgtagcattgaaggctcggtcaagctgcgtgcgtgccacaccacaccgaacttggcccatccgttctgctcaccggccaacttcacccgtgattcggtcaccggtgaggtcaactacctctcgtcccagcaggtcaatgcggccagcgaggaatccgaaggtgttgatatcggcgtgctgtatcagttcgatgtggccggctggcaggccagcgcgagtctggacgcctcgtatctggagcgttacgacgtcactcccttcgccggtgccaccaccattgagtacgccggcaagatcaccagcggcttgggtagctacacccagtggcgtggcttgggctcactgcgcatgggcaagaaccgttggactggcgtctattcggcgcagtacatcggcagtgcggacgacatcatcgccgtgcccggaacgatcggctcgcatgtgtccagcgtggtgtaccacaacctgcaactgagctacggcatcaagaagaaatgggacatctccgccggcgttgaaaacgtgctcgataagaaggcgccgttcgtgcagaacaaccccaacgccaacaccgacaccatgacgtacgacttgctgggtcgtcgctggaatgtccgctttggttaccactggtaa

SEQ ID NO: 506946 - DNA, 600 bp, Stenotrophomonas maltophilia; identical to SEQ ID NO: 506631

SEQ ID NO: 506947 - DNA, 948 bp, Stenotrophomonas maltophilia
ttggttggcacgaaacccacagcgccgaccagggtcggcatctaccagcaacggttgccggccagcggccgacactaccccccctgtaacaaccgccacatcgccctggtgggtgcctaccttggttggcacgaaacccacagcgccgaccagggtcggcatccaccaacaccggctgccggccagcggccggcactccccccccctgtaacaaccgccacatcgccctggtgggtgcctaccttggttggcacgaaactcacggcgccgaccagggtcggcatctaccagaaacggttgccggccagcggccggcactaccccatgcaacaaccggtgcatcgctctggtgggtgcctaccttggttggggcgaaacccacagcgccgaccagggtcggcatctaccagaaacggttgccggccagcggccggcactaccccatgcaacaaccggtgcatcgctctggtgggtgcctaccttggttggggcgaaacccacagcgccgaccagggtcggcatctaccagaaacggttgccggccagcggccggcactaccccatgcaacaaccggtgcatcgctctggtgggtgcctaccttggttggggcgaaacccacagcgccgaccagggtcggcatctaccagaaacggttgccggccagcggccggcactaccccatgcaacaaccggtgcatcgctctggtgggtgcctaccttggttggggcgaaactcacggcgccgaccagggtcggcatctaccagaaacggttgccggccagcggccggcactaccccatgcaacaaccggtgcatcgctctggtgggtgcctaccttggttggggcgaaacccacagcgccgaccagggtcggcatctaccagaaacggttgccggccagcggccggcactaccccctgcaacaactggtgcatcgctttggtag

SEQ ID NO: 506948 - DNA, 723 bp, Stenotrophomonas maltophilia
atgccatgcgtggatggggtcagagcccttgcctgcagcgagggatccgcccccaaagccatcggcctcatcccacctggcatggacggcacagggggtagtgccggccgctggccggcaattacgggaagccggccagcggccggccctaccaggagatccacgctgtacggggatggggtcagagtccttgcctgcagcaagggatccgaccccaaagccatcggcctcatcccacctggcatggccggcacagggggtagtgccggccgctggccggcagttgcgggaagccggccagcggccggcgctaccaggagatccatcccatgcgtggatggggtcagagcccttgcctgcagcgagggatccgaccccaaagccatcggcctcatcccacctggcatggccggcacagggggtagtgccggccgctggccggcagttgcgggaagccggccagcggccggcgctaccaggagatccatcccatgcgtggatggggtcagagcccttgcctgcagcgagggatccgaccccaaagccatcggcctcatcccacctggcatgccggcacagggggtagtgccggccgctggccggcagttgcgggaagccggccagcggccggctctaccaggagatccacgccatgcgtggatggggtctcaccccacccggcgcaggaactcctcggcgtccattggtcggcccaggtggtaa

SEQ ID NO: 506949 - DNA, 1515 bp, Stenotrophomonas maltophilia
atgagcccgaccaagacgcgtctcacacagctcgccgtggccctcgggttgctggcgctcggctttgccggcggctacgcctggatgactcgaacctctgataccaccccgccccccggcacgagcgtcgcagatcaagcacgcaaggtgctgtactggtacgaccccatggcgccggagcagcgattcgacaagccgggcaaatctccgttcatggatatggagttgctgcccaaatacgcagatgaggccatagggggcggaacgcagatcgatccgcgcctgcagcagaacgtgggcatacgcactcaggaagtgacggtagagttactagggactgccgtacgcgtgccgggcacactgacgtgggatctgacccaggaaagcgtgatcagtgcgcgcatggaaggcttgatcacccacgtgcaggtaaaggcgccgtttaccgaggttcgtcgtggtcaaacgctggccaccgtgcaggccccggcatggaacgcggccatcgccgaagcacatgccatgagccaagctcagtccgcgggcgcgcgtgagctgcagggtgcggcgcaacaacggttgcgttcgttgggtgttccttctggcgcctcggccagaagtggcgtcgtgcttagcgcagaccacagtggtgtcgtgaccgagatcctggcacgcgagggacagacggtgatgcccggtacgccactgttcaagatcaatgggctggacacgttgtggctggaggcctcggtaccccaggcagcgctgggcaccttgcggccggggacctcagtgcaggccacggtcagtgcctggccggcagagcgctttgccggacagatccaggcgttgcttccccaggtcgacatggctagtcgcacgcagcgggcgcgaattgtgctgcgcaacccgcagcgtcggctggtgccgggcatgttcgccgaggttctggtgcagcccgacgccgagcaggccctgccagtcgttcccacggaggcgctgatcgccaccgggcgggacagccgggtcatcgtgcaggatccggacgggagcttccggccagtgcgggtgagtgtgggacgtagcgtgcaagggcgcacgcagatcgtggcaggcttggccggtggtgaacgcgtggtcgtctcgggtcagttcttgctcgactccgaagccagtctctccggtgcgttggagcgcctgggtgctgcacaaccgacacgccctgccagcgcatcaggtgtgcacgagcgccatgacgccgggcacgaaccacgcactgtcgtgccgtcaccgtccagacagccggcgcctgtcgcgccagacacctccacctctacgccgccgcgctgcccggtgcagtactggtatgacccgatggtgccggagaagcatttcgacaagccgggcaagtcaccgttcatggatatgcagttggtacccaagttcggccccgccgcagccgctgattgccaggcaagcgaggtcatgtccgaagcgatggagggcacaccatga

SEQ ID NO: 506950 - DNA, 597 bp, Stenotrophomonas maltophilia
atgcctgaccggcacgccgacggggtcgaaccaggggtcggatccctttccggaacggaaagggctctgaccccgcccctacagggagaaggtttccgcctgcgcccttggcgcccggatgacctggaatccctgctgcgccatgccaacgacgccgaggtgtcgcgcggcctgcgtgatcgctttccgtacccgtacacgcgcgaggatggcgaggccttcctggcgggccgcgtgctggcccctggcacgctgaacctggccatcgagatcgacggccaggcctgcggcagcgtcggtgcccagcagggcgtggccgagcgtgggcataccgccgaactgggttactggctcggccaggcctactggggccaacgcgtgatgacccgcgtggtcggcctgttcgcaccgtgggtgatggacgaactacgcctgttcaggctgcaggccaccgtggtcgacttcaacctcggctcggcccgtgtactggagaagaacggcttccaggaagagggcgtggagcgctgtgcggtctacaagcgcggcgtcctgcacgacctgcgccgcttcgcccgggtacgcacccagctgccctga

SEQ ID NO: 506951 - DNA, 3126 bp, Stenotrophomonas maltophilia
atgaagctgtccgacatctccatccagcggccggtgttcgccgtggtgatgagcctgttgctgctggtgctgggcgtgatgtccttcacccgcctgaccctgcgcgaactgcccgccatcgatccgccgatcgtgtcggtgtcggtggactacaccggcgcctcggcggcggtcatcgaaagccgcatcacccaggtgctggaagatgcgctggccggcatcgaaggcatcgatacgatcaatgcgcgcagcaccaacggccgctcgcaggtcagcatcgagttcacctccaaccgcgatatcgaagcggcggccaatgacgtgcgcgatgcggtcagccgcgtcgccgaccgcatgcccgaagaagcgcgtccgccggaaatcgccaaggtcgagagcgatgccgacccgatcatctggttcaacatggtctcctcgaccatggacacgctggagctgagcgactacgccgaccgctacgtggtcgatcgtttctccagcctcgatggcgtggcccaggtccgcatcggtggtcgccagcgctatgcgatgcgcatctggctggaccgtgaccagctggccgcgcgcgggctgaccactggcgatgtggaaaccgcactgcgcaacgagaacgtggaattgccggccggccgcatcgagtcgaccgaccgtgacttcaccctgcgcgtggagcgcaactacatcaagccggaagactttgcgaccatcccgctgggcaagggccgcgacggttacgtggtgcgcatgggcgacgtggcgaagatcgaactggcttcggccgagcgtcgcgcgtactaccgcagcaacggcgagccgggcatcggcctgggcatcgtcaagacctccactgccaactcgctggacgtggcgcgtaccgcgcgcgctgaagccgagcgggtggcgctgaccctgcccaagggcacgcagatcttcgtcgccttcgacaacaccaccttcatcgaagcggcggtggatcgcgtctacgccacgctggtggaagcgatgatcctggtgctggcggtgatctggctgttccttggcagtttccgcgctgcgctgattccggccgtgaccgtgccggtctgcctggtcgcggcgttcatcgcgctgtatgcgttcgatttctcgatcaacctgctgaccctgctggccctggtgctgtgcatcggcctggtggtggacgatgcgatcgtggtggtggaaaacgtgcagcgccgcatcgacctgggcgagcccccgctggtggcctccaagcgcggtaccacgcaggtcgccttcgcggtgatcgccaccaccgccgtgctggtggcggtgttcctgccggtcggtttcctggaaggcaataccggccgcctgttccgcgaactggcggtggcgctggcggcagcggttgcgttgtccgcgttcgtggcgctgacgctgacgccgatgatggcctccaaactgctcaagccgcacaccgggcaggcaccgcgcggcctgcatggcttcgtcaaccgcaacctggagcgcctggcctccggctatggtcgcgtgctcgaccatcacgtggaccgcacctggatctacctgctggtgatggtggccgcgctggccgccagctggggcctgctgaaactgctgccgtcggagctggcgccggccgaagaccgcggttcgttccagatcatgatcgacggcccggaaggcgccggctacgactacaccgtgcagcaggtacagcaggtggaagcgctgctggcccctcacgtcggcccggacaagccgatcgtgcgtgccaacccccgcgtgcccggcggcttcggtgccagcgaggaaatgcacaccggccgcgtcagcatcttcctgcagccgtggcgccagcgcagcgaggccacgccggacgtggccaacgcactgcagaaggaactggacaccatccgcggcgtgcgcgtgcgtacgcaggtgggcggcgggctggtgcgcagtggcggccagccattccagatcgtgctgggcggcccggaatacgccgagatcgcgcagtggcgtgaccgcatcctgctgcgcatggccgacaatcccggcctggtcggcccggattcggactacaaggaaacccggccgcagatgcgggtgaacatcgaccgccagcgtgcggcggatctcggcgtgccggtcaccgcgatcggttcggcgctggaaaccatgatgggttcgcgtcgcgttaccaccttcgtcgacaacggcgaggagtacgacgtgctggtgcaggccggtcgcgatggccgtgccagcccggccgacctggccgcgatccgcgtgcgcgccacctccggcgaactggtgccgctgtccaacctggtcacgctcagtgaagtggccgaggcgggcacgctgaaccgcttcaaccgcctgcgctcgatcaccatcaccgccggcctggcaccgggctatccgctgggcgaggccatcgcctgggcgcagaacgtggcccgcgaggaactgccgcagtacgcgcaggtgaactggaagggcgaatcgcgcgagtaccagagtgcgggtggcgcggtgctgctgaccttcgccatggccctgctggtggtttacctggtgctggccgcgcagttcgagagcttcatccacccgctcaccatcatgctgaccgtgccgctgggcgtgctcggtgccttggtcgggttgtgggtgagcggcggcacggtgaacctgttcagccagatcggcatcgtcatgctggtcggcctggcagcgaagaacggcatcctcatcgtcgaattcgccaaccagctgcgcgacgacggaagaaccgtgcgcgaggcgatcatcgaatcggcgatggtgcgcctgcgcccgatcctgatgacctcgatcgccaccgtggtcggcgcgattccgctggtggtggccggtggccccggctcggccagccgtggcacgatcggcatcgtgatcatcttcggcgtgactctttcgacgttcctgtcgctgttcgtggtgccggcgttctacgcgcggctggccccgtacacccgctcgccggaagcggtgaagcgcgagctggagaagcaggaagccgaatcgccctcggtgggcgggcatgcctga

SEQ ID NO: 506952 - DNA, 1107 bp, Stenotrophomonas maltophilia
atgttggctcgtatcgcttcgaccctggcccttggcctcagcctggccgtgttggccgggtgcgcaggcaaacaggaggccgccgcgcgtcggcagggcgaagcagtgccggtcacggcgcaggtggtgcagcccacgcagtggaacgacaccctgcaggcgctgggcacggccaaggcgcgcgagtcgatcagcgtcaccgccaaggtcagcgaaatcgtcgagaaggtgcatttcgaaagcggccagcacatcgccgccggcgcaccgatcgtgacgctgcgcgggcaggcccaggaagcggcgctggttcaggcgcaggccaccttccacgaggccgaccagttgtacaagcgccagcgcgagctggcctcccagcggttggtgtccagcgccacgctggatacgcagaagtcgatccgtgatgccgccgaggcgcgcgtgatgcagatgcaggccgacatcggtgatcgccgtgtgcgcgcaccgttcgccggcgtgctcggcatccgccaggtcagcccaggctcgctggtgaccccgaccacggtcatcgctacgctcgacgacatcgagcacatgcacatcgatttccaggtgccggaagtggaactggccgcactgggcgtcggtgacaaggtcagcgccaccagcgtggcgtggccgggccgcaccttcgagggcgtggtcagcaccatcgacgcacgcatcgacccggcgacccgtgcggtgaccgtgcgcggcgatttcgccaacagcgaccacgcgctgcgcccgggcatgctgctggacgtgcgcctgttccgccccgagcgcccggcgctggtggtgccggaaattgccgtggtgcaggtgggccgcgacacgttcgtgtaccgcatcaagagcgacgacagcgtcgagcgcgtggacgtggtgaccggtgcgcgccgtgccggcgtggttgagatcaagcagggcctggaagccggccagcgcatcgtggtcgatggcaccggcaagctgcgcccgggcctgaaggtcgcggccaaggatgcggcgccggccagcggtgccaagccggcggatgcaccggcgccggtcgcggccgagggccacggcggatga

SEQ ID NO: 506953 - DNA, 2064 bp, Stenotrophomonas maltophilia
atgaaaatgacttcccgcctcgcgggcgcttgcgcgcgcctgccggttgcccttggcctggccgtgaccacgtcactggcctacgctgcgcctgccgaagaggcgcgtaccctcgatacgatggtggtcaccgccgccgcaccgtcctcgccgctgcactgggtgaccgacccacgcctgccgcggcagccggtgccggccagtgatggtgccgattacctgaaaaccgttcccggcttctctgccatccgcaatggcggcaccaacggcgacccggtgctgcgcggcatgttcggttcgcgcctgaacatcctcagcaacgacggcaacctgatcggtgcctgcccgtcgcgcatggacaatccgctgtcctacatcgcgccggaaagcttcgaccggttgaccatcatcaagggcccgcagagcgtgcgctggggcgcaggtgcctcggccggtaccgtgcgcttcgagcgcgacacgccgcgcttcgatgaacccggcctgcgtgccgatgccagtgcgctggtcggttcgcgcaaccgcaatgaccaggtgctggacctgaccctgggcaatccgaccggctacgtgcgtgccagcggcaaccggtccgaagccgatgactacaaggacggccacggtgacgtggtgccgtcgaagtggcgcaagtggaacggtgacgtggccatcggctggacgccggatgccgacacgctgctggagatttccgccggtgccggcgatgcgatcgcgcgttatgccgggcgcggcatggacggcgccgcgttcgagcgcaccagttacgcggcacgcttcgagaagcgcaacctgccgggcgcgtgggacacggtgcaggccaacgtgtactacaacgaagccgaccacgtgatggacaactacacgctgcgcacgccgaatcccaacagcatgatgccgatgccgatggcctcgaacgtggaccgccgtacccagggcggccgggtcagttccgagtggcgttggcaggatgtgcagctggtggcgggtgtggatggcgaagacagccgccaccgcggccgcatgggcatgggccgcgatacctaccggcaggcggcgtgggagactgatgccaacttccgtcgctatggcgtgttcagcgaactgaccctgggcgccggcaccgaccagcgctggatcagtggcctgcgcatcgaccgcgccagcgtccgcgatgagcggcaatcgatccgcggaatgatggggaacaggcccaatccgactgcgggccagcgtcgcaaggaatggctcggcagtggattcctgcgttacgagcaggacctggccgacggcctgacctggtacgccgggctcggccacagtgaacgcatgcccgactactgggagctgttctcgcccaaccatggcccggccggcgcagtgaacgcgttcaccggcgtgcagcccgaacgcaccacccagctcgacgtcggcctgcagtacaagggaccgcgcgtgcaggcgtgggtttcggcgtacgccgggcagatccaggactacatcctgttcacgtaccacggcagcggcatgatgggcatgagccaggcccgcaatgtcgacgcgcgcatcgccggtgccgaggcgggcctggaagtgagcctggccgggcagtggaagctgggcggcacgctggcctatgcctggggcgagaaccgcgaccagcagcgtccgctgccgcagatgccaccactggaagcacgcctgagcgcgaactgggaaggccagcgctggagtgccggggcactgctgcgtgcggtgacccaccagcaccgcgtggccgagggccagggcaacgtggtcgcacaggacctcgggccgagtgcaggtttcgccacgttcgcgctcaacgccgcgtaccgtttcagttcgcagctgcagctcagcgcgggcgtcgacaacctgttcgaccgcgcctacagcgagcacctgaacctggccggcagtgccgacttcggcttcccggccgacccggtgcgcatcaacgagcccgggcgcagcctgtggatgaaggtgaactaccggtactga

SEQ ID NO: 506954 - DNA, 432 bp, Stenotrophomonas maltophilia
gtgacccgcctgtcccgcccgcagcgtcttctgctccagctcgccatcctggcgacgctgctgatggtgcttgcgccgctggtcagccgcgcgctgcaggcacagccgatggagcacgccgcgatggcgggcatggaccatgccgcgatgggccatgacatgcacgccatggccatggccgggcacgatcagcacggcgccgcgccggcagcgcccagccccgcggccgatccccacgccatgcatggcgaagcctgcgaatactgtgtactggccatgcgcctgctgccatggctggcggtgctggtgctgctgttgccgttgctgtggcggccgcgcctggtgttcccgtggtcgcaacaggtgctgcccgtaccgcactggcccgcacatgccgcacgtgggccaccgcgcgtctccatcgtccgctga

SEQ ID NO: 506955 - DNA, 951 bp, Stenotrophomonas maltophilia
ttgaatgcggggattgccaagaattcggttgagaataacttccttgcagaggaccaggctcgtgtactgaagcggcagctcgacgagtgcgggggtgacacttcatgccagaagacggtgcgcgacgtggccaagcaattgtcggagagaatggattacgagctgctctcggtgtgcactgcgaactcagcgagccccgcgtgtcaggcgtttgtcaatgcggccgtttcgtacaagtatggcttgtggcccggagagcttgggctgttcgatgatctcggccgcagtagcgaggtgctttcttcgtttgcccactccatcaatggacgtgcctatcgtgagctgatatttgagaacggggggatccagccggtctatatcctgcctcaggagcacactgtagctgcgctggcggagtggaccggaaatattgacaggacgatcgatcagtacggcctcttctcgaaggaatcgtcagctgagctggggcttgggcttgcgaaggtcttgttccgtaaatatggaatcgtgaacatggttggcggaaacggaggcttcggatctggagcctccgggaacgctgccgactatcagaagttgaaggatgcgctggtcgctgaggacctccgagctatcggggcgagagatcctcgccttaacattgccgtcggcgggagtgggacaagcaaccccaacttcagcgctgggcgaggtacgcatgctgaagcagagcgaatggggaagatattggtaggtgacggggcaagacgaactagtgatggaactggttggatcagcgctgatggcactagagtgtatcgacctccgtcggagaagctgagtgagctggccgtaacaggagttcaggcgaactttgagcgctatgagataaataaaataacgggtgcccgcaagaagattggtaacgggcatatggatatcgataaatga

SEQ ID NO: 506956 - DNA, 240 bp, Stenotrophomonas maltophilia
ttgaacctcagtcagggtctctcccgccagcgccttccggagcagccccgcactcatctgatccgcagcatcaagcagaaccagttccaaggattcctgcttatccagccccccctgccgcttggccttctcgcggagatgtaccatccgagcatgatcgtcattgccaaggaagttattctcaacggaattcttggcaatccccgcattcaacgcgatcccagccagatcctgccctga

SEQ ID NO: 506957 - DNA, 1944 bp, Stenotrophomonas maltophilia
atgccaaaaaatgttgcgacggaccgcgccacccggcgccaggccaccaagtttagtctgacccaccaacaggtgatggagctttcagttcggcgcatccctgcgtcgggaggcttgggcaagcgcgccaagctggtggagcggccggcggagcagggcgataaggcctatcgcgtgctggatggaaaccaaggggcgccggtagggtttggcttctacgtgggcaagacccggacgacctatgaagtggttcggcgcggaacgcagggggtccgccgctttgcgttgggcaacgtcacggacatggggctggaagaggcctactccgtggcccgggagctgattcaggagctcaaggcgtcaggcgagaacccgaagactcgggcagcgcgggctagccagcagcagcaagaggacggtcgactggctcggctcaccgtggccgactgtttcgacgtctacatcgccgacatgaaggaccgggtgaccaagcgactggtgaagcagtccagcctgacggcgttggaggacagccttgctcgattgtcacgtccggaagtggggttcgctcagcgggccgtggccgatgtgaccgacgacgacgtggaagccgcgttcgacgcgttgcgcaagagcgcgatggtccgatccaaccgcattccgaccccgatgcgagaagctttggcgggctacgaggactgggcggagctggatacgcggacactggaaagcctggggatcacgggaaagtatgtccagcgcgtccgggccagtggcctggccgccaccgaacacagcttcacggatgcccatcgcgcggtggccatggtgctgaaacgtgagagcgtcctggcgggacgggaagggcgagagtctaggctgaggcacaaccccctgcaggccatctttgataggcacttgctgagaggcgcccggaacctccgcaagcattatgagaaggcggcggtccgcaatccgctgaccgacaacacgctcccaaaggtgttgcagtcgattgtggggcgccgggatgagcagggtggccacaacgccggcgcgtccgattatctgctgctgaccttgctttggggcacgcgtcgaagcgaagccgcgcaactgcgctggatggatcgctgttcccacagcgagttgatccaagaagaagtgtcatgggtctggctgggccagcccggggagatcaaccgctatacgaagcgggagggcccgcaggtcttcatgttcgacaccaaatcgggcgaagagcgcttcctgccgatcagctacttcgcggagagggtgctgcgactgcgctttgaaacccggctggacgacgacggtgccctgcgcgaactggctgcagcagagtcgttgctgaagtcagccaaggccaagggggcggcacgaacggtccttgctgcactggaggcaggcgtccaggaagcgttgcgcaaggtggaccggacacgcttcgtgttccccgcccgctctagccgcagcaagtcgggccattacctcgatagcaaatcgatcctcgccaatgtgcgtcgcgacgcgggcttggttgggcagcagggagatacgggggacattcgggatgacgtcgaccagggcctgaccacgcatgatttgcggcggacccttgggcgttatgcggccctgaagtttggcgagagccgcattgtctcgcagatgctccaccaccacgtccgcacggccggtggcgatggcatgtctccggtctccgaacgctacacgcagcaggagtgggcacgccttcgcgaggcatttggtgaggttgaggagatgatggtggcccgcagtccccgggtctggaaccggctcaaggggctggacaagccccgcctcgacgaggccggcgaggagccggttaaactgttcgctccaaggaacaggaagttggcgctgagccatgcagacgattga

SEQ ID NO: 506958 - DNA, 771 bp, Stenotrophomonas maltophilia
atgcagacgattgaaacggttcgcagtgacgaggactaccgcgccaagcttcaacgcgcgctggaccaagagctgtcgcgcgctgcagccggcctgacgcccaccgtttcaaccaaggccgcagcccagtttctcggggtgcatttcgacacgctgggcgagtggcgccgccggtcgcccccgctggggccgccctttcaaaaaggcgcgggcagccttcacggcggggccaatcagcacgtccgctatctgtacgaggatctcgtcgagtggcagcgcgctcgattgggtcgctcagccaaggagcgccggctggtggcagaggaagacgctctgcgccagcagatccgcgagctcgagcgggagctcgcggtaaagacgggccggacggagttggagaagctcaagaaggcggtcggcaagggcgtgtccttcctgtcgttgcgagactgcgtgtcgatcagccatgggtgggtaatgagcgacggctgtatcgccggtcacgttctctcggtctcggaagatctgctggaccgggccctggacgaaggcaacgtgtgggatgcatcgctgtccgaggctctgctggaggcttgggtcagcgtcgacgcaagagaaccctacgacgccgccatgagcgctgcgttggacgaggtggaaaaggtcttgcgggtggcgcgttcttctgcccgccaagacgcattggacgactctctgcctgagcctgcccgacccgcaaaagatgtcggtggcggtcgattccgcttctga

SEQ ID NO: 506959 - DNA, 705 bp, Stenotrophomonas maltophilia
gtgagagaacgccagccaacagctaaaggtcgagacccagggattatggggggcaagcgtcgtggccggcctcgaaaagatccgacgtcaccgctcgttacattgagcgagcaacatcaggacgagctatcgcgagcaagaaaaggcttggagcctgatgtgagcggcgccgtcgccgcttacacgatgggcatcagcctagactcattgaacagtcgacgccgggcggggaaggggctctttcctgatttcacgagggcgaagagcaacaaaggtggcacccgttacaactggagatccgtcctggattgcagcgaggcggaggtgaacgggcgatggatatcggccggccgccaacgtatcgaagaggatgaggcaagtgcgctgtcggcagcattggctgtagccaagatcaggcgcgctgaggccgatgccgagattgaatccctgacaaaggcactcaagcggcttggcattaaggcgcttgaacgcgtgctgccttgggcggtggatgatcgagggcgggtgcttggctctgccgcggcctaccctgcccacctcgcaaagcctcacacgaccctggaggcgctccagatgccctgggtcgagcggcgtctgcacgacgtgctgatggacgctgtcgactcgatcctgagcgatgtccgccaagcgctgaacagggcgcgtgaggcaagcctcggctga

SEQ ID NO: 506960 - DNA, 354 bp, Stenotrophomonas maltophilia
gtgggactcgatatgtttgcaggaaaaacccgtaaagacgtggtggacaacaccgccgtgccgatcatggaatggcgcaagcacccggatctgcatggctacatgcaggcgctgtatgccagccggagcggctgcaaagacccgatgaagttcaacaagaagcccctgtttctgtctaggcaggacctggaggacctccggcaggccgtgctttccggacagcttccgaaaacggaggggcacttctttggcgagtctcttcccgaagaacagcacttcgacctgatcttcatcgatggagcgtgccgcctcatcgatcagggttggaatgtcttctacgactcgtggtggtga

SEQ ID NO: 506961 - DNA, 276 bp, Stenotrophomonas maltophilia
atgacgctcccggacttgctgacgtcggaggaagtcacgtcctgcattcaagtttacggttcttaccgagcagtcgtgacccatttcgacacgcagtttgtggtcgagtccgtggggtgccgcgccgctacgaaaggccattcatccaagcccggctttgttctggatacatacgatcagcatgcacccggcgatttgcagcctccctcgtggctcggcagcttccagcccctcctgcgcacggcgccgctgcccggcttgcagtccgagtcgtaa

SEQ ID NO: 506962 - DNA, 567 bp, Stenotrophomonas maltophilia
atgaaacagcgatacaccatcagcgtcaccggcccggtgtgggtcgactacagcgtcgccatggatgtcacgtgtgtgtccgatgcgatcaaccatcttgaatcgcttgatcctgaaatcgccgcacagtggctgattgagtcatcggcctactctctggaaagaatcgaacacgaggtatgcggaggcgtgggggacgcggtgtacgaggcgatcccggactacgtgttcaaccgagccggtgagatggagttcggatcggacgaggaggacgaccacgatggtgtcgccgatcccgtcgcgcccgcgttgccgcaacgcctcttgctgacggcgacggggctcgccagccgccgctacaccttcgaagccgagtcatgggaagacgcattgagtcagtttcacgggctcagcaccgaggagctcaatgcgccgacgtggagcatttggggaattgatctggacgtggacgtcagccttgtcgtgggggcattggtcgagggcggtgaagccgacgaagacgcgctggaagacattgccatgcacctggacgtgcagctgccgtag

SEQ ID NO: 506963 - DNA, 690 bp, Stenotrophomonas maltophilia
ttgaacatcctctccgcttcgtctgacccgaacaacctcttcatgccgaaggagcgcaaaaccacctccatcccccggactaaaaagctcgccgcagccacagttggtttcgaccgcttgccgcagttcgagacaaccaccacttggctcacccctccggagcatatttggggcagcccgagggaaggcttcacgggcctggggcccttcgacctggatccggcaacgcccgagaacgggatgccgtggcccaccgcggctcggatgctcaagcccagcgatgacggcctggcgtcggaatggccggcggatgccttcgttttcatgaacccgccgttcggccgggggcaagaggcctggatggagaagatggccaaccacccggggggcggcatcgccctggtgtttgcgcgaaccgagacccgctggttccaaagtttcgtgctgaaccaccccgatgtcagcgcggtggtcttccaggagggccgcttgaagttccaccgggccaacggagacgtaggtgacgcgccccctgctggccctgcgtggattgcctacggcgaggagggcgcccgtcgcttgaagcgggcggtcagggaggggcagatccgcggatgtttcctggagctggactttgcccgggtgagttctggggtgggcgctgacgtgggggcggccaacgatgagtaa

SEQ ID NO: 506964 - DNA, 789 bp, Stenotrophomonas maltophilia
atgagtaagggcacttcgaagaaggcaaagccgaccgatccccgcaacaatgcttaccagcggttgttgaaggctatccaagccatccccggggaatcgcccagggaaaagatgcgcaagttcaccgcgtttgcgctgaaggtttgcgtgatcaatcaggccgaggagttgttcacccggggatttgggcccttggtcgcctggtgtgacttgacgctgcttgggactgacgtgcaaggaagcgaggattggtgccacgaagcgggccaggcctacggcggcgcagtggaaaccttcgagccgttcgaatgcatcctgggccgattgtttaatgagttggtgtggtcagggaaaaagaacgacgctcaacatttcaccccttggggcttggcgagggcgatgaacgcctttgctcaagcgcctcaaaaagacgagtggcccatgggtgaccccacctgcggagccggcacgctgttgcttgtgaagcttcacgaactggccgggaaggattcgaaggcccttcgggggcttaccgtgaaagcgaacgaccgcgatccgttgtgtgctgcgatgaccgcacttcagttgctgtcaaaccagttgatctggcggatgcccatcgggcgcgtggtggtcgagtgcaaagacatcatcactcaatacctggaaacgcgggtggtgttttggtctctcacgcgagatcggttcatcgccatggatgaggagatccggctcgagaaggccaaccgggtgacgggcgctgacatgggggcggccaacgatgaatga

SEQ ID NO: 506965 - DNA, 270 bp, Stenotrophomonas maltophilia
atgcctggtggcaagggtttgaaccagatcgagaagatcgccgggagtgaaagactgacccagcccttccccacccttcctggccagcagctcggcatggacccgtcccaggacatcgtcaaacggcctgcttgcgaagaccgctttgatgtaagcgttgatggctgctaccacttcaggcgcttcttcgacattttttttcaagggtccaaaagcaaggactttggtgtcgaggtgacccttggtgtctgcgtggatatgtgccattga

SEQ ID NO: 506966 - DNA, 744 bp, Stenotrophomonas maltophilia
atgcctgacgtcaaactctcccagctcgccgccgccagtgcggcctcggtcgccgccggggccggcctgtggacgatggcgggtcacatcctcggcctgcgcatggagtacgtggggccggcttccattcgcgtttccagcggcagcgcctggattccgtcgctgcaacaggccatcgaggtgccggccgcgctgaccctcagcggtctgacgcttgcggcgaacacctggtaccacctctatctgtacctcaacgggtcgacgccggcgatcgaggccgttacggatgctccggccgctccttacagcggaaccgcccgcgccaagacgggcgccacctcgcggcggtacgtcggcagtttccgcaccgacgcatcggggggcatcatcaggttcaatcacaacccggttggcaacgcagtcgactatgtggcggacatcaacctcgcggcgctctacgttctcgccaatggctccgcgactacatccacttcggtgagcatggcgactgcggtccccgtaaccagccgccaggcccgctcgttttcggagcagaccggaggcacaagcaccggcatcatgtccaatagcgacgtcgctgccagtggcgtcctggccttcgcgcgagctggccagctctacgctggggtgttggcactgaacagctctcaggcgttcacctatttcgtttccggcgctggacaactgaatgtctggtgtgccggctactactacgagcgctga

SEQ ID NO: 506967 - DNA, 975 bp, Stenotrophomonas maltophilia
atggcatacgccgagttcaacaacattccgaacgtccaaacgctgatcgacctgattgtgcagttcgcgcaggccaatggctgggtggtcgagcgaaacacgcttgccggtgccaaccgcacagccacggtccgcattcctgggatctcggactacgtgcaccttttcaataccgaccagctgagcctgcggtcacgaatctccattggctacgatgggaacgcgactcccgcgttgcaaccgttggtgtctccacgcgacatttcttcctatgagctgactggccccttcccgcgcctgaagctcttctctaacggcactgcaatccacgtcgcggtggcccaagccgttgccggtgagtatcgccatcatgcctttggcgtgctggagaaggctggtgcgtacgcgggtggaacctatgtcgatgggacctactgggcgcgcactggcggttggagtggcgttctcattccgaatggaaacaatgtcgtgctgtttggtaacaacttcaacggcaccggctgcggccacgttcgcgcggactctattgaggacaatcggatcaattgctaccaccagctgtgcaactacttcggtggatccttgggtgtggaaggtcaagctggcagcggtgtggggtcgatttaccaggcaacaacatccgacagctacgacagcatgtggctcggctatgttctggccggtgcagatgacaacacgttctctggccgcagcgtctttcaacccatccatctgaccgtccggcgccctggcaccacaccttatctttctccgatcggtcaggtcatcggcctgcgcgcctgctacatggataggcttgagccagagcaggaagtgacgatcgcggacgagacttgggtggtgttcccttggctgcgaaagctggcgatgaacgacagaaccgactcaccgccggcgagcggcaactacggttgggccgtgagaaagtcctga

SEQ ID NO: 506968 - DNA, 486 bp, Stenotrophomonas maltophilia
gtggccaagccccgcactgcgccgcccagcgcacccaagaccgtccaggacgacacgccggccgacgtgccggccgtcaaggaagagaagactacggacgcgccgccggcgacggacggctcggtgccggagcaaggccgaggtgagctggagtccaccgcatcggttttctctgcagccgatggcgctgccgtcgaccagtcgcaggccgaccgtccggcagcggaccagggtgcggacgccgaagcggttgtttcttcgactgatgctgcgtctctcgacgctgtcactgcgcctgccacttccacagccgggggttatgacgtgccgagcgcctggctcttcgaagtactcagcccattcaagcacaacggcgtggtcgtgaagccgccggcgtgggtgccgatgacatgggacgaagcggaggactaccaggatgctggcgtccttggtgacgaaccggccacccaggaagagctggagtaa

SEQ ID NO: 506969 - DNA, 1803 bp, Stenotrophomonas maltophilia
gtgtccgaggtcctcatccaggctgcggccagccagttgctggcggcgccgcacggcagcaaggggcgcatcgcctccgcgctggccgagcagctgggatgctcggtccagacggcctaccgtcacctgtcgaaggtgacggcggccctcaaaccccgcaaacgcaggtccgatgcgggcgaactgtcacttacccgtgacgaagcggcctcgatcgcggccatcgtggaggaaacccgtcgcctgaccggtaccggcgcgctgccggtcgaggaggccgtggatgccttgcgtgccaacggcaggatcgaggcaatgcgcgtggacaaggcgacgggcgagattgtcccgctgagcacctcggcgatctgtcgcgccatccgccattacggcttccaccgtgaccagctggcggcagccacaccggctgcacggctgtcctccccgcatcccaaccacctgtggcagatcgacgcctcggtcagccgccagttctacctggctgatgacggcacacgggtgatggacaagcgcgagttctatcgcggcaagcccggcaacttcaccaagatcgcagaacgccgcctgtggcgctatgccatcaccgaccatgccagcggtgcgatcgagctgttctacgtgctgggtgccgagagcagcgccaacctgctgtcggccctgatccacgcaatgacacggcgcgaaatcggcacgatgcatggcgttcccaagctgctgatgatggatcccggcagtgccatgacggccaccagcaccagcagcttcctggcggcctgcggcatcgaaacgatcatcaacgaagtcggcaatgcacgcgccaagggtcaggtcgagaacgcgaattacctgatcgaaacccacttcgaggccctgctcaagctgcgtgcaccggtcaccagtctggaggaaatcaataccctggcccagcagtgggcacaggcctataacgccacccgcatccacagccgcaccggctacacgcgccgtgatgggtggctgcgcatcacccaggaccagctgcgcctggcaccggccgtggaagtgctgcgacagctggccaccagcgcgcccaaggcctgcaccgtacgcgattgcatgatccgcttccgggcacagcagtacgacgtgcgtggggtgccgggactgatcaacggtcagcgcgtagacgtggtggtcaatgctctggatccggagggcagcgtacgcgtgctgatgccgggcacacaggactgcgcgcctgtgcactacatcgcaccgcgcatcggacgcgacgactggggcttcctggacagcgctgcccgggttggcacggagtaccggaccgctccggagacgccggccgacgcagctcgcaaggaactggatcggctggccatgcaggttcacaccgatgctgaggccgctgtggcacgcaaggccaagcgcgtggccttcggggggcaggtggatccgatgaagcacctgcgcgaagccaatgtgacgccgagcctgccgcgctcgggccgcatcgcccaggtcgatgcaccacaggtgctggcggcccagcgcatcgagcctgcgccgatccgcgccgagctgccgccactgaaccatgtggaagcggcaatgcgcctgaagccactggtggaggcagccggttcggcttggtcgcccgaccactacgcacgcaccgccctgcgctggccggaaggcctgccggtggatcaggtcgagtcctgggcgcacgccctggcaacgccggagcgcggtggtctccggctggtggaaggaggtgccgcgtga

SEQ ID NO: 506970 - DNA, 1176 bp, Stenotrophomonas maltophilia
atgacgttgcgcctgaagcgcctgctcaccgatgccggcatcaagcagggcgtgctggccacagccgccggcctgagccgaccggccctcaatgccctgatcaatcacggccagctgcccaccagctgcgatccggcagcggtgcgcgctgccatcagttcctgcctgacccagcacggcgtgaccgacgcccactggcatgaaaaggaggggccgacgtgctccaacacgccggccccggtttccccaccgcaagacaccgataacgacaacgacattcacgacgaggaagatcccatgctactgcgttttcaggcattgaccccacaggccaagcgtcacttcggcctgaccaccaatcctttcgccgatccggccagcgccgaagaggtgttcctctccccggatatccgctatgtccgcgagagcatgtaccaggtcgcccggcacggcggcttcgctgcggtgatcggcgagagcggtgcaggcaagagcacgctgcgcgaagacctggtcgatcgcatccagcgcgaggagcaggccgtcatcgtgatccagccctacgtgctggccagcgaaggcagcgatgcggtgggcaagaccctgcgcagccaccacatcgctgaggcgatcatggccgctgtcgcaccgctggccaagccgaagagcagccccgaagcccgcttccgccaactgcacgaatcgctgcgtgacagcgctcgcgccggtcacagccacgtcctggtgattgaagaggcccacagcctgccgctgccgaccctgaagcacctcaagcgcttccgcgagctgaaggacggcctgcgcccgctgctgtcggtgatcctgatcggccagcccgagctgggcgtgaagctctccgaacacaacccggaggtgcgcgaagtagtacagcgcattgaaatcatcacgctgccgccgctggacaacgagctgggcgcctatctggcgcaccgcttcaagcgcgcccaggtgtcactggacaaggtggtggaacagagcgccatcgaagcgctgcgcaccaagctggttccctcgcgcggtgcgggctcgctgctctacccgctggccgtccagaacgcgctcaccgctgcgatgaaccgcgccgctgacctgggcgtgccgaccgttaccgctgacgtcgttcggggggtgtga

SEQ ID NO: 506971 - DNA, 399 bp, Stenotrophomonas maltophilia
atgcgcacggatctgaccatttcgctgaaagccgcccttgaccttgtcgctgacgaacgtcaccggcaggtcaatgagaagggctactcctccgagcacgacgacgatcacgcgcaggaggaacttgcagcagctgcggccttctatctgctcccatcgtggatgaaccaggacgttgtcagtgtcgatgcgaacggcgcgatggaaatcgccccacttcagcagttggttgccggcagtgcattcaaccccagcgcctgggaaggcctcagtcgactggaggacgatccagaggatgacgttgagacccgcattcagaacgtcgttcgtggcttggcccttggcacggctgagctggagcgactgctgcgccttcgcgacgaacaggagggctgctga

SEQ ID NO: 506972 - DNA, 240 bp, Stenotrophomonas maltophilia
atggctgataccacctccagcaacggcctgcaccaccttcgctggtttgccgaaagcctgatgcgcgatgccgagctcccggaccgtcaggtgacggtgatgcaccgagacctcttccgccgcgccggcatcgagtggcgcgatggccaagacctggtggaactgttggcctccctggacctgcagcagctacgtggactgatcggtcagctgcgcgacgccaatggcgaggaggactga

SEQ ID NO: 506973 - DNA, 255 bp, Stenotrophomonas maltophilia
atggcacgcaccggccgccagcgctacgaccacctgcgcgcgatgcgctttgcgctgtgggctcgcactcagaacccgcgccagcttaccccgcagcgcatttccggcctgctcggcatctcgctggatgccgcccgccgctggcgcgccgactggttcaccgccaccagccctatccacgtcgaaggcgtccccgacgtccttcggcccactcaaccgtttgtcacccccgccgcccaaggaggcgcccaatga

SEQ ID NO: 506974 - DNA, 702 bp, Stenotrophomonas maltophilia
atgccgaagatccgagacacctgcaccttccgcttcgacggcgttcgcggtgcactgaatgccagcaccctagccctggccgtggagatcgccgaccgggcagcacgggccgacgtggagatccacgcgcccgccgtgaagctggacgggctgcgcttcttcgatgtcacctgcggcaacatccagggcgaagacgcgaccgccgcccgctatgccatccgtcaggcagtgcggtacatcgaggcgcgcggagacgcactgccctggcgcctgaagcgccacatctcccagccggcgctgctgcacttcgaagatcgcaccgaccccgaggtggccaccaccgggccacgtcatgcctgcgtcaactgcgacacgcccaccgatgcgcccgagtcgcccatgtgcggcccctgcgctcagcaggcggtgggtgcgatggctgcgaccacggccgaggcgatccggcgaatggacggactcgacttcatctgtggcctgcgcgacccgcagacaaagcagaacgtggccgtggccatcgctcgccaggtcgggcatggcatggccgagaagtgcgaagcccaagcacaggctgcgctggacgccattctcaatctgctgctccatccgccgaggttggtctggcagggaacttgccccatcgacctcttcaataacggtgccggaaaggaggtgagtccgtga

SEQ ID NO: 506975 - DNA, 918 bp, Stenotrophomonas maltophilia
atgctgatgcgtaacttgctgctcttccgcttcccgaagggcaccgacttctccgaagtcgaatccgtgctgccgcatggcgttctggagccggttggaccgctcgaaatgaactcgcgcggcttcatttcccccttcggccgcgaggaacaggagcacctgtcttgccggcagggcaatttcctttggctgacggtgggtggcgaggacaagatcctgcccagcgcggtggtcaaccgtgcgctggagagtcgtcttcaggtcatggaacaggaacagggccgccgaccaggtggccgcgagcgcaagcgcatgaaggacgacatcttgcacgagctgctgcccaaggccttcgtcaagaacactcgccacgacgcgatcctggacctgacccacggctatgtggccgtggacacctccagccgcaaggtgggcgaggccttcgtgtccgatatccgcggcctgctgggcggcttcccggcagtcccgctgaatgctcaggtggcaccgcgctcgatcctgaccggctggattgctggcgagccactgccggacgggctatcccttggagagtccgccgagttgcgcgatccggtcgaggggggcgccaaggtgcgctgcagcgaccaggaactgcgcagcgacgagatcgacaagcacctggatgccggcaagcaggtcaccaagctggcgctggtgctagaggacgcggtgtccttcgagctgggcgatgacctggtggtgcgaaagctgaagttcctggacggtgcgctctcgcagttggagcaagccgacgccgatagccatcgcgccgagttcgacgcccgctttgccctgcagagtggcgagattcgccgcctgttcctggtgctggaacaggccttccagctttccgatgtggaggtgcaacgtggatga

SEQ ID NO: 506976 - DNA, 162 bp, Stenotrophomonas maltophilia
atgatcccggccccgcccaccttcatcactgcaccagtcgtccagatggcaggcgacccgttcgatctgttcctgcgcatcaacgtgatcgcgttcggcgtgttcgttctctgcgcctgcgtcgccatatgggttgccgatgaccgggagggtggccgatga

SEQ ID NO: 506977 - DNA, 204 bp, Stenotrophomonas maltophilia
atggcccgagtccttacgtgcattgatccgacgccagcgagcgacggttcctgcgaacagtccgcgtgggtcgatcaggcctcgtggattgactacttgcccaccgtggaacaggcgaacacggtcggatttgccatcttctgcgcgctcgcgatgctggcagcttttcgcctgatcaaccctagagagagtgacgacgtatga

SEQ ID NO: 506978 - DNA, 252 bp, Stenotrophomonas maltophilia
atgaacaagctcaaccgtgaatccctgatcctgcgcgccaagcacaaggcatggtccatcaagtccggagtcgtggccgctgttgccactgctgcggcactgccgggcttcgccttcgctcagcagacggccaccttcgacccggcgtccgtgttggccggtattgccgcgatggtggcggccggcatcctgatctataccgcgtgggtggcggcgaagtgggccttgaaggccttcggcattgtgaagtaa

SEQ ID NO: 506979 - DNA, 1536 bp, Stenotrophomonas maltophilia
atgcgctggctttcgcatgtctctgccagcgggatcgtactggcgcttcttacggcgctggtcggccagctgtccgttgttcccattgcgagtgctcagagtgtcgttggttgtagctccaacagcgtgccatccgatgctgcgattcctacctactgtgatcaaggcattgccttcagcgcatgtgcggcggcagaagatggcgcagcagcacggttgcgctctcgctatcccgacagtgcatcgaatgttgagaaaggcgggtgtcgcaagtgggcggacaatgtctttcagtgctacgtgcgaattcctggcgtgtcggaggacgactgtcgagcggacaacaaggtctatagcttctaccggccggatttgacctgcagctcgcggaactcaagccttccactagccgatgcggcaccttggttcagcgccccgtctacctgcgttggagggtgcaaggttggcggaacgccgttcagtcaggagaacggaaacgtcaaggtctacgggatgaaggatcgatactacgatggcagtagttgcagtccacaagcgggcaccccaggcattagtcccgaccaaggcccggaagaagaagggaagcctaagccggacgaatgtacagcgcttggcaatgggcaaacctcatgcatcaagcctaacggtgatcattgcgctactgcgtccactggcaaaaccttctgttggaagccgcatgagagtggcgagaagcgtgacggcaccgacgctcagaagaagagtgaggctggcaagcctgtaacgccgcctgcgccctccgagccgacgaaggagtatcagcgtacggaagggcaccagcagacggcctgtatcaacaacacgtgcatcacctacaacgtcaccaacttcacggaaacaggcaagggcagtgccaagaatggaacgggcgacaacagccccgatgggacgaagaacaccagcggcaatgggaaaccgggaacgggttcaggtggaggcggaaaggatggagagggcgactctgccagtgacagtggcaactgtgacgtagcacctctctgcactggtgacactctgaagtgcctgcatttgcgctacacgtggaagaaccaatgcaataccgccaaggatgaggttaccggcggtgatgattgcaaggcgccgcctgtgtgcatcgggaagggctgcaaagcgcaggagtacgcgatgcttctacagcaatggcgtgggcgctgtgctgcggaagatgatcgcaccaagctcgctagtgatgctgcggcgggtgccgccgatgctgcgggcgataacgagacgtcagccgttgccgatctatggaagaaaggcccaggacaagatgggcaggggcttgatcgaggaaagttgacgctgggtggcggcgagctcttccccgcgattgaaatcatgggtaccgcatgggcacctccagcgcagctatatacggtgcttgacatgatccggcagatggtgagcgcggccggcgttcttgcggctatgtacatccttttcaggaagtga

SEQ ID NO: 506980 - DNA, 315 bp, Stenotrophomonas maltophilia
atggcttggctatcgtttgacagtccaatgctcggcggcttggccgggatgctcaacaagctcatcaagctgcgcgccgggctgtgggtggcgaagatcctttccacactcggcttgggcttcgctgcgcaagagttcatctatgagccaatcatccagcaggccattacggcgtggaattccgttccggggtatatcgccaattgggtacatgcgcttggcatcgatgtgttcgtttcgctgtgcctaagcgcctacgggattcagggcgcctcgcgcatcttcctttcccggaaatatgagagtccgacgtga

SEQ ID NO: 506981 - DNA, 1131 bp, Stenotrophomonas maltophilia
atggttcagcgcattgcggacttggtagagcaggggcagcacgtttttacgacgaacatcaacggcatcaacgtgccggggatcacgccttgggccgatcccactgactggcgctcgctaccggctggtgcggtcctgttcgttgatgaggctcagcagtacttccgtgcgcgccgtggcggtgatccgcctgagtacatcagcgctatggagacaatccggcatagcggtgtgcggctggtgctggcaacccagcagcccaactacctggacacgcatcttcgcggcttggtcggatttcatgaacacctgttgcgccagtcgggcaaggaaaaaacgttcatcttccgcaaccatcaggtgatggatgaggttcgacagggtctgaaacgcatcaagagcctgtacgaccatgagatgtggacgctaccggcgaagtacttccagtactacaagagtgcggagattcatacggtcaagtaccgcatgcccgcgctgctgaaaaaggctttgatcattgcgccgattgccttggtgctattcgcgctgcccttcggctatatggcctacacggggctaaaaaagaaggacgaagcggccgggttgaaggaggcggcggctacggcgccgccgactgacccggccggtcgtccctcgcgtaatgccggtggtaggtccgagagccggtcggcagaagaatacgtccaggcaatcacgccgcaggtggccgacgttgcatggtcagcgccggggtactcgggccgtgagttccgtagtgatccgcacatcttctgcatgtcgacggagaacagctgccgatgcgtgacagaacagaacacgcggccggttgtgccggtacgcgatgacgtgtgccgggagattgcccgctggggtgaggcgtacaacccgttcaaagagccgcagattgtgcgtgagcgcgatgcgcggccaaggccggagcagccggagggcgagggtaggcgtgttccggcggcgcaaccgcaggccatggcatctgtgcaaggggtgacggtgcagcgcggcgacagggcgatgggtagcttccctgagtcaccgcagcatcagacgtcttcgtacatgacaaccccgacgatccctaccaagctctag

SEQ ID NO: 506982 - DNA, 261 bp, Stenotrophomonas maltophilia
atggccggccgcaacgggcacgtcccacctgcgcgcaatcctgggccacccgcaagcgtagatcgcggtgcgcaggtcatcggcagcgccgactacctgcgactgtgccgcatcgccgacgcagccgcgttgctggccaagctgccgagcgaagcggcaaagatgctggatatcaaagccgatcacacgtctgccgtagcgcagtacatggccgaagacctggccgcgatcctgagccgatcccgccccgcagacgagtaa

SEQ ID NO: 506983 - DNA, 345 bp, Stenotrophomonas maltophilia
atgagcgccgtcatgggccagcgcgccatcttcacctgtgacgcatgcggtacaccgttgacgaagcgcaccagcgccctacagcaccgccatctgcgtaccgacgcctatgtgtgtcaaaacccggtatgcggcgctacctacaccggccactctgaactgaccagcatttccagccccagcggcatgccgaacgccccggcctgcgaactaccgcagacacccggctacgagcgcgccctgctgctgcaacgctggagacaggaccggggcgaaatgcagctggattggatcgacaccccccacgtcacaccacaggacggcggcgaacaacccgccacctga

SEQ ID NO: 506984 - DNA, 771 bp, Stenotrophomonas maltophilia
gtggatctactcaaggacgcaatggaccgcgcgctcgcagagatgcgccgccacgactcgcagcgacgctcccttccccgcgaatcgttgattgccttggctgccgatgcccagcaggtcatcgacgccacccgcgcggcaatggcagatggtgctggcggccctcggactgagcggcgcatggctgccggtggcctgctggtttacgctctggacatcgcatggtcggcctgtcacctgctgcgcacggacccggtgcgcacgcacatcgtggtgctcaccctgtggcgccctttgctggaggtctggctgcgggcggcattcttcgcattggaagcgaccgacgacgaagtagcgtcattcctccataaggggaagcttcctcggcgcaatccgaaagacccaagagatttcagcccgcgactgatcgcgggtcttgtcggcccgacgatctgcccggacgaaccgggcttactgaatgacctgggcgctgaggtgaaggactggcacggcctcgtgcatggcggcaacatcgttgttgacctgtatgacggcggggacacgcttcaatcgcaggtcggcccagacgacatggcggtcatagttaaccgggtcgcagtcgtcgcgtgcctgatcgggctggtcggcctgaacctatccgtcgacgaaggcaggcgcgcggagattgagcccctccaagccagccttaccgaacgagtccgctcattccaagcacgatggccacaaatccagcgggataggttggcgtag

SEQ ID NO: 506985 - DNA, 693 bp, Stenotrophomonas maltophilia
atggggctgggtagcgcgtgccatacagacgaagtcgaaggcaggtcgcgtctttcagaatcgccgtttgctgataccttcgcaggttggaacttgaccagcggggggacgatgagcagccagtcggcattctggacggcagacaccatcagtgcggcgggtacagcattgtcggccctgcttgctgcaggggtatttgcttatgaccgtgcctcagcctggtcgcggaggcgttcggacgcttcccgcctgtcgcagctaattgctggcgatctaggactggagatagcgcagcttcgttcaattagtgcattcattaacggaaatgccgagacggccggctattcgaatggcctgggacttctaagtgccaaaccaggtgcagaagcagctctgctggtctatttgaagcagttcaatacggcgcgaatagatcgaatttgcgagaccacgaacgtgtttgatgccggcttgagcgaccgactgtcgctcattattacgttgagggccggggccttgatgtcggtggaaacaatggagtcgatggagccagatcaagacagggctgatgtcgcgaagcatgtatgcctacaagtgaacgccctacagcgcaccatgatcgaggtgttcaatgcaatcatcgcttctcggggagttcgttcactacaggtcgagtgcctgatttcttcctag

SEQ ID NO: 506986 - DNA, 294 bp, Stenotrophomonas maltophilia
atgacgatcattgagaagctggaaaccggtgctgaagcatgcgacgcggctgcaatcgtgatgaccggggatgatactgactccgccggccaggcaagagccagagagaacgtcatgcacgagatcggctacttccatggcaaatatgggaggcgccgagtagtgcttttgcatgaggaaggcgtcagcgtacctaccaacctgagcgggatcgtctacatccccttcccaaagggaatggtaagcgcggcattcggtgtgcttgctcgtgagttgaaggcgatctacgtctga

SEQ ID NO: 506987 - DNA, 420 bp, Stenotrophomonas maltophilia
atgactgaggaacagtctgcgctgctgcattgctgcagctgtgctggcaggagcaggtgtgctgtttgccctaatctctatcgcctcatccaacgtacgtaccaatatctcaagctgccagcgcgcaaacaatccgtttggggtctttgtttttacattgattcccttaggtgcaacatcgacaactcgaaaatcgccgtacagggatggcagcagctttcgaagagtctctacctgactgtgtgcttgtctaaagtagggcccgacgtcgtcaatcgagaagtactggcggaggtccattttcgctgttatccctttgacctgctcttcgagcgcggcagcagtgcctttgcgagtgccggccagcttagccatggtgatcgcgagttcatccattcagcgtctccgatttgttcgtaa

SEQ ID NO: 506988 - DNA, 1857 bp, Stenotrophomonas maltophilia; identical to SEQ ID NO: 170045

SEQ ID NO: 506989 - DNA, 627 bp, Stenotrophomonas maltophilia; identical to SEQ ID NO: 170044

SEQ ID NO: 506990 - DNA, 1923 bp, Stenotrophomonas maltophilia; identical to SEQ ID NO: 170042

SEQ ID NO: 506991 - DNA, 318 bp, Stenotrophomonas maltophilia; identical to SEQ ID NO: 170041

SEQ ID NO: 506992 - DNA, 465 bp, Stenotrophomonas maltophilia; identical to SEQ ID NO: 170040

SEQ ID NO: 506993 - DNA, 372 bp, Stenotrophomonas maltophilia; identical to SEQ ID NO: 170039

SEQ ID NO: 506994 - DNA, 1518 bp, Stenotrophomonas maltophilia; identical to SEQ ID NO: 170038

SEQ ID NO: 506995 - DNA, 354 bp, Stenotrophomonas maltophilia; identical to SEQ ID NO: 170037

SEQ ID NO: 506996 - DNA, 1404 bp, Stenotrophomonas maltophilia; identical to SEQ ID NO: 170036

SEQ ID NO: 506997 - DNA, 951 bp, Stenotrophomonas maltophilia; identical to SEQ ID NO: 170035

SEQ ID NO: 506998 - DNA, 447 bp, Stenotrophomonas maltophilia; identical to SEQ ID NO: 170034

SEQ ID NO: 506999 - DNA, 495 bp, Stenotrophomonas maltophilia; identical to SEQ ID NO: 170033

SEQ ID NO: 507000 - DNA, 747 bp, Stenotrophomonas maltophilia; identical to SEQ ID NO: 170032

SEQ ID NO: 507001 - DNA, 2883 bp, Stenotrophomonas maltophilia; identical to SEQ ID NO: 170031

SEQ ID NO: 507002 - DNA, 435 bp, Stenotrophomonas maltophilia; identical to SEQ ID NO: 170030

SEQ ID NO: 507003 - DNA, 1470 bp, Stenotrophomonas maltophilia
atgaaaagtaaccccctcctgaagtggctgctgatcccgatggcgctggtgctgctgttcgtcggcatcaagatgttctccggggatcgcggcgccaagcccgttccggccggcagcgccaactcgctcacgcccgaagagatgaaggcgctgggcatcgagggcgacacgccgcgcgataccgttgccacactggtggcccaggtcaagcagttgcgcaacgagctgcagacggcgctcaacgacaacaagaaccagaagagcgagaacgagcgtatgcgcgcgcgggaaagcgcgatcgaccagcgcatccagtccgcgctggatggtgaacgcggccgcctgcagcagtaccgcgagcagttggccggcgaccgccagcagacccagggcctgctgcaagacctgcagcggcgcctggatgggctttccggcaagggcggccaggccgatctgccggtcgggctcggcctggaggacggcgacggcaagggcttcagcggcagccagggcggcgccgcgcgcagcaccagcggcacgcgctgggtggaaccggacgatgcgaagccttcggcgaagaacggcagcagcggcggcctgaactttccgaccagcttcgggccggcgcagaagacgctttccgacacggccgacaacgtggccagcaccgtcgcggatgcaggcagccgcgccgtgggcacgtcgtccaagccggtctacacggtgccgtcgaactcgacgctgatgggctccatcgcgatgaccgcgctgatcggccgcgtgccaatcgacggcacggtcaacgacccgtaccccttcaaggtgctgatcggcccggacaacctcaccgccaacggcatcgacattcccgacgtggcgggcgcggtggtcagcggcacggcctcgggcgactggacgctttcctgcgtgcgcggccagattcgctcggtgacgttcgtcttcaacgacggcacggtgcgcacgatgccggaggacggcaaccgcaaccagagcggcggcggccagggcaatggtgcaaacagcacgacgcaaggcggcctgggctggatcagcgatccctacggcatcccctgcgtcagcggcgaacggcgcagcaacgcgcagcagtacctgggttcgcaagccctcatcaccgcggccggcgccggcgccgcttcactgatcaagtcggacaacggcagcgtggccgtggtcgctaacagcaacggctcgcttggcacggtaggcatcagcggcaacgaggcgatgggccgcatcctggccgggggcgtccgcgacatggccgattgggtcaacaagctttacggccaagccttcgccgccgtctacgtgcggcccggcgccaaggtcgcggtgcatctggagcagccgctcaacatcgactacgacgccaaggggcgccgggtcaatcaacgcatcggaggcaagcatgcgtcggatttggattga

SEQ ID NO: 507004 - DNA, 921 bp, Stenotrophomonas maltophilia; identical to SEQ ID NO: 170028

SEQ ID NO: 507005 - DNA, 693 bp, Stenotrophomonas maltophilia; identical to SEQ ID NO: 170027

SEQ ID NO: 507006 - DNA, 429 bp, Stenotrophomonas maltophilia; identical to SEQ ID NO: 170026

SEQ ID NO: 507007 - DNA, 240 bp, Stenotrophomonas maltophilia; identical to SEQ ID NO: 170024

SEQ ID NO: 507008 - DNA, 408 bp, Stenotrophomonas maltophilia; identical to SEQ ID NO: 170023

SEQ ID NO: 507009 - DNA, 1629 bp, Stenotrophomonas maltophilia; identical to SEQ ID NO: 170021

SEQ ID NO: 507010 - DNA, 1143 bp, Stenotrophomonas maltophilia; identical to SEQ ID NO: 170020

SEQ ID NO: 507011 - DNA, 1002 bp, Stenotrophomonas maltophilia
atgatgggcgtgcccacctaccatgtgctcgccctgtctgggggcggctatcgcggcttgtacacagcgacggttcttgccgagcttgaagccgtgctaggccgccccatcgcttctcacttcgacctgatctgcggcacctctgcaggcgggatgctggccttggggctggccgcggaaatccccgccattgaactcaaagccttgttcgaacgacagggctcccgcatctttggttgccgaagtctcgctcggcgccttctgggcttctggttgaccgccaagcacgactccgcagggttgcggggcgtgctgaccgagcgctttcaagacgccacgatcggcaacttgaagcaccgcgttctcgtgccagccgtcaactactcgacggggcgcggccagttcttcaaaacgcctcaccatccctcatttgagatggaccaccgcatgaggatcgtggatgtggcgttggcgaccgccgctgcgcccgtttactttccgctagcgcgcaacgatcgtggcgtctttgcggatggaggactggtcggcaatgcgccaggactgttcgggctgcacgaagtcaatacgttcctcgcgccgaaacagaatgcactggtccgggtgctgtccatcggcacgatgacgatcggtgcaaccgtccgtggcggcgccagcctcgaccgcggattcggcaagtggcgcggagggctgttcgatctggtgatctctgcccaggagtcgtcggtggactacatgctgcgccagtcgttgggtagcaactacttccagatcgacgacaaggccacgcccgatcaaagcaaggacgtaaaggcgctggaccgggtttccatcggcgccacgaatacgctgaaggaccgcggcaatcatgcagcgcagcgcgcgcttggcgaccctcttttccaaccgtttcgagcgcaccaggccggcgcacccaccttctatcacggccccaacaagaatgtgccggaggccgaatgctga

SEQ ID NO: 507012 - DNA, 225 bp, Stenotrophomonas maltophilia
atgacaggcaaaaatcagcatgtagttcctcaccaggacggttgggccgtcaagggtgccggcaatcaacgggcaacctccgtgcacgatacgcagcagcaggccattgacgcggcgcgggacatcgcacgcaaccagcagtccgaactggtcatccaccgtccggacggtcgcatccgtgacaaggacagccacggtaacgactccttcccgccgaagggctga

SEQ ID NO: 507013 - DNA, 387 bp, Stenotrophomonas maltophilia; identical to SEQ ID NO: 170019

SEQ ID NO: 507014 - DNA, 870 bp, Stenotrophomonas maltophilia; identical to SEQ ID NO: 170018

SEQ ID NO: 507015 - DNA, 750 bp, Stenotrophomonas maltophilia; identical to SEQ ID NO: 170017

SEQ ID NO: 507016 - DNA, 555 bp, Stenotrophomonas maltophilia
atgaaccgcatcctcgtcgccgcgactgcggcgctgctgtccaccaccgcagacgcgcaggaccgcggccccgttaccaagaacagttccccgccgctgatcgtggtcgaggacaaaggcggcacctcggcgctgccgtactaccgggccttgaatccgcaggatgcgcagcccggtcagccagccacgccgcaaaccaagccgcgcattggcggcccggccgaagccgaggcggccatgctgccggtgcgctcgatgcggctgacacccggcgacgagccgcgccgcgtgatccgcgcgccgggcctgacgccgctgttcctgatcggcgacgacgaccgctcacgagcctggctccaacgacggggcaaggacttgcaggcgctacgcgccgtgggcttggtggtcaacgtggcgacgcccgaagccctggccgcgttgcgtcgcctcgcaccgggcttgatgctgtcgccggcctcgggcgacgagctggcgcagcgcttggggctcaagcactacccggtgctgatcaccgccaccggcatcgagccctga

SEQ ID NO: 507017 - DNA, 585 bp, Stenotrophomonas maltophilia; identical to SEQ ID NO: 170014

SEQ ID NO: 507018 - DNA, 732 bp, Stenotrophomonas maltophilia; identical to SEQ ID NO: 170013

SEQ ID NO: 507019 - DNA, 645 bp, Stenotrophomonas maltophilia; identical to SEQ ID NO: 170012

SEQ ID NO: 507020 - DNA, 612 bp, Stenotrophomonas maltophilia
atgcaaccactcacctgcgtcgctcaccgcttggctgtgcctgcctggctggccggctgcgtgctcatcaccggctgcgccgccacgggcacgacgagccctcccactgtccatgactcgctccccgagcctgcggtgttggtcagaaccatcgccccggagcccgagccgggcctgatcccggtggcccgctacgggcgctacacgctggtcgagatggtgccggaaccggcacagcgcgacctgctgcgacaggtgatcgagatttcgattccgccgatcttggacgcgagcgtcggcgatgcccttcggcacgtgctgctgcgcaccggctaccggctctgcgacgcgacggaggcgaccgcgctgtacgcgttgccgctgccggcggcgcacctgcggctcgggccgctgccgctgcgcgatgccttgctggcactcgccggcccggcctgggagttgtccgtcgatgacgcttcgcgcgcggtgtgcttcacgcgcgtgacgactgcgcgtgcgccgagcgcaagcccgattcccgcggctccggcaccgagcgcgccggccgccgaacccgccgattcccacgtgccccaggaggcccagccatga

SEQ ID NO: 507021 - DNA, 1116 bp, Stenotrophomonas maltophilia; identical to SEQ ID NO: 170009

SEQ ID NO: 507022 - DNA, 657 bp, Stenotrophomonas maltophilia; identical to SEQ ID NO: 170008

SEQ ID NO: 507023 - DNA, 828 bp, Stenotrophomonas maltophilia; identical to SEQ ID NO: 170007

SEQ ID NO: 507024 - DNA, 270 bp, Stenotrophomonas maltophilia; identical to SEQ ID NO: 170006

SEQ ID NO: 507025 - DNA, 393 bp, Stenotrophomonas maltophilia; identical to SEQ ID NO: 170005

SEQ ID NO: 507026 - DNA, 630 bp, Stenotrophomonas maltophilia; identical to SEQ ID NO: 170004

SEQ ID NO: 507027 - DNA, 345 bp, Stenotrophomonas maltophilia; identical to SEQ ID NO: 170002

SEQ ID NO: 507028 - DNA, 366 bp, Stenotrophomonas maltophilia; identical to SEQ ID NO: 170001

SEQ ID NO: 507029 - DNA, 798 bp, Stenotrophomonas maltophilia; identical to SEQ ID NO: 170000

SEQ ID NO: 507030 - DNA, 717 bp, Stenotrophomonas maltophilia; identical to SEQ ID NO: 169999

SEQ ID NO: 507031 - DNA, 465 bp, Stenotrophomonas maltophilia; identical to SEQ ID NO: 169998

SEQ ID NO: 507032 - DNA, 450 bp, Stenotrophomonas maltophilia; identical to SEQ ID NO: 169993

SEQ ID NO: 507033 - DNA, 552 bp, Stenotrophomonas maltophilia; identical to SEQ ID NO: 169992

SEQ ID NO: 507034 - DNA, 1251 bp, Stenotrophomonas maltophilia; identical to SEQ ID NO: 169990

SEQ ID NO: 507035 - DNA, 1662 bp, Stenotrophomonas maltophilia; identical to SEQ ID NO: 169988

SEQ ID NO: 507036 - DNA, 189 bp, Stenotrophomonas maltophilia
atgcagggcgaagcacacggtacgtttgaagtggatctgcggccgatcggtggcaatgacggcccgattgcggtgatgtcgatcaacaagaccttcgccggcgacctgcacggcagcagcgtcggccagatgctggccttccgcacgccggtgcaggctcggccggctacgtggcgatggaacgggtaa

SEQ ID NO: 507037 - DNA, 435 bp, Stenotrophomonas maltophilia; identical to SEQ ID NO: 493171

SEQ ID NO: 507038 - DNA, 1074 bp, Stenotrophomonas maltophilia; identical to SEQ ID NO: 493964

SEQ ID NO: 507039 - DNA, 1584 bp, Stenotrophomonas maltophilia
atgggcgtgaagtacaagcagatcgacctgtacgcgtccgatgcggcgcagatcaacccgaccttcacctactcgctgggtgatccggacttccccgattccattccgtacaaggcgcagttcgtcaagccggtgaccggcgtgaccggtgtgtccggcgaagtgcgttcgaagtccaagcagtacggcgtgttcatccaggacgactggcaggtcaatgaccacctgcagctgaacatcggcctgcgctgggactacgaaaagaccccgtcctacctggacttcgtgaccccgcagcaggtggtcgacgccatctattcgcaggatccgcgcgctcccgccggccagacctatgccgattcgctggcactgggcggcctggacatcagcgactacatcagcaacggtcacaaccgcaaggcattcaaggatgcctggcagccgcgcctgggcttctcgtatgacatcaatgccgacgagcagcacgtgatccacggtggtgccggccgttcctacgaccgtgacctgttcgacaacctgcagctggaaaccaccaagctggccctgccgcagccgaccatctacttccgcaacccggccaccggcgcctgcatcaacggccaggccgcctgctatgactggaacccgaacctgctcaacggcatcggcaacctgcaggcactggtcggcgcgaccagcaatgccggcctggaagtggacctgctgaacaacaagctgaaggcgccgtactcggatcagttcagcctgggcatgagcaaccagatcggcgactggctgaccgacgccaccatcgctcgaaccctgagctacgacggcttcgccttcaccctgggcaaccgctacccgaccggccagttcttcgatgatccgcgcctgtgtggtggcacctccccgggcctgagccaggcctggagctgcaacgtgccgggcttcggcagcctgatcatcggccagcagggcatcaagacccgtgccacccaggtcctgctgtcggcacagaagccgttcaccaaggaaagcggttggggcacctcgatcgcctatacctggaccaccgcgcgccacaaccgtgacatcaacgagaagtacgcctttgatcgcggtctgatcggtgattacccgaccatccgttccaacggcgcgccgcgccaccgcctggtggtgaccggttcgtacgcgggcttctggggcatcaccttcggcggcaagatcaccctggccaccccgaccgccgtcaacgactggtacccggtgatgcaggccagcggctacacgctgccgactccgcaggcggccgtgcccaacgcaaccggcaagttcctggtgggcggcaagatcttcggctaccgttcggtcgacctgcaggcgacgaagacgttcaagatgccgggcaacactgagctgtacgcccgcctggacatcatcaacgtgttcaacttcgacaacttctccacctacaactacgtcaagaccaacggcaagctgcaggccagctacaacgagaccggcgacatcatcggtacgccgcgccaggtcaaggccgaagtgggcttccgcttctaa

SEQ ID NO: 507040 - DNA, 1281 bp, Stenotrophomonas maltophilia; identical to SEQ ID NO: 158941

SEQ ID NO: 507041 - DNA, 327 bp, Stenotrophomonas maltophilia; identical to SEQ ID NO: 158945

SEQ ID NO: 507042 - DNA, 276 bp, Stenotrophomonas maltophilia; identical to SEQ ID NO: 158952

SEQ ID NO: 507043 - DNA, 945 bp, Stenotrophomonas maltophilia; identical to SEQ ID NO: 158953

SEQ ID NO: 507044 - DNA, 1425 bp, Stenotrophomonas maltophilia
atgtccgatccctacgcccgccgcggccttactgctgttgcattcctatcgatcacgcttctcgccgcgtgcagccactcgcctcacagggtggagacatcacgcgttgaggttccggccaaattcatgaacgaagcgggtctggctgtgcagcaggtgccagcacaagcactcccggccgagtggtggacggcgtacggtgatccgctgattgacgcgctggtgcgcaacgcgctggagcacaacaccgatctcgctattgcaagagcgcggattgatgaagctgtggcgatcacccgacgtacacgcgcttcaatgttccctagcttggcgctcacgccccaagcaacgcgcgcgcgcgacttttctttggcaccgaccatcagcagcgatgccaggcttccgctgtcggcttcatgggaagttgatctagcgggccgcctctcgcatgccgctgatggcgcacggatggacgcagttgctgtcgaacagaactggttcgcgacacgttggcagatcgcctttgagacagtgtccgctgcactgcagcagcggcaggcggcagagctggaagatctggcaaaagagcgacttcaagtcgccgagcgccttgagcgtctgacagagcagaagttcaaggcaggtcaagctacgggctttgacattgaacgcacgcgttccgaggtcatcgccctccgggtggagcaagagcagttgcgacgcgtacgcggcgaagcaacgcatgccttggatgtgctcgttggccggattccgggggcgcttggcagcggtcctgcgcttgcctctctcaccatgcccgattggactcccagaagcgtgccaggcgaattgctgcagcagcgccccgacgtcagagccgcgcaggcgcgtcttgcagcggcgacggcgcgatggaacgcagcagaaggcgagcggctccccaaacttgtgctcgatttgagtggtgggcgccaacgcttcgagaacaacggaacacgtgtggcagggaacattttctctctgggcttgggtgtgacgcttccgatctttgacggtggagcaatacaagcgggaatcgacgagggctcagcacgcagtcgcggcgcacaggctgacctggaacgcacggttttgcttgcgcttcaggatgtggagaacgcttatctgggctggcagacccagcggacttctctgcagcatcaggtcgatggtcttgtcgtcgctgatcgactccttgaccgcagtcgacgcctctttgaggcgggacaggtggatgcgaccgttgttgcagaagcggagcgtggcaccttgtcccagcgagcggctctggtccgtgctcgcgccgacgcagccgtgcaatggggtgttctcgctaaagcgctttctggttcgccagagcatgtgaatctgcaatcttcaccctga

SEQ ID NO: 507045 - DNA, 636 bp, Stenotrophomonas maltophilia
atggcaactcgtatgaaatcaagcccagaggagtcgcattcggcggacaacggcgctgaagccccctccatctctaagaaagcgcaacaaacacgggagcgcatccttcaagctgcgcgtgacgtagtcatggagggaggtgccgggcacctaacgcttgacgcggtcgttgcacgggcaggaatgagcaaaggtgcgttcctgcaccacttcaagaccaagcgcgatctgctcctcacgatgattgatgaccaggtctcggcgtttgatggcgggcaggaagagcgagagctgccattcgtcggcgatccagacccttggctatccagccaggtctcggctatgcctgacggcgggatgcaaaagatgagcgctgcattgctggcggccgtggctgaagaccccacgctgcttgagcctgtgcgcggctggtaccgcaggcagtacgagaacgcgagcaaatctccacgcggcaccgatatcgccggaatcgttctatttgccttggacggagtcttcctcgccgaaatgatgggttttccgacgtttgctgccgaagacctttctcgactcatgcacaccctccaggcgctcgcccgcggcgaactggaactcacccctattgataaacgctga

SEQ ID NO: 507046 - DNA, 1167 bp, Stenotrophomonas maltophilia; identical to SEQ ID NO: 265145

SEQ ID NO: 507047 - DNA, 3117 bp, Stenotrophomonas maltophilia; identical to SEQ ID NO: 280994

SEQ ID NO: 507048 - DNA, 336 bp, Stenotrophomonas maltophilia; identical to SEQ ID NO: 158958

SEQ ID NO: 507049 - DNA, 630 bp, Stenotrophomonas maltophilia; identical to SEQ ID NO: 354428

SEQ ID NO: 507050 - DNA, 1311 bp, Stenotrophomonas maltophilia
atgtctctcgccgagaacgaccaacgcatcaggccgtcggaggtcaaccaaccggtggttgtagcggtgacactgtcaggcgggggcgctcgggcggcggccttcggcctgggcgtgctgcgcgaactcaaggccacacgcttcgcgctagagggccaggagaccactctgttggatcaggtgttcctggtcagcggagtgtcggggggcagcatccttgccgcgcacttcgcggccttcggcgatgccacgctgactcgtttcgagccggattttctgcttgtgccttttgaggggcgactcatacgtgaagctctgtggcctgagcgtctttatagactaacttcaccttggtttgggcgcagccagatcctggctcaacgcttggacgaactttttgaaggccgcacctttggtgacgtgcgccgacgaccgggcgcgcccgaactgatgatcacggcaaccgacctcacgaccggtgcccctttcgatttcaccaccgagcaattccggctaatctgttccgacctcgatgcaacgccgctgtctttcgcggtggcggcctcgtcggcagtaccgctggtgctgtcgcccgtaacggtgcgaaacaacgccaatacctgtccgccgcctctccgatctttgcctgtcagagggcaaaattacagatcacgcatcctgcaaagcggcatagacagctacctcaatgcgcacgatcggccctatatccacctcgtggacggtggtgtctccgacaacctcggcgtacgtctgatgctagaccggctagtagcttcgggctcaatgagcgccaatttctcggaggtcaagcccggaagcttgcgccgactcgtgttggtgacggtgaactccgaacgaggactgagcgagagagtggacagtagcgaccgagttcccagcacgacgcaagtacttgagtcgctgatcttcggtgccggcgctcgcgagacccaggtgacgctggccatgcttaacgacgacctgcaacactggcgttccgagattgtccgcacccgtggccaagcggacagcccctttgcggccgacgcagaaatctacgtagtaagcgtaagtctgaacgacgtgccggacgacaagatccggcattcgctgctgcgcgtgcccacagccttcacgatcgaggctacggatgtcttggacctgcaaactgcgggaggcgaagcactgaggcaatccaaggagtttatggcattgattgaatctctaagaagaatcacagcagccaagcagactgcgcctggtactcagcttcccttgatatctaactga

SEQ ID NO: 507051 - DNA, 1983 bp, Stenotrophomonas maltophilia; identical to SEQ ID NO: 158961

SEQ ID NO: 507052 - DNA, 600 bp, Stenotrophomonas maltophilia
atgaccgccccgaccaccacacccaacgcgcccgacgtggcgccgcgtcctcgctcacgcctgcgcgctcgcatcgtgctggcgacactggccgccatcggcttcgctgcgctggcctgggcggctttcgtgtcgccgctgccgcgtctgacctacaacccgtccgacagcgtggcggtcggctggtatcgcattgacccgttcgacccgcgcaccgcctcgctgccacgtccgttgtccgtggacagcatcgtgctggtgccgcttccggccacggctgccgcgctcgctgcgcagcgcggctacctgccggcacacgttccgctgctcaaacgtgtgggcgcggtcgcgccgcaacacgtctgcatcgtcgccggtcaggtacgcatcgacggcgtgccttcggccgccgtactgcccgccgaccggctgggccgggcgctgccgtccttgcagctttgccgccgccttgaaccgggcgaactgctcctgttgagcgtgacgaatccagcatcgttcgacagccgctatttcggcccggtcagcgcatccgccgtgatcggcgttgcgcatccggtgtggccggagatacgcccatga

SEQ ID NO: 507053 - DNA, 639 bp, Stenotrophomonas maltophilia; identical to SEQ ID NO: 280985

SEQ ID NO: 507054 - DNA, 333 bp, Stenotrophomonas maltophilia; identical to SEQ ID NO: 199652

SEQ ID NO: 507055 - DNA, 315 bp, Stenotrophomonas maltophilia; identical to SEQ ID NO: 199651

SEQ ID NO: 507056 - DNA, 2067 bp, Stenotrophomonas maltophilia
atgaacgccattacccaaaccgaagcccgcgccctcaacaccgccgccgctatcccgctggaagccgccgacccgaccaagaacctgattttggttccgctgtcgcggctggtgtcgcgtcctgctggccgcaacgtgcgcaagaccccgcgcatgtccattcccgaactcgccgcgagcattcagcgtgtcggcctgctgcaaaacctcatcgtcattgccgccgccgatggcgagcattacgaagtcgtggccggtggccgcaggctggccgcgttgaagctgctggcgaagaagcgccgcatcagcaaggaatgggaagtgccttgcctgttggtggccgatggcaccgcccgcacggccagcctcaccgagaacgtgcagcgcgaagccatgcaccccgccgaccagttcgaggcattcgccgcgctggtggccgaaggccgacccatcgaggacatagccgccgatttcagcgtcacgccgctggtggtgcagcgccgcttgaagctggcgaacgtctcgccccggctgctggccgactaccgcgccgaagccgtgacgctcgatcagttgatggcccttgccatcaccgacgaccacgccgcgcaggaaaccgcgttctacgacgcgccgacgtggcagcgcaacccttcccaattgcgcgaccgcctcaccgagcgcgagattgacgcataccggcatccgctggtgcgtttcgtggggctggatacctacggagccgcaggcggtggtgtgcgccgtgacctgttcgcggaaggtgacgcgggcgtgtatctgaccgatgccgcgctgctggaacggctggcgcaagacaagctggcaggtatcgccgccgaggtgaaggacgaaggctgggcgtgggtggatgccacccccgccgtgacccatgccgacctgcacgccttccagcgtgcgccgagggagcgccgcgaaccgaacaagcgcgaagcgcagcgcatcgagaagctgcaaaccaagatgcacgaactggccgccgccgtggatgacgcgcttgataccgaagacgaggaaaaggccgatgccttgcaggaagaaggcgaagccgtgggcgagcagttgcaggcgctggaagatggcttgcaggactacggcacgaccgtgaaggccgcagccggtgccatcgtcaccatcgaccgcaacgggcaggcagtgattcatcgcgggttgatgcgcgaggccgaggccaaggcgctgcgcacactggaacgcctgcgccaaggtttcggcagcgaaagcgaagccgggaacgacgacgaaggcgaggacgacgagcagcccaagaccgccgccatgtccgacaagctggcgcagcggttgagcgcccaccgcaccgccgcgctgcaaatcgaagtcgcccggcatccgcaagtggcgctggccgcgctggtgcatggcatggtgcagaccgtcttgcagggcagccactacggccacgacttgccgctgggcgtgagcctgaaagcgcaagaccggctggaaggcatcgccccggatataccggattcgcccgccgccgtggcgctgcgcgagttgcagcaggtagcaggcgaaggcttgccggaggacagcgccgaactgttcgccgtgctgctagcgaagtcgcaagatgaactggtgcggctgctggcgatatccgtggccgtcacggtggacgtggtgacaccccgcgccacgccgcagcaaccgggcgcggaactggcgcaggctgtcggcttggacatggccgcatggtggaagcccaccaatgagggttatttccggcatgtgccgaaggccgcgattctggaagccgtggagcagtacgccccggcgcacgtcacccggctggcgaagttgaagaaggccgacattgccagcgaagccgagcggctggccgatggcaccggctggatgcctgccatcttcaaggccgaaggcaccgacgacaccacggcgcaggatgcgccgcaggcggtgacgaacgacgagccggaagccatcgacaacgacgacgagcagcaggcccacgcactcgccgcctga

SEQ ID NO: 507057 - DNA, 831 bp, Stenotrophomonas maltophilia; identical to SEQ ID NO: 199577

SEQ ID NO: 507058 - DNA, 1410 bp, Stenotrophomonas maltophilia; identical to SEQ ID NO: 199574

SEQ ID NO: 507059 - DNA, 2139 bp, Stenotrophomonas maltophilia; identical to SEQ ID NO: 159008

SEQ ID NO: 507060 - DNA, 1800 bp, Stenotrophomonas maltophilia; identical to SEQ ID NO: 159009

SEQ ID NO: 507061 - DNA, 1248 bp, Stenotrophomonas maltophilia; identical to SEQ ID NO: 199571

SEQ ID NO: 507062 - DNA, 1200 bp, Stenotrophomonas maltophilia; identical to SEQ ID NO: 199569

SEQ ID NO: 507063 - DNA, 756 bp, Stenotrophomonas maltophilia
atgcaaccgcgctttaccatcgccgtcgttctggcttgcctgacactggctgggtgttcgaccgttcaacccaaacccaagcccagcagcccctgggttttccaaaccccgaagccgcacggcgccatttaccgattcttccatccgaaaaacgaacggatgtggaagggggtttccccagcgctgcgggaaaaggtggaagccgtccaggcccagctggccgcggaagggtttgatgtgcggcccgtggaagggtatcgaagccccgagcgccaggcggccctgcttgcctccgggtctggcgtgaccagcgttggggcattctccagctgccacaacttcggactggccttggatgccgccgtgttcatcaatggggagcccagctggaacttggacgatgcccatgtgatggccggctatcaacgctttggggagctggcggagatcgtggggctgaactggggcggccgatggaccagcccgaaagactatccgcacgtcgagctgaaagccgagtgcggccaagccaagtgggcctaccggcaggggcgcaagccgggcgcgtttccttcggtgaccggggagccctcttcggaagtgctggcccgtgcgctggcaccggcttggtgccctgcggggatggaaacggcgtgcttggcctggggcaatgaaaaccggatggcctggaactggttcgcgccggcacgggtttgctttgcgacctttcctaacaccttgaaaaagatcggatga

SEQ ID NO: 507064 - DNA, 1284 bp, Stenotrophomonas maltophilia
atggtcaccgtttgcgggcgtcagcacgtcgatacgcaccccgcgcaacgcagccgtgctaagcgccgcgatcatcggctgatcggggacgaaataaggtgtccagatgcgcaccgaatgcttcgccgcgctcaaagcgcccatgaaggtccagcgcatcctgtccagggcctcgtcgggaccggcctcgatgccgcgcgcccaagaggtcccttgctcatcagccattgcgggcgattcgcgccagaaaccctcgccgagctgctcgcccgtggcatcgcaccaatcatcggtgaagcactgcatcagatgcgcaaccaccggcccgcgcagacgaaagtgcaaatcgtgacaggcctggcccggcgcatcgggccgccaatacgggctgcagatattcatgccaccggtgaaacctgcctcgccatcgatcaccagcagcttgcggtgattgcgcagatgcgcggcatgcaggcgcgcgggaatcaacgtcgggttgaacgtcgccgccggaacgccggcgcgttgcaaggcgcggtaggcgctgcggggcgtccagcgggcatacacgtcgtcgatcagcacccgcacttgcacgccgcgctcatgagcccggcgcagcgcatcgacgaactgcgccccgatgccttggctgtcgaagatgtacgaggccaaggcgacgctgtaccgcgccgattcgatggcggcgagcatggccgggtaggcccgctcgccatcgacaagcggctcgatgcggttgccgccggtcagcgactggccggtggcgcgtcctaccaggtgcgccaggccggcaagcggcggcgatacgggctcgggcaccgtgggcgagagatcctgtcgaacagcaagatccgtccccggaaacagccgccgtgcccgccgctggtaacggttgatgccgaacagcccatacagcagcgaaccgcccagcggcaacaaggcgatcagcagtatccacagcgtggccgatcgagggtcacgcttgtagatgaccgcgtgccccgccgtggggacagcgaccgccagcgacacgagggtggctgcccatgtcagcccgttggggtcggacacgatagcctcctcatgactcaagattcgccgcccgccggcttcttcttgcgcttaggcttgctctcgccgttcggcggtgcctcggccacgttcgcggcatcggacttatcaggctcggccggctgcgcgggtggctccttgcgctcgaagacgacgcgttcggccttgtcgtcccagcgggcgctggcgtga

SEQ ID NO: 507065 - DNA, 147 bp, Stenotrophomonas maltophilia
atgaccccgctccatttggcgtccgacaaaggcggcacggaaagctgcttgcggttgatcgccgagggcgtggacgtgacgctgagtgacttccaggggcgaagccccgtggcactggcccaggggaagccggggttgagccgttga

SEQ ID NO: 507066 - DNA, 696 bp, Stenotrophomonas maltophilia
atggacacgaaaaccacccccagcatcacggagcttctcgaaacctttgagcccgaggcgtgggcctcgcccccgacgtcgaccatcgccaaccacgttcaacgcacgttgggcgagggcgaccatcaccctgcgcaggttctccaggctgccgtggcgtttctccagcagccggtggaaggcgtggacgggtttggggacctgacctgggtcgcagggcctgccgagcaggggtggccctgggtgaggttggcgctggactacgacggcgagaaagcggagctggcgatgctggggcccatcaccccggagagcgtggatgccgcgcttcacgacgaaaacaacgaacgcatcagcgggatcgtgctggactacatcgatgagcagctcgatgaagaggaccgcgccgacactctggcagccatcgcgatggacggggtggcgtttcgcgagcgccagcaccacgctgagcacctccagcagacctgcggtcggcaagccttcctggacgaagccgtggagaaaggcgatttgaagctgctccaggcagcattgggcctgggggcggccgtcaatgcgccgcggatcggcggcaacaccgcgctgcacgaggcgatagagcgggggcacacgggcttggttgaccccctccttgaggctgggcgcgggtcaacgtcttcaaccatgccggcatga

SEQ ID NO: 507067 - DNA, 822 bp, Stenotrophomonas maltophilia
gtgctcctgtatgacctcatcaagctatacgaaccttcgtttgatccggctcgcaccaaggttcacttggcccgaaacaacaagatcgacgatccgatcgacgtctggctggacggccggtttgacgattggcaatgctggcagcggcagcgaaactttgaccgggacctggtcttgtccctcgtccagatcccccacacctaccgctggatgttcgccggcctcttccgatccgtgggaagcaggcccgatgtggatgccaacggaacgccccacgttgactacaccctggaacgcatcgacagcacactggcgttagaaggacgcctcttcgtgacggggaaatacgtcagccgcacttcctacctcagaggcgagaccctctcgggggacatggtggtgcacgaacttctggcagaaaagctgggagacggagagttccctgggttcggtcacgtggacatcgacaaaggcaccctggaccgcatcgttgccagcggcaacaactcttggcgtgcagctctttccagtgtcaaaggcatctaccttttaacggacagcaagaccggcctgctctacgtcggaaaagcggacggcgacgccggcatctggggtcgctggtgccagtattcgagcaccgggcacggctggaacaaggccttggtccaagagttcggcatcaaggccaccgagcgccagcgcgatctgcgcttctcgatcctcgaagtcatggaccggcggtcccaagagagccagatcgacaagagggagtcgcattggaagcgaatcttgatgtcccgcaacggctacaaccgcaactaa

SEQ ID NO: 507068 - DNA, 504 bp, Stenotrophomonas maltophilia
atggccttcaccacccttcagtcgatcaacgcggaaatcaaacaactcgaagcccaaaagcggttggtggagaaacgcgacggtgaagtgcccaaggccatcgcggtgcttcagaagtatgcgaaggttctcagtcccgcccagcgtcgtcaggttgccaagctcattggcgaggccatcgacgtcacgccggcgcgttccccgaaaccttctgctgggccgctgaagggtcgaaagctcggcaaagtcgctcccaagtatcgacttccgacgggagagacctgggcaggccgaggactggcacccaaggcgttcacggcatgggccaagtcggccgaaggcaaggcgtgggcgcaggcgaaccctggggccaagttcccgcccgccgctggcaaggtgaagaaggccgcggctaagggagctgcgaaggtgggcaaggtcgccaagaaggcaaagccgattcggaaacctgccaagaaggccaagccgaagccggctgcttaa

SEQ ID NO: 507069 - DNA, 921 bp, Stenotrophomonas maltophilia
atggcgattcgaacgtttgtgtttcttctcggtttcatcgtcctgccgttcaccgcgactggctctcagctgttcgccgtgactcccagtggcacacccgaggccgtgttctcaggcaaggcatcggtggcggtgtcccgcttgtccagcaaatgcatggatgtgcagtggacagtcgtgagcagcagcgatacagaactcgtttgcgagtcgccgttgagcacgggccagtccatcatgggtcagatgctactcgggaacagttactccacgccgcctcggcgcttcttccgcttcaacgtgagtgagctgtccggaatctcgcgtgtgcaggtgtcgggctggatggaaactcagatggccttcggccaaatgcagcgcgctcccttttcaggggcggacttccacaatagcatcatgaacttcctgatcagtgcgggaggtgcgttccccgcagggacgaccttccccaaccacgccgtgctcggagttctagggaaagtcgctccgcgcggcagagctgctgtctacgaggtggctgaggtgacgcctggtgcagctgctgaccgagcgggcctcaaggcgggagacgtcatcatctccgtggccggaaagaagttcaagacggatgttgagttcctagacggcttagcaaaggcagccaaggcaccgacctaccagctcgatgtcacgcgcaacgacgctgcaatgtcgctcaccgtcgaccgggaataccgacccacggccacgcaggccgctagcgtcgccgaggagcccgcggcggtgcccactcccgtggcaccagccctttcggttgccgatgagttggccaagcttctgaagctcaaggagcagggcatcctgacgcaggccgagttcgactcgcaaaagagcaagctgttgggtcaaccgtccccatag

SEQ ID NO: 507070 - DNA, 1086 bp, Stenotrophomonas maltophilia
atggacggaaactttgcttcaacaatcgcagacgcggtcgcagacgcggccaagcagatggggcatgtcaacatcctgatcgccggtcggtctggagtcgggaagagcacgctggtcaacgccatcttccatgaagatttggctgaaaccgggcagggacggcctgttacaaaggagaccaaggagatcaccaaggaagggatgccggtatcgatcttcgatacccgtggcttggagatggctgactataagagcaccattggtgcgctcacggatttcatccaagctcgtaaaaacgaggttgaccccacgaagcacatccatgttgcttggatttgtgtgatggaggacggccgccgcgtggaacccgcggaagtggaactgcatgctgctctttccaaagttgttcctgtcatcggcgtgatcacgaagcatcgctccgaccaaggcttcaagaaggaagtggagggccttctgccagagtgcaggaatgtggtccaggtgcgcgcaatcaaagaagagcttgatgacgacgttgtattgcagcccaagggcctttcgaccctggttgaggtcaccattggtgcgattcccgaaggtgcaaagcgcgctttcgcgtctgctcaaaaggcggatctgaacacaaaaaagtctgaggctcggaagattattatggccgcagccacggcgtctggcgccgcgggggtgagcccgattcctttctcggacgcgatgatcattgcccccgtgcaaatcggcatgatcgccaagatcacatcgatcttcggcgtcaatctcactaactcgatgctcacatcgcttgtcagctctgcggtgggcgtggccggtgctagctttctcggccgcaccttggtgagcaacctgcttaagttcgctccgggcatagggaccgccgcgggagcggccatctctggaaccacggccgtcgcgctgacgtcggcgctgggcgaagcttaccttgccgctatggtcgctatctttacggacgacccggatgcgtcaccaactggcgaagagataggtgcccgctttaagagcgcgatgagagacatgcttaagaagtga

SEQ ID NO: 507071 - DNA, 942 bp, Stenotrophomonas maltophilia
atgacgcagaaaaggattgatgccgccgaggcaatcttggccgcagtggggatgccccgtgcgcagttgaacgagcgctcggcgctctcgctgctggcgcttgccgatctgacgccggataagaaatgggcgagagcttccgcgccgttgattggcatcacgccgatcatggattgggtgcgcgagcagtatggcaagttgtatgcgcccaacacccgggaaacgttccggcggcagacgatgcaccagttcgtggatggcggcatcgcgctttacaacccggacaatccggaacgaccggtcaacagccccaaggcggtctatcagctcacccccgagatgctggcgctcatcaaaacctacaacacggcggagtgggaagcgtctcttgctgtgttccgggagagcaggcagtcacttgctgatcaatacgcgcgagccagagagttgaagcaggtgccagtcgtgatcccgggcggcggtgaagtgatcttgagcccaggtgagcatagccagctcatcaagcagatcatcgaggtgttcgccccgcatttcgccccaggctctgaactcatctacgctggcgacaccgggcagaaggttggtgtcttcgataaaaaggcactctcgcagctgggtgtgacggtggacagtcacgggaagatgcctgacgtggtgttgtatgaccgcaagcgggaatggctgctgctctgcgaagcggtcacctcacatggaccggtagatggaaagcggcaccaagagcttgagaaactcttcaaggacagcaaagctggcctggtctatgtgtcggcgttccctgaccgcgccacgatgcgcaagtatctggccgatattgcttgggaaaccgaggcttgggccgctgatgcccccacgcacctgatgcacttcaacggtgagcggttcctcgggccttacaaatag

SEQ ID NO: 507072 - DNA, 1395 bp, Stenotrophomonas maltophilia
atggggcagttcatgaccaacgccgacgtggccgctttcatggctggtctgctggagcccaaagcggggccgcacgtgctgctggatcctggagcgggtttgggggccctcagctgtgcggtgctggattcttggaagagcgggaagctcggcagcggctcgatgtcggttgaggcccacgagctggatggccggctgcgggaacacctcgaagcgacgctggtggggtatgaatcagacggggtgagggtgacggtccgagagggcgattacttggccgccgcagccgatgacttggagaatagcagggcacctttcacgctttgcgtgatgaaccctccctacaaaaagattgccgccagctcgaatgcgcgcgtccaagcgaggcgcatcggactggagaccgtgaacctctactcggcgtttgttggggctgcgctggcgcagatggccaatggcgggcagctggtcgcgattatcccccgcagcttcgccaacgggccctattacaagcccttccggcgcttcatcctggatcgagcctctctcaagcacattcacctgttcgacagccgaacgaaggcatttcgcgacgacgaagtattgcaagagaacgtcattcttttgctggagcgcgggggggaacaggggaacgtgaccatcacatcgtcaaccgacgattcgttctctgatctgcgcacacaagagtttccgttttcggccatcgtgaagcctcaagacaaggaaagctttatccacgtcccgacagacgaggctgatctcattgaagcctcccctctcgtgggcgcatcgcttgcagacgtgggggtatcggtctcgaccggccccatcgtggacttccggacgcgcgagcatctgcgtgcaatgccggaagagggcacggtgccgttgatttacgccttccacatcgatgggaccaagacgacctggcccattgagggggccaaaaaagcgaacgcactggttcgagacgcgcgcaccgaacgctcgatatggccgaccggctactacgttgtcgtgcggcggttctcgtcaaaggaagaaaagcgccgcgtggtcgcctacctcgtgcagccgcaggacctcaaggggcaggagcgtctagcattcgaaaaccactcgaatgttttccacttcaacaaacagggtcttgaagaagatgtggcttggggcctatttgtttacctcaatagcaccgccttggatgaccacctgcggcggttctctgggcacacgcaggtcaatgcaactgacctgcggaacatgccttaccccacgcgtgaaaccctggaaaagatggggcgttgggccaagaaggccgccgacctcggtcagaaatctatcgacaaggaaatggagcaagtgctggcatga

SEQ ID NO: 507073 - DNA, 966 bp, Stenotrophomonas maltophilia
atgacccgtcatcatcccagtgatccgcgcacggcgctgttgcaacaccgctggctcaaccgcctgcagaccgggctgttggtcctgaccctggtcgggatcgcagccgcagcagggagactgccgtttggggaaggcggcctgtggctcgcgctgtttgccgttgcaggtgcgttgctgctggaaccggtagccgcgtcggcgctgagcttgcgcctgtaccgcgtacgggccttgcacccgcaagaagcccacgagatgtgggccctgttgcgcgagctgcccgcccgtgccggtttgcccgccacgccggtgccgcactatgtgcccagtgccgtcgtcaacgccttcgccaccggatcgaagcaggaggcatcgatcgccctcaccgatggcctgctgcgcagcctgagcccacgcgagctggcgggtgtgctcgcgcacgagatcgcgcacatcaccaatgaggatctgcgcgtcatgaggctggcggattccgtcagtcgcctcacgagcctgctggccctcatgggacaaatcgcgatcctgctcaacctgcccgcgctgctggttggcgcggcggaggtctattggcctggtctattgttattggccgcatcgccccagctggccctgctcgcacagctcggcttgtctcgcgtgcgtgagttcgacgctgaccgcctcgcggcggaactgacgggcgacccgcaggggctggcgtccgcgctggcgaaaatcgagcgggtcagccgctcctggcgtgcctggctgtggccgggatggggcaatcccgagccctcctgcttgcgcacgcatccggcaacgcaagagcgtatcgcacgcctgctgacgttggcgcctgggccagcatcagcgttgccattccacgcgccccatttcttgccggaatccgctgtgacgccgcgcccgccgcgctggcacccgagcgggctgtggcgctga

SEQ ID NO: 507074 - DNA, 2178 bp, Stenotrophomonas maltophilia; identical to SEQ ID NO: 496612

SEQ ID NO: 507075 - DNA, 921 bp, Stenotrophomonas maltophilia
atgggcatagccaatacaagcatcgaccagttcacccccgctgaaatcgaggccaacttcagatcctttattgccgaaggcggtgatccagcatcgcgagataatcaacaaaggaactttttgcagcagatgttttcccacgattacattgactccattccccctgaagccgcattggcggcttgcaaggtcctgatggagcacgggcttcatccagatgattgcgaacgtaagatggctaggggctggtcgagcccgctcacgatggctataggggaagggaacctgtctgttgtccggcttttccttgagcatggcgccgatcccaacctgacggattttgaccaaggggcatgctctacccccttggctttggctgcgaagcgaggtcaacaagacatctgcgcagtattgttggagtatggggcagatccaaacgagagcactcagcagaagtttgaggggccgatccccagcgtggaccgtcgcgaagaagtgggttacatcggcgcgccagatcactttgcgattggacctctcgggagtccagaggcaacgccgttgctgctggccgctgccggaggccattctgctgtttgccaagtgctgttggaacatggggcggatcccgctatggcatgcagggtttggagctacgctggcgaagatgtaagtgaggcatgttggaaggaaactcctgagcaagccgcagataggtctgggcacacagcaaccgctgggctcatccgttctcacattcgcaagacactcctggaatccctgcttccgcgtgccgacgcttggaaaccaccagctggaggctttgccgctgacgctcagcgtgaagtagccgcggccatgaaagcccgtgggcaggtggagcaaactcacgccaaccagcggctacgggcgcggttttaa

SEQ ID NO: 507076 - DNA, 342 bp, Stenotrophomonas maltophilia
atggacttcttgccatcgcagagcgttgtgaacgacgttgcccggtgctcggccgcagcaagctacgtcatggcggcggcagccgttttgcccaatgactcttcccgttggatggcgttcgcgactgacatcagcaggacgatggccgaagaccagagccgttcgccggagcaccgagcgcagctcacccccacgactgccgagatttttgtggctgctgcgcatgtccgggggctggttgaagaaggctgggatctcaaaaagccgtcgggcagggactacgtcgttgccaacgctgccgcctattgcactgcctcgctcttgggtcccaaggggaagtag

SEQ ID NO: 507077 - DNA, 459 bp, Stenotrophomonas maltophilia
atgacctcggaggcactaaaaagccgtccgaaggactggatgggagggcaggctattgaggtgatggttcatcatcccagccaagagccctacttcatctattacgagaacgagcaatactacttcagcatggcgagtgctgggggcaggcagtccctttccgatgctcagagctttgagggctaccgaagcagcgtttcgcaggttctgtgcatgttccttgtccttcatctcatcagggaggaagggaaggacattcggcatcctgaaatgtccttcactcataaccgcatacacaccaacgttgtcgcttacgttgagcgcctgaacaactggtatccaatccagcacggctccgaagagcctgactcggcaaccgacaggaagctggtgttggtcaatcgaggctccgtcgacatctctgaagtgatcgccatcaacgcgccatcgcccgcgtag

SEQ ID NO: 507078 - DNA, 543 bp, Stenotrophomonas maltophilia
atggaagatatcgtctcggatcagaaccaccccaaccagtggtttgcaagagcagcaggcctgagagccggtgccgcctgcatttggctgtccatcaggggaagcgcagaagagacaagagagctgctgggagagcccgtcggattctctatggctctggcggctcgcccctcctaccacttgctctgcggcttggcgatagaagtcctcttgaaggccattctggtcagccgcggcaagaagcccgctaacacgcacgacagcgtgctccttgccaacgaggcgggcctagccacctcccaaaccgacgttgagcttctgaagttctacgcctctacggttgtttgggcggccaagtatccgacgagtcggaagggcgagactgagatgatctcctattgggagaacgcgggtgatgtcctcacaaccagcgagcccgtgccctccagtcattggataagaaagatcgggtccagtggaagaacggattggccttcttttgccgcgatgtattcacggatcgcggccttgcgacaggcatga

SEQ ID NO: 507079 - DNA, 555 bp, Stenotrophomonas maltophilia
atgctgcccctgccggacctcatggctgccaagaagacccccgccaagaacgccgttgccaaagcccgcaaagacctgtccaaagccgcgaaagtggtccacgccaagccgcaacgcacgtatgcgccgctcattgatctggaccagttttccgaggagcagctggcagagctgatggtggctgcaggggacgcgcctgggcgcaagacctatttcgactacagcgaagagcagccctttatccggtcggggaagaaggtgtatctcgaagtggggcgtggtagccagatgtttgactatcgagacgcccagggcgtcaggaccgagagaacgatggtgaccgtgccgcccaagctccgcgatcagctccaggatttgacgggagaagagagcccggtgatcaccactgcgatcatcgccttggcgtcctgggcctgccaggaactaaaaaggagcaagcggcgcttggtggtggcgacggcgaccgacgacctggatccggtgcggaaacaggtccggaaggcgattgtggggcgggcgaggaaacaacggtag

SEQ ID NO: 507080 - DNA, 1554 bp, Stenotrophomonas maltophilia
atggcaatcagtcagcaagtgattcatggcttgaacatcacgaagctcaagggaatcttggctttggatgagattcgattcgacgagaaaccgctcactgcaatcctcgggccgaatggttgcggcaagtcaacggtattgcacgcgctcgcttgctgttataggccacccgaaggatcggacggcaagagctggcagtttcgggagttcttcactcccacatccgattcaacgtgggcaggcagctcgctgatcatgcatcattcatttagagacggcttgactgagcataaagacatcagcaccgaatacagaaagaaggcggacaggtggtcccctcgctattcgaggcgcccggagcgcgacgtttacttcatcggaataaagtcctgcgttcctcgcattgaggaagagacctataactcagccatcaactatcaaacagaggtgcacgctgacgccacgctcataaaagcaaaaatgggtgtagtgttcaaccgtgcctataccgagctcaatgttcacaaggcgcatgccggacgaaaatacaatggccttgcactcgatggcaacaggtattctgcgcttgccatgggagcgggcgagcagagagttctggaaatcctatccgtcgtcttcaaagcgccgaagtattcactcatcctgattgatgaggttgacctcctactacacaccgccgcgttgactcgcttgatgcagctcctacatgatcgagctaaagaaaaatcgctccagataatcttcacaacccacagagaggcgattcttgacctcacgaagattgccagcatcaaacacctacacacggtcaaaaatcagaacaagacgtattgcttctcaaatacgaagcctgaggcactccaccgactgaccggggaacgggatcggccgcttgaggtttttgtcgaagacgaaatgaccttgacaatcgtggaacacgagcttttttcgctgggaatgaagcgctatgcaaacataacatcctatggcgcggcgacaaactgcttcaccctcgctgctggattgatgctgtccggagcacacagcgtcgaatctcagctgttcttgctggacggtgatgtttatgcaagcgaacaccagcgacgggaacgtgtcaacgcggttctaactggaaccgaaaccagcgcgtcggagcgccgtgagcgttgcctcgaaggcatcagaaaacttatcccggcgaatgatgcagctgcggcgccggagacgcagctgcattggatgatccgtagtctgccaccacaagatgacattgaaggaactgagatcattgaactcgcacaaggtatagaagcagtcgatgatacgcactccttcatcgagctgattattagcacacttaacatcaacagggctgccggcctatcgcgcatagttgatgtcgcttcaaggtcgccgcattggcaactctatgtgtcggaactacgggaatggctggagcttaggcaagccagtgttatcgaatcagataccaagcccttgccagcagtaataccctccccctctgcggagtaa

SEQ ID NO: 507081 - DNA, 1038 bp, Stenotrophomonas maltophilia
gtgtttgagctgacccccttcttggatgccattgctcaagccgatgccccgctggaaggcaaggccaacgggtggcaacgcaaggctgttttggccgagttcggcaacgcctgcgccttctgctccgctccgctcgacctggcctctcccaagtcttggacggctacgccactggtgcccgcgcaactgggcggccccgtcagtgtcgtggagaactgggtgcctgcctgccgtccctgcgttgctgccaagggcctgcgagatatcgtgtgctggaaagagtggcaagcgtcggcgacccctgaccgcgtggcgctgctgctggaacgtcggcgctctgcgttgctgtatgcagagaaccacttcaccccgttgagccgccactcgaagcgtgagcggctgctggcaaacctgtccgcccgtttcgacaagccccgcttccgcgtctacgcctggtcgggtgaggtggatggggagcgcgttggcctggtgggctggagcacgcggtcaggcgatgccttggcactgagcgaggccctgctggcgttacgaatgagggacgggggcgaggtggtggcagagggccaggtgacccttctacggcttccggtggacgcgttcctgcgggccgtgtgggcgctcatcgaggcccatgggatcgtcgtgccgttggatgtgccaagcgatgggccgctcaatgcagatgactggcgggaatgctggcgacaccgagtcatggacccggtcagcaaccacaagcgggttccgatgaccagcagccaggcgctgcctcatgctccccgcgtgctgtccaccaacccggattccgttcgccggctggcccagctgcgggccgcccgccgtgctgaccgggtggaggaggcggagctgctgtatcgcgaggcgatggcccgaaagagcaaatacctggagcgtgtcagacgcggcttggaggccccgatgccgctggacgaataccgggcgtggagcgatgaggtgaggcagctgggcgtggactgggtgaagctaaagaactaa

SEQ ID NO: 507082 - DNA, 357 bp, Stenotrophomonas maltophilia
atgctcgacaacgatggccgtcgccgcttcctgctgtcgctggaccgcccggccgatgtgcgcctggatgcgatttccagccaggttgataccgtgctgcgcgtggtcggtggcgacgtcgagctgaccgacgacgatggtggcaacggcaccaattcgcgcctggaagagaccctgccggccggtcattacacggtcgacgtgtccagcctgaacaatggcgcgggcatggtggaagtgcgcgtgcaggtggatggcgccagcgccgacggggctgcggcctcggcggcacgcgccgcagccgacgcagccgccgtggccgatgacgccgccgcggtggaagctgccagccgttga

SEQ ID NO: 507083 - DNA, 303 bp, Stenotrophomonas maltophilia
atgctgactgccagcgaagatatcggccagcttgagtgtgtcatcgggctgataaaattcgaagatttcctcttccaccatggcctcggcgacgtcctgggcatccggttcgaccggcgcgtccagagaaacgaattcgccaaattgccggctgcttgccacttcgttatccaggacggcgaacagatgcttcaaaagaccggtgtaagcctctttttcccccggcacggattgccattccacctcagctcggacaatcgcttcatccaccacgtcgcgcagcgtcggataatcgcgcggtaa

SEQ ID NO: 507084 - DNA, 858 bp, Stenotrophomonas maltophilia
gtggaccggcccgacaagaagggacggctggacatcctgaaggttcatgtcaagaaggtgacgctggcccaggatatcgatctcgaacaggtggctgcgctgaccacgggcttttcgggtgcagacctcgcgaacctggtcaacgaggccgcgctggccgcgacccggcgcaaagcgtccgccgtggagttgcaggacttcaccgccgccatcgagcgcatcgtggcgggcctggagaagaagaaccgagtactcaatcccaaggagcgggaaaccgtggcctatcacgagatgggccatgcgctggtggcgctggcgctgcccggcaccgaccccgtgcacaagatctcaatcatcccgcgcggcatcggcgcgctgggctacacgctgcaacgccccaccgaagaccgcttcctgatgacgcgcgccgatctggaacacaagatcgccgtgctgctgggcggtcgtgcggccgagaagctcgtgttcggcgagctgtccaccggggctgccgatgacctcgcacgggccaccgacattgcccgcgacatgatcacccgctttggcatggacgaaggactgggctacatcgccttcgaggcgcagcggccacgctttctcgatacaccggaactggcccacggcggctgccgggtggccgaatcgacccaggcgcgcatcgatcaggccatccgcgacatcgtgatgggcgtgttcgagcgcgcctacgggatcctcgacaccaaccgcgcggtgctggagcgttgtgcgcgcgaactgctggcgcgggaaacgctcgacgagaacgacatccttcaattgacccaaggacttgttcttgatggaaacgaaaagtag

SEQ ID NO: 507085 - DNA, 441 bp, Stenotrophomonas maltophilia
atgtctgcattgactccgtgggaccccttccgggaactggatgaattgcaaaacggcctggcgacgatgttcggacgaataccccagcgacagggcgcccgtaccggcaacgaagccatgaccacggcggactgggcaccaatggtggacatcagcgaggatgagaacgcattcctcctcaagctggatctgccggaggtccccaaggatgccgcgcgcgtcagcgcggaaaacggcgtgctcaccatcagcggcgagcgcaaactggaaaaagagaagcagtgcaagaagttccaccgcatcgaacgtgcgtatggccgctttgtgcgcagctctgtcttgcctgacaacgttgatccgaccaaggtgacggctgatgaaagacggcgcgctgggagtgcggcttgtcaaggccgagcaagccaaaccgaaacagattga

SEQ ID NO: 507086 - DNA, 480 bp, Stenotrophomonas maltophilia
atgccacaatcggctctgttggccacgaccttagtgttcggcgcattctccttggtcaatggcgctttcaacttggttgcagcggtgcgccatatccagaaaaaagagcgctggggctggctgctgttcagcggcattgtcggcatgcttaccggcgttgtcgtcctggttgctcctttggtcgccacgatggtcatggcttcttttttatgggctagcgtgggggtctgggcgattttcaccggtgtgctggagatatccgccgcggttcggctgcgtcaagaaatcaagggtgaaatctggcttgccttcagtggactgctctcgatagtccttggcgctatcgtcttgtggatattcttctcccgtccggccgagtcattcctggccgcaggctggctgctgggcttctatgcggcagtctatggtgtcacgcttttgttcttgagttggcgtcttcgcagaacgcgccagggataa

SEQ ID NO: 507087 - DNA, 138 bp, Stenotrophomonas maltophilia
gtgatccaggggattgaaggcatcgaggaccagcagcgtgaagacgatggcgatgagctggaacagcgacaccacgatgatgacggcaattaccgccgacagaacgagggcgacgacctgctcgaagcgatcgtataa

SEQ ID NO: 507088 - DNA, 246 bp, Stenotrophomonas maltophilia
atggcaaaagctgaaaagctggccgagaccgacaagcgcgatgccaagcagaacgaggagctcagcaccttgctgtcgtccgtgcgcacggagatcgagatggcgcagatcctgggttatggcaagaaggcggatttcaaacccatcttcgatcatgtgaagtccattgagcaaaagtcggctggtggcaaaagcggcaagggatggttcgacgagttgaagacgcgcctccaaaagctgttttga

SEQ ID NO: 507089 - DNA, 282 bp, Stenotrophomonas maltophilia
gtgcatccgctgcccgccctgcgcgccaggctgctcctgaagcgcgccgagcccctggtagaagatggtcagcgcagcgaagcatccaatgagcgcctggagacattgttgaacgaagcccggcagcagttggaaatggcagaactgctgggctatggaaaaaggaaggactttgagtccatgtacgatgaactcaagaaaatcaagcagaagacgggagggggaggcggcggaaaaggctggctcgatgaagtcaaggcaaaactgtccaggttgttctga

SEQ ID NO: 507090 - DNA, 303 bp, Stenotrophomonas maltophilia
atgctgactgtcagcgatgatatcggccagcctgagtgtgtcatcgggctgataaaattcgaagacttcctcttccaccatggcctcggcgacgtcctgggcatccgcttcgaccggcgcgtccagagaaacgaattcgccaaattgccggctgtttgccacttcgtgatccagcacggcgaacagatgcttcagaagaccgaagtaagccgctttttcttccggcacggattgccattccacctcagcttggacaatcgcttcatccaccacgtcgcgcagcgtcggataatcgcgcggtaa

SEQ ID NO: 507091 - DNA, 204 bp, Stenotrophomonas maltophilia
atgctgggtggcggtatcggcaaggccgatcacgccagcgcccgctgggacgacaaggccgaacgggtggtcttcgagcgccaggagccacccgcgaagccggccgagcctgagaagcccgatgccgcgaacgcggccgagacgccgccgagcgacgcgagcaagcctgcgcgcaagaagaagtcagcgggcggcgaatcttga

SEQ ID NO: 507092 - DNA, 1218 bp, Stenotrophomonas maltophilia
atggcaccagcaggcagaaaacgaaagctggatccgacgatcccgcgccatatcgaccagacgaagatcccgaccgggctctactgggacggtcgcaagggcggctgctggtacgtattcgaccgcaagccgggcgaacgtccgaagcgcaagaacgtggccaccaagacggcgacgcttgccgacctccacctcatcgcggaggcccgcgcaggcaaggccagcagcaaggtgatgcgcggcctggccgaggccttcgagaacagtgaccagttcaagaagctcagccagagctcacgcgacgactactcctattgcaaggccgtcgttctcgacttcaagttccccaacggcggccgcttcggcgacctggtcacgaagcgcatcacgcggccggtggtgcagggcctgatcgacagcctcgccgtcggtaccgaacgggacagcgccggggcattgatcccgacaccgagcaaggcggcccatgtccagcgttacctgcgcaggctcttccggtggggcgagaaccgcggctacaacgacgcgaatcccgcggacggcgtcgagctcccgaccgagcgcaagcgccggcggctgcccgacaaagacgtgctgcaggacctgatcaagttcgcccgtgccaacgccggcggccgcggccaggaaggcagcgtagcgccgtacctgtgggcgatgatcgtgatcggttaccgctgccgcctgcggccgatcgaggtccgcacgctcaccgatgccaacgccttgaaggaaggcatccagaccaaccggcgcaagggcagccgcgacaacatcaccgaatggtcgcccgaactccgcgaggcctgggactacctggtcgcacggcgcaaggccatatgggaggacgagaagagcgccaagaaggggcgccctgcgaacaggcgacccgttccattccgagcggaggaccgccatctggtcgtcaaccacgtcggcgagccgctgctgaagagcacattcaattccgcctggcggcgcctgctcgacagtgcggtcaaggccgaagtcatgagcgacgatcaccgcttcggtgcccacgacctgaagcgccgcggcatcacagacacgcctggcacccgcggcgagaagcagcaggccagcgggcacaagaacgaggcgatgctggacgtctatgactacagtgtcccgctggtcaaaccggccggagacggtacgtaa

SEQ ID NO: 507093 - DNA, 240 bp, Stenotrophomonas maltophilia
gtgatcggagagatcctccagttcgaggacctgcagcggatgtgccggccgaacccggaaggcccgctgccgcgcctggccacggtggtgcgctgggcggaggaccagggaatccggtacaaatacgacggccaaggtgggatctggaccactctggatgcggttaacgccgctcttggcgtggccgcggcgaacgattccgccccgtacgaccccaccgatttgttcggcaggaagtga

SEQ ID NO: 507094 - DNA, 201 bp, Stenotrophomonas maltophilia
atgaagatcgcaggcgtcccggccaagaagccggatctcattcgcgcggcgatccgcgccctcgacgatgcaaagctgggccagctggtcgccgagctggcgttcagcaccaggctcgagcaatcggcgctgcacttcgctcgaggcgagcagcgccggcggaagcgccaggccacgaagggggagaaggcagccccgtga

SEQ ID NO: 507095 - DNA, 579 bp, Stenotrophomonas maltophilia
atgtccatcatttccgagaatgccgagcgcgtcctggaactgatcacgagcaacggcggcgtgatgaccggcgagcagttgcgcaacgagctcgacgatctcagcgccgccgatcgccgcaacgcggttgcgcggcttcgctctgaaggccggcttacgtcgaccggatcgacgaccctgatccagtatcacctgccaggcaaaaggccgagcaaggttgcggccgcaaaaccctcggcgctggcgaccgccactctcgcccgcgctacgcatcaggcaggtcagcccgaccagtttgagatagccgaacggatggcagaagagcgtatcgcgacacgaagcggcaatggcgcgatcgctaccgctgcactcgatgcgcaggtcggcgagatgtcgtcgcaattctgcctctcggtgccgctgcttaacggtgtgtcggctgaacttcaactcatggcggcgctggaccacgtcacggagcagctggcgcgccaggaagtcccgcgcggtcttcaggcgtgcgagctcgcgcgggcgactgcctggctggccagcaagcaccaggtgctgcccgcatga

SEQ ID NO: 507096 - DNA, 339 bp, Stenotrophomonas maltophilia
atgaatgatatcaaagccctggccgctctgaccgcgttgaacgagatgttcgcgggcagccacttcagcatctgcacgatcgacaaggtcgccacgctgctcggtgtgcatccacagcgcgacgcctacgagacgctgcacgcgttgcactgcgtccactggagcaagatgccgcgcgagttgcgcgaccagatgccggagctcatccagcaggcgctcgccaatggcacggcgccgtttcagttcgagcttaaacagccgtgcaacaacgcactgcaggtcctcgatcagagcaagcacacgaggcggccgctgctacagcgtctgatcaaccgatga

SEQ ID NO: 507097 - DNA, 522 bp, Stenotrophomonas maltophilia
atgggactcgacatcacgtggcaccgctgcctgtcgaaggccagcgggaacgagggcttcgacgagcacggcgagatccgctggggtgacggctggaatcagttctacgtgaacccggacttccccggccgtgcggatgagatcgtgaatcgtgccgcatatcgatctgaagagagcgatggtttcagggctggcagctacggcggttacaaccaatggcgtgagcagcttgccattctcgcaggctatccggccgcgcagtacgagaagtggggccgaagctgggacagtcactgtgtcgcgtgctggaacggcgcgactggccctttctctgaactgatcaacttcagcgactgcgaaggcgtcatcggaacttcggtatcgagcaagctcgcgcgcgacttcgcagagcatcagtcaaaggcagacgcgcacccggacgaacgtttccgggagcgctacgcgttgtggcgcctggcgtttgagaaggcgtccgatcgcggctgcgtgcatttccactga

SEQ ID NO: 507098 - DNA, 2019 bp, Stenotrophomonas maltophilia
atgaacgcacagcccgccatcatccatgtgccgctttcgcagctgcgtctgtcaccccgaaacgcccgcaagaccggaggccaggacatcgaaggcctggcggcctcgatcgccgcgcacaacctcctgcagaacctgaccgtcacgcctggcgcgaacgacaacgaataccaagtcgtcgccggcggccgccgcctcgccgcgatgcagctgctgcgcgaccgtggccagctggacgcggagttcagcgttccgtgcaagctgatcaccgacgacggcgtcgctctcgaggccagcacggccgagaacacgctgcgcgaggcaatgcatcctgccgaccagttcgacgccttcaaggatatggtcgaggcgaagaagtcaatccccgacatcgccgcccacttcggcgttacggaactcgtggtcaaacagcggctgaagctggcgaacgtcgcgcccaagctggtgcaggtgtaccgcgacggcggcatggacctcgagcagctgcaggcgctggcgctgaccgacgacaagaagctacaggagaaggtctggttcggcgccaagaacgattggaaccgcagcgctcgcgacatccgtcacgcgatcactaccagcgaggtccgcggcgattcgacgatcgcgcgcttcgttggcctggacgcatacgaggccgcgggcgggccggttcgccgcgatctcttctccagccgcggcgaggtgttcctcggcgacaaggcgctgctggacaagctcgccctggacaagctggaggcgatcgcgaagtccgagcgcgacgccggatggtcctgggcggaagcgcatctcggcctcgactacgacaagctcgcggcgttccctcatttcggcgtcggtccgaagcgggagaagccgaccgcgcaggacaaggaacgcatcgccgagctcgatgcgcgcttggccgagatcaccaagctgatcgacgaggacgacgagaacgagacgctcgacgccgacggtcgggaggcgctcgaggacgaggccaacgacatcaacacggagcgccatgcgctttccgagggccgcgaggtatggccgaccgatgtgatggcgaaggccggcgtggtggtctgcatcggatacaacggcctacaggtcgagcgcggtcgcctgcgccccggccagaaggcgacggcctccggtgcggtgacgggttccgggaaggatgggaagaaggagccgcccaagaaggcgacgctgagccaggacatggtcacccgactggagatgcaccgcgctgctgcgatccgggagcacgtcgcagccaggccggcgatggccttgcaactgctgctggcgcacctgctcaccaagctcttcaccgatagctacgccgagtccgtgctgggcctggcgcccaccaaccagcacaaggaagcccgtggccagatcgagtcgaagttccaggatctcggcaaggccgctgcgcgaaaggcgatcgacgagcgcatcaccacctggaagaaggcagggctcccagggaaggcatcggagatcttcggctgggtcggcaagctcgaccaggcgaagcagctggaactgctggcgctggccaccgcgctcaccgtcagcaccaacggcggccaccgcggccaggcgctggccgagcagttcgaggtagatatgaccgcctggtggacgccgagcgcggattcgttcgtttcactggtgccgaagagcctgctggcagaagcggtgacagacgtggacggtaaggccgctggcgaggccgtcctggccatgaagaaggacgccgcgatggcagacgccgccaagcgcctgcagggcaagggatggctgccgaaaccgctgcgcggcggcggctacaagccgggcaagcccgcaacagcgaagaccgtagcgtcggcgagtgcgcccgcgaagaaggcaccggcggtcgcgaagaaaccggcgaagaaggcggtcaagaagcccgccaagaaggctgcgaaagcagcgccaaagaagggggccaagtga

SEQ ID NO: 507099 - DNA, 318 bp, Stenotrophomonas maltophilia
atgagcgtgcgtgcaatcgccggccgcgcgctcttcagcgaccgcatcgagatccaattccgccagcgcacagacaccggcctgtacgcgggacgcctgacctggcagcacgtcgtcgacggcagcgaagcggccagcacgcagtccttggatctcgctggggcgcaggagctcatggattcgctgtggcagtgcgggctgcggccgagcgaaggctcgggctccgcgggcgcgctcgccgcgaccgagcgccatctcgccgacctccgacagatcgccttccacttcatggagcagcccgaccagggccggtcctga

SEQ ID NO: 507100 - DNA, 612 bp, Stenotrophomonas maltophilia
atgtccgattatcagcaactcagcggcccggatttcttggacgctgtcgcccaggccgaggccgccaacggccttaccgtgaacgcggccgagtacagccgtcgcgccgaccagtggaaggacgatctcaaggcgctggagctcgcgcagtccctggtggacacgcaccagcgcgctatcgccaacatccgccgcaatgctgcccacgcttacgacctgatctctcgcgtgcgtccggactccgagcacctggacctgtacgaacaggtccgcgtgacgctttccgcgattggtgacgttcgcttcggccccactgcatggggcgaccacaccgatccgttcggtcgcaatccgcgcctgatgcccatgcccggtgaccgctactacctgccggtggaagtcgctgccgcggcatacaaggacaacgggttgtcgatcacctaccggccgatgctgcgtaacgcggcggggatgctcgagccgaagaaggagcaccacttcgtcgtactcggctgtccgacctggtcgcacgatgcgatcggcgtcgtggcctccccgcggttggcgttcgaatcctgcccgttgtccgaaacgctcgccgaggcggcctga

SEQ ID NO: 507101 - DNA, 624 bp, Stenotrophomonas maltophilia
atgagcgccgccaaacagaacggcgccaaacgcaccggccgcgccgcactcgtgcgcgagttcctcggtcgccagcgcacggccaaatccgcccgcgaaatcctcgacgccgtggagcctggcgggaacatcaacttgatgaccgccacgctcggtacgttgttgcgcggcggagcggtggagaagcatggcgcaggcttgggccaagtgcgttggctgcttgcgcgtcatccccagcgggcgccgacggaaactgcacgcccagcgaaaagaatctcggccgatgcgcgcacggcgccgatgccgcggccggtgcccaaaaaggcagcgccgacgtcgcagccgaatgcctcgaaaacgatcgtccagcccacgcgcgcaccgaaccgtgagcagaagacgaacttcaccgcccccttgagcaccgtggcggcgccggccaaggccagcgcgacggcgggattcgagagcgtggacgacttcctgcggcgcggcggccgcatccaggtgctgcgtgccggcgagtgctcgcagccgcttcgatacgaccactcgcaccacgccgaacaacgcgccaaggggcgcgccagccagcaacgcaaccgcgccgccaagcgcgcctga

SEQ ID NO: 507102 - DNA, 819 bp, Stenotrophomonas maltophilia
atgaaactggcccaaaagatcccctcgctgccctcgatcgagactttgattgcggacggtgcgctcttcgtagcgaaccacagtggcggcaaggactcgcaagccatgttgatccggctgctcgagatggtgccgcgctcgcagatcctggtcgtacatgcctccctcggtgaggccgagtggaagggcgcgctcgagcatgcccacgcccaagccgaggcggtaggcctccctttcgtagtcgcgcacgcggtcaagacattcttcggcatggtggaacaccgattcagggtgcgccctggtccgaattcgtcgtgctggccatcggcatcgaaccgccagtgcaccagcgacctcaagcgtggaccgatcgagcgtgagatccggcgctacgcgagcgagcacggcttcgccaagatcgtcacctgcctgggcatccgcgccgcggagagtccgggccgggcgaagcggccagagatgtcgtggagcgcgcgcaacagcgtggccggccgcagctggtatgaatggctgccaatccacgggatgacgacacccgaggttttcgccacgatcaaggccgccgaccaggagccgcattgggcctacgcggcgggcaaccagcggctgagctgcgtgttctgcatcatgggaagcccgcgcgacctggcgaacggcgcgcggcaccggccggagctgctggccaagtacctcgagatcgagcagcgcaccggctacacgatgcaccagagccgcagacctctgctcgaactggtcgcgatcggcgaagcgaccctgagtggcaggggaacccaggcatga

SEQ ID NO: 507103 - DNA, 339 bp, Stenotrophomonas maltophilia
atgaagcggcgcgacatcaagaagtgctgccgttgcggatgcggcgtggcgaagcacggcatcgtgttctacacgctgcgcctgcagcagtggggactgaacccgcgcggcatccaggagacgcacggcctcgagcagttcttcggtggcggcgcggctggcgctgcgctggcaggaatcatgggcgcggatcccgacatcgccgtgccgctgagcgagcccggcgcggatctgtgggtgtgcgccgaatgcgccatcacgccggtgtcgctgctcggcttcctgcacgagagctccagcgacgcggacgcggtcatcgatacggacctgcgggcatga

SEQ ID NO: 507104 - DNA, 627 bp, Stenotrophomonas maltophilia
atgaaccgctcggtgatcgtgttcgggccacaaggctgcggaaagacgacccaagccgcgcgcctggccaagcattttgggctgaagcacgtcgttgacgatgccgacgtcgtgctgcagcacgagattcttctcaagccgaccgacgtgctctatctcgcgcatgagcggcccgaatgggcatcggccgatgatcgtcgcacgcttccgtacgcggaagcgatgtctctgctcaagagtgaagtgccatgcgacggccgcctgtattgctacagcgctgacgaggaattcttccacggcgaccacacatcgcgcgaggaagctgccgccgccggtttcgatcgctacccggacgtggacacgatctacgtcggcacccaggtgcgttatacggcccatcgattcgtcgatggcgaatcgatcctgacccaggtcagcgagtgcgccggcgacaacgccggcgaatgcgcggaagactggctgtggggctccgacatccgcaaggaagagaaggttgctgagctcgagcagttggtcggtgactggatccaggcaaacgagccgcccgagttctacatggtcgaggacatcgaggccttggcacgcccagcagctggtgcggcatga

SEQ ID NO: 507105 - DNA, 282 bp, Stenotrophomonas maltophilia
atgtccgacaagcacacccttccgccgctgcagcgccaggcgctgctgtcgatgctcgcagatccggagcgagcgctcactcgcgtaccaggcggcttctactgcccggccaatcgcccccatccggtattcaccgggcgcaccgtcaaagcgatggagcgcgatggcctggtgaaactcgacgcgccgctctgcacgacacgcgtggacttcaccgaggaaggcctcgccatcgcgacgcagatgcacgaagccgaccaggcgcaggcaggtgcagcatga

SEQ ID NO: 507106 - DNA, 240 bp, Stenotrophomonas maltophilia
atgcagctgatgcagttcgcgccactcgcggtcgtccccgccaggcccactcgtgccgacgatgccgaagtcaccaaagccgtgcgccgccacgcccacgccattggctgcgatgccagcaacacccaggcggcgatcgcctgggcgctgcgctcgccgggccacacgctgcaggcgatccgcgaagggcgccgccgcgccgagcagctgcgccaccggcagaagccagtccccgcctga

SEQ ID NO: 507107 - DNA, 288 bp, Stenotrophomonas maltophilia
atgatcatgcacgacatccctccgtcccagcggctggcgcacgatgcgtgcgggcacactgcgcacctgatcgagactcgcgggcgcgtgcagatcgatccgcgcctcttcgggaaacccgcgaggcagtaccacgtcgaatgcacccactgcggtgtcgcgacgccgcccgtctactcccagcgcatcgccgagcacctgtggagcctcggcgagacggcgctgatcccgctcacccagttgcctgcactccgcattgctgcggagcgctcgctgctggccgcctga

SEQ ID NO: 507108 - DNA, 330 bp, Stenotrophomonas maltophilia
atgagcagtctttcgatcctcgtccatacgctgcagcgtttcccgctgcgcctcaccttcacgccggcatgggattcgatcaacgcctcgttgtatctgcgcccgagcaacgccgaccggaagttcggaatcaagaccggcaagcagctggtgttcgtcgctggcgatcgcgcgcagagacttcggctgagcgagcccgacgacacagctgacgactgctctgtgtggctcggcagcaccgcattcgatatcgacgccaagacccacgcacggctgaaggcgtggatcgctgacaccttcgcttcccaggacggaggcacgccgcgatga

SEQ ID NO: 507109 - DNA, 219 bp, Stenotrophomonas maltophilia
atgtcgcatctgctgcagaaccacctcggcctggtcgtgatcgcagtgctgatcgcgctgggcttcatcgccgtggtgctttcgctcgctttcggctgggcacgtcagcgtgctgagcggctggaacatgcgcagcgctcgatcgacgcgattcgttggcccggcacggcagacagctatcgcaacgcccgtgccgagatgcggagtgggccgcgatga

SEQ ID NO: 507110 - DNA, 342 bp, Stenotrophomonas maltophilia
atgatctcggcgcgcatggacgaactgcgtccgccggtggaaagggcaaagcctcagcttagggtcgtcaccacacccaaggccaccatctacgactcgatcacgcgcgagtgcattctcaagcgcgtgcgcttcctgcgggatcgctggcagatgcattgcctggtcgaccaggccacgttcaacgtgcccaatctcgactgcctcgaggacgcggagctcgccgcgctcctgcacgacatggaacgggcgcgagaatgccggggcgagggcattgactgggaagaggctggcctgatccggtccgtggccaggcacgtacccctggattcgttcgactga

SEQ ID NO: 507111 - DNA, 588 bp, Stenotrophomonas maltophilia
atgcagttaggtcatatcgtcgccgggttgatgaagcaggagggcctgagcctggccgccgtagctgaacgcgtgcgcgcccagggcgcctcgaacgtgaagcaccagcacattcaacagttgatcgagttcccgaataggcgcccgcggtacctgccggaactggccaaggcctttggctacacggtcgagcagctgatggcgtggaagccgggcgacaaacccggacatgttcagcaggaaagcgtcgtgctcggcgcgatgtctcacgacatgcgaagtggacttgagaggatggcctccgcggtcaagttgcttcagtacatcgtggagatccagcacgggccgcccgaggcgctccacgacccctaccttctaaccatcgcttacgagatcgtctcggaggccggagaagtcgtcactgatagcaacctgatcgagttcagcaggcggttcgccgccagacaacgcgagcgggagaacagtgatggcactcagcgaaaatcgacttcgggaactggcggggatgatctcggcgcgcatggacgaactgcgtccgccggtggaaagggcaaagcctcagcttag

SEQ ID NO: 507112 - DNA, 309 bp, Stenotrophomonas maltophilia
gtgaacgcattacagcgcgccatcgccatctgcggcacccaaaccgagctcgcccgcagggtcaagggcaagccggcctccggccacgtccaccactggctgcaaaacgggttcgacgaggacacggcgatcgccatcgagcgcgccgtctccgccgtcgtggccgagtcgcccgccgccgccgagcgggccgccgcgctcggcctggtcaccgtggagcagttgcttccggacctggagtggcaccgggacgccgccggggtagtgaccagctatacgaagcgggtccgccccgcggaggcggcctga

SEQ ID NO: 507113 - DNA, 165 bp, Stenotrophomonas maltophilia
atgtccgcgctctacaccggcggcgcccggagccagctggaacatgacggcaaggacgcggccgtggccgctttcgatatcgaacgcgtgcagggcggtgaatcggaggtgggtgggatcgaacatggcccgcatggtttcgcaggtcggcgggggttcgcatga

SEQ ID NO: 507114 - DNA, 585 bp, Stenotrophomonas maltophilia
atgaagcgcgggcctcaatatctgccgccgcgccaatcggtcatcttcggctatacccggcgcatgctggacgagaccgcgacgaacgctaactcgttcgcgatggcggtggcggagcgatatcacgcaatggtcgccccggatgttcgccaggtgaagctgcgcctgggtgagggcgacgccctctgccgcgccatgaaagacaacggccaggtcctgcgccgctacatggacggcaccgtaaaggttctgccggccgacctcgaagacgcatgggtatgcgcgctgcccgagccataccgctccgactgcgagcgcgatctcgctcgacgccgtggccacctgtgcgtccgaatcgatgacggcagcagcaacgccatcagcactgtcggcgagctcagcaccgagttcggcgaactgctcggggcgatcgcgccggcgatggcggacggccagatcaacgaagcggatctgaagcacgcgctgcagatcctcaataagtcggatgacctgatcagcgccgtgctgtccgtgcgccgttcggtcaccgctctcatgccggaaggggaccggacgcatgcctga

SEQ ID NO: 507115 - DNA, 237 bp, Stenotrophomonas maltophilia
atgcctgatgcaatggaccacctgcagacgttcaacgacgagcacgtgcaggattcgatcaagcgccaccaggctcaccagcccgcgcgagccggccgcacgcattgcgagcgtctggattgcggcgagcccatccgccccgaacgcacggcgcgaggcgcgcagcgctgcgacgaatgcgaagaagagcaccagcgacgcaatgcccacttcgccccgtgggcaaggcagcggtga

SEQ ID NO: 507116 - DNA, 210 bp, Stenotrophomonas maltophilia
atgcagcccgcccgacgccgctgcttcaaacccgcgaacgcggcctcgatgcgcggcatcgccgcggcgctcgccgtcctctacgacaccagcgggccagcaatgacgacggaagaggcccttgccgagcgagagcggtttcgccgcgaggccgaggcgtcgcagagacgccagggcgaactggcgctcgtgctgaaggtgcgcgaatga

SEQ ID NO: 507117 - DNA, 1035 bp, Stenotrophomonas maltophilia
atgaacgcttcgtcggctgcgcgcatcgacaccgacgcactgcgcgccagcgtggacatcgtcgatgtcgtcggcgcctacgtaaagctcaagcgcgacggcaacgagtggaagggctgttgtcccttccattcggagcgcacgccgtccttctacgtctcgccggctaaaggcttcgtccattgcttcgggtgcggcgcgcaccacgacgtgatcgcgtttgtcatgcgccatgacggcctggacttcaaggaagcctgcgagaagctcgggcatcgcgacttcgagcccatccgcgagtcggcgccggtcgaggtcgctgtaccggagggcaaatgggttcccttgctgcctgtgcctgatcacgcgccggcgttgctgcgcgccgacggatggaccgtgccggtctggaacccgaagcggtccaagttctcccgcttccggcctgctcgcgccgacgcgtatcgcaacgcggccggcgcactgctgggctacgtgctgcgttgcgagttcggcgacggaaagatcacgccgacgatcacctggtgcatcgggccggacggcgcgatgcaatggtgcattcgccccttcccgcgtccgcggccgctgtgtggccttgatgaccttgcagccaagccactcgcgccggtcttgatgccggagggcgaaaaatgccgcgcggctggcgctggcgcgctgcccatgtacgcggtggtgacgtggccaggtggcagcaagggtattccctacgtcgactggtcgccgctggcaggtcgcgacgtggtgttgtggcccgatgccgaccaaccgggccgcgacgcaatgctcggctaccgagactacagcgggctgcagcaccccggagtggcgcagttcctgcagcgcgcaggtgtcaggtcgatgcgctacatcgataccgaaggccagccgaagggctgggacctggccgatgccctcgatgacggatggaccccgcgacagctggccacatgggccgcgcagcgcgtcggcgacctcgaagtgatccgaggatga

SEQ ID NO: 507118 - DNA, 1410 bp, Stenotrophomonas maltophilia
atgaccgccgtggccggatcgaagaagaagttcacggtcgttgatggcggcggcacggcgccaccgccaggcgattccgacccgagtgcttggaaggacgtgctgacccgacgaaaggacggcggcgtcgaaggctcactgcacaactgcatcatgatcctggagcacgacgagaaccttgccggcatggtgtggctcaacgagtcgagcaaccaggtggtgctggccaaggatccgccgtggacaggcggcaaccgcgacgagttcaccgacaccgatagctgtgagctcgctgcctggctgcagtcgccggaccgctaccacatgagcgtgagcgatgagctcgtgttgaagtcagtgatcacggtcgcgcggcgccaccggcgccatcccatccgcgaataccttcgcggcttgaagtgggacgggacgccgcgcgtcgagcgcatgttcgttgagctcttcggcgcggaggacaagccctacaacctgcaggctgccacgtgcttcatggtatccgcagcctcgcgcctgctgtggatcgatccgaagcagccgttcaccggatccaaggtggacttcatgctggtgctggagggcggccagggcaagaagaagacgtcctcgttcgaagcgttgttcggcgcgcagtggtacgtcgagacgctcgagtcgccggcgggcaaggacttctaccaggtgatcctcggctgctggggcgtcgaaatcgccgagatggacagcttcagcaaggccgacgtcacgagcgtcaagggtgccatcacccgccgcgtcgacaagtaccgcgcgccctacgagcgcgtgccgcggtcgtaccgccgcgagtgcgtgttcgtgggcacgaccaacgagaccgagtacttgcgcgaccacaccggcggccgccgcttcttgccggtgcgcgtcctcgatgagggcgtgatcgagctcgagaagatcatcgaactgcgcgaccagctgtgggccgaagcggtgcacttgttcgacgccggcgtcccctggtggaagctgccggacgacgcggccgcggagcaggaagcgcgctacttcgaggacagctgggaaggccgcatcagccgctggctcgagggcaaaggtcaaggcgatcgcgcctaccctcaacgccttagctacaccacgcgtgtcgactggaccaccaccgacgagatcctgcagtacgcgatcggcgccgatgctgccaagcacggacggccagagcagatgcgcgtgtcgtcgatcatgaagcgcctgggctggacgcaccgacggatgctggtcgacggcggagcactgcgggagcgacgctggctgcgcgcaagcggggacatggcggacgaaggcaaggccacgccgccagcaggaggcgtcgatgacgactgccccttctag

SEQ ID NO: 507119 - DNA, 648 bp, Stenotrophomonas maltophilia
atgaccgtcggcccgcagaactcaggcaaggatgagacggcctcggtcgccggccagcaggcgcttgcggctgagcccggcatcacccaggccaccttcgcagcgcgccgcggcgtgtcggaggcgatggtctcgcgctggaaggccaagggcatgctcgtgctggacagcgagggccgggtactggaagcggcgtcgaacgcccgcttgcgcgcgacgctcgatcctgggcgcggtggggaccgcacgggccgccagcggccgcctgtgcccgctggcgcggccagcgcccgcccggccggccagggcgctcccgagggcggctacgaccccgacccggaccgcctcaactaccagcgcgaggcggcccgcgacaagcgcgccagcgccatgcagcgtgagctcgagctggcccgcgacgccggccagctgctgcacgccgacgacgtgacaaaccgcatcgcgcaccacgtccgatccgcgatcgatgtgctggccgcgcggcggcggagcctggcgccgaagctggccctggaaaccgatccgcggaaggtcgagcagctgctcgagcaggcggaccgcgagttctgccaggagctcgccgggttggccacgacgcccgacggcgacaccgcgggggccgcatga

SEQ ID NO: 507120 - DNA, 2064 bp, Stenotrophomonas maltophilia
atgacgttcgatgccgccggcttcgagcacctgctgggcgacgccgtctgcgcggtcgaccaggcctgggcccgcgcgtggatgccgcggatgccgatgacgatcagcgagtgggcggaggcccaccgcatgctgcccgaggccagttcggccgagccaggcaagtggcggaacgcgcgcaacccgcacctggtcgagatcatggacgtgctctcgcccggccatccggccgagaaggtcgtgttcaagaagccgacgcaggtcggcggcaccgaggtcctgatcaacgcgctcgggcacaacatgtgccacgaccccggcccgatcatgctgctggtgcccggcatcgacttggccgagcgtcacagcaagcagcgcatcgcgccatcgatcgaagcgagcccggagtggagccgggtcgtgccgccggcgcgcagtcgcgacagcggcaacaccgtccgcgcaaaggagttccccggcggcatcctggtaatcgccacggcgaacagttcggtcgctgttcgctcgatgccggtccgttatttgtactgcgacgaggtcgacgagttcctccgcaacctcaacggccaaggcagcgcgctggaggcagcgatacgccgaaccggcacgtaccagggccgccgcaagatctacctgtgcagttcgcccaccatcaagggcgacagcatcatcgacgacgagtacgaagccagcgaccagcgcgagcggcacgtgccgtgcccgcactgcgagcgcctgcaggtcctgcggatggacaacctgctggacgacggcacatacgtgtgcgagcactgcggcaaggccatcgaggaaactcacaaggactggatgttcgagcgcggcgtgtggatcgcccgctttcccgaccgcgccgtaccggggttccacctcaacgcgttgtacgcgccgtaccgccttggcgagtcttggctctacatcgccggcgaacgcgcgaaggccaaggcggatccgtcgaagcaggtcactttcaccaacacctacgaagggctggcgttcgaaggggagcggcagcaagcggacccggaagtcatcgccgcccgcgcggaggccggtcgctaccgcggccgtgttccacgtggcgcgctggtgctgacgatcggagtggactgccagcacgatcgcttcgaggcgcaggtgatcggctggggtcgcggccagcgtgggtcgatcgtcgactacgacgtgatcccaggcgacccgtcgacgccagaaggctatgccgagctcgatgcgtggctgatgcgcagctaccggaactgcggcggcgcgatgatgatcggcgaggcggtggcgatcgacggcggcaactggaccgagatggtcgcgcagtacgtcaagtcgaaggtcctgcgttccggccagtcgcgcctcgtccaggtcgcgggcggcttcagaccacagaagttgtacgtcgtgcgcggccgctcggccaagtcagagcgcgtggtctacaagccggcgaagacagaggtcaacgaccgggaccgcaccatcgctcgaagcgtgggcgtgtggggcgtcggcacggacgtggccaagcacatcctgttcggccgcatgactgccgacgccaacccggagaccgacgtggagcggcgcatgatccgcttccccggcggcctcggcgagcccttcgacccattgaagcccgatcctggacagctgccgcccgagtactacaagggcctgaccgtcgaatactacgacctcaacgcgaagcggtggatcactccgaagggggcgcgcaacgagtcgttcgacacgatggtctacgcctactgggccgcgttgagcccggcggtgcgcctcgacatgatccgcgaccacgagtggacggcgctggaggaccggctcgaacccgtcgtcgacttgttcagccctgcgccggaggattcggattcccgtgaaacactgccggtacagtcgccgcccccggccgcggccgcggattcccgtgaaacatcgccgcgcccggcacgtcgtccgaccggcatcaccacacgcgagggctggggcctatga

SEQ ID NO: 507121 - DNA, 294 bp, Stenotrophomonas maltophilia
atgacggcaacgcgcaagcgcgaggcggaactgcgcgcacagatcaccgaggcattgatccgcgatgttggcgtcagcgagcggatggcccagcctttcgtcgactcggtgatgggctgcttcgctggccagcggccatacttcccggtggcgcgtggcgacgaccgggccgagcagatccgggccgcactcgagcgtggcgagccggtcaagcgcgtgatgagcgactacagcgtttcgcgccggcagctgtaccgactcttccctggcggattgccgaggccgaagacctga

SEQ ID NO: 507122 - DNA, 327 bp, Stenotrophomonas maltophilia
atgcttgtcctcgccatcgccatcgccgttgcagctacagcgactgacgaagcggcgcccgccgctatcgagcgtgcgcagacgctgatcttgcagaagctgaaggatccagaggcggcgcgctttcgcggcgtccgcttcaacccggaaacaggcgtcgcctgtggccaggtgaacacgaagaacggcttcggcggctacgtcggataccaggacttcatcgtgaagggcgacttcgcgctcacgcggggcgaggcggcggcgtcattgcagccgctgttcgacgaagcctggcgccagtgccatgtggcgccagcggtgccttaa

SEQ ID NO: 507123 - DNA, 216 bp, Stenotrophomonas maltophilia
atgccgacgatcaacgaagaacgcctcgaactctaccgggccgcggaggtgaagatcctcaagggccaatcggtgcgcttcggcgaccgcgagctccggtatgcggacctcaaggagatccgggccgagatcgagcgtctgcagcgcgccgtggccagcgagcagcgcggcggtcggcccggtttcgcgaccgccgacttcggcggggtgacctga

SEQ ID NO: 507124 - DNA, 1548 bp, Stenotrophomonas maltophilia
atgggcagcgcggccaccgcgcgccagcggctgttggagaccctgcctgtcgaccgggcggcgcgttccatcgcgcaactcacagacgcaaagatcagcgcccgcgcgcacgaggtaacccgtcccagccgagctcgcaaacttgctcgcgactggggcagcggcaacgccatcgtcggcatggacgccaagcagttgcgcgaccaggcccgccacctcgagcgggacctcgacctggcgcgcaacgcgatcaacatcctggtgcagaacacggtcggctccgggatcgatgtgctttcggcgccgcgcaagccgggcggcgagatcgaccgcgtactcgcccaggaaatggacgacctgtgggacgactggtgggacaagcccgaagtcaccggcatgcacgacttcgggcggtgccagcagctgctcgcgcgcagctggttgcgcgatggcgagtcgtactaccaggacctgatcggcccggtcgtagcgctcacctacgacacccaggtgcgctacgcgatcgaaatgctggaagcggacctgattccgctcgacctgacggatcccggcaggaagatcctgcagggctgcgagcgcaacgactggggccgcatcctggcctggcacgtctacaagacgcatccgggcgatgtgctcggattcaacctggagacgaagcgggtcagcgccgaccgcatgcaccagatcgcgctcatcgaccgcctgcaccaggtccgcgggctctccgtgctcgcgtcctccatgtcccgcttcgaagacgtcaaggactacgaggaatcggaacgcatcgccgcgaaggtcgccgcttcgatgtgcgccttcatcaagaagggcgagaacggcggcgccaccaccccggtaagcggcgcgctcatcgtggagcccgacgggaaccaggtgcgcgaactgcgcatgacgccgggcgcgatcttcgacgaactactgcccggagaggacgtcggcacgatcgcaagcaaccgaccgaacccgaacgccgcgacgtggcgcaaggaacagctgcgtgccgctgccggcggcgttggcgtgagctacagcagcctgtcgctggactacaacggcacatacagcgcgcagcgccaggagttggtcgagaagtggggcgcctacctgatgctcgccgagagcttcatcgcgcagggcgtgcggccgatccgcaagcgcttcgtcgaggcctgcgtcctcgacggcctgatcaagcttccccgcacctgggagatgcgccacttgatggcgtcgacctacgtgcgcccgatgatgccgtggatcgacccgctcaaggaagcgatggcgcggggcgagtacgaggaccgcggctggacctcgccgcagcagaacgcgctcgccctgggcaacaaccccaacgaagtgctgcagcagtccgccgactggaagaagcagcgcgaggcgctgcagctgggcgacgctgcacagaccaacgacccgaacgcccgcgccgccctgcgcggtgaagtcgttcgatccacgctcacggagaagaactga

SEQ ID NO: 507125 - DNA, 2151 bp, Stenotrophomonas maltophilia
atgaagcgcacgcacctgtctgccgccctcgccatcgcgatcgccgcatcttccgccgccggccccgtagccaccattccgggccgtctcgagattctcgccaagggcgaggacaccgccgagctgctgatctacggcgacatcggtgacagctggtggggcgaatcggtggccgcggccgacgtcgtgaagcaactcaacgacatcaccgccagcaccatcgaggtccgcatcaacagctacggcggcagcgtcaccgacggcctggcgatctacaacgcgctgaagcgccacaaggccacgatcaacgtgaccatcgacggcatcgcagcctcgatcgcgagcgtcatcgcctgcgccggcgacaccgtgcagatggcagcgaacaccatcctgatggtgcacgcgccttggggcggcgcctggggcaacgtgcgcgacctcgaggcttacatcgacgtgcttaaggtcatggagggctcgatcgccaccagctacgccgcgaagaccggcagaacggtcgacgcgatgctcctgctgctgcgcgactaccaggaccactactacaccgcggccgaagcgaaggagctcggcttttgcgacgtcatcaccgaggacgccgccaccgaagaagccgcggagagcgcgaaggcgcaagttgccgcgcaggccgctttcgcgccttacctcgaacgcatgcccgagcgcatcgccgcggcgttccgcacacccatcacgcgcagcgggcccgccgcagctgcgccgaaatcgtcggcctcggccgacgccccaccgccggcggtcgccggcaacaccaccggagacgtcgcaatgaccgaagaagagaagaaggcggccgccaaagcccgagacgaagctctcgccgcgctgcgcacccgcaacaccgagatcctggacatggccaagccccacatgggcaacgctgacgtcaaggcctacgtcgagaaggtgatcgccgacgccgatcccgccgtgactgcggccaacgtcggcaagcacatcctggcgctgatggccaacggcgccggcccgctgaacggcaacgccggcgtcgtcgccggcaaggatcagcgcgacctgacccgcaaggcgatggcgaacgcgatcgaggcccgcgtcggcttcgccaaggccgagggcgacaacccgtatcgcggcttcacgatggtcgacctggcccgcgagtcgctggcgcaggcgggcgtgaacacccgtggcctcgaccggaaggagatcgtgggcctggcgttcacccattccacctcggacttccccggcctgctgggcgataccgcgcgcaaggcggttctgcagggctacgaggaagccgaggaaaccttcgaccagttcacccgcccggtatcggtgcccgacttcaagccgacgaacctcgccggcctgggcgccttcagcgatctgctcgtggtgccggaaggcggcgagtacaagtacggcaccttcagcgagcagtcgcaggcgatgcagatcgtcacctacggccgcctcttctcgatcacgcgccaggcgatcatcaacgacgacctgggcgtgttcaacgacgtgccgcgcaagctcggccaggccgccaagcgcaccatcgcgaaggcgatcttcaacctgatcaacagcaacccgaccctggccgatggcttcgcgctgttcagcgccgagcacgggaacctgctgacgggcgcggcgatcagcaccaccagcgtggacgcgatgcgccaggcgatggccctgcagaaggacaaggacggcaacatcatccgcgtcccgctgaagacgctgctcacgccgatcgcgctcggtggcctggcgcgcacggtccgcgagagccagtacgaggtgagcggcaacaagaacctcaccacgccgaacatcgtgcgtaacacattcgaggtggtcgacgacggccgcctggatgccgccagcgccaccgcctggtacggcgtggccagcaactccgtcgtcgacagcatcgtggtcggctacctggacggcaaccagacgccgtacttggagcagcacgagggcttcaccgtcgacggcgtcgcctggaaggtccgcctcgacgctgctccggcgatcgccgactaccgcggcatctacaagaaccccggcgcgtaa

SEQ ID NO: 507126 - DNA, 357 bp, Stenotrophomonas maltophilia
atgaaaaacgcacaccaggacggccgcgtcctcgacgtcaccctggaggcggccgtcgaaagcggcggcgtcgtgaccaagggccgcatgctgggcatcgccgtcagcaagggcgcgatcggcgacacgatcgcggtccacgtcgagggcgtgttccgcctcccgaagctcaacaccgcggtcatcgccgtgggcgacccggtcacctgggacgtcaatcccggtcgagtgatcgtcgcatccgccgccaccggcgacgtcgagaacttcggctacgcagtcgccgcggccggcaacggcgcgaccgaagtgctggtccgcctgtgccccggcgccggcgtcccgaaggccgcctga

SEQ ID NO: 507127 - DNA, 429 bp, Stenotrophomonas maltophilia
atggcagcgccccgcggtgtccgcaacaacaaccccggaaacatcgaccgcagcggtgtcgcctggcaaggcgaggaccgcagcgatgcggcgcgcaggaaggaatcgcgcttctgcgtcttcacgtcgccggagttcggtttccgtgcgctggcgaaggtgctgcagacctaccagaacaagcatggcctgcgcacggtcaaggccatcatcaatcgctgggcgccgcccaccgagaacatcaccagcgcgtacgtccgtgaagtctcaaaggcgctgaacgttgatcctgatgcccggatcgacgtaaccaagttcgctacggccttcggtatcgcgaaggccatcgcccgccatgagaacggcggtcactactggcccgacgaactcatcgtcaagggtctcgagctcgcaggggtgcgcgcatga

SEQ ID NO: 507128 - DNA, 450 bp, Stenotrophomonas maltophilia
atgatgggggcgttggggatcaagctgaccgcggcgagcctgacggctgtggccgcgacgcagacggccgtcacggtcatcgagcatgtcgagcgcaacatcgtcggcatcccgcaatccgtgcttctggctgccatcgttggcgcgctgatcggcgtcttcatcatgccgaacaaggacgcggcggcggtcttcgagaagcgcgaacccggtgcgcgatggttcgcgaccgcgctgctgaaggcggggttcctcggcgccggcgtgatcggctacgccttcctcgatggatggacggttaccgcgctttcgctgtggttctccgacaaggtcgggccggccgcgctgccctgcgccggcatcctcggcgtcttcattcggccgctgctgccgaagtacatgcagggactcgagggggtggcggaacgactcttcgggagggtgcaatga

SEQ ID NO: 507129 - DNA, 285 bp, Stenotrophomonas maltophilia
atgaatccgctctactggtgcggcgtcgtcacaaccttcgccctgttcgctgcggtgtgctggcgcctgatcatgacgccgcatccggacgcatcgctcgcctgccgggcgcgctggttggtgtggggtttcctgcacatcgccatcgccgtcgcggcggtgggctggatgcttgaccacgcaggccacccggatgtttcggagtggcatctgtgcgtcatccgagcggccacggcggccctcatgctggtgcgttggcgccgtcgcgcgggagacgtcgcatga

SEQ ID NO: 507130 - DNA, 585 bp, Stenotrophomonas maltophilia
atgaactggttgcatgccgcatggtcctggatcctcgacttctggccgtggcttgcgggcgcaggcgccgcggtcacagtgatcgcgctcgcagcgctgaacccggcagctgccctcaagctcgccagcgccatcggcggcttcgtgatggatgcgctgcgcgacctcgtccaatggctccgcaagcccggcagcaagctcaaggcggcatgtgccgtcctggcgatggttgccgcgatcgcatgtctttccagctaccgggataaccaacggttccttgtggttacccaggagcgtgccgaggctgcgcgcaagttcgccgagcgcgaagcggaactgcaggcggtgatctcgacctaccaacagcaggagatcgacttcgaggctgctgtgcgccaggaggcagagcgcctcatcgtggcacgtgcgcagtccgccgccgctaccgccgaagtaaagcgccggcaagaagccgcggaaaagtcggcatctgcgttcaaacgcgaagcggcgaacaagtcggacgcctgcaaggcggcgctcaaagcattggaggcggcatgtcccacgttgcgcgactactga

SEQ ID NO: 507131 - DNA, 300 bp, Stenotrophomonas maltophilia
atgtcccacgttgcgcgactactgacgacaatcgcggctgtgctgctgaccgcatgcggtgcgaaccgccaggcgatcaaggcagtgcctgcgaaggaagtcatcgtgaagccggtcaagtactacgtgcctatcgatccggacctgcgcaagcggtgtaagtggcgcgagacggcaccgatcggcgcgatcttcgaagtgtccggcgagcgcaaggcctgcctgatccagtacgagatccaactggacggcatcgacaaggtgcaggggaatcccgtccctgaggacaccacgccgtga

SEQ ID NO: 507132 - DNA, 303 bp, Stenotrophomonas maltophilia
gtgagcgacgcagaccaggtcttcgcggatctgcatgccgacctgttcgaggtgttcgggcaggacggtaccgtgcagcgcggcggtgacgctgccgtccccgtgcgtgtggttatcgaccgcggcgtagagcgctatggaacgaacggcgaagtcgtggcgaccgtcacgatcgtcagcttcatggtggcgcagtggattccgtccgccggcgacgtcgtcgccgtcggcgcctggagcaagaaggtcgacgtgctcgacagcgacgacggctatgtcgccaaggcggtgatgtatggctga

SEQ ID NO: 507133 - DNA, 426 bp, Stenotrophomonas maltophilia
atggctgatcccgcgcgcagctaccagatcctcactgtgctgcagacacgcctgcagcagatcagcgtcgacaacggctatcgcaccgacgccggcgccgatgtccgcaccgaggaaagcaaggacgcagccactgcgccgcgcatcacgctctacgccggcagccgcatctacccggacagcgcacgatcgaagggcgagcgcgagttcacgctgatcgtcgaggcccgcattccggcatcgctggagaacctgcaggcgctcgcgacggcgatcgacgaggacctcgagcaggcactcgaccagtacctgcagcagccgttggccctgccgctgcagttcgaggagtcgatcatcctcgacaagcccgacggcctgtccgaaatggtcgtgcagcagatgtacacgacgaggtatcgccggtga

SEQ ID NO: 507134 - DNA, 636 bp, Stenotrophomonas maltophilia
gtgaccgcggcctccgtcaccgccagccggcgcggccggatctcgctcggcttcgagctgcagggcgcgctggccgcctcgcgcaacctgggcctgctcgcggaccgtctgccgtgggtccagcgccgcgcgatccagaccctgcgccggcgccttccagtgcaggcgcgtcgagacatccaggccgagtacaacctcggcgcgcagcgtatcgccaaggacctgtccacgcgcgccgacgacaccggcgtgcgcctggtcggccacttccgcggcatcggactgcgcaacttcgccgcacgcgccacggccaagggcgtgaccgcggcgatcctgcgcggccgccgctcgctgcacaagggcgcgttcttggcgccgctggccaacggcaacgtgcaagtcgtttcgcgctacggcgagaagcgggtgatgacgcaaggccgctacaagggcaagcgccgccagccgatcgccgtggaatacggcgccaccgtcgctcagatgctggcgaaggggcgccgccctgagcgactcgccgacttcgcacgcggcgtgttgggcgccgagatcgagcgcctgttcgcctactacgaccgccccggcggctttccacccaccagcgaggaatcgccatga

SEQ ID NO: 507135 - DNA, 243 bp, Stenotrophomonas maltophilia
atgaacagcaacaccagcaccacaggctccgcttcttcaacgccggccgcgaagcgcaaggtccggatcttccggccgcacacgcacgaaggcaagcgcctcacccccggtccggacggcatcgaaatcgaggtcaacgagcccgacgcgaagtttctcgaatcgatcggcgccaccaagcgtccggacggcgccgaagtcccgatcggcgccacggccggcggcattcgtccgcaaggctga

SEQ ID NO: 507136 - DNA, 759 bp, Stenotrophomonas maltophilia
atgaaagacttcagtttccagggcaaggtgtacctcggtgcacggcttgccggcggcaagcccggcgcgctgcgctgggtgggcgacgcaccgcgctgcgacgtgtcgctgagcaccgactccgagacccgccgcgagagctactccggccagcgcctgacctcggcccgcctgcagcgtggcagcgatgccgaagtggcgctgaccctgaactgggccaatgccgagaacctggccctgggcctgtacggcgaggtcaacacggtcgcagccggcagcgtcaccggcgagttgctgccgaccggcctgattgccggcgacatcgtcgctctggaccacggcggcgtgagttcgttggtggtgaccgacagcaacggcactccggccaccctgactgccggcacgcactacgcgctggactcggagaacggcggcgtgatccggatcatcaatccggcttccttcacccagcccttcaaggccgcgtactcgcacaccgaaagccaggacgtgaccatgttcacgaccaagccgccggaacgctacctgctgctggatggcatcaacactctggacggttcgccggtcaaggtgcggctgtaccgggtgcagttcgacccggcctcgagcatcccgatgatcaacgagagcttcgggcagctggaactgtcgggcgcggcgctgtacgacgacgaggcctcgctcgacgacgagctcggtggcttcggcaagatcgaacagtccgcggcggtggcctga

SEQ ID NO: 507137 - DNA, 522 bp, Stenotrophomonas maltophilia
atggcccgcaaaacgacccctcgcaaggtcgacgccgccgccgaggctccctcggcggcgacggccttggtcgagatcaagcccgacgtcaccctgaccatcgccggccgcacgctcaccatccgcgagtacggattcttcgaaggccttgccgtcgcgcacaaggcacagccgctgattgctgccatgttcgccatgtgccaggacggcaacctgcagtactcgcggatccgccgcctcttcggcgtccaccaggacctggtcatcgagatcgcggcgcaggccgccgatgtcgagcccgagtgggtccgcggtctcgagaagaacccgaccgacgcggaactgttcctggacagctggttcgcggtgaacagcagttttttcgtgcacgaggccgtcgtggaaatgcgggaggcgcggcaacgcgcggcgatgtcgactggttcgacgcattcgcccggatctccgccgccggcctcggcgacttcgaccgaatcggccgcttcaccgagcggcagctga

SEQ ID NO: 507138 - DNA, 3111 bp, Stenotrophomonas maltophilia
atggtgcgccggtcgctcgatgagctcgaggcggcccgtgcgcagatcgaggcggaccaaagtgccgctggaacaagccgcagcggtgcggccgccgctacgatcgagcaggcccaggctcagcaggcctacgtggctgccagccgggccacgcagcaagcggtcacagccgagatcgggctgatctcggaactccaggagcggctcggccgaagcgccaccagcatcgacgacctggccgacaccgaggcgcgcctcgacgtcgcgatgcggaagggcctggtcacggcggaggaatacgacgaggcactggagaagctcggcgccgagcaggaccgcctcaacaaggaaaccgagaagagcggcaaggcgatcgagggcacggtcgggcgctacgacaaggcgggcgcctcgctgcagcgcctcgcgcgcgacgaggcacagctgaaggcggcggtcgacgccggccgcatttcccgcgagcagtacaaccgcgcgatggcgaccatcggcgccgagcgcacgcgcctcactgcaatccgggacggcgcggcgcagtcggcgaatgcgatgcgcaccctgaacaccgagtcgctcggtgtccagcgcaacctgtcccagctggtcagctacggcgtcaccggccagtggcaactggccggcaaccagctgctgcagctgggcaaccaggctgggctggcggggcggttgttctccggcgccggcctggcgatcggcggcgtcaccctggtagtgggcgggctcaccgcggcgctggtcacgaactacctacagatgcgcgcgttcgataacgcgctgatcgccaccggcaactacgcgggcacgacggccggtgcgctggccgacatgcgcaaccaggtgggcgagtccacgggcgacttcgccgcggcgcagacgtcgctcgaggcgctgaccgcgtcaggcaagttcacctcggactcgctgcagagcgccacgcaggcggccgtgggtcttgcccagctgactggaaagagcatcgaggacaccacgaaccaggtgatcgcgctggccaagtcgccgaccgcgagcctggtcgagttgaacgagcgctaccacttcctgacgctggaggtctacgagaacgtcaagtcgctcgaggaccagggtcgggctcaggacgcgacgaaggccgctaccgaagcccttgctcaagtgaccgcgtcgcgcgtgtccgagatgcgggcgaatgccggcacgctcgagcgcgcctggtacgacgtgcgtgacgcggcgcgcagcgcctggcagatgatcaaggacatcggccgcgaggatgccgaggcccgcatcgccgcgggccagcgtggcatcctgatggcgaaccagcagcgtgctgagctcgccgagaacgtccggctcgggatcctcacccaggcgcaggccgacaaggccaaccaggcactgcgcgagcgcatcgcgaacgaacagaagaacatcgcgcagtggcaggaacgcaaggacctgcaggatgcgacggcgaaggccgcggccgaagagcagcagctgcaggacaaggcggtcagcgccgcggcgtcgatcgaccgcgacatcgcgcgcatcgacaagaaggtcgagcggcagcagagactcaacaagctgatcgagcagtacaacgtaatcgcggcggtcgatccgaacgactcgcgcctgtatgacggctcatacgagcgcctgaagaaggccatcgaggacgagaccgaagagaagaagtcccgcacgccgcgcggccccaaggcgacggatcccaacgacgccgccctgcgcgaagtcgagaacctggagaagcagatcgcgctgctgggcgatctgtccgaaggtgaaaccaaggtcagtgaggcggcgcggatccgctacgagatcgaggaaggcgcgtaccggaacgccagcgaggcggtgaagcagcagctggtcgacaacgcgcagctgctggacagcgagcgcgccaagcgcgaggaggccaccaagcagaagcgggagctcgaggatacaaagcgctcctatgagcagctgcaggacgcgctgcgcacgccggccgaggccgctctggaaggagcaatcgcgcaggtcgagacgctcaacaaggccctgaaggccggcatcgccgattccgcggcctacgacgcgtcgatgggacggatcgtcagcggcgcgttcgacaaggcaccgaaattcgaaggcttagcaccggagatcggcggggcgttcggtgagctcggcaagatcggcgaggctcgcgccgaactggagaagtggtaccaggatcagctggcgctgctcagccagttccgtgcgcagaagatcggcgtcgaggcgcagtggaacgcgcaggagcaggccctcaccgcgcagcaccaggacgcgctgcgccagatcgagtcggcgcgccagcaggcgatgctggccggcgcgtcggcgacgttcgggcagctggccgacatctccaaggcttacggcggcgaacagagcaagacctaccgcgccctgttcgccatcagcaaggccttcgcggttgcgcaggcggccgtcgcgctggcgcagaacgtggccgaggcgagcaaggccggcttccctcagaacatcggcttcatcgccggcgccctggcgcagggtgcgcagatcgcctcgttgctgtcccaggcgagctacgacggcggcagcggcttcgcggagggcggctggaccggccccggttcgaaatggcaacccgccggcatcgtgcacgcagaggaattcgttaaccgccgcgaggtggtgcgccagccgggcgcccgcgcgttcctcgaggacttcaacaatcgtggcatggacgcgctctacgactggcgcggatacgctgccggaggcttcgtcgagcccgatgcgaacctggcgggtccacgctgggaccgtcatcccagcgcagagaatggcggcctgtcaccgacggtaaacgccaatacgcgagtgctgaacttcctcgatatcgaccagctggcgcaggcgcttgcgaacaaccgcgagttcgagaagaccttggtcaacggagtggtatcgaacgggaattcgatacgtgcggggtggcaggagtga

SEQ ID NO: 507139 - DNA, 1200 bp, Stenotrophomonas maltophilia
gtgacgtacacgaccaacgggccggtaccctggccggtgccgccggattggagcagcggtgtccgcgagtcgctgtcctggctgaccgacgtgctgcgctccaaccgaaccggttacacgcagcaccgtagactccgattgagcccgcgccgggccttcacgttcgatgtgatcgccgacgcgcaggcgcgccgcgtggcggccgccctgctgttcgaccgtggcgtgagggagtgggcgctgccgatctggccagacgtgcagcgtacggaggcatcgatcgcggccggagctaccatcgttccgtgccgcaccagtggattcgacttcgccgtgggcggccatgccatgctctggcgcggggtgaaccagttcgaggtcgccacgatcgcggcgatcaccagcgagcacctcaatctgcaggcgccgctggtgtcggcttggccgcgcggcacccgcctgtacccggtgcgcgctgcacgcgtggtcgacggtagcgaggaacaggcgtggaccgatgatgccggcaagcgctcggtgagcttccagctgaccggccccagcgactggccgggcgtactgccattggcgctgtaccgcggcttccctgtgctggaccaccggagcgacgaagggaccgacccgactagcagcgtcacccgtcagatcgagttcgtcgacgagggcacgtcgctggtgtcggcgttcgacctggccggtcgggcgttccgcaccagctcgcaccggtggctggccagcggccgccaagagcaagccgtcctccgatcgcttctctatggcttggcggggcgtagcgcgccgctgtgggtgcccagtggcgccgccgacctcaagttggcccagccgatcgccgccgccagcccgacgatcgtagtggagtgggcaggctatgcgctcttcggtcgccagcagcaggggcggcgcgacatccgcatcgagctgaagaatggcaccgcctatcaccggcgcatcaccgtctccagccaggccggcgcgaacgaggtcctcaccctcgactcggccctgggcgcgagtgtgtcgctgtcacagatccgccggatcagcttcatgtcgctgagcacgctggccagcgacgacgtcgagatcgagcacatgaccgatgcggacggcaccgcgctttgcaacctgaccttcgcggcggtgaccgatgacgtttag

SEQ ID NO: 507140 - DNA, 837 bp, Stenotrophomonas maltophilia
atgacgtttagcctgctcgagctcagccgctggttcggtcagccggtagcgttgttccgcttcaagcgcggtccggtggtgttgcgctacaccagtgcggaccggccaatcgtgatcggtgctgagaccttcgagccgatcgcgatcgcgcgcgggccgattcgcgagggtatcgacgctaagcgcagcaacgtcaccatcacggtcccgctgcagatcgggggcgaagacctcgagctggccagctggtggcggccgtatccgcccagcacgaccgtaatcgtcgattgcatggtgttgcactatggcgacgctgaagtgtcgacggagtggatcggccgcgttgtcgccccgtcctataccgacaccacgctcaagctgacctgcgaaccgtcgcagacgtcttcgcgccgcagtggcctgcagttgaagtggcagcgcggctgcccattggccctctactcgcagggcatcggcatgtgcaacgtcgacccggccgcacacgcattgccggcaacgctgacggatgtcactggcctgacactgaaggccgcagccttcgcgacgctaccggtcgggcgcctcgccggcggtttcgtcgagtggacgcgcgtcgacggcgctcccgagttccggaccatcctcgcgcacaccggcgacaccatcgtcgtgaactacggcgccgcggacctcgcggacggcatggcgctgacggcctatccgggatgcgcccacaactggaccgattgcgacgagtacttccacaaccgcgacaactacggaggatcgatgttcctgccggtgaagaacctcttcgacgggaatccggtgtggtga

SEQ ID NO: 507141 - DNA, 345 bp, Stenotrophomonas maltophilia
atgaagacactcgccgccaagcggttccgtgcgctcttgatggccatcgcatacgaggcgcgtgcgcgcgtgtaccagacgcgatatgtcagcggccgaccggtgcacgcagcctacgtgcagatcatctgggccatcgtggtgatcatcgtgtcgctgctggtgtcgtacgcgatgcggccgaaaccgcagaaccaggagcccgcgaagggcaacgtgccgacggtcaaagacggcaagtcgatcatccggatctacgggactgtgtgggtcgacgattccatcgtgctcggctggaaaccggcgggcaccgatccgatcaagaagaagggcggtaagaagtga

SEQ ID NO: 507142 - DNA, 228 bp, Stenotrophomonas maltophilia
gtgatcgtgcgcatcgagcatctgcgcgcagttcccggcttcggtccgaagccgggattctgcgcacgcggcgggaggcagtggttcgcgcgccatcaactggactgggcggctttcgttcgccagggcatcgacgcatcgctgctcgaggcgaccggcgatccgctggcgctggcgctggtcgagcacgcgcgcaagcaggaaggggtcgcgaatgggcagcagtaa

SEQ ID NO: 507143 - DNA, 2952 bp, Stenotrophomonas maltophilia
atgggcagcagtaataaggtcaccgtcggctactggtacaggctgatcatgcacttcggctggtgccgtgggccgatcgacgcgttcctcgagttccgcggcggcgatcgcaccgcatggaagggcgagctgacgaacaatggcgtgatccagatcaacgccgagaacctgtggggtggcgagaagtccgaaggcggcatcgtcggcagcttcgacgtgcgcctcggcggccaggcgcagacacccagcagctatctcgcctcgcagttggggccggagcagagtgcctaccgtggccgcgccggcggcatcttccaaggtggtcggtacggagcattcaacccgtatccgaagccggcctcgttcaaactgcggcgcatcctgaagggctgggacaacgatgcgccgtggtatccggcgacagcctcgatcccgatcggtgccgaccgttcgccgattcctggtacgtggccatgggtgaaccgctcgaccggttatttcgtgatcggcgcggcgcaggaactggagggcacctacttcaactttcagggatggtggcacggcaacatcgattgcttccgcatcaccaagaacgtagcgcggtacgcgcagtcctcgtactcggtgccgtccactccgttcggtggcgccggcgacgatccgcactattccgatgttgtgctgctgctgcgaatgctaggcaccgaagggtcgaccgtcttcaccgacgacaagggacacgctgtccagggctttggcggcgcgcacatcacgacggcacgctccaagttcggcgggtcgtcggcctacttcgacggcgtcgacgactacctgacggcgacgatgggcgccgatcagaacctcggcagcggcccgtggacgatggacgcgtgggtatggctggactcgttccggtcgcattactactcgcgcgccctgttcggccacggccccgtgggcgttggcgctcaggacaccgcctggtactgcatcggggattcctggcgctatgaccagttggaatcgggcagccagcagcgccccggcgtcctgcagaactctgcgccctacatgcagaccgggcgctgggcgttcgtgagcatctgttgggacggcgagcggtactggctgcaccaggatggtcagctgctgacggtcacctccaacgagttcgggatgaatcccgcgcacatcatttacgacagcctggccagcgcggacatgcagggcgagccagtgtcgtcgatcaacgatgcgagtttccgtgcggcggccgaccgcttcttccaggaatcgttcgcgatctgcaccaagtacgatccggactcggagtcgatcgacgacttccggcagcgcatctgcaacgtggttggcgccagctgcacgcgcagtcgcgtcgacggcctgtggtacctggatccgatccgcggcgaccacgacctcgattcgctgctggtcctcaccgacgacgacgtcatcgagtaccaggaggacccgtccacgctcgacgacgcggtcaaccaggtggttgtgtcgtggttcgacccgatccgcaaagagacccgcgccacatcgcccctgcaggcgctcggcgccatcgctgcggtcggcggcgtgcgatcggagacggtggagtatccggagatcccgaacgaggatctcgcgctgcgcgtggccggccgcgacctgaccagtaagtccacgccgctgaagcgcttcacgctgaccacgaaccgcaagccgcacgcgctgcgtctgggacagttcgtgcggctgcaactgcccttgcgcggcatcgccgacatggtgtgtatggtcggcgacgtggactcgggcactcttcgcgccggcaccatcaagctgatcgcggtgcaggacgtgttctcgatgccggacacgacctacatcattaccgagccgggtatcgacccgcagccgccgacaacgccggagccgccgccggcacaggcgatcatcgaggcaccctacgtcgagctggccgggacgttgcccaacgctgagctggccgcgcttcctgccgatgccggctacatgctgacgatgggcgcgagcccggccaacggcctgaactacagcctctggagcaagactggcggcgaggacttcgccgaccagggcgttgcggactggtgcccggcggccacggtggtcgaggcggcctcgcgactcccctccgaaacggcgttcaccctcgctggcgtgagcaacctcgatcgcgtgacgatcgggaccgcggcgctatggggcagcgagctggtgcgcgtcgatgcgctggacacgacgacgaacgctgtgacgtttggccgcggcgtaggcgacaccccgccggtcgaccacgtcgccggcgagcgcgtgtggttctacgacgcctggtccgggagcgaccagcgcgagtacgtcgccggcgagacggtgtccgcaaagttgctgacgcgaacgacgtcgcaggagctgcccctgtcgtcggccacggagatctccgtcgtcatggatcagcgtgcccagcgcccgtacgcgccaggcaatgtgcgcgtcgccggcgagtacgcgccggccggtgtactgacgggtcccctggccctgacgcttgcgcatcgcgatcgcgtcctgcaggccgaccagctggtggactggggcgccggcagcgtcggcccggagccaggcgtcgagtaccgcgctcgctactacgacgacaccaccgacgcgctcgtgtacgagcccgcgacattcaccgcagacaacgcctcgcacgacttccctttcaccggtgctgttcgcctcgagctcgagagcgtgcgcggcggtctggagagttggcgggcagtggtggtgcgcttcatgtacgagaacggcggaacggaactgatcaccaccgaggcgggagagggcctcatcaccgagggcggcgagaccgtcatcaccgaaggataa

SEQ ID NO: 507144 - DNA, 471 bp, Stenotrophomonas maltophilia
atgtcgaagaagttcagtcagtttgatccggccggcgcgctagacgccgcggacaagttccctctcctgcaggaagccgggacgcctggcgtctacgtcaacgttttgacggacctcggcaccctggccgcgttcctggcgctggccagcagcgtgccgcccgtggccacgatcagcggcaccacgcacagcctcgtcgccggcgacgtcggcaagtacagccgcctcaccgccaccagcgcgaaaacgatcaccgtgcagccggatgccaccgaggcgatgccggccaatgcggagatccacgtgcgcaacgtgggcgccggcaccgcgacgatcgctgcaggcgcgggggtgacgatcaatgcgccggcgggaggcacgctggtggtgcccgtgggcggcacggtgacgttgaagcgtgcggcggtcgatgtgtgggacctcatcggcgtgaccgaggccgcaccgtga

SEQ ID NO: 507145 - DNA, 741 bp, Stenotrophomonas maltophilia
gtgatccccggtattatcgccggccgtcgtacggcggcgccggctaacgatcccctgtggacgagcgtgcgatccctggtgcatttcgacggcgccgatggtgcgacgtcgatcactgatcagaaaggcgtcgcctggacgcgcgatggctcggccgtgctggtcacggcgcagaagaagttcggcaccgccagtctgcgcctggtgaacaccaccggcgacgacgggtttcgcgcggccgcggacttgatcagcccgtcaggtcagtacaagcagctgatcacgatcgagggatggatccgcgtcgatacgctcgccggctaccagtacaaccgcaatccgctgatcggccaaggcggttcaggcggatccaccgatcagagcttcgggatcgatgacggcaaggtcacgttctatcgggcggccggcctcacgggcggcaatcgcctggtgcagggaacgacagtcgtggccgtcgacacctggcaccacatcgcgatgacctacgacggtagcgtgatccgcgtattcctggacggcgtcctcgaggcttcggccactgacaacacggccggctggcagaacaccggccagcaggttcgccttggccgcacggtcgtggcgggctacgaacagtaccgccaggcggccaagggctacatcgacgaactgcgcatcacgcgcgcgtgccgctacacgtcgaccttcacgccgccctcggcgccattccccaacagctga

SEQ ID NO: 507146 - DNA, 750 bp, Stenotrophomonas maltophilia
atgggaacggacagggactgggaaaactggggcgcggccgacccctacttcggcgtgtatagccgcgagcgcttccgctccggctcgatgacgagcgaggcacggaacgagttcttcgtctctggcgaggagcacatcgcgaggacgctgcgggatctccgcgacgccttcggcgatgagccgtccgtgcgatcggcgctggactttggcagcggcgtggggcgactcgtcatcccgctggcgcggcgagccgagcgagtgactggcgtcgacatctcgccgtcgatgatcgcggaggccgagcgcaactgcgccgccgccggcgtcgccaacacttccttcgtcgagtccgacgatcgcatctcgcgcgtgtcgggaaccttcgacctggtgcactcctacatcgtgctgcagcacgtcgcttggagccgtggccgcggcatcctgcaggccctggccgatcgcgttgggcccggcggccacctggccgtgcagatcctcaccggccacgacgcctcgccgctggtccgcggcctggtccgcctgcgctacgccttcccgccggcgaactggctgcgcaacgtgatgcgcgggcgccccgtgttcgagcccgccatgcagctgcacatgtacgaccgcgacgtcgtccggcaggacctcgagcatcgcggcttcgcagttcgcttcgtcgacgagcagtggccaggcttcaccagcacgttcgtctacgccaagcgcaaggcgtcgtag

SEQ ID NO: 507147 - DNA, 792 bp, Stenotrophomonas maltophilia
atgcccaacccgatcatcccttggccaggcggaaagcgaaagctgctgcgccacctctacccgcacttccccgcgcacgaatgctacgtcgaggccttcgccggcggtgcggccgcgctattgctgcggccgtaccccgcgccggtcgaggtgctgaacgacatcaacggcgagctcgtgcgcctgtaccgctgcgtgcggcaccatctggacgagttcgtccgcatgttccgctggagcctggtctcgcgcgagatgttcgagtgggcgcagatggagcggcccgagacgctgaccgacatccagcgcgccgcccggttctactacctgcagaagctcgcgttcggcggcaaggtccacggccagaacttcggctacgtggccagcggcaacgggcccaggctcaacctgctgcgcatcgaggaagagctcagcatggtgcatctgcggctggccaacgtgatcatcgagcacgggccatggcacgaggtcctgcagcgctacgatcggccggcgacgctccactacctggatccgccgtactgggagaccgagggctacggcgtcgaatttcccttcagcgagtatgagcgcatggccggcatgatgcgatcgtgccagggcaaagtggttctctcgatcaacgaccatccggagatccgccacgtgttcgagggcttcacgatggtgccgctgcagatccattacacggtcggtcgcaccggccgcgaggcggccgccggcgaactgatcatcaagaactggaacgacagccaagcacagcttctgtga

SEQ ID NO: 507148 - DNA, 768 bp, Stenotrophomonas maltophilia
atgcggacacctggcgcaagagcagccgagcatggctcggctctacagaagacgcgctgcctgcttccttcttctggtgggtgcggaccgctggtccgcacgatgcatcaggcatccggacacctggcccaagagcagccaagcatggctcggctctacagaaggcgcgctgcctgcttacttcttctggtgggtgcggaccgttggtccgcacgatgcatcaggcatgcggacacctggcccaagagcagccgagcatggctcggctctacagaaggcgcgctacctgcttccttcttctggtgggtgcggaccgttggtccgcactgtgcatcaggcatgcggacacctggcgcaagagcagccgagcatggctcggctctacagaagacgcgctgcctgcttccttcttctggtgggtgcggaccgctggtccgcacgatgcatcaggcatccggacacctggcccaagagcagccaagcatggctcggctctacagaaggcgcgctgcctgcttacttcttctggtgggtgcggaccgttggtccgcacgatgcatcaggcatccggacacctggcccaagagcagccgagcatggctcggctctacagaaggcgcgctgccctaccagacatcatggtgctgctcctccgtctcatcgccaagcaggcgcatcagccacggtgctcccacccgctgcgggtacgccatcatcatccgcgcatgcatgttctgcagatcgcccagcaaccaggtctggttgtag

SEQ ID NO: 507149 - DNA, 669 bp, Stenotrophomonas maltophilia
atgggaatacgcctgcccacctgggtctggatcggcgcggtcgcgctctcgtgcgtggccggcatggtcaacgtggtcggcttcctcggtttcgagcaccaggcggtcagccacatgaccggcagtaccagccagctcggcatggcactggcccagggtgactggcgcgcggtcggccacctgtggggactgctgatcgcgttctcgctgggcgcaatgctcagcggcctgctgatccaggacagcaccctgcagctgggccgacgctacggcgtggcactggcgctggaatcggctcttttgctggtgtccattccgctgttcgaacggcaccagatctggggcgcactggccgccgccatggcctgcggcctgcagaatgcaatggccaccactttcagcggcgcggtggtgcgcaccacccacctcagcggcatgttcaccgacctcggcatcggcctgggccacctgctgcgcggactgccgttgcaggtgcgacgactgaccctcagcggcctgatcatcagcggcttcctcgccggcggcatcctcggcgcctggctgttcgtgcgctggcagtacgacgccctgctcgccccggccctgctcaccggcctgaccggactgggttatgtgctgtaccagcagtgggcgcgttggcggcattga

SEQ ID NO: 507150 - DNA, 1455 bp, Stenotrophomonas maltophilia
atgaacggcaacccaaccaaaggtaaagcaaaaaaaaggactttgcccaaaggcgtttacgaacgcggggttggaactgctcatccttatttccaagttcgtctgcgctccaagggccagaaccggagcttcaagttcccgtatgtgcctgtcgggcaagttccaactcttgaacggaaaacccgtcaagaagctttggatcaagcaacgttgtgtaaagccgaaggcgaagcgctttcgcactattacgatagaccgctcgaccaaatattcagcgaataccgacttagggagtgggtagaaggttggattcaagaagcgtgtgaacggaagggaaaagatggacaacccctgtctcacatgatcgaacgaaaaggcgcaaaagaagacgccaagcaaatccggcggctcatgttcattgctgatgcttacgcggaacaacaccaagatgatccaacaagaaaggtgtccatcttcgataagcgagtcaatgcgctaaccgaagccgattttaccggaaaacacggcctcttgaacctattgacaggacgtgcgccaaaaagacgcaatcccaaagttcctgagccaaagccggaagcatcagcagcgaccaagcgccgggcactcgccttgctgtcgatggtttgggcacacgtcaacgaggaatggagagacaagaaccagccgccctaccctcgcccctgggaggggttccaaatcaaggcaaagcagaagcctgggaatactcgcgcgctctccattaaagaactgagcaaggttgaacgggcgatggaacaacttcacccgaccaccagggccgctattcatttcttgcgctggactgctgcccgagcgggtgagatgaagaagctcgaatggcagcatgtcacctttgccaaggactcgaatgaattaggtgaattgctgtttgtcggaacgaagacgccccgaaagggggcttaccgggagcgtcgcattcctcttccggaagccgcagaagaagcattgcgcaccctatttaacggccagaaaccggagaagggtttggtcttccgttctccgtctgacccacacagtccgctatccagggactccgtataccaagcctttgttcgtgctgtgaatcgtgccggtgttccccacgctcgtttgcatgatctcaggcacacgcggaccaccgaactctccgcaaccgttgatgccacccaagccatgacgatcaccgggcactcggaccctaagatgttccgtcgctacgctcatacatcgaaggaaatcaatcctaagctcatgcaagccgacagggagcgcagaaagattgggggcaccaaaattcaggctccctctttgccgtctgatcctgcttcgctcgctgacgccctgaaatcgctttcacctaaggagcgtcgaaaaatagccctacaaatgctcagcgaggatcttgacaacgactga

SEQ ID NO: 507151 - DNA, 294 bp, Stenotrophomonas maltophilia
atgtattacattgcaaagccaaaatcgttcgcaatgacgatgctgacggctcttgtctgcttctccattcttccaatcgtcggagcgatgatttctctctcgattctgttcgtctacttcttcttctcgaacccgcgtcacatgcgtgaagttcctccgcacgcgaagttcttgcgtaagcagcaatggaagactgtgggtatttggtctgcggttctgtttggcgtcttctacatcttcttgctcggcattccgcagatgttcttgctgcgcggctggtcaatcttttcgtaa

SEQ ID NO: 507152 - DNA, 471 bp, Stenotrophomonas maltophilia
atgaagaagaaatggggccgcagccaaaaatatcacaagagaacccgtcacctatacgcgctcttcttcgacaacgagagagccgtttacatcggccaatccgtcgatttaaagaagcgctggcaacaacaccgttctgccgcagggaaatggaaccggcactttcgccccgtagaactcgcttcatatgagatgactcagcacgaagccgaacgcatggaagaattgtggcgctgcaaagccgtccagatgggctggcgcgtctacggcctgcctccgggcatcgtcatcaacccctatcggagagcgggtctgtggaatcgctggaaggccaggaagctggtgtggaagacggggatgacgccaatggcccctgcccgctttccgtggaagggtttaggcgtcggtctaggcttgatgatggcggcaagcaccgcccttccgtgggcggcgtcactggttagcgggtga

SEQ ID NO: 507153 - DNA, 2811 bp, Stenotrophomonas maltophilia
atgcaaaacgtaactgcgctaaaacagaacaagtctggggttcaaaatgcgattgcttacctgcaaaacgaggcgagcgaatctcaggcagtaagctactatcaaaaagatggttcaagtaattatgcagcttggggtggaaggctggccgaggctctaaatcttaaagacaagcccgtcaatgcgcacgatatgaccagactggcagaagggtttgctccggacgatggtaggagtttatgcgagaacgccggggaaaagccgaaactggaaatcaagaaagatcggaaaggcaatgtcgttcttgacgagagcggaaaaccgattgagctattgaagggcggacaccggattggctacgacattacgatgtctgcccccaaggacatctcaattgcattggtgatggcggatgaagaagaaagggctcgcatagtcgaagctcacaatgaggcctgcaaagccgctatgaactactacgagagcaaagttgagacgaggagagggaagggcggcaagaacgttatcggggtcaatggcctcatctactcgggtcacactcactttgcgaaccgcaatctagaagcccaattgcatactcatcatttggtgtatggagtagcacaaggagaagatgggaagtggggaacctatgatgctttcgaaatctacaatcacgctcgaactgctgacgaaatctataaggcgcatctttacagcaatatgcagactttgggctacaagttagagcgctataacgagctggatgatacgcagcgggaaacgggtaaggtcatcactcgaatagcgggcattgatgcggatgtgctcgaaaatgccagcagtcgtcgcaaagaaatcttggcgtatcagaaggaacacggggtcagcgcccaagcggcttgcatggcgactcggcagaacaaggacgaaccgtcgctagaagagatgttccagctttggaaagactggttgaagtcgcaagacggcgatttcattcgcaacacgaacgatttgaagaagatcgagcaatcagaactcttagccgcaaagacgcatgatcagatcatcgagcgacttcacgagaacgactctgtttttacgcatcgtgacgctgtgagagaaatcttccatgaaaattgcggattgatcgacgccaaagagatcgacgctgccgtttctcattttctacaaaaagaaggcctggtcgaagtcggggccaagcggctggcgaagggggatcaaggagagacttgggctaagcgcttcacggagagccgctatgcagcgcagtggatggcagacaaggaactggatgtgttgcacggcgcacagcgaagagtccaagaagaccatcacgagatcccgttttaccaggtggcgcagtgcatccgtcgcttccagaaggaagctggttttcagatctcagacgaacagcgactcatcgtgaaccatgtcacttcgaatcaaggcgtggtgttggttgaaggccttgctggcaccggaaagaccacaatcacgaagatcacgaatgcggcgttccaggggcagggcaagcggatgttcggcattgctgtgtcgaacgcagctgcaaagaagcttcaagaagagtccgggatggagtgcagctctgttgctcaactactagcggatgtagaccgagggaaggttcagttccatcgcaacgatgtcgtcgtgttagacgaatgcggcatggtctcaaccggtgaccttctggaaatcatggccttgacggaaacggctggggcaaaattaattttgcaaggagatgcagagcagttgcagcctattggggctggcagtggtatgcagttggtcagagacgtgatcggctctgagaagctcactgaaatccgccgtcagaaagcccaggaagatcttcaaattgccaaagcgttctatgtcaacgacggacatgatcggttggaaatcggcatgcggtctcacgcagagacgttgaagcatggattgaagattgtggaattgttggaggagcgagacagcctggacgaatacgagacgaagaaccagtcgattgccgcactggtcaaagacttcatggcgtgtaaggaagaccgcaaagacaagatcgtcttggctcatgctcgtgccgaagtccggcaattgaacaaaggcatccgagatgaactcagggcgttgggtgatatcgaccccaaggatatcatcgtgaaaacgatgcagaatgggaagttggaagatcgagagttgacgaaaggggatcgcattcgcttcaacgtcaaaaacaagaagcttggggtcatcaacgggaccgaggcccaggtcgagaagatcagtcaatccaggaacgatggcagcttgaacttccatgttgtgttggaagacggcagacggctgaacttcaacgaaaagtattacaactcgtttgatcatgcgtatgcgatgacggttcacaagtcacaagggcaaggggccaaggaagtgttccatctgggcaatattgggatgactgataacgcttctgcccttgttgcgttcactcgccttacgtccggcaaatacaagctctatctgaccagtgatgaaaaggaaaggctgcacactcggacagctctggaacgactgaaagagaacgtgttcgagacagggttgcgcagccaatccgacggtcggaaagatgcaatgcagcgactcagagaacatgcgattttgcttcgcaaacagcgggaagagcagaaccaggtccagcatgtcgttcaagcgacccaccagcccactcgccgagagtcaggcccttcgttcacccgctaa

SEQ ID NO: 507154 - DNA, 1521 bp, Stenotrophomonas maltophilia
atgcactatcgctcgctgtcagtcaaagagcagcagacagacccgcactctgtgctgattcaccctgagttggtcatctcaaagaagcaagccagtcgccacgtgctcgtagtgggaagtcctggctcaggcaagtcagtcatcatgagtcagaccatccgacacgcaatcaagaagaaccagaaatgctttatctatgacgtgaagggcacttacacgtccatttttcgacaacccatcatcgtctgcccgttcgaccagcgctcatacgtctgggatgtggcgaaagacgtggatacgccgattaaggctgaggtctttgccgcttcgatcatcaatgatccaggcaatgacaagggaaacttttggattctcgctgcccgatcattgttagtgggcgcaatcaaagagctgcaagccactaagcccttagcctggggttttgcagacctcgcagcgtctatcaaccgctcacaagaagagtgggtagtgaccatgatgacctggcacaaacaagccacaaatctagtagctgggggcggagagaccgtccagtcgatccaagccacgctcgcgggattgagccgcttgatcaacgacctcgccacggcttggccaaccgttgggaagcgccgttttgcgatgtcggaatgggtcaaagacggctacgaggggcgtaagcaagtcattgtgcaagcaggccccgacgcagggctgacagccgcttacatcggcgcgctcatcaactgcgcagtgcccgagatcctctctcccaacctccccgacaacgaagaaggccggttcttgggtttcttcttcgatgagctgacctctattgctcgcttgaacatcgatgggttgttcgagatgggtcgttcaaagggcgttgtggcttacatcggcttccaggacttcatgcaagttcaaagagtctatggagacaaagaagcagcgaccttgcagtcaatgatcggaacgcacatcgcttgccaaattcagccttccgaaacgcgcgacctgatttctcagcgttttggaaaaaagaaggtctcatggttcagtcatcaagacaaagccgttgtgcacgaagagagccgaaacgtcgtatccccacacgaactgaccgctgaactaggcccggtgaagagcaagaagatcaagccggacgggtttggcgttagagcaatcgtgtcaatctcaggctgggacccgatgctgcttctctttcctggccgcaaatacccgaaacgtcgagaggggcaagtggaagcaaagtggatgcgagaagtcgcgaagccaaacgcccctgcgcccaaaattgaagtcattgcgggcgacaatggtgagggttatagcgtcgagaccattaaagaagcagataccccggcgcaagaagtggcacccttctctgttgcttctattcttgaaaagcacttgaagcgcaacggcgcgagagacgtggtgcgggtcaaaattgataagccaccagccggggatgagaatccattcgggtttgattga

SEQ ID NO: 507155 - DNA, 690 bp, Stenotrophomonas maltophilia
atgaaaaagacggtattactaacttccctcgctcttctgccgattcccggcaacgcttctgtgctcacaacgggcttagatgcgccagctcgtagagccttggaggccatccagtgcgctggtctagccccaagacttctgcttatcgcagatatgacaaagcccaaggactcaccgcgccttcgggtcttagatctggacactgggaaaaccatcctcactgactatgttgctcatggggttggcagcggcacagacgtgcctcggcgcttctccaacgtcgaggggagccttgcgacaagcctcggcttgtatcgcatctcagagcgttaccagggagtctccgggtggtcccgtcgcttggacggcctgacgccgggatggaacacgaacgcacggcagagagcagtcgtgatgcacccagccacctatgttcgccctggacgggtggggcgttccgagggctgtccggctgtccggaacgaggtgttagtcagcttggagaagcaaggcctcacggatgccgtcctttggattgacggcggaaaagcagtggagacgtgttcaaccggtaaccccttaccgctgatttggaatcgacgtgccaaggaaaaccgatgtttggtcaacaacctgaaatggccttcgagttcttcctttgatcagcaaaagtggtttgcaaacaattga

SEQ ID NO: 507156 - DNA, 1836 bp, Stenotrophomonas maltophilia
atgactttactagaaagcacaaattttaaaccagccactcccgctggaacggacgatgagtcttctttgagactaagccaagtgctcaaactcgggttagccaataagaacgatagagatattaaaagaaaggtcgtcagtcaattgcttagaacgaaatccggaagacagaagctcggcctacttgttctatgcgggaagggagcgctcggcgctgagtatgctaatgctttcgatcaagtccttcgaaagggcgttcggttcggaatgtttgaaggtctggacatcgagcaaatcgaagccgggttgtttgatgtcggagggtcggaagttgatgcaagatcaaaattatgggatgacggttcaagaactttgtgccgatacgcgattcatatttggtctgctgcggcgagagatatggaatcaaagatgcgcaactattactgcgacaagctgattgagcacgacgaagaaatggcattcttacagcttaaatctcatcaagattacttgaacggaagagagagcatatacgacaaacgcattgttgatcttcaagagaaagtgcagcggatcaccgagcttttgctgagtgagccttatcgcgattcagcgcaaggtctaatctctatctatcagattctaagatccggagttcatctcaccacagatgataagggcacgaaaactcactactcgaaagacctcattaagctcttcgatttcatcggttatcaagacgagaacttctcgatttccgattacgaagaacgggaagcaagtggcctcattcatcctgaactgactcgcccaggctcactgttgattcgagccattggacactacacaagcgaattccagaagttaagttcggaacaacagacgagtttcactttgtcgctgcaaaacaagttcgatcagcttgcgcaaggcacgaagttggtctgctcggagaacgtcccgtggatgcttcacgaaaaaggcgacttccatccggaagaagtgatcagggggcagagcgtcactattgatttgaacgaggccgttcacggcgctgcttctaccattgtcaactcgctcgtgaaacagcgcgttttccgtctcattaaatctcgcggtgaaagacctcaatggtcgaagacagagacgaaagtcgtctgcatcatcgatgaagtccatttgatttgcggactcaaagacgctgaattcttctcgatttgcagaagcttagggatgacaatctttacgggaacccagggcgtggaatcgctaaggatagccttgggcagcaataatgctgccgatgcatttttgctccaaatgacgagcgatctggcatttaatgtctccgcagaaaccctggcttacattcaaaagaaatacggtaaagcaaagcttacttcttctgtccaccaagttcaaggcgttgactattcgtccagctacgatgatttggcaacttcgatcatgaatgacgtgaaccatccaaattatttgaatttgcgcgagatgcgcaagtatgaagtattaatgaataggaactcggcggcagataagctggacaggaatcccgacaagatcaactacgaacaagtggcactgatgaagaagaactcggctcgtgtgcagcacaaagagcaggaaatcgtcaaacaagagcagtttgctgcacacgtaggggttggagagccgttcgtcgggctgtatcgagcgggagttaaatgcattgactacatcactgttgatttcgtgcaatcgaaagatattgatgacttgtcaaaacctgaaactgtgcaatatttaaaagagtgtttacttgaatttggaggtatctaa

SEQ ID NO: 507157 - DNA, 1239 bp, Stenotrophomonas maltophilia
atgttggttggaaaatttacaagaaatgcagatgtaaggactttacaaaaagcggtagatcgatttgaagatgtaacgattgaccctaattcgattcacattgtcgagtccagatacctggacgttcctcttgaagaagaagaagccgcgattctggcaggggccaattacgattccgacacccgttgctttgtcgtgccagacaatctcgatttgcaagcgttcaagcactggttcccaagagtcgaggcggacctgttgcctcccaaagacactaagaactacttgacgaaaagcgggaggcctttggagtcctatcgacttccgcaggactcatccaccggtgttacatctctcgcaatgcctatcatgtatgccgcgttaccggcaattgcagcgctggctttctttgcgttccaagtcaccggatctctttttctgagcattccgcttttgtttctgtcagctccctatttactcactatctatcaaagggcttgggacggtcagctcgaaatgatgaagtcagcggttcttcttttgctgatgccgtatggcgtcgctacggcatcagcgctgggtgggtcagcgtctctttcaatgattgggtttttatcgacagcatgcatcgcctgggttttcctcagcgtcttaccgtttatcttcggaaagacgaacgacatggcttttctgagagttcgacggctttggatgtcggtcagcgttggtgtgatgatcaatctgactgctgtcttgtcggcctctgctttcgcaatgggaggtttcctcggctccgtcatgtgctccttcatttttggtctgacatctctctacgcgctctactactgcaagcagcaatccaacgtgcgttcagtgaatcttgcgaatttcagcaatgacaattctatgagcagattggggtcagagcgagaagcattccaaattcaaaaagctcggcaagcgaaagcttcggtggaagaccagtcgctgcgcattcaaatcggtcaaagcaaaggcatcgtatctcaaaaaggctatgcgaattcccctgcctccggcgtaagcatcaatttcagcgtcaacgatgcgggacgaggggccgtcaccacaggcccgactggttctggtaagtcagttgttttacacaacattgtctacgctgtgcttgtgaacaacactacctactctttaacgcatcaagaaaatccaaattctcaaaacaatggaggtgaacaatga

SEQ ID NO: 507158 - DNA, 342 bp, Stenotrophomonas maltophilia
  misc_feature (217)..(226): n is a, c, g, or t
atgattgaaagttcgaaaaaaagaattcacttcggatcaaagttcttgacgctccacggccggttgctaattgctagcccgacagaatttcttgggaaaagaaaggatatggatggctcagtagcgcagtctttttactacttgcagcaagatcgctaccttcctactgataaaaagaacgctgatatttgggagcgcgaccaattgttggctaccnnnnnnnnnntcgagcggttgttctcgttctcctgttctccctcgcgcttggtatcacaggatctttcgccaagaaagttgtcgccggaacaacgcccggatctggcctgtcgattcagtcgctag

SEQ ID NO: 507159 - DNA, 849 bp, Stenotrophomonas maltophilia
atgaatacagaaacaagagaagaacgcatcaagcgactgatgagagagcgggaagaaggaacgctgactgagaagcctgcgcccacccgaattgaagaaaaatcggggaagcccgtccaggaacagcaggattgggaagaagagtctcgcatcgtttctgcaaagaacagagagcgcatcaagaagagcgctgagctggctgccgtccaagcaaaagcagcaactgagttggcagaaaaaggcgctaagagtgctatgaaatctctacatgcgttcaagggaaaggccgaagccaaacttgaagagcagaaagaaaagagacgactgaaacgcgaagagcaagaggcgataaagggtgcagacgttgaagctctggcaaccaaaagcagtcgagagccattagcgccaaacagcagtgcgcagcggcagacacggacaaagttttggatgctgtgcagtattccagtgactctcagcatcattctgaccggaatttggttactcaaagctcgcgacacggttgaagccaccaaaggttcatcgacagagcaaccaaggacagagcgtgcagccgagccaattcaagtgctcactccggttgcagcagctcttccaaggcttgaagaaccgccacaatcgttgccgccgcttcctcagcaaccaagtgtagaagaagattttgtattggaagcaccaactacggtcgctcagaaaggaccggaaacaaagcgaccagttatgagaagtgagcgcgttccaaaagcaaaaaccgtggataagagcgcagagcccgcgaaaagagaatggcagaaagacgcggctaaaaagctggaagactaccaattttag

SEQ ID NO: 507160 - DNA, 672 bp, Stenotrophomonas maltophilia
atgaaatcaaaattattagtcacatccatcattgccgcccttgctttgagtgcgtgcgccacggttccaggtggctttcaagcggacaaaggaagagttgccaaggcgtcaatcgtcggttgcgcaggaggcgctctattagccaagttcactggcaacagtgacaacgctctcagagcttgcgcgggtggcgctgtcgttgctggcgtcgcgtcttattcggctcagctcaaagaagccaaagccgtcgaagaagccgcaaggcgcgcgggcttgcaagcgcaagtcaagacagaagaagtagtccagggtagtgagcgcaagagcgagttaaaggaacttcgcttgcaatacgaccccaacgatcttcgcaacccatcggctgagacgaacgcagtcttcgacaaacttgcgagcttggtcaaaaacaagaagccaaactcgaaattggaagttgagttgaaaggatctgacaaggctatgtgcttgaagcccgctgagcttttgagaagcagaggagtcgggttgcttgaccttggggcttacgcgacaccacccaaaacgaccgttccaggcgcggtgatcggtgatgcacaaatgccgcatgcaaccatctcagccaactgcacgggagtgcacgagattgtcatcagcccaatcaccagcttgtaa

SEQ ID NO: 507161 - DNA, 444 bp, Stenotrophomonas maltophilia
gtgagcaagtggatgttgatggccgcgcttgtcgttgcacctttggccgcgcattcggcagagcctgacccgctgtcttgcgcagctctgaccgcaggcaagagtaagaacgacgaagagaacatcaagattctggctcgtgcaatccccgaggcgtcggccaagcatctgaccgatggcgtgcggaaagagtggttgaagaggggcgcaaacgaatacgcggccttctccgcttcactcgactactacgcgaaaacggctctgccccttgccgatgaagtgaccgctcagttcggtctcattgcccagcaggaagggtcttacgtcaacgcagtgaaggtctactgcaaagacaagaagatcaacatctctgagtttttccgtcgcgcgtttgatgcagcgctggacgacaagttgaaagaactgccagacgacaacgattga

SEQ ID NO: 507162 - DNA, 387 bp, Stenotrophomonas maltophilia
gtggaaaagaccaagaagaaaaagcggttaggcatgtggaaccgtctcgcaatcgtgggggcgttcctggcgatttttgcttggccggttgctcttgccttcatgtccgagtcgaagcttgcggaataccgaacctcagacatgcagcgctgcaaagagcggctgattggttcaggggaaagcagtcattcggaagcgatacgcacctgtctcgatgagaacgcgaagcagcaagacgatgatcttgcgtatgtcttcaaagaacaattacccggttggatgattctctacgcattggcttacgctttcgcgtatctgttgattttggcaatcgtcaagacgtgtaagtgggtgatcgctggtcgaaatcaggagaacgaatcgtga

SEQ ID NO: 507163 - DNA, 837 bp, Stenotrophomonas maltophilia
gtgcgctctatcatcttcggggccgtaggcctggcactagcgctggctggttgtcagcaggaggaggcgtctccgcgctccgcgccgcaaggcacaacagccaagcccactcagccacccatcgtgctcacccaggaggcttgggcagggaaggcgttcgacggcaaagaggttcgactcaacacgccagaacgcttctatcaagagatcatcagtgtccgcaacggggtgagcaagaacgagttcgagacgaccgctgcatacgagaagcgtaaggcagagttggctctacccacaggcatcagcggcgatgcggtctacctcttcgagtctcccaatcgcgtcaagtatgacgccgaccagggcgcgtatgtctccgagaagacgttctgcacggactacgaattttcggatctgaagaacgttctggcgtgtcgcctcagggaagtcgagggcaagccactggtgaacaagagagatgtttacggtcaagttcagctcttcgagaagcgaaccgacacgcagtattcgatcctcatgcccgtcgcccaggttcgcaaatttgccgcgcgcacgtctcaatacgcgagctatgaattgccgggtaagtgcccggtcccggtcgaggaggcgaggcaaatcgggccggtggccatcgcttatggcgtcatgttcactacgccggatttcgccaaggcgacgatggatctgcacacgtatccggagtatcggaacgagtggtatgtagaccaaattggcgtttacggaaaggtggtttcgctcgtttgctacaccgacgatcaaacgaagcgcatcctttatcagcgcaagttttga

SEQ ID NO: 507164 - DNA, 834 bp, Stenotrophomonas maltophilia
atggctgaccgcaccttccgcttcccagttgggccggctcatggtcgatgcaatatatgtgggcagcaacgagacttgacggagaaccatgttccgcccaagtcttggagtccaggtagagcggttcggatttggagtattttggattcggttgcacaagacgggcctggggagttcgaaaagcggtcctatggggttccttttcgaacgctgtgtgccgattgcaacggaaatattcttcaaccttacgacagagaacttgcttctctgaccaatcagcttgctaaggcaattggtcagaaaagagaggggattccgttttatggttcggcactcgtaaggcctaggcgtgttgcgcttggagttctcgctcatctgtgttcggtgggtcttgatagatatagtgagcacctatccagctatgttttaggtattaatcagtcattgttggatgacgtaaagatctactactggccttatctccattctccaatgaccatcgtccgtgactatcgggtgttcgatttcttctcaaagaatctctccaacattttcatcctgaaagcctatcctgtcgcattcgcaatagctattggtggtggaaaatcatttttggacgacgcggatgttcgcaattttgatgagtatgcaagcctgggcgtcgatgacgaagcgctgatgcattttcagttgttcagaatgccatcgcaacgatggcctgagtgcggcgacgaaaacagcatgctagcccttgactctgcatcagccttcaacgtaacaggtaaacgcacaaacagcgatgacatagtgaccatctggcaccagccccagtaa

SEQ ID NO: 507165 - DNA, 339 bp, Stenotrophomonas maltophilia
atgatctgggagaccgcagaaggcaaggtcgattggcatttctcagagccgccaagagttcttactgaggggactgatttccttatcccgtcttacgtcacatgtaagtataaggataagcaaaaaattgcagtctatgagcgccgattcaagcatttcacagatgtggacgaatggttctggacaagcatgaatgttttcctgatgctcgataacggggatcgcgtgatttatgaatcggaagacgcggataacaagatcaacagccttttcaatgtggcgaaagacaatgcttccaacgtcaacaacatcatcaaaggacttctcgaagcagattga

SEQ ID NO: 507166 - DNA, 141 bp, Stenotrophomonas maltophilia
atgaagaagtatccgccctcagcgacactggaaattggaagtgagatctggaaggaagcccgcatttgggaagagcatgaaaggatcaggctctctattccgcaagggaagatcgaaaaacccacgggtcgtaaaatgtaa

SEQ ID NO: 507167 - DNA, 369 bp, Stenotrophomonas maltophilia
atgaaaaggcactcactcagcatcgtcaaagagctggtcatcgcgcatcccgaattctcagctcagacctttgttctcagctatcttccacaccaaggcgtcgtctttaaggaatacgacagtgtgagcgaagcagttgaagagatggtctatgaagagacaaagcgcgtcattcagacgagccagtcaaaagtagcagttctggtcgaacgcaatacaggcgaccacctggtaaccgacgaggaactcttagaagcgttcgatgcgtttgctgattacagccaaaaattcggtcggaaagagattgagacggtggtcaattttgctttccagattatgaacggagattacaaaaacgtttgggaatag

SEQ ID NO: 507168 - DNA, 450 bp, Stenotrophomonas maltophilia
atgagaaatatcattgcatcccaaaaattaacagaatcccaaacaatcgttatcgttgagatggttttaaagaagaatcgatgggcgggcaggcgaggggctgtcaagctcctggtcactgatcaagaaggcatcgacaacttgtatgaggtggaaaagattatcggtaatccgcactgccttgaaattgactcgttctgcttcgacttggaaaaggtcggccctggaagcgaatacaatgaaaaactcgctgagatggaggctcagcttgaagagatcatctcaatgcaggctagggagaaccacgaactgaaaaaattcggtcaacgcagtggatacgattcacaattggcgtataggagattgagtgtggctgatatggtggtgctgttgttaaagaaaggcgcttttaaaaaactggcgtctgaaagcatgaggggtcacttatga

SEQ ID NO: 507169 - DNA, 486 bp, Stenotrophomonas maltophilia
atgagagacattaccaaacgccctaaacccccagtcatggccgaaatcaaacgccgcctttccgtctgtctgccgcttgctctcgttcgaatcctgaacgaagaacaaaaccgagtcgagattgctgtcaaagacgcgctcaaccaactcgattccagccttgggctcgaatcggtgcaactcgatagctctgaacgcttcgcaatcaagcaagagccaatcgtcatcgcgaaagagaacgaaggcagctacttcgttcgcgatgcgtgctccatttatgccgataagacaagagtatcaggcgttgaagaaattgttctttacctgatgttctccaagctcagaatctttgcgcccgatttggcggcggacattcgaatgtttgagcgaaaaaggctgactaagaaagagtgtatgttgctgtctgagcgtcaaagtcagctggaaacggagctgcgatacatccgtcagcggctagcccagtag

SEQ ID NO: 507170 - DNA, 402 bp, Stenotrophomonas maltophilia
atggaaagaaatatacaacccaaagatgagaaattaaaccgcgtggctccaaatcctcgcgtcagctttcaactcaacgaagatcttcgcgattggagcgcagaagccgagtgccgcaaagcaaagctgcaacgacaaatcattcagcactatttgaacaacttcgatgacgaagaacttcggcttgaattgcatttggctgaatcgaaagagtcttacgaagatgaccagaatcagactggcgcatggttgcaaatgacgcggatctcgaaagaagaccaggctgcaattcgcttgcgcgcggatgcgcttgatctttcgagaaccaatatggttcggctgatgatgcaagccgccgtcaagcgttggaaagagcagagcgagagcagctcaattttttga

SEQ ID NO: 507171 - DNA, 741 bp, Stenotrophomonas maltophilia
atggcaaagacctggattagacgaagtttaagagagcaacaaagaggcttgtgtgcgtattgcgatgagccgcttcctggaagagcgaaaagctctctgctcatccctgtgcaggttggcgggtcaaaggacgcgggcattgttctcgcgtgtaacgagtgcctcggaagcaagagtcagtcagacctgatgggctggctcgctacgccctttcatcgagtagttccgaagaacttgcctgcgttgctggtgaagcgcctggaagccgctgagcaagcccagaaccatcaactgccggtggcttactcagcgcacagaaaggcggtcagaaaggcgctggaagagcgttggaagagcccgcgagtgagagtgagggtcgaagagggaaccttgatcttcgatagggaacaacacgggcgcggagccaccttggctgtcttgcgaagccagttcgcaggggtcgttgaggaacgggctggtgaagtgagggtgcgtgtgcctgtgcaacacctggaaagagcaaagggcgtgcttgcgagcctgaattgttgggtagttggactacccacaagtagctccttggctgggttgaagcgcgctaagaagaagacgccaatgcggggaattagcaagcgccagcggcaacagatgctgatgcttagggatgcagatcagctgacgacgctggggcgggtggatgtagaactggcgttgctaagacatcgactgaggagtcggtaa

SEQ ID NO: 507172 - DNA, 288 bp, Stenotrophomonas maltophilia
atgtctgataaggaatacgtcaagacttacttgaatgcagcaaaatctgtcctttcttcacccaacgggactgctcgtctcgtgtctggattcagcacgttgaaaaatggtgctgatgcaggagtgacccctagccagatgcgcgcgatgtttccggatctgaggaagtatagcgacccggtcattgagggctttatcgagatcggtagcgatctggtcgaaggcaaaaccatcataccgagtgcggtctttgaagatcccgaacccaacgtcgctgttgctcagtga

SEQ ID NO: 507173 - DNA, 372 bp, Stenotrophomonas maltophilia
atgaccgctcttttccaagaaatgccaatccagcgactgagttgctcgctccctagtgtccgactacacgccgacctggacgccgagctgagggcactggcagcgcttcaacagaagccattggttcaagtcatgcgcaacattctctatcactacttgcagttggaggaagaattgatgcgattggaaatcgaagatgctcccgttcgacactctgccaagactgaccaggtgatgagccagaaggttagcgtgacaaaggaagtcaaaggcgcttttattcagcgtgcccaggttctctaccttccacagacaacaatgctacgaatgatttttgaagccggggtggagcggtggaagcgaacgctatga

SEQ ID NO: 507174 - DNA, 387 bp, Stenotrophomonas maltophilia
atgaacgcgattgcacaacaaacatcttccaagcactacgtcagcgaaagaaaaattatcagcgatttgcacgtgttgtttaacgcttcatcagcgggaggcgcacgagtttcagacaaggcagtggtatacagcgcagaagccttcgcagacttcttcgactaccgcgcattcggagacatgcatcaagccgtttacagtcaagagctggaaggcgtgcagatcttcaaaggcttgcaaatgggtaaataccgattcttctacgtctcacgagacagcaacgcggtctatggcttctactctgctcacgacaagttctttcaagaactcatgcgtgaggaaagagcgctgaacaaccactacttcctcgaagagcgtgccgcatga

SEQ ID NO: 507175 - DNA, 339 bp, Stenotrophomonas maltophilia
atgaacaccactactttcgcactcaacgttgccgataacttttggccccattttgcagacgctctgatgttcgcttttatagcgatttcagccctcacgctgctcatcgtgctctacaaagacggctcccataagaggctctctcagggcttcctaaaagcccgcgaagtgtcctccatgattcgtcctggacaacgttacgaaggcactgaccatagcgtgcactacatcgcaacagaccgccgaaggccgtttttagtggtcactaagcacgctgaattcctatgcgactttgaccgccttgctcgtttttacgcaggcgagaggttcttcttatga

SEQ ID NO: 507176 - DNA, 402 bp, Stenotrophomonas maltophilia
atggcagaaaagaagaccaatctcgacaatctcgcagctcagaagcagaagcttctggaagaactgcgcaagatcgaggaacaggaaaacaaggaacgtcaagcagaggccgaaagcgcccacagcaacatcgtgagcctgttggaagatttcgctgagttcttcgattcgcgtcagcgcgctgaaatcgcgcgttacgtggtatccggttccactcgtggtcgtaagtccgtcagcaatcagggcagcaagggtcctgtggctgcaaagttcaagctgccgaatggcgagacttggagcgggcgcggtcgcactcccacggcattcgtagaatgggaaaagtctgacgcggcgaagaagtggcgcgaagcgaacccggagcagaagtggccggctgcataa

SEQ ID NO: 507177 - DNA, 516 bp, Stenotrophomonas maltophilia
atgaaaaaaatgaaagacctttctgccgcgctcaacgtcgtgcaccagagcagatacgacgcagtgatgcatgagagcctagaagacgtgttgccaggagataagttgggggcaggggacgagtcagggcggaagacctatttccagttcgaagaaggcgctccgtcccggaggaatgcgcacactggtaagagaatccacttagcactggggattcctgggtatctgggctcaaagccttctcttcacgactaccgaaccgacgatgggaagcgagcaaatcggatgatgatgactgtcccacctaagctccgcgaacagctccgaaagctctcgggcgctgagttcgactacgaggtgcccattgcaacttcgatcattgctcttgcgtcttatgccgctcaacggcttatggatgaacgcaagtgcttgacggtaaaggcttgggaggacgaaaggaagagccaaaggcagctttataggcgagtcgtgaagaagcggaatggacgaaattga

SEQ ID NO: 507178 - DNA, 579 bp, Stenotrophomonas maltophilia
atgaccgtccgcttatgcctcctttcggccaagggtggggtagggcgcactacccacagtctcgctctcgctagctacttcgctgaggtggaaaagaaacgcgttctcctgatcgaccaagatccccaaggcagcgccttggcttggtccgccctggctgatgaaacgccctttactgtcgctcgctcgcgtagcaagggcttcgatgtggaaatcctcgatacgcctccgcgcctcaacgacaacgaagtccttccggacgctgatctctacatcgtccccaccgccttggatgccgtttcatatgttgtgttcttgcgcacgattgacctcttaaagcggaaaaagaagcgcttcatcgtcgttgcgaatagggtcaacaaagcgagagcagaacatagagagcggttggcaagcagcgagctggcgggagcagtcgtcattcctgaccgcgcaggcttttcgcgtgcctacgcagaaggctcaaccatttataaaatcagaggaaggggggttcgacacgtccagttcgacacgctctctattgtcaaaaacatcaagtcggaggtgaacttatga

SEQ ID NO: 507179 - DNA, 288 bp, Stenotrophomonas maltophilia
atgacgaaattcaaagaaaagcttgtcgagattctcactcaggcggcatctattgcgataggtcttattctctttgtcgcatttgtgatcggcgtccccattgccttgttttcaatggcggtgttggtcgttctgtgtcgatacgtcctgatttggcaccaggaatttttaaggatgggtttgatggttggtcttgcccttgggttgttagcattcttcgtttttgtgtttaattcagttctgagtgcctctaaaaaggagaatgaaaataaaggaggtgactcatga

SEQ ID NO: 507180 - DNA, 441 bp, Stenotrophomonas maltophilia
atgaactactcatatctgctactgcccgctgtgcagaccaaacgattagacgtagtgaaagcagccgttggaaccgctgtattgcatcgtcctcagcatgacttcatcaatgacagcgattcaaggggcgtcagcgctctggcactcgcaagcttgctatggagccaagagccggatgcaaagacacgggaggagttggacgcgatcacggcgttcctgctcgacttcaaagcgaatccatttcaagaagtgggcgtgacggtggtcaagcggtatcacgcgtggagcggacggaaagagttcgaaagacggcctgggaagaccatcgcagaaatctgcggcggcaggattccgcccgcattaaaggcctacatcaacgccgatgcggagcgcgttccggtcccagggaagcgcattgaagagcaaaaggaggccgcgtga

SEQ ID NO: 507181 - DNA, 183 bp, Stenotrophomonas maltophilia
atgaagttggaacatttatacagaaacgaagccgcattctctctcgaagacaacgcttttgcgttcttcaagcaatcgcagaagtcgaagcgcgatgaacgtaggagcttgaagcagcgctatgaccgaaaagcgcctaaggaaaacgctctggatgcacttgtgcagggggtgtgggaatga

SEQ ID NO: 507182 - DNA, 1602 bp, Stenotrophomonas maltophilia
atgaaaagacaagaagggtattcactgacggaactgttcattgcagcaggtatcgttagtgccatgggcgctgtcgcattcgtgctctaccagccggttaaagcgcgcgcacagacgcgcgcggagagcgagcgactcaacaatctgtctagcgaaatccagcaagccttcggcgttattggaagctacgaaggcgttagcagcgagcgtctaatagaagagcgcttcatcaagtcggagcaaatccaggacggcaaaatcagaaatgcgtggggaggcgtggttgatgcacagcctttcggcatccgccatttcggagacgcttttaccctcgactacacgagcgtcagcgctacgagctgctcagatttcgtctctgccaacgcgagcaatacttacgatgtcgtgatcgacggcacaagcatcgtcaagaacaacaacgatcggttggatgttgctgctctgacaaaggcgtgcgcgagtgctcgcgttgtgagctttgtctatcacaacgagaatattgggcagttcattgccacgcctttgaaccttcctcagcgcgatcagacggagaagaatccagcccaaagtcctggggtcgtgacgccaggggcggtgacggatggacagcaagccacaccggtccatccatacgttccaagctgcggcgcgaagccagccctgccgtcgtgcccaggcgttagcaaccagacgtgggaagccactgtttttccccagtgctggaccttggttggctcttgcgccctacccgtcgccccaagcccggctcctgttgtgccggcgctccccgtagtggttcctcttcctactcttcctcctgcacagccagcgctttgcagcgcttcttctgagtctcaacctgcaagctgtctcgctggcagctatggcaatgcaacttcaacgcgtcaaaagacgtgccccgaagcgtggggtcagccggtgtggaccacgtgggagaccgacaggagcagctgtcaaagctgtccaggtagcagtcaggaagagagctaccaaaccgtcacgagaagcggctcgtgcccgtccggtatgaccggttcgatgacgtatcagacgcggcttaaaggcactcggaacgtctcttatgcctgcccggcaggccaagtcactgcaccctccccctcttacacagagtgggcttgggcggagacgggagaggtgctttcgaaagatgagagtgcgtgcaaagcggaaggcttgacggttgccagcggaaaactcttcatctcaaacacgaacacgactcgaaccatccaagaaggcttggtcctggcgcagaacagcgactggacaacgcttgcgagtgtgtcgagcgactggccgcaatcgtatggaccagttcgagcttgggcaaacgtgagcttcactttcaacggggtcacccagggcttctaccaagccgcaaacgggaatacgccgagcccaggcaactccatcaactattcggaaatccgaacgctgaacttcaacggaaaactggtggacatcgatttccgaaccttcggaacctcagacggcgctgtgatcaacggcggaattcgccttctttaccgggttcgctga

SEQ ID NO: 507183 - DNA, 1770 bp, Stenotrophomonas maltophilia
atgaaaaacaaattagcgttatccggtatcgcgttggcgatccttttatccatgtctgcggcgaacgcagcagaacccatcgaaattggtgaagacgtgcgagcgtgtctggatggcatctctatcggaacaaatgccaagagcgatatcatttgcgcgcagaatggcggtatagccatcggaaaaaacgtcaagtcgaataatggcgtcgttattgggacgaattctagccagagctacggcagtaatggcaacatcatcggaacacaatctgttggtctagcagataacgtcaacattcttggaaacgagaacaatgcgacgggggcaaacgtgctcggcaatcgaaacagggatgtgcggggaaatatcgtcggtaacgacaataagacgatcatgacgaatagcttgatggatgatccaaatatttacggaaatcgcaacgtcatcacatccgacaatgatggagcagccacaagcgtttcaaccgcaatgctaggcaacgacaacagcgtcaagggaagcaacaacgttgtggtgggcaacaagaatataatcgatgccaacggcgtttctgcgtcggattccgtcttcgtcggaagcagcatttacacgaacaatgcgagcggtcagatcaaaaacggcgtcgccattggctacaacgctggcattcaagggaaccgcagtatagcgttgggttcaggcgcaaccgctactgctgacgactgcactgccatcggttccggtgcgatgtgcgtggagtcgaagaccaccgcgtttggcgacactcgactgacgaacattgcgaacggcatcagagacaccgacgccgcagccatgggtcagctcacgggggtggcgcgaatcattggtggcggaacacgctttgagaacggaaacctggtcacacccacgtggtatttcagagacaacagcacacacacaacgatcagcagtgcactggacaacctggacgaacgaatcgagagagcaggtaacggtggtgccggacaagacggctactcagcgtatgagcttgcgcagcaatacggctatgaaggcaccgaacgcgaatggctcgccagcttaaagggtgacaaaggagacaagggagatcctggcgttgccggtgctgctggtgagaacggtcaaccaggaaaagacggtcaagacggcatgagcggtggtgccggaagcaaggtgactgccggaaacaacgttgaagtcactgagagcgaagacggaactcagtctgtcgcactgactgacaacgtggagctgtcggaacaaggcagcgtaaaagtgggcgctaccaccgtttccaacggcggtgtgacggttaaagatggtccatcgttgacagctaacggcatcgatgcgggcaatcaacgagtgtcaaacgtggcggctggccgcatcgaacaaggttcgcaagatgcagtcaacggcggacagatctacgatctcagaaacgaactgaacgacaaatgggaagcgacgaatcgccgctttgacggcatcgaaaagaggttgaacggcttgggtgctcagactgccgcaatgagcatgatggctgcttctggtgcaggcttgccggtcggcaaggtagccatccaagccggagtgggctttaacggtggagcgtcggcgatggcggtaggctaccgcgttcgcacaagcgaaaaagtgagcttctcagcggggcttagcttcggcggcaacggaaccaagcctatgggtggggtgggcatgagcatcattcttgactga

SEQ ID NO: 507184 - DNA, 729 bp, Stenotrophomonas maltophilia
atgggcagccaacctcttcccccgcagtcctccccaagtttttgctcccccgctcttgcccttccgcttttccccggtagaagtttaggaaagccccaatcctcaacccaaccggagccccctatgcccctcactcccgccacgcccagccgctcaaaaaagttttcgccagcccccgtagcctgcctccccacccatccagctccccacctctccaccgacgccgcaccccctgtctcagaaatcggggaccgccgtttcccccacgccccagccctgtcccagttcgttttagtcaagcggaggccagcatgggatcgcgtgagtggttgggttcagtcacgctgctcgggtgttctgaaagccctgcctccatctgttttagtcaactttgctcgggggttctggaggacgactgcaggggctattggttttggttcgggtgcctggaaagcgttgaccccatccgttttagtcaagcgagtggcctcggttgaagttcactgccccccggtattcgatcagcggttggggggccagtgctggtctggaaatgtttcgggcaagcgggctctgggttttggatcggcggtcgctggggaggttcgacaggctcggcaaagcgttttagtcaaatctttttcaaactcctgcaacgccccactgcccctgttctgcgatccggttgctgggcctgcgttgaacggctggggggtgttccgtgtttga

SEQ ID NO: 507185 - DNA, 543 bp, Stenotrophomonas maltophilia
atgaataaagcgaattacgcaaatgcaattgaaacgaccactacttggttgacccctaagcgcatcattgaagccttggggccttttgatcttgatccttgcactcctgcggaggggatgccctggcgcaccgccgaagagatgtggacgccggtagaagacggtctggaaacgccttggccgcaggataagttcatctggcacaacccgccgtatgggcgaggtcaggaagcctggatggaaaaggcctcgacgcatggcaataacatcacgcttgtctttgcacgcaccgacacgcactggatgcaccgctttgtcttcaaccattggaagtgccgagccgtcctctttacggaaggccgtttgaagttctgcaattcgaagggaattgaagggcaagcctctcccgctggttccgtttttatagcatacggaaacgaggcggagaagcgattggaaaaggcttggcggaacggcgatatcgaagggcacttcttgtccctcaaccgaatgagtcagatgcggcttgacttggatctttaa

SEQ ID NO: 507186 - DNA, 1185 bp, Stenotrophomonas maltophilia
atgagtaaaagtatagaaagtttctttaacgatgaagagaattcggcgtcagcgaaagaacgcgccgtcgcgctggataatttgaaattgaattcaacaagtggcgagataagcctttacgacaaacttgaaagtttaggagtgttagagaggcatctaagacaacagcacgagaaatccggagatcccctttccattcatcactctgattccccatacgaaataaagaggctgcatgaaatagtatttgaacaacaaatcaaagccgaagacattgatgaagaattcatttctcacatggttctcgttgacaaaagcagtccgaacggacatagcgacaacgactatcttcgcgatgagcaagtcaatcccgaagccaaacggttgttgattgagttgggagctgacgcggataaagccgaacgtttagatcttgatcatctgacatatcgactgaacaatcacatcaaggaaaccaatgatttaagagacagtgggaaagcggccgactacgacgtagagcttatcgattcattgattcacaaaggtgcggatgtcaacggcaaatatcatagcaaggatcacgatcgtatccataaaaaatactatgaatatttagagaatcatcggagttatccaattgctcacgacatcagagatcgggatgttttcgagcatttcattgaaaaacacgtgactgacctggactttacagacgaagagtccccgctcacgcatgccgtcgctcacaatgatctctcaaaggttcaatacttgattgataaaggtgcgagcatcgatccgagtccgaaatatcacgaccggggcatggctttttggtgcaatagcgtggaaatggtcgaattgcttggcaattcaggtttcgacttcaatcaaacagatgacagattcagcgctcctccgctgacagaagtgttcgggagagttagtgacaatcgagacaatcatgattcgatagaggcagttaaaaacattgcaattgccgaaaaaatgattcaattcggtgcagatatcaacaagccccagaacgactatcccagtgcgacggaaatgattaatcgtctagacttaaatgatcacttcaaagaacatctcaaagcgccaactcttgaagcgtcaagctctcaaagaaagcaagaattcaaacgcggctttgccctataa

SEQ ID NO: 507187 - DNA, 906 bp, Stenotrophomonas maltophilia
atgagtcaggaacaagacgaacgagcagcgaagttcattgccaatgcagtggcatacgtgacgaatgagccgcttgttttcgcacaatacgaaagcttgcatccagagttgttcccaacactctactctgacagtcaagccgaatttgctaagcgaatggacgatgttttagagcacatcggtggaccgcccaggctgtatcttcttgacgttgacaagtcaccaccgcctgcggacgtgtatccccaagctgcgcttcaagaagtgatagaagtgttcagccgcgcccgcaaatcggtgttgcgagcccatctctttatgacgggatcgactcttctgtccaaaaatcctgagatgatggagcttggaggagcggagcgagagaagctctttatcgtccacacgaacaaggcgttttgggagcacgcggaagcggcttacatccgcttgttctcgttttgggaccgaatcggtcaagtcctggatttcgcgtttttcaatatccgaaagttcgaccacaacggcttttattcggtcatggaaaagattgcggccaacgttgcgccgatgaacaaggatctcgctggcggagcggcgtggaagaggttgcgtaagttccaaacctcagaaaaggaagacggtttgaagtggcttttgctgagacgaaacctgatcattcacagcttgcatcttcacccggtcatcgaaagtgatgaggaggacgatttgttcaaatctcaatacaatcacttggaaaaatcgcatcgcgagaagttgcgaccgaaagatccgcagggagaagccgaattgcttgttgggcagcttcgcgcggcaacgacgctcttcgatgatgtgattcggttgttgaaattcacgccttcgcagcacatgagctaccgccgatga

SEQ ID NO: 507188 - DNA, 156 bp, Stenotrophomonas maltophilia
atgcagtcgcaggaagtctgggagaaggtctgggagaagtatgatgtgctgtctcagttgagagagcagtttgcgttgtctcagcacctcgactcaactgtcaccaagatctcggcgacacgctcgcagagccctgtaaaaacggaacgcttctaa

SEQ ID NO: 507189 - DNA, 1671 bp, Stenotrophomonas maltophilia
atggcgcttgaacattgcataggaccggtgtgcttcttccacctggacccggcttcaccgaagatcttcggatttgcagagttgctggcgggactggctctaatagtcgtcgcttggacaattgctgattaccgtttcaaatttcgcatcgcaactgcacctattccagtgatgcgcatttcgtcgtggaccgtgataggggtctccgctcttgcgctgctgacagacctgtggcgagcagaaggatggctcgttccaagaggtccaattcttacacccgctatgtggcagttcctactcgctttcgcgttcctcctgacatttttcacttggatgtggttcgcagttatccgtccccccgtttttgggaagaagaacgctgagcattatgccaacgccgtatatcgagtgatagcgagcgggtcagcacaggaactctcagttgtggctgatgagatgtcttactctatgaaagccatcgtgcagcacgccaataactacaccgacgagaacgctcgggcgctggttcttcatcgtcagagcatggagcaacgtggaaagacagacagcgggatgtttgcggacgacatcttgtcttttattgcatatccgcgaatgaccagggctattctgctcgaatcgcctgcgacagcggttgagctgttcctaagtattggaaagcttcaaaaatttggagtccaggcgggcatctttggcaggaatctgcttgccgaagggctagctcatcatgattcgccttttttccacgagcaagatgaatatgactcagggttaatggcgaatattaaggcgctgtcaggatcaatgttcggctcgcatgatgtggttgccggtcagaaaattctgttcgatgttgaacaccgccacaactggtcgcattcgcagtggcaggtctattgcggcttggttttgatgacatacagtgactacgtgcgtaagcggatcaaggaccactcgtatgttctccacagagcctttggtcacatcgaagatgccatcgaagatctgtcgcaaagcaatttcgaagcaaagatggaagaagaagcttggcgtaagttgcagaccgttgtgaggttcgtcagtaatggagttgtggaaaccgatgcggcaaaactgagtcggtcagaattctcgcttgtgcctacgcggtttcgagacggttttccgatgccgtttgagctgtgggacaggattcttcttatcgcaatcatcaagactgcctctaaacgcgcgcctcgctgggattgctggatgaggaatagttacatttgggatcactctttcgcgtcgtcacgcttcaaggggcccacaggacaggcagttctcaggcgactcagacgaagtatgtttaaaaaagtaaaatcgctcgaacgctctgacaactacgcggcggcagcagtgatatctttctgtctcactgttatgcataaccacatgcgtgacgaagcgagatcatccacggcaatctatcgcgtggtcaccggatggatgaaaagaaattatgcggctctgcatgctcgttcaccgtcagttgcagcggcttgcttgcccgctccatacgaatacgtcgaagagcacggctgtatcgttagtggcccccttaaaaatgagctgcaacgccatgaggttttgctctggcttgacccgtga

SEQ ID NO: 507190 - DNA, 462 bp, Stenotrophomonas maltophilia
atgtcaatgaaatcaatcagcgcactattcttagcccttgctttaaccggtcccggctttgcccaggcatcggacacgtccgctcgggtctacgggaagcaacaagcgctctcgcagcagaacgtcaggctgggtgaagtcctctatgttcaagaagttcgcattcaagaccagagctaccggctcaatacggggtccgcagtcggagcatcgaccggctacttgctgagcaaaaaccgcagcggcaccgagagaacgattgcagggctggccgggggagctattggcacagcggtgcagcgacaagtgacgaagcgcagagccgtggaaatctacatccgtctggaagggaagaacgatatcttctctgtcgtgcaggacgatgaccaagtgattcggcctggggatcacgtgttcgttagtggacgaggcaatcagatgcgggtcaccccgctgaggtaa

SEQ ID NO: 507191 - DNA, 210 bp, Stenotrophomonas maltophilia
atgcgttacagaaagaacgaagcccccgattgggggctttttttattcctggtcgtgttgaccaatcagtcgtccaaggcccattggaggccgtctggatcggatgaactcgaaatattcgctaccgccgagcttctgacccctctcaaaagcaggggttccttgaagcatggcagagtccaaagcgtaagagcctgggtcagcgactag

SEQ ID NO: 507192 - DNA, 1650 bp, Stenotrophomonas maltophilia
atgaacttacagaataaaagtagcatcgattttaataatgtcaacttcttcaatgaaggagatccgctttacgaaaagtatgagtcagagcgtctcgccacattagaggcgagtgctgcgagagcagaggttgcgctcactgtctctatgtctgccgaagaaaatgctgcctctgcgtctgtcgaagagaagcctagcgctgatgacgcgaagacactggcgcagtccaccggaaaggctccgaagaaatccaaaaaagataagccggacagtgtttcacttcgtttcgccaaccacattctttcccagaaaaacgaattatggggcgggcgcgtggaagagggcggcacactgattcacaaatggaacggaagccacttctccttcgtgcctgcggaagacggcatgatgatggtcaatcgatggttgtctttacacgtgccagaatcggcgactcgaagagcggaggaacacacctggaaattcttggaaagccatcttcgttggcgtgctccgattgctacgcctgatccgaagaacgtcatcatcccttgtcgaaatgcttacattcacctagacgaccaaggtgaaatcacagtgcgagcaccagaccctgcattcggtttgactcattcgctcaacatcacttttggagaacccggacaaccgtatcagcacaggcctttgccacagaattccaagttcaaagcattcttagacggtgcagtcacatcttctgcgatgcgcgacttcattcaagagcagtgcgcgatgcttttgcttccgcacaactatcagctcgccgtgtggtggtggggtgagggtggaacgggcaaatcgacgttagctgaattgatgtgtctctatcaatctaatcctgttagaccgattctgcacaaccttgatcagcgttttggactagaagttatattaggtgcatcgttgctgatgaccgacgaagtgtcgagtggcaaatggtgcgaggaaacgtggaaaaaaatcgtgacgcaaggcgctgtcagcgttgaacgaaagggcgtcagcatcatcggtgcctataagaatcgcgcgaagtggctcatctgctccaacgacgcgccttttgtcgttgataagagcaacggtgtttggcgtcgaatgagcgtagtgaagtggagcaacgtcgttgacgatagtaagaagaaagtcgactaccatgaagaacttttcagagaagaaggagatgcaatcctgtcctggattttggagggcgcgcagcgactgattaaaagagggcgattcctgcctgaaaaagaatggccggaggaagcaagggcgatgaaagatgaggtcaaagtcgttgcgaacaacatcaagatgtggatgcaagaggaaaaggttgagaagagcgagggatttgaagataaagcgatgatctatcagcgctacctcaatttctgccgactctttcagtctgagccgctggatacctcaattttctggcgcaacatcagtagctacatcccaggctttgagcagaagcgagttcggatgaaggtgggtggtgtaagtaggccaacttatgttgcgaacgtaaaatggtgcacgaaagaagagggtgaggaaatagacctttcttcccacgatgatttcaatgaggttccgttctaa

SEQ ID NO: 507193 - DNA, 261 bp, Stenotrophomonas maltophilia
atgttgaacgaaaagaacaacgcgtttgaagagcgcgcaatgtcgctggaagacgcgttggaatcattggacgttggaacgtcatacatcgcaaagatggaacacgatggtgttcacttcctcaatggcgatttctcacacttctgggaccaggagcagatggttgcggagctggaagagcaggagttcattaaacttttgctgtctcatctccgaaatggccagcaaatcatcctcctgaaagagggggatatccgatga

SEQ ID NO: 507194 - DNA, 987 bp, Stenotrophomonas maltophilia
atgagccaaatgacggatcacaccgaaaaagttgcgcagctcttcatcgaattgatgcagaaagacctagcgcctttccagcgcccctggtccccaggacagccacggcacacggcaaacctcgcgccggtcaacggcacttcgggccggaactaccatggcgtcaacgcgctttatctgcacatgcagcagatcttccaaggttatgagtcgaacgcatggatgacgttcaagcaagcctctgacctgggaggaaaggtcaacaaagggcagaaagccacccaggtagagttttgggactggccggacaagaaagacgcccaggagggggatgcggaggaggaagccgtccagggccgcaaggggccgcgcgtgttctacgcgaacgtgttcaacgcttctcagatctccggcattccagagcgcttctatgcgcctcctaccgtgatgcccgaggagtggaggcacgaagaagccgagcgcgtgctgcgagaatccggggcctcgatcaagcatgacggcggcaaccaggcgttctatcgccccatgactgactccatccatttgccgcaaattcagcagttcaagagcgctgacctctattacgccactgcactccacgaattgggccactggacaggtcatccgtcgagactcaatcgaacctttggagcgttcggtgatgagcgatacgcgcaggaagagttgagagccgagatcttttcttacatgtgcagtcagcggcttgatcttccgcacgaaccggagcgccatgcgggctacgtcaagtcgtggatcaaggtcgttcaagacgacccgcgagcgatcttcaaagcgtgtgccgacgccgagcgcatctgtaaattcctgggcgttgagcaagccgtggcgaagcgagaggcgtttcaggtcgaagagaagagcaacgtgattgagttccctgcacccaaggcagtgaagcggaagagtcggggaatggcgatgtag

SEQ ID NO: 507195 - DNA, 915 bp, Stenotrophomonas maltophilia
atgcaacagggaaggccgaactccggcctattgctatggggaaccagcgtgagcataaaaatcagccgagccgcctttcatgcggcgattatgacgtgcctcttgaccaccgcgccgactcatgtcactgcgcagcctgctccggtccgcctgccagctttgatgttctggacgacgatgatgaaggccgatagcaacatcagcaatcaagttcatcattacgcagaacaaaacggattgaagtcccttccggcaagttacgccctgcttctttcaaaacagacaacgataggcagcaatcctgtctatacggctagtccggacgacgttctttgcggggctccggctggggcagtcgccatggttagcgtctacgtttttggccaggaggatgatctcgaagcgcttcctgagttctccgcacacatggcgcgattggagggcttgaagaggaacgcgcaaggcgtggcagcacattccacacaacaacaagaaaagcttctgagggatagccaaggcgggcacgttgatgaagcacagaaaaagctgattcgcgcgtatcagagacagctgactgcatcgatatcgcagagcgagcttcaaaaatcttcggcaccgctcattgctcaatacgctgcgacagtgaacaccggcttttcaaaaatgacgacgcaagaacgttgcgtgtgggcaatgggtgcattcatagcgaagaatgccaaacagttggaagcaagcttggcttcggcgcagcgtcgcgatgctgctcagaagcagtccagcgcgctggggttcggtcccactggcaccgcaccgtccggcgctggatttgacatggatatcgcggtcaacactgcgaaatctgccaaagagttggagcacaaggccttccagctgggcttgaagtctcaatag

SEQ ID NO: 507196 - DNA, 474 bp, Stenotrophomonas maltophilia
atgagtagtgcgactacccaaaaagaacatcgaaagaccgctccgcccttgttggacaaatcccgaatctcggaattcaagacgaaatccgctgcgatcagggcttgggacttgatcgagaaagaagaccgtctgccatcgattcgtgcagccgtgttgttcgaagcaagacagaagccagaggaataccctgacgaccgcccgaaaggcgagatcaacgaagaaggtatatggattccagactcggctgaaatgagtgaagaggaacgattgtcgctcacggctcccacgctcgacacccctaaggcctatttttactcttgcttgtcgattcatcactgcgcgctgcgctatcaaagctccgtcatcgatgtgagagccattcaactcatcgcatcactcttgaatgtttcattggagcaaagcgcttcgcgagttcaccaagagatctccaagctcacccgcgttctttaa

SEQ ID NO: 507197 - DNA, 243 bp, Stenotrophomonas maltophilia
atgttcagtttaattcgcgcagccgcgtgctgcgccactcttttattcgttctctatcatcccaaacttgcgttcaaagaccgagccttccaggcactcgacacgatagcgatcagcatcgctgagatcactggtcaacaagtcaggtcgcccacttcctacaaaagagtcaaagctgctgccgatgcgggcgaagacttctacgaagccatgatttcgggcagagcatacgagacgcaatga

SEQ ID NO: 507198 - DNA, 564 bp, Stenotrophomonas maltophilia
atggccttgatcggccttctcgtaagtgtccgtgaaaacgggggtgaacccaaccttcaagagtgcgagaaagagcgagcgtttggttcgattcgatacaagtatgagccgaccaacaccccgtgctggcaagccagcatcttcgaccagggcggcaagttgaagcttgaccttggcgagatgccgcaaaacacgtcggttgaggtcaatttcggccggaaagccattccggacggcatctaccacgtgggcaaagtcacaacgatggttggtaagatcgaagacgtgacgcttgaaacgcagggcgttgaccgtcagcaagagatctatgaactgttggctgcgaagtggggtcagcccacgtctaccaacgttgagaggttgcagaacgggtttggcgctcgctacgacagtgttgaagcattttgggcgcttcaaggcatctcgatccaatacgtcggcatgctcaaccatgagcaaggactgatcatcttccgctctgacgcgtcaaacgctcagatgcgcgagcgggacaagaagttgagaggagcggaatcgttctga

SEQ ID NO: 507199 - DNA, 1803 bp, Stenotrophomonas maltophilia; identical to SEQ ID NO: 494821

SEQ ID NO: 507200 - DNA, 945 bp, Stenotrophomonas maltophilia; identical to SEQ ID NO: 501394

SEQ ID NO: 507201 - DNA, 165 bp, Stenotrophomonas maltophilia
atggggcgggagcggtcaatggcctgcgaatgcgttgcatgcgcgccgttcaccacgaagaccatcgatcgccaggcccacacatcggcggtctcggacgctccgccgttcgccaagccttcactcggggatcgcttgatccgcatcccagcctcgatacggtaa

SEQ ID NO: 507202 - DNA, 1473 bp, Stenotrophomonas maltophilia
ttgaatcgtccccacgagccgttgcttcatcccatcctccaccccctgacgctggcccagttctacgggaagcatcacgaggccgccgctgccgccgatgcgcgggaagtgttggacctggccacgcggttctgccgagaggcccaggttttcgggttggacacccagaccgacgcgggttttgactgggtgctgacccccagccgtttctccaaccgcatttccctggagctgggcaaccgagctggaggaaccaaggttcacgtcgagcccggcatcaccccctcgcaactggacgtcacaatccacgcgggcgtgttgggccacacccggcttgctccggcttacctcaacctccccagcgacgagcgcgccggcctgctggcccagctccagcaatccatcgcagaagtccaagccaaccgagccgccgctgaccagctccagctcctgcgtgcccagcccgagttgccgcaggaggccccggcgcttccccaactggacatcgccggacttctccagcgctacgaggtcccggaagagcaggccaaggccaccgagcaacacctcatccaaaccctgggcggaacgctctccacgatgcacggaagcgaggtcatcgccgccgcgcaccagcactgcgaacacccggggctctacggcgcaccgtttcagacctggctttgcgaaaacagcaccctgggcaacttggccgcggtcaatgcttgcctggcgatgggcgccgatccgaactgccccaatgcccgaggattgatgcccatccacctggccgcgcgccagggcgagggggccatcgttcgtcggttgctggagcatggagccgaccccgcgctcacggcacccaatgggcagacgacgttgagcatggctgaaggccaccgggtggcccagacctacgtcgcgctgggcatgcagcgctcggtccaaaactacccggcaggactgatggagcgttacggagctacgcctgagcaagcggaagcattggaactgaagctcatcgacgcccacggaccccaactcgcccgcttccatgtggcggaacttctggcgtccgcgcacgcgttccatcccgagctgacgttcaacgtcccttcgcaaacgtggctggaagaaggcatttcgttgaacgcgcccgaggtggtggacgcagcgctgcacctgggggctgaccctaaccagcccgacgcgatgggcgaccgtccgcttcaccaagccgtgcgttccgaaagtcacgtcatcgtccgccggcttctggaagtccaagctgatccctcgcaggtgaatcacttcggccaggccccactgcatctcgctgcgcaatggaagcaggcccgcgtttgcctggagctcatggccgcaggcgcggacccggggcagttggatcgggaggggcgcaagccgggcgacgctcaccgggagaaggcacgtgagcaagtccacgatttatga

SEQ ID NO: 507203 - DNA, 1119 bp, Stenotrophomonas maltophilia
atgggggcttcaatgacactgcaacatggatggcaggcttgccgaaactgccacgcttccgacagcgatttgcgcgttgaggggcgatggcatctccgcgccaatcccggctattggggcaccagcgaacccaaggtcttggtgctggggttctccaagggcgccacccagatctccgcgtctcaatccggcagctttgatggggtcgccttcgcccgcatgcgccctcgcttgcgccaggtgctcgatgcgctgggcatcgacctgggaacggaaacggttgaccaagcgctctcggcgtcgagccgttggctgggtgcggcttccctgattcgctgtggcctctcgttggacatcgacggcaagctgaccaccagcggcaccatcatgcccaaggcggtctccgcggcattcacccggcaagtcatgcgctcctgcgtggagcagcacttgagcccgctgcctgccagcgtcgaaagggtcgtgatgctcgggaccacggatgcctacatcaagggcgtcaaagccctgatgcgcaaccagttcgccgactaccaggacatcaacgaggtggccttcactgcgcagggccgagtctgggtcttcgccgcgcatccgagcccctccaacgctgagttcaagcactggctgggcggggacatgggttcgacgtcggggcgaaagctgcagctggcagtccaagcccttggttcaaggcccgtggcgcctactgcactcgcatcggtcattgccgtcgccaaggccgctcgccccgccgcctcttcgactccccccccagcaccagtttccaaggaccgcgttccgatgaccagcaccaccgatgaccgctttgcccagaccttccacctggttcgcggtgatgggaagaaagtcgtccccgtcatgatgaagaacaaggacacgggacgcgtggctttccgcttggcaaagcaagggaacaccaaggacgttacgcttgagatcaccgacgaggcagacctccttcgcaagtgcgaaagcggcctctaccaagtccgggtgcaaccactggacaaatcgtcccctccaagctttgtccgcccgcagctcaagcaccgcatcgtgaaaggccgcgcctga

SEQ ID NO: 507204 - DNA, 777 bp, Stenotrophomonas maltophilia
atgctctggaagcctgtgacgcatggcgaggaactgttcctcgtcatgcatgagcacgtgcggcacgtgttctctgggaacgagcttggctcggaactaggatttctcatttcttccgacgacttcattgattacatgaagttgtcggccagtatcgagttcttcatgagatgcgtgcgcgacgcgcgcctggtgcttgagaactacggcgatgtcactccggcggcacttgccaatgacgtccgtcgcaacattgaccttccatcgacgttctggggggagaggaagtttcaacagttgctcaaggttgtcgcggtcaatgccgggccacgtaaggccagcagcaccatggagaaggatgcgctgcaggggttgaggcgtgtctgctacatgtgcgggcgctcggtgtccaagcaaggtaaaggggggcacgctgtcctgtccatcgaacacgtctggccccatctctttggcgggcagacgatcctggagaatctcctcccttcctgcgtaccctgcaatgaaaggaaggggcacgcattctcttggacaacgggtccggtactctcaacactcgtacatgcgaatgagagcctcagcaacgacctgaggatttctcttgggctggccaaggttgctcatcacgcttggcgcggagggcgtactagaaccctccgagacgcaattcttcagtgccagccggttagcttccagcctgaactggagccgaacaaacaccatttttacttcgaacttcttccgcaggccaggcaatga

SEQ ID NO: 507205 - DNA, 1368 bp, Stenotrophomonas maltophilia
atgaccaagaagatcaagacccaaaggcaatttacgtacagcgcgctcatgtattcgcagcgcaatgtaaagggcgctccggaattcgtggtattccacgctcctgcccgggaaatcgtcgaatgggcagatgtccatcgactcacgcccgaatcccgaacaggtgctcagcgcccactcaaagacttgaaggtaaaaaaggtctcaaagttcattagagccgacccggccaacacaattcctacgtccatcatcgttgcgctagatcctgcatccgtaaagttcaatggtgaaggcgacatgcaggcgggaaaagttggagaggtgaccatcaatgcacgcattgctaagccaggcctgattattgatgggcagcaccgagtacatggcgctgccgccgagctacccgatatgcacctgaacattgttgcgtttctgggaaatgacgactctgagcgtgctttccaattcgtggtgatcaataacacggcctcccgcatcagtcgtgatcacatccaggccctcaacttgcagttcgacaaagatgagcttaacggccgactgatctcgagctctggtgttggcctaggtatggccggtcaaaagtacgatgaccttcaagttgttgatgtcaatgagccattccgaggactacttaagtacccgaccaatgccaaggggttcatccctcctagcgctatcgaaagtgcgctggctgagacctacgagcgcagcgcgctgctcggtattgatggcgatgagcttgaacttttcttgtcaatctggtcgacaatcaaggacctgcgtgggaatgcttggcgcgctggcgacagcaagctcttgcagaaggtgggcatctacgctttgaccgtgtacctgctggaaagcatgatctcccgacagcgtaactccgatgacgtcatcgacttctccaatacccaagttctggaagagcaagtcaaccgcgtagttgggcgaattcccgaacagttctggacgatggagtggaagtccaaggagatggacaccagttcggggcgggccaagctgattgagacgttggagatcatcgactccaacgctcgcttcaatcgtccttggtatgagcgggtttcgttcgtggatgccaatcaggttgtcgaaagcgggggtgcgagcaatgcgagagcgaaggcgaccaagaagactgccaggaagctcgttaagaaggcgaaggtgcctgtatcaaaacccgccgcctcgaagaagttggccgttaaagctctcaccaaatcaaccattgctggaaagtcctcactaagcagatcgaaggtctcagcaaagaaggtccttaagaaggctggggcacgcaaagccgttcgaaagtag

SEQ ID NO: 507206 - DNA, 2496 bp, Stenotrophomonas maltophilia
gtggcgaagtgcgcctgcgcaacaggctgtgacggtgctcgcagttgcatcgtcctatcagtagtccgcaccgccagggtgcccgtcataaataatcagcgaagcgtccaggggggatgcatgctttcggaacaggaattcgtcgatctcgttcaggcgcatcaacagagagccttgaaccaagagcagtcgcagtgcgtagtagcgacaaaggacctgcctttgttgatcatcgcgggaccagggaccggaaagaccaccgtgctggtgctgagggccttgcggcatctcttggtcgaccgtatctcgcccgaggggatcttgatcaccaccttcaccaagaaggcggccgaggaagtccgtacccgttggctcgactggggattgcctctcgtcgagttggcaaagcagcacccaagcctgcagtcaccggatgaccaactttggctgcgcaatgtagatctgaatcactgcactaccggaaccttggattccatatgcgaagagatactgagcgacctgcgaccggccggtaccgtcccaccagtgctgattcagggtgttccggccgatcagttgctgatgtggaaggccttcagtaactactatggtcccaatagagaagcgatcgatacttacctggcgaggttttcctttactggggaccgtcctcggaatcagggcgaaatgctccggacggttagaaccatagtagaccggtttgttcatgatcgtgtagacatgggagccttcaagcaggcttctacggattcggctgcccggattgagatcgctacggctcatgaggcctatgcgaagtacctgagcgaccagtcgcagatggactttgcgcttctcgagcagcaattccttgagcgcatgcagacaggaatgctcgatgaaaccatcaatacatgggaggtcatcctggttgatgagtaccaagataccaatccacttcaggaacagatctactttgaagccgtccgccggagcggagcttcattgagcgtcgtaggtgatgatgatcagtctctttaccgcttccgcggcgcaaccgtggagctcttcacccagttcgtgtcccggctcaaggcagcaacgtcacttgacgctgctactacgtatctgactcgaaactatcggtcgacaccggagatcgttgagttcttcaacagcttcatcgaaggcgacgcaggtttcgcggcagcgcggatccaacctccgaagccccggattcaggcgcatcgagaaccgtccggcctacctgtgatgggtatgttccgtccggacgcagatacgttagcgtcggatctggctcagttcctccaggacatcttccgtggtggtgggcgatcaatcctcgtggatgacaactctattcacctcgcgggtgcacctggacagggggatcttggggacgcggtgatgctcagcttctcggccgacgaactatcctgggcgtcgcagaaggatgaggcgaccgagcgtcttccgatgaagttgaggcgcgaactgaacagccgaggccttggagtattcaatcctcgagggcaggcactggccgaccaggtcgatgtgcagatcctcctaggcttggtcttagagtgtctcgatcgctcttcagcagacaacccaagtggaaagattgttggtgagcaaagattggtcactacggtcttcaacaagttttcgtcttggcgaaagcaggctgccgccttcatcgccactgatcccgcgcccggaaagctccgggatttcgttgatgcgtggcacacgcggacgccgaagaaaggaactgattggcccgatgagtggcccttgttggagctgtgcttcaagctcacaacttggatgccaaagttctcatccgatccggaacatcaggtttggcttgaggccgtatctcgcgccatggtggaggcgcgcctgttctccgcattcggtggcatgatccagaacaagggaaatctggtcgttcccagccgcaaggctgccatcatggacgtgctgagaccgatcgcggatggtctcttggagctcgaagaggagctgatcaccagcgttccacgtgatcgcttgtcgatcatgactatccaccaggcgaaagggctcgagttcccgctggtcattgttgacgtgtcgtccagattcacgatgaatcatgctgcgcaggccgcattccgatttcctaagaatccttcaactacaacaatgcttgaggatgatcttgcgccgttcacgcaggttgggaaggacagactggctcgtagcgcaattgaccggacgtttgacgaccttgcgcgtctttactatgtggcctactcaaggccacagacagctctgcttctggtgggtctagagaagactatcgctgcgggaaagaccgtgaaatctgtggcgacgggctggtcccgagatgacacatgggcctggcacattcctggggccaagaagccaaccatcgccaataatctccctctggtgctcatctaa

SEQ ID NO: 507207 - DNA, 1914 bp, Stenotrophomonas maltophilia
atgttaaggaagcttttgctcgccgcatcgactgcgatcatggtcgcgccagctgcgcaggcccagaccgcccagcacgagtggatcaccgtgatggaagaacatttcgacgagctgggtttgacgaactggattccctgggaaggggacattctccatcagaatggaggccagccctacagctacacgcctggcaacgcgttcgtatcgcaaggcaatgtcattcttcgtgcagagcggctcacaaacggaaaattgcagaccggaggcatctactatccgcgctattttgcctacggacggttctcagcccgcgtgaagatgaccaatacgcccggcatcattcctgcattctggttgcagtcgcacgctccccgctgcgcggagatcgacattttcgaggcaactggcctgaaaaagtccaatccacgggcgatcaattcgcagcactactggttcctggacccaaccaactgcggcaatcccagttccacgaccatttacggagagacagcgctggaatggtatggagatgactattctgccggattccacgttttctcagccgaatggacgcccgagcacgtcgcctacttcgtcgatggcgtagaggctttccgcgcaacccgcaacattcccagcctgccgatgctggtgaacgtgaataccaatatgggaacaccaccggtcgacagctacgtcgagaaccgcatcaatgcggccaccgtgttccctgccgatttcgtcgtggattgggtcaaggtcgagcagttcgctcctcgcgcatgccccgcccgtggcgatcatgcaggaagtctccgccgcgccaatggcagctgcgccgcggtgcgctcggtggactacaacggtgatggtggcggcgacgtcatcctgtacaacccatcctctggcagcgcttcggtggcgaccggacagctggccccacatgcgggcctggtgacccattccctgacggatgccccctcggcaccatgggcaacctcggccaaactggtcagtggcgacttcgacgccgatggcttctccgatctgctggtgcacggcggcgacggtagcgtacggctccactatggacgtcctgacgctcgattcaccgaacatcttccatcacgcactgcatggaatgtgggcagtcaattgatggcaggagatttcaacggtgatggacggagcgacgtactcatcctgcaggacagcggcgctctcgagatccgctacggaggcagtgatcgcggattgcgcttcgccccacaatcgcaacggcaggtcaccctgggcagccgcccgcatgttggcgacttcaatggcgacggccttgatgacctgttgctgtatggacccaacggcgaggtcgacctcttctacggacaggccaacgacggactgcgcgcagaacccggtcagcatgatcaatggcgggctggccatacattgaagattgcggatttcaacggcgatggatacagcgatgtgctgatttatgccgccgacggggccactgagatccgctatgggcagatgaacggcggtttgcgctttgcaccgagcacggccgacctatggtccaccgggcacacgctgttgacgggtgatttcaatggcgacggcagagacgacgttgtgatctatgcagcgaacggacactctgaaatccgctacggccaagccagtgatggtcttcggttctccgcgcagagcctctccagctggagccctgggcatcacttgctgaccaacgacttcgatggcgacgggcgcaccgacatactcatccagtcggcgaatgatgatgtggaaatccggtacgggcaggcaacggatggcctgctgttctcaccagcttccgcaacccgctataaccctggctggcgcttgcatacagggacccgctga

SEQ ID NO: 507208 - DNA, 303 bp, Stenotrophomonas maltophilia
atgagcatcaaggtcaccgtcctcaagaacgaaattgacgaacgcggcggcagcttcaagaacgacgctggcgagaacgtggaatacaccacccgtaagcagaaggccaagctggaaaccggtggttttgcctacccgttcgacgtgcgcctggacaagggccagccgggctaccccgagggcgagtacgagctcgatgttgaatccatgttgcaggtcaacaagggcgtcgcctcgctgagcaagttcaccgtcctgcgcatggtgcccaaggctgcaccgcgcgcaaccgcgcaggcttaa

SEQ ID NO: 507209 - DNA, 459 bp, Stenotrophomonas maltophilia
atggaacgcgaacgaccggaatacctgccgcctatcgagcggcgccgctggtacttcccgtggctggtcacagggtttctgacggtgataagccttgccaccatcggtgtactgacgcttggacgcaccaacagtgcatggagcgagcgttttgaggggctgcgacgcaccgctgatgctgtcgaaacagcggcccctacacaagccatgcagcagcgtgaggtcgtagcagcaccggttgtgacgccttcccgcgcacgtcccgagcagctgggccgtgatatgcgatgcatcaacggcatgctgttccgtcgcatcgaaggcggctgggagaatctaccgggctcgcgctgcggcgaccagccgacgatgaacgtccagtgcttcgcaggaaagccgtacaggcagatggccgctgatggtggctgggtgctttctccgaacgaccgctgcccgtga

SEQ ID NO: 507210 - DNA, 708 bp, Stenotrophomonas maltophilia
gtgataattaatgaggcggtcgagaaatttagtgcccagcctgagggtattgctctaggcatttctgcgttgcagtccttggcgttggatgaaatctggcctcaggatggtcttgcggttgtagtgcccgctaacctggtgcgactcgtttctttgattcgaggtggaagtcgtgagcatgctgaattcctgttgcgcgtggttcattacttcaactcttccttccgctcgaacaaggtgcgtgcttctgactcagaagtggtaggcaggttggttgcattccttagtcatcttgagggagccgggcgtctcgtagttttgggtgatgaggtcgacgatgtggaggttgctgaggcgttctcaggtctctacccgagtggtgcgttcgagatcgcgatgagccctctgcgcaacttcgttcgcgattacttggtgagaatttattcttggtcgaagcggactggtggcgtcatcattgagcgtacgaggcgtgttttcaacgatatggggcaccaagttgccacattgcagttgccggaccgtttggatcgttgtgttgatatgaaatcgaagtatgtaaagtatgctttttcattccccgggggtaaggcggcaaagttcttcctgggcgtcgctgttagtgcggtaggactggttagccctgccgcatctatagcaggtctagtaattgttttcgctgacccatga

SEQ ID NO: 507211 - DNA, 1197 bp, Stenotrophomonas maltophilia
atgctcacggatgaccagttggatcagcttcgatacaagggtgaaggctcggatctggactacaaggctgaacgctacccgttcgcgtccgccacggatgacgctaagtcagagctgctgaaggacattctggccatggccaatgcccatcgggacggcacggcctatatcctgatcggctttaaagaaagttcgccgcacccagctgaagtggtgggtgtcctggcagagggcgcaatcgacgattcaagaatccagcagttcgttaacgagaagctggagagcaagctggatttccgctatgaagagcgaatcttcgacgggaagcatgtggcagtcattgcgatccccaagcaatcgcgtccgttctatctcaagaagtcttacggcaagttgcccaaggacacggtctatatccggcgtggaagctcgactgcggtagcttccccgcgtgaagtggccatgatgggggccggcaatgccatccggccgccagccaagattgacctcgagctaatgggagacggcaaccttccgttggatcagaacttccaactggcattctacagcccatcgactccctatcctgacttcagcacggaagagcggtcatatgaccccttcgacaggacgtctctttacatcaagacgcacgaagacaatcggcatttttggagggaagccgcggaacacctgttcctgagaagccgcctcgtcactgttcgagtgaaggtaaccaatcgatcagagttcgccttgaatggcgcaaagctggaggtatgggcacttgggccgagtgatatggctgtggatctaaatctggtggacgagttgccagagatgcccacgccgaggtggaacatcatgacccatcaaatgcgacacatggttccggtagctcgacacgggagccgcgcacctcagatggaagtggacaccaaggaaggccatcacatatgccgtgtccgattgggcagcctgttgccgggcgagtcagcatttggggacgaggccttggccgtgctcccggaacttcctggtccccatcttcttaaggtccggatactcgcccaggaactcaacccacctttgtccttcgaacacattttcgaagttcaaggaaagagcgaagcgctcgatctggacgagttgaagtcactgatctatcagtccattaaaggaacaagagcggattag

SEQ ID NO: 507212 - DNA, 1242 bp, Stenotrophomonas maltophilia
atgaccccagaagaaaagaaccaaataatgctgcagcgcaagcgcaaggagctgcttgagcgtgccaaggaaaccccggccgcatcgtccacccaagaagagcggctgatctccgacggcatgaaagagaacctgaaagctgccagtcactgggctggagtgatcagcaagcgcactgccgagttgacccagaaaggcgttgctgccgctgcagagaaggcgaaggaggccaaggcacagctggacgcgaagcgcgcccgggaagcccaggaacatcgtgctgtcgaagagaagcctcaagacgctccgctcaccgtggagcaggaaatgttggtcaggcaactgacgtccgatgcagctgcgccggttctcgtaggagcgggtgataagggaatgtctaccgttgaatttggagagcccggcgcacaggttgcagagggattggacggtgcgaacaatttcgtgctagaccctggagctgttacctcgttaacgaaatcacagctcggcagtgagcagtttctgtttggtgagacaggggctggcatgaccagcaatgtcctgctcccttccggcggggtggtatccgatggaatggatggacttcgtggggccgcaaaagaagcgctgggcgcgaattcgaccattcatgtgccagcggcacttgccggtgaaggtgcggcacccttggccgacctgtctcagcaggacgcagtggaagtcctgtccgtttccgcagcgcctgaagggtccagccggcccccggaggccgcgtcaccagagcagccagtaactccaatccaacccagcccccgctctcgttggccctgggtcttggccagcttggtggcggtggcattggtcgctggggcgatctattccctcctggggaagaacgacaaggcgccgccaagcgcgcccgctcccgtggcgccggttgccactccagccgctcccgagcagttgcccgaggtggtggaagcccccgtggtcgcgcctgctccagcagtgcttacagagcaggccgagccagaacctgcgatcgagaagccagagccggtcgccgctcccgatgtgacagcgtcagcgacgattgcgtcccagcccaagccttcgccgaaacgtgcgatcgccccgttgccgaggaaggccaccggaccagccgccgaaccgcggaacgactggcagcaaaaagccaatgcagacctggacgcctgggcgaagaagtcggggatcgactaa

SEQ ID NO: 507213 - DNA, 849 bp, Stenotrophomonas maltophilia
atggatatctaccttgacaggaacgagttagaacggactgactttgtcgagtgctgcctcttcacaggcgcgattcctgtcgcgctgacggaagagcacgtgattccgaagtggatgctctccgttaactgcttgaaagacaagcgcattgaaatggggtcgcgcaccgcattggctaggatgaaggagttccgggtcgcggcggagtccgccgagaatcagttctttgggaatgtggaaaatcgggtaaagcaaggcagcgcgagcaccgacgaaattcacctttggcacaagaagatctctgcgggtcttaccgttgcacactggcggatggctcgcaacacaaataatcctcgcgctccaagtgagcttgatgaggctgcgcttcccatcgtcctcagagatttccagagtgactatgcggcgctcaagcagggaagctacatccgtacggggtcaaccatcagacttaaatcgccgctgccggatggctggcttgcacatgtggtcggcgggctgaagcaagattcgggtgccgcctaccatcaccgaccttatgcgctcgttgccacttcggtgggtggcgttctccatgtttcgacgctgcacgatcgggcaaggcgaattgaggcaaggttcgtatctcaagattgggctagttctctggcaacctgcaacagctcgccgcgcatgcatgctgctcttgctgcaatgctggcagacttagtggacgaatggcttcgcgaaatgaatggcggaagcctgcccgagtctatgtttccgatgcttgcgtatcagcttggaattgagattagaggtgatttaacttggggagtacgccaagcctga

SEQ ID NO: 507214 - DNA, 2751 bp, Stenotrophomonas maltophilia
atgtcaaaatattggcgcccctcactttggggcaaactgttcacccgctctgccgattggtcgattcgcatggatggcgaaagggttgaggttgtcatcggcggccaaccctatcaggccttcttgaagtccgagcgtcagcttcaaatcacttccggcgtcatctggtcgagggttgagatcagagtaaagaatggccttcagttggttggagatggcctgcccaacgacgagggggatcgtctacgaacttcgatcgccatgcttgtcgccgagcggcggaggcgcgagcaattggcgattttcaacgccacgcttacgttgatccgtgactggttgggaaaagcaaaggaattggctgaggaaggtaggaacagccgccgctggattacccatgagcagcagcaatcggtccttcttgctcgcccagagttggcgcttacgcgcgaggagcttgaagtgctcttcctggatgaagaccttcacgaggatctaggttcctacgagcatcagcaagcattgggccaactgcgagactgggatcaggattgggttaacctctgggaggaggcgaacgaatccatgacccagcgagagctggtgcttgcgagggacttcatggatcgagtggagagtgatccactcaccgaagaacaggccagagccgtgatctgcttcgataaccgcgtgcaagtggtcgcctccgcagggtccggaaagacgtccaccatggtggccaaggcggcctacgctgttgagcgtggtttcctagcaccagagcgtatcgtgatgctcgcgttcaataatggcgcggccaaggagctgcgcgagcgagcagataaggcgctggatcgccttggaatgaacggagtagagatcgaagctcgtaccttccattcgctgggcttatccatcatcaaaagtgcgagtggacgtgatcttcaggtcccgaaatgggcgcgagagaaggagaagggcactgagaagctgggggagctgatcgaccagctgaaggaccgctccgcacactttcgaacccagtgggacatgttccggcttgtgttcggcaaagacctcccttgctcgggttcagagtcaatggctgacggatttgacgcgaatggccggccttacctgaacactctgaatggctcgcgcgtgcaaagcatggaggagcgcgtcatcgctgactggctgttctacaacggcgtgaattttgagtacaagcgctcctacgagttcgactcggtgagagatattcatcgccagaatcagccaaacttctattatccagatgccgatgcgtatcacgaacatacggcgctaccagtcggtgccacggcttcgaaccaggcgcactatgcggacgatctggcctggaggcgtgagcaacacgcatgtaagggtaggtcgttcatcgaaacgacgtcggccgagctccgatccggccaggcatttaagagcctaactgaccaactgtgcgcactgggtgtcgaggttgatcccaatccagacaggcaattgccggccagagccgcgacgccgatgtcggaggatgatctgatcagtctcctacgcgcattcattgcacatgccaagagcaacgtcctttcgttggacggtatctctgagcgcctgcgacgtctccctgaggaccattacaaggagcgccttcgccggttcttggaactggcgacgcccgtgtaccaggcatgggatgatgcattgggtgctgagcaaggaatcgactttgaggacatgctgaacactgcgtccctttttgtagagcaggggcgttacacgtcgccgtacgatcttgtcatggctgacgagttccaggactcatctcgagcacgcgcccggctttgcgcggctctggttagcgcacctggcaagtatttgtacgcagtcggagatgactggcaggcgatcaaccgattcgccggtgcggatctttccgtcatgaccgatttctgcaaatggaatggccatggcaaggttctgaggctggaggagaccttccggttcccccaggaactgtgcgatgcgtcaagtcgctttgtaatgcgaaatccaagccagatcagaaagaatgtgcgttcatcaaaatcacccgtaggtcctgtgcttctggccttccaggtcaacaacaggaagcaggtacaggacggggtaacgcaatacctggcgcagctacaagagaagatcctatcgggcgctctgcctagagggaaggatgggcttgtatctgttctagtgctgggtcgctacaacttcgagagcgacaaggttcctccggattggaaggaggactttggacagaccatggaagttgagttcatgtccatccacaagtccaagggcaagtccgctgactacgtcatccttccgggcatgattcggcgtagcttcccaagcgcaaagcaagatgattcggtactgtcattggtgatgccacaaggtgacagctatcccgatagtgaggaaaggcggttgttctacgttgggctgacgcgcgcccgaaggacggtcgttatgttcaccgtccaaggaaaggtttcaccgttcctcggagagctgcttcgggagggggccgtagagctgactacgctcggtggccagccaatccatgaggagcagtgccctgtctgcaaggtcggcgtcttcgtagagcgaatggggcgcaatggatccttcagaagctgttcgagctatccggactgcgagaacaagccgagaaagcggcgctag

SEQ ID NO: 507215 - DNA, 3852 bp, Stenotrophomonas maltophilia
atgaacattgcgatcaccggccctgagaaatttttactccaggacatgatctgcgttgaagcagcattggccctaggccggaacggaggttgctcactggtgcctgagcccgaggcgggagaggacgcccgtattgtttggcctggcaccacgccttgcacccttgaggtgcaggtgaagggaggctctgaggcgctctcagtgtcgaaccttgtggagtacttagcccactaccctgccagaaaggactctccatccctgctacgccggctgatggatgagagcgagacctatgctgcgttcgtactgagctcgagagtctgcgacgacctgggagagcttctgacgcctcagaatcgattggacaggccacaggccagatacgcaagtcaacgactcgccaaggtcgttcgccaagcggttctcgatcggtccacttcaactctacataaagcaaaaaagccacgaacgaaggtgaaagcactggctgtcaagcgcgccaaagaacaagccaacgtcgcgctcaggagcgaggagtgcttccgccaagccctcggaaagatagttctcgtcgagcgagagacggcagagtctgtagagatcagactgcacagagtcctgcagaaggaacgattcgacatgccctctatccgtgggatcatcgcacgacttacagacgccatcacccaagcgaaaagaagccagaaggacgttgtccccgaattcctagaacttcttagggcaaacgcgcccgctcggcttcagccactgaattatattaatcgtggagccgaggacgcgctgctgcaagttctgaaggatcaacattgcctgctgctggccggccctcctcgtgcaggaaagacctggacttcgcgcacaattggatccctgctccaggccgatggtgtggcggtcaaaaccggaagccacattgatgaggccgagcgctatcttacggatgacgtggatggccatcgggcatacatccttgatgaccctctcggctctcgcgaacccatcgagaatccgagtgccgcaatggggaatctagtgcgtttgtcttctctcacccaagctggacgttatcttatcgtcgcacagacggagaatgtgcttctgcaagttcgcggcacaaacgacctagccggttgcagggttggctcgcaatcctggacatcactcgctcgtctccccgtcacggtagcaaccgagatctggagatcctctgccgaagcacagggactctcggaagcagctattaccgccgtggaaaagatcatcgaggagagcgagcagctctgtgaaccgggggcgcttgcatacctggcacagacttggagcgagctcccaaacgcgccaaccgatgcagagatcctggcacagtcccgccgagacgcaattgactttgcgcgatctctatctgacaagcaccctggtgcgcggagcatactgatcgcagcggcaataggaactgagatccatcgacctatcgtcgaaccagatctcgcgtatatgaccagctcaagcgaagaacgccccggctttgcggatgaattttctttgataactattggaggcagctgggatccgtcccctccaccctcctatgaagttccctgcagacttacagaggaagcgagagctgcacttgccgtgctccaaaggcgccgcgtcctttgggtcgatggcggcaattacaacttcacgcatccctatctgcgcgcgggagcccaggcgctggctgtaccagacatccccgaagatcgggagctactccttgagcagctcgagagggcgctaggctgcgcgtctccaatcacaacacttgcagcagcgcaaaatcttcgatggatgcgccccgccttcaaggaccgccatgaagcggacctctttgagctggcgacaatcggcacgagatcaaggtttcccgcaacacgggatagctgttttgagttccttgttcggtttgtggatcacctcccccaagagctacgcgacaagctgccctggatggcagagaacatggtcatcagcctggagcggatcgacgtagattccggcattggattcatatcgagcagctacatcccgttcgaatcgtcacctacgctagagtctgtcaagccttaccttaacgcgatcgaggatgggagctccattgctctggaccttgcattgtccaagagaatccttcaggccctggcaacacagccccatgcactgacgtcgagagctgtagaacggctccttcgagctgacgaagcgaccattcgagcattcgctgccaaatgctggatctctgcagatcgccatgacgacgagcggatcctggatttaatagctcgtgaccgcaccccggcaatgagtacatgcctgctgaaaggccttgctgagtcatggagcacactcgagcaatctcgccgcgataaaatttgctccatcattgaacatcagcttgaagtgacaagctgtgcaagcgtactgtattcccgtctagtcctattcaatcggcctgaggagtttggcaactctccgccgtgggacctattcgccagactcctcccgaagacactcgaatgcatgccgcacaccatcgcgcttcgtgatggccggcttaacgcagcgattgacgcggcacttaagaagcttgatccgtccgaagttggcaactcgctggaagcttgggtcaatagaattattcgaagagttgatagcttcacgcttgatgagttcgagctcaacgtttcggcacctctgcttaagctcgaggccaacgagcgccgctacaacttgatagccgctctgctagatgttggcgatacgggattgcgcattgttacgatgtcccgactgataagggggtggacaggcctctctgaccgtgagatcgatctagtcctgtcatcattggggtctgtagaacacgacgcgctgtggatcagagcagtcgccttgacctccaaactcgtacctgcgccagtgcttgtgaagtgcaacgcccagaacctagcgctgtctctggatgcgatcgcggtagaagagctgcttggaagtgagcttttctcggcatgcgtctatgtccattgcggctggccgcaaccgctgtggtggtacgccacacaccatcgaagtgacaagtgggatgccatcttgcttgatcttgcctccaagccggagcatcagcttcatccgctagcactgattgaaattctaagctaccaggaaagcgaagctcccgaagtactgaagcttctccctagcgggtgcctttttgatacctacctagccatgcttcgattccaatccggcaccaatgcaaactggtcacccgacctctggaagatcatagtagaccgcctgcttaagaacaggaaaattgatgacctcgtggctgcaattgatccagtgatcgatggagtaatcgagcgcatctcccaaattgggctctggcttcccgacagccctctcgccctcccgatcctggagctggtgagagctgactacaatgcgatgaaagcgctcacaaccttgactactatcctcgcggggattgaggatgccagagcaggcttggactcggatggcgcgagggacaccgagatgcttcctcaagtcatacttgaacaattcgtagccgtgatcgaaaaatgcaatccccggctgtacggaacctggtcagacttgcacagcgccctctcccgcctcggctgccctgaggaactactgttacgactggaggacggcagaatgcgtgcgttcaagaagcatcagcgcatcagagatgcgcaagctgtttggccggaggagccggcgctagtcgggtggcgctacgcaagagcttctagctaa

SEQ ID NO: 507216 - DNA, 546 bp, Stenotrophomonas maltophilia
gtggctctgaccaccctcaaatcactcgatgctgagatcaagcagctcgaagcgcagaagaagctcgtggagaagcgtgatggagaggtccctcaggcgctggccgttctccagaagtacgctaaggtcctgaccccagctcagcgtcgtcagatcgccaagattgtcggaggcattgccgacgctgacatagctgctccagttggcgttgtgaagcgtgcaaagtcgtcggccaaggggcgtactctaggcaaggttgcccctaagtaccggctgcctaccggtgaggcatggactggtcggggtctggcgccgaaggtgttcgttgcttggcacaagtccgctgaagggaaggcttggcgtgccgagaaccagggtgagaagtacccacctgcagattcaaccaagtcgtccgcgaaggtcgggaagacggtgctcaagaaggcgcgcaaggtcagtgccaagactaaggctgtgaagaagcccgctaagaaggctctcaagagaattgcccgcaagcctgtgcgcggggcaaagcaaggctga

SEQ ID NO: 507217 - DNA, 450 bp, Stenotrophomonas maltophilia
ttgaccgtttcagagactcaaaagttgcttcatcagcagcaccacgaagccgccatcaagttcagctacttccttctcactgctacaggcgcggcgatcggtttcgcggtacagaagctggatggacagagtttcgattttgcaggtatcacgctgctagctggtacaggtgcctggcttctttcattcctctgtgggctgcttgctttggaggctaataactctacaaaaggcttcagcttgcagcgtcaaatgttcgaggacgggaatcacacgctgtccaaaagattcaaaagcgagacagaagggctatcgaacgtgatgagggagtgggtcgcgaactaccagaagcgagcccgatatctgaccttcacgcagtcggtgttcctgggagtaggggctacttgcgtcgtggcatggcgcatcattgagatgtcgggccgcagttga

SEQ ID NO: 507218 - DNA, 660 bp, Stenotrophomonas maltophilia
atgaaacttgtcagtagcgccgcatatgcggcatctcaagctctgtcccagcggggcctcaacctctcccgctcacatctgtcagaagttgtcgccgcattgcttggctacaagaccttggccgctctaaaagtcgaggagtctgatcagagcctggattaccatctcgacgacgccgaacggctgatactaaatctcccgctggggttagtacgggccagtagcattggcctgtcccagattgtcgtagatatgtgtgtcgaagcgctgaaggcagtagccactgtccccgtgcacactggcgtacccgacctctacgatgggtacgcgcgcgagatgctggaactggccatcgccgagggcgagtcaacagcgatggcaactgcggagagcaatgcctccttcgaagaaaatccctacatggaagacgaggcaacgaccagtggcgatctgtgggaggctccaaccgaatggagcatcgaggccaccggcaccatgagcggcgagtacgatcccgatggtgatcgcatgtacaacggacacgccatggacgtatggggcaagctcttgttcttcaaggccggacgtgccggtctgatctatatagagagcgaggatagcgcaagcccggacgacacctggcgcgacgatgaattctga

SEQ ID NO: 507219 - DNA, 309 bp, Stenotrophomonas maltophilia
atgaacacgatccagacgcgttcggcgctgatgtcgaactgtggctccgcttttcccgccgacgcggcactcactcttgtccccgaaggtctgcgggaccgcccggccttgagtcttaaggaactgctccgggtgatcccggtcggccgcagtaaggcctacatgctgatgaaggaggatccctccttccccaagggcataccgctctacgacggcgagaactcgcccaagttctactggacccacgaggccattgcctggttgcagagccgtgccgccaaggttggcgccaacaggggagggctgtga

SEQ ID NO: 507220 - DNA, 342 bp, Stenotrophomonas maltophilia
atgagcagccttaccgatacgcttgctggcatccgcacgccgcttgaccggctccagcacgccttggctcaagacctgagcctgggtaagagcaagctggagatggacttccgccaggcctatcccgtgctggaacaacacctgatgcaacggatgcgtaagcggctggcaatggagcgtttcaatgctgcttacagctacgaactgagcctggcccagttccgcaagttgttgaatgcggagcgggagcgccggcaggagatcggcgaggtcgtggcgtgctctggctgcggacgccccgtccaggagccggctgcagccgatcagggagcgtccgaatga

SEQ ID NO: 507221 - DNA, 1458 bp, Stenotrophomonas maltophilia
atgaccgcctccttcgcccgagttgccccccgttacccactgaacgccttcctggtggtggcgcgcgaagcaggttacgagatctcccgtaacgttcaggcgccggaggcgctgatcgggatgagcctgatcaatgccatttccatggcctgtcagggactgatcgacgtcaagctgcctacaggcctggtcaggccggtatcgcagaacctgctgatcatcgccgaatcgggcgagcggaagtcgacggtgtcctcgctattgttcgcgccgttccgcgattcggacactgaggcaatggcaactcacaaggacaagcaggaaacgtatcaggccgaactaggcgcgtgggaggccaagaacaagggcttgcgcagcgccatcacgcgagcggtcagtcgtggccacgatagcgacgaactggaggcgcggttgctggaacacggtcggagcaagccggccgagccccgattgcgctacttcatgcgccaggaaatcaccgggaaagccatcaccgaagcgctagtgggcgacggggagtcgatcgcgatcagcaccgatgaggggcatgttctgttccgaagcgaggccatgtcgcacctgggcctgttgaaccggctgtgggactcccctggcgttctgatgcgtgatcgggcggacgagaatctgctggccatgaacccgcgcgtgtcggtcagcatcatgactcagcacgaaccgctcaaggcattcttggaccggaagggttcagtcgccaaaggcagtggccactgggcgcggtacctggtgggctggcctcaatcgaacatgggtttccgtcaggtaagtggcgaggagccgacctgggaccatctgccagcgtttcagcagcggatccgtgtgctgctggagcggtaccgaacggagatcgaatcgggatcgatagaacgcgaactaatcgagttcagtctggatgcgaagaatcggtgggtagagctggcgagggagactgagcgcctcctacgtcaaggcgagtatctgagcgacattaacgactttgccgccaaggtgatggagatcctggcgcggctggcagcggcgatgcactacttcgcggaagaggttggcccgatctcggtcgatacgctcaatcgagcgtttgagatcgtcaagtggcatgagagtgagtacaagtacctgttctcacctgactctgccgtgcctcaggacctggtcgatgcccgggccgtcgcccactacctgaagacgcggatctggggcggcctcttctccaacacctggatcccgcgcaatcaggtcttgcgcaatgggcccgtacggaagcgtgaccggctggccgctgccttggaactgctccagacgcgtggggcgatacgcatcgggacgtcgtacggtgaccggaagtgccacttgcagttgatcaactgcttcttcagccagcagctgatggcattgtag

SEQ ID NO: 507222 - DNA, 741 bp, Stenotrophomonas maltophilia
atggcaagcttccactacagcatcaagagcggcaagagaggcagcgctcgcagacacagcagctacatccaacgagagggatcgcacagcgagcaagaagacctagttcacgccagtcacggcaacctcccgccctgggccaaggacgatcccaaagcgttctggggcatggccgatcgccacgagcgcgccaacggtgccgcctatcgcgagcatgagatcgcactacccggcgagctgactcaaccgcagctggttgagctggctgagcgacttgctcagcgcctagccggatccaaaccgtaccagtacgcgatccatgcgccagagggagcgctcggtggtatcgagaacccgcacgtgcacctgatgtgttcggaccgcattccggatgggatcgaacgcactccagatcgaaccttctcgcgctacaacccgaatcatccggctgaaggcggctgcaggaaggacagcgggggcaagagccccatggagctgcgccaggtggtcacggccaggcgcaagctggtggcagatacccagaatgagatgctggccgagtgcggtcacagcaccagagtcgaccaccgcagccttcgagaccaagggttggaccggcgggcagagcgccatctgggctcgctattggtcaaagagttggctgatggggagaaggcccagtatgtggcgtatcgggctggccatgatgccagcaccccgcccgccctctctcaacagtag

SEQ ID NO: 507223 - DNA, 369 bp, Stenotrophomonas maltophilia
atgggtgatgtcgccacctgtggagccttctttcggctgcgcctgggccatgagaagcgcgagcactttgaggtggcgtttttggacgcccagcaccggctccttgcggtggagcggcttttctcgggaacgatagatggtgccaacgtctatctgcggatcgtgcttcagcgggccctggcattgaactcaggggccgtgatcctggcccacaatcaccccagtgggaaccctaatccttcagctgccgacagggcgattacgacacgcctcaaagatgctcttggcttagtggacgtaaggctgctagatcacttcgtagtgacggcagatcaggcgctgtcgatggcagagcgggggatgatgtag

SEQ ID NO: 507224 - DNA, 510 bp, Stenotrophomonas maltophilia
atgacgatgatgagcgatgcaccggatcgcatctttggattggtggaggagttgatggtagaggtcgtcggatacgacttccctgagatcactctaaagcacttggaagcagtgtctcagtgcgagggcaagtcgccgttaggtgatttggctagacgcatcctgagtaaactagctcagtactatgactcgctcgatgccctggatgttgcagaggagctgtcgccgccttccgaggagcgcagactgtttgccaaggaacgggccagaaaggcggagcaggctgccgaggaggcgaacaagaactcgatcatgagtcggatcgcaacgactgttccggtcaaagcggggcgctccaccttttcggtgcaagagggtcgcgttgggcccgctagtgacatgatttcgatcagtcactcaatggccatcgctcgcagggagatcctcgataaggtcgggaacgacctgatccgtcgtgtcatcataacgtcgaaggtcgacgccgaatga

SEQ ID NO: 507225 - DNA, 1749 bp, Stenotrophomonas maltophilia
atgaagttgatcatcaaggaatacctcagtcagctccgagagtcaggcgacctagatcggttgctgcccgacctcctggttaggatgcaaatcatcccgattagccgcccgcagatcggggtccggcagaacggtgttgatatcgctgctgtgggtagggacgagaagggggcaaagcgactgtacctgttcgtcttgaaggttggtgacatgggccgaagggactggtctggcggtgtcaacggtgttcgcgcgacgctagagcagattgaggatgtatatctgcccacctccgtgcggccggaacatcaatccatgcccgtaacagtggtgatctgttccactggtgagctcaagcaagagcttgtgcaggacttcaagggctatgggcaagcacgcaagccgatctacgagctggtctattggtctggcgacgatctggcggggatgattgacgacaatctgctcgatgagtatgtcgttgagccttcggctcgagctgatctgcgtcgcgctcttgctctaattggatctcgcgactacgaccttcgtcatgcctaccgtgtgctcagatcactattgctagatagccatgacggccttccagcaaagactgcggccagtcgaaagaggttcatccggcagctaaagacgagcaatctggtgcttgaaattgcgttccgatgggcttccgagggtaagaatcttctcaatgcctttcgcctaggtgagcgctgttgcctttgggcttgggagggaattcgcatacgtgatctgaccaagtatgggcgggcggttaaggcgttcgaggaagtctatcggtctcaccttcgtatctgcgatgcgtacgtaaagaagatcgggccgtactgtctggctagggatgggctttcaatcttctctcgtgagaatgctctggtcaccaataccgtctacgagcagattggtgttttggctgagattgggttgcttcatctggagtgggcatcccggtgtgagcctggcagtaagtctctctctgatgccgtggtccgggcccactccatcgcccagctgcttcaggtgctgatccatcacaattcatcgtctagttcgccccgatacgacgagaattcgattgagatatcccttgctcttcttttgctctccgtcacgcatcagcatgccgggttcgcccaatggatacgagagctttcctcgaggctgcactttacctttggtgtgtcgaggagcttccctatcgcaaccgactcgattgaggaccttgtggctatggagatagaagatcttagtgatgagcaggttcagaagctcaggaacctgagtacgttgattccgactgtcatgtattggtgtgcgaatcgcggactgagcgagccttaccggttgctgcatgctcagcgagaaactgcgttcaaaggtgtgtgcttccaattgtggtatgccgatcaaaagacagagtcacacctgtatagggagccagcccagtacgaaagtggagcgatggaggttcctatccatttcccgcttcagatggatgagctaagggagcgtgaagccttgaagaagcaatctggaaatattgcatctctggagtcattctccgccattgccgccggtttccccgggcttatgctgatggcgagcaggcatttccgtaccccgatgacgccacaactctggctattccagcagcgaacggacgagggcgagtcgttggataaggaagtggccgaccacaggggttag

SEQ ID NO: 507226 - DNA, 378 bp, Stenotrophomonas maltophilia
atggcgcgagggatctatcgtcaccacttcggcgagagttttcgtgggagttctgtagcggtcttcggatttctcatagtggagaacgaggggcaatccaatcttcagcaattcctcttgaatcgggcgagaagggatacctcgggattgcccaagtatggagctaaccaatcggttttcttctatcaggtcgtagatcctgatgagaatggcatcgcgctcttaaatctctgtttctttgagaacatcgagatcttctgcgcccttgttccggagcaagggaacatccctagggacctcggcttcgagcttatgaagtggggtctgcccgtgaagttcatgctggatgggaaagagtatccggtgcacttggagtag

SEQ ID NO: 507227 - DNA, 942 bp, Stenotrophomonas maltophilia
atgtttgtcgagtccaaccatcagctggcaatgagttcagttttcgaccagacggtttttgctgcgccacccatcgagctgcgtcgagagatggcagcctacgagtcgttgtggctgcagcaaggggcttggttcaaaagcattgcgcaactcttcgcctcgaaccctcagagcattccgtcggaactcgtgccggcaggcgatatccgagatgcgtggaagctgctcgcggaggaggtcggcctggaaaggctgaagtcggtcggcgtccgggtgcacggagccggtgagtatcctcaaaagctccgtgaggccgatcaccccatagagctcctctactaccgaggcaattgggagttggtcgatacccgcggtgtcgcggtggttgggaccagggcaccgagctcggaaggtgcggccaatgcgcgcagaatcgctcaggcattggtgcgccacggttttactgtggtttcgggtctagcaagaggaatcgactacgcggcgcatactggcgctctggacgcgggcgggcgcaccatagctgtcattggaacgcctctgtttgaccactaccctaaggagaacgctagcctgcaagagcagctggctaaggagcatctggtcatctcacaggttcctttcctcaggtacaagcggcagcattacaagtccaacagcctcttcttccccgctcggaacgtcaccatgtctgcgcttaccgaggcgactgttattgtcgaagcgggaaatacgtctggaacgcttgtgcaagcgcgagctgcgctggctcaggggcgaaagctctttatcttggatagctgcttcaggaaccctgacttggcctggccccataagtacgaagcgcaaggtgccattcgcgttaggaacgtaacagagatcatggaagctctgggcaaaaatgcgacatctaatcaagattga

SEQ ID NO: 507228 - DNA, 624 bp, Stenotrophomonas maltophilia
atgcgacatctaatcaagattgaccctcggcactacgcttggctcgaacaaggtgatcagtgctggtactgcggcgagtacaccagtggtggagggtggggcatcagtgagacgaatcgtcagattctcaatctgaaaaaggggcctggctccaaggccaatgagctccattacaagggtgtggccgtcaattactggggtgatgctcttgcgagactgatcacgcttgagaagacgatcggcaagtgcacctttgttccgatgccaggatccaagcccatcgggcatcctgagcatgatgatcggattggcaaggtcctggccagaatggctgcccatcggcctggtgttgatgtaaggcacatcctcaagcagggctcagcccgacctgcgcaacatgcaggtggcgggcgtaagagtccgacggagatctgcgagacgcttcaggttgactactccctgatgcctccgcctttgtcgccgacgatcttcgttgtggatgacgtgatcacgatgggggcgtcgtttgctgctgccaagcgcatgctgcgggagttgcctaacgtggagcaggttgttggcgtcttcttggccaagacggtttggccgactccaggatgctag

SEQ ID NO: 507229 - DNA, 627 bp, Stenotrophomonas maltophilia
atgcccttcgtcatatttgcgatcttgggcggcctctgcctccttgtgccgaccctcttctatctgacgggctccgaaccactgaatattgacaagtttggcgccttctttggtagcacagcgggacccttgctcagctttctggcacttctagcggttgtcgcgacccttaggaatcaaactgaggcgatgaaacaggatgcctctgcaagggctgccggtgaacacctgcgctggcttgatgcgatctacactgatctctccgagatgctcgacggcactgtcattggaaccgaagacagtatgcagactcttcgagacgtccttaatagtcgagcgatgtcggcgccgccttcagtatcagccacacaaccgcttatcgacgactttgccaagctcctcggacagtactgcgaagcaatcgctatctatcgggaaaactgcgagccactatttgatgtgaagatctacgtcgacagaggagcacggctgctagatttgctcaagcgccatagcaaagatcaagatggaatgaatctgatcgcgattgagatcatggacatgcacctgcgcggtgagaataaacgcgccaaggctgaggcaatgtcccgccccaccagacgctag

SEQ ID NO: 507230 - DNA, 1248 bp, Stenotrophomonas maltophilia
atgatcaatcttggacttcttcggactcagcatggcgtcggtcagggcggcttccatacatctaccttctgcgtgcatgacagtgatctagatgtatctgcatcattcgagatggtctttgactgcggaacggtcagcagggggccagatggagaggtgtcgactgacttcctcgcaagtaggattgatgcctacgtgcagcacgctcgcgtggtggatgccttcttcatctctcacatggaccaggatcatctgaacggtgctgagacgctctgtagtatgagtagggtgaagcggatatttctaccgtacttccagcagggagagcttgctcttttcatggcacagcaaattgtgtcgaatgacaggtccgccttgggccctagggcgcttgctactgctgtcaacgcgctcaggggcggcacgctatttgacgtgccggtaacactggtcggagggccggaagctggaggacgtgatgacgcgcctcgggatggtagtcctgatcggattgacctcgtcgagatcatgccctcggcagccagccgtccagtgggctccactttgccttcaggagcagcgcttgggctgcagattgctggctgccatatcccttgggtgctgctgccttggagctataaggaatcgcccgtaggcttgaatcaattgctctcagatgtgccggagctggctctgattcactctgccgcagactacgtcacagcgcaagacatggaggatttgatcgatctgcgtcctcggatacgggcatctctgaccaggatcataaaggctgcaggcggagttgcggcttcagacttcaacgcgccgtcgatctgcctgtattctgggccaactccagatgatgctcggatcaagagcgcggggtacgtgcagcgtgggacaagtcatctctgggctcaggaggaccccattggttggatcaccaccggggatgccatcttgcgcaagtatgaatttgaatttttccaggcgttccagcacctattcggcgacatcggtacttatgtattacctcatcatggtgctcaaaaaaatcactcgcgtgagttcatgcggcaggtgcgagggcgctttgcgttgatttgtgcgaagcatggaagcaagcaccatccgcattctgaggtgctgtccgacttggcagcctttggggaagagtacagagtcttgacacagtaccttggcctgggcgtatccgaagttgtttcgatggatttcgactgttga

SEQ ID NO: 507231 - DNA, 1203 bp, Stenotrophomonas maltophilia
atgtctctccttacagatctcaaagcccggaagatgtctccgggcggcccagctgtgcctcacggcggcgttactggcttgacgctgctgccctcatcgagccagaagggtcatgggaaatgggtacttcgctatgtaagccccgttagcggcaagcgtcgcaacgccgggcttggaagttatcccgaagttggcattgcatctgttggaaagcttgctagagagatgcgcgagcagatcgcacgagggttggatccgcttgacttaagagctgcagaagaagcgaagcataggactccgaccttcaaggaagcggctagccagatgcacaccgagctcaaacccggatggagaaacgccaagcacgcccagcagtggatcaacacgctggagcagtatgtcttcccaaagattggctctgtccctctggatcagatcagcccgcgtcacattgctgaggtactacgcccgatttggctcgaaaaggcagagactgcctcgaggctgaagcagcgcctccatgccgtaatggcttggggctgggcccatggtttcaatcaggccaaccccgtcgatgtggtcccccacctacttccgggtcaacccagtaaaactattcgccaggagcatcaaccagcgatgccttggaagatagcacctagcttcatccgcgaagagctccactggccgcgccccgatgatgtctcgaggcgtgctctgctgcttctcatcttgaccgcggctcgttcgggagaggtgcgagctatgacgtgggaagaagtcgatctggactcgagagtctggacgatacccgcttcgcgaatgaagacccaggtggctcatcgcgtccccctttccgaccaagcactattgatcctcgccagtcaacgcggggaacacgatcgactcgtcttcccgtctattcgagcaaggaccatcctgtcagatatggcgctaacgtccctgcttcgccgactgggtgctccaagcgatgctgatggccgagtcgctacagctcacggattcagatcgagcttccgggattggtgcagcgaacatgggtacgctagggatcttgctgagcgagcgctggcccacacagtgaggaaccaagtcgaggccgcctatcaccgcacggatctgctggagcaccgccgaccaatgatgcaggcctgggctgacttcgttatgcctctgccctag

SEQ ID NO: 507232 - DNA, 186 bp, Stenotrophomonas maltophilia; identical to SEQ ID NO: 441954

SEQ ID NO: 507233 - DNA, 2052 bp, Stenotrophomonas maltophilia
atgaacgccgtactcaaaaccgaagccgtcgccatcgaagccgccgccccgctggaaatggccgacccgtccaagaacctgattctggttccgctctcgcagttgctgccgcgccgctccaagcgcaacgcccgcaagatgccgcgcctgtccatccccgaactggccgcgagcattgcccgcatcggcttgctgcaaaacctcatcgtcatcctttccgccgatggcgagacttacgaggtggtggccggcgatcgccgcctgaccgccttgaagctgctggcgaagaagaagcgcattcccgccgactacgaagtgccgtgcctgctggtggccgacgcttccgcccgcaccgtcagccttgcggagaacgtgcagcgcgagaacatgcaccccgccgaccagttcgcggccttcgccgcgctggtcaaggaaggacgccccatcgaggacattgctgccgacttcggcgtgtccccgctggtggtgcagcgccgcttgaagctggcgaatgtctcgccgcgcctcatggccgactatcgcgccagtggcgtgacgctggaacagttgatggccctgaccatcaccgacgaccacgccgcgcaggaagccgcgttctatggtgcgccggaatggcagcgcagcccgtccaagctgcgcgagcgcctgaccgagcgcgaaatcgacgccgcgcacgcgctggtgcgcttcgtcggactgaacacctaccggcaggcaggcggcggcatccgccgcgacctgttcgcggaaggcgatgccggaacctacctgaccgataccgtagtgctggaaacgctggtgcgcgacaagctggcaacgctggccgaggacgtgcgcgccgagggttgggcatgggtggaggccgtgccgcatctggcctacgaggaacggcaggcgttccagaacgccccgcgccaccgccgtgagccgaccagccgcgaggcccgccgcatcgcctcgctggaaagccgcctcgaaaagatcgacgccgagctggaagaagcctgcgacgccgaggacgaggccaaggccgagaaactggaacagcggcgcgatcaggtggtcggcgaactacaagacgcggaggacgccttgcaaggttacgctcccgaggtgcgcgaggtggccggtgccatcgtcaccatcgaccgcaacggcgaggccgttattcatcgcggcctgctgcgcgaagccgaggccaaggcgctgcgcacgctggaaaagctgcggcgcggtttcggcaacaccgaaggcgaagccgccaacgacgagcacgaggacgccgacgacgcacccaaggccgcgagcctgtccgatcggctggcgcagcggttgagtgcccaccgcacggcggcgctgcaaatcgaagtcgcgcggcatccgcacgtcgcgctggccgcgctggtgcatggcatggtgcagactgtcttgcagcccgacgcctacggcgatggcctgccgctcggcgtgcgcctcacggtgcaagaccggctggaaggcatggccccggactggccggaatcgcccgctgccgtggcgctgcgcgaactgcaacaggtggcaggtgaagccttgccggaggacagcgccgaactgttcgccgcgctgctggcgaagtcgcaagatgaactggtgcggctgctggccgtgtgcgtggcttccacggtggacgtggtgacgccccgcgccacggtgcagcaacccggcgaggaactggcgcaggccgtgggcctcgacatggccgcatggtggaagccgaccgcagaaggctacttcaagcacgtttccaaggccgtgattctggatgccgtgggcgagtacgcacccgagcaggccaaccggctggcgaagttgaagaaggccgacattgccagcgaagccgagcggctggccgatggcacgggctggatgcccgccatcttcgaggccgcaggcccgcaggacgccgcgcaagaggcaggcccggagcagaacgccccggaggatgccgaggcaatagcggatgaacccgccgaggcgctggccgcttga

SEQ ID NO: 507234 - DNA, 351 bp, Stenotrophomonas maltophilia
atgccccagccactcgccaccgtcccggagcgcgcgcaactgctcgccaacggcgaggctcgtgccgctggccaggccatcgacccggtgcccgtggtgcggctgttcacgccggacgcgcatgtgacctggctgctggccgcactcgatcccgccgatggcgacaccgcctggggcctcatcgacctgggaatcggaatgccggcgcaaggaaccgtcaagctgtccgagctggctggcatcgtcgggccgcatcagcagcccgtgatgcgcgaccgctacttccggcccacgcgcacgctgtcggaatacacccggctggccgagcgcgacggggctatcccggactga

SEQ ID NO: 507235 - DNA, 771 bp, Stenotrophomonas maltophilia
atggtcgatcgcagcgccgagcactggtatccgactgccgcgtatctgtacgtgctgcacttggacgaccttgggacggcctgggaatatctgcgcagaaaccccgattaccggctcgactggctgcgccatcatcgccggccgaaagccgcgcagcaggcggcgcatcgctggggcttgcgcctgctggaagatccggcgttggatgcgcgcgacgcgcatccagcctggttgcccggccatgtggccgtggtgcagctctatcccgacgccgatccgccgcagtatgctcccgcgttcacgttttggcgcattgccgggcacaagcaactgctccatgacggcaaagggctggcgctgatggcgcacagcccaggtcattgcctgcgcttcgcgctggcgcccggcctggaagacgggatggctgtcgcctatgcccgccgcggcggcgccgccgcacctgcgcgcaaccatgcgctcggcgcggccctggcttctgcgaagcccaggccggcacccgccgcgctgcttgagctacacaccttgcaggcgctcgacgcaaccctagcgggtgcgtccttgcgcgaggtggccgaaggcttgttcggcggcgatgccgcagccgattggtacagcgacggcggcctgcgctccaaggtacgccgcttggtacggcgcggcgatgcgctgatgcgcggcggctatcgccgcctagcacagcttccgccgcttgagaagggtcgttttgaggacgacgcaaaacggccctga

SEQ ID NO: 507236 - DNA, 633 bp, Stenotrophomonas maltophilia
atgtacaacgtatccaagccaaccctcgacgaccttccatcgtcgaaacaactgctgcgctcgacgctcattgcactcgtcgccgccatcgcaattttggtcggcatcgtccttccctccgagtacgcgatcgacccaacagggattggtcgcgtcctcggcctgacggaaatgggggagatcaaggcgcaattggccgaagaagccgctgcggatgccgcgaaggatgcagccatgcccgctgccgcgacgacagggaatgcaggcaccgccgcgcctgcacaagcacagaacgccgcgcaggcggagaacggcgccgcctggcgcgatgaaatgcgcgtcgcactcaagcccggccaaggggcggaggtgaagttgagtatgaaggccggcgagcaggtcgagttcagttgggttgccgaagggggcgttgtgaacttcgatacccacggcgatggtggcggccagtccatcagttatgaaaagggtcgcgcggtgcccgctagcaatggcgtgatcgaggctgcctttagtggaaatcacggttggttctggcggaaccgtggcgacgctgacgtgacggtgattgttcgcactcgcggtcaatacatggaaatgaagcgcgtcttgtga

SEQ ID NO: 507237 - DNA, 264 bp, Stenotrophomonas maltophilia
atgaacattcgtccggttttgattgcagctctagccagcgcctcgctcgcttcgccattcgtgatggcccataccggcgggcatgacgacgatgcgaaggcgataccgaagacatgcgagcaattggcagatacgaagcggtatatcagtgacgtggcttatcccgaagtaaagaagctgaaggagcaatgcgacgccgcgaagaagaagccaaacgcggcgcaatcttctgcggaacgccgcccgtccaacggcggcaactga

SEQ ID NO: 507238 - DNA, 783 bp, Stenotrophomonas maltophilia
atggttgagcccatcgtcatcgaagggcagcgcgcctggctgaagcagtacggcaagggaagccgcgcagtggccctgggcctgctcaatttcgttgcccgccgtttccatctggacgccctgcggccaccgccgcaccgtggtggtgatgccgcgcgagaaaccgaagcccgtcgcctgggagaactgcaggcgcaaggcgtgaacgtgcccgacgtgctgggcagcggccacgccgcgctggtgatcggtgacaacggcagctcgttcaatacctgcctgcgccaggccgatgaggccggccgcgaccggctggtgatggcggccatgcaggccatcgccgaagcgcatgcgcgcggcgcctatttcggccagccgctgccgcgcaacctcacctgggatgggcagaaggtgggcttcatcgacttcgaggaagatccgctggaagtgatggatctgtccgaagcgcaggcccgcgactggctgatgttcggttacggcgtggccaagtactacgccgaccgccccgagcagctgcaggcgatgatggccgaggcgatgggcgaggcccaggcgcctgtgcgcgaacacgtgcacgcggtcagcggccgcctgcgcagcctggcccgggtctgcatgaagctgggccgttcagcgcgcgcgctggcgcattcgatcttcatcgcccatggcgccagcacggcgggcgtactgatgctggtgggcctgtgcgtggacttcctcgccgacggcgacctggacgtgctgcagctgttctgctga

SEQ ID NO: 507239 - DNA, 480 bp, Stenotrophomonas maltophilia
atgaatgccgtcaaccatcccgtcagccccctcggcacgctgcgctggctgctcaagcgcgagtactgggaaaaccgcggcggtttcctgtatgccccgctgatcgccggcctgatctcgctggtgatgagcactgtcggcatcgccttcggcctgtttgcgctgaaccgcgcggcgcgcaacggtgcgctgcatgtcgatggcgagagcgtgaacgtcaatggcctggacctggcgctgctcacccgcaacatcgacggcaaggaccttgccgacctcggtaacggccttgacctgaccctggtgctcagctcggcatggccgttcctggtgctggccttcgtggtgttcttctattgcctcggcgcctgtacgacgaccgccgcgaccgcagcatcctgttctggaagtcgttgccgctgtcggatacccagaccgtgctgtccaaggtcatcagcgcactggtcgtggcaccgctga

SEQ ID NO: 507240 - DNA, 165 bp, Stenotrophomonas maltophilia
atgacgttccagatcaagcgggtcctccggcgctactggttcgggcacccgatcttcttcgaatgccaccgtgaggggtacggctaccgccgttgctggctctgggtcgatttggtcgtggactaccgctatttcgtggatggccgcgaggtagcgctgtggtga

SEQ ID NO: 507241 - DNA, 975 bp, Stenotrophomonas maltophilia
atggcctacgccgaattcaccaacgtccccaacgtacagactctgatcgaccttgtggtccagttcgcgcaggcaaacggctggaccgtcgagcgcaacaatctggtcggtgccaatcgcacagccacgctccgcattcctggcgtctccgactacgtccatcttttcaacaccgaccagctgagcctgagatctcgcatctcgattggctatgacgggaacgcaacaccgtcggtacagccgctggtgtccccgcgcgacgtctcgacatacgagctgactggaccattcccacgtttgaagctgttcgccaacggcaacgcgatccacgtcgccatcgcgcaggccgttgccggcgagtaccgccatcacaccttcggcgttcttgagaaggccggcgcgtacacaggcggcacgtatgtcgatgggacctattgggcgcgcacgggaagctatagcgggatggtgacatcgagcggcaacaacgttgttccgttcggccacaacaccagttcccctgggtgtgggcacgtgcgcgcggattcgactgaggacggccgcgccaacagctacagcaggatctgcaactactacagcagcacgctggataccgaggggcaggcaggaagcggtgttggaactatcaaccagtcgaccacttcctccagctacgacagcatgtggttgggctacgccctggcaggttgcgatgagaacactttctctggccgcagcgtgtttcatccgattcagctgagcattcgccgccccggtaccggtgtgtacctctcaccgatcgggcgagtgtctggacttcgtgcctgctacctggaaaagctcgagcccgagcaggagatcaccatcggcgaagacacgtgggtggtgtttccttggctgcgcaagctggccatgagcagcgcgaccaatgcgccgccggccagcggcaactatggctgggccgtgaagaagtcctga

SEQ ID NO: 507242 - DNA, 963 bp, Stenotrophomonas maltophilia
atggcctgggcaaccgacactgcagccaacatcaccgacctcatggcccgcctgcgggacttcctgaccaccaacgcggccctggtggcagcgaaccagcagtggcaggtggtgggcggcgtggccagcggcccgatcgcggccaacgatttcgtgtcactgaagggccgtgggctctccggagaggatgagatctacgtatcgctgcaggcgtgggtagtgccggccagcaactactacaacatgcgcatgcgcggccacacggcgtacaacccagatctgccaggcatcctcacgcagcccggtgcgaactccaactacgtgtcgatcctcggcgtcaactcacccatcaaatactggtttattgccaacggccgctgcttcaaggtgatcacccgcatcaacgggcgctatgacgctctgtatgcaggtttcatcctgccggagcacctgccgggcgactggagctacccgcttttcattggcggctctttcctgggcagcaacggcgtagcgtcgttggatacctacgagcattccaatttctggaatgcgctcgcggatgggcagagcaataccgcgttgagtcaaagctatctcttcacgccgatgcaggcatggctaccggttcgtaatgggtccagcttgggtcgcatcactatgccctggaaccaatatgtgggtaatcagaacgtccgcagttgcctcgatggtcagcgttggctacagcgcggtcagcttatggcagtcggctgggaccggggcagcgttgatcgcggcggtcgctacggcgaggtaccggaaggcggacagttctacggcagctttgacggcgtcttctacacgccggcctttggtgccacggctgaacagattgccacggtgaacagcgtggaccacctgctagtccccaatgtctatcgaacaggcgatgggcagtacgccgcatttgctctggagtaa

SEQ ID NO: 507243 - DNA, 570 bp, Stenotrophomonas maltophilia
atggcgcagtttgaagtcacccttgattcggcaacacctggtctggccgatgcgctgcggcagctggagggcgaggcgcgccaactgatcttgaaggactggggcgagtacctgctgaggtccacgcgcgagcgggccgcaaaggagcgggacccgactggacgtcgatggcgcgcgcttgagcccagctacaaacgctggaaacagaagaagcgccccggcgttccgattctgaagttcgatttccacatgctcggtgacatggcttcatggcaaacggacgggaacgatgccgtcctggtcggtaccaatgcaccctatggcgccatccaccaattcggcggcaccatccaacgcgccgcgcgtccggccaacatccacctgaagacgggtaagggcggcagccggttcgtcaaagccagtcgtgggaacgcgcgctacaagcgctcggtcacaatgccttcgtacacgaacaccatcgctgctcgtccgtggctcggtgtcagtcgcgaggacgagaaggagctgctggatatcgcccaggatcacgtgagcggcgccttcgagtga

SEQ ID NO: 507244 - DNA, 1278 bp, Stenotrophomonas maltophilia
atggctgcggttgcctacgctcaattgcccttcaaggagcagatcgagttcttccgtcgcaagaagaacgtgctgaccgagagctacctcgacgtttgggaatccgagcacgacaccagcttcatggtggccggcgccaatcgggacgcgctgctggcggacttccggcaatccatcgatcgggtcatcgccgaaggccgcacgctggagcagttccgggaggacttcgaccggatcgtggccacgcatggctgggactacaacggcggccggaactggcgctcgcgggtgatctacgagaccaacctgcgccagagctacaacgccggtcgctggtcccagctgcagcagctgatcaaggtgcgaccgttctggcgctacaaccacaacgatgccgtcgagcacccccggccgctgcacgtgtcgtggaatggcctgctgctacgccatgacgatccgtggtggcgctaccactatccagccaacggctggggctgccagtgctacgtcgatgcgctcaacgagcgcgacctgcgccggttgggcaaggatggtcccgacaaggctcccgagatcgtgatgcagccggtgaccgtcggccagcgcagtcccggtgggccgcgcaccgtgctgacgccggcaggcgtcgatccagggttcggctacgcgccgggtgcaacggccgaccactggcccagtggccgcggcggtccggtcaccccgccatcgttgaccgggcagctgacctccgctctacagaacaccctggagacgggagcgcggctgccggcggcgccggccgctgccagcgctgctcaggccttggcgcggccgcgcgccagggatgcgctgcaggccggctatgccagctggctgaccagcattgatggcgatgctgcccacgctgcccgctacctggccggagcactgtcgcccggactggtttcgcagctgcagcgtgccgccgttcgcccagcgacggcggcctttgctgtgttggccgaccagctccccatcactcgacctggcgcggtggccatcgccgcagccgagctgcccatccgccttctcgatgcggtggccatcctgctggacgctgccgcaggccgcttgcgctatgtgctggcggtggggcgtcctgccttcatggtggtcgatgtggccatctcggaaacgggcgtcagcacggtgcagtcccagctgcagatgctgatgcccgccgaactccagcgcggcgttgccgatggcacgctgcagctgctgcagggagagatctga

SEQ ID NO: 507245 - DNA, 210 bp, Stenotrophomonas maltophilia
atgagcgaacccgcccccagcctggatcttcacctcaaggtccgcaccgccttcgttggcaagggcaccagtctccgcggctggtgcatggagaacggcgtcccgccgcagaacgcccgagacgtcctcatcggacgctggaatggcccgaagggtcaggccctgcggcgccggctgctgaaggccgcaggcctgagcgcctcagcatga

SEQ ID NO: 507246 - DNA, 507 bp, Stenotrophomonas maltophilia
atgccgcagctccagcaaacctgtaccttccggatcgacggggtccgcggatctctgacggtgcgtgccttggccctggctgtcttgatagccgaccaggcggcacgtgccaacgtggagatccacgcgccgtccattgaactggatggcgtgcgcggctacgactcgacctgcggctccgtaagcgggccagctcgcggcagtgtccagttggctttgcagtacatcgaggcccgaggcgacgggttcccttggcggctgaagcggcacatttcgcagccggccctgctgttcttcgaagatcgcaccgaccccgaggtggccaccaccgggccgcgtcatgcctgcgtcaactgcgacatgcccaccggtgcgcccgagtcgcccatgtgcggcccctgcgctcagcaggcggtgggcgcgatggcggccgcgctggctgccgccaaccaacgtttggatctgatccacgaggttcagaaatccatctgcgaggtgcaattgtga

SEQ ID NO: 507247 - DNA, 909 bp, Stenotrophomonas maltophilia
atgtataacttgctgatggtctaccaggagggcacctgggatcaggacgagttcgttcttgagctagccaggttcctggaatacacggcacagcctcttattgatcggttcggcgccctagatcaacaaactatccaatatttgaaaggcattcctgcgctctttgcttatgaagaccgtggtcgcgaggccggccttcctgcccgtgttggcaagattgacgatatacaagttcgatatggtggcgtgcgtattacgtggtctttcgatgcgagtgtgagccctattcccgcgttggctcttcgcgagatgtttgccgcgcttgatgtcgccgcagatagaagctgggagcacacccggacacactgggctgttaaagatgctgatctctatgatgtcctgcttcgatacgggctgcttgagaacgatcagaccccaccccctaaggtatttgtttcgtattcgtgggactcccccgagcacatcgaatgggtgcggaacttggtcaacgccttaaggatgaacggaatcgatgcgatatctgataggacccacttgaggttcggccagaatctgcctcacttcatggagcagtcggcagcatgcgatcgcgtgattgtcgtttgcaccgagaactacatgaatcgtgcgaacggtagggtgggtggtgtcggctacgaacaccttgtaaccgcagcggacctcgccaacgatccattgtccatgaggttcattccagtgattcgcgatcccagggatgccgcgcacatgccaactaatcttagggggcgtttctacgtcaacctttcgaatggtccggatttcaatggtaactttcaggagcttgtgagagacctgcacaacgcggtgccacctataccgccgatcggaagaaggccttctttctga

SEQ ID NO: 507248 - DNA, 585 bp, Stenotrophomonas maltophilia
atgggcgccgccgcgttctgggtctacccccgcgttactactcgggtcaatgtggcgtcggacgtcgagaacgttcgggacctggccagccgcgttgatcggtcccatggcgtcattggctcgttccgcggcgtcagcacgttgaacgtgcttgaagatgggcttgcccccgccgacttccgccaaggcagcgcagtgaccatgagcaacgcgtggggcggcgcagtgaccgtgtccccggccacggtgcgcttggcgggggatgccttcaccgtggggctgtctgggcttcctgcgcgggcctgcgtgccgttcgtctccgccatcgcggacgacgtgaacgtgcgggacgtgatcgtgggcaacaccagtgttttgctgagcaaccgagggagcctggacgtccccggcttaggattggcgtgcggggtcgatggggccgtggtcgagatcgtctattactcgggcatggtggctgggtcgtcggtcgccgtggtacccacgcttcccctgccctccacgcccgccgtccccgccttccaacgccgaccccggcggggcccgtcactggtgcgcccagcgtga

SEQ ID NO: 507249 - DNA, 327 bp, Stenotrophomonas maltophilia
atgacccccgcaccctggccatcgtcggagctcgttcgcctcgcatgggcggcacgccgggatcctcttgcccggcagcacctgcttcaggcgttccaagagggggccgatttccatacccctctgtccagcagcgatctgaacgacgacctttttgccgtccctggggattgcttggccggggtggtgattcgggaactgacgggcgtcaaggacgccgaagagtggctgcatgcgtttcttcgcgcgcacgagttgcatcaagctgccacctactgtgggaagcgctggcaagcggcgcttctgatgaccgtgagcccgcagtaa

SEQ ID NO: 507250 - DNA, 978 bp, Stenotrophomonas maltophilia
atggaacggtcgagaaaagatgagctgaacgagtggaagtggcccactcgcccaaccaacgaagaagagttcgacgccatgatgacgtctctcgacagtcgcttttcggcgatgggcatcgaaccctgccatcgaggaatgagagcctcccagcaaatatcctggaccttgaagctggatggcactccaatcctcggcggaccaccggacaggggtccccccttcggtccgcgcgacctacttgccaaggtccatgactggtattcggatcactacggcgacgcgatgaagatcgacttctcaccgggaagcttcctggttgtcgtcaacggcaacctctggaaggttcgtcttccgatgatcatgggcgaagggacgctcgtgtttgatcgcgacctatccatagcccagaagggcggtgttggcaggggtccggcaatccacaacgtgttgtgctcggtggagggactgacacaaccgatggccaacaagttatcggacccggagcttgcgtttttcttccacgcatttgtgcatggttggcaagcaatcatgactctggattcactcggcgggcatgcactgttctctgaagcaaaagcagatttcaggcacagcgtcgatgccatcgccagccgacgcgagtatggaaaagcgcgctgggaggcggctcaatgcgctgagaagttgctgaaaggccttcttgcccgcgagggacactcgtatccaaaggatgccggaaaggggcatgaccacgtccaccttggcaagctgctggaggaaaagctcagcattcgtatcagcgaagagattctaacggcattgaagacgtcaccggccgttcgatacggggaagaggccagcacattagagcaagcgatggcgtcccatagcgctctgctggcattgctaaggacgcttgggccacaccacttcgtcgagaccagcgatggcgattcaaccaatggaatcggctag

SEQ ID NO: 507251 - DNA, 939 bp, Stenotrophomonas maltophilia
atggacaacggcaacgacaaacaacggatcgccgaatggcgcgcaaagcgacgccggcagcgcttcgagcaggaactggagcgaaatcgcacgcggcagttcggcgggcatttctttctcgaggacgatgaaggggaaggcatcgatcctgctgacgccgctgcggacgcagaggagctggccttagcccagcaaaagttggtgcgcgcacaggccccgcctcgcctgacgagcagcgagctcaggctggcgttgtggtcatgggatttggacgcgctgcgccagttgtggagtgagcgggagcaaaagctgacctacctggaggacgccgctcggttgcttgcacacattcgtcaccgatccgggattgaccccgtccttcgtgccccggcgcagatgatgaagaacgacgcggtcgaagcactcagggggacgctggaagagtccggccgcctgattccgagctctgcacccgcctcactcgctccgccagacgtcgaggtggatggcaagcgcgtcgagcaggtgctgcgagtcatccgggatgggcaggccgagttcaggaagcgattgatcgagcattacggggccgtgtgcatggtcacaggcacggcgcacgcggccgtgatcgatgctgcgcacatcacgccctacaacggcacgtccaccaatgcgctcagcaacgggctgctgcttcggaaggacatccacgccctgttcgatgctggtttgcttgtggtgtctccgagcctggtcatctccgtctccagcaccctttctgatgcctgctaccgcgatctgcatgggcggccgctgagacttctagccccgtccaagatctctacgaacgctctgcggtcccggatgcttggcaaggcagcggacgagatcagcctttcaggcgttaccctcgggaacaaaaatgaatctcgcatctga

SEQ ID NO: 507252 - DNA, 306 bp, Stenotrophomonas maltophilia
atgctctctctactcaagcacacgacgcggcgagaggctgaagaggcggatcaagtaagaagtgcattggagttcggttcagagcttgaatcactcgagcaggactatgccgccggattgcttaagcagggtgaatacgaacggcaaaaccgccgtttgatggcactgattgagggcggcgaggccgcccgtgcttggctgaagcaggaagaagcagagcgtgcagctgaacgcaagcgccttgaggcgggaggggatggtcgttggtcggagcttgaggatgatccgtgggagggtgaggagtga

SEQ ID NO: 507253 - DNA, 384 bp, Stenotrophomonas maltophilia
atggccctctacaaaatcgcagatcatctcgaaaaggcgaaggccttcctcacccaaggcgaggagtcctcgctgatttatgccgcacttgagcttcgattctgtctggaatccgtggcttatcaaaatctggccgcctacggcgacgacatttcagccgagttggctagagagtggcgacccgatcaaatcatcaaaatgctggccgcgttcgatccaaactctgatcaaacggccagcttctctatctcggtgacgccgctgcccgaagacctcgatttcgcctcaagtgacttaagagctgccttcaacgacagcgatttcctgccgataggcgaggccaaacgcattccttggagcaagtttcgtagctactacaactag

SEQ ID NO: 507254 - DNA, 2202 bp, Stenotrophomonas maltophilia
atgcggcggggaagcgtcctgggcctcgcgctggccctgtccatcggcaccgcgcacgcggccatcccagacggggtggaacccgtgcttgcagcgcccatcctggccaacggccagcccgccaaagaccccgtgttgctctggcagcagaacggggcttgggtcgcggaagccacgacttggcagcagctcggcgtgacccttcgcccgggcgaagaggggcaggacctgactgaccaagccttgggcgtctcggtggcttacaaccccgagaacgccacggtccggctcaccatccccgccgaccgcaagccagcccagcagctcacccgacgaggcaccccggtttcccaggtctcgccggccatcgggggcgtgctggtcaactacaacctcgccacccagatcgcaggcggccaacaagccacgtccttggcactggacgcgcgcaccggagggcgttggggcgtggtctccaccaccgggcagctcaaccattcccccagcgggtttggcatgcgccgcggcatgacggcctggcagaaagacgacttgaagcgccaacggacctggcaagccggcgatgtctacgccatcccccgcatcggctccgtggcgctggggggcattcgcctcgcgaaggacccggcagccctggatccgctcacgccgacgtggcccgtcccgaccttggggggcatcgcgttggatccggggcaggtcaaggtcctgtccaaccaggcggaaatcacgcgccaagacgtcaaggccggccccttcaccgtggacagtcgaaacgtggccttgggagccagccaaacggccgtggtcgtgcgggacgcctacggccgggaaaccgccgtttccactgcacggctctacgtcgccccgaccctgctgcgtcggggcctctccgcgtgggaaatcgccgccggccaggtccgcgaagacgaaaaccgctacggcacggccggcgtcagcgcttcctgggccaggggcgtcaacgaccgctggaccatccgagccggtggccaggtggacgagaagggcaagggcaacgtcaccgtgggttccacctgggccccgggcacctggggcgtgctcgacggcgaggtgggtcgctcaagcgacggcgggacgcgctgggctgttgcctacggctacaaagggcccacgtttggcgtgcgattggaacacgaggaaaacgacgggttctggcgactgcagagcgagaccgcgctgcccatcgcgtcgcgcacccaagccagcgtttcctaccgtccggatcgccgcttcaccttgcgcggcacctacagcgccatcgacacggggcgctccagcctagccttcgcctccctgagcgtgagcgcgaacctgggcaccgcgggccaggtgtccgccaacgtgctccgagaccttcaaggcgacgatcttcaagtgtccgccagctacacctaccgcttcggcagcaaggccagcgtgggcgtgcgggcccgccaggccccaggccaggatgccctgaccacccgagcgacctaccgcaccgagggcggccttcgcttggctgcagagcacaccgagggcgaactgggcagcacccgggccacggccgacgcgatgacccgttacggcgacgcccggatcatgctggaccgctacgacgggcaaacccaggtggcggccaacttctctggctccgtgttcctggaccatcgcggtgtggccttcggaaggcctgcctacgccagcttcgcggtcgtggacgtgccgggccaggcgggcgtgccggtgcgggtcaacggagcgccggtcggccagaccaacaagcaaggccgcgtgctggtgaccgacgttccctccctgctacccaccaccgtcagcctcaaggacaaggagctgccggtgggcgtggagatcggggagacggagaaacaagccgtggccccccggcaaggcggtgtgcgggtgaccttccccgtgctgacgcagaacgcccgggccttcatcctgacagctccgatcatcgcgccgggcaccgtcgcgtccacgccgaacgaacaagccatggtcggctacgacggagccctttacctagaacaccctgagccggggatggccgtcgaggtttcgggcgtgtgcaaagccgtgttgccgtcgccactgccgggcctggacgaagtggcggagttaaggtgcaactag

SEQ ID NO: 507255 - DNA, 480 bp, Stenotrophomonas maltophilia
atgcgcgttttggttctttctctggcccttgtcggcctgctccccctgacggcctccgctgcggacaacggttccgcccatcgttacggcaccagtgaaaccttgagtgttcagaacgcccgcctgggcgaggtgctcatggttcgcagcgtggacatcaaatccgacaagcgcctcaacgccggttccgcaatcggcgccgccgtgggttatgcgtccgtgcgagaggtgaacaaaaactatcgaaacgcttcccggattgcggccgggaccatcggcggggtggccggcacggcggttcagaacggcttgagcaagcgcaagcgcaagggcgtggaggtgtatgtccgcgacctggagagcggcaaggtgattgccatcgtccaggcagacgacttgctgatccgcgccggcgacaaggtgttcttgaccggccggggttccaaaagccgcgttgtgccgattgaagggcagcgctga

SEQ ID NO: 507256 - DNA, 654 bp, Stenotrophomonas maltophilia
atgaacgctgttgctcgccccctcaccaccaagccgaagaagcccaagcagaccaagctttcgctcgccgtcgcccacaacgtgggttacgaccgggcaccggaaggcattacgaccgagacttggctcaccccgccgaagatcgtccacggcctgggtccgtttgacctggatccctgcaccccggagcagggcatgccctggcgcacggccacccggatgctgaagcccagcgacgacgggctcaagacgccctggccgaaatcggcattcgtgtggatgaatccgccttacggtgggcacaagaacagctcgacctcgcagcaccgctggatggagaaggccgcagagcatggcaacgggattgcccttgtgctggcgcggatggaaacgagctggatgcaggagtcggtgctcaaccaccccagcgtttcagcggtggtgttcacgaaggggcgtctgtcgttctgccgcccggatgggaccctgggcacgagttgcccggcgggatcggtgttcatcggctacggtgctgaagccgcgcgcaggctcaagcggggagtggagtctggcctgatccgcggaagctactttgacatggcccgcgtgggccgggtgttgggcgctgacgtgggggcggccaacgatgagtaa

SEQ ID NO: 507257 - DNA, 525 bp, Stenotrophomonas maltophilia
atgttcggcaagttcaaaaagcaggcaagcaagcctatgaccggggcggagctggcggaagaaggccttcggcaggtggccatcgccgccaagaacggggacatcgatttccagcgcgggcgggttcacgaagacatctttgcgcacgctgatcaacctgctggaatgatgaggctgacttacgtcatgatcagccccaccgtcgagaacgaagttatcgcccgctgcgtcatgctgctcgatcgcgtcgaaacaaacacgccggtgtttcagatggactgggcggttctggaaagctacagagggcaaggctttggcatcgccgtggcattgaagtcattgatggaattcaccaacggcatgcagggcaagcttaagagtggatacgtcattgaggcggtggttgacgaaggcaacgacgcgtcgctgaagatcgcccgcaagattttgggtggagagaaggtcctaccgaatcctgccattggaaagaacacgcacagttttcttcgcgtttttcctgcataa

SEQ ID NO: 507258 - DNA, 1278 bp, Stenotrophomonas maltophilia
gtgctgacgagccctctcgatgatcaggtgttggagcggtgcttgggcgccgcttacgtgctgctccaagagagcgggcacaccgacgcggcagatcttcttcgcaccgcgaccgcagtgatccagcacgatacctctgacaactggaacgggggaacgaactactggaacgtcctgctggaggtgccagcgccggagtttgcgcgcttgcggcccaagctcaaggacgtttgcgaacagatcaccgaggcattgacggaagccattcccccgaatggccacgacttgttcgccgcccggttgattcccatcgtgggccagaacgaagactggcgctcctcctctccagttgtcattccccgtgccgttcgtcggaacatctttgatgggctccgattggagcaggtgaacgtgttcggcgcgttggacgacaccgagtttctaagccgcatctacgagctgcggcggttgccatccaccgattcgcgctacaaggacgccgcgggggacatctaccagcaccgggtcaacaattttgactgggacgattactggatcttcgacgacgaccgatttccgttgctggatggtccggccgataccttcctacggttcctggcggaaatggtccacccggtggtgaggcctgaccgggaggaggccgccaccatcgttgagcacctcaacgaccaattgcggcaagcgggttggcacttggtcgaagtcgagcggatcgcaggaagggcccggtatgaaccccgcccattgacctccaatggtcaccgatcctttgagaggggaaggtctgccgccgattccttggacgcgggcgccatcgccaagcagatacagcgcatggaatacgcggtcgagaaagatccggagctggccatcggcagcgccaaggagctggtggagtcgtgctgcaagaccatcctgggcaagatgggggtggagataggcaagagcgacgacatgaacgacttggccaagaagctggccaagagcttggacctggtgcccgaagggatcgatgaccaagccaagggggccgagtgcatcaagcgcatcctgagcaacctgaaccaaatcgccggtaacctggccaaccttcgccgcctctacggcaccggccatggcaaagacggcaagcaccgtgggctgcagccccggcatgcgcgcttggcggtggcgtctgccgtggcatttgtggacttcgtcaccgagacctaccgggatcggcaggtcaaggcgaaaccgacgtccaccgttcgctga

SEQ ID NO: 507259 - DNA, 1419 bp, Stenotrophomonas maltophilia
atggatattcaaaccgtcgctgcaatggcggtcgcggccgtgtttggcggcactgtcgtatggggtatcaccagccgacgccgccctgtagtgaacgaacagttgaaaggacagtgggatgcagtctcgctcaaagcccagctgcacgaaaccagcctgagccctcccggccccttgcccttaccggcaaccacgtcgttgatcgtcgagaatcagcagggtgaaagagccctcgctgtgacgcagctaccgctggccttgtttgacaaagtctccggcaagagccgcaagccccccaaagcggtcggccgcttgaacgcccttctccaggcaggtcccacgagcgcattggccgcccaaggggttccagaaaacgtttttgaggtagcgatcaacggtcctctgctcaacgctaaagattcggcgggcaatgtcattgagggaacctaccgggcgatgaccaacggcggaagcggtggcatcaaggaacatgggttgctgaccaaggccgatagcttgagcaacgctatgaatgcagccgcgatttggcaggtcgcttccgtcgtagtcgcccaaaagcacttggccgatatcagtgaaaaactggacggcatcgtgaagaccatcggacgagtggagggcaagctggatgctcagcgccgcggtgttttgatgggtgccatggatacgctgagggaggtatccgtgcccatcttgcagggtgagcacacccctcataaccgacagacccttgaagaccagtatcaaaagatgatggacaagaagcacgagatccatcaattgctaagggaacgcatccaagccttgaccgaccttcaggacacccagacatttggcgcctcagactttccccagaaaattcgcgaggaaatgagcgagatcgaaacattgttccaagaggccttgctttgctctcgcgcccgattccaagcatggtcactgctaactgcacttcctggcgaagcgctgctgaagcaggaacggtatcgcaccgtgcagcatgatttcgatcagaccttttcaccccaaggactccgggaattgttcgagcagaacatcactgatctgatcatgcgcgttgactccaagatggtcttcaaaacaacgctggccacccaccggacagagctcaccaaagagctccgctcaacccttcaaacactggatcaagatatccgggcagagcgctcgatcattgcgcaaggggaagcgctattgagcgatgcgacccaacccacccgtgttctcgtcaaaacccagggcactcgggtaactgcgttcaagcacctgcctgccaacggcacgccagagttgctggagcacgacatgcaaccgtcggttttcccggcacacctgctacagacgagcgctgcccccgtgctcattgataggcgttga

SEQ ID NO: 507260 - DNA, 516 bp, Stenotrophomonas maltophilia
atgggttacgatgccggcatgccggtgtccgaccacttcgcctttcctctgcttcgcatctttggccgtctagaggccaagctgaagcaccgccccagatttatccgccaagggaaacgcgatgccatggtggattggtgggcggtcaacgccgttgtttccgcattgccccccgccgcgttcgtggagcggctggacgacgacactcgggacaagattcttgccggagaacgcgaccggcccaaggtccaggtagtcgtggaggtggagggtctacggcgggcgcgtttccgccagcgccccttggatcggcccgaccacgatccatcggatgccattgctttggtagaggcagcccgacgcgtgcgcaacaacctctttcacggtggcaaggaagatccgggtgatcagccgttcgacggcgatgacgacgaatgggggcgcgccgccttggacgtggccaagatcctgttggatctggtggaacatggcgcgtttgggccagccgaaccttga

SEQ ID NO: 507261 - DNA, 282 bp, Stenotrophomonas maltophilia
atgtggttggctggcgctctgctagccgtttgtggtcaggcttgggcgggtcagggggaggtgtgcttggcagatagccagaacacgcccgctggcatcatgaagccttttgaggacgccaccgtctttcgctgcaagacgatcggggcggtgaccgtcgcgcagctctacgcgaagggttggcgggtggtctccgtgtttccgcaaagctcattggatccagcgaagcccggtgtggtcagcgtggtctggaccatcgtggctgaaaaagacgagcgctga

SEQ ID NO: 507262 - DNA, 345 bp, Stenotrophomonas maltophilia
atggccattccgtatgcgcgagcgaaaagatggctggagaaggagaagggactgtcggtgtcggagaagccctatgggttcgaaatcgacgagatagccaacgccctgtttaaaagggggacgaagctgattgccgactggaatccctcttcgccagtccctgacggcgccatcctgtgtatctacagcagagttcgctaccgcgattttcattacgtcctcaaggtcccagggggttacatggacccctggtttgacttgaaggaaggccagatggtcggcaaggtgcgtgcctccctgccgaagggaacgaagatctacgtggcacttgtgccggctctttga

SEQ ID NO: 507263 - DNA, 1461 bp, Stenotrophomonas maltophilia
gtgtgcctcttggcgatgctcgcggtcgcccaagccatcctctacgtgcgtgacaaggaaggggcggaggcagtggcggaagccgcggtgacgcgcgcggaggccatatctcgtaaccggcgcgtagcggccgaacaagcctctcgcatcggacagccgccttgctccgacaccgacatcgactcactaaaggagatcgcgttccgctccatctacatgagcgacatcggtcgcatccgagacggacgccttgtctgcagcgctctctgggggcgctcgcgcccctacaccctccccgccccacgcttctccagcggcgctgtccggctttggcacgcgtcggatctcgttgcctccccctacaccgggtccaatctgatcgcccaaggcgacacgttcaccgtgtcctccccgtctgccttcgagagcttggaccctgcgcgcagcagctccatcagcatcgaaacgaaggaccgatcgtttacattccgcaccttgtccccgaccagccgcgtcggcaccccgtctctcgtccaagctcaacattgcagccgggtggccgacgtttgcgcgttcgttaccagccctaggcacgtggtgtccgaactgccctcggcgttgctcaccaccatcctggcagcgggtgcctcggtagggctgttgctcgcgttcttgctgatcaaacaccaaatcacggctcggcaaaccatccagcaacggttggtgcttgcactgaagcgcagcgagatcgaactggcctaccagccactgcgtcgaattggcacgcgggagctcgtgggatttgaagcgctcagccgctggcgcccgccgggagacgatgagatcccgccggccatcttcgtgcccattgcccaccgattcggcctgagtcctgatctttttcgatacgtgctggcccgtgccatgaatgatctcgcccccgcgctgagggagcataggaacctctacgtaagcatcaatgccgagcccgtggacatggcccaagagtgcgtcgttcgctacatcggcagcgtcaccaacgattttggcgtgttgccagagcaaattcgcatcgagatcaccgagcgggaagaactcgtgtccgctgccgcaaagagcaacatgcaggccctctcagttctgggataccggttcttgatcgacgacttcgggaccggcagcgccaacttctcccacctcgcccaatcgccatttcgaggaatcaagatcgatcgcatgttcgtggccgctatcaacgaggactcccccctgcggcccgttttgccagggatgtatcgcatcgcacgtgagcttgggctggatgtcatcgcagaaggcgtcgaatcagaggcgcaagatttgctgctctaccggattgctccagaggctattggccaagggtggcactatggctgccctctctcaaccaaagacgcgcttgccgccatccaagttgggtag

SEQ ID NO: 507264 - DNA, 1113 bp, Stenotrophomonas maltophilia
atgacaactcaccacggctggcaggcgtgccgcgcatgccatggaccaggactggatgtgcgtgtagtgggaggctggcacctccgtgccaatcccggctactggggaaccagcgtccctaaaaccttggtcctggggttttccaagggggccacccaaattgccgccgcccaacacgggagcttcgatgcggtcgcctttgcaggtgccatgcgccctcgcctcgcagccgtgttgcacgagcttggggttgatctgggtgggcagacgatcgacgacgccctgaccgccgaaagccgccacatgggcgccgcctccttggtgcgctgtgggttgtcggcgatggagaaaggcaagctggtgagcagtggcaccatcatgcccaaggccatgcgatcgtcgttgcccttggaagccatgaaaacatgcgtagcacgccacttggacccgcttcctgatagcgtggagcgcgtggtcttgttggggaccaccgatgcctacgtgaagggggtcaaggcgctcatgcgccagcaattcaacgatttccatgaaatcaacgaggtagcctttagcgcccaaggccggacatgggtgtttgcgtcgcaccccagcccggccaacgggacctttcaagcgtggatcgacggtgacaccgccacccaaccgggccgcaagaagtggctggcgcgccaagcgttgggccacatgaccccagcgcggcccctgtcagctccgcctcgcccggcaccggcaccagcaccagcaccagcaccagcaccagtcaagcgtgccacgccgcctgcgccgattgcgcccattagggcgtccaacggcgaccgttttgcccgagccttccacctggttcgccacgatggaagggtgatcgtcccggtgcggatgagggaccgagacacgggaaacgtggcgttccgggtggccaagatgggcaacaccaaggatggccagcgcgagatccacgacgaagctgagttgttgcgcttgtgcgagagcgggcaataccaggtgcgcgcccaaccattggacaagtccacgccggccaactttattcggccgctgctcaaccaccggatcgtgaagcgccctgcccattga

SEQ ID NO: 507265 - DNA, 1257 bp, Stenotrophomonas maltophilia
atgcaggcgttgtatctgtttgcgctcgaccccgtcgccgaagcttatggggacattcactcatacgggttccgtagtttcaggtcgacagccgacgctgccgcccacctgaagacctgtctgagtacgaagaccagctcacgctgggtgatggaaggggatatcaaaggttgcttcgacaacatcagtcacgactggctgatgaaacacgtaccaatcgaccggcatgtgctgtcgcagtggctgaaagcaggcttcatggaagaccgtaagttgtttccgacggacgcgggcacaccacagggcggcatcatttcccctgtgctcgcaaacattgtccttgacggactgggccggctcatcgatgcgctcccacgccgcaacaagtgcaacttcgtccgctacgcagacgactttgtcatcacaggagcctctgcggagatcctggaacgcaaggtcaagccgatcgtcgtcaagttcctcgcggaaagagggctcacgctctccgaaagcaagacgaagatcacgcatatggacgaaggcttcgacttcttgggttggaacttccggaaatttggaaatctcctcctcagaaggccgtcgaaacaaaacaccaacgccttcatggctaagatccgcagccagctccggctgttgcggggatccacgcaagacgacgtgctgcatgtgctgaacccgatcattcgggggtggggcatgtatcaccaagttgtgaacgcctcagaaccgttcgcaagactggatcaccttatccaccacgcggtctggtgctgggccaaacgccgtcaccccaccaaaggtctccgctggatcaaacgtcggtacttccggcgcgacaagtcccgcgattggatcttcggtgtcggtaaacacactctgatgcgcctgtcgtccctcaaggtcggcgaatacatcaaggtgcggtccgacgttagcccctacgaccccaaggacgagagctactttaatcagcggttgcaataccgtatgaagcgctcgctgaccgggaaaaggaaactgctatggctttggacaaagcaagaggccaagtgcgcctgctgtgggcgaaagctgaccagcaccagctggcacatccaccacaaggttttcagggtgtacggggggtctgaccgcctctccaaccttgttttgctccacaccacctgtcacgagcagcttcacgcccgtgccaggctacggctgtcgccccctcccatagaagaagggggtttgtga

SEQ ID NO: 507266 - DNA, 660 bp, Stenotrophomonas maltophilia
atgagcagactgcgtacccattcacccgtacggaaattgagaaatagccatcgggcccttaccgggaaggtcaatttgcaagctggcggcatggctggctttgaatcctcactagagcgggacctgcttctgatcctggatttcgaccggacggttctgtccgtcaaggagcagcccttctcgctgacgcacattcaggatgcgtcggtccgccgctatacgcctgacgtgatggccgagtacgacagagatgcgctgcccactatcgtttatgaggtcaagcccatagagaagctgcgggccgactgggcatccctgcgcccagggttcaaagcggccgtagctcactgccggctgcgtgactggcagttcaagatcgtcactgagcgtcatatccgtacgccctacttggcgaatgcgaagttcctgcgacgctaccgggacctgccccccctgttggtccgccaggcccagcttaggtacacggccagcgcggttggtcctaccactcctcagggactgttggctgctgcctactggccgaaggaggaacaggctcaggcgatccccgccctctggcagatggtcgccgccggcgagttcaacatcgatctgacgaagccgctcagcatgcggatgcccatccagttggcggagtag

SEQ ID NO: 507267 - DNA, 2832 bp, Stenotrophomonas maltophilia
atggtctcctcaaatttcatcaatatttcgccaggcgttgaggtcatggttggccagcgtcggtaccggattacgcggtctttggacatcaacagtgtcttggccgaagacgtggaaaccgccaagattgcacggttgcggatcgagaccatgtcccgtgtgctggaggcagaagagggggatgagacacccaacttctccgttcaccacttctccgatgatctatgggcggtggcacaacggcgctttgaagctatcaagccgctcctggacaaccctcgccgaagccgatcctcagtggcggcggccgccttggccgcaggagtcaacacatccacgctgtataagtggctggcgctgtatcacgaccatcagcatgttgcagctctcgtcccaacaaggcgcggtcgaaacagaggggcacgctttctacaggcagaccaggaactcgtgatcgcttcggtgatcgaggacttttatctcgataggcagaagccaagcccaaagtcggttgtggatgaggtaacccgtcgttgccgtagggccaagatcgatgcgcctcatcccaacaccgtccgcaatcgacttgctgatatccgtcccgccacggcgctgcgtcgtcgtggccagaaggatagggcgcgggacaggtacgagcccattcgaggctccttcccgggtgcggactttcctcttgccgtggttcagatcgaccacacgccattggacgtcatcgttgtagacgaggagcaccgcaagcccatcggtcgcccatatctcaccttggccattgatgtgttcagccgcgcaatcgttgggctgtatctcaccttggacgcaccgtctgcgacttcagtggcgatgtgcatatctcatgcgatgaacacgaagaacgagtatctgcgcctgcttggggtagagggtgactggccggtatggggccagataggcacgttgcatgcggacaacgctagagagttcaagtgcaaagcggtaaaccgcggctgcgaggcgaaccagatcatcatgcagtggcggctccaagtcagcgacatcccaatcgtcacgaccaccttgaaggcccctgacgggacagctagcggcaccttggtgcgtgtattcccgctcaagaatgactggaccgagagtaatgagcagcttggcggcttgaaatcattcatcaggcgcctgcggagcccgttctcggccatcagaaagttcaagattcgtgtgtcagtgaacggttctaggccgattccgacacccccgcttcatgagtcgatgcgagctcacgctgaccaagtacttgagcttcgctacgatcccaggggtgtctcctcgctgattgatcctcttctgtggatgaagctgagcacgggtgaagaggtgagcaaggtcgaagaacagccgcgctcagctagcgcggttcttcgcatgctgactgataccgatggcgccaggaaaaaggcaaagaagcgcgccgtcgcggcgaacgagcaagcgacgcccatcgatcttgataccttgaaggccattggcccattcaaacttcacatccttcgtttcaatcgccgccagcttcgcgagaaggccaaacaagattgggacctggttcgaagagagctcgatatgtggtcaggcgggatcgctatctatcgggacggtttccgggtcggcttcaccgggtctgagaaagatggtgactggcttggcctagatgccaaggcactccgtggcagcggctacgttgtaaatcgtattcaggtaatgggcgctctggagatcacgcatcgtggaaatcctaatcttcgagatctgactaatcgagaagggttgatctctacacctgaggtagaggcgctcaaagagctacttattcgcgtcgcaatcaatcccctgcgcgctttggtgcagatggaggatcagaagacccggcagcaagagcttgaacgcttggtcagcgatggaacctcgactcttgctgaccgccttacgctggctaagcaagacatcgcttcgcttcgtagtgcagctccggagccgctcaaggcagccatcggatcgcttgactcgcatcttcatttcatctctgcgcaagtcacgaagtttgagaacgctgtggaaaaggctggcgaagggcgggaggaaattctcgagctagccggtgtcggcaatgtgatgcacggcgtcatgcacgagctgacaagaaccacagcccagacccgagagctaataagaaaaatctctggacggaccgacaaagagacgcaggaactgctcgacaagctcgagcaggagatcaacgcaatcaatgttcgcctgcggcagatggatccgctgatgcctggcgcgcgacacgtaaagaaagagattgacgtggagcgcctggtcaggacgatcgtgtctggctatgagacacgctttgccaggcacgaaatcactcttgtcattgaaaagccaagcaactcagagacattcattgtgaacatggtcccgggcttcctcagtcttgccctggagaaccttatcagcaattcggtctattggttgggcgagcggcatgacaagacggtaccagcgaagataacaattcacattgaccccggctctaatacggtggcggttgtcgacaatgggccgggcgttaggctctccgacagagagcgggtcttccatcctggattcagtctgcgagccaaaggcaaaggatacggtctgtatctcgcgagagaggttgctgaatatcaccaggggcgactgtttctcgagaagaccgtcggtgacggcggtgggttaaacactttcgtacttgagctaccaaggaagcagtga

SEQ ID NO: 507268 - DNA, 2163 bp, Stenotrophomonas maltophilia
atggacatcaaggaactgattcaggacgccgacattcggaaggtactgtttgtcgatgacgacctgcgcgagaggccggctctcagggatgtcgatttggcgtcgccatctgcgcacctggtgtcggatatcttgcgtgatgccaacgatgacgacaccgaagagcttgttgccattgcgaccgctcatggcgctaagacgggcaatgtgaacgagcttttcgaaagcctgcacaagccagaagtgctggcggcagcgccggattcaattcgagttccttatgagactgccagggacaagatcagggatgcgggtgccccggtacgcaagatcatcgagtggatgaaagaatggaccggccatgatcctgtcctgcgtactgtgcctagcgacacggtggacgcggcgaacgatatttttgatcttctggttattgactattacttggtaggggacagcgaagccgagactacgccctacatcaagagaatgttggagcttcacgagacagaagataagcctcttcttgtggtcttgatgacgtccaatggtggaggcgtgatagccaacatgcaggctataaagaaggagatcgcccgctcgagcgctcgcttccgaattctggagaagccatccgccgccccgggcaatgggggcttgatcgccaaggaacggtgggcacaggccttgacccagctcgcaactcagcgccggctcatcattcccatggagaactttgtcggtgcttggaaggctagcctgcaggacgccgcaaagaccatggagctccgattgctggatctagacggcagtgcctttgctgtattggaagcgactgcaaaggaggactcgatggaggtcgaggaatacttgtcggatctgctaagtcgccgtgtcaccgcagaggctgaagagcgcggcgacgtactcaagagcgttaaggcgcttcagcaggcgatggaaactgaccgtaacaagattatgcccatccttaacaggggggttgagcttcgtgatgctcagtttggtattcgcagcttgatgtctgacgtgatctggcatcgacccgcatggtggcaggctcatgaggatgtcccagccgtacctgagccagaggtggtcgaggcagccccagatgaggatgctgcggaagaagtgggagatgccggaggtgccttggacgggactgctgatctggcccggcgagctggtaagggtgaggttgtccggcggctcgaagaagttatggccggagctcgcaatgagcacctagatgcgcacgcgaagcgcctgcagcgtgccgctacggttgagcgcctccagtggctgaagcggcatgtacgatttggcacggtgctcaaggagcggcgtgcgaacgggcgctacatcctgaacgtcacgcaggcatgtgatgtccagcacgtactgctcgaccaggtcaaggatgctggatatctcttcattcgcggtgatctggcgcccgtggatgctggagtgagtggtggtgggaagatggttgagtcccaatattttcttagtgatcgcaatgttgacagcttcaaggcatttcactggaatctgcgtcagccatacacgccaaggatctccgatctgctaggtgaacttgaggactacatgattgtcgggcagctgcgatacgagagtgcctatcgtgtgttagcgaagttcgcttcgcaggcaacccgcgtcgccgagatgcgtatgccaaagttcttccgatggccggtgcatatctaccagcttgatcgacagaagaagtgggtacttatcaatcgagatgttccgctttcgtccagtgcctggcatatggatgggcagggctggcaaatccagttctctattgaagaggctgcgcttgcggtggagctttgccgggatttggtcgtgcctcaccgtgaaggtgaagccgatgatccaatgtcggaagaggacaaggggaagctcatgaacgcgctgtctaggggcgtcacccttaagggagggacgcagccaattggcagcagcctggccactgcggtccgagtggtcgcagctactgatcagagcgagtcagagctcgctgagtcacttgagaaaaaggtcaacgcaaagtcgaagcctgtcggccatgtagcctttgtactggtgtccgctcacaaatag

SEQ ID NO: 507269 - DNA, 810 bp, Stenotrophomonas maltophilia
atggaaaagttgtacttggacttcaacgtcatcagctacctaaggcaggcgcaacagccgtcgctaacgagggccttcaatcatgccgctaaaagtcagctggtagtcttcagtcctgcgcacttagaagacattgctgcctcagcgataagggataaagcacctcctgagattgttgaagccgagatcgacttcctcgctcagatcgctggcagaaacggacttcgtcccgttacattcgatcaagtcgttctctatgacgagtcaccacgagactgctatgaacgcgtagtggctaaatacgataggaatgacattgccgaggaaatagatgcttccgtcatggccgatgcacacgagaggcctgccggggatcccaggcagatgaacaatattccccatactgagattttgggtcacattgtttatcgcgagctaatcgcgcgcagcctttgggccgcaggtcttattgagaggggtgaacaggttaacgtactctcatggcagttcgatgatttgaaggatcgattcatcgtgcttgaggcctatatcaacttggctgcaaatcatcttgagaaaatggggtattatcgggagggtaaggataaatcccgcgctcggcttcatgacgtttcgcatatcatatatgcagcctactgcgacacatttgtcacggctgacaggaagctggcgaaaaaggccatggctatatacagcctgctaggtgtccgaacgactgtccttcttgacaaggagtttgcggctcaactgccaccccctgtttcgagtgctgactcaggtcatgactga

SEQ ID NO: 507270 - DNA, 552 bp, Stenotrophomonas maltophilia
atgaattcccccttgtctcccctgttgtcggcaatcggccgtagctggtggatcctcctgctgtatggcctggtcgctctcggcttcggcatcatcgccatcggctggcccttgtcggcggccatggcattggcctggacgctgggcgtgatggccatcatcgagggcgtcatcagcctgttcgcattgatcaatggcggcagcggcgcgtcccgcggctggctggcgctgtacgccctcgcctcgctgggcttcggtatcctggcggtgatcaatccgctggcaacggccagcgtgctggtgctgttcctggcggcgtggctgctggtggccggcatctatcgcatcgtgttcgcgatccgcgtgcgcaagcagatccagggcgaatggttgctgatcctcagcggcgtgctggcggtggtgctgggcctgctgtttgcggcgaatccatatgccggcgtggcggtaactacgctgtggatcggtatcggcagcctgctgtacggcctgctgcaggtgctggtggcattcaagctgcggaagctgaagtga

SEQ ID NO: 507271 - DNA, 945 bp, Stenotrophomonas maltophilia
atgtgcatcatgccgtcctcaatgctggaagtatccctcctcagcacaacaccccttgcacgatcacaaaaaacgaacgtcagccttgcaccgaccctatctccgtccgtcttaagaatgaagtatgaacaatctcccttgacgcgcgcattcatgacgtcgaaaaaatcagatagatatcgcctatcaatgggcataccaactcgctccgagaaatcgatagccaatgaattcttatctttcactcgcgctcccttgacagcccttaccacttatttaattaactttggttcaccgaaccaaactctgccaacaacctcccacaacactccactccatgggtcgccaacagcgctctggtggtgccaggcttggctggtaacagagctgaaggcatccacgcctggcgacaaagctcagatgttggcccccactccagcgctcgctgccgcacaaaaacttgccgtcagcctggctctgcttgctggcgtagtcgtcggtgtcctgctcgctgatgatggacaggttgcggtcggcgtccaccaaggtttcgacgtgcgtggtgccgttgccgctgcccttggcggtgctggccggcacataccaaccggtcggcgcaccgatgctgaagccgatttcgccactgccgctattgttcttcgacgactgcgtgtgctcttccgtttctctgcgcagggtgatgttgtgctacccaccgccgattttgtcgtggcacgtctgcctagaactggggctggaggcgccgatgccgatgccgatgccgatgccgatgccgatgcgcaggctcacgccgtcggtggtgccggaagccccctgcagcatggcgccgccgacgccagcgttcgaccaggcgggcttgtccaggcagacacgccattgagccaacgccatctaaatattattttatcttaccggagaaaataa

SEQ ID NO: 507272 - DNA, 600 bp, Stenotrophomonas maltophilia
atgttgcctgatggttccgttattggtggtggttcaatatttacctggtttgccacggatgtgaacggtcggctggcaatgtttcttaataaccgatttggtccagtgcccacttgcgttcagggaatgatggatgttcgcggaagacttcgagaccttggcgagcttgcatggggggagtcgagcaagcacccggcattcactgtggggggcggagggttttcggttgacatgtattcgcgctggttgaacaaagacacgtcaacgtccaatttgacgcgtgaacttcaggaagagtttgatcattacgggtcgaactcagatgcggcgattgcaattgaaagagggatgtatcttttcttcgcagttgaagggaatgctgttggggatgattacccggttggctatgatggccccgtagagatgggtgactattacagatacttagttcctgaggtgtgctcgagcatcaatgacttccccgaggaactcaggggggcattcgttcgagcccgatcaatcgacttttcgaaagacaggttattgaagggtggattggttgatgtgtattttccggaattattttctccggtaagataa

SEQ ID NO: 507273 - DNA, 1248 bp, Stenotrophomonas maltophilia
gtgagtgctgctggtgcggagaaggccaagatcgcgatctcggaattcctcgagaacaacaagggcagcctgagctgggaggactaccagtcgctgatggaagtcggcagcgcgatggtgggtggggccctggggggcagcacgggcgccaacattgcggtgaccggggatcggttcaatcggcagctgcacatcagtgagatcgatctgattcagggctctgcgtctggattcgcacagcgcctgtgcggttgccgcaatccaagccgcgagcagatcgatgcagccgagaagtccttgtcggaacaggcctatcggcaggtgcagttcggcgttgaggggcaatgggatcaggctgcgagcgactatctgaggcaagtcagcgcaggcagacttcttgagcctgatccgaaccggccggggagtggttacagcccactgttctatgcaacgccgggtgagaaggcggacgcaacacagtacgtcggctcatggaatctgagggcggacttctatcgcaagaacggtctggatgtgccctcgcaagagcaggcaatggccgctgccatccaggatcaaattgatcgcaagacccacggcaaagtgctcattggagggacggctgtcattacggcagctggactgtcgccggttgcgttggccgctgcgcgtggctgcctgagcaagccagcttcctgcgacgcaatcctgaccggcgtggttgatgcagtcgcaagcgaggcaacgggtggtgccagcttggtggttggcgcaggtgcagctgcgaagactgccgagttgattgttgaaaacgttgcgcgcaagggagctagtgttgcagcaaagccggcagcagagcttaaatcggacttgggggcggtctggaacctgaagccaacccagcgcggagtagaaattgagtcatacttggcgaaaacagagtattcatcacaaggcggttggtacaacatcggggcatcgaaaaatgggtatttccctcttgtcgattttcagaatggtagtactttggttagcctcaagtcggtggacacttcggggagttcctggttgagccgaatgcaggatcatattgttgatcttggtagtaatggggcgacggtgaatggtgctcctgcgcagatggttcttgatttgcgagttcagcctggggggcttatggatgcgcagtcgcttatcaattttggcgttgaaaataacgtaaaagtcataataaaagagtttaagtga

SEQ ID NO: 507274 - DNA, 399 bp, Stenotrophomonas maltophilia
atgagccgccgcaacctggcccgcccgcgctcgtcgcagggtggcttcagcctgatcgaagtgatggtggcggtgctgatcctggcgttcgggctgctgggctttgccttgctgcagaccaccaacgtccgcttcgtgcagagcgcaaactaccgcacccaggcgaccaacctggccaacgacctgatcgagctgatgcgcgcccagcgcaccgataccctggccggtggggcctattcctcggcctcgttctcggccggctcggtgaagcccagcgcgcaggtgaccttcgtgcagagcaccggccaggtcaccgtggccatcagctggggtgaccagcgctgggatccgaaggatcccgacagccttaccaccttcggcctgacgaccttcctgtga

SEQ ID NO: 507275 - DNA, 795 bp, Stenotrophomonas maltophilia
atgaacgacgtcgacaacgcctgctcctgcccgagcggtgacggctcgctgcgccacccgtgttccgcacaccctgccccggcggacgtgcagcccggtgggagggtgaggctgggggatgcagatcctatgcgtagcgcgctggaagatgcacttcagttcgtggaaaccctgcacagtaccgtttcaggtgactcgcgcaagatcgtgtggcgttgcctggagcgtggccgcgccgcactctccgcccagccctccccgggtggtcagggggtgggcatgagtgccgacgactttgcaaacatggttgagggcgaagctggcgagtatggggagatgctggaggacggcggcccatacaacggatggatgttcagctgtgaggcgttgattggattctgcggcgcgatcatcaacggctggggatttgagcttcgcgctcagcaatccgccctcgccgcccgccagccggtggggtctatccccgaatggttcgagctagtcatccgcgacgtttgcgagctggacccggaggaccccgacgccgccgacacagtgtgcatccggctgctcgacctgcgactgatcatggagcggcatgcactgcccgcgcaggccgtggacctggccgccctcaaggccctgtatcacgcctatgtccggctgctggaatccggccgggatcgcatcatcgaccttggcggcacctgcgacccggtcgatgtgatggaagccaacgacgtagacctgcaggctgcgcggcgcgtcctcgacagccaggcggtgggcaaatga

SEQ ID NO: 507276 - DNA, 639 bp, Stenotrophomonas maltophilia
atgcgtgagcatccgatcctgttcaacggcgccatggtccgagccatcctcgccggcgagaagacgcagacacgccgcctgtgcaaggacatgaacgcctgggtagaccaaagctgccgagaggtgcgccatgttgacggcgtgccccatcacttcctgctcggcgcggaaacgcccatcgagaagctgcgctgccccctcggccagcctggcgaccgactgtgggtccgcgagacgacagtgaacgtggaaaagcacggctacctcggcccagtccatctggaatccgaagaaggctacgccacgctgcagggtgggctggcaccagggccagacgacgtgattgatgtcgagccgcacgaaatcacattgcggccgtccatccacatgccgcgatccatgtgccgcctgttccttcaaatcaccgaggtgcgcgtggagcggctgcaggcgatcagcccagccgatgcccttgccgagggcgcaatggagtgggccggtgagcaagacacccccattcgcgacctgggcaccggggacgagcgcatcgccttcagcgcgctgtgggacagcaccggcggcgactggaacagcaacccctgggtgtgggtcatcaccttcaagaggatcgaagcatga

SEQ ID NO: 507277 - DNA, 813 bp, Stenotrophomonas maltophilia
atgattgagctgccgaccgttcccgcgctgatctccgctggcgcgcttttcgtcatcaaccactcgggaggcaaggattcgcaggcaatgatgatccacctgctgcagcggattcctatcgaccagctgctggtcgtccatgcctcgctcggcgaggctgaatggcacggcgcgctcgaacacgcacagagccaagctgccgctgcaggcgtccccttcatggtggccaaatcccgaaaatcgttcatggatatggtcaagcaccgctacgcggtccgacctggcccgaattcgagctgctggccgtcggcatcgaatcgacagtgcaccagcgacctcaagcgcgatccgatccagcgcgaggtccgcggctatgcgaagcagcacggcttctcgcgagtggttacttgcctgggaatccgggcagccgagagccccggacgtgcgaagcgcgcgacgttccaggtcaacaagcgcggaaccgtgcgcgggcgcgaatggtacgaatggctgccgatccacaacatggaaactgccgaggtatggcggaccatcgggcgcgctgggcagaccccgcacgcggcgtacctggcgggaaaccagcgtctctcctgcgtgttctgcattatgggcagcccgcgggacctggccaatggtgcgcggcaccgacccgaactgttggcccagtacctcgaagtggaggcgcagacgggctacacaatgcaccaatcacggaagccgctgcaggagctgattcagatcggcgagcagcagctgctagccgccaaggccgcggagatcgcacatgactga

SEQ ID NO: 507278 - DNA, 252 bp, Stenotrophomonas maltophilia
atgcacccgacttccttgatcaccggccgttttcctctcaacatgctgctgcctcatgcgctggctcaggcacgtgcagccagcccagagctggcaaggcacctgcgccgcattgcgccacgccaccgcaccacctgggcgccggccggtggtggccacgccgagcgtgcgcgccgcgtgcgccagatccaagccggcaccttaaccactgccggtggcctggtcccgatctacaggggcgaacagccgtga

SEQ ID NO: 507279 - DNA, 384 bp, Stenotrophomonas maltophilia
atgaacattgattcgaacctgatcctcgccgacaacgttcgccggctcatggaggcaggcggcgaaactcaggcgaaggtggccaagcgcgcagggctctcccagcgcaacgttggcaacgtcgtcacctatggcaagacccacgagacctcccctactgtccgcaccgtcgacggcttggcggcggccttcggcgttccggcgtggatgttgttcatccagcatgtccccctcgaggtcctgaccggccagcggctcaaccaagtcatccaggactacatcgcggtcccggagcagggccgcgccaacattgagcgtgtggcaaacgctgaggttcgatacgcgggcctcccagcgggcggccttacggcaaaggccggctga

SEQ ID NO: 507280 - DNA, 540 bp, Stenotrophomonas maltophilia
atgatcgaccaggatcgactgcgcagctatcaccgtcagcaggtgctgtacgccctgcagcaggccagcgagccgatgacggcctccgaagtgcacgagggcatgactaccctggcgctggccatgggccaccccagggaatgttccgcgatcaccccagctgctgtggccgggattctgcgcggcatgctcggcgagcagctggtcacccagggcgacgacagggccaatcggcgttacggtcgcgccgaaccgacctggtcggtcgcagcgggccagccggcggtcactctgccgcaagccccgggccgaaatgcgatcgcaccggtggccgcatcaacgctgggcgggcagggtacgcagctgcgccagatcaccctggatcagcgcatggcattcctccaggccgagtgcgccgcactgctggcggatgtgaccagggaacatgcggcgttcgagctccgggttcgaagccagatcgaggcgttcgaagcgcgcgctgcacggctgctcggcctgccgcaggacggcggccaatga

SEQ ID NO: 507281 - DNA, 339 bp, Stenotrophomonas maltophilia
atgagcggttggagatcgagcggcagcgcagggcgtaccagggtcgacctcaccgaggtccccaccaccgacctgctgcgggagatcgagcggcgctgctcagctggtagaccctcgaagacccagccgccggcacaggatctgccgttcccgacaaaggcgctctgggccgaagacaaggtgaaccaggcacgtacgcggcttaccgagctccgcgcgctgccggcgccggaaagcgaggctgagcgcgccgcccgttccgcccaggacgctcaactggtcgccgacgtcgtcaagtacgacggcatggccaaggcattcgcgaggaagggtcaatga

SEQ ID NO: 507282 - DNA, 498 bp, Stenotrophomonas maltophilia
atggttgagaccgtactcggaatgacggatcttcagatcaaactggtcactgcagcagggcagctggctttgaccgcgacggtcgcgtacgtcgcatggcagcaatggcgcacggcgcgcaacaagctgaaagcagatctctttgatcgcagatttgccgctttcgaagagctaaggcgtaccgtatcaacgttcaggaatctccagcatatgcccgaagcagacgccatcgtcgctctggcgcccacatttcaataccttttcggaaccccggttagccaagatgtgttgcagttgggtggaagcgcaatgcacatcgcgcagatccggcgcgatctcgctttgccacccgacttgatcggccgcgatgtgagtcctgagcagaaggacaattgggacgctgcggagtcagagatcgcagatacgtatgaacgctttaacgcccgctatctagcagtagttgcggggacaagggttgccctccgcctcgagcactga

SEQ ID NO: 507283 - DNA, 282 bp, Stenotrophomonas maltophilia
atgaaccagcaaggcggcacgaccgcactagcggacccgcagaccccgatcgaatccgccacgaaggacttggcccgagcgcaggtggatctgcacatcgctgtcgagcagctggcattgcgtctcgcgccggtgctggccgcaagcaaaccggatgctgcatcgtccacgggccgtgcactcggtgcctcgccgttgctcgaagacctgttccagcggcgggacgcagcggtggccaccctggacatcatcaacgagctgcacgctcagctgacgctgtga

SEQ ID NO: 507284 - DNA, 1104 bp, Stenotrophomonas maltophilia
atggcactgcgcactccacttattctcaatcagacctcggggcgcattgaggagctggcggctggcgatacgcttttcggcagctatatcgaggggctcctggggaagaacctgctgatcaacggtgacatgagtatttcccagcgcgggacgctggcgaatcgccctgacggcgagggttacaccattgatcggtggtcgttcgcttctctcggcacaggcacgtcgaactggggtgtgggcaccttcaccgtctctgactcgtcgccgatcttgccggtcccaagcccaccccgctactggcttgggctgaacatcgccgctggtaccaatacggcttggctgcggcagaagatcgaaaaagtcgccgtgtaccacaacggtaaagccacgctgtctttctggatgcgcgcgggtgtcgccggcaagagagttggcgtccgcatcatccaagacttcggcggcggtaccggcgcgtctgcagctgtatttatcgaaggcacagttttcaccctcaccacttcgtttcagaagtacacctacacgttcgacgtgccatctattgatggcaagacactcggctctgcgccttccggcaatgactgcttgcaggtgctttttgatttcgtggctccaactggatatggcggtcagttggtggggcaagctggtctttttgaggtggcgatggtccagtttgagcgcggcgcggtagccaccgaatttgatcggcgcaccgacgctgtcgagctggccctgtgccagcgctactacgaaaagagttataacctcgctgtttcgccaggtgctgttacgcggatcgggggccacacttcggggctgcttaccggctacctccttcattacccgactgttcgcttcagccagaggaagcgtacagtcccagctatcaccgtttacaacacctccgatggcactgcggggcagctggcagagaacggaggcgacggcgtacaccgtgtaaaccatccagcactggttgattacgtaggttcgatgtcgtttgaggtaatcgtgcaaaacggtacagccggggtcggtaacattgcacgattccaatggacagcagacgcggagatttag

SEQ ID NO: 507285 - DNA, 618 bp, Stenotrophomonas maltophilia
atgctggaagctctttctgtggcggtcgccaaggctgctccatcagcaaccgcagcggcgagcaatggagacgactggaagtggctggtgccggttgccacactgattctgggcttcgggctgaagtggcttcaggatcacgttacagagaaggggcgccggcgacacgaaaacagcctccgacgcgagcagcgttacgaccagctcaggatgaggcgcatcgatgctgaacggtccaatctcatcttgttgcagccagcagcggtgcgatttgttcgcgccgccaccgtcgtggctatagagaagcagaaggcttttcagctgggccggccttggagcgaagcagaggcgacgccgacggctgacgaagagctccgtaagagcgctttcgaactcatccctctgcatgcgcgaatccacacagaggcagtttcagtcgttctcaacaacgtcatcaacctaatcacaaccgcgatgcaggctaggaccgcagtcagcttcgaagaacagtgggaattcgttaacaaggagaacaacgaactgcatcgagtgttgggcgtggcgatcaagcaactcgaggacgagaaccagcaactcggagatccgccggcgcgttaa

SEQ ID NO: 507286 - DNA, 741 bp, Stenotrophomonas maltophilia
  misc_feature (360)..(395): n is a, c, g, or t
atggagggcccagacacggaaaaagccgaacggggaggcccgtccggcttttgtgcattatccgggtttccggggtccgctgccacctttccgacggacggcttcaccggccggtcagccgccccgctcggtcgtgccggccgctggccggcaatgccaaccaaggttggcatctaccagagcctggccacgcaagtgcaggccggtcagctgccccgcccggtcgtgccggccgctggccggcaatgccaaccaaggttggcagctaccagggcctggccacgcaggtgcaggccggtcagccgccccgcccggtcgtgccggccgctggccggcaatgccaaccaaggttggcagctnnnnnnnnnnnnnnnnnnnnnnnnnnnnnnnnnnnnccaaccaaggttggcagctaccagggccaggccacgcaggtgcaggtcggtcagctgccccgcccggtcgtgccggtcgctggccggcaatgccaaccaaggttggcatctaccagagcctggccacgcaggtgcaggtcggtcagccgccccacccggtcgtgccggccgctggccggcaatgccaaccaaggttggcagctaccagggccaggccacgcaggtgcaggtcggtcagccgccccacccggtcgtgccggccgctggccggcaatgccaaccaaggttggcatctaccagggcctggccacgctggtgccggtcggtcaactgccccgcccggtag

SEQ ID NO: 507287 - DNA, 537 bp, Stenotrophomonas maltophilia
atgacggtcacttgggacaagccgaaagaactgggatgggcacgtgtcgacgtttcagccctagctgcggatgttgctacgaagctgggcttcgtcttgggcggccccattgagccgatcgtcgagaggatgggtggccagatcgtgtacggcgaattggccgaaggcgatttggagtcgggttcgatctccatcgagcctggcaagttcaccatcaacatcccgttgaacaccagtcctcagcgcgacaggttcaccattgcccacgagcttggtcactttgtcctgcactacctgctgcagaacaacaagcgcgaagcggacaacaagatcacgcacatgcgtgcgaggcgcttcggcagtgacagaactgagcacgaagccaattggtttgctgcgtccttcctgatgcctagccaagcattcatagatatctacaaagaactggatcaggacatcgcgaaggtggccgagcgcttcggtgtgtccgagagcgcagctggcgtcagagcgcgatcgcttaatctgatcccctga

SEQ ID NO: 507288 - DNA, 1311 bp, Stenotrophomonas maltophilia
atggcaaccgaacgactggctcctgactcagtccgcgagtcacttaggccgcgcctgcgacttttcatgagtgcagacattgttgggtcaactgctttcaagcagcgatccagccgtgattcggactcctggtttggcgttgttcggtcgttctacagcaagtctcaagggttcttcgagaagaagtgggacgaggcgtacaaggcccaccaggcctcacccagcatgttgccactgagcgctgatccgccagagctctggaagaccattggcgacgaggtcctcttcactaaggagatcgagcatccccatgaggcgctgatttgcatgagcgcctggatgggcgttctcactgaacttcgtagcatgctcaccaagtcgaagtcactcgacttgaaggcgtctgcgtggcttgcggattttcccattcgcaatagggagatcttcctgctcgcccacgggcaccgcgttgttacaggcgcccccggccaactggcagaagccagaaaagctgaactggccaagcaaggggcccaagctgtcgctccgttcgacccggaaccacagccagatgatgcacatccacagttgacctcagcagatgatcgtactgccgatccggccgagacggactcggattgggagaacgcagaactgttcaaacttttccgagaaggccattccacggtcagtcgtgacttcattggccagtcaattgacaccgggtttcgcgtaagcgcggaggcaacttctcgcaagttgaccctctcagttgaacttgcgcacatgcttagcaaggtatgtgtcgacttgatcgccgaacccagtcatatcccgactctggactacaggaacttcaacttctactttgatggtagacagcctttcaagggagtcttgggcggcattccgtatcctgtgatctggctcgacacggaaccacgccgagccatctatcgtgctgaagacgcactgatgtgtcggccgaaggccgagccggtgcttgtacatggttttaccacggcgctgatccgggaatttccgacgcgcttctgcacgatgctggagttctcagggaacaaacctgcgaagtacgaccaattcgaactcacgatccatcagacgatcagacggatggagagcgagttcttggaacgggacaagttcatggcagcgcttgcagagtccaacgatacgatggattcaggcacacggaccaagaacactaacgtggacctgctgctcgacgagacgcttgctggctccccgccaccgccactgccgccagcgcctcccagtaccccagtgtag

SEQ ID NO: 507289 - DNA, 1200 bp, Stenotrophomonas maltophilia
atggaaggacgtgaaatcgtggcttttgcagccgcgctcattgcagctgtgctcgcctataccaagctgatcgccgacaaagagtccaagatctctgactttcggaaggactggatcaatagccttcgcgaggcgctctcggaaatgctgggggaggcctacacgatctctggccgtatcaggattcgggtcaagcatgccgaaaccgtgagggcggcggcggccgaagcagctaaagcagctaaagcagctaaagcagcttctgccgcggcgactacggacgagggcgccaatactgcagccgagcctggtggctcacacattgccgctgtagaagatgcagccgcacagcgggctgtgggtgcgacctcggatgcggccgcgagcattcagagttctgactctgtcgacgctgctcctgcgcaggatgagaagggtgctgggactgatgctgctggaggctcagaggcacccactgcaggttccaccaaggactcatccaagccaaagcaaccgctgctaacggaggagcaggtcgttgagctcgagaaggacctgacagatcactggcacagccttcggaaggcacatcgcgccattctccttcacctgaacttcggcgagacggcctcaggcttgcgtgagttcaaggaggtggagctggagggcagtaggcccgctggcgtctggaaacatttggttgatcagacgcgcattggcggcgcaggtaggagcttcgatagctacaagccgagtcagaaccgcggcatgtctgatgccgctgtgcttctcgtcgaccagttggaattgctggtggaaaagcttctcggtgagtacgacgaagttggtgaagagaagagatacgatgaaatcaagaaggccatctccgatgcgactttgcttggcaacttggttctcaagccagagtggaatcggatcaaggatggagagccaaagttcaacaacgtgctcaagcaactgaagcggctggcgttgggtggcttggcgttcctgcttttgttcgtgttcatcccaaagaagcaaggagatagcgcgacagcgcagaggcttatcatcgatgtcagtcagcgccaggaagctccgatgacctgtccagagatgttggacttgcgcgacaaatggaggggagttgctcccgtctcttccagcctgccgtggtgcccccccaggggcttgtga

SEQ ID NO: 507290 - DNA, 180 bp, Stenotrophomonas maltophilia
atgtcaaacaaaaaatcaagtcgattccagcctatcttcaagaattgcttcaacggcaacaacttcatcctcagcaagcagctgtcagtcaccattgtgctcggtgtcactattgtggtctccatcgccctggcgttgacgcttggtgccggcgcgttggtcatctgtgcgctgatgtag

SEQ ID NO: 507291 - DNA, 477 bp, Stenotrophomonas maltophilia
atgcgcccaactattctggctctcgacctggagggcaccctgatctccaatgctgtcagtcagatcccgcggtcgggactgtacgagttcctcgagtacgcgcagggacagttcgatgagcttgtcatgtttacgacagtggacgaagtgcgtttccgtcggattgccgcgttactggtctcggaaggcaaagtgccggattggttcgcccaacttgcttacacgacctggagcggtcgaactaaggatctgacctacgtgtcgccaactctgggagaggccctgctgtttgacgaccacgcggcctatgtccatccaggccaggagccactgtgggtcgaagtgccattgtttgactctccctatctggctgaggacgaaggtcttctggttgcgaagcgacgcctagaggagagaatggtgagcctggcattagagtcttttccgaccggccggcatgaggatgcgcagtcctga

SEQ ID NO: 507292 - DNA, 1959 bp, Stenotrophomonas maltophilia
atgactgatctaaccgacttccccgatgacccccgcgtgtacttcatccgtcacatcgacgggtacacccagccacacaagggaacggagtccacgtctgtcaggtgctatttggcgcccattccacatgggtgggggtcagatccatccaaactcgatgatcgtcagatcgcgcgtctgttctccgacaagaatcctgagggtttcatcagcaccatcttcgcggggtcactagcaacctacgttgcagggcaatgcttcatccgcggagaggatggaaggggcgtctatgccggaatgctgattccgaagcagcgaaggctgggcaatgccttggccttcggcgaggagtccaggctgtacaaggagtacgaggaagaccacgagagcgggctattcccgtccaccaaagttggagagcgcaccacgggcgaggcagttgtcgcacttccccaatcccagttgcaccttcaggacgccctgagttacggctccagaatcctggtggttagggacacgaggagccgtgacgagcgaaatcaggttgagtacatcatccccaggacggtgatcttccgggcgttctacgcgttcaattccaccattgcagacatcttcaccgcaggcccttggagtaccgtcaggtccaaggcgatttccgagcaggagttcgccggacacgttaccggcatcgacgagcagagcggctactggaagatcgtgcttgcgttgggtatgacgttggatgatggcccaatgatggccctcttccggtttgatcactatgccgaggcccgggccaagcgcattcacgagcccattctgagagcccagttggacgctgccctttggggcgccgaggattcgcattggtgctccaatgccgagatcccgttgaatccattcttgggaccttaccaaggcaccgtatctggctacttcttgaaccgccgcaaagacggcggtttcgccggcaggaccttcttggtgacagcgattcaccagatgtccttctcaaagcgactaccggcaatcgctacaatcttggttaatgatgccaccgagggtgagaaggtcattcatacgggaggacctaggccacacaacaatggcaataggcctcgatcgcctcgtcctaatggcaagccgaccgtagacacgcatgaagcaaccgagcggaagccagggtttgatatgccctcgatctccttcgcttttcatccgaagccaaagatcatccgcctcaaaaaggatcagagcttcaagtacagttccaagcgaaagaaggacagtcaggagcccaccacagagatttctggcggccgaaaagccggcaagcaagaggatctcagccacgcctacagtgctcatgaaaaacgcgacgcatcggagttgctgactgaactgatggcgattctgaagatactcaagacgaaggggaccattgccgagtaccaggtcgtcgcccccgttgactccgagcaacgcgtccaagttggcgcctacccttgttggaacttcctgggcgaggacgaacgcaaggcagtccgcattggaaaagctgattgggggacgcgatcttggatgtaccttcagaaggcagagtcacactacagagccctcgctcgcacagcatttgtaatcagactgttgctgcccaatggccttgcaggcctatggattgaggtcgagagaagaagcaagagagacaagagcaatgagtccattgcgtcagcgtttgtcgtttcagacgatctcgctatccgagcagagacgcaggctgcactcagcatcatccgatcggttcagggtgtctcgctaggcaaggcatttgagaggaaaggacgcgtctgctacacccaccctcactacatggagaagccaggtagcgaaaagtggagcttggcgccattggaggccttcctgaaatccataggcaacggtcagccccaaccatag

SEQ ID NO: 507293 - DNA, 903 bp, Stenotrophomonas maltophilia
atgggtaacggccttttcgttttggcatccaacaaggaatttggtgtggaaagcgcagccatttggaaacccctcctccagcagatgctgagaggtcagcctcccgaacctgcagctcggctccttcagcggttggccaagagccccgaggccaaagcacttggaggctttgactacaagcagatgggctttccgcggttcaagaatttcttggatgcctgctccgacgttctggatcagcacatcagcgctcatggcgacatgctggtctcgctccgcggaaccacagttgatgcccgctcggaggcagtgcgtccggctccttcttcaattcgaagtgacgtctggatagcattctccaaccccgatcccaatcgcatcaggttcatcaatcgcactaccggcgaggtcatgcaccacgtcttggctgccggcgaaacggtagatggcatccgcccgggccaggactgggttcagattgaaccggtggctgcagacgtccaagcctcctggatgcgcgagtttgcagcacagactgagggcgtcaatccggaggaccatgcagtactcggacagtcgtacaggacttacgccagcgccgtcttcgcaaaggaactcggccctctaggcaagcagtggaccaagttccgcactgcaaagatggtcgaagcgattcagaagtggtcagcaagggtcaacatcgccctggcaacactcacccctgcggctaccaatcgttcaggggcaactgcggttgaaacacccaagcaggaagcagtcacctctggcctgtctgccagagcgcgggcgctcaagctcatggatgccctcaccgacgaagagatatctagcactctggtaccgctcatggcttcgatcatcatggtgaaggcacagcgctag

SEQ ID NO: 507294 - DNA, 852 bp, Stenotrophomonas maltophilia
atggcaatcttcgtaatcggacttccaagcaatctcagagcacgcttcatcgcggaagccgctcgtcaggggcagaggccagaactcagcttggttgtgaaacagcagtaccgttatgaattcagtcctcccaacggtcagtgcgttgcggacctgaacaactttgccatgcaggaagcctggcctgacctcacggtcgtagttctgccatacgtagccctccccgcggagatgaagcccgaacttcaggtgctggccgatgaaggcgtcaggatcattcgacctgttcgtggcgagaatggctggcctcttcgacttgtgggccaggaggcggacgacgatttcactggcgaggtctacaaggcgctggtggagcaactcggctgggcgactaccacagcatcccccgccgagaaattccgcaggtcagctcagaagtatggcgactatcagatcctgggggatgccctggacaagtgtgatgacatccaccacacaagacaccgatttctcaagacctcggcggaactcttggagaagttttgcaagaagcgcggtgccgtccagatgggactggccagttacttcggtgatcgcggcgtggaccttgcgacgaccggtggcgtcaagacaaccatctacctaatgaagtcggatcgcatcatcgagaagaggtcatcgaacatgcacctcaaggaaggggatgcgacagcgccaattgcgtgccctcgcatctacttccagcatctcgaccgcgatcagcagttccgtctgttcctcctctacgtcgggcctcatccgcccaaggatctcatccagatcacgcgaaacgtccaatgggagcatggctaa

SEQ ID NO: 507295 - DNA, 342 bp, Stenotrophomonas maltophilia
ttgcaagggaaggatctgagagatttgcttgaagcacaccctgatgccaaacatcacctgagcgacgcaaatgactacctagtcagctatcgcttcgacacgggaactgaggtcgccttcgacccacgcacagtcaaaaagtgctccgttttcttggctaagaagccgcctgctgggctctatcaccccgatgacctggtcatctacgaggacgacgatgagccatcaagcgcgctgcgtcgagtctccaccaaacttgcatccactcgtcccttgtatcgtgtcagattgaaggaccccgacctggccaaggaactcttggactgggcaaggctggcctag

SEQ ID NO: 507296 - DNA, 960 bp, Stenotrophomonas maltophilia
atggaactgagctgggtacagtcattggtcgacaaccaagtacaggaatcactgtatctggagctcaagagaggcgatgccctctcgcctcagaacaacagtaagacagagatgatcaaggacgtcactgcgctcgcgcatgccagtggtgggcacctggtctacgggattgaagaagagccggtcaatgacattccggctgcagtacgactccgcccagtcactgacaagaagctcaacaaggactgggtgaccaaggtcattaccgacaacacttcgccaagcctcactgattttgaggtcttcgagttcccagtggacggcggcagggtccttgtcatcaaggtagaagaggcttccaccgctcaccagaatcttctggactaccgctatcatcagcgggtaaacacggtgtcccggttcatggcggacttccagatccgcgacctgatgtctcgtcgctcatcaccaagttgcgaagtccgggttcgtctggaacgcattaccatcaatcgcgacaaccatgtctaccggctgagagtcgaactgctgaacaccggtatggtttcaatggagaagtggtggatttccattgatgttcctaaggaatgccttgctggactgacgtatccacaatcggaactgcgaacccacccacgtttcggcaaagttgtgcgcgaagtagataagggcggcttcgacttcatcaggttctcgtggggagaccccttcttcgatggcgatcgctacattctccacccaggacagtcactggatttcgggccgagcaacgactcgctccacactcaagcccccctcccccccatagttgtcgagttcaatgaccgaatctttcgcagcttggtacatcgagcgccggaactccagtggacgctgtacaccaaccacggccagcctgtctcgggttcggtgccattcgagcagtggtgcaacttctga

SEQ ID NO: 507297 - DNA, 519 bp, Stenotrophomonas maltophilia
atggccctggcactgctggaacttaccgaaaccacgactggggacgtactggagcagttgctctcgatcccaattgctgaagcgaaaaagtgtcaacaaacggtctcagtccgggtggtcagtagcgtccgcttgtatgcggagatcggtagtaatcctcttggtgtgactccgatcatccgctcgcggttggaatgcgccgccatgtcctgcctggaccaagtcgcggggcgccagagcaacgcccttcagggggtacccgtcgcattcacggcactttggcgggatggcgtactccagcaactgcagtctcagtcgctggcagacagtattgcggtttggtctcggcagccgaatcccagagaggcatacgtgttattcgatcttcgcagtctggcgcagtcagaaatttctaccgcggagtgccaacttgagttgctctacggccgactgcgcgacaacgtgaccaggcacatacagttctgccgtggtcatcgtagttcactcagtctaatctga

SEQ ID NO: 507298 - DNA, 1281 bp, Stenotrophomonas maltophilia
atgtcagatggttcgattttcatagcgaagctggacgatagagcaatcattgaggctgttgagaaggtccagaaggagttcccgaatcaacttgaggttcacttcatcggccagtttggagaagtgcatggtgaggaaattgcggcctaccgggaatcgggcagcctctcactgataagggtcaaacttgacttcaccgaatgctcctggacgtggtatcgacttggacctcctgactccaagacttacccgcaggccgccgagtacgacagaattgagtttagaggcaaccagtacaatggcttaactccacagcagagaccggttgctcttgccatcgatcgaactcttaagctagcactgcagttgccattgaccgaaatcgacccgtcctcgccattgagtctggctaccggtcgcgaggtactacaggcgctacagacggcgtctcagagactgctcacagagacggcggagcatcggaccaagctggagatcgacttcgcggccagggaagccgcgcgggaggaacgtttcagccaagttcgtcagcaggatgaagagcgcctcagtcaggagcgagaagccgcccaggtcgcccatgcagagcgagtagccgccctagaccttcgcgaaggtgagctggactcgctgaagaagactctggacgatcgcaacaacactcacgttagacgcgagatccgctccagcctccttgaccttactaaggagcgactgctgaattttcgcgtttcacctgagacccgaacccagtacattctggtgcacgcggtttgctcagcgggaatcctgttcttgcttggactcgcggcggtcaccgccgtcaagttcgacagtactctaccgccaactgcatttgcgctctctgccgcgcgctccttgctggccggtgcggctgcaatcgccttgggtgcgtggtacttgaagtggttgaatcgatggcttcagaggatcgccgacgccgagttcaagttgcaacagttccgcttggacattgagagagcatcctggttgaccgagacggtcttggaatggaatcaaagctctaaggagccattcccagaactcttggccagtcgcctatctactggtctgttccaatcgacaaaggacgatgtcgaagacccgcagactccggccagccagcttgccgaggctctgttggggtccgctgcgtcggctcggctaaagatcggcgatcaggaactctcactggatcgcaaaggaatccgccaactcgagcgcccggatgcaaggtag

SEQ ID NO: 507299 - DNA, 804 bp, Stenotrophomonas maltophilia
atggactcctatgccccgccgctcatttatcgctgctgcctgtgtggatcaacagaggcgctctcaggagagcataaaatcaaggcatcggcattgcgatcagtgtttggcgaccagaaggcagtgatcgttcgcgacggaggagggttccggcacgctcagagttcgaggtcaaaggcctatcactttcaagcgcgagtctgcgtgccatgtaacagcgctcgaacgcggccggcagaccttgccttcgacgagttccatgccgtggcatcccacctcgccagtcgtagccatgacccagccgacgtcacgcatgaccctcgattcagggacgcctctggggaactctacttagacgtattcagatacttcgccaagttgatgtgctgccatctcgcggagatgggcgcgccgttccaggatgagcttgcggccttcgcaatcggtcttagtgatcgcaacatcgtggaactgagagttgacctggatgaggtatacaaacgcctgcagaacgagcttttagcgaaaccttacgctgcacatggcgggctgattgtcactggagacaaggataccctagccccaacgtcattctattcgacgctaacagttgggccggtacgctactgcttccgcgtcagctacagcgaacaaggtcaggcgaacctcatgcatgatcatccggagttctatgactggtgcacccgcaagatcgctgacctcatcgccaatccattgagtgcagatgcccggcagctgctcggcctacctccgcatccggacgacctgcctccagaagcatga

SEQ ID NO: 507300 - DNA, 1482 bp, Stenotrophomonas maltophilia
atgagtacagataaacaggggcgccgaacttgcgatggctgttacgccccgatgatcaatgcccataagctgtacaaaggtagcgagtactgcgggacgtgctatagcagtcaattcgtgagttgcagttgcccaacatgcagcgggacagtggtacatcacgcgtcagagccacaagctccatcctgtgatgcttgtcttcgtaaccagaggcgctgtatcaggtgtgaccggcccgcgcccgaggcgcgcatcatccgggataccacgcctggccccgacggtggatcacccatcacctatgagcatttcgtatgcccatcgtgcttcccgtacaccacgtccgagattgaatgccctatctgcaagcggccaagtcaacgtctggcaggtgctgcacacctgccggaaaacctaaaggcttgcccatcgtgtttgaacaagcacacgcatgccacctgcgtgcgatgccggaagtacaggaaggtggtctcggtcactgaagagggcaggccactgtgtatcggatgtggcggtgaccagccagccgagcacatgtgtccagactgtggttcaacggttaagggcgccggatcggcccgctgtgattcatgctcgatcgcggcacgcctcaggcgagaggttgcgctgagcgcggcaaccattgagcgcgagtgggttgcctccctgtacaccgcatttggcgagtggctgctcgcgaggaacgttgctactggcggacttcccaggaaagctgtccaagctgcaccgttctttcgtgccatcgacctggatgctggcacccatcagccgatagtggcggccgatttgctccgtctgttcgactccaagcaactgagagccaatctgaacgtgacccgtttcatctgtgagcgctacgggttccagattgacgagaatgctcgtgccggagctcgtgacgtcgcgctgatagaacgtggtctggaggagagtgcatcaagaccctgggccaggtatctgactgattacaggacatggctggcaggtaagccaactcgtacccaggcccagtatctgaggacggcacaggcgttctgtgaggccgccgatctcggcggcccctttgcgcaggagcatctagtgaggtacctggattcggcacctggctcgcgcgccaacctgagcgtctgggtcggattcgttcgggcgcggtacggctgggctgtgactatgcccccaaaggtcgccaagaaggcaagccttaggcgggatgcgcagacactgatggacctactgctgcgggtacgcgttccaggcactgcctcggatgaggacctggctgcgacaatcgccctcgcttacggatttgagttgcgcaccctacgtcgccaagtgactggggtgacggatgtaggagacttgatcaccagagacggaatcgtcgaggtgagaatggagttgagggctgttgttgccgaatggtcgaggcgagcgttctag

SEQ ID NO: 507301 - DNA, 1038 bp, Stenotrophomonas maltophilia
atgcgcatcgtctggccgccgcatgtgccagacgaactgctttccagctacttggctcgaatcgcaatcgactacggaatttcgtctcacaagctcatggcgctccatgcgcctggctttcaggtctggaccagggatgttgatgtctgcgcctccgaagccctgttggagcggctgacgtatccgtcaggaagatctctacagatgctcaatggactcacccttggcgaatggaatgcagtgacacggcgcacctgcgatccgccccaaggggtgtaccactggatcaacagcatgggcgtgtatcaccggactcgcctcagacacggtctaacgttctgcccggagtgcttggaggaaaatggagcatatcttcgccagtggcgactgtcattctggacggtttgcccgttgcaccaaagggttctgcaggacgcatgcccctattgcggggcggtggttcaaccccatcgacatggattcgatcttcgtagatgttggtactgcaatcgtttcttaactacttccacgacggcagcaatgcgcgctttgcccttgcagtcattcctgttcagatgcctgatggatcccagcaacgaagttgagttcaacggtcattgctgctccggggctgaggtgctttgggggagcgatgtacttctccaatcactcaagccggtctgcaggtcgatggggatggggccagagcgggggctgaggatcgaactgcgcagggtgccggatcgtcacgcggacatagagttgctctcgcacctgctcggtcttggacccgctggcttggtagcgatggttgagtctatgggagtgacccagaggtgctttcgccaacagatgcccccctggataaagcggttagcggagcagctttctgcgggacgcgtgaatcgcgggccgatatccaatcgggccgagctgaggtccgcaggtgaggctcagcgaaagcgcgtcagtggatggcgcgagatgagggcagatgtgttgttcaagatgattggaagaagcaatgagtacagataa

SEQ ID NO: 507302 - DNA, 882 bp, Stenotrophomonas maltophilia
atgagtagctatccccatctgcatgatcaggtcgctgcttacatgggcgcatccaacgaggaacgcatcgcagttgcccgtaaagatcgttggattggttacccgaaggcaatgagtgtgctggatgagttggatcaactcatcgtgtacccctccacacagcggccgccgtgcaggctgattgtggctcgaggcgacaatggcaagacggcactcctccggcagttccagttgcgccatccagccgtacaactgggcgacgggggcactagccttccggtgctccggatcaacatgcctgctcagccggatctatcccaactctggtcagaggtgctcactcgctgtgcgactactcaccgtagaagcgacccggccagtgccaagtacaccatggtggtctccgttcttcgcgtactgaaggttcgcgtgctcgcaatcgatgaattcaatgacgttgctcttgccaggaaggggacgtcggatgttctggcaggcatccgtaagctcagcaatgagctgaatctaagtattgttgctgccggcaccgaggcggcggttcatgctttggccttcgatgcccaaatgcgatcgcgattcagtgctttgtccatgcccaagtgggccatggacttgccgtatctgaacttcctcaacacctatgagcgcctgctccccctggccaagccctctgggctggcgggagagacgctggcgccggtcttgcattccgcgggcggggaggccattggtgggaccgtgactctgcttcgtagcgcagcagccatggcgatcaggtctggcgaagagaagatcactatcgagattatcagggccgcccaagacagcgcttctcatgctagcgctctagccgagatctga

SEQ ID NO: 507303 - DNA, 1899 bp, Stenotrophomonas maltophilia
atggtctcctcaaacttcatcaacatctcgcctggcgtagaggtcatggttggccagcgccggtaccggattacccgttccttggacatcaacagtgtcttggccgaagacgtcgagaccgacaaggttgccaggcttcgaatcgagactatgtcccgagttctggaagtggaagatggggatgagacacctaacttctccgttcaccacttctcggatgatctatgggcagtggcgcaacggcgttttgaagctatcaagcccctgctggacaatcctcgccgaagccggtcatcagttgccgcagcggcgttgagtgccggcgtcaacacttccacgctttacaagtggctagcgctctatcacgaccatcagcacgtagcggccctggtcccaactcgacgcggacggaatagaggtacacgctttctgcaggcggaccaggagctagtgatcgcctcggttatcgaggacttctacctccagaaacagaagccgagcccgaagtcggtcgtggatgaggtgatgcgccgctgccgcgtggccaagattgatccgccgcatcccaacactgttcgcaatcgcatcgccgatatccggccagctacagcactgcgtcgccggggccagaaagacaaggcgcgtgacaagtacgagcccatccgaggttccttccctggtgctgactttcctctggcagtggtccagatcgaccacacaccgttggacgtgatggtcgtcgacgaggagcaccgcaaacccatcggccgtccatacctcactttggccattgacgtattcagccgagccgttgttggtctgtacgtcaccctggacgcaccctctgcaacgtcagtcgcgatgtgtatatcgcatgcgatgaacacgaagaacgagtatctacgcgaactgggtgtagagggagactggcccgtgtggggccagatcggaaccctgcatgctgacaacgctagggagttcaagtgcaaggcggtgaacaggggctgcgaggccaacgagatcatcatgcagtggcggccggtcaagaagccaaactatggcggtcacattgagcgctatatgggggtagttgccactgaaatgaagaaagtgccgggggcaacattctccaacatccaggagaagggcaactatgactccgagaaggaggcgagcttgaccctgagggaagtggagcactacttggtgaactttatcgtcaacaactatcaccaatgcgtgcacagtcagctcgacgcagcccccatcaaggtttgggaggacgcgatcctgggcgatgagaagcctggtgtgggtcgaatgctgccggcagatccagaccgggttcgtatggacttccttccctacttccaagtcacggtgcagcggtacggcgtgcgaattgagaatgtcttctactatgacccaattcttgatcgccacattggggcgacggatgaggacaacccgaagctgaagcgcaagttcatcttcgcaagagatcctcgaaacatcagcgaaatctatttcttggatccaaattccgaaagatacatcgctgttccctatcgaaacgtggctcatccggcgatctctgccggcgaactacgtgaagcaaagaagcgaatcaaggctgagggtaaggatgctgtagacgaggaacgcatcttccagagcattgagagcaatcgaaagttggtcgaagagtcaaaagccaaatccaaggctgctcgccgccaagcggcgaaagctcccaaggcaaagcctagttcgattgcgtcccagtccgcgcaaagctcgcaagccacgccgccgccgcaccagtcagcagcgaaggcccctgaccgcaacatcttctcgcagccgctcgaagtccttgaaattggagagatcaactga

SEQ ID NO: 507304 - DNA, 759 bp, Stenotrophomonas maltophilia
atggcttaccgcagtgatcctgacctggagttcctgggtcagttggggtccgcagatctgaatgatctcgtctattgcctcacgcatgacaaggatggatccccccgattcacggaggagctgaccatgcatgcgcgatacaagacgtacaacccagatcatcatcagtactgggagcagattgcagccgaaattcagtgcttcggggcaaacaccttcgctacgatgttccggggtggcaagggcgttcagtacaaggaagtgctgatggatgtatgcgataagatgaaggtgaactacacgaaaaactccagcgtagagaagatcgagagcaatcttttgatgaagatccttacggacgcactggagaagatgagccccgaagaactgagagaactggcagagtccaccggcgtcaagaacaccaatggtgtcacggctgaaaccatggtcggcgtgttccaggcggtgttccggctgggtggcttcaggtcataccaactgaccgcgatcatagtgaacgccatccttaaagcgctcattggccgcgggctttccttcgctggcaacatcgccctcaccagaacgatggcattgctgactggaccgattggctgggtgatcactgggatctggactgcagtcgatgttgcaggcgctgcgtaccgagtcactatcccttcggtcattcaagttgccgcacttcgccagaagcatctgtacgaacacctcgcagaagaagttagcttcagcaattga

SEQ ID NO: 507305 - DNA, 183 bp, Stenotrophomonas maltophilia
atggcagtcaacgtcaaggtcaagtaccagatcaagatcaagggccaatcggttcgcaacgtggggccacctggcatctttgcacaggcaaaaacggaaagcgccgtcatggaggccatccggaagcgagagtacgccgcgaccaagcaggtcgagagcatcgttattctcagtattcagtag

SEQ ID NO: 507306 - DNA, 1197 bp, Stenotrophomonas maltophilia
atgaacggcagcagcacctctgacacaccccggtcgaactgggggctggccacctacgtcgcagcggcgatccttgcccgctcggccgacggtggcgtggtcgtggccgtcgtcctgctggtcacgctctccggtggcagcggtaccctggccggcgccatggcagcatgcgtgacagcaccgcatctattgggccccttcgtcgcccgccgtatcgacacttccgatgatccgcgccacttcatcgcggcggcatgcggccttttcgcgctggttttcaccgttgcgattctgggattcggtcaccttccgcacgtggtcgtaggtgcgctcctgatggtggccggcgcctgtggtcccttgctgacaggtggactgagcagccgtcttccgtacctgacccgtccagaccgcaccagccagcgccgtgctcatggctgggacgttgcgacctatggcctaggagggacgatcggcccatcggtcgtcgccgggctggccggcaccttcggtgccgtatggggggccgcggccattgcggttgccgctgcagcgtcaaccgtgttcacactgatgttgcccaagtcgccaccctcccatggaggggatccacgacaggtgccaagtgcgcttcgcgtcttcacgctcatggcgaccgacagccgcttgcggcggacggcctacatgaccatgctggtggccttcggcgtggccgccttgccggtggtcgcggtctatctggcgccggtgctgggcgtctctgcagccagcgcggcactgctgaccgccgtgtatggaatcggaaacctggccggatcggctggcgtcatggtgcggccgatccggctgactcccgaccaggccatggcgtggtacgccggattccttgcgttggcgcttgtgcttgttgtcgccagcggaaacttccccttcgccctggcagcctacttcgttgcagggtgcatcaacgcctacttctttgccgccacgctggcagcgcgtaccgaatatgcacccgcacagggcaagggccaggtgtacctatgggttggcgcgcttaagatcgcggcgggatctgccggcacagcggtggcgggcatggtggtgaccggctcgacgtcgttagcgttatggatcgcgaccgctgcggttgtgatcgcgcctgtggtgtcgcagattgatcggcgggcaccgtag

SEQ ID NO: 507307 - DNA, 894 bp, Stenotrophomonas maltophilia
atgttcagtggcctcagtgcgttcccgcttacaccatttaaagacgagcgcgtcgacgtcgcggcgttccgagtgctggtcgatcggcttgtcacggccggggtggattccctaggggtgcttggctccacgggaagctacgcctatctggaaaaggcggaacgcaaagccattctgcgggaagccattgatcgtgcgggcagcgtgcccgtgatcgccggtgtcggcgcgctgcgcaccgccgatgttttggagctggctttggacgccgagcaggctggggctgcaggacttctgctcgctcctgtgtcctaccagccgctgcacgatgacgaagtgttcagcatgtatgaagccgtctgcagcgcagtgaacacccccatctgcgtgtacgacaatcccggcaccacccatttcacgttctcagatgcgttgcatggccggatcgcagcgctccccaacatcgcgtccatcaaaatcccgggtgttcctggcgttcaggccgaagccgatgcacgcgtggccagcctgcgagccaaggtcccgccccacgtcacaatcggtatcagtggtgactcggcggcggcccgcggactgaatgccggttgcgaagtctggtactccgtcatcggcggcctgttcccggaagtcgccctgcgaatcacccgcctatccatagccggtcgagcccaggatgcgcaggactgctctgaccggctgcaaccgctgtggacactgtttgaaaagcatggcggcagcatccgcgtggtggcaaccgctgcggcgcttttggggctctgcagcgacgcaaatctgcctcgcccgctgcgaacactgactggcgaagatcgggctgagctggcggaagtgctcgctgcaacgggtctggcctga

SEQ ID NO: 507308 - DNA, 468 bp, Stenotrophomonas maltophilia
atgaatgatctcgtcgagctgatgcgtcacaaacgatggatcgacggttcgtatctggagctcgcaacatcagccactctggaaggcaagcctgagctccaacgagagcttctgtactggcttaaccacatccacatcgtggatcagatcttctattgccatctcataggtaaggcacatggattctcttccacggtcagtgatgaggttcccgaagccaatgatctgcgcgaatgcatgctggatctggatgaatcactcatcgccctgagcgagcagctcaattcacatgcagcggcagcctccatcagcttccggttcaccgatggcgcagacgggaggatgacgaggagccagatgctgctgcatctaagcacccacgggctgtaccacctcgcggtttccggcgcgcatctgaccaaaaagggcatcgccatcccgccgatgctgctgaccacaatgctctag

SEQ ID NO: 507309 - DNA, 510 bp, Stenotrophomonas maltophilia
atggacgcttgggcgcaggtgttccgcaacttcggtgcgaagccgcagcgcacgccttgctctgccgaggcgctgagaaagcgtgcggcgcgtgatggcggattgccccgaatcgatccaatcgtcgatctctacaatgcgatcagcgtacagttcgcagtgcccgtgggtggcgagaatctggaggcttaccgaggttcgccccgcctggtgatcgccgacggaagcgaagcctttgacagcatgaagaacggcgaacccgccgtggaatcccccgacaagggcgaagtcgtctggcgcgatgacctgggcgtgacctgtcgtcgatggaactggcgtcagggtatccggacgcgcctggaccagcacgccacgcggatgtggttcattcttgagtctctgcccgagatgccgatcgaagcattgcacgaggccggcgatacgcttgagcgcgacatcctacgcatgatgccaggctcactattgcagtcggaaatactgagaacctaa

SEQ ID NO: 507310 - DNA, 324 bp, Stenotrophomonas maltophilia
atggcgtggttgtatcttttggtagccggtttgcttgaggttgtctgggcggttgcgatgaagcagtccgatggcttcagtcggttgaccccgtctgtcgtcaccgtcgtggggatgatcttgagcttctggctactgtccttggcaatgaagtctttgccacttggcacggcatacacgatctggaccggcatcggcgccgtcggagctttcgtgctcggtatcgtggcctttggtgagcaggtcacggcaggacgtgtgaccgctgctgttctgatcgtcagtggcctggtgttgatgaagctggcttctccttcgacctga

SEQ ID NO: 507311 - DNA, 1179 bp, Stenotrophomonas maltophilia
atgaacatccatacatcagcgggcccgtcgcaaaaggcgggcctgtccatcttcattcttgctgttgcagcgttcgtgctgctgacaacggagttcctcatcctcggcctgttgccaccgctggccagggatctgggcatatccatctccgttgctggacagctggtgaccgtctttgccgtggtcgtcgtgctaacgggaccgcctctcgcggcgctggtatcacactggtcacgcaagccgctgttccttggcattctcgtggtgttcgccgtctccaatgggctttcggctgtcgccaccgatttttggagcttggccctggccaggacactggcggccgcggcgttgcctgtgttctggggcacggccagtgaaagtgccgccgcgctggtccccgccgggcgtgcagggcgagcggtctcccaggtctatctggggattaccacggccttcgtgttcggaatcccactggggaccgttgccgtcacctatgtgggctggcgcggcagctttgctctactcggggccctgtgcctgctggtggcagcgctgatggctgtcttcatgccgaacgtgcccggggcgcccagagcggagggtgcgccctcgcagctttccattctgcgcaatgggcacttcatcgcgaacgtgcttcttaccgcgctggtgtttacagggatgttcgttgcctacacctacctggccgatactcttgagcgtgttgtcggtgttgcccccgagcgtgtgggatggtggctgatgggctttggtgctgttggcatgttgggtaatgtgctgggcgggcggctggtcgaccgggatgccgcgctggcgaccgccacgctgctgggaatgctggccttcggcatggccggggtacccgcagcggcaggctggctgccgggcgtcgtgctggcgatgatggtctgggcgatggcctacacggcactgttcccggtctgccaggtgcgggtgatgcaagccggcgcccaggccaaggcgttggccgggacaatgaacgtctcggcttccaatgcgggcatcggcctcggtgctgcgatcggtgggatggccatccccctgcttggtctggatggcatcggctatctgtctgcggcgatcgccgttgctggcgcgctggtggcgctcatgatccgacgcggatcgcgaccctag

SEQ ID NO: 507312 - DNA, 894 bp, Stenotrophomonas maltophilia
gtggacctcattcacccccaattggccgccttctctgccgccttggatgaaggcagttttgatgctgccgcgcgacggttgtccatcaccccctcggccgtttcccagcgcattaagtccttggaggatcgcctaggccaggtgctcttggtacgccaggtcccgtgccggccaactccggcgggccagcgcctgctgcagcggcttcagccgatgaaggttctggaggcggaagcgctggcggatcttcatccggaacgggccggcccgttcttctctatcgcggtggccatcgccgtgaacgatgactccctgcagacttgggtgcttgatgccctggccgaactccaccgtgaacatggctacctgttcgatgtgcgcgtggacgatcaggaccacacgctggcgctgctgcaggatggcgctgtgctgggtgccgtcacatcccaggccacgccgctgaaaggctgcagtgtcgtgccacttgggtcgatgcgctaccgcgccatcgcgtcgtcggcattcgttaagacctacttcccatcgtgcgtcgatgccatcagcctctccaaggcaccgatgctgatcttcaaccgcaaggacgagctgcaatggcgcttcctcaggcgcatcaccaaggcacggcttaatccgcccgtccactatctgccttcgtccacaggcttcgtggatgcggcccggctggggctgggctggtgcttggcacccgaagccctcatcaagcaggcggtagccgccaagcacatcgtcacactggatcaggacaggccggttgacgtgccgctctactggcagcactcggccatccgttcggcaacgctgcaggccatggctcgcgcattcgtggacgcggccaagacaaggatgaactag

SEQ ID NO: 507313 - DNA, 624 bp, Stenotrophomonas maltophilia
atgctcctgtccgccgccgcctccggcttcgttgccgccgcaggcctgatcatcgccatcggagcacagaacgcctttgtgctgcgccagggcctgcagcagagccatgtgggtctggtggtgctggtttgcatgctgggagacatcgtcctcattctggctggggtggctggcatcggcgcattggtccaccagtggccatggctgctgcagttgcttcggttcggcggcgctgccttcctggccatttatggtgcgatggctgcgcaacgcgccatccgtggaggtggcgaactcattgccgcgtccacggcgaagcagcactggcggccagtcctgctaactgtcctcgcatttacctttctgaatccccacgtctatctggacaccatggtgctgctgggcagcctatctacccggtatccggcagagatccgctgggcattcgcgctgggcgcctgctgtgcgagtgcagcctggttcaccctccttggctacggcgctcgactgttgcttcccgtgttcaagaacccgcgggcctggcgcgtgctggacagcgtcatggccctcttcatgctgggcttgagtctgctgctattgctcaagccgctcaaggtgagctga

SEQ ID NO: 507314 - DNA, 1284 bp, Stenotrophomonas maltophilia
atggcagatgatgagtccctagaaccggcaaccaaggttcttttccaatccgccattgaggccggtgctgacccgcattacaacgcatgcgtgggtgagaacactggttcagtcgaaaatgcgcccctgtatgcaggtggatttgagaaggccactgaggttcttcttgtgtcacttggactggtgccgccctcgaacgcccgcccaatgtgggcccgtggccgcatcgaggacatcctggtctacccgatctgctattgcgctcgccaccatgttgagttgtccatcaagcacctgatcccattggcttggacggcgttcaagctgaggcatcctaacgatcgcaagggcctatcaaagcctgagatcggcaccaagcacagcatcaagctctactggaacatgctcaacgatatatgcaaggccactgacagccgtctagagagcctagctggtgcactggagccgtacatccaggatcttgaatcggttgactcgacaggacaagtcttcagatatgcgagtaattctgatgacgatgagctgcatctggaagagctggatcacatcgatctggcccatttcgctcaaggctatgctgagctgtgcaagatccttgaggacatccgctatacacttatgaccgtcgaggctgaagctgcctgcggatccttcgcaggcccttcaggtcgtgacacgcttcgtaagattgcagatgaactgccacctcttaatagctggggcgatgggaccttcaacgcgaccaaggcgagtatccggctcaagtactcactaggtagcaatgcgctttctgctgcgatcaaccgtatcaagtcctctcgccacctctcctacagagtggggcatgaaattcccattgagcacctcaatcgcggggtgttcgagaggctgcaccgcacctactccggcgaccacgcctcagctgcgtcgttgagtgaggctgagctttctgcgcttcacgcggtactggaggtgggaaatccctccgtgatgcccgaagaatttgactcgtatttggcgccacgccccgctggtgacgaggcggcatatcagtacgatctggagcgcgatccaaagcacctagcccggaagttcgcgagggctccggatcggatcagagcttcgctacaggcgcttggccagccgacgttgttgtcagaattcactgacgtctacgccgatcatatcgcgcgccttgagaagcttcgcgttgatcaagctaatggctttgatgacttcctcaatggactagttggcagttag

SEQ ID NO: 507315 - DNA, 627 bp, Stenotrophomonas maltophilia
atgtcgttggataaagcagatttgctcttggccggtgcggaagcaaagttcaaggagcttgcaccgaaagtggcacaagatcagcagttggccctgcagttctgggcgaagttgatcgccaacagtaaggcggtggtttcgcttgtacaaacagactacggtagccccgcggcgatggtgcatcgggtgtcgatcgagcactttgcgtacatgtacggcttggtcaacggtgtgatcacggttgaaagcgttgagcagcaactcaagtacgacattctcaagaacgctaagggcctcgacagcgcccagcgtcgtgacgacaaggcggggcgggatgtgctgacggaggagaatcgtcagcatctggctgagttcctggatgacgatggaaacaaggtcaaagaccctggcgtcagggtttacaatattcttggcgagctggatctggacttcatctacaacatctaccgcctttactccgtaaacgccgcgcacgccaacatgttctcgtgccgctggaatcccaatgaggcagaagtgacggtactgctggacaacgtcaatgatcttctggagatcgcgggagctctctggcaggagaaggttggtagcggcgaactggcctga

SEQ ID NO: 507316 - DNA, 2019 bp, Stenotrophomonas maltophilia
atgcgcacaccgattcaccttccggtcctggaccggctccaggtctcaaactatccgctttacccaggcgcagccaagaacggactggatctgatattcagtgctggcgtaaccgtaattgccggcgtcaatggcattggcaaaaccacgttgctaaacttggcattgcgcatgcttctgggcgcaagcaaccccagcaaggccgccacgcgggacatcgggaaggcgagccgacgtagtctcgtcaatacgaagaagttcaagttctttgccgctcgagtgccgaacttgcctgcggccgcatctgcggttcttacttaccgtattggtgcgaccaaggtcgtaattgagcgcagcttggtcgatctgagcatcatcaagcttaccgtgggtaaggagtcgatcaaagacagcaccaacgcccagttcttggatcgcatggctgtgctggccggcatgagctcggcttacgactaccacatggtagtgcgctatgttcagtttttcaccgaagagcgcctaccgctgctttggtctgccacagctcaggtcgagctgttcaagatgctctttgccgaggcgccaaacatggccagcctcaatgctctctacaaggaaattcagaaggtcgatagcgatctgcgaaatcgcgtgtatcagctgaacgaccggaaggagatgcacgccaaggtcatcgctgcggttgggctggatggcgtcggtgtagaggaagtccgacgcgttctgcaggagacccaggacgagcttgcacaagctagcaaggcggtagcgtttggcaatcagtctgtccaggacgccatcgctcaacaggatgccgggcggcgtgaactggatgatcttcagaaccggctggatcagatcacacacgaattccacaagcgagacgcggccttcatttcgcagattctgccggttccgcataaggacaagatggcgcttctgattcaggggctcacatcgaatttgggttgctttgtgtgcggccgtgccggaagcaacgaagtggcggtcatcaatgagcgtcttgagcagcatcactgtttcatttgtgatggaaagctaccggagatagcagcggacgaaggtgagcagtccccacaagagttgttggatcttgaggaaaagatcgcgacgcttgaggctgaaatactgcgccgtgaggctggccaggaggaaggggacaaggtgtacagcgaggcgcttgcagcgctccgtcccttggcagtcaggcgcaacgagttggtccataagcttgaacagctcgccatccaatggccaaacgaggtcatggctgcaaatggcggcaatccaggggagttggcatctgaagaggcggccattgagcaacttcgggtgaggcgaaaccagctcaaccaggactatcggacccagatcgccgcgcttagcactcgaatgggtgcattcgagcaggatctgggtcagagactgaccgcatatgccgagcagttcctgctagaaaaggtggcagtcgagttctcgcgaaatgcgtcggtcaagatcgtcacgggtgcggtacccatcaaggttccaacgttccgagtctccatgacgtcaagcacacacatggcgacccatgagagaacagagccctccagcgtatcggagtcccagaaggaatttttggacttggccttccgaatgacgctgctcgacatgatcggcgctgattccggaacaatgctgatcatggagacgcccgaagcgagcctcgactcatggttcatggaacgggccgcattgatgattcgcaagttcgccgccgaaggcggagctacgaagctgatcgctacttccaatgtgaacggcacgtccatgatcccggacttgcttggcctgaaggatggagagaggctggcaagcaaagactctcaccgcctgatcaacctgatgacgctagccgctgagccaggtgttctgaaggagaaggacgccaaggccgcgctattggcagagatgcggaagtacgccgatgcctaa

SEQ ID NO: 507317 - DNA, 690 bp, Stenotrophomonas maltophilia
atgcctaagctcaaacaggtgacggttgccgaccacgaccgccttttcttcattcgttggatgcttctacttgtcgtcgccaatgaggcggcaggcctgccggtgttgaaccggcagagattgcattcgctgctttttgtctcctttgcttcttcaaaattttacagcatcgtcccactgcgccagcgggcacgccgatctgagcacgggccgtactaccgcatggctcacatcgctttgggtcatctggtgatggcagggctcttggacgttaccgacttcagaccgcacccggcgcctcgggatctgcagtttgagggcgtctttcggccaacactggctggtatcaaggcgtgcaagcacctgcgcatgacgatgaccggggatcgcatctatcggttcctgctggatatgtcactggcatctgctgagtcgctcgggtctgacgccgcccaagcagattcccaagtgcttgatcggactctggaggcagacctcacctatcagagagcagtgcgcaaacatggtgaaattctagagcttcaagatccgagtgaggacgagacgccgaccgttcgtggtcttcactcaatcgatgaccatttgcagagcaaagggttctttaaccgccgtgatgtggtggccgcctatcaagtcgttctgtcgcgacgtgcagggggcagcgcatga

SEQ ID NO: 507318 - DNA, 1179 bp, Stenotrophomonas maltophilia
atgagtgtgcctaccagcccagtagcgctgactaaacaagagatcggcgggctcggcaacccaacggtcactccttctggcactgaggctcagcgcttcgtgcagtcttgctcagcctggtaccgcgagtggctcgaggctaatgctccgatcctggatagtaacggcatcaaaaatacgcaggtgctcgtgctgattcatacggtctcgccggacattgagtgcgctgacttcgcgtctgtgggcactgacaaggagattgtgttcaggtcagccttcgatgcgaatcttgaaggtgtggtgctgacgactgagaacactcgccggatgattagggtcaggggtggattcagctcgatcagcgatgccatggcgacctgtatgatgcttccccccgaggcgacgttcgttgtgcttccgctcgcccagcggaagatgatgctgcactatggtggggatgacctcgagtcctggtgcgagcatccgcccgagttccagatgcgtagcggcttggatgcgctgtccgttgagcgcattgataaagacatccatgagttccacgaccaaacgctgaagattgccgcaagccggatttcccggaggatttggttgggaccggctaagccctacaagcttgtccataaccctgaagaagctatccagtcctacctcttcacggcgctcgataaccgctatctctacctgaaggccattgtcgatgaggagaccgtcggcaggggaggtcgttgcgatatccgagttcagtggcccaatccgggtggtcttcacaactacacttccgtcatgattgagctgaaggttctcattgaaggtcgtggcaacgccgcgcatcgacgttggatctggaagggcatcaaacaggccaacaggtatcgcagggtggacaccgccggcgtatttgcgtgcatcttcgacgggcgaaaggatcagtctgatcagatgcctggcttcaagcctcatgcggaacgactgaacgtcaatctgcgctggtatcagatggaccctccgctggataaagcttgggacgacgaggtgccggaccttacggttgcggctgagtcgaacattgacagcgctgcgtccgcctcagcagaccctcaagggacgcaagaggcagatctgtcattggtgaactccccggagccctccgctccctag

SEQ ID NO: 507319 - DNA, 2001 bp, Stenotrophomonas maltophilia
atgcacagttcgatcagtttcccaattctcgaacacttccacgtccacgaatacggcctctacccaggtaagccggatcgtcctgggctacagctgaccttcaggcctggcctgacgctggttgtgggtaccaacggtctgggtaaaaccaccatggccacgatgctgttccgcatgctcagcgggccgcatgatctgtcacaccagacgctcaatgcaaccgagcttggtgggcagtctctggatgagatcgccttgccagccaggcagaaggccatgtttgcggacagggtgagcgaccgtgcagcaaccgcgcacgcggaacttcagttccggctaggagagagccgagttgtcgtgaagcgcgcgattaagaatctttcgctgatgggcctttgggttgacggaaagctggtcgggaacaaggagggggactaccagcagcacgtggtcacctgtgccggcctgtcttcattcggcgactggttgatgttcctacggcagctggtgttctacttcgaggaccgaaggtcgctggtatgggatgcatcggcgcaacgacaggtcttccgcatgcttttcctgccccctacggctgccagggatctgtacacgaaagagcgagagatcctgaagctggacagtgggatacgaaataccaatgcggccctaggtcggcttgaggcgcgagttgatgaggaggagcgcaagaggaccgatagtcaggatgtccttagccaagtccgatcattgcagccgttgcaggagcgagatctagagaagcaggcgcagctcgtttcggaggtcaacgacattgacgagttccggcgtgggctgcggcgccaattgctggaagctgaggaccgagccagtcgcctgcaggagcagttggaggatggacggcttcagatcattcacagtcagttcccttccaaatcggagacagccaagtacctcctgtctttgctgatgctggatggaaagtgtgccgtttgctcggaagagtcgcctggattttctgccacgatcgagtcgcgtgcggagcattcaatgtgcgtgctctgcggtagcccggcgcacgtagaaggaccggagacggccgcgcctaagtttgaaagccttgccgagactcgggatgctttggagcgtgccagggtgcgcgctgcagagctgcagagtgagcttcgagccgtttctgagagctatgacaatcgcagctcatacatgctgaagctttcagatgaggtcagtgctcgggacaagctgctgacatcactcatcaagtctcttcccacggacgatgagatgcagctccaagcaaagaaggagctcatcggtctgcggcactcggtggaccaggatagagctcgccttgagaagctgacgaaggaatttgaggcaaccgcgcagaattttgacaggagcgtgttccaacgcgtggaacagatcaagcgggccttcaatagatacgccaaggactttctttttgaagatgtcgcactgaagtggactccccaggtacgtcaggtcggacagctgcagacgatcgaaacgtccacttttgacctcgatatgggggggacggacttcggcgtaagccaccgccgagaggggccttctgccgtctcagagagccagcgtgagttcatcgacctcgcattccgcatggcgctcattgaaattgcgggtgaagggagggggggaagtctggtgatcgatgcaccggagtcctcgctggatgctgtgttcgtggagcgggctgctgaggttctgtgccgattcgggcagccatcgagcacaaatcgtctattgattacctcaaacctgattgatgggcgcctgctgcctgatctgatcaggcttggtgtgccgccggcggagaagcgagatcggttgctgaatttgatggacgtggccgtgcccacggccgcggtgaaggctgtgggagacaagtaccgcaaggagtgggagaacatccttatccaggggctcgggcaatga

SEQ ID NO: 507320 - DNA, 654 bp, Stenotrophomonas maltophilia
atgaccacctcctatgggagctttgtggatcccaggcgtcgacagatcatcctcttggggctgattgatgcagtcgagcgctccggtactcgaccagtagaagccaagcgaatgcatacgctgtggtacctggccaacgcactggcgccggcctgggggctgccgccgttcgatgctgccgttttcaagacggacaagcagccgtactttccgggcgtccaggctgacattgatagtttggtgggcatggggctgctggttgtcgctgatttggccacgacagacgatggtctgcgcatccagggtaggttcgtggtcaatcgtgagttctgcgatcgtgtcctgtccacgatgcgccgcattccagaagactcaaatcttctggacttcctcgatgatgtagttcaggcaaccaatcgcctctcagacgttgagcaagcggtggcgctcactcaggacgctacctatggcgatccacgtgtggacgcgggtaacgtcgtggatttggggcgctggatccgcccagacgctacgacaccaactgagtacgttctggccaagctccagtcagttgcaggccgcaggctgaagccggcagagctgatggagctgtacatggatcacttgggctggaggctgcgcaatggcaagtga

SEQ ID NO: 507321 - DNA, 1062 bp, Stenotrophomonas maltophilia
atggcaagtgatggtggcctgtggtctgacgatagcttgctagggactgtcagtgcctataccggttctggatacaaccaggatctgcctgcgtttactcagttctgccatgaggctgcgaagatcattcgtcgtcgtcgagctttggctggtaagccaatggctgatggacctgtgatcttcgtcttagagggaatcattcccccctcggcagagggtggggaagttcgtcacctgttcaacatgggggcgcagagtattgagggtcgcttgtggacaggtgcgtcccggttggccgttgcaacgggcttggatctacctcagggaactgcggcggatcgattcaattacgttacgcagaccctggggatgggggattcgccagcgatctactacgacgccagtgagagcgagcacctgatgagggccttcccagaagggatgggtaagcccaacgtgtacgacgatctttcgttgaaatctgctgacctctctctcgaacatatccgggacatgctcaaaggcgctcatgcccgtcttttggtcagccctacagcgtcgaacctggctcgtagtctctgggagaaccagcaaaagacgattcccatcatgcatgccgagaaggcggtgcaggacatcctgcacgtcgctctcaccgcccggttaggctttggtgcaattgccgtcaggcaagagggcacatcggagatgggaaggttcgacttccatcttgaggagcaggacccggtagacccctcagtttggacccaccacgcaatcattgagctgaaagtcctcaaaagctttacatcgtctggcaagcccgtggcggccagagagaatcttgaggcggtgaccaagggggtgaagcaggctgtgggctacaggcatgctcataagtgccggcttgcggcgctctcatgctatgacatgcgaaagccgccagatcctgaggcggcgatcgcacatgaagtcagcaacgctgctacttggaacgtggggctgtgggcttggccgttgtacccaacggccgaccgtgcccgggatgccttggtgaactag

SEQ ID NO: 507322 - DNA, 1311 bp, Stenotrophomonas maltophilia
atggagttggctccacagtccgcccagagtcaccccgatctgtgcgtttccttcgaggaatggaccggcggccgcaagatcgtgtccatcggctcaaatgccggcgcccagcgcctgccattccagggatggcatcacttcaaggaggcattcgcccctgaggtcatcgcccgggcagtcaatgagagcgcccgtgaagtccgctcctgcctagatccgtttgggggctctggaacgaccgccctcgcctgtcagttcctgggcgttgagccgacgacagtcgaggtcaatccatacttggctgacctgatcgaggccaagctatccagctacgacgctgatgatcttgcactggatctcagccgcgtggtcgcggccgtaggcagccgccggcgagcatcactggctcggttcaagaacgtgccaccgacgttcatcgaatcggcttcccaggatcgctgggtgttcaaccgaaatgtcgccgagcgcattgcttgccacttggacgcaatcgaagaacttgcccgcccaactcatcgcaggctattcaaggcaatgctgggcggcatgctgatctcggtgagcaacgtgctgatcaacggcaaggggcgccgctacagaagcaattggcaggaacgagacatcccgccaaggctggtggacgagctgtttgaagagcgcacccgccacgcaatcaaagaaattcatgcccatcgcatgcgccgtcaccgtggatatcatgtgctccgcggtacctgcatcgagcagatcgcaggcagcaagaaatccgatttggctgtattttcacctccgtaccccaactcgttcgactacaccgacgtgtacaacgtggagttgtggatgctcggctatcttggcggaaaagacgccaatcgcgatcttcgcatgtccactctctgttcccatgtgcagatcaagcgcgaattcgctcccgcgcctaagggttctcgtcgcctgaacctggcccttggtcgcttggctcgcgtaaagggagaactctggtccccgtggattccggagatggttggcggctacttccatgacatggctcaggtgatggctgcattgcacggccgcctgaatgatcgtggtgaaatctgggccgttgtaggcgatagccgctatgccggcattcggattcaggttgcaaacatcctcgccgacctcgcagctccattgggctttgaggtcgtcaaggttgagcctttccgatcaatgagatcgtctgctcaacagggtggcaaacaagagctcgatgagagcctggtgatccttcgcaagaagggctag

SEQ ID NO: 507323 - DNA, 1182 bp, Stenotrophomonas maltophilia
atgggccgcggccgcaagcgcaaattcaatccgacgatcccggcgcacatcgaccaggcggcgctgccgcgcgggctttactgggacaagtccggcaacggccggtggtacttgctggaagccgacccggaaaccggcaagccctcagccaagaccgtcgccggcgccgacgcaaagctgtcggaactgcacgccatcatcgaggcccgtgccggcggatccacgcgcggcacgatcgcgtacgtgctcaaccagttccacgccagcctcgacttcaagcaactggcgaagtcgacgcgcgaccactacgaggactacgccgaggcgatcaaagcgtacccggccaagcacggcaagtttggcgacttgttcgtcgaccgactcgcgcctccgattttccgccacctggtcgacaccatcgcccagggcaagccagccacgaaggcgggcgaagaagccattcccggctacccgacgaaggcgaaccactggctgcgctacctgcgccgcgccttcggctggggcgtcgagcacgacgcctgcaagaccaacccctgcaggggcgtgaagtgcgtgcgcgaagtgcgcaaccatcgcatgccggagcgtgacgtgttccgcaatgtgcagctgtacgcccgcgcctgcagtctgctcggcaatcgcgaggccggttgcctgccgccgtacctgtgggccgcgatggagattggctaccaggcgcgcctgcgcggcatcgaggtgctgacgctcaccgatgcccacaactgggacgaggacctattgaccaaccggcgcaagggcagccgcgacaacctggtgcgcaagggcaccaacctggcccgcgcgatcgaggccctgcagacgtaccgtagcgaggtctggacccgcaagcgccggccgatcccactgcgccccgagcagcgcttcctgttcgtcggcgaggacggcgagcccctgacccgtcgcgggttcaacactgcgtgggggcggatgatgcgcaacgcggtgaaggaccaggtgctgaccagcgaagagcggttcggcctgcacggcctgaagcaccgcggcgtcaccgacaccaagggcgacaagaagaaggccagcggccacaagacggacgcgatggtgcacctgtacgaccacgaactgccgcgcgtcgagccggccggcgagccgtga

SEQ ID NO: 507324 - DNA, 237 bp, Stenotrophomonas maltophilia
ttgatcggcaacgtgctccagttcgaggacctgcagcggctgtgccggcctgcgatcgatgcgccgctccccaagctggctaccgtcgagcgctgggccaaggcccaggggatccgttaccgttatgacggccaagggggcatctggacgaccgtggatgccctcaacgccgccctgggcctgcgcgccggggcagccaacgacgagggcaagctttccgtagaggacgtgttctga

SEQ ID NO: 507325 - DNA, 198 bp, Stenotrophomonas maltophilia
atgaagatcgccggcgccgaagccatgaagcctgaccaggtgcgcgacgcgatccgtcagctcggcgacgccgagctcggccagctgatcggtcggctcgatcgcagcacccgcatcgagcaggccgccctccacttcgctcgcggcgaacagcgccgccggcgacgccgtcagcgcaaggagtcgcgccagccttga

SEQ ID NO: 507326 - DNA, 522 bp, Stenotrophomonas maltophilia
atgtccatcatttccgaaaacgcggacaggatcatccagctgatcactgacaacggcggatccatgagcggggagaagctccgcgaggagctggccgacatggaggccgtcgataggcgcaaggcgatcggcaagctccgcgaagaagggcgcatcacgtcgacgggcgccactacccgcgtcacgtattacctgccggatcagaagcggaaggcaaacggaacggctgcctcggaacccgcacgtgaccagttcgatgtggcagaggagatggccagtcaaaccctcgctgcgcgaggcaacgacggcctagaaaagcctgccgtcgttgtcgacggcatcgacctggatcgtcgctggacggtctgcgtgccggtaccgatcgtcaatggcgcgccggaggtgcagctgctcggcgcgctggacttcatcgccgagcacttcggcgcacaaggcctcgatgctgcggcagtcggccgcgctgcgacctggctggccagcaagtaccaggtggccgcatga

SEQ ID NO: 507327 - DNA, 414 bp, Stenotrophomonas maltophilia
atgccgtatgacctcatcccgcgcaatcggcagcagggcgagatgaccatcggcgctttcgcgtggccctggatgctcgaagcaggcctcggcctgcccctcacccacggcaaaggcattgagcctggaagcttcgtttacgccgaccggcccgatggacgctgcgttgcgtacaacgacggagcgcgtgttagtgctggcgaagccaaggagatggcaaagctcgctcgctggattgccaactatcaggaaacgttgcacacgatcttcgatcgtcagccagacgatgtgaaggaacgacaactcaagaacgagcaccgcctctatcacatcccagtccgacgagattgggtcgcgaaacttcgcgatttcgccgactgggccgagaagtccgggggattccgtgtcgactga

SEQ ID NO: 507328 - DNA, 339 bp, Stenotrophomonas maltophilia
atgagccacatggagatgatcttcatcgacagcgatcgacaggcgcgtaagaccggcgtcggcgcaatgatggacacgcctgcgaagacctgggaagccttccgaagcgtgcgaccgctcgaggtggaggtcgagcaagccgagttcctgctcgactactacaaccggaacggcgagctggccgacacgatcgccatttctcgcagcaccttcgagcgcatcactggacagaaggcactgacggagcaggagtaccgggacatcgacaaatcgttctggtccgacctgcggtccgaacttcgtgcggcgcaccgcgggcaggctagtcatgccgtatga

SEQ ID NO: 507329 - DNA, 1092 bp, Stenotrophomonas maltophilia
atggacatcaaccagaccaacgcgcacgccgcaatcctccgcgcgggggatggctttacgttcggcccggcgcacaagacccgcgagtgcgccgaacgcggtgtctccccgttcgagggaaccgagatcctcggcttcgccgagctgttcccggcgccgatcatgggcatgcacttcgccctgcagcggcatgccaacgaaaccgtcgccgagctgcgggaactggagcgccgcggcgtccgcatccaggcgaaccgcggcaccgtcgaggagccgcgctgggaaacgctctcggagccggcgcagttcacctgcgcggcacacctgtaccgcgcgcacccggacgacctggcagcgtcgatcccggacgaagatcccgacgaggactcgctggtcgacggcgaaggcttcgaggcaataggggtcctgcaggcgatcgcgcagaagctcagcgtgccgtgcacgcacgcggcgatcgaggatgcgatcgatgacctcctgcgggatcgcatgagccctgcagttcggctggtcgctgacgaacgccgccgacaaatcgaggccgaagggtggtcgacggatcacgatgaccaacacgccaatggcgcattggctgatgcggccggctgttacgcgctgtccgcggggggcgttcccgaggaactcttcgagtcgctctggccctggtctcgtgaatggtggaagccttcgccgggcgatcctatccgcagcctcgttaaggccggcgcactgatcgtggccgagattgaacgccagcagcgtgcggccgctgccaggccgatcacgatctggcagatcaacgacatggaatggttcgtcggcgccggcacacccgagtcgatcctcgcctggtacatgaaggaacacggcgtttcccatgaggacgcgaccggtcacggagatgaacttccacgcgccctcgacgacgacgagttggacaccctcaagttcgtggattgcgacgaagacgaacgcccgactggtgctgtccgcacgtttcgagagcagcttgccgtggagatctcgcagggcggcacttttcctcggcttttcgcttcgaccgaggtctga

SEQ ID NO: 507330 - DNA, 2016 bp, Stenotrophomonas maltophilia
atgaccgccatccaggcaattccgctttcccagttgcggctgtcgccgaagaacagccgcaagcgccgctctcccgaaactgtcgccgcgatcgccgaatcgttgaaggtacacggacagcttcagaatcttgtcgtcaccgcgcgcagtgaagacggtctgtacaacgtcgacgccggcggcacacgactgcttgcgtttcagttgcggctcgatcgcggcgagattccggccgaccaccccgttgattgcaagatcgtcggtgacgtagacgctctggaagcaagcaccgcggagaacacgctgcgcgaggcgatgcaccctgccgaccagttccgcgcgttcagagcgatgatcgacgacggccgctccgtagacgaagtagctgcgcacttcagcacacccacatcggtggtcacgcagcgcctgaagctcgcgaacgtcgcaccggagttgttcgagctctacgaccagggccagatgaagctcgaacaattgcaggcactggcgcttactgacgatcacgaagcgcagcgaaaggcctggttcggcaccaagggcgagaaggtacaacacgactggcagcgccgccccgacgagatccgcaagcgcatcacctcgaaggaaatcgggcctgacaatccgctcgtgaagttcgtcggcgccgatcagtacgaagtcgccggcggcgtcgtgcgccgcgacatgttctcggacgacgtttacttctccgacgccaagctgctggaaaccttggccagcaacaagctcgaagccattgcactcgatgagcgcaatacgggctggtcctgggtcgaggttcacctgcagatggattacagcgcccagtcccgatacgccgatggcccgtttcgtccaacgtacggcaaggtgacaaaggaggaccaggcgcgcatcgacgagattggcaagcgactgaaggaaatcgaggccatcgacgatcgagacgatgacgtcgacttcgagcaactgaatgacgaggcggaacggctcgagcgcgaactgagtgaccttcgcgctggccgcgcggtgtggagcgacgaagccaagaccaagacgggcgttctgatctacatcgaccgctaccacggcctgcaggttgagcgcggcagactgctgcccggccagcgtgttagcgccggcaaggtggacggcaaggcaaaggacgcgggcagcaagaagcccacgctcagccaggacatggtcacgcgcctggagatgcatcgcgccgcggcaatccgcgagcacgtcgcggcacgcccggcgatggccctgcagctgctgctgacgcacctgctgaccaagctcttcaccgacacctacgccgagtcggtgctggccctgacgcccaccaatcagcacaaggaggcacgcggccagatcgagtcgaagttccaggatctcggcaagtccgctgcgcgcaaggcgatcgacgatcgcatcgctgcctggaagaaggccgggctccctgggaaggcgtcggagctcttcggctgggtcggcaagctcgaccaggcgaagcagttggagctgctggcgctggccaccgcgctcaccgtcagcaccaacggcggccaccgcggccaggcgctcgccgagcagttcgaagtcgacatggccgcctggtggtcgccgagcgcagattccttcgtgtccctggtgccaaagagcctgctggcagaggcggtcgccgacgtcgacggcaaggccgctggtgaggccgtcctggcgatgaagaaggacgccgcgatggcggacgccgccaagcgcctgcagggcaagggatggctgccgaagcccctgcgcggcgcgaactacaaggccgcgaagccgacgtcctccaagcccgccagcacgccggcgccggcgccggcagcgaagaaggccaccgccaagaaggccacacccaaacagccagcgaagccagcaaagaaggcctcgaaggcgcccgccaagaaggcgacgaaggccgccaccaagaagggagcgaagtga

SEQ ID NO: 507331 - DNA, 177 bp, Stenotrophomonas maltophilia
atgaagcagttcaggttcgatctcgggcagcaggtgagcatcgccgcgagtggcgagagtggcgaagtcatcggccgcgccgagtacacgacgtccgagaacacctactacgtccgctacaaggccgccgacggccgcgccaccgaatcctggtggagcgagagcgccctttcctga

SEQ ID NO: 507332 - DNA, 318 bp, Stenotrophomonas maltophilia
atgagcacccgagccatcgccgggcgttcgcttttcagcgaacgcatcgacctgcagctgcagcgtcgtaccgaaaccggcctgtatgtcggctccctcagctggcggcatgtcgctgaaggaaccgaggcggaatcgaccgtggcgctgggcccagctgcagcccaggagctgatggattcgctctggcagtgcgggctgcggcctaccaatggcagcggatccgccggcgcactcgcagcgacccaggagcacctggctgacatgcggtccatcgccttccgacttctcgatcgcggcgaacaaccgcggtcctga

SEQ ID NO: 507333 - DNA, 219 bp, Stenotrophomonas maltophilia
atgcgcacggtcgcaatccacaagagccgcagcgtcggcaaaagcgaaaccgcggtgcgcgcgtgccgcgtgtgcggctgcacggacttccaggcctgcgagggcggttgctggtgggtggcggttgatctgtgcagcagctgcgccgatgtccccagtcgtgagcagccagagtccagctcgcgctgcgccacctcgctgacggacgccagcgcatga

SEQ ID NO: 507334 - DNA, 624 bp, Stenotrophomonas maltophilia
atgtccgaacaccagcaactcgacggccccgacttcctcgacgccgtcgcccaggctaacgccgccgaaggcctcaccctcaacgcctccgagtacagccgacgcgccgatcagtggcgccgcgatctgcagacgctggaggtttcacaggccgcggtcgacacgttgcagaccgccatcgcgaacatgcgccgtgacgctgcccgtgcgttcgaccagctgtcgcgcgtgcgaccggactcgatcaacgccgccgagtacgaagccgtccgcatgaccctgtccgccatcggcgacaccacattctgcccgcccgcctgggcggacagggtcgacgagagcggccgcaatccgcgcctcacgccgatgcccggcgatcgctactacgtgccggtcgaggtcgacaccgccacctacaagggcaacggcctgtcgatcacgtacgtcccgttgctgcgcaacgacgctggcgagctggagccgaagcgcgaccatcgcttcgtcgtcctgggcgtgccgacctgggcacacggcgccgtcggcgtcgtggcatcgccgcagcgtgccttcgatgcgtgcgcgctcgcgcacctgaccgaggcggcccaggaacaggtggcctga

SEQ ID NO: 507335 - DNA, 639 bp, Stenotrophomonas maltophilia
atgaacgcgaagctcaacggagccaagcgtacgggccgcgctgcgcgcgtgcgtgcattccttgctcgccagcgcaagccggtgaccgcgcgggaaatcctcgacgcgatcaccgctgcgcagatcgctgagggcctcgatccggacaccgacatcaatctcatgtccgccacgctttcgacgatgagccgcggcggcaccgtcgagcgcgtcggcgcaggctacggaaacgtccgctggcagctcgccgctcgacgccagacgcagccgccggcgccgacgcccgtacgcgcacgacccgccgcgcgtgagcctgaccaggctgcgcccgtcaaggcgaaagcagcctcggtgccgaagcaaccatctccgaaagtcgtgcagccggtcgtgcgccggcagcgcgaacagaagaccaacttcgcggcgccgctggccaccgttgcccaggtagccaggccgaacgccgcggccggattcgagtcggtcgacgatttccttcgccgtggcggccgcatccagcagctgcggcctggtgagtgctcccagccgctccgcttcgaccattcccgcctcagcgagcaacgcgcgaagggtcggaccacccagcaacgcaaccgcgcgtcctcgcgcaactga

SEQ ID NO: 507336 - DNA, 294 bp, Stenotrophomonas maltophilia
gtgaaaacggtccttcccttcccggtgaactggcccatcgcctacctggccttctggttctggctcaccgagacgctctacttcggcctgaactggtggcccgacagcgtcgccgagttgcttgccgacggcatcgtgttcctgctcgttggcttagcgatcgcgttcgggcctccggtcaagccgcgtctgacgctcacgcgtgttctgacgaaggagcaccgcctgctcagcgtgatgatcgcgcacgacggtcaggtcgaggtcgtgcatggccaggacgtgcagctatga

SEQ ID NO: 507337 - DNA, 324 bp, Stenotrophomonas maltophilia
atgaaggcccgcgatatcaagaagtgctgccgctgtggctgcggcgtcgccaagcacggcatcgtgttctacacggtccgcctgcagcagtggggcctgaacccgcgcggcattcagcagacccacggcctggagcagatgttcggtggtggcgcggccggtgctgcgctggcggcggtgatgggcggcgatcccgacatcgccgtgccgctgagcgagcccggcgccgacctgtggatctgcgcgcagtgcgtgatggcgccgacggtgctgctcgcactgctgcaggacgagccgggcgaaacggcgaaggaggcctcgtga

SEQ ID NO: 507338 - DNA, 288 bp, Stenotrophomonas maltophilia
atgaatgccgagcgcatcaacgcggcaccgacgctaccggccattacgccatccctgtgccaacgctgcggagcgtgttgctccgcagacgtcgacggcgaactggtgacgtgccagcacctggatactagcaacggtttccgctgccggatctacacgacccgcccgcaagtgtgccgggactacacgtgcatccgtgacgggaggatccgcagcaccgcggtcgaggcacgcgtgcatgccgctgttcgcggagatgccatcgctggcgtgggcggtggcgcatga

SEQ ID NO: 507339 - DNA, 144 bp, Stenotrophomonas maltophilia
atgaacgcaccgaagctcgacggaaccgcagacacgggtcgctggcaacagtccacgcggcgcgaatggctgctcgacaacgcacgactgatcgtgctgctcggcgtgctcgcggtcgagatcgtgtgggtggtgctgcaatga

SEQ ID NO: 507340 - DNA, 282 bp, Stenotrophomonas maltophilia
atgaagaaccgccacaacatcccgccgctgcagcgccaggccttgctggcgatggtcacggacccctctcatgcgctgaagcgcattccgggcggcaactactgcccggtcaacggaagccacccgacgttcaccggccgcaccgtcaagggcatggagcgagatggcctggtcgacctcgacgagccgctgtgcacgacgcgcgtcgagctcaccccggaaggcctggcgatcgccacgcatctgcatgaggccgcacaggcccaagcgggggcagcgtga

SEQ ID NO: 507341 - DNA, 252 bp, Stenotrophomonas maltophilia
atgggcatccagttcggaccactcgccctgcaccgcgccgacggcgccgtcatcggcagcacacgtatcgactcgacagaggtaacgaaggtcgtgcggcgctacgcgcaaacgatcggctgcgatgccagcaacacgcaggcagccatcgcctgggcccttcgctccagcgcacacaccctgcaagccatccgcgatggccgtcgccgcgcagagcaactgcgcgctcggcaagcgagcgcacacgcctga

SEQ ID NO: 507342 - DNA, 294 bp, Stenotrophomonas maltophilia
atgatcatgcacgacatcgatccgtcgctgcccctgttccacgcgccttgcggccatcgcgcccacctggtcgaaacgcgcggtcgcgtgcatctgcacgtcgagcctcggctgttcggcaagccggcccaccaataccacgtcgaatgcccgcactgcggcgtgtgcacgcaacccgtgtactcgcagcgcatcgccgagcacctgtggtcgtccgacgacgcgtcgctgttccccatctcccagctgccgtctctccgcatcgctgcagagcgctcgctggttgcggcctga

SEQ ID NO: 507343 - DNA, 330 bp, Stenotrophomonas maltophilia
atgagcgagctctcgatcctcgtccacaccgcccagcgcttcccgcttcggttcacctacgcgccggcctgggattcgatctcggcctcgctgtacctgcgcccaagcaccgccgacagaaagatcgggatggtaaccggccgccagctcgcgttcgtcgccggccagcctgcacagcgactgcgcctgagcgagcccgacgacatcggcgacggctggagcgtatggctggccagcaccgctttcgacatcgacgaatcccagcatgcacgactgcgcgcctggatcactgagaccttcgctatcgagcctgggagtgcctcccaatga

SEQ ID NO: 507344 - DNA, 219 bp, Stenotrophomonas maltophilia
atgtcgcatctgctgcagaaccaccttggcctggtcgtgatcgcgctgctgatcgggctgggcttcatcgccgtggtcctcgcactcgcgtttgggtgggcacgccagcgcgctgagcgtcttgaacaggcccagcgctcaatcggagcaatccagtggccaggcggcaacggctaccgccgcagcgcccggaccgagatgcggagtggcccccgatga

SEQ ID NO: 507345 - DNA, 477 bp, Stenotrophomonas maltophilia
gtgaacgcattacagcgcgccatcgccatctgcggcacccaaaccgagctcgcccgcagggtcaaagggaagccggcctccgggcacgtccattactggctgcagaacgggttcgacgaggaaaccgcaatcgccatcgagctcgccgtcgcatctgtgatcgcggagtctccggcggccgcggagcgcgcgcgcgagctgggcgcggtcacggtcgagcagctgctgcccgacctggagtggcatcgcgacgccggcggcgccgtcaccagctacacgaagcgtgtccggcgcggccgtgccctgcaggtagtgcacggtagcgaccgggcgcgcgagcgcgggtgcacagaaaaggaccgcaacgagccggccacgaccatggtcgatgtggaattcgtgcagggcgaggaagcgaaggtgggtgaagtcgagcatgggcgcaatcctcgcgcagcgacgagggcgtccgcatga

SEQ ID NO: 507346 - DNA, 585 bp, Stenotrophomonas maltophilia
atgaagcgcgctcgtcaatttctgccgccgcgccagtcggtcgtctactcttacacacgtcggatgctcgacgagacggccaccaacgcgaacagcttcgcgatggccgtcgccgagcggtaccaccaactggtggcgccggacgttcgccaggtgaacctgcgcctgggcgagggcgatgccctcagtcgtgcgatggacgccaacggccagatcctgcgccgatacatggacggcacagtgaaggtgctgcccgccgacctcgaggacgcgtgggtgttggcgctgcccgagccgtatcgcagcgactgcgagcgcgacttggcgcgccggcgaggacatctgtgcgtgcgcctggagaccggcgacgacagcgccgtcagcggcgtggcgcagatcagcaccgagttcggtgagttgttaggcgcaatcgcgccggccctcgctgacggtcgcatcaacgaagccgaccgcgtgcacgcactgcagattctcaacaagtccgacgacctgatcagcgcggtgctgtcggtgcgtcggtcgatcaccgctctacttccggaaggggaccggacgcatgcctga

SEQ ID NO: 507347 - DNA, 237 bp, Stenotrophomonas maltophilia
atgcctgatgcaatggattccgtgcaggctttcaacgaggaccatgtccaggactcgctgaagcgccaccagaccaacgccgcacgccggcccggccgcacgcattgcgaacgcctcgactgctgcgagccgatacggcccgagcgcacagcccagggagcgcagcgctgcgaggagtgcgaggaagagcaccagcggcgcaacgctcacttcgcgccgtgggcgcgtcagcggtga

SEQ ID NO: 507348 - DNA, 207 bp, Stenotrophomonas maltophilia
atgcagcccgcacgccgacgcagctgcaaacccgtcaacgaggcctcgcgtcgcggcatcgccgccgcgcttgccgctctctatgccgagacgccgccgatgacggacgacgaaatcatcgcggagcaggaccgctttcgtcgcgaaaccgaggcgcccaaccggcgccagggcgaactgccgctgctgctgaaggtgcgcgaatga

SEQ ID NO: 507349 - DNA, 228 bp, Stenotrophomonas maltophilia
atgagcttgtggtgttgttcccactatgcgatgcggatctcgaagttgccgctcgagcagtgggccggcgagatcgccaagctgcccgaaggttgcgagaagggatgtggcgcgcctgccaactgcagggcgcgtaacgccgactacctgcgcgtgcaatatcgcgctctcaagcggcgcatcgagcgcgaagcgcgcgggcccggcaagcagggagcgcttctgtga

SEQ ID NO: 507350 - DNA, 1032 bp, Stenotrophomonas maltophilia
gtgagcagctcgcgtcgcgagatcgacactgcggcattgcgcagcgacgtcgacatcgtcgacgtcgtcggcagctacgtgcgactgaagcgtgacggcgacgaatggaagggcctgtgcccgttccaccaggaacgcagcgcgtcgttctacgtgattccggataaggcttttttccactgcttcggttgtggcgcgcatggcgacgtgatcgacttcgtccagcgccacgacggtctgacgttcgtcgaggcctgcgagaagctcgggcatagagactacgagccgatccgggaggcctcgccggcggaagtcgtgcagcgcgatggcaaatgggtgccgctgctgccggttcccgagcacgcgccagcgctgttgcgccgcgacggctggacggtgccgatctggaatccgaagcgctccaagttctcgcgcttcaagccgacgcgcgccgacgcatatcgcaacggcgccggtgcgctgttgggttacgtcctgcgctgcgagttcggcgatggcaagatcacgccgacaattacctggtgcatcggccccgatggcgccatgcagtggtgcattcgcccgttcccgcgcccacggccactgtgcggtctcgacgagctggcggcgaagcctgcggctccggtgctgatgcccgagggtgaaaagtgccgcgcggctggcgctggcgcgttgccgatgtacgcggtggtgacctggccaggtggcagcaagagtatcccgtacgttgactgggagccgttgcgcggccgcgacgtcgtgctgtggcccgacgcagacgagccgggccgcaacgcgatgctcggctacgaggactacagcggcctgccgcatcctggtgtcgcgcagttcttgcagcgcgttggcgttcgctcgatgcggtacgtggatccggaaggtcagcccaagggctgggacctggccgacgctctcgatgacggttggacgccgcggcagctggccacgtgggcagccgagcgcgtgcgcgacctcgaagtggtagcggggtga

SEQ ID NO: 507351 - DNA, 1434 bp, Stenotrophomonas maltophilia
gtgaccgtggccaacccgaagcgaaaactgacggtggtcgacagcggcggcacggcgccaccaccaggcggtacggattccaacgcgtggaaagacgcgctcactcgtcgaaaggacggaggggtcgaaggcacgttgcacaactgcctcctgatcctggagaacgatgagcacttccgcggcatgctgtggctcaacgagtccagcaaccaggttgtgctggccaaggatccgccgtggaccggtggcaaccgtgacgagttcacggacaccgacggctgcgagctggcggcctggctgcagtcccccgatcgctactacatgagcgtgagcgacgagctcgcgctgaaatccgtcatcaccgtggcgcgccggcatcgccggcatccgatccgcgaatacctgcgcagcctgaagtgggacggcaagccgcgcgtggagcgcatgttcgtcgacctgttcggcgccgaggacaaggcctacaacctgcaggcagcggtgtgcttcatggtctccggcgtatcgcgcctgctgtgggtggatcccaaacagccgttcaccgggtcgaaggtggacttcatggtcgtgctcgagggcgggcagggtaagaagaagacctcatccttcgaggcactgttcggcgcgcagtggtacgtcgagacgttggagtcgcctgcgggcaaggacttctaccaggtcatcctggggtgctggggcgtcgagatcgccgagatggacagcttcagcaaggcggacgtcaccagcgtgaagggcgcgatcaccaggcgcgtcgacaagtaccgcgccccgtacgagcgcgtgccacgatcctatcggcgtgagtgcgtgttcgtcggcacgacaaacgagaccgagtacctgcgcgaccacaccggcggccgccgcttccttccggtgcgtgtcaccgacgagggcgtgatcgagctggagaagatcatcgagcagcgcgaccagttatgggccgaagcggtccatctgttcgagcagggcgtgcagtggtggaagttgcccgacgacgcggcagcggagcaggaggcgcgttacttcgaggacagctgggaagggcgcatctcgcgctggctcaccggcacggtcgacaacaaggatccaaccaaggaccggccgtatcccgcgcactgtcggtacggcaagcaggtcgagtggaccaccaccgacgagattctggcgtacgccatcggggccgacgcggccaagcatggcaggcccgagcagatgcgcgtgtcatcgatcatgaagcggcttgggtgggtgcaccggcgcgagctcctggagggtgtgcgagagcgccgttggtaccgcgccagcggggatgccatcgcagaccaggccagcgccagcagtgcatccgccggcaacgcgggtggaggggtcgatgacgactgcccgttctag

SEQ ID NO: 507352 - DNA, 651 bp, Stenotrophomonas maltophilia
atggactcccgcccgcaaatctccaacagctctgcgacaccggcactggccggcgccgtgatgacgcaggccgaattcgccaagcaccgcggcgtttcggaggcgatggtgtcgcgctggaagaccaagggctacctggtcttcaccaccgaccgccgcgtcgacgtggccgcgtcgatggaccgcctggaccgaatgctcgatcctgcccgcggcggcgatcgtacgggccgccagcggccgtacagcccggctggcgccgccggcgttccccaggcggcgccgggcgcgggcagccaaggcggcgcgcccggcggcgccgagggcggctgggatcccgaccccgaccggttgaactaccagcgcgaggcggctcgcgacaagcgggccagcgccatgcagcgcgagctggagctggcgcgcgaggctggtcagctggtccgcgccgacgaggcggccagccggatcgcgaaccacgtgcgccaggcgctcgattcgctcgcggcacgccggcgtcgactggcgccgaaactcgccctcgaggccgacccgcgcaaggtcgagcagctgctcgaggaatcggaccgcgagttctgcatcgccttggccaacctggtcaccgggcaaccgacggaggctccggccgaatga

SEQ ID NO: 507353 - DNA, 2085 bp, Stenotrophomonas maltophilia
atgagtttcgacggcgccgactacgggcacctcctaggcgacgcctgcaccgtcgtcgaccaggcatgggcgaaggcgtggatgccgcgggaaccgttgacgatcagccagtgggccgagcgtcatcgcgtgctgcccgacgcgagctcggcggagccgggaccgtggcggaacgcgcgcaacccgcacctggtcgagatcatggactgcctctcgccggtacacccggccgagaaggttgtgttcaagaagccgacccaggtcggtggcaccgaagtcctgatcaacgcgatcggccatgcgatgtgccacgaccccggcccgatcatgctgctggtgcccggcatcgacctggccgaacgccacagcaagcagcgcatcgcgccgtcgatcgaagcgagcgaggagtggagtcgcgtcgtgccgcctgcccggagccgcgacagcggcaacaccgtgcgcgcgaaggaattccctggcggcatcctggtgatcgctaccgcgaacagctcgacgggcctgcgctcgatgccggtgcgctacctgttctgcgacgaagtcgacgagatgctgcgcaacctcaacggccagggcagcgcgctcgaaatcgcggtgcgccgcaccggcacataccagggccgtcgcaagatctacctgtgtagctcgccgacgatcaagggcgacagcatcatcgacgacgagtacgaggcgagcgatcagcgacagcggcacgtgccgtgcccgcactgcgagcgcctgcaggtgctgatgatggacaacctcggcgacgacggcacgtacctgtgcgagcactgcggccagtcgatcgaggagcaccacaaggactggatgttcgagcggggcgtgtggatcccgcggttccctgatcgcgatgtgcctggcttccacctcaacgcgctgtacgcgccataccggctgggcgaatcgtggctctacatcgccggcgaacgcgcgaaggcgaaggcggatccgtcgcggcaggtcacgttcaccaacacgtacgaaggccttgcgttcgaaggggagcggcagcaggcggatccggacatcctcgccgcgcgagcggaaccgggccggcatcgtggccgtgttccacgtggctccttgctgctgactatcggcgtcgactgccagcacgatcgcttcgaggcccaggtgctcgggtggggacgtggccagcgcgccgcggtagtcgactacgacgtgatccccggcgacccgtcttcgccggaggggttcggcgagctcgacgcctggctgcagcgcagctaccggaactgcaccggtgcgctgatggtcgggcaggcggtcgcgatcgacggcggcaactggaccgagatggtcgctcagttcgtgaagtcgaaggtgcagcgctcgggccagtcgcgcctggtgcaagtcggcggcggctatcaaccgcaacgtctgtatgtggtgcgcggccgctcggccaagtccgagcgcgtcgtctacaagcctgcgaagactgaggtcaacgatcgcgaccggacgatcgctcgcagcgtgggcgtgtggggcgtcggtaccgacgtggccaagcatatcctctacggacgcatcaccgccgacgccaatcccgaactcgacatcgagcggcgcatgctccgcttccccggcggcaacggtgaggcgtgggatccgctgcggccggatcccggccagctgccgcccgagtactacaagggcctgacggtcgagtactacgacttggcggcgaagcgatggatcaccccgaagggcgcacgcaacgaaccgttcgacacgctggtctacgcgtactgggcggctctgagcccggccgtgcgcctggacatgatccgcgatcacgaatggactctgctggaggaacgcctcgagccggcggccgatctgttcgcgccgacagcgccggattcggattcccgtgaaacattgccgaccgctacgccggcgccgaccccggcaccggcgccgaccccgatcgcttcggattcccgtggaacagcagcgcggcctgcgcggcagaacacgggaatcggcgcacgcgatgggtgggcactgtga

SEQ ID NO: 507354 - DNA, 300 bp, Stenotrophomonas maltophilia
gtgaccgcctcccgcaagcgcgacgccgagctgcgcgcgcagatcaccgcggccctcatgcgcgacgtcggcgtgagcgagcgcatggcgcagcccttcgtcgactcgatcatgggcgtgttcgccgggcagcggccctatttcccggtggcgcgcaacgccgaccacgtggagcggatccgcgcggcattggagggcgggaagccggtgaagctggtcatgagtacctatggcgtctcgcgccgccagttgtaccgctacttcccaggcggcctacccaaaccgaagcgtcagccgtga

SEQ ID NO: 507355 - DNA, 339 bp, Stenotrophomonas maltophilia
gtgctctcgcttctactcgccgccgctctcgtcgtgtcgcctgaccaggccgctactgacggcgcctcgcctgcagagcgcgcacagcgccaggtcgccaagcgcatgaaggacccggccgccttgcagttccgggatgtcgcatacaacgcggcagccggaatcgcatgcggccaggtcaacgcgaagaacgcgttcggcgggtacatcggctaccaggacttcatcgtcaaaggcgacttcgtgctgacgcgcggcgaagccagcgcggctctgcagccgctgttcgacgaagcatggcgccaatgccgcggcggcaccgagcccgatcacggctga

SEQ ID NO: 507356 - DNA, 219 bp, Stenotrophomonas maltophilia
atgccgacgatcaacgaacagcgccttgagctctacctcgccgccgaggtcaagatcctcaagggccaggaagtccgcttcggcgatcgcaccttgcgcttcgctgacctgaaggaaatccgcgccgagatcgagcgactgcagcgcgcagtggcagtcgagaagcgcggcgcaggcggcgcccgctacgccaccgccgacttcggcggggtgacctga

SEQ ID NO: 507357 - DNA, 1560 bp, Stenotrophomonas maltophilia
atgggtagcgcagccgtcgcgcgcatgcgcctgctggagaccgtgcccgtcgatcgggccgcacgcgcgttggcggaccgatccgcgaccatgccgagcgcccgcgctcacgaagtcaccaggccgagccggtcgcgcaagctcgcgcgggactggggcagcggcaacgccatcgtcggcatggacgccaagcagctgcgcgaccaggcgcgccacctggaacgcgatctcgatcttgcgcgcaacgcgatcaacatcctggtgcagaacaccgtgggcgcgggcatcgacgtgctgtccgcaccccgcaagcccggcggcgagattgaccgcgcgctcgcgcaggagctcgacgagctgtgggacgagtggtgggatcgtccggaagtcaccggcatgcacgactacggccgctgccagcagctgctggcgcgcagctggttccgtgacggagaggcgtactaccaggacctgatcggtccggtgccgtatctgacgtacgacacgccggtgcgttatgcgatcgagatgctggaggcggacctggtgccgctggaactgaccgatcccggccgcagcatcctgcagggcgtggagcgcaacgcctggggccgcgtgctggcgtaccacgtgtacaagcagcaccccggcgacgtcttcagcttcaacctggaaaccaagcgcgtcaccgccgaccgcatgcaccaggtcgcgctgatcgatcgcttgcaccaggtgcgggggttgagcgtgttggcgtcctcgatgtcgcgcttcgaggacgtcaaggactacgaggaatccgaacgtatcgcggccaaggtcgccgcctcgatgtgcgccttcatcaagaagggcgacgcgcagtcgttcggcaacggcaccacgccgggcctcggcggaacggtggtcgtcgagaacgggcagcagatccgcgaccttcgcatggcgcccggcgcgatcttcgatgagctgctccccggcgaagacgtcggcacggtggccagcaaccggccgaatccgaacgcggccacgtggcgcaaggaacagctgcgtgcggccgccggcggtgtcggcgtcagctacagcagcctgtccctcgactacaacggcacgtacagcgcacagcgccaggagctggtcgagaagtggggcgcgtatctcatgctggccgagagcttcatcgcccagcaggttcgcccgacacgcaagcgcttcgtcgaagcactcgtgctggatggcctgatcaagctcccgcgcggctgggagcttcgccacctgatggcctccacgtacgtgcggccaatgatgccgtggatcgacccactcaaggaagcgatcgcgcgcggcgagtacgaggaccgcggctgggcttcgccgcagcagaacgccctggcacttgggaacaacccaaatgaggtgctcaatcagagcgccgattggaagcggcagcgcaaagagctgcagctcgatgacggcgacaccacgaaccgcgatcccgacgcgcgcgcatctgtgcgtgatgccgtggttcgcgccgcacttacggagaagacctga

SEQ ID NO: 507358 - DNA, 2175 bp, Stenotrophomonas maltophilia
atgaagcgcagttccctgtcgaacgccttggcgatcgccatcgccgcatccgccgctgctggtccggtcgcaaacacgcccggtcgcctcgaggttgttgccaagggtgacgacaccgccgagctcctgatctacggcgatatcggcgacagctggtacggcgaatcggtggcggccgcagatgtggtcaagcagctcaacgacatcactgcatccacgatcgacgtccgcatcaacagttacggcggcagcgtcaccgacggcctggcgatctacaacgcactgaagcgccacaaggccaccatcaacgtcagcatcgacggcatcgccgcgtcgatcgccagcgtgatcgcctgcgctggcgacaccgtgcagatggctgcgaacacgatcctgatggtgcatgcgccgtggggcggtgcctggggcaacgtccgcgacctggaggcgtacatcgacgtcctcaaggtgatggagggcgccatcgccaccagctacgcagcgaagacggggaagaccgtcgaagagatgctggcgatcctgcgcgactaccaggatcactactacaccgcggccgaggcgaaggagctcggcttctgcgatgtcatcaccgaggacgcggccgccgaagccgcggccgatagcgcgaaggcgacgatcgccgcgcaggccgcgttcgcgccttacctggagcgcatgcccgagcgcatcgccgctgcgttccgtcccgcacaaccccagcgcgaagagcctgcccctggccgggagcacccggccagggcgatggcgagcgcagtcccgaattcgtcggccaccgccggcgcccatccgccggcggtcgccggcaagaccaccggagacctcgatatgaacgaagagcagaagaaagcgcgcgacgaggccctcgccgcgctgcgcacccgcaacaacgaaatcctcgacctggccaagccgcacatgggcaacgccgacgtcaaggcgtacgtcgaaaaggtcgtcgccgaagcggacgacaacgtcaccgctgggcatgtcggcaagcacatcctgacgctgctggcgcagggtgccgcaccgctcaacggtaacgccggcgtcgtcgccggcggcgaccagcgcgacttgacccgcgcggccatgatcaacgccatccaggcccgtgccggcaccgccaaggccgacgcgcagaacccgtaccgcggccacagcatgtcggagctggcgcgcgagtgcgtggtgcaggccggcgtgaacacgcgcggcatggacaagatggaaatcgtcggcctggccttcacgcacagcacgtccgacttccccggcctgctcggcgacgcggcgcgcaaggccgtgctgcagggctacgaggaagtcgatacgccgatcgaggagttcaccagcccggtcagcgtgcccgacttcaagccgaccacgctggtcggactgggcgccttcagcaacctgctcccggtgccggagggcggcgagtacaagtacggcaccttcagcgagcagtcgcaggcgatcgagctggtcacctacggccgcctgttctcgatcacgcgccaggcgatcatcaacgacgacctgggcgtcttcagcgaagtgccgcgcaagatgggccgtgcggctcgccgcacgatcgtggcggccgtctggaagctgatcaccagcaacccggtgctgaaagacggcaagacgctcttccatgccgatcacggcaacctgctgacggcggcggcgatcagcaccaccagcgtcgatgcgatgcgtgtggcgatgggcaagcagaaggactcggacggcaacatcatccgcgtgccgctgaaggacctgctcaccccgctggccctgggcggcttggcccgcaccgtgcgcgacagccagaccgaggtcagcggcagcaagaacctcaccacgccgaacatcgtcaagggcacgttcgacgtcatcgacgacggccacctggacgacgacagcgcgaccgcgtggtacggcgttgccgatccgacctacatcgacgcgatcgttatcgcgtacctcaacggcaataagacgccgtacctggagcagcacgaagggttcactgtcgacggcgtcgcgtggaaggtccgcctggacgcgcagccgggcatcgccgactaccgcggcatctacaagaaccccggccagtaa

SEQ ID NO: 507359 - DNA, 357 bp, Stenotrophomonas maltophilia
atgaaaaacgcacaccaggacggccgcgtcctcgacttcactctggaggctgccgtcgagagcggcggcgtggtgaccaagggtcgcctcgtcggcgtggccgtcagcaagggcgccatcggcgacaccatcgccgtccacgtggaaggcgtgttccgcctgcccaagctggatgccgccgtcatcgccgtcggcgcgccggtcacgtgggacgtcagcgcggccgaagtgatcatcgccggcgccgccgtcggcgacgtcgagaacttcggctacgccgtcgaggccgcgggcaatggcactgccgacgtgctggtgcgcctgtgccccggcgtcggcgtggtgaaggccgcgtaa

SEQ ID NO: 507360 - DNA, 447 bp, Stenotrophomonas maltophilia
atggcagcgcctcgcggtgtccgcaacaacaaccccggcaacatcgatcgcagcggcacggtctggcaaggcgaggaccgcagcgccgcggcacgccagcgcgagccgcgcttctgcgttttcacctcgcccgagttcggcttccgtgcgctcgcgaaggtgctgctgacgtatcagaagcggcacggcctgcgcacggtgcgagcggtcatcaaccgctgggcaccaccggtcgagaacaacaccgatgcctatgtgcgcgaggtggccaaggtggtcggcgtcgagcccgacgcgcgcattgacgtgacgcaattccgcaccaccttcgcgctcgcgaaggcaatcgcccgccatgagaacggcggacatttctggcccgacgcaaccatcgcgaagggcgtcgacatggcgggggtccatgaaggggaaagcgatggacgctga

SEQ ID NO: 507361 - DNA, 333 bp, Stenotrophomonas maltophilia
atggacgctgagcgtcgagatgatggtcactggcatttcaagctggggcccatcgaaaagggaatcgtcgcgctgatcgccgcaggaatcgtggcgaccgccggcatcgcgtatcgaaagttcgacgcgcaaagcgagacgctcgcgcagctcgtaacgcagggtgcggtgaccaactcgcggctcagcgacctgagtcagcagctcaccgacgtgcccgagctacgccgccaggtggtggagctgaaggtgcgcgtcgaccagcaggtcaaccgcgacgaccagcaggacgaggcgatcaaggaactgcgccagctgcgggggctgcgatga

SEQ ID NO: 507362 - DNA, 420 bp, Stenotrophomonas maltophilia
atgaacaagctcatcacctccacgttcggcgtttcgctggcggcgctcctggtgctgctggcggcgaacggccgcgggctcgcggaagcgatgacggggctgtggcaagtcatgctccggttctccgacaccgcgccgatgggcttggtgtcgttcctgttctcgcttgccctagccgtggcgtcgcagccgttcctgcgcaagtggatgcccagcctcaagtgtccgctgtcccgtgagttcctgatcgagacggccgcgctggcgatcgcgttgatcgcgcagttgctgcaggtcagcgacctgaagggatggatgctgggcctgctggccggattcatggcgccgtacgtgttcaagggcctggccgcgctgtcggggctggcgctgcgcggtctgcagaaggcgggtgagccgtga

SEQ ID NO: 507363 - DNA, 423 bp, Stenotrophomonas maltophilia
gtgagcctggtcgatccaattcgcccgtacctaggcttgatccgcacggtgctgtgcatcggcctgctcgtcggcacctacatcaccggctgcacccgcggcgctgacgggaaggccgaagagctggccggcgagatctcggcgaagaacgcgcgcatcggcgagttggagcgcgcggtgtcgggacatgcgcaggcgctcgccgacgtgcagtcgcaatcacaggctgccatcggcgaagccgagcgccgtcgccagctcgccgccgacgccgcccaggcggccgagctcggcgccgaggcagcgcgaaaggcggctgctgacttcgaacgcaagtgggccgacgcggccaagcgcaagcccgcctgcgccgctctgcttgcaaccgatatggaggccgtatgcggactctcgctgcgctga

SEQ ID NO: 507364 - DNA, 294 bp, Stenotrophomonas maltophilia
atgcggactctcgctgcgctgatgtgcgccacgttgctggcggcctgcgccaccacaccgccaccggcatcggtgccgcccaaggtcgtcacgataacggtcgagaagccctggattcccgattggatgctggtcgtcctgcccgaggacgcgccgcgccagaacacagtgcaggaggccaagcggctcgccaacgatcgcctgtcgacgatccaggccgagaactgccgcaagcgcctgggcgcgaaggtcaaccgcggtgaaaaggtcgacccgaaggagtgcgagaagtga

SEQ ID NO: 507365 - DNA, 303 bp, Stenotrophomonas maltophilia
gtgacctccgaggttttccagtcgatgcacggtgacctcttcgacgtgttcggcgaggacgcgacggtgcagcgcggcgccgacgcgccggtgccggtgcgggttgttatcgaccgcagcgtgcagcgcttcggtgcgaacggcgaggtggtcggcgtcgtctcggtcgcgagcttcatgctctcccagtggtcgccgaaatccggcgacgtgctctcgctcgtcgacagcgcctggaccaagaaagtcgacgtggtcgacgaggacgacggctacgttgcgcaggcggtgatgcatggctga

SEQ ID NO: 507366 - DNA, 426 bp, Stenotrophomonas maltophilia
atggctgaccaggcgcgcagctttcagatcctcaaggtcctgcaggcccgtttgcagcagatcagcatcgcaaacggttaccgcaccgacgccggcgccgacgtgcgcgtcgaagaggcaaaggaacccgcgagcgcgccgcgcatcaccctgtacagcggtagcagggtgtttccggaccgtgccggatccaggagcgagcgcgagttcaccctgatagtcgaggcgcggatcccggccagcctcgacgcgctgcaggagaccgtgaccgcgatcgacgaggacatcgagcaggccctcgaccagtacctgcagcagccgttggcgctgcctctgcagttcgaggaatcgatcattctcgatcgcccggacggcctcgctgagatggtcgtgcagcacatgtacacgacgaggtaccggcgatga

SEQ ID NO: 507367 - DNA, 639 bp, Stenotrophomonas maltophilia
atgaccggcgcgaccgtcaccgcggggcgccgcggccgcgtcacgcttggcttcgagctgcagggcgcgctcgccgcatcgcgcaacctgggcctgctcgccgatcgtctgccgtgggtccagcgccgcgcggtgcagaccttacgccggcgcctgcccgtgcaggcccgtcgcgatatccaggccgagtacaacctcaccgcgcagcgcatcaaccaggacctggtgacgcgcgccgatgaccgtggcgtgcgcctgatcggtcggttccgcggcattggcctgcgcaacttcgccgcgcgacgcaccgccaagggcgtgaccgcatccatcctgcgcggccgccgatcgctgcggaaaggtgcgttcttcgcgcctctgctcggcggaaacacgcacgtcgtcgagcgctacggcgagaaacgcgtgatgacccaaggccgctacaagggcaagcgacgccagccgatcgccgttgagtacggcgccacggtcgcgcagatgctcgccaaaggccgccggccggagcgtctggccgatttcgcgcgcggagtgcttggcaatgagatcgagcgcctgttcgcctactacgaccgccccggcggttttcccaccaccaccagcgaggaatcgccatga

SEQ ID NO: 507368 - DNA, 231 bp, Stenotrophomonas maltophilia
atgagcaacaacagcaccaccagcggcgccggagcgcttcgcaaggtccggatcttcaagccgcacacgcatgccggcaagcgctacacgccgggcccggaaggcgtggagatcgaggtcaacgaagctgacgctaagttcctcgacagcatcggcatcaccaagcgtgccgaggcgccggccgaagtgcctaccgctgccggtgccggcggcatccgcccgcaggcctga

SEQ ID NO: 507369 - DNA, 759 bp, Stenotrophomonas maltophilia
atgaaagacttcagtttccagggcaaggtgtacctcggtgcacggcttgccggtggcaagcccggcgcgctgcgctgggtgggcgatgcgccacgttgcgacgtgtcgctgagcaccgactccgaaacgcgccgtgagagctactccggtcagcgcctggtgtcggcacgtctgcagcgcggcagcgaggccacggttgcgatgacgctcaactgggcgacgctcgagaacctggcactcggcctgtatggcgtcgtcaacaccgtggccgccgggtccatcacggcggaagtgctgccttcgggcctgattgctggcgatgtcgtcgcgctcgagcatggcggtgtcagctcgctggtggtcaccgacagcgccggcacgccggccaccctggtcgagagcaccaactacgccctcgattccgagaacggcggcatggtgcgcatcatcaatcccggttcgttcgtgcagcccttcaaggcggcgtactcgcacacgcagagccaggacgtgacgatgttcgcgaccaagccgccggagcgttacctgctgctggacggcatcaatacgctggacggctcgccggtgaagttccgcctgtaccgcctgcagttcgacccggcctcgaccatcccgatgatcaacgagagcttcgggcagatcgagctgacgggcgcggccctgtacgacgacgaggcctcgctcgacgcggaactgggcggcttcggccgcatcgagcagtccgaggcggtggcgtaa

SEQ ID NO: 507370 - DNA, 528 bp, Stenotrophomonas maltophilia
atggcccgcaaagtgaccgaacgcaagaaggtcgcccccgccgccgaggttccctcggcggtgtcggccctgctcgagatcaagcccgacgtcacgcttacgatcgccggccgccagttgaccgtgcgcgagtacgggttcttcgaagggctggaagtcgcccaccaggcgcagggtttgattcgcgacatgcatgccatgtgcgccgacggccgcctgcaatactcgcgcatccgccggctgttcggccctcatcgggaggtggtgatcgcgatcgcggccaaggccgcggacgtggatgccgactgggtccgaggcctggagaagtctccgcaggacgccgaggttttcttcgacacctggttcggagtgaacgcgagttttttcgtgcacgaggtcatcgtcgagatgcgggaagcgcggcaactcgcggcgatggcgtcgactggttcgcaatcttcgccagtctcgccggcgccggcctcggcgacttcgaccggatcggccgattcaccgagcggcagctga

SEQ ID NO: 507371 - DNA, 3288 bp, Stenotrophomonas maltophilia
gtggcgaaccgcgacttcgaaatcgacatgcgaatgcaggcggacttcgagtccgcccgtcgtgaaactcggggcaccgccgatgacctgcggaacctcggcgacgtcgccgtcgaaaccaatcagaaactcagcaagagcggaagcggatccggacagcaggaccggatccgcgagatggtgcgccgctccctggaagagctggaagcggcccgcgcccaggtggaagccgagcagcgcaccgctggcgccggtcgcgatgcagccgcggcggcagcccagcggcaggcgcaggccgaagccacctacgtggccgccagtcgcgcgacgcagcaggcggtgagcgccgagatcgggctgatctcggagctgcaggaacggctggggcgcagcgccgcgagcgtcgacgacttggccgacaccgaggcacgcctcgatgtcgcgatgcgcaagggtctcatcaccgccgaggaatacgacgaagcgctggagaagctcaccaaagagcaggaccgcctcaacaaggaaaacgagaagtcgggcaaggcgatcgagaccacggtcggtcgctacgacaaggcctcggcaggcctgcagcgcctggcgcgtgacgaagccaagctgaaggaggcggtcgacaacggccggatctcgcgcgaacagtacaaccgggcgatggccagcatcggcaccgagcgcgcgaggctgacagagctgcgcaacggcgcccagcaggccgccggcgccatgcgaacgctcaattccgaatcgctcggcgtgcagcgcaatctctcgcagctgatcagctacggcgtgaccggccagtgggagctggccggcaaccagatcctgcaactcggcaaccaggccgggctggccggccggctcttcagcggtgccggcatcgccatcggcggggtcgcgctgatcgtcggcggtctgaccgcggcattggtctcgggctacctgcagatgcgggcgttcgacaacgccctcattgccaccggcaactacgccggaaccaccgccggcgcactggcggaaatgcgcaacgagatcggcagcgccacgggcgacttcgccggcgcgcagtcatcgctcgaagcactgaccgcctcgggcaagttcactgcggactcgctggccagcgcgggccaggcggcagtgagcctcgcgcagctgaccggccgcagcatcgaggacacgaccaaccaggtaatcgccttggccaagtcgccgacggccagcttgctcgagctcaatgagcgctaccacttcctgacgcttgaggtctacgagaacgtcaagtcgctggaagagcagggccgcgcccaggatgcgacgaaggtggccaccgacgcgctggccgccgcgacgtcgtcgcgcgtggcacagatgcgcgagaacgccggaaccctcgagcgtgcctggtacgacgtgcgcgacgcggtgcgcggcgcgtggcagaccatcaaggacattggccgcgacgacgcagaggcgcgcatcgccgcaggcgagcgcggcatcctcatggcgaaccagcagcgcgccgagctgcaggaacaggtgcgcctgggcatcctcacccaggcccaggctgaccgtgccaaccaagcgctgcgtgagcgcattgccaacgagcagaagaacatcgcacagtggcgcgagcgcaaggacctgcaggaccaagcggcgaaagcagcggccgaggagcagcagctgcaggacaaggcggtcggcgccgcggcatcgatcgaccgcgacatcgcgcgcatcgacaagaaggccgagcgccagcagcgactcaaccgcctgatcgagcaatacaacgtcatcgctgcggtcgatcccaacgactcgcgcctgtacgacgggtcctacgatcgcctgaagaaggcgatcgaagaggaaaccaaagagcgcaagccggccgaacgcaaggggccgaaggaagcggatccgaacgaggcggcgcagcgcgacctggagaacctgcagaagcaggtcgcgctgctgggggacctcgccgatggcgagacgaaggccagcgaggcctcgcggatccgctacgagatcgaggagggtgcatacaagaaggcgagcgagtcgatcaagcagcatctggtcgacaacgcgcagctgctcgacagcgagcgcgcgaagcgtgaagagcaggccaagcagaagcgcgaactggacgaaacgaagcgcgcctacgagcagctgcaggatgccctgcgcacgccggcggaagccgcgctcgagggcgcgatcacgcaggtggagacgctcaataaggcgctgaagtccgggcttgccgacacggccgcctacgaccaggcactcggccgtatcgtcagcggatccttcagcaaggcgccaacgttcgaaggcctggcgccggagatcggcggcgcgttcggtgaactgggaaagatcggcaccgcgcggggcgagctcgagaagtggtaccaggagcagctcgcgctgctgaaccaattccgtgcgcagaagctgggcaccgaggcgcagtggaacagccaggaacagcagctctcgacccagcaccagaacgcgctgcgccagatcgaatccgcgcggcagcaagcaatgctcgccggtgcgtcgtcgacgttcggccagttggcagacatcgccaaggcgtacggcggcgagcagagcaagacctatcgcgccctgttcgcgctcagcaaggcattcgcggtcgcccaggcggcggtggccctggcgcagaacgtggccgaggctagcaaggccggcttcccggcgaacatcggcttcatcgccggcgccctggcgcagggcgcacagatcgcgtcgttgttgtcgcaggcctcgttcgatcccggcgagggctatgcggaaggcggctggactggacctggatcgaaatggcagcccgccggcatcgtgcatgccgaggaattcgtcgcccgccgcgaagtggtgcgccagcccggtgcgcgctcgttcctggaggacttcaacgagcgtggcatggacgcgctgtacgcgtggcgtggctatgcagacggcggcttcgtcacgcccgacgctgatctggctggtccgcggtgggatcgccatccgagcgtcgataacggcgcgctcgcacctaccgtgaatgcgaacacgcgcgtgctgaacctgctcgacatcgaccagctggcgcaggcgctggccaacaaccgggagttcgagaagacgctggtcaacggggtcgtgacgaacggcaactcgatccgcgcggggtggcaggagtga

SEQ ID NO: 507372 - DNA, 198 bp, Stenotrophomonas maltophilia
atgcgccccatcacccagggcatcgatcgggacctcgccgagcagctgcaggcgctcgacaccaggttcctcctggccatcctccacggcgacgtcgacgttgggcttctagtgaggcgtgagctggccagccgcggcgtcgacggggcggggcgctgggtcgggttcgctgaggcggggcaggcgctcgggctctag

SEQ ID NO: 507373 - DNA, 168 bp, Stenotrophomonas maltophilia
atgatcccggccccgcccaccttcatcacggccccggtgatccagatggctggcgatccgctcgacctgttcctgcgcatcaacgtgatcgcattcggtgtgttcgttctctgcgtctgcgccgtcctgtggattggcgacgaccgtgagggtggccgcgatgtttga

SEQ ID NO: 507374 - DNA, 207 bp, Stenotrophomonas maltophilia
atggcccgcgtccttacttgcgtcacgtacgacgaagccgccaagcaatgcacaagcgaagtttggttggaacagtcggactggacgcactacctacccactgttgaacaggccaacgtggtcggcgccgccttcttcacctcggtgatgatcgtggcagtcgcaagacgcctgctattcccacctgaagagagagaaattcgatga

SEQ ID NO: 507375 - DNA, 255 bp, Stenotrophomonas maltophilia
atgaaccgtttcaaccgtgaaagcatcgctctgcgtgtcaaggctgtcgctgcatcgaccaaggcccgtggtatcgccctgatcggcgcggcctccatgctgccgtcgctcgccatggctcaggatgccgcattcgatccgtcctccatcaccgtcaagatcggcacctacgccggctatgcgctcatcatcatcatcgccttcgcggccgccgtgtggggcctgcgtgccgccggcctgatcggcaagaagtga

SEQ ID NO: 507376 - DNA, 1500 bp, Stenotrophomonas maltophilia
atgtataggctggcggcgtactttgtcgtgctgctcgcttcgcttctagcgcagctgcccgtcatacctgttgccagggcgcagagtgtcgtcgggtgcagctccaacagcgtcccatccgataccgctatcccgagctactgccatcaaggcacggcgtacagcgcctgctcggcggcagaagacggagcggctgcacgcttgcgtgcgcgataccctgacagtgcgtcaaacgttgaaaagggcggttgccgaaaatgggctgacaacgtcttccagtgctatgtgcgaattccgggcgtgtccgaagacgattgccgcgttgacaacaaggtctatagcttctaccggcctgaattgacatgtagctctctgaacacgagtacgcctctcgccgatgcggctccgtggttcagtgcgccgtcgacgtgtgttggtggctgcaaggtcggcggcacaccgttcagtcaggagaatggcaacgtcaaggtctatgggatgaaggaccgctattacgacggcaccagttgcagtccgcagtcgggaacgcctggaatcagtccggaccaaggacctgaggaagaggggaagcccaagcccgatgagtgcacagccttgggaaatgggcaaacctcctgcattaagccaaacggcgatcactgtgctaccgcgtccacgggaaagacgttctgttggcagccgcatgagagtggcgagaagcgtgatggcaccgatgcgcagaccaagagtgaggccggaaagcccgttacgccaccgtcaccgcctgatcccacgaaggaatatcagcgtacggaaggccaccagcagacagcttgcatcaacaacacgtgcgtcacttacaacgttactaatttcaccgagaccggcaaggggagcgccaagaacggcactggcgataacagcccggacggcagcaagaacacgagcggcaacggtaagccgggcactggttccggtgggggaaaggacggcgaaggcgactcagcatcggatagcggcaactgcgacgttgcaccgatgtgcaccggcgatactttgaagtgcctgcatcttcggtacacatggaaaatccagtgcaatacaaaaggctccgagatcagcaagggcgacggctgcggcgagggtgatgttcccgtgtgcgccggttccagctgtaaggccgaagcgtacgcgcaattgcttcagcagtggcgcgcaaggtgttctgttgaaaacttggtcaagggtgtcgaagagcatgcaggccagggcgacggtgatgacggtgagggaagcgtcatcattgatgactctggaaagaacccgaatcttgatgagggaaaaatctcatatgcaggcggccaacttggctacagcttcgaggttgagggagtgaagttcgaaatgccacagaaggtgctcgacttcttgcccatcctgaaagtgttgatcatttcgttggccgcgctcgctgccatcgccatcatgagggcaaggtaa

SEQ ID NO: 507377 - DNA, 291 bp, Stenotrophomonas maltophilia
atgagtctgttcactgagggcctcagcgtatggctgtctaagctgatcattagcaaggcggcgcgctgggtcactaagaccttcttcggcctcgggatcggcctcggcagctacgtgatgattttgcagccgttgctggattgggctattgcgaagtggcaggcgatgccgggcaacatcgcaatgtggctgcatgccttgggcgttgatgttgctgtctcaatcattctgagtgcctacggcttcaaaggcactgagcggctgttcctgcgtcggagagacaatccgtga

SEQ ID NO: 507378 - DNA, 1212 bp, Stenotrophomonas maltophilia
gtgagcatctacaaaaccgctgcaatgtcgcttctgacagggatccttggcagtggcaagacgctgcgcgcagttcagcttatgagcgatgcgatcaaggacggggagaaggtgtatcaggcaggattcaaaggcttgacggtgccgggcgtcatcgactgggaggacccgcgcaagtggcaagagttgccgcccggtgcgattctgtttgtggatgaggctcagaagtggttcggcgagcgtcgctcgggatacgccccggattacctcaaagcaatgaacaccatgcgcggcgaagagggcgtgcgcatggttctattgacccagcatccaaagtacctggacagccatatcaaggaccttgttggttgccatgaacatctgctgcgcgagtccgggaagctgtcgtccaagctctaccgcagtgacgaaatcatggaggatccgcgtagtcctcgcggccgctctaaggccgactatgagacctttcgctttcctatcgagactgcaggaaaaatgtatgtttcggccaacagtcctcatacgatcaagtaccgtatgccggcagtggtgaagaaggcgattcttatcggcggccttggctcgctggcgttgcttggcgtgtggttcttcatgttccgcagtgcttatgcggacatcgccgagcaagaggagcagggcgccgctgccgcgcccggcgcgcccacggcaagccggagcggcagcggcgatcctgcgacgtcgtctcgtagtgaccgccttgcaatgcggacaggaacggactacatcgccgccatcactccgatggttcaggacgtaccgtggtcggcgcctgcttacatggagcggcccgttctatctgatccccatctttactgcatgagcaccgataacagctgtcgatgcgtcaccgatcaaggcacgaaaccggtggtcacagtaagggacgatgtgtgccgcgaaattgcccgttggggcgagccttacaacccgtttaaggcgcctgcaggcaggagcgatcagtcacggccacatgacgctcctgagcgcgcagaattggcatcgcgccaggacgcgcgaggcgagggcagtgttgctagtcaagggacgacgatcagccatgtggaacgcctgtcaggaagcttccccgaggtcgcgccgttcccgagcgccagccggatgacgacagccacgcaacccaacaagatgtga

SEQ ID NO: 507379 - DNA, 606 bp, Stenotrophomonas maltophilia
atggcgccggatgatggagaacggccgcgcgatcggcaagccccggaaacccttgtccttcaacgctgccagcgtggtgaatctctccgatgccttggcacagcgccggaaaaggcggtcatcggtggcgatggctggccccgacgccgagcctcccgcagcagtccagccagtaccggggccgaaacgccgccagcgcgtgtgaggcgcttccgtaggggcgctgcccctacaccccggctagaatgcgcgcaggacaaccaggggggggcttatggacaaagcgggatggcaggtggcaagcggtctattggcgatggccttggtcggcaccggcttcgccctgatggcgacgcgcggcgtactcgcccaagaaagaaacgaccgtcaggcgtgcccaacgatagagccagacacggtgatcgtgcgggagcaagctcagccagtgaacgtgcagtcaatcgaagaaatccggtcgaggcgcgaaagcctgctgcgcgaagaggcccccaagatggttccaccgggataccggtgcatcaacggacaggcattccgcaggatcgacaacggctgggtgcaagcatcgatagcctgccctcgtga

SEQ ID NO: 507380 - DNA, 441 bp, Stenotrophomonas maltophilia
atgacggaatcaacggcaacgcctcaggcacagggctccgacaccaagggtatcgacactactcagcagctgcctgacgcgctgctgcaggagttggtcgtgatagccggcgctggattcggcttcgggattacgcttacggtcgggggcacgctggtcagcggcaacgtctgctccggcagcaagtacatgcagttcatttttgacgaaacactcgccgacgtggacgagcaagtgaaggaggctatcaagaagcgcctccagcccttcgccgacatctacgcccccgacgcgtggagtggccaagcgccgacctacattcacctggagaacgcgcgtttcttcactccaggcgtgtcaggggcaactccttcctcgcctgtgctctggcgcgggcgcatctccgatgtttcagggttctgcttcggagttttgggctga

SEQ ID NO: 507381 - DNA, 192 bp, Stenotrophomonas maltophilia
gtgttccagcgctgccagcctgactggattcccgttggcctcggctcgctgaagtacggcggcatcagcgccaccgagattcgggccgcagcagacctgctcaacatagatcgcgcccactaccccgacatcttgttctgcctggatgtcttgatcgaagcaacccgcgacgcctactccgtggccgcatag

SEQ ID NO: 507382 - DNA, 360 bp, Stenotrophomonas maltophilia
atgctgaaactcaagaaaaccgccactgtgtcccgcccggtgaagctgcggctgccgaccgacaacccggacaccttcaacgaaggcaccatcactgtcggcgtcaagatcctgaccaaggaacagctgaaggatctggccgacgccgagatccacgacaccgagtatctgcgtcagatcctggtgtccgtgtccggtctcggcgatgagaacggcaacccgatcgaaggtgatgccgccctggccgaggtctacaccggcccctggtcgacctacctgcagaacgccatcctccaggactactgggagcattacggcgacgtccgcgtaaaaaactccaagccgtcgcgcgggcgctag

SEQ ID NO: 507383 - DNA, 276 bp, Stenotrophomonas maltophilia
atgagcgaccccgtcatggctgggccgatggtggtgggtctcctggtgctggtggcgggcttggtgtcgatcaacctgctggtggggatcgtcctgtggtggcggcactccggcctggccgaccgcgtcacaaaactggaggttcataacgaacaccgcatcacccgcgacgaagtccagaaggtgttcgagcgccttgccacgctggagggcaagacggacaccaccaacgagctgctgaagaccgtccaagaacacctgttggagaacgagtaa

SEQ ID NO: 507384 - DNA, 606 bp, Stenotrophomonas maltophilia
atgaaagcgacatgccccgactgtggctgccaaggccatatcgccaccttctttgtcgaagaggacggcaagcggctggcaatgatcatggccgagatgcccaccaaggagctggcaaaggcagttctgggctatctcgggctgttcaagccgccgaagagttcactgcgtctgcagcgggcggtgaagatcgcccaggacgtggcggacttgatcgcaaccggtcacgtctgcaaggacgagcgcactggcgttcgccgccctgcaggccctgcggtctggacagcaggaatcgagcagatgctcgctcagcggtcggccatttcgctgccgctggactcccatggatacctgcgcgccgtggtctacggactggccgacaagcaggacgcggcggcggagcgcaagcgcgaagaagacacgcgttcgggcaagcacctgacgcgtagttccggaaccaccggcatcgatccctcacccaatgcagaaacacctttgcaacgccaactggcttggatcgctcagatggaggaattcggacagtacaacgcagaggaagccgaggaagaacgccgcaaggcccatgagaagtacggagaggtgtga

SEQ ID NO: 507385 - DNA, 279 bp, Stenotrophomonas maltophilia
atgagcgcaaaacgtgaaatgaaggactgctgcgtcgtgaccatcgggttcgtgcaggtgctgatgcctgccaccgatgggctcaaagcgatggccctcctgcgcaacgccgtcgaggtcgaacacgacatggagcgaggctatggaaactgggtcgccggcgagcggccgcgttgcgagatgcagatggtctccccgggcaacgtccgagcaacggtagagacccccaactccacgccccgcgctcggaagccgcgtctgctggggcacgaaggatga

SEQ ID NO: 507386 - DNA, 255 bp, Stenotrophomonas maltophilia
gtgagcgaacagaacgcccttgatgacgcgatgatggaagccaccgaggtggcgttgagaacaacgattgaacagatcctgcagttgccaccgccccaggtgatgccctacctaacccagatgacccagatagcagtggagttgctgagagcgggtggccaacaggatgcctttgtgcgcggatttctcgatgcggcgctcaaaagcctggaccagccaccatacatgacgatgaaggacctgcgggtcaactga

SEQ ID NO: 507387 - DNA, 285 bp, Stenotrophomonas maltophilia
atgcccaagcagcaaaccattgcgcagtacctgcagctcgcggcagagattgccgaccgcacagtgcgtagcgacatagaactgttcgccaaggacgtctgggtcgacggaatccagcactacgacctgggcgcacccaggctctacgacgaggacgtgtcgatggtgcgggatgccctggagtacatcgatctacggggtgaaggcgtcttcccgtgggtgatgcgccgccacccgcagcatcccaacctggtgcggtttgaagaccgggcggtgggcgtatga

SEQ ID NO: 507388 - DNA, 1647 bp, Stenotrophomonas maltophilia
atggtgaacgcaagcgcgtcgcaaccccccgtacaggccgcaggtgcctggtccccgctgaagatccagatgttccgctcgatctggctggcgatcctggccagcaacatcggcacctgggtcaatgacgtggcggccgcctgggtcatggccgaacgtaccggttcgccgttgatggtggcgctggtgcagtcggccaccacggtgccgatcgtgctgctggcactcgccgccggaacgctggccgacatcgtcgatcgccgcaggtacctgttggcgacccagggctggatgctgctggtcgcggccgtgatggcggcgctgactgcgatggacatgctgactccgcagctgctggtactgctgaccttctgcatgggttgcggtgcagcgatggcaatgccggcgcaggcagcgatcgtctccgagctggtgccgcagccgatgctggcctcggcggtggcgctgaactcgatcggcatcaacatcgcccgctcgatcggcccggccattggtggcgtgatcgtggcgcagctgggtgcggtgtgggcgttcggcttcaatgccatcacctttgccgcgatgctgttcgtggtgtggggctggaagcgtgatcccaagcagtccagccttccgccggaaggtttcggtgccgggttgaaggcgggcctgcgctatgccagccgcgctggacgcctgcaggccgtgctgatcaagtcggtgggcttcttcttctttgctgcggcgatgaatgcactgctgccggtggtggtacgcggccagatgcagggcggggcggggcagtacggcatgctgctgggctgcatcggtatcggtgccgtaggtggtgccttgctgctgccgaagctgcgcgcgcagttggatcgcgacctgctggtgctgctggccacgctgtcgctggcgctcagcctggtcgggctggcgctgacccgcagctggtacgtgcttccggctgtgatgctggtcaatggcttcgcctggatcaccgtgctgtcgtcgctgcagatcgccgcgcagacggcggtgccggcatgggtacgtgcgcgtgcgctggcgctgtacatcatggtgttctcggcaggcatggcggccggtggcctgagctggggcgcgctggcacagcgcacctcgccggagctggcgttgctggtggctgccgcaggtgcggtgatcggcggactgctggtgtggcgcgtgcggattgctggcaccgaggatctgaacctgcgtccggccgggcactggcccgcacccgagctgtcggtgccggtgtcgaacgatcgcggcccggtgctggtcaccatcgagtaccgcatcgacggtgctgatcgcgccgcgttccagtcgcagatgcgcgcgctgggcacgatccgccgccgcgatggcgcggtggtctggggcgtggtcgaggacgtggccagtccaggcatccacctggagtatttcgtgaccccgtcgtggctggagcacctgcgccagcacgaacgcatcaccgctgatgacaaggccatccaggaagtgttgcgggagctgcatcgcggtgagcgtgcacccgtggtgcgtcacttcgtgggtgggcatgacccgctgcctgccgccgtgccgcatcaccacaccgacatctga

SEQ ID NO: 507389 - DNA, 900 bp, Stenotrophomonas maltophilia
atgcggatggatatcgccgacctgcgcctgttcctggcgattgccgaggcgggcagcatcacggccggcgcagcgcaggcaaacctggcactggcgtcggccagcgaacgcctgcgcacgatcgaagccgatgccggcaccgcgttgttgaaccggcacccccgcggcgtcagcctgaccgaagccggcgccgccctcgcccaccatgcacgattgatcctgcagcagcaggcgcagctgcgcggtgaactgcaggcgttcgcgcacggcgcgcgcggcacactgcatctgtatgccaacaccgcagcactgaccaactacctgccttcgcggctggcaccgtggctggccgaacgcccgcgcctgcacgtggaactgctggagcgcaccagccccgaagtcgtgcgtgcgatcaacgctggccaggccgaagccggcatcatcagtgatgcggtcgacgctgccggcctgcagcagcacgtggtcgccgaagatccactggtgatgctgctgcccgcggaacaccggttcgcatcgcggcgcagcgtggccttcgccgatgttgccggcgagaccttcgtcgcgctggccgacggcaatgcactgcaggcctacatcgaagaccaggcacgcggcatcgggcgacgcctggacgtgcgcatccgcatgaagaccttcgaaggcgtgtgcatcatggtcggccacggcattggtgtcggcatcgtgccgcgcaccatcgcccgccatcatcgacgcaatacccgtactgttgcggtcccgcttgcagatgcgtgggcacagcgccgcctgtgcgcctgtttcgccggatgggcgcagctgtcaccggcgatgcgcagcctgctgcttcacctgggcgtgcagccgcagaaaaatgtgtga

SEQ ID NO: 507390 - DNA, 1122 bp, Stenotrophomonas maltophilia
ttgcgcttgccgacccttctccccgcattgctgctgttgactgcgctgcctgccagcgccgacgcgctgcaatgtggcgaataccgcagcgccgatggcggcatggcgctggtattcaccactcccggcagcggccaccaccacgatgatggcagcgagccgcagccgctgtgggttgatcgcggtgcggcacagacgcggttggtcatgctcgacgatggcgtggcgcagcggatccggatcagcgccgatgggcagcgtatcgagcgcgacggggtggtgctctacaccctgcgccagccccgcgcctgcgccagcgagcccagcgcgatggacggcagctgccgcgccgccggcagccactgcgttgcacggctgcccacggcctcacccggccagggccagcgtgcgtgcagcgaaggcgttggcgcgggctgctcggcgctgctgcgccagcttcgcgatggaacgactgtagtcggcagcgatgacaccagcaccgcgcgcttcgaacgcccgcccatctgccgcgaacacacgcccggccatgacccgcaggcctgcgagacgctgaccggcgatgcgctggccgccgccatgcagaaggtcggtgaacgcctgcaacaggaagacgaagacctcccggattcaccgcttccggccgctgcacgcgatcgcctgcagcagttgtgcctgcagcaacgtggcggccgcttctgcgtcgaagtagccgcacagcaactgatcgcgctggagcccgcattggcggtgcaggcgctgcaggtggtctgcgatgccggccgcgccagcggctgcgaacgcatcgcaccgctgcgcggtcctggcgccgacctgcgcctcgtcccggcccagcaggtgccctgcggccgctaccaggccgatggaggcgtgatcgacaggctcgacttcggcgatggcacccgggcccgcctgcagaacggcgccatccacctgcagcagaacggcgaaacccttgtgctgcgccagctcggcaacggcgatctgctcggcatggatgcgcagaccgcctaccagcgttaccagcctgtgcccggcacggcagaatgtacgcccccgcgcgagggccgtggttcgccgtag

SEQ ID NO: 507391 - DNA, 663 bp, Stenotrophomonas maltophilia
atggtagtgtggctcaagccatgcgagagtaggtcatcgccagggtttacacccaaaaccccgctgctcacgcagcggggtttttctttgtgcgcccgaaatgccggtgccggccgctggccggcaacccgatggcattacatcgcccggcagatccacgccatgcgtggatgctccctgcgaggagccacggcgccaaccaaggttggccgctacccacagaaagcgcgtacagcaatcgattgccggccagcggccggcaactttgtgcgcggtaaacaccgggtagtgccggccgctggccggcaacccgacggtgttacatcgcccggtagatccacgccatccgtggatccccctgcgaggaacagcggtgccaaccaaggttggccgctaccaacagcaggcccacacagcaatcggttgccggccagcggccggcactaccaggggcaggtcacgcataaaaagacggcgccctgcgggcgccgtcctgatcaggatcgaatggaaggcccgggtcaggcggcctgggagacctcgagcggttcctgctggcggaataccgagactgcttcggtcaatgtgccggcctggttctgcagctcgcgtgcggcagcggtggcttcttccaccagcgccgcattgtgctgcgtggcctga

SEQ ID NO: 507392 - DNA, 285 bp, Stenotrophomonas maltophilia
atgatcattgcgccaatgcccgtcgcgctggtgactagcggcagagctagagccccaaccctggcagcccgcggctctgtagagtcgagccgcgctcgactatcgcgggccacatcgctccccctcaggcacatcaccagcaagaatctgcagcacccgatccaacagaacaggttccggtatgccagccagcacctgttccagataatccaacggctccagttgccattggaggagcgcccgcaactgcacaacggcgggcgcccgctgctccgcgtcaagtga

SEQ ID NO: 507393 - DNA, 939 bp, Stenotrophomonas maltophilia
gtggcgcagaagggtggtgtctacaccgtcaccaaggatctgctgcgccgcttcgggccgcgccgggtgttcaacaccctgctggacgaaaccatgatcctgggcatggcgcagggcctggccaacatgggcatgctgccgatcccggagatccagtacctggcctacctgcacaacgccatcgaccagctgcgtggcgaagcctgttcgctgcagttcttctccaacgaccagtaccgcaatccgatgctggtgcgggtggccgggctgggctaccagaagggtttcggcggccatttccacaacgacaactcgatcaccgccctgcgcgacatccccgggctggtggtcggctgcccatcgcgcggcgacgatgcggtgatgatgctgcgcacgctggcggcgctggcccgggtggatgggcgcgtggccgtgttcctggagccgatcgcgctgtacatgagcaaggacctgcatgagccgggcgatggccagtggctgttcgactacccggcccagggccgggcactggtgccgggcgaaggccgtgtttacgggccggaggctggcgagctggtggtctacacctacggcaatggcgtgccgatggcgctgcgcgcagcgcgagccatcgaacagcagctgggctggcaggtacgggtggtcgacctgcgctggctggtgccgctggacgccggcttcatcgccagccaggccgccagcgcacggcgcgtgctggtgctggacgagggccgccacagtggaggggtgggcgagggcgtggtcaccgcactggtcgaggccggtttcggccacctgccgctgcgccgggtctgcggcgccgatacctataccccgctggcaggggcagcaatgttcgggcttccaagcgacaatgcggtgattggcgccgcccttgaactggcgcaggaaccttga

SEQ ID NO: 507394 - DNA, 198 bp, Stenotrophomonas maltophilia
atgtacttgcagcgtgtcccgccgccccaccccggcccaaccctctcgttcttcaacgcatcggacagcaagagcattgttgttatcggcttggaaagaggggtcagatcccttttcctgcggaaaagggatctgaccccggaagccgtcggctgttgcttttgcttctgcttttttcttttgatcttccgtggctga

SEQ ID NO: 507395 - DNA, 456 bp, Stenotrophomonas maltophilia
atgctcgcaaaactcgaacgactcatcggcgaaatcggcgacctcaacagcaagttgatcctgctggtcggtcccagccgcagtggcaagacccaactgctgcgccaactcagcgccaagctcaacatcgagccgctcaacgtcggcctggagctggggcgccgtttggccgccacgccgaacaacaagcgcggcttctcggcaggcgaactgctgcgggagatcgcggacaaggaacgaactgaagccccgctgctgctcgacaacctcgagttgctgttcgagccgggcctgcagatcaacccgcttgacctcgtcaggcggctggctcactccaagcgcgtcgtggccgtctggcctggcgagctgcgcggtgatcgcttggtgtacgcggacatgagccatccagaacatcgtgactacagccgcgacggtgcggttgtatttgaaatttga

SEQ ID NO: 507396 - DNA, 3747 bp, Stenotrophomonas maltophilia
atgatggccaagaacatgaaatacggagatctgatccagttcgagcagatcgagtcagtcattcagctgctcgatgccgggcgcccggacgaggccaagaagctcgtcgcgacctatgtcatctccgacgacatggccgagcggatctccaagctcatggttccccagctcagttttgacgactcggtcgatcacaagggggtgctgatcgtcggcaactacggcaccggtaagtcgcacttgatgtccgtgctgtcgttggtggccgaagatgccgcctacgcgccgatgatccgccacccgaaggtcgccgaggcggttgccccgatcgctggccgcttcaaggtgctgcgtatcgaggtgggtgggctgcagatgccgctgcgccagatcatcaccctgcagcttgagcgtttcctcgaaaaactcggcgtcgattacaccttcccgaccgccgacaaagagctcaacaacaaggactccttcgaggagatgatggccgcgttcgcggagaaattcccggaccagggtgtgctgctggtggtggacgagttcctggagtacctgcagtcccgtcgcgaccacgagctggtgcaggacctggccatcctgcgtcagattggcgaagtcactaagcacctgaagttccgcttcgtggctggtgttcaggaagccatcttcgacagtgtgcgcttccagcatgtggccgacagtatgcggcgcgtcaatgagcgcttcacccagatcctgattgaccggcaggacgtcagcttcgtcgtctccgcgcgtttgctcaaaaagactgccgatcaacagaacaagattcgcgaatacctcacgccgttcgccaagttctacggctccatgaacgagcgcatggacgagtacgtgcggctgttcccggtgcatccggactacctgaagaccttcgagcagatccacttcaccgaaaagcgcggcgcgctcaagaccatcgaggccgccatgctggccatcctcgatcaggaagtgcccgccgacaagccgctgttcatcagctacgaaagcttctggaacacgatcaaggccaactcggtcttgcgcgccgaccccaacatcaaggaggtgatgcgcgtctccgaagtgctggagtcgcgcgtgcagcaagccttcacacgcccagcctacaaggccatggcgctgcgcgtcatcaacgcactggccgtgcaccgcttgactaccggcggcgacatccacgtgcccattggccccacggccgccgaactgcgcgatgccctgtgcctgttccagccaggcgtggaggacatgcccggcgatccggccgagaatctgctgtcgatggtgcagaccgtgatgcgggaggtgctcaagaccgtcaacggtcagttcatctccaaggcacctgacaccgagcagtactacctcgacctcaagaaggacatcgactacgacgcgcagatcgaaaagcgtgccgaagccctgtccgacgacgcacttgaccgcgcctactacagcgccatcaaggcgctgatggagtgcagcgacgacctgcgctacccaggtttccagatctggcagtaccagatcgagtggcaggagcgccgcgtcgagcgcatgggctacctgttctttggcgccccgaatgaccggcccacggcacagcctgagcgcgacttctacatctacttcatccagcccttcgacaggccgaagttcagcgatgccaacctggcggacgaggtgttcttccgtctgaagtcacccgacgaagactacaaacgctatctgtcccaatacgctgcggcactggatctggcatccaccgccagcggcggcgcaaaggccgtctacctatccaaagcccaggactcgctgcggtccatgagcaagtggctgcaagaaaagcagatgaccgcgttcgaggtcacctaccaaggcaagaccaagacgctacaggactgggccaagggcgtgtccctgcgcgagcgggcacgcctgggcccggaagaacgcatcaacttccgcgacgtggtgaacatagtctctggtttggcattgggtcagcgctttgccgacatcgcgcccgaataccccacgttctcggtgctggtcacggaagccaaccgcaagcaattggtgggcaacgcactccgtgcactggcaggcggaacgcgaaccaaggatgccgttgccattctcgatgcgctggaactgctcgatggcgaccgcgttgatcccgccaactcccgctacgcgaaagaggtgctgagccgcctcaaggctaaaggccacggccaggtgctcaaccgcaacgaactgctgtctggctcgtccgacatcgagtatttcgcgccaatcgacaagtaccggttggagcccgatctgttggtcacggtgctgggcggcctggtctattccggcgaccttgtgctgtccatcactggcgacaagatcgactccggcaagctggcgcaactcgcggagcgttcgctggaggaactcaagcagttcaagcacgtcgaggcacccaaggagatcaacctcgcggtgctgcgcgccttgttcgagttgttcgatctgccatccggcctggctcagaaggccagccaaggcgacaccgagcccgtcatcaagctgcaagagaaggtcagcgcgctggtgccgcgcgtactcaaggccggctccgacctgcagcaaggcaagctcagcttctggggccagaacctgctgcgcgaagaagaagccaaagattggtacgcccggctcgactcgctgaaaaaattcaccgagtcgctgacgccgtacaacaccgtcggcaagctcaagaacctgcgcgtcacgccggatgatctggatagccagaagaagaatctggagattctcgccgccgttgagcgcctgctcgaactggtcgcggatctgggtagcacggcgtcttacctctcccaggctgagatggtgctgcccaccgatcacccatgggtgaagcaagccgaggcagcccgcaaagccctgcaagtcaagctgagccaggaccgctccgccgaacacgcttctgagtaccggcaaacgctcaaccagctcaagaaggactacatcgctgcctacatcgccagccacagcaaggcgcggcttggcgtggccgaagacaagacccgcaacgccctgcgccgcgacgagcgcctgctggcactgcgcgtattggctggcgtgtcgttgatgcccaccagccaactcaccgcgttcgaggaatccctcaatggcctgaagagctgctcgtcgctggatgagccgacgctggtcacgaccgccgtctgcccgcactgccagttccgcccgtccgctgagcaactggaactgctgcccgccgccaaccgcctgcacaagctggacgatgacctggacgaattgctggccaactggcagcaaaccctgctggaaaacctggaagacccgttcacccaggagagcctgggcctgttgcccgccgccagcaaaaagctgatcgacgccttcctggcctcacgcacgctgccggagcccttgacccaagagttcgccaacgccgtgcaagaggcgttgtcgggattggaaaagatcgaagtgaagagcgacgagatcaagcaggcgctgctgcaaggcggctcacccgccacgccggacgacctgcgcaagcgctttgatgcacttatcagcgaccgtagcaaaggcaaagatgccaccaagctgcgcttcgtcatcgagtga

SEQ ID NO: 507397 - DNA, 1371 bp, Stenotrophomonas maltophilia
atgagcaacacgctaaaagtccgggatgaccaagcccctatctgctttgaagcaagcgccgaggatgtcggaaagttcaagctttgcgaaggcgcagaagcctcttggctaacccagggccaggctttcggcataaaggagttgcgaagccgagttgagccttggctgaccgcattattccagtcggagcatctttcgctgcttgctggctcgggattgacacatgccgtgcactatctggcggtagggaagcctgcggctggaatgaatgaagtggccctaaccagctacaaggacgcaatcgagacagcagcgaaagaagccgcgcacaagtcaggcagggaaacaggcaatctggaagaccaattgcgcgtggccaatgaattgctgcgagggctggaaatactgggcaactcagcagaagccgaaacgctacggaccgagctgaccagcgcgctggaagatttcgccaagtccatcctcgaaagtgaagccggtattgccgaggcgagtgaagacaagcgtgagcaggcgctcaatgtgctggtcaccttcctgatgagctttgccagccgcaccggtgtgcgcgaccggctgaatatcttcaccaccaactacgaccgactgatcgaagccggggccgaactggctggcctgcacctgctggatcgtttcctcggcaacctcatgccgatcttccgctcatcgcgactggatctggacatgcactacaacccgccaggcattcgcggcgaaccgcgctacctggagggagtcgcccgctttaccaagcttcacggctcggtagattggttgcaggttgatagagatattcgccgcgtcgggctgcctttcggcgctggcgatgttgcgccctatctgcaagcgcctggactcaaggatgccagtgctcacaagctgatgatctaccctaatgccgccaaggaccgggaaacttcggatcacccctacgtggagctgttccgagacctcgccgctgcggtgtgccgccctaacagcacgctgattacctatggctacagctttggtgacgagcacatcaaccgcgtcatccgcgacatgctcaccgtgccatccactcatctggtgatcattgcctataacgatccgcttggccgcatcatgcagacctatcaagagttggggcggccatcgcaaatcagcctgctgatcggcccggctctggcagatttgcaaattctgactgaaagcttcttgcccaaggcagccatcgacaagaccaccttccgcatgagcgagctgctcaagcagcgttttggcaccgaagcccatccaggcccggcagccgcgaaacctggaagtgattttgatggggcggacttggtatga

SEQ ID NO: 507398 - DNA, 2130 bp, Stenotrophomonas maltophilia
atgagcttctcgcccctggcctatgccgactcactgcgtatcggcagcatcgactttgtctcgcccgacgaaatcaaggttctgctggatattgaagcacccgacaacctcgcgctaaacacaggcactccgaggccgtttccgcgtatcaacggttatgtgctcgtgcctggtgaggcaggctacctggttgcacaggtggagtggatcactatcgagcggtcgcagtaccccaagcgcaagggcatgcaggatttcggcctggtcgatttgccctatccgctgcgcaagatgagcctcaaccctctgggttccctggtttacgagggtcagactgctggaaaggaacgctacaccttccgccgcggcgtggaagcctacccaacggtaggtgaccccgtactgctacctacccaaacgcaactccgcgccatcgtcgaatccggcgacaaccgtcgggtgaagattggtgtcagcccgctggccgccaatgcggaggtcaaggtcgaccctgatcgcctgttcggtcgacatctggccgtgctgggtaacacaggcagcggcaaatcctgctcggtctccggtttgattcgctggtcgatggatgaagcccgcaaagcacgtggcggagcagaccccaatgctcgtttcatcgtgctcgaccccaacggcgaatactccaaggcatttgagggtctgggtaaggtgcgcgtattcgccgttgagccgaaacctgacagtggcattgcacagcttcaggtgccgctttggttttggaacagcgccgagtggagtgcgtttactcaagccagcgccaaggcgcaacggccgacattgatccaggcactgcgcgccgtgcgcgacggtgcggtggaagtcaccgtcacaccaagccacgacatgcgtcgttttctgcgcacgctcgttagcgtgattcagattgagcgcgctgccggacgcccttgggctaattttccgcaccccaagaacttctttgaaaagaccaagaggtggcaggaaggtttgggaggcgatgcttcattcactgcggatgaaaatgcggcgctaggcgcaatacgcgacaagatttccgcgttcaccaacgcacgttcaggtcagtatccaaactacgatttcacagcaccagagatcgacgaatttttgagcatagccaaagccgctcatgcggccttcggcggcagcgacaccgatattttgccgatcgatgcagacgtaccacgcgctttcaccggcgaccaactgctgcgcagtgttgaagccaatgctgaactgctaggagtttccgagtacgttgaaacaatgctcatgcgcattcgaacaattctgtccgatagccgcatgaaaaccatcgctggcaatgccgatggtgtgacgctgcatcactggctagccaacaccatcggcgacaacaaagcgtccaacgggacagtaaccgtcatcgacctatcgctggtgcccgctgaagtcgtgcatatcgtcaccgcggttattgcccgtatgacgctggaagccatgcagcgctaccgcaagctcaaccacgggaaaacgctgccaaccgttctggtgatggaagaagcgcacacattcatcaaacgctaccacgatgatgctgagaaccagaactcagctgccatttgttgtcaggtgttcgagaagatcgcccgcgaagggcgtaagttcgggctgggcttggtgctgtcatcccagcgacccagcgagttatcacccacagtgctatctcaatgcaacagctacctgttgcaccgcattagtaacgatcgcgatcaggaattggtgcataagctagttcctgacaacctgcggggtctgctgcgcgatcttccttcgctcccatcacgccacgccatcctgctgggctgggcctctgagctgcccgtgctggtgcagatgaacgccctgcctgaaggccaacgacccaaatccgacgacccggacttttggtcggtatggtcgggcaagaaggaaaacgaaataggcgatgtggaagctgtcgagcggatcgtggattggacggcgattgcagaggactggcaacaagtggcacctgcgccagccccggatgcttccgatgaaggtggggcttgctaa

SEQ ID NO: 507399 - DNA, 1155 bp, Stenotrophomonas maltophilia
gtgcgcgctggtacgggcttgagtcgactgaatatcgacaaagcggaagaactgtccgagccaatatcaattcggaagctgctcaaccgcttgccgaagcgtaacgcagcatccatccgcaagcggtttcagtcgggcggcttgttgaccgagaaaggcttctccgctgttgtcgaaaccctccgccagcttgcgccccaagccagcaccttgctggatcggttcagtgaaaccaggactgcccgcatccggcgatggcccgacaaggcaagggagaacctggcacagcagaaagaagctgtgctgacggctctatcgattgccggactcagccgcgacccgattcaggagtgggcgccctcggacgaaacgccggtctcctttctggacggcttgcccagcgttcggctgcgcgaagacccgatggtggtcaacgacctgcaaaacctgccgggcttcgagatagtcaagacctatccctatggcgcagcggtctttgagtcggaggaaacgtcggaacgcctcaccgtcatccttgccaatcgtcttccgctcgaagagcaaaccggcaccgatctcatctacttcaacgaaacctaccagagctttgtcatggtccagtacaaggcgatggagcgtgaagataggcgcaacaggccagccgaagccgtctatcggttgcccgatgcgcagttgaaggaagaaatcgaccgcatggatgcagtgcttggcgcgttgaaggcgtgtgcgcccaacaccgacattggcggctaccggctgaccgaaaacccgttcttcctcaagctctgcccacgattggtattcaacccggatgatgtgggcctggtgcctggcatgtacctgccgctggattactggaagctgctggagaacgaccccggcatccaggggccgaggggtggtctgcggatcacctacgaaaacgcaaagcgccatttcgataacaccgcatttaccaccgtggtgtccaaggcgtgggttggctcgacgccgagccaatcgcaggtacttcaggatctcatccgcgcaaccctagaaacgggcaaggcagtcgctattgccatcaaaccgaagaagtccgccgaaccccgagcggacgatgaagaaacagaagaggatgcactcgatgtctga

SEQ ID NO: 507400 - DNA, 2787 bp, Stenotrophomonas maltophilia
atgtctgacatgttttccacgagcgcagcctcgtcatcgactggccccgtcgaatgcctcggccagtccttccccagcgacgacgcgcgccgcgcgcattttcttgcgctgctggccgacaagttgaaagacccggcattccgcaaacaggaaggtttcccgcaaggcacggatgaagccatccttgccatgtccgatccgccgtactacaccgcctgcccgaacccgtggctggcggagtttgtggcgcactacggcaagccctatgacccggcggtgaaatacagccgtgagccgctggcgattgacgtgagcgtgggcaagaccgacgccatctacaaggcgcacagctaccacaccaaggtgccgcacctggccatcgtgccgtccatcctgcactacacccagccgggcgatgtggtgctggatggtttttccggttcgggtatgaccggcgtggcggcgcagtggtgcggcacggctccggccagttatcggtttgaactggagcaggcgtggaagaaggaaggacgcgccgcgcccaagtggggcgcgcgccgcgcggtgctcaatgacctgtcgcccgccgccaccttcatcggcgcgaactacaacattcccttcaatgtggatgccttcgccaaggcgggtaagcaactgctcaacgccgtggagcaggacatcggatggatgtacgacacgctgcacagcgatggcaagactaaaggccgcattgaatacacggtgtggagtgaggtgttcagttgcccggaatgcgcgggtgaggtgagttttctagatgaagccctggatgaggaatccaagcgcgtcaaagatgagttcccgtgcccgcattgcaatgctggactgacgaagaaaaagctggaacgactctatgtttcccggctggacagcgccacgggcaaccccctgcaagtacccaagcgcgtacccagcttgattgcctatcgcattggcaagaccaagcacgagaaaaagccggatacagcggacttggccttgctgcaaaaaattgatgcgctgccgctgcctggcgatgttcccaccgttgcgtttcccttcgcggatatgtgggaagcgccgcgcatgcgagataagggcatcacccacacccaccacatgtttctgccgcgagccgctcaggcaatgggtgcgttgtgggccaaggcgcaagcgcacccagatgcacggactcgcggcttcctgacctttatggtggagcaggcagttgctggactttcggtactcaatcgctatggaccaacgcacttctcccaagttaatcgcatgttggctggcgtctattacgtcgcagcgcaacatgctgaatgcagcccgtggtacatccttggcggcaagctggatcggctggtcaaagccttcggtaacttcaaagtcagtgctggcggtgcggcgatcaataccggaacggcggcgcatatgccgctggcggacggcagcatcgactacatcttcaccgacccaccgttcggcgaaaacctaccctacgcggagttgaatttcattgtcgaggcttggcacggcgtgatgacgcaagccaagctggatgccatcgttgatcgcgccaaagaaaaccgtgcggcgcagaagtcggtggacgactatcgcaggctgatggccgattgcttcaaggaatactttcgcgtgctcaagccgggccgctggatgacggtggtgttttccaacacgcaggcggcggtgtggaacggtttgcaaacggcaatgcaggaagcgggctttgttgtcgccaatgtgtccgcactcgataagcagcaaggcagtttcaaggccgtaaccacggcggttgccgtcaagcaggacttggtgatttccgcctacaagcccaatggcgggctggagcagcgcttcgcagagcgcggcgcgacaccggattcggtatgggacttcgtgcagacccacttgaagcaactgcccgtggtgaagatgaaggtcggcgaactggaattcgttgccgaacgcgatccgcgcatcctattcgaccgcatggtggcgtggttcgtgcggcacagcgcgcctgttccgctttccagtcaagagtttcaagacggcctgcgcgcccgcttccccgaacgcgacggcatggtctttctgcccgagcaagtcaccgaatacgacaagaagcgcgcgcaaaccgcacaagcgccgcagatggagttgttcgtctccgacgagcgcagcgctatcgactgggcggcggattatttgaaagcgcggccatccacctaccaggacatccaccccgagttcatcaagcaactgggcgcaggctggaagaagcacgaaacccgtccggaactctcggcgctgctggaggccaacttcctgcgctttgagggcaccggcgaagtgcccagccagatccaccgctacctgtccaccaactaccacgacctgcgcggactggagaagaacgatccgcgcctgatcgccaaggcgcaggaccgctggtatgtgcctgatccgaacaaggcgcaggacttggagaagaagcgcgaaaaggcgctgctcaaggagtttgagcagtacaaaactttcacgggccgcaagatcaaggaatcgcgcctggaagtgctgcgcgccggtttccgcgatgcgtgggcgaccaaggactacgcaaccatcctgcgagtggccgacaagctgccggaggccactctgcaagaggatgaaaagctgctgaccctgtacgacatggcgctgacgcgcagtgaggacggtatctga

SEQ ID NO: 507401 - DNA, 312 bp, Stenotrophomonas maltophilia
atgaccccagccatgcagcgctgtcgccaaaccttgggggcgaacttggcgttgaaccaggcggatgcacaggccagggagccagctgggaccaagttgggatcaagtcgggaccaagtcaccccggaagtgcggcggatgctggccttcccggaaatgaaggggttttcgcgcgccaacctgatgtatgtgggagcgtttgccgaggcttggccggatgccgaaattgtccaacagcctgttggacaatttccctggggccaaaatctgcccagcattgagcagatcgaacgcgaggtgggtgggcagtga

SEQ ID NO: 507402 - DNA, 2811 bp, Stenotrophomonas maltophilia
gtgagtagcggaaccgacttcaccactggcgattggtgctggttcacccggcaggcatcgccgtgccgggtgatcgagcggcaagatgtgtggggcgaggtggcctaccgcgtgtggtcgcccaccaaggacgcggtggtgcgtgcccgtgcgttggacttggcctcgctggaaagcgtgcggccgagcgtagagcagattctgcacactacggcggccgcgaagctgctggatgcactggaagacaacctgctgctggcgcccatccagtccagcgtggtgccgctgccgcaccagctttacgcactgaaccgcgccatcagccgcgaccgtattcgctacctgctggctgatgaggtgggcctgggcaagactatcgaggccggcttggtgctgcgtgaattgaagctgcgtggccgggtgaagcgcattctggtggtggcgcccaagggactggtgcgccagtggcaggcggaaatgcgcctgcactttggcgagacgtttcagttcatcgaaccgtccgagctggcggctttccgccagtggcgcagtggcggtgcgggcgaggaagagaacctgtggcgcatgcacgaccaggtgatctgctcgctggattccgtgaagcccatggaaagccgacgtggctggagcctggagcaactgaatacctacaaccgcgagcgcttcgaggacctgatctcagggtcgtgggatctggtcatcatcgacgaagcccatcgcatgggcggcagcaccgagcaggtggcgcgctacaagctgggcgccgcgctggccgaagcgtcgccctatctcttactgctgtcggccacgccgcaccagggcaagaccgaccagttcatgcggctgatgcagttgctggaccgcgaagccttcccggacgagagcagcgtcagccgcgaccgggtgcggccgttcgtgattcgcaccgggaagcgcgtgtccatcaatgccgaggggcagccgctattcaagccgcgtgtcacccggctacaggcggtggcctggcaggcacgccacggcgcacagcagcgcctgtacgaggcggtgaccgactatgtgcgccacggctacaaccaggccatggcggccaagcagcgccacatcggcttcttgatgatcctgatgcagcggctggtgacctccagcacggcggctatccgcaccacgctggagaagcgccaggccctgcttgatgcgccacagccccaagcgaatctctttgagaacaccagccaggacgagtgggccgatctcgatggccagtcccaggtggatctggccatgcagtccagtggctgggagctggagaagtccgaagtcgagatgttgcttgagctggcacgggaaacggaggcggcaggtaccgatgccaaggccgaggcactgctggagctgatctacaagctccagcaagaggaaggcgacccggcgctgaaggtgctgatcttcaccgagttcgtgccgacgcaagcgatgttggccgattacctcgaaagccggggtttctcggtggcgacgctcaacggcagcatggacctggaagcgcgcacgcgggcacaacaggtgttctccaaggatgtgcgcgtgctgatttcgacggatgccggtggtgaaggcctgaacctgcagttctgccacgttatcgtcaacttcgacatgccgtggaacccgatgcggatcgagcagcgcattggccgggtggaccgcatcggacagaagcacgtggttcgcgccatcaactttgtgctcgaagacaccgtggagcatcgggtgcgccaggtgttggaggcaaagcttgaggtcatcgcgcaggagtttggcgtcgacaaggcggccgacgtgatggattcggtcgaggccgacccgatcttcgacgagctgttcgtgcatggtctgcagaacccggatgccatcgaacaggagtgcgacgcggtggtgtcgcagctgcgaaccaccttggcggagtcgaagaagaacagcgatctgctcactacagagcacgatctggacgctgatgatgcccgcaagtggcgcgaccacccggcgcagttctggctggagcgcgccatcaccagcgggttggctgcgcgcggcggctcggcaacgaaggttggcaaggcgtggcgcgtgaagtgggcggacggcagcgagtcggcacaggcttgttttgacgcccgcacggcggatgagaacccggagttggaatgggtcacgatggaagacccacgcgcccgtgctgtgatcagtgagctgccacgctttgtcgccggccagccgctgccggtgatccgcgtgaccggtcttccggactcggtacgcggcatctggtcgctgtgggagatcagtctggcggctgaaggcttgagtcggaagcgcttcctgccggtgttcatcaacgaggaaggccgccccttcgtgccgaccgccaagcgcgtctgggatctgctgctcactgaaaccgtagaagtgcatgccgtgacgggtgccgaggagtcggtgaggtggttcgaggcatcgcattccgctgccagcgcccagggtgaacggatcttcacggagctgctgaccgaacaccgcgcccggctgaaggaagagcgcgaacgtgcggtgtatgcgttcgaggcacgaggtcaggccatcggacgaattggcttacccgccgtgcgtgagcaccggcgcaagcggctgcagcaggaacacgatgcacgcatggccgccctggacgacatggaagccagcgtgccggatttgaatgccgtgatgatggtgcgcgtcggaggtgatgcatga

SEQ ID NO: 507403 - DNA, 2016 bp, Stenotrophomonas maltophilia
atgagcctttggacggaacgcatcctgagccacttcacagccgacctcacccggctatgggtggcgtgcgaccctgacgatgtgttgctcgacgagaagctgttgaccgagctacgcggtcgcggcttcgaactgatgctctacgaagacccgtttgccttccgcgcggaatatgaggaacgctaccgcgcggcatgggatcggggtgagcaaggaccagcgccctcgttggttctgcatctgcgcagcgccgacgcgaatgaattgccgtgggacatcgtgcaccacggacgtgtggtccggctcagccttgcggagctcttccctaggctggcatacagcgcggtacagcaagtcgagccggagcatttggccgggctgtttcatgcccaccagaccgaattgcagtcagcgcgcggcgagaacgagtccaaggacttcattctcgagcacgtctaccaactgacgccgcgatctattcgcaacccggtcgacttctggcgggagctgctgcgcatgcactttgccaaccgctcgttgccaccgctgtttgccgagcacgcggcaggcatcatccagggtaaaggcttgttcgcgggcctgcccgtcgccacatggctggcatccaagagcgcgctgctgcgcgtggtgcagggtgcgtggtaccgctatctgaagaccctggggctggatggcacgcgcacgggtgaaacgacgccgccagactacctcgccaagatcgagattccgttcgaccactccgatgtgcaggtgttggtcgattccatgttcctcgacggcagcttgcatccgctcgcggtgcacagtgttccggcagggatgccgagttggatcaaggccggcatcgtccaggacccggcggcgttgcaggctttggtgctcaaaggcatcgatggcctgatcgagacgaccccaacggcggcctcttcgcacaaggactggagcgagttcgccaaacgctacggtgagatcctggcccgcacgcatggtctgccaggcacggaaggcagtgaacacttgccggtgattcgggagcggatcaagaccctacaggagcaatcagacgagcatctgcaagcctgggtcgcagccaagcattacgccgacctgatcctgcagccggtaaccaaaggtccggtgatggtgcaccacgtgccgcgtttcttgcgccatcggcggtctgcaggggaaaccaaggtcgctctattggtgttcgacgggctggccttcgatcagtgggtgcagatccgtgagcgcctgatcgccaccacaaagtgcttcgcgttcgacgagggaaccgcgtttgcatggctgccaaccgtgacatcggtgtcgcgccaggcgctgttctcaggcctgaagccgcgcgaattcgacgactccatcgacaggacggacaaggaggaatccttgtggaagacgttctggcagaacgaaggcgtcaactcgaatgaggtgatgtatcgacgtgcactgcgccagatccatcagctcgacgccctggaagcggatttgatcgagcggcgtccgaaggtggtgggactggtcatcgatgaggtggacgatcggctccacaaggagcggtccaagaaggacgtggcgatgtggatcggaaattggctgaataccggcttcgtcgaccggctgttctccctgttgctggacaagggttaccatatctacctcacggcggaccacggcaacgtggagtctaccggcgtcggcaggcccaaccagggcgtcattgccgagacgcgtggagagcgggtgcgggtctaccggagtgagccattgctggtcgattccgctgtggcctatcccaccacagtcaggttggacatcgctggactgcccacgaacttcatgcccctattcgcaggcggacgaaccgcctttgtgcccgaaggcgagcaggtggtagtccacggcggggtgtcggtcgaagagttgatcgtgccctttgtaagaattagttattcaggagatgtggcatga

SEQ ID NO: 507404 - DNA, 723 bp, Stenotrophomonas maltophilia
atgaccacaaaggtgccactcattggctttgatcggtatgtagaccttgactggtgtcgaagtgcccttgatgccgctgcgactcaaagctccgttgaggttgtcagggatcaggttgcgacgatgctgccgggtattgagtcacagcgaaagacactagatgttctcaagcgcttgagcactaagccctttgagcacttggttgatttcataagcagaggcatcgccatctacaagaggctggggcaatgcgttgtgctcccgctggtctggggcgcttccatagccagctatccattcttcggaaaaacctctgaaacggcaggccggctgcttgcattacaaggagattgctccatcaaagagcttcagcggcgtatggcagaacagtacggcgatcgcagtgggatcgagagggctgtaaccagggtggtgcagacgcagacgagctggcaagccttaactcgggacgaaacggccaaacgtgtcatcaaacgtcaagcggtctcgattgatgacgacgaactcacagcgtggctgatcgaagctgctgtcctctacgccggcaagccggtttccgtgcctagcctgcagtcattgcccgtgctgttcccgttcacccttacgcggcccctggcctacgtggtgtcgagcagtgcaaacctgatccttcggtcggaagggccgagtaatcagtttgtcgctttgcgctccgcgatttga

SEQ ID NO: 507405 - DNA, 1836 bp, Stenotrophomonas maltophilia
atggcccgcatcgaaaaccacaagtacagcatcgaggaggcattcagggagtgcttctacatcgtcccggactaccagcgtgagtatgtctggacggacaaggaagtgcatcagttgctggaggacatcggcgagcagatcgatgcgggcacgacgcgggaatacttcattggcaccgtgctggtgtcgccaaccgagcagaagaaccattacgaggtcattgacggccagcagcgcttgaccacgtttttcctgctgctttgcgcgctcaagcatctgttccagggcgagccacagcgccagatgattgccgggctgatctcgaccagctacgttgacagcgacggcgaggtgcgcaccacactgaagctggaacctcgttacgagagcgcaggcgaagtgatggccaaactggtagagctggatgccgagccacagaccgtgcgcgccggcatccagtctgctggcatcacgagcttcgggtcgctagagaacttggtcaatgcttacagcacgctgtaccgctatctgaaggacaactacgacgacacggccaagctgaagaagtattggggctatctggccaacaacgtggtgttcatccagatctcgaccgacgtcagcagcgcgctgaagattttcgagaccattaacgagcgcggcgtcggtctgaacccgatggacttgctcaagaacctgttgttcacgcaggttaagcagacccagttcactcagctcaaagacgagtggaagaagatcaccaagccgctggagaaggagaaggaaaagccgctgcgcttcttgcgctacttcctgatggccaactacgtcatcaagaacgagcgcggtgatgcggtggtgcgcgaggacgagatctacgactggttcatcgccaaagacaacgcggcgctctgcgattacgcaggcaaacccttcgagttcgtccgcaaggtgattcgcaacgtcgagcactacttggccttcgccaacgggctgggtaatgacggcaagcccagcctggcgatggacagtctcaagcgactggccggtggggcgttcagcttgcactacgtcctgttgctggcagcggcgaactttccgaagccgttgctcgaccacttcgtggcgcagctcgagagcttcctcttctactacatcttcaccaagacgccgaccaaagatctcgaacgcagcttctcccaatgggccgacgagctgcgtgcgattgcggagacgactgacccggtgaaacagaaggttcagctgaacgccttcgttgccgaccgctttgagaagaacatggcgggcaagtcacaggaactggccgatgccctcaaacgcttcactttgtattcgatgcagcagtaccgcacgcgctacctgctggcgcggctgacccagcacgtcgagatggcgttcagcggcctgaagactccaggcagtctggagcccttcaccaagctggaaatcgagcacatcctgcccgacaacccgaaggcagaactgcgcgccacgtgggcagcagagaacccgaatgcggtctacgacgactacaagaatcgcctcggcaatctgaccttgctggaaaaaccgatcaacatcgtcgcgggaaatgatttctacaaggccaagcaggcagagtacggtaagagcggcaactacctgacgcgcagtctggtggcgctgaccgaggtcggccagaacacatcgatttcccggatcaacgccaagctggaatctttttctgcgtggaatgccgcgtctatcgagaagcgccacgcgctgctcatcgcgctggcgcaggaagtctggaagacgacgccaattgacgtttga

SEQ ID NO: 507406 - DNA, 2505 bp, Stenotrophomonas maltophilia
atgaatggcgacaacggaacgtcggcgccgcacaaccagcaactgcgcgccctgctgttcaccgacctgtgtgactcgctgctgctggtcgaacgcatcggcgatgtcgctgccgccgaactgttccaggaacacgaccggctggtgctggcgctgcagcagcgctggaacggccagctgatcgatcgctccgacgggctgttcatgctgttcgagcgcccgatcgacgcgcttggcttcgcattggattaccagcgtgggctgcaaccgctggggcagagacacgagatccatctgcaggcgcgggccggtctgcatgtgggcgatgtgctgacctgggagaacagcgccgaggcagtgcgggctggcgccaaggcgattgaagtcgaaggcctggccaagccgacggcggcgcgcctgatgcagttggcacgtccgggccagatcctgctttcggcggtggccgaatccatcgtgcgtcgctccagtgggtcgctgggcgcgatggctgaaggcctgcaatggcgatcgttcgggcgatggcgcttcaagggcgtgagccagccagccgaagtctacggcgtgcaggcggcgggcatgcccaccccggggcggctgcggcacacggccaaggcccggcgtgatcttccgttgtggcgccgtccgctggcgatggcggcgcaggccgccgtactgctggccgcagtgcttggtgtctggttgctgacccggccacagccggccatcgcgttcgccgaacgcgactgggtggtgctcggcgggctgcataacctcaccggcaatcgactgctcgatgacgccctggaccaggcgttccggatcagtctcgagcagtcccgctacgtcaacgtcgtcagtgacgaccgcgtcggccgcacccttgagatgatgcggaaaccgccggatcgcggtgtccgtgaacgtggcgatgccgccgctgtggcggtgcgcacgggcgcccgcctggtgttcatgccatcggcgaccgatgtcggcggccgaacccgcttcagcgtggaggtggtcgagccgtcgacgctgcgcaccctggccgtggtatccgccgatgcgaaggccggtgcagtactggcggcggtggacgatgtttcgcgccagctgcgtgatcgcctgggcgaagagcccgcattgatccagcgcgacagccaatccctgccggaggtgaccacgggcagcatggatgcgttgcgtgcgtttgccttgggccagaagcgctacgtgcgcggtgactacaagggagcattggcgttttaccagcaggccacggaaatcgatccagaattcgcactggcatggctgggacagactcgcagccatttcgcggatgcggatttctcccgtgccgccagcgtgttgaagaaggcacagcgatggtcccgacatctgaccacacgtgaagcgctctacgtgcgcaactggacccttcatctgggcgaccccgaccgcgcaaccgatggatggatgcagatggccgagttgtatccggactatctgccggctgcgaacaatgctgcgatcagcctctattgcgagaaccgtttcagcgaagcactgccgctggcgcaacgcgttgcgatgagccaggtcgatctattgggcgttggccaggatcagtacggccgcatcctgctggcaatggggcggttcgatgaagcagaccgcgcgctttccgttgcagcggccagcggctggcagggagcactgatgcgacaggcgaccgttgcagcggcgcgaggcgacctggcacggtccctgggcttgttgcagaagatcgacgccagcgactatcacgccgacaacatccgcatttccgtccagctggacaagggtgacatccaggccgcgctgtggaatgccgagcgcggcatgcagcggagctacgccatgcccggtgttgaccgcttcaacttctatgttcccctggccgtcgcgcgattgcaggcgggccagcattcaagcgtcggaccgctgctggatgaggcgatccaccggacattcgaaggcatcgaatcagttcccgtggtcgatgccgttgatcgtatcgtcaccgcccaggccgcggcacttgtagggttgcgcatgggggacgcccgctacgccaggcaggtcgagcgtcgctgggcttcgttgcagagaaagccggaaagcgccgtcatccgcgaattcgatgctgtgctgggcgcggagaggctgcgcgcatcaggtaaaccgctgcaggcactccagctgctcgaaccctatctgggtgctcgctcgcgggtgcaatcgcgggtcgcggcgatgaaggcggcccgcgatgcgggcttggatgcccagatgctcgaccagaagcgttggctggcctccaaccccggccttgcgtacgcagagatcgaatgcagttactgcctgcaggcgatgaacgtgctggatgtgcgcgaggctgcccggcctttgcccgcagcggagaccaggcccgaagggtga

SEQ ID NO: 507407 - DNA, 312 bp, Stenotrophomonas maltophilia
atgcccaccctgcagctggaacctgccgtcgcgcagaatcttgtgaacctgctcgccaccgatgacgcattccgcggccgtttcacccagtcgccggaggcggcgttgctggaagccggccacgttcctgcagatccggccgagctgagccagttcgtcgccatgtgctgtgcctccatcgagctggcggacaaagccgtcatcgagcaggcacacgcgcagatcgtcgcgatgctgtccagtggaacggcctacaccgtgccaatgctcgagaacggcaacacaggtaattccccgcgtacgctccgctga

SEQ ID NO: 507408 - DNA, 1176 bp, Stenotrophomonas maltophilia
atgcaggtcaggcgctgttcggtactgatgatggagctgcgggaaacggtaacgttcgacctgcagggcctgatgcagggcggtgatgggcttcgtcgcaggcaggcctggcttgcgctcgcgccgcacttgcccgaaccggtcgaactggatgccaggcagcaggcctggctgggtcggctcagccccagcgcatggcaggaggtcgcggtggatagcgaggaggcggggatggtgtcgcccctgcagcaggcagggctggtgtttgtccagggcagcgcgacggatgcagcgtcgattgccgacgaggcattgcgctcgacctactggcacccgcttgctgccgtgctgcacgcattctcgcgctgggatggggtggatgccgtcggcaacatgcgcgcgtccaggaccgagacggccgtgcagatgcgtgaaacactgggagcgccgcctgcgaccacggtgtcacgttgcagcgaaggcgccattgcgctgcccagggccgagccggcagccttcgacacgctgctggcccgtcgcgcaacctgtcgcaacttcgactggcagcgaccgctgccgctgccgatgctggcgcggatgttgcagcggaccttcggcagtaccggagaacaccgtgtcggcgaggacctggtgttcatgaagaagaacgtgccctccggtggcgggctgcatcccatcgaggcctatctggtggtgcagcacgtcgaagggctgccggcgggcctgtaccactatcgcggcgatacccatgtgctggagccggtggcctcggacagcgaggtggaccgtgacttcgtgatggatgttgtgggccagcagcactggtttgccgatgcgcacgtgctggtgatcctggcgccgcgcttcgaccgtacattctggaagtatcgccagcacgcgaaaagctaccgcgtcatcgcccttgaggcgggccatctgtcccagacactgtatctggccgcgaccgacgatggcctgggtgcgttcatcactgcggcaatcaacgagaaagcaatcgagcgtgccctttccttggatcccgtcaccgatggcgtgctcgctgtgtgcggcttcggctggcgcgccgcgaccatgaccacgaccgagctggaccctgcaggcacgatctggaaccttgaagaccgcgcgggctga

SEQ ID NO: 507409 - DNA, 1500 bp, Stenotrophomonas maltophilia
atgagcctggcgctggtccatagccgtgcccgcgccggggtcgatgccccgctggtgcgggtggaagtgcatctctctggcggcctgcctgtcacccagatcgttggcctggccgaaaccagcgtgcgcgaatcccgcgagcgtgtgcgagccgccctgctctgcgctcgcttcgactttccacagcggcgcatcaccctgaatctggcgcccgccgatctgccaaaggaaggcgggcgctacgacctggccattgcgctgggcattcttgcggccagcggccaggtcgatccgcagtcgctgcttcaatacgagtttctgggcgagctggggctgaccggcgagctgcggccggtggccggtgcactaccggccgcgattgccgccgctgaagccgggcgcatcctggtggtgccgcccggcaatgcggcggaggccgcactggccgagcacgccgatgtgcgtgtggcgcgcacgctgctggagtgctgcgccgggctgggcaatccgcgcctgttgccgcccgtggagcgcgtggacacgacaccgttgccactgcccgatctggccgacgtgcgcgggcaggcgcacgcacgacgcgcgttggaagtggccgcagcgggtgggcaccatctgttgttgatcggcagtcctggctgcggcaagacactgctggcctcgcgcctgcccagcctgttgccggataccgaagagactgaggcgctgcagctggccgcgattgcatcggtgagtggcgaaggactggacccacgacggtggcggcagcggccctttcgggcaccgcatcacagtgccagtgcggcggcgctggtgggtgggggcaacccgccctgccccggtgagatatcactggcccaccatggagtcctcttccttgacgagcttccagagtggaaccgcagcgcactggaaaccctgcgcgagccactcgagtccggccacatccgcatcgcccgcgcggcacgcagcgtgcagtaccccgcgcggttccaactggtggccgcgatgaatccctgcccgtgcggctgggccggtgaccgcagcaaccgctgcctgtgcagcgacgaacggatcaatcgctaccgcgcgcgggtgtccggtccgttgctggaccgcatcgatctgcatatcggcgtgacgcggatggacgcggtggagctgcgggagagcacgccgctgggtgagcccagtgctgcggtgcgtgcacgggtggaggccgcccatgcccggcagcaggcgcgtggcgcgctcaatgcgcatctgccgccagcggcgctgcgtgcgtgcaccaagctgagcgaggccgatcaggatctgctggagcaggcgattgaacgcctccaactttccgcgcgagccatgcaccggattctgcgggtcgcgcgcacgattgcggatctggcgggttgcgaggtgatccaaacggcccatctggctgaggccattggctaccggcagctggaccggggaaagccctag

SEQ ID NO: 507410 - DNA, 186 bp, Stenotrophomonas maltophilia
atgaacgagctgaaagagcgtggcaaagattgctatccattcgtctacgacgagaacggcctttgcgaagtgcgtgatccacgtgccattgaattgctcggagccggcggcgtccaagcgtccggagcagtctgcaaagtcaacagcggaaactgcgtttccggttgcgcgtgtaaagcatcctga

SEQ ID NO: 507411 - DNA, 1293 bp, Stenotrophomonas maltophilia
atgcgctacgcgcttcagctcgcgttgttgggaatcggaaggtcatggcttctcagtctgttgattgtcgcttcgctggcaatcggcatcagcgcgtttgcgacaatgctgatggtcaggattggactgagtgctgatcctgcaccagccgtcagccgaacgctttatcacgtagagcttgatcttagggatggctcatcccgggagtctgacaatagacggcttcccacaatggcgctacacgacgtgaaagcgctctcggatcgtactggagtgccgagcgcagcgacctcatcatcctggttgccctacagaccctacggttcagagcgtcgagcgggcatgctaccagtaaggggattcacctatggcgcgcagtcagtattcgatcttaacctgatctcggggaacttctggcgaagggaggatgatgacgccggcagtcgggtggccgttatttcccgctccctttccagggagctcttcggaacggaatcggcgctcggcaaggaactggaactcgccacaaggtcattcgtgatcataggggtagtcgaggactggaatcctgcaccgcgattccatgaccttcgtgggggcgcatatacggataacgagcaactgtacattccgctgtcatcgtggatttcgcttccgactgactatggaatgggagggatgacctgttggcaaggtgttcttgacgacccgaaccacccctcctgcgcatggcttcagttctgggtccgattggaaagtgcctccacgcttgatgcattccgggtcgcgctgaagaactatgcggaagaacagattgaaggcggcaggtcgactcacgcctatcccaatgtgacgtcgttgttggagtggctggagatcaatgacgtcgttccggaggatgtccatacgcaactatggtttgcgataggcatactgatcatctgcctggtgaatgcttccgggttgttccttgctgggttcgttgacaacgccagggaaactggcattcgaagatcattgggagcaacgcggcgggacgtggccatgcagttcgcactgcaatcgaccatgctgggaaccttgggcggcgccctgtccgttcccttggtactggttggattccatgttgtcaaagagcttgcgccagagcatacggcgcatctctcacttcccgtatggcttcttctgctttgtccggtcattgcgttgttctctgcgatgttgtcggccgcagtgcctgtttggaggaccagtcgcctgccagcatcccttctcactggagaggcgcgatga

SEQ ID NO: 507412 - DNA, 1236 bp, Stenotrophomonas maltophilia
atgatgttcatcagttcggcatcaatgacaatcagatcgctaccaaagcacgccgccatagccgcattgctgatcgtccaggttgccatcgccatggcggtactgtgcaatctgttcactgtagttctggatgcgtcacagcgaagcagggcgcattcaggtctcagcgagagccatatcgctgttgtccagaatatcggaatcatcggtctggaggaggctgcggccagctcggctgccggtttgcgcgcgatgcgcgcagtgccagggataaccatggcggcgatcggtccagcgccatttgcagtggagcggggggacgtctacctggagccctccagggagctatcggcggccagaccctatatctactttggaagtgagagtctttccgacacattgggtgtctcagttcttcaaggtgttggtctcagaacgctccgagcgcctgcggtggaagacgcactgcaggccggcggatcgctgcacgttccggctgtggtaaccagcagcctatccaaacgtctatttcccgcaggcaatcccctcgggcggatcattcatgccgaggtatggggtagctacccgatagctctgagaatcgtaggagttgtcgccgacttcagaagtgcatccacgcgctccccaagcgacagcgatgccgtgattgcggaagtgaaaattgaaagtgagagcatcggcggcctgtatgttgcccggcgaagttcctcctttgatcatcgagggaagcaagggctactcaccgcgctctctctttcgatgccggggtttgtgcaggagccagttcgcacagtggccgaactgagagtgagaaatttcagtaaggatgtggcgagatcacagatgctcctgctcgtcgcgacaatcgtgacagtatcgtcggcgctgggtgtatttggtttgactcatttctgggtctcccgcaggcgctggtccacggcgatccgtcgcgcgcttggtgcgtcgcggcgtgatgtagttgtcctcttcgcaaccgagagtgcactgatatcgagtatcggcgtgctggccgggatggggctggcgatacttatgaatgtactcctggggcgccaagtggaacttgttccggtaaatgggctggccatggtggcaggtgcgggcgtgacgttctttggctgctcggtggccgcaatcatcccggcgttcagcgcggccaaagtggaaccggcgttggccttccggttgcgctga

SEQ ID NO: 507413 - DNA, 1926 bp, Stenotrophomonas maltophilia
atggtttccctccgtggtacgacagtagggcgaatctcgcagattgcgtgcgagctcggtctgcagcaccgcgtgtttgcgggacgggcaacagcgcttcgatgcatcgagtcggagtgcatcctgctggtcgatggtgggcacttcgtcgtcatgcaaagagtgagcccggatcgcttcaggttgctcgaccctgcagctggtgagattgcagtgtcttttgccgaactggagaggcgattctcgggggcgctgctcatgttcaccggcggaagaagacagtgcgaggagttcgctgtcgagaccggtccttggcagacattggcgtcagaagtgcatcagcagaagcacaggtatcttccaatagtgctgctggccattgcggcagagatcctcttggttgtatcgcccctctatctccagaccatcatcgatggcctgcagattgctgatgcggccttcaatccagagcgcctattggtgatcttcgtcgccatcgccgctgccagggtcttggcagtggcgtcccgttccatgctgaccgtgaagctcggagctaacatcatcggtgcgctttcgacgaaagtcttcgggaagatcctgagtcttcctccagcgtacttcctgcgtaggcatcccgctgatgttatatcccgactgagttccgtgcacgaggtgcaagagatcgcgtcctccaagatcgttgagtgcacggttgactcaattgcgctgctcattcttctggtggcgtgttggtttcatagctcgctgcttgcggcgctggccgtaacgggagtgattgcctgcgtcctggcgcgcgtattcatgtcggacgatgcgggcgttgcctgcaatgttcttgcaagccggctttcttcgcaggatcgagaagtaatagagaccgtgcgcgccgctcagacagtcaaggccaacggtgcggagcgcgtgagggagatgcgattccgtgaaagcaatgttggattgatcaatgcgagtaccacgcttcaacggatatccattgcctccagctgcgcgagtgatcttattctcggcttgacgaggattgcagtcgtctacatgggcgctcttgctgtgcaagaaggttcgatgtcgatcggtgctctggtagcggtggcgatctatgtggagatgctgggccagcgtgcgagttcaatcgtacccaaggtcatggacatacggatggcccgagcgcacttgcagagaatttcggaagttctttccgaggctgaggaggagcgcacgccatgggaggtggcgggaagtcatcgggattcgctttcgattaggtgtcgggacgtcggcttccgctactcgagtgatgacccttgggtgatcagaggcttgaatgtgagtattgaggccggagagatggtggcaattgttggtccgtcgggcgtaggtaaatcaacgctgttaagaattcttaccggattgatcccgccaaccgagggcgtaatggagatcgatggtcgcggtgtggagcgtggccagattgccaatctgcgtagccatatcggaacagtgcttcagcaggacgcgctgctttccggaaccgtcctggataatgtaacgctgggtgaagttgcggatgtggatgaagcctggagctgcctgcgcgccgcaggtctggacgcctttgtgtcggagcagccaatgtcgctcggtacgcaggtgggggatgaggggcgcctattgtccggtggccagcagaagcggcttctgctcgcacgcgcgctctatcgcgcccccaaaattcttgttctggatgaaacgctgagtcagcttgattatgacgcggagcagcagattctggtcacgctcctggcgctgaaaatgacccgtgtcattgtcacgcaccgggttcgtgccttgcctgaggatgtacgtgtgataaggctgggttga

SEQ ID NO: 507414 - DNA, 1047 bp, Stenotrophomonas maltophilia
atggagacgtttcaggaacgattgaacaagcggttggagcttacgatcatgccaaccgagaaatgcaacttccgatgtgtgtactgttatgaggatttcgagatcggtcgcatgagggccccaacgatcaaggggatcaaggcacttgttcagcggcgggtggaggagcacggattgaaggaactccgtgtcgagtggttcgggggtgagccacttcttgcaaagatggtggttctggagctttcaagggcatttcatgcccattacttgtcgggggctctggatctgctcgattgcagcatgacgacgaatgggtatgagctgacacctgaactcttcaatgagcttgtaggcctgggtgtgaacttcttccagatttcgcttgatggagacgcatctgcccacgacgtgactcgccgatacgcatcgggagcaggaacgtttcaacgaatctatgagaacctgctcgcaatgagggagtctgcgctgattttcacggtgatgttgcgtgtacacatcatgccgggaaatgaagagagtcttcgggacctgtcgagtcggctttgcagcgatttcggcggtgatgagagattcacgatctatctgcgcgacatctcgaacctgggcgggcaagggcaatcgttgaagttgatcagccatgccgaggcggtgaggatttcgagggaacttcaagccgactttgagagcgaagggttcagagtcgagaacggggtcgagacggagttcgaaagccaagtatcaatctcggggctctcggattcaaatgcggaactccaggccatgagcgtgtcgggactgcgggtcagtcatgtctgctatgcggccaagcccaaccatatgctgatcagagccgatggtcgcatagggaagtgtaccgtcgcgttagcaagcgcagggaacgtggtgggggcgctggcggaagacgggacggtggccttggaccccgcaaagatgaaattctgggcacgtggatttctttctggcgacgcgacggagcttggctgcccactcatgacccgtagctga

SEQ ID NO: 507415 - DNA, 327 bp, Stenotrophomonas maltophilia
atgagcctggcgctggttgacagcggtgcccgcgccggggtcgatgccccactggtgcgggtggaagtgcatctctctggcggcctgcctgtcacgcagatcgtgttgccgcccgtggagcacgtggacacaccactcctgccacggccctacttggccgggtcgcatgcgcaagcgcctgctccgcatgccctgcaggcttgcctggcaacgcctgctactgccacacgcgagcggttcaaagtacagcgtgccgtgctgctgaaaacccgcaagaagctgaagcgccgaatatggccatgcgcaaattcgaagggcgcagagtag

SEQ ID NO: 507416 - DNA, 1332 bp, Stenotrophomonas maltophilia
atgggactgtatgaccaaaggggataccttttctccgatattgacctgcgcgcaactatggagcaccagcgaagtgccttgcaggcggaagtcgattcgctggagcagaaccgcctactgaacacgtcagagcaggacctgatcgactacttcgtcgaaaagtacacagttgagccacccattttgcttcgtgatgacatgaccgcagatcagcgcgaaacgaaagttgatgcgcgccaccatggacatcgctggataagtgacacaagccgccccttctacattccaggccagcagatagatatcgagattccgttcactggggaggcgaatttattcaaagcccgggccagcacattctccagcgcacccccgcaaggccgagtgtcgaaccaaacgctgatcctttcctatcagattccccacgatatggatcaggatataaagccgcagctggagcaccaactccaagagatcgagaagcacctcgaatggattagaagcgatctaaggggctacaacaactcgatcgccggcgttgcagaaaccgcgataagaaaacgaagagaccgacttcttgccaatcaaggtcgcgttgcagcgatcgggattcctttaaaagtacgtggggaagctcccaagacatatgctgcgcctgctattcgcaagaaagtagccccaacacttcccaaggcctccacagcacccttcgaaccagaacccaccatgagcatggagcactacgaacacgtgctaacagtggtccataacatgactcagatgatggagcgcagcccatcgacattcgcaacaatgggcgaggaggtccttcgcgatcactacctcgtgcagctcaacggccagttcgaagggcaagccacgggcgagacgtttaatgccgctggcaaaacagatattttgctccgcattgaaggaaagaatgccttcattggcgaatgcaagttctggaagggggcgaaggcctacggcgagaccattgaccaactgcttagctatcaatcttggcgagatacaaagactgcaatccttgtcttcagccgcaaccgcgacacatccaaggttcttgaggagataaagaaggcgacggaagtgcatccccactacaagcgcactatctcttggaaaaaagaatcaggcttccggtttgttatgcaccacccttcagacgccaatcgagaactaatcatgactgttctcgtattcgacattcctgacaacactaccgacgacctaccaaagaaaggtagccccgcgaagaagaagcgctgccccccttcaagcccacatgatgacagccgtgcgaaacaatga

SEQ ID NO: 507417 - DNA, 1014 bp, Stenotrophomonas maltophilia
atgagggtgccggccagcggccggcactaccggattacgcacgcgttattacgtcaggcgatgcccggcggacgggaacgcgcggctgcggcggttctacggcgagccgccgaagatcgaaacacggtagtgccggccgctggccggcgacctggcaatgccaccgaagatcatgagggtgccggccagcggccggcactaccggaataccacgcgctgttgcgtcaggcgatgcccggcggacgggaacgcgcggctgcggcggtgctacggcgcgccgccgaagatcgaaacacggtagtgccggccgctggccggcaacctagcaatgccaccgaagatcatgaggatgccggccagcggccggcactaccggaataccacgcgctgttgcgtcaggcgacgcccggcggacgggaacgcgtggctgcggcggttctatggcgagccgccgaagatcgaaacacggtagtgccggccgctggccggcaacctggcaatgccaccgaagatcatgaggatgcgggccagcggccggcactaccggaataccacacgctgttgcgtcaggcgacgcccggcggacgggaacgcgcggctgcggcggttctatggcgagccgccaaagatcgaaacacggtagtgccggccgctggccggcaacctggcaatgccaccgaagatcatgaggatgcgggccagcggccggcactaccggaataccacacgctgttgcgtcaggcgacgcccggcggacgggaacgcgcggctgcggcggttctatggcgagccgccaaagatcgaaacacggtagtgccggccgctggccggcaacctggcaatgccaccgaagatcatgaggatgccggccagcggccggcactagatcatgagggtgccggccagcggccggcactaccgattgcgaaggtttacggccctggcggcaaacgcacttcgaaacgggcgccgcccagttcgctggaacggccgacggccagttcgccgcggtaa

SEQ ID NO: 507418 - DNA, 3882 bp, Stenotrophomonas maltophilia
atggccttccccttcttcgtggtgccgcaccaacgtgagatgctgcgtcaggcgaaaaggaatttcgaaatgaatgttgataagaaagctgtcttgaagctattggcacgccttcggcgaggaaccaagaagctaatcgttaactacgtcaaattgccttggatcctccgtagtgtccaagcgggctcacctccgtacagggctacggtaccgcgacgatttgtctcgaagatgcaggcactcaagacagctctaggctctcagagataccgcgtgcgcggaaggatcgagcctctgacgcccgcgcatctgataggcagtagttataagcaatatagggctgaattacagcgggcgcttcgactgccgaaggtccggaacattgcaattacaggcgggtatggtgccgggaagagtagctttattcagacgtttgcctcagagcacaccgaatacaagtactgtttcgtctccttggctgcattcaatagtgctcaaggtggctatcctgaaaaggcacccggcagctcgagtgattcaacatctaaggaatctatagaacaaatcgaggccacgattgtccagcaactactgtactcggtggaaggtaagaccgttccgcaaacacggcacaagcggatcagccacgtatcgaagttgtgggcgtccttctactccgtgctcgcgcttgcaacagtcttggcgcttgttcgactctttgggctgcccaaagacctagtgcatctgtccaaagaatttcccatatctcaagtcctcgagtcgaatctgctgtacacgatgaccgttttactgctggtcgcattcttggtgattaggaaggctgcgatcgcagtgttgggattcaaccttcagggtttgactttgaagggcgtgacgatggctccagcctcaatctcttcagttctccataagcaggtggatgaaatcgtctatctcttcgaaagaagcaagatagatgttgtcttcatcgaggatcttgatcgattctcagattcaagtccattcacgcggctcagggaaataaacttcatcgtcaatacctcgccggcgattcgtcgcccagtttattttgtttacctgataaggggcgatctattttccgcggaggatggtgtaaagttctttgactacgttcttcccataatttcggtaatcaacacggataactcccggcagatgatgattaacgtcatgcgggagcgaaagtgggctgtgacttcaaggccgagtgaggcgctaatagaagcggtttgctattacgtagatgatatgcggcagctcttaaacatagttaatgagtatgacctgtttaggagagttgccggtggaaatgagtacctgagcgtcgacaaaatgttcggtgcagtggtggccaagtgtctctatccgagggagtactccaggcttctgaaaggcgaaggcccaatctatgatatgataaagagctacataccttggtcagtgaatagagagcttgaaggggctgcagaggtcgcggcacttgaagccgagattgacaattacaccgcgggtctgtcgcgatccgagagggagtacagagcgctggcatggatggctgcctctgaccaagagcaagcatatgagctagagacaattacgatcccgagtggagaaatgctgggctttgctgctttcgtgaatcgggaatccgtagtgagcattctcgaacagaacgccttgctcagcctcaatttccagtatgtcggggttaggtctgtagaatccaggcgattgatcggtgatggggtgggctcgctgcgtgcacgcattgcttctgcaagagaggttgcaaatggagcgcatcgccggctttcgattttgcgaggaaagttggcagatgagcgagtaagcgcgctctcccaagcaattgtccatcctgagtttgcaaaccacgttgccactctcgaaggtgctagggcgcttgggccactgccctacttagtatcttctggtgtattgggcgaggactacttcgactactcggggttcttttacgagggatccgtgtcccgttccgacaaggcggtgttgctgcggataaaggccggtgagttgctgcctgtggatactaggctggacagtcctgtggagcttctgaagcgtctcacggttgcggatctcagggcggggagggcgcttatcacttccttggcggagcgggtgttcaatgtcgacccgattcagacccctatgacggagcacgagcgagcgacgcttgctgatgtctccacgcattctggaaggctggacttggcattagttgggctgtacgggagcgcgagtttccaccgcctaatccgctccgctcttgccgataatggagctgtcttgataagacttctaacaggcgagtaccaatgcgccaggagtccttggagggagcgcgtgtctgcctcgatgattagctccggtagggcgggtcccgcaaacttggacgactttgatacaagcgcgcttgactcaatcatttcaaccaccgcggacgcgacttcatttgcaaagggaataacgagtgaaccggaagctaaagaatggttggatgaaaacgatacgtggataaactcgcttgatgagaatattgatagggacgatgtcgagacgctgcttcgactcgatgttgtacggatcaaccttcacaaccttagagtgttagcgaagtcatttgagatgagctggtttgattcggctatatcacttcgagagctacgccagctaccacgcggtccactacgtaagagcattctccgcagtgctgctacgctggtagaggccctgttggagcaggacgggccagtggacgatgatcctgtcgatgttcaatgggcactgtccaagctgggcaggcatccagagttgcgagaaaggttgattgagcatgctgcattcttgcttccgacgctgagtgaagtggagcaagggttatgggtcccacttgcattgaagcatcgcattaagccgacttggggaaatatcaatctgatcacggggacgctcaaggatcaggagttgcgtgattccattagcggtatgctccgaagtcctggtgtagaggctggactgaccggcgacatcgatagcctcatcagcatgagccacggacaggttggatcaatgatcacaacgatgctggacctcgaaggtgaggtccagctcttagtagcgagagcgctcggtgagaccggcgcgatacgtttcgccccagagtccgccgttccagagcttgaaggggaggcgctagaggcgcttgctacaagtcttaacggcaggtggttgagctggctttttatgaggcttcagctgactaacgggcttgcagcggcatcctatctcgcaagttgtgcagatgatgtagctctgactgaaggaggatacgagattgtctcagaactattgattgaagcgatgggactagtcagcagcccccgcagctggctccacctcgcgcagagttgcctcggccggacgactggctggacgcaagcgactggggagcgtttccttgagtctattcagattatggacttgcaggtggctggggcagccaactcggtactcgcgttgcccggagctcgagaagtcttcaccagggccgcattgaaaagctccttagggattctcagttcaatggtgtcgagcttggattggtccttggtgaggccaattgtgacgggggctgccaacggtgccatgtccaagctccttagtccaggaggtcaagtttcaattgagaacagtgaagctggcagaaattttgttgacgcgctttacagaaaatcgctgatcaggaagccgataaacaaggcgaagaatatttcgattcagtcatctgctaaattctga

SEQ ID NO: 507419 - DNA, 2103 bp, Stenotrophomonas maltophilia
atggatgactcggagtttggcatcgagctacggcagctggtggtaaggcgcgcagcctccgatcatcttgtcgacacacttgcattcgtgaccgaagttgccgataggctgcaggaagatccggcattcggcgagatgattcttgccgacgatactcggcagctctccaagtcgcgtcagagcaagatccatggcttttccgctctcgatgagtccgacaggtccatttcggtggtcgtaggaaagtggaacgacgacccggaagcaggctccctgtccaccgcagagattgaccagatgcgcggctggctggagaactttgtgtctgcgtcgctcaacgatgggctggatcaggaaattacagagtccagcccggcgtacgaacttgcgactacgttgcgctcctattgtgattccatctcctgtattcgcctacatgtgctctccaaccagcttctgagcaagggctaccggcgtgaatccagatcgatcgtgtctggcgttccgacggaattgcatatctgggacctgagccgcctcaaggcggtctatctctcatcgcgtgaacgcgagatagtgcagatagagcttgccgactttggtaccgccggcattccctgcatacaagcctccaagactgaatctctcaactcctacttgtgtgtagtcgacggtgatgtgctggcgaacctcttcgagcatttcggtagcagactgctcgaaggtaacgtcagatcatttcttggcatgaagggcggcgtcaacaaggggataaggggaactattcaggacgcgcccgagctcttcttcgcctataacaacggaatcgccgccactgcagcctcggcaacggtggaggtcgggccgcttggcacacgcgtaacctccatcagcgatctgcagatcgtgaatggaggccagactactgccagcatacttagagcgaggcgacaggatcgactgagtcttgcacaggtttcagtccccatgaagctgacgattatcggctcgaatgaaaccaatgaacttgtacccaagattgccgagtacgcgaatactcagaataaggtcgcaatcgcagatttctttgcgaatcaccccgtacacaggcgtatggaggaaatatctcgccggatgatggttccagcgcgagcagacacacgcgttcaaagcaaatggttctatgagcgcgcacggggccagtatcagaacgagcgcatgtacttgactggtgccggcaagacaaagtttgatcttgagtaccccgcctcgcaggtagtcaacaagactgacctggcaaagttcgatagcgttctagatgggaagccccattgggtcgcattgggtgcacagaagaacttcatcaagtttgctggcaaattttcctcgaagcgcgacaagactgatgcccagtactgggatgagatcagtccaaactacggcgacggttactaccagcgcgtggcagctatggctcttctgtggaaggccggggaggccgctgtctcgagtgggcgaggcacatggtatgaaggcgactacagacctcagatcgtggcatacgcgtggtcactgatcttccattgcattagaagtgccggtcgagaaccgaatcttgttcgtgtctgggagagacaggaggctgatccaactctcatgaaggccttcactcgcgcagcggtgatggctcagtctgccatcaaggatcttcccgagggctcttcgaacgtcggcgagtgggcgaagaaggaggcctgctgggccaagctatcctcgacgaagtttgccttgggagaagccgtcctggcgtggtctgtcgaccagactgaagaccgagagcggaagcgactggctcgagccgaaggattgatggacgacggcatcagcctgcaacaggaggttgtgttccgatctaccagtgggtattggcaagcactttacaactggccgttattggacggacatgtgtctggtcaggagcgcagcttgcttggtagagctatctccatccagacagccgcgatgattgtcgctgaccgagatctcaggagactgcggaccattgccgaacggtgcgaggaagccgggttccggcattcgtag

SEQ ID NO: 507420 - DNA, 984 bp, Stenotrophomonas maltophilia
atgacgccgatgaatagtagcttggaggaggtgtggcactctgcagtcactcgtcaggcagccgcagcgccatcgtcgcatgctcacgtcatcttccgtacggatgacagctcccgagtcgggacgttcggaggagtggactcgtctggaaacctcctgtttgcagtcgagaccacctcccccccacctgcagtcgatatccgttcaaattccatcgattacttccgccagcaacggccagaagtcggatcgtggcttatgttccttcggctcaaggatgctgagctgagaagtgtcttctccagactgtgctgtgatctgatcgagtccatatcagattgccctgacgataaggcggtcatagcagagacagtgtcgcgaattcgcctttggcagaagctcttcaatcttcgtcctgatggccttcttgacccgcacgaagtcaagggccttacggcagagcttctattcctactgaagcaattaagagcaggccgacttcagtctgatgaaatcgtgctctcttggctgggacctaccggcagcgatcaggactacatattctccacagagtcattcgagatcaaggcggttagcccaagtgcagagctcgtctcaatcagctcacttcaacaactgcagtctgatcgcgctctaagcctcagcatctggacactccgacaggcagctccgactgagccccaagcgtggacgttgaacgcactggtactgaaggctgaaagtcatctggccgacagtcccaccgccctcggcacattccgggatcgtcttctgtcggcggggtacgtccatcacgcactatacgactcaattgcgtatgagtcgcttgccgaggagacgttccaggtagaaggcgactttccccggataaccgagtcggatgttcctactggcatcgtcaccgcgagttactctatctcgctccactcaatccgtgcagctcggagcccagcacatggatga

SEQ ID NO: 507421 - DNA, 2703 bp, Stenotrophomonas maltophilia
atgtctgatttttctgtgaccgcaatgggcattctcggggaccgcgatctcacggacgatctcctcaacgacatcatggtcaagctctccatggtctttccggggatagaccttgagccaacccgcaaaattcttgaggcaaaaatcggcctgaccatgagtcccggcgaaggattgaccagtggcgatcaggagccatgggttgctgatgccaaggcttcgatcaagtgggcctactgggaggcctatcagcagcagctcaaaagccagggtctgacaccttcaattcttcgtgccatcgacgaagatacagagaacgtcctgaccgagtgcggaaatccctcaaactctgagccgtggaaggtgtatggcctggtcatgggcgatgtccagtcaggaaagactggaaactactgcggtttgatcaacaaagccgcggacgcaggctacaagatcatcgtgcttctcacgggaacaatcgaggagctccgctcacagtcgcaggaacgaatggacgagggttttgtcggagaggacagcaacgatgtcatggatggtgttcgcacgaaggtcctcggtgccggccgtttccgcgacaacatcgtgccaaatgttctgacgtctgtgagttccgatttcctgaccgcgaatcaaagatcgctcaagggcataccgctccagaacctttcgcagccggttcttctggtgatgaagaagaacatgactccgctcaagcgcctcattgagttcatgaagtctcagcgaggagcccaagccagtggccagcttgatctccccttgttgctgatcgacgatgaagctgacaatgcttccgtcaatgcaaagaaagacgaagacccagccaagataaaccttctgatcagggaactgatcgggctcttcaggcgctcttcgtacgtgggctataccgcgactccgtttgcgaacatcttcatcaacccggattcagagcggaacgatctgttccccagcaacttcatttacagcctcaaggcccctaccaactacgttggcgcaagcgcgatcttcactgacgaaggcagccagcagcatcagctagtgacgatggatgacgctgaagatcattttcctgcgcggcataccaaggagctggcagtcgactcgctcccccagtcactcaaggacgcggtctcgactttcctcctatcctgcgcgattcgagatctcagggaagagccactcaaacatcgatccatgctcgtcaatgtctctcgatttacagacgtgcagggtcggatagcggaatcaattgaagggcatctctactctgttctgaatgacgtacgtcagtatctttcggcggatgatctctggcctaagcaccctgttctggcggatcttcgaagggtcttcgatgatcagtacctctcagttgagttctcctgggatgtcgtgaggcggcagctccatgactccattgcctccatcaaggtgctgaccatcaatcagaagaccgagttggagagcaagctcaactaccggaagtacaagaacaccgagaagggccgcagagtcatcgcggtcggcggactgacgctttcgcgtggcctgacattggaggggctatgtgtcagctacttctatagacactccaaagcctatgacacccttctccagatggcccgctggtttggctatcggactgggtatgatgacctctgccgcgtgtggatgcatgaggacgcgcaggactggtttgcagatatcgccgaggctgtctccgaactcagagctgacctccgccacatgtacgtcaatcgccttccaccgagccgcttcggaatacgagtacgctcccatccaaagctcttgctcgtcaccgccaagaacaaaatgcggaactcatccgatgttgatctgagcgtctcgttcagcagcacactgatcgagacgaccgcacttctgcgggattccactgtcaatcggagaaacctggaagctactgcggagttcgtcagtcgattgggagttgcgtcagaagagagcaacagattcgtgtggaggagcgtgagttccgccgatgttgcgctgtacttgtctgcacttacaatttccccaatcaatcagggattcttgcctgacgcaaagacaggcgagcaaccgttgatctcgttcatcaaggacgcccgggttccggcactggataaatgggatgtatgcgttgtccaagggagcggcgcccctgtcgatgccgtctccatcgccctcaaagatggatcgcacgcccagccaaccacgcgcaagaggtcctttgagcgtctgcgctcaaaggccgcaacgagtgcgcgcatcaacaagcatcgccttggcgaggcgggcgatgaacgggcaggtcttgaagcggaggtagtcgctgaagccgagcaagcgtggaagcaacagcaggagactggcaccaaatccattcctggcggagcctatcgtctctaccggccttcgcctctaatcatcatccacctgatcgaagcgaaatcagggagcgatgacccgaagaagaagaccgctcctgttgatgacgtgggcggtgacgtcaaggttgccgtcagcctttcgttcccttcctacaccgataccgagtcaactgcagtcacctacagagtgaacaaggtctacctagacaacattggcctgagtgaggacgaggatgacgccgatgaatag

SEQ ID NO: 507422 - DNA, 1458 bp, Stenotrophomonas maltophilia
atgaaacagcctcagacacttctagtgatcccggacccggtttcactgatggaatcaatgcgggcggtggggtacaccgtggaagctgcgatcgcggacatcattgacaacagcctctccgcaggcgcactcaacatcggcatccactatgatgcatccagcagtccatacgtagccattcttgatgacggttacgggatggaagcgtcggaactgactgatgcgatgcgccatggcagcaccaatccaacggatagtcggaggtcagccgacctcggaaggtttggacttggcctgaagaccgcctccttgtcacagtcgagaaagctcactgtcgtcagcaagaaggacgggcagacaagtgcgagggcgtgggatctcgatgtagtaagagacctgtctgcctggagggtggtcgtccctgatgaagatgaccttctgactcttcccctgtaccggaatctccaggatcaagcgtccggcaccctcgtcgtgtggcaggagcttgaccgccttacctcgggtgctgccgacgcaaggaaagagatgacaacgcggatggcaccgctctatgagcacctcgcgttggtcttccaccgcttcacaaagggagagcgaggccagcctgcggtgtccatttccgtcaacgggcttcgtcttccgcaacgcgacccatttcttggtggtaattcacaccgacaggagctcgaaggccaaacgatctctcatgccaaaggagtcgtatcggtggccccgttcatccttccccctgtgggaagtctgtcgctggacgagttggagatggcgggtggatcagaggggctacggggaacccaaggattctatgtgtatcgcggacgtcgtttggtcatctggggtacttggttcggactcgtccccaagcaagagttctacaagttgactagagtccaggtagatataccaaattcgtttgacgaactatggtctcttgatatcaagaagtcggcagcctacccaccggatgtcatccgggagagactgaggcagctcattccgcattttgccgacaagagcagaaaggcgatccagtacgccggcaggaagaagcaaggacttggaatagtgcctctctgggaacgcgtcgagccgtcccatggcaacttcacgtatcagatcaatgtccagcatccccttgttgacgcagctctggatccaggctcacacgcaaccagcaacgccttgctaacactattgaagtctctatcagtatctctgccctacgaagccatctatgcagacatgtgcagcgaccaaaggaaggggcttccggcgtcagaactggatgagctcacccgcattgccactacgttgatggacatcacaggtcgcggaattgatgcagttctacagatagacccgctggcacggcacccaaatctgcacggccttctcaaggagagagttgaaaatgtctga

SEQ ID NO: 507423 - DNA, 1245 bp, Stenotrophomonas maltophilia
atgcaacagggacgtttgtcggagtattttcaaggtgtagcggcaaagaggctgactgaggtggaggctaatgttctccgctccaatcagcacgagttcaatggcgtcaaagctttacgcgccatgctcggggagcctagcgaacgggtgccctaccctgcgaagatgatgtacctcaccgacggccagaacgagcccgttgtggaagatgccgtactcacctggtatgacgcacgacagaaggcgagagaggagcgcggcgtaatgcgcgatgagtaccgcctctacttcccgagtacagcggtatcagcgagctacgcggcaggagatctcctcgtcatcgcgctctgccaagacaagtcgctacttgtgatcgttgcgaaggcaggatcaagcattgccgaacaggttcagtggcttttcgccatccacgcagacggatccaattacgacatcaagtctgagggtgactttgatagtcaacagttaggctatgcgtctcgattcattcttgagagccttggcattgatatcgggtggctggatgacagccatctcgacgagatgctcgctgtattcaagggaggtttccctaccacacttcaattctctgctttcagcaggtcgaagtgcgcggggatcgatgcacgacttgatccagacagcacgcttctgacgtggatggaaaaagaggagcagcttttcagggccttggagcggcacattgtttcgcagcggctcacggctggattcgtcacctctcgcggcgaggctgacgtggatgcattcgtgtcctactccctctcggtacagaaccgacgtaaaagtcgcgtcgggctgacccttgagaatcacctcgaacagatattcactcagaacagcattcattactcaaggaccggcagaacagagaaccgctcaaaaccggacttcctgttcccaagccagagcagctaccaggatgcgggatttgatccgagccgccttctgatgcttggagtcaaatcaacctgcaaggatagatggcgacaggttctcgccgaagctgaccggattccagagaagcatctgctgaccttggaggcccccatctccaagcaccagacggatgagatgcgcgtgaagtcgctgactttggtcatccctacgcccttgcagagctcgttcaagccagaacagcgtgttgagctgatttccgtgcgcgaattcatagcactagcacgagcgcgccagacccaaggctga

SEQ ID NO: 507424 - DNA, 504 bp, Stenotrophomonas maltophilia
atggctgttttttcatcgttgggcgaattggtcaagcgcttcaagtcattgggtgcgaggacaatcgtgttcaagccgcttgaggagaacgacaacagaaagcagcagatctacgtcggagactctctagaagctgtctatcatcttccaacgcattggagacacgagaagggtaccgatggagaaatccagaaatcggatctcaacctgcgttgggtggacacgacgagagaggagcgggctcccgaagcgaagctgatcttctatccgcaatatcccgaagtgagactttcaggggtcctgtcaggctgccgcctcgcgccgcgagaacacttgcagccagtggcaaagccggaccggaagggatacgacgaacgggtgctgttcctcggtatcagcagtgacggcagggtagtcgctcatctcgctcctgccggaagtgcactctcggccgaagcgcggggaatagaggaccaagactcactgtttacacaactgatctga

SEQ ID NO: 507425 - DNA, 354 bp, Stenotrophomonas maltophilia
atgaagcctgtgatctatggcgctgtgctgctagcggcggtggctgcggcgatcgcgagccggcatgtacccaaggctggcttggatctgcggacgtttcggaaggtatccgacgctgagtttgctgtcatgcgcgaggaagccgttcgacttgtgcacgagggtctggtacaggacgcgcgctacgcgggagagaggtactttgaggtcagctgtaacggtgcacctgtgatgatggtggacaactctctggagcagcttgtgattgtgctgtatgcggatagggagattggtgttccgtgcgttttgccgctgctgtcgcattggagttcgcggattgtgccggaactatag

SEQ ID NO: 507426 - DNA, 477 bp, Stenotrophomonas maltophilia
atgccaagggatggccgctatgctggcagcgcgccggaatggaaaccacgcatgccccgcttcaacaccgccctggcactgaacctcgttctgatgctgctgggcgctacacccgccatgaccgtggcggcagacccgcaggtttccactgaagtgttcgtagagcgcggtgacaacctcagcttcgagctgcggcaggcgcctgccattgagtattcaacggcccctgccacgccgcccgataccttcctgcaggctcacatgcaggtggtgcgggttgctcaactggatgagctgggccacgtttccaacgtgatggtggcgcggtccagcggactacgggagcttgatcgtgcggcccttaccgcggtggacaggtggcgctttggtccggtcgtggttgagggcgtcgcgctgcatgcgcgagttcgggtccgcctgaccttcgcgcccacggccgaagcgccgcccggctga

SEQ ID NO: 507427 - DNA, 1005 bp, Stenotrophomonas maltophilia
atgaacgaagaagctaccgaaagcccacagtcggctggcggcaaggccagggcttctgccctctccgaaagcaagcgctctgaaattgccaaaagggccgccgaagcacgttgggggggagcgagaaaagcgacccacgagggaacactgaccgtcgctgaagtgcctattccctgctacgtgctggaggatggctaccgctacatcagcacgcgaggaatcatgaaggcgctcaagcgcccgtggcgaggccgcaagtacaccgggaccgaattgccggttttcatcgaggccgggaacctctcgccctttataaacaatgacttgaaggaaatactgaccgggaccgaagtgcggagtaccaagggcgtcgtttcagaagcattccgtgctgaggcactgccagccgtctgtgacatttatttgcgagctcgcgaagccaaggcgcttacggccacacagctcgtcgtcgcgcagcaggcggaagtccttgtccgggcgttgtcgcagctgggcattatcgctttggttgacgaggctacgggctaccaagaagtcagaccccgggacgcgctgcagcagtacttggacgcagttcttcgtaaagaactcgccgcttggagcaagcgctttccggacgagttttacgagaacatctacaagctgaagggatggacatggcccgggatgaagaagaaccggtttagtgtcgttgcgcactacacccgcgacctggtctatgaccgactgggcactggtgtactaaaagaactcgaactacggtcacccaagaacgaaagcggcacccgacctaacaagctacatcagtggctgtccgatgacgtcggccacccccttctggcccaacatctccactccctcatcatgttccagcgcctagctatagctagcggccacggctggcaacgctatgtaaagatggttgaccaagtgcttccgaagaagggggatacgctagaactcccgcttggtgaaccggactaa

SEQ ID NO: 507428 - DNA, 351 bp, Stenotrophomonas maltophilia
atgctcgagttctacacacagtctccagaagcacttcttcgcgcattcaaagaaaaagtggatctagggaatgaggaaggcggaatctccacgtggacggtgggcagagatggtcacttcatacattcctctctgcaactcaaaaatatcggctacgtttcgcctaaggttatcaacgatggcgaggaaaagaagcttcgcttttccatttattggcgccaggaaacaacggccaaagaacagcaattctgctacaaggaactgagcggcaatcttctggccaccttcgttgaccatttctccaaccagttcacgaaggctattcatacggacgtccggaagtgggcctaa

SEQ ID NO: 507429 - DNA, 216 bp, Stenotrophomonas maltophilia
atgagcgctgccctcgcctaccactccaacgcccagcgcgccgctgccgccgccggcatcgtcgcccgcgccgggcgccgctggggcctcctccccaaccaggtcatcgccgccgccagcttcgccgccaatgccgtcctgcggcgcggccagagcgctgcaggcgccgtcgccaccgtgcgcagcgcagcccgcgcccaaggcggtgctgcatga

SEQ ID NO: 507430 - DNA, 579 bp, Stenotrophomonas maltophilia
atggcaatcgaaatctgtccgctggcttcggacgtcggaaaccttgcagactgggctgctgtggccgtcgccaccgtcggttctgtggcagtccttatgcttagcagagcggcgaatcgaaccgcaaatgcttcgcttcaactgagcaagcgaattgaggaaaaggaagacgagttgctgttgagagagaagcagcttcttttcagcgagttgacgcgcgatgtgatggaagcgctgtccgatatcgatgcaatcaaaactcacatggcacgtggtttggatagctgggggagcgatgcccgcttcatgaaagctgttcagagccttgcgctggcgacagccgatcgcgagcgtgcgagattgcatcttcttccggagtacgtggcctccagcgttgtccatgcccaacaatcgatgaatcagtttcgtgcgcgggctgttgagttcaacgatcaccatgttggaactgagttggcggggcatttctttcccactatcgtcgcggcagcggaggacgtggatttttggctgaacagcgctttccgatccctcaattttgctgccggaatgaccaggtag

SEQ ID NO: 507431 - DNA, 744 bp, Stenotrophomonas maltophilia
atggctgaccagctgctcaccgccgcgctgacctcgggcgattcaattcgatgctgcaacctatcgacctttcctcctcggattaaagctggcaaccgcttttgtgcaatggctcacggcggaatcgacgcagagcagtgcgtcactaaattcctgctgatatgtaaccagagcctcttcgagcatttcagcgggacgaacaatatcaggcgtcgtcaagaagagcccggttccgctcactgcttttgctgcgaagactgcgcgagcgatctccaccgtaagcttcaagctgcccccaagcggaagctgaccgaaatcaagcgtcgcttctccaagtcgcgcgacatgctgggctgccatgacgaatccttcacggtactcgtcatcctcgatcagcttctgcgcggttttaagacgcgaagtcttgtcagctgtcggaaagtcctgcgagagaatctcaaggccagaacgcgcaagcgccaactcatcagcaaacctaagagcgatgattgcattgagcctgcgtgcatttctccactgccgtatcaacggggcaagcagagcaatcagtacgccggtcatcgtccccatagcagcccaggcgtcccaccatacgacgcagccgccgtgccccggcggccagcatgtgcttacagcattccaccagctcattccttgatccccctgtggactggccggcattctgccatgccgccgcggtgggcggagatctcctatggctga

SEQ ID NO: 507432 - DNA, 318 bp, Stenotrophomonas maltophilia
atgccccaggaacatatcagccacccggaagagttgccgaactgcgccgccggccaccgcgcgcgccacatccacgacaagcgctgcgcctccgccggcggtggccacctggtcgagtgcgcctgcaggtcgaccagcaagcatgccgatcccgacaaggccatcgcagcgtggcgccggctcaaccgcccgcctcgcagcgcacgggcactgtcttcggaggccgtccccgacaacgtcgtgcaattcaacctcagtctcgcggaacagccgacggccaggaggaaggtcgcgggaggcgccaatgggcgccgctga

SEQ ID NO: 507433 - DNA, 954 bp, Stenotrophomonas maltophilia
ttgacacagttggcacagtggcggtcggggtgtgtaatggagcgggtagagaaggaacttccggcagtccaagagcgacatgctgacgtatgggctgagctcttactgtattccttcgccgctttttgcacgggcttgctgttggggacggtggcgctcgtcgccagcgataagggggcgagtaccgactggggctcatatgcggactggctagctgcgttgggcggcgtagttgccgcgttttcgaccatcgtaatcgctggcctcgcgcgcaaagagctgatgcgccgcgaacagcaagctcaggacgatgtgacgcgccgtgagcaggaggctcaggatgaggccgggcggcgtgagcaagaggcaatcgctgaaaccgccaggaggcaggcggaatttcgcgcggagaccgagcgcgttgctggggaagagcgaaagcttgctatagccatagcgtacgggccggtggccgcagatgctgctcttgcggcgagagtgacaggaaaaattccgttgagcttcagatatgactttcaaaccgtgaccaacattgttgaagccttgacgtcatttgttactcctgacgaaattgcaaacccagtgcttattaagggtttgccacatgagtcgctgagagccattctcgttgctcgtgggcagatgaagctcattcataaaacagccaagggcttggaacggagcctacttgctaaacgctctggaaatactgaggccgtttttttggatgagctgagtcctaaaacgtttgagctggaggtgaactatctcgttgctgccacagagcatatgttgtcgggattgattccaacggccactcagttgcatgaggaggccggcgcaaagtcggacatgccgtggagtagatggaaggccaagcgcgactttggcgaagttctacgaaaaatggattctgaatacgatgggtcttag

SEQ ID NO: 507434 - DNA, 879 bp, Stenotrophomonas maltophilia
atgcaggtgttctgttttgctcgttggcggccgggtgcaggccgggtagtgccgctgtgccagcagcaggtggaagtgcttttctcgggtctggccgtcattgccggccgcggattcgcggtggctgcgccaggccgagacgcggaagcccgatacccgcagcgccagctccaccgtgtccagctcatgcagctggaagtcggcggcgaatggcaggctgcgcatgaagctggcatcgccgaaggccaggcacaggcggccgccccggcgcagcacccgcgccagttcgtccagcaccggggccaggttcggccagaagtacagggtgttgaccgccagcgcggcatccatcgcggcatcggcgaccggcagtgcatgggcgtcgccgtgtcgcatcgccgcacgttcggccaccccggcgtcggccagccgctggttgccggcctcgaccatggccgtggacagctcgatgcccagatagtggctgccggtggcctgcagcatcagtggcgcgaaggccgcattgcccgggccgacctccaggacccgttcgccggcgccgacggccagcagcccgattgcggccaggttgagtgcgccgttgctgcggttcatcgagtcggccactgccagcgcggcctcgccgtggggctgccgcagctgtgcggccagggtgggagcatccagcatcatcatcgtccgttgcagagtttcggacgtggcggcggcgggtccgccggtgaccatagcgccgaccttgtggcttgggaagtagggaaaccccgcttccgggtgatgaggaaatgtccagcgtcgcagtcggtgagatctggttgtccacagggggtgtggattacgcgtgggcaactttgtggataa

SEQ ID NO: 507435 - DNA, 2190 bp, Stenotrophomonas maltophilia
atggcgggccagggcaccaacggcaacgggttgctggagcgccgcctgcaggcgctggccgaagagcgtcggcggctggcgatgatcatcgatggcaccgccgcgggcacctgggaatggaacgtgcagaacggcgagatgcgggtcaacgcgcgctgggccgagattgtcggttaccgcctggaagagctggagccggtctgccagaagaccttcctgaagctggtccatcccgatgacatagcgctgtcggacgcggcactggacgagcatttcgaggggcgcaccgacaactacgcgtgcctgctgcggatgcgccacaagaatggccagtggatatggatccaggaccgtggccgcgtcttcgaatgggacgcgcagggcaagccattgtggatggccggcgcgcatgccgacgtgaccgagctgcagcaggcccgacaggatgcggccgaaacacggcaacgcctgcaggccgtggtcgatgcctccgacgaggtggcggtgatcgccaccgatatcgatggcaccatcaccctgttcaacacgggcgcgcaacgcctgctgggctacagcgcggcggatgtggtcggccagcgccggctggatgccttccacgatccgcaggaactgaatgcctggctgcgaccgctggccgatgccgatggccaactgccagatgtgttcgaggcactcagtgcgcgtgccgatggccagacctattcgcggcaatggacgctgctgcgcaaggacggccagccacgccaggtacgcctctcgatcagccgcatggacggtgccgacggtgtacgcatcggctatgtcgggatggccatcgacatcaccgagatcctgcaggcgagggccgaagcgcgcttgtccgcggagaagttcgccggtgcattcacctcggctgcgctgggcatggcgctggtgtcactggaagggcgatggctggacgtcaacgatgcgctgtgccggatcctcggctatccgcgggaagaactgctgcaggtggatttccagcgtctcacccatcctgatgacctgcagaccgacctggccctggtgcaggacctgctggccgggcgtcgcagccactaccacctggaaaagcgctatctcgatcgcgatggcaaggtcatctgggcccgattgtcggtctcgctggtgcgcaacgagcatggcgagccgttgcatttcgtgtcgcagatccaggacatcaccgcccagcgcagcagcgagcagcggctgttcgagagcgaacagcgcagccgcatcaccctggatgccgtggccgacctggtgctgagcgtcagcctcgatggccgtatcgattacgccaatgccgctgcagtacgcatgttggccggcgatggcgcgttgtcgctggccggacacaaggtgcaggatgtgctggcgctgaccaccgaatacgcgccgggttcggtgctggacgtgtcggtactgctggatccggacagcaatgcggtcgacctgcatgccgacctgctgctgcgcctgggtgccgccacggtgccggtggacctgacccgcgcctggttgcgcgatgacgagggccacgtgcgaggcgcggtctgggtgctgcgcgacgatacccagcagcgtgcccgccagcgcgaggcgcgtcatctggccgagatcgatccgctgaccgaactgagcaaccgccgtggcttcgaggtgcatctgcagcaggcgatcacccgcgtcgaacgtaccggccaggccgcgtcgctgatgtacatcgatctggaccggttcaagccgatcaacgatacctggggccatctggctggcgatgcggtgctctgggcagtggccagtgttctgcgtcacggggtgcgcgattcggatgtggtggcgcggctgggcggcgatgagttcgcggtgatcctgtccggttgcacgccgcgtcgtgcagcgcgcattggcggcgagctgctgcataccctggcgtcgctgtcgattccgtgggaccaggaccggttgcgggtaggggccagcatcggcatcgcgccgctggccggagggatgagcgtggaccaggcggtggccgcggccgatgcccagtgttaccgggccaaggcgatgggccgcaacaacgtgcaggtgcagggcgaggccagtgagctgccgggcgatgattccgaggtcgtcgagggctga

SEQ ID NO: 507436 - DNA, 960 bp, Stenotrophomonas maltophilia
atgaaacaacgcatttccgccgtactctttgccataggcctgaccggtgctgcgcaggcctcggcatgcgatctcactctcgacagtggtggtgaccttgctgccgcagtgacagccgcacctggcaagaaaatctgcctgcggcctggcgcctacgtcactgggcctgcaccacttgaagtaccctccggcacgaccatcgagggattgggtgcgagcatggccgacgtcgtgatctccgcccatggctccccacagaaggcaatcgggctcggcagcggcaccatgctgcacaacttcacattgtccaaaggtacaggcggaaacttcggtgtactggcctatcatcaggaccgcatcatcatctggagcctcgatatcgtcggcttccagatcagcactggtgtcgtgggcgggaaaggtgtggatatatgggacaccttcatgcgtgccaacggcatagcgggcaacaatgtggcagacccgaatctgtggatcaccgattcccgcgacgtcaccatcctctatgggcagctgaccggccgcaaggatggcccggggggcgatggcgagatggccatctacaactcgagcaacgtcatgattgatggcgcccgcgtcatcgactccggcgccagcgccatctatctggtgaactgcgtcgactgcaccatcaagaactcggtgattgaacgccctggcgaatggggtatcgacgtcgtacagggttcacagcgctttcttgcagaaaacaatgctgtaagcggtgcgaactatggtggggcggtgtttgagacatcgggcggtaccacggcaacattccgctccaaccggttcattcagaatcgtcgcttgggtgttggaaactgcaacggcatcaatgcaaagggtggtgttgcaggcgttatatcgacaggtaacatctctttcccttcaggtgatctctgcgccttcccgtga

SEQ ID NO: 507437 - DNA, 1827 bp, Stenotrophomonas maltophilia
atgctcattccaggcttcacggcaggcgcgcaggcgccggccgagctgcacacccgttggtcgccgtggcgtgcgctgcttggcgtactggcgccgcagcaacgcaccggcacagagaaggcgatgaccgaccacaccgagctggaagcgcaggtggccgcgctgcatcgcgtgcaggccgtcatcgagttcgcgctcgacggcaccatcctgcaggccaatgacaatttcctgcaggcgatgggctaccggctggaggagatccagggcaagcatcattccctgttcgtcgaccccgagctggcgcgcagcgccgaataccgcgacttctgggcgcgcttggggcgcggcgaatacgacgccggacagtaccgccgcttcggcaagggccagcgcgagatctggatccaggcctcgtacaaccctgtactggaccgccaggggcggccgtacaaggtggtcaagttcgcgaccgacatcaccgcgcagaagctgcaggcggccgactcggcggggcaactggccgcgatcaccaagtcgcaggcggtgatcgagttcagcatggatggccgcatcctgtcggccaatgacaatttcctggccgccaccggctacagcctggacgaagtgcgcgggcagcaccattcgttgtttgtcgagcccgagcatcgcagcagcatcgaatatcgccagttctgggagaaactggggcgcggcgaatatgacgccggccagtatcggcgtcttggcaaaggcgggcgtgaggtctggatccaggcgtcctacaacccgatcctggacctcaatggcaagccgttcaaggtcgtcaagtacgccaccgacatcaccgcgcaggtgcatgaaaaccaggccatgcagcgcgcggtggcgcagacccgcgaggtggtggccgcggccaagcagggcgatctgacccagcgcgtggccaccgccgacaagaatggctcgatcgccgaactgtgcgaaggcgtgaattcgctggtcgaggcgatggccgcgatcatcggccagatcaagttcgccgcggacaccatcgcagtcggcgcgactgaaatcgcacagggcaacagcgacctctcgcagcgcaccgagcagcaggcggcttcgctcgaggaaaccgcggtgtcgatgaagggcctggccgagaccgtgcagcgcaccgccaccaacgcgcgccaggcgagccagctggccggtggagccgccgatgtcgctgcgcgcggcggcagtgtggtgcatgaggtggtcgaaacgatggcggtgatcaatgcctcgtcgcggcgcatcgtcgacatcatcggggtgatcgacggcatcgccttccagaccaacattctcgcgctgaacgcagcggtggaggcggcgcgtgccggtgaacacggccgtggatttgccgtggttgccaccgagatccgcgagctgtcgcagcgttcggccagcgcagcgaaggagatcaagcacctgatcgatgagtcggttgccaatgtgggtgccggcacggcgcaggttgagagcgcgggccgcaccatggacgagatcgtgaccaacgtgcgccgggtgagcgacctgatgaccgaaatcagcactgcctcgcagcagcagagcgacgacatccagcagatgaaccatgccgtcgatctgatcgaccagggcacccagcagaactcggccctggtggaggaggcgtcggcggcggcacgcagcatggaagagcagtcggcgcagctgctgcagacggtggccagcttccgcttgcagggcggcgccgggcaccggcacggagcggcggcgctgcatgcggtctag

SEQ ID NO: 507438 - DNA, 1230 bp, Stenotrophomonas maltophilia
atgaacctcggcccccaacatcctgcggcacatggggtactgcgcctggtgcttgagatggatggcgagaccgttgtgcgcgcggatccgcatgtgggcctactgcaccggggtaccgagaagctggcggagtccaaacccttcaaccagtccatcggctacatggatcggctggactacgtatccatgatgtgcaatgaacacgcctacgtacgtgcgattgaaacccttctgggaatcgaggcgcccatcagggcgcagtacatccgcacgatgttcgatgagattacccgtatcctcaatcacctcatgaacattggaacgggcgcgctggacctgggcgccatggccgtgatgctctatgcattccgggaacgcgaagagctgatggactgctacgaggcggtatccggcgctcgaatgcatgccacctactaccggcccggcggtgtgtatcgtgatctgcctgaccagatgcccaagtacaaggagtcacgctggaagaagggaaaggagctgcggcggctgaacgccgcgagagaagggtcgctgctcgatttcatcgagaatttcacccgcgagttcccgaaccgcattgatgagtacgaaaccctgctcaccgacaacagaatctggaagcatcgcacggtgggcattggcgttgtgagcccgcagcaggccatggactggggcatgaccggggtgatgctgagaggctcgggcgtggcgtgggacctgaggaagaagcgcccctacgcgaagtacgatgccgttgacttcgacattccggtcggcagcgccggtgactgctatgaccgctacctgtgccgcgtcgcggagatgcgacagtccaaccgcatcatccgccaatgtgtcgactggcttcgcgccaaccccggcccggtgatggtccagaacttcaaggtggcgccgccgtcccggcaggagatgaagtccgacatggaagcgctgatccatcacttcaagctcttcagcgaaggctaccaggtgccggcaggtgagacctacgcagcggtcgaggcgcccaagggcgagttcggctgctacctgatctccgatggcgccaacaagccgttccgggtgcacctgcgtgctcccggcttcgctcatctctcttctctggatgaaatcgtcaggggccacatgctggcggatgtcgtcgccatgattggcacctacgacattgtgttcggcgaagtggatcgatga

SEQ ID NO: 507439 - DNA, 657 bp, Stenotrophomonas maltophilia
atggctagaagaaccagggaggacgcacacgccacgcgtgagaggatcctcgatgccgcactggtgtgcctgctgcgccatgggcccgcgggcgccacgctggagctgatcgccaccgagtgcggctattcgcgcggcgcgatctactggcacttcgggtcccgtcagaacctgctgggtgaactttccgcgcgagggcggccagatgcacccgaaggactgcgggaagccgccatccggcagtgcagtgacccgttcaagcttctgtttgcggacctggtcagggtatttgatcacacgcgccgcaccccacgcgttcgccgaacggttgagcttctgctgcgctctggtgcatcacatgagctgggcggcataggcgacgtgctcgcggcgtgcgcgatgccggaggtccgcatgctggagcttgtataccagcgtgcaggagcactgggccagctccgtgagggcgttgatacagccactgcggcgcgcagccttcatgcgatcgcggtcggtgttctgctgggatcaatcctggagcccggcatcctcgacctggagatgggcggggcacgcaccgtggaagacctgctcaggctgcacatggctgttcccttcgcggccgccggagcgtggctcagcccatgtgtgggctga

SEQ ID NO: 507440 - DNA, 1530 bp, Stenotrophomonas maltophilia
atgtctattggaaatcgagttgcctgcctgtcgattgctgtgcttgtggccctgtcttctggctgcgcctctgtggcccccaggaccgagatccctgacgccgcagcccggcatcatgtgggccaggcccccacgccggcggcgcgggatgcggatgtcctgcccgggacgcccaacaggcaatggtggaaggacttctccgaccccaacctggatgcgctggtcagcctggccatgcgcgggaatcatgacctgaagtctgcccttgccgccgtggtggaagcgcgcgcactggcaggcgcagcgcgcaaggactatctgccgagcggtgcgctgcaggtcaaggccgaagccatgcagtccgcccagatcgaagcggatccctatcgccaggatcttccccgccccccttcacagaggctgctctctgccggacagatgttttcctgggaactggacctgtttgggcgcattggcaccgccgcagccatggccgatcgcaaggccgatgctgcggcggctgacgcgaggtcggctgccgcagtgctccaggccgaggttgcgaagaactacttcctgctcaggatggaccagatcagcctgtcctctcttgagcgagaggttggcctcagcgaggcccgcgtggcgcgcgtgaaggcccggtatgcggcagggctggtcgatcgcagggaggcacttgcggtcgaatccgaacatgccgagctggtggcgcaggaggcggcaaccgttacccggctgcaggcggacagggccgcattggcggttcttgcgggtcgctcgccgaccgcgcaggatgacgcctgggaggcgttgctggccccggctccactgccggccccgccggatcttgcatcgcttgcgcagccgaccgacctcctggcgcggcggccggacgtcgccaaggccgatgcactactgcgagcaagccttggcaacgtcgtactcgccgagcgcgcgcaccttccgcgcctcacgctgaatgttttcggcggcatccttgcaccgttcggttcgctgggcgattccagtgcaaagcgcttctcggccggcccggagcttcagtgggagtggctgagctttggccggaagaaggccagggaggaagccgctcgcgccggcagtgatcagaactggcatgccttcgagcagaccgtgctgacggcgctgaaggagagtgaggactccctgcatgcgtggacgagttcccaggtcaggatgcagcaggcagtaaatgccgaggcactcagcagcagatcttcgtcctatgcctcttcccgcgtggacgccggaatcgaaccgaaggatgccggcctgcagcagcaggcgctgcacgagaaggcgcgcagagagcttgcggcggcacagaccggactgctgatggcccacgtgcaggtgcagctggcactgggggcatggcagcccgagaagggggacccggagattgaaatcggcaggcccatcgcttcccggaagagcgccgaaagcgaagcatccgcggcgcatcactga

SEQ ID NO: 507441 - DNA, 3048 bp, Stenotrophomonas maltophilia
atgagcctctcctcattctcattggcgcgtccccgcctgaccttgctggcgatcgtagcgatcgtcctcaccggcctcattctggcgctggacttcccgtccaccgaagagccccccatcaccattcgcacggcgacggtactcagcttcatgccgggcgccggcgtggaccgggtcgagcagctggtcgctcgcccgatcgaggagagcattcgtggcatgccggaggtcaagcggatccggacgactgtccgcccaggctttgcgttcacctacgttgatctctatcccaccgtggaatcggagaaaattcccatcgtgtggcaacggttgcgctcacgcatgggggacatccagtgccagcttcccgagggaacgattggcccggtcgtggacgacgaattcggtcgggttgcggtgatgaccatgggcctgaccggcgatggctataacgcaggcgagcttcgggcagaagcccgccgcctgcgcgatgaactgttccggctgccgggggtggaacgtgtctcgctgcacggcgtgagggacgagcaggtccagatcatcctggacgtgccttccctggccgcacgtgggctcaaccccaatgtgattgccgatgcggtttccaagcgcaatgtcattgcgccggcgggctatgtcgagatcggaggttcggagatcacgctcaacgtgagcggtgacgccgacaacccctcccagctgaagagcacgccgataccgctgccgaagggtggctcggtgccgctgggtgcccttgcgcgagtggaacgggtgacccaggacccgccgatgacgggtgcattcgtcaatggcacgccggccgtggtgatagcggtctccatggcgccaggactcaacgtagtcagcttcgccgatctgctgcgcggcgacgttgaacggctttcggaaacgctgccggccggcatgcagcttgtccagatcacggatcaggccgaggttgtttccacccagctgctgcgtgttgccaaggttttcctggagaccctggccatcgtcatggcggtggtcgtgctgttccttggaatgaggaccggcctgatcgtcagcgccatcgtgccgaccacggtgctggggacgatggcaatcatgaagatcctcaacatcgatctgcacatgatctcggtgggtgcaatcatcattgccctgggtctgttcgttgacaacgcgatcgtggttgccgaggacatggagcggcgactctcgctgggtgagtcgccggaccaggctgccgctcacgcaggcagcacgatgttcgtgccgcttctggtttcttcgctggcgatcatcctcgcgttcatgccgctggccatctccagcacggaaaccggcgagtatctgcgcagcctcggtatcgtgatggccatcgcgctgctgttgtcgctggtcatcggcgttaccctgattccgctgctgtgcaagtactttgcccatcaccatgccgaactcagccgcaccgcacgcgcggtcgagcggctgacgggctggtaccgcggcaaggtccgctggatcctggggcacaaggccatctacatcggcgtaatggttgcactgctggcaacctccggctggttgttcaccaccgtccccaacgagctgatgccgccgtccgagcgccatcagctgcagatggccatcgagctgtctccggattccagcccggccaatacgatggcggttgctcaacagatcagcaaggtactggccgacgagaagctcgttccggagatctccagccatgccctgtacatgggcgatggtggtccacgcttcattctggcactgaatccccctactcctgcaggacaccgcgcgtatgccgtgctgtcacttgcgaagggcgtcaagcatgaagcggccattgagcggctgcgttctgtgatggcaacacacttcccggatgtgcgggtggaacccaagcggttctcgatggggtcttcggacgccggcgttgcgacgttccgcatctccagcagcgacggcgcacatcggattgctgccgagaagctgctgcgcacgctgcaggacacaccgggtatggtggatgtatccagcgatgccgaacgccaggtcgtccagcttgatgtggacgtcgatcagcccaaggcccaggccgcaggcatcagcagcgcggacatcgccaagagcatggacatgctgctgaccggcgcaacgatctcccgttatcgtgagggcgacaccgttctcccggtcatcctccgcggagaggcggcactgcgcacggatatcggccagcttgaggcgctcccgatccagaaggcggatggcagcggaagcgtgcctctgggccaggtggccaagcttcggttggcgccgcagctgtcttcaatccagcgagtgaaccagacgcgcgcggtcaccgtgcttgcaaagagctccgagctgacggcccaggggatcgcggacaaggtggagccacttctttccgaattccgcaagcagggcgtgcgggttgaactcggtggcgagatcgaggaaagcaagagtgccaacgaaggcatcgagaagctgctcccgctctgccttgctgccatgttcctgttgttcgtatggcagttcgagagcatccgcaagagcctgatcgtcctggcgagcattccgttcgtggtcatcggcgcgaccttggcactcaagctgagtggcaccagcctgaccttcatcgggacactggggctgctcgcacttgccggcatcatcgtcaacaacgcgattctgctcatcgatgcgatcgacgaaggccagcgcgatggcttgcctcctctccaggccattgaagaggctgcggccaagcgcctgcgccccatcgtcatgaccaagatggtctgcattctcggccttgtcccgctgctgctgtttggcggctccatgtggaccagcatgtcgatcgtgatgatcggcggcctcgcccttggaacgctgatcacgctgggcctcattccagcgctgtatgccgcgctctaccgcattcacccgaccgaggaggcatga

SEQ ID NO: 507442 - DNA, 1077 bp, Stenotrophomonas maltophilia
atgactcggtcgttggtgcctcgtctcagcgcactggccattgccctgtccgtgatgacgggatgctccgacaccccggaaagcgccgcgcccgaagcacgtaccgcgtacgtcgcatccgttcgacaggccactggcgatcagcgcgcttacatcggcaccgtgcgtgccacgcagcgaggacagctgtccttcccggtctccggaaaggtctccgcggtacttgttgaatcgggtgacgttgtacgcaagggacaggtgcttgctcgactggatcctgtcccctttgcagcgcaggaggcgtccgctgccggcgacgttgcacgcgcgcaggcggcactggacgaggtccagcgccgcgtcgagcgactcgatgttgcacagaaggctgatgcgctcagcccggcggagatgaccgccgcgaaggccgaactggcggctgcgaatgcggcggtccgcaatgcccgcgcgcagcacgagctcgccggctggtcacaaggggaagccacgctgaaggcaacgtttgacggagtcgtggctgcccgaaacgttgaagttggacagtccgtgggcccgggcgctgttgccatccaggtcgatggtggcggccgcgagctgtctgtcgcgattccgggcactgctcccctggctgttgggcaggtggtcaatctgatcagcggctcggacaccgtggcgagcaaggtgctccgtgtcgacggccgcgttgatgcaggcggcgtgcgtaccgcatacatcgcagtgccagaggcggcgaccgtaggctcgacctggtcagtccggatcattggaacagatacaggcccagccaggcttcaagtgccatttcgggctgttctgccgtctgccgatggcggcaagggtcaggtgcttcggctggcaaaggatggcaagacgaccgagctggccgaagtagatctgggccagtatcacggtgactggatcgaggtgagtgggcagatttcagccggtcaacgcgtcgtggttgcgggtgccaaggccatccgcccgggcacgcaaatcaagcctgtcgacatgaagatgggatcagaacaatga

SEQ ID NO: 507443 - DNA, 1152 bp, Stenotrophomonas maltophilia
atgggggctgcgaaacgccccttcgaaaacgtgatggctgccatctccaagaatctgcctacctccatggactggcgtgagcccggtgaggaactcgcgttggatgcgacgtctctgaacccctccgatgatccaggctcaacgcacgaatcgcagatcgcagaaatcgtgccgaccggagccagggccatccttgggcttgttgaagaacggggtttctcgccggaagatctgtgccgcgggcttggtttcacgtaccgcgatctctcgatgagagatgtaaggctgtcctacaggcagatgcgcaagctgttcatgcgcgcagaacgattgctggacgaacctgcattgggcctcgccctgggagcccggcagacacccatctcctggggtgttcccggcctggcgatgctcacctgcgagacctatggagaagccctgaactacgggctcagccaccagcaggcaatcggcgccatgctgattcacacgatcgaggaagctggtcgtgaaatccggatggaggtccgattccggcgctttgatatccagctggaatccgttcttgtggaggatgcattcgctgggttcgtcgccgtcagcaggtaccttattggcccctcgtttgcgccgctacgggtcgacttttccctacccaagccctccgatccggacgtctaccggcggttcttccagtgcccggtgcgctttgatgcagggatcaaccgcctgaccttcgactcacactggttgagtgtgcggctgccaggcttcgaccggatcaactcgaagatcgtacgcgaccagctcgacacgctgctgccaatgcggggcgtgcgcaatgaaattgtcgaatcgctgtcgagccacctgcggtgcgacatcgagacgaccacccggcagagcgaactcgcaagcctgatcaatgtaagcgagagaacgctcaggcgccggctcaatcgccaggattcgagttatcgggaactccgcgatgaggcccggtacgagcgggcccgcgatctcctgctgaactcagagttgagcatcgccgaagttgcagacgcggttggatactccgacgcccgtgcattccgccgcgcattcaagcgttgggcggggtgcctgccaaccgagttccgggaatccaggtaa

SEQ ID NO: 507444 - DNA, 411 bp, Stenotrophomonas maltophilia
atgaagcgcatacggctgtttgaatcgaaactcgcggcgagattccttgaggtcgatcgattggcgcgggaaggcgccacgttgaagaacgtggctgagaacatgcgcacgatcaccattgcggtgacgatgctgatcgtggtggggctgctgatggacgttccggcgtctgtcattcgtgtggcggccatcgcatgggggtgctgggcactggtctatgcgctgcttgccgcagcacaggcaggaattctctttgtcctgctgcttggcgaggtggccctgttgaagcacatcctcatccgaattggatttctcagaggcgccaatgccacaggattcgcggtgcttgtcgtgatcatcatggcagtgtcatgcgtgctgttcgatccgaagcacatgttgcactggtga

SEQ ID NO: 507445 - DNA, 483 bp, Stenotrophomonas maltophilia
atggagatggcgccagcggatagcacgcacgggcaattccagacggtgactctcgcccccgtcctgctgatgccagaggtggctgcaacgctgagcccaggcgtcggcgaccgcctcaaggctgccgtaagcagtcagctgcagcggcagatcgacagacgcctgggccggggcagggcagggcagccgggaacggggctgttgctgcttgcaaggatcacctcggtgaaagaggtgtctgtcggcctgaacattgccacatcggtcctgatgggaccggtgagcaagggacagctttccctcgaaatcgaggcgattgacgcaagcactggcaggcaggtagcactgctgctgctcgccgacgaggccgacatgagggacattcgaaaaagctacacgccggacggccacgccaagtcacttgcgggtcggttcgcgattgaggcggtggagttcattgcgccaatggtgagatcacgctag

SEQ ID NO: 507446 - DNA, 225 bp, Stenotrophomonas maltophilia
atgcgccagtatctgcgggaggttctcgccgcccacagtggcagcctcaatccagacgttgagatcaacgcgctgctgggctttgtacctacgccaggcagcccggccgttctggtcccggcaaacttcgacggactgctgagcgcctttgcacgtgccctggagatctcaactgtcgcagcaggcaatacgccgcctgcgccccgtgatccctacgcaacctga

SEQ ID NO: 507447 - DNA, 1332 bp, Stenotrophomonas maltophilia
atgcaaggattggcaaaatacagtttttccgcgaatgatctgaccagtaaagaatcgcatgagctggctggagaaatttccggtctgatcaaccgttggctcaaccgcaagggggcatcgcttccactgcagagcagtggcaacttcaggtcgaaaacgcgagcgaacccggatgggagcttcgactaccaacagatagaacaggacggcaagcagctaaccagcctccgcctagacgagtttacctcggccgatcagctatttgaaacccaagttcaagttctgcgcagcgaagacaaggtggaggtctatgccagtttgtcagcgcaggcgatgggagccaccgtctctcctttggtgattcaggcaaagtgccctcgcatagtgagcgacatcatcgccgcatcccagtcgtggtcattcaacggacaaagcgtacctacggccctgacgcgggcttctggcgaagcggatgggaagaagctcgctgagcacatccagagcgcatcacgtgtccaccccatcgtcgtggcttccgacctggacgacgaggagcttcttccagagctgtgcgagaagctcgcctacgagctggaaggtctggcacacgtctactcaattgatgaagaggcttcatgggagctcagctcagaactgggcaagctcaactcgtgctatttgggtgcggtgcgactgtactggcccaagacggcaggtagcgagcgactgtactcgagcgtgtggacagcgtccaagctgctgccccaagacgaaacccaggaccttcaggcacgggaccgctttctcggtcagatccgacagagagtgttggccactgccgctgaggcattggtcgaacctgcatccatgagcgggttcaaaaagcagctaagtcgaagaaaactgctcgatgccgcgcaggaggagcgctcagctactgctcaaatcgaggagcttcatcgcaccagtgaagcgctggaagcaaagctagaggcagcacaggccaccatctcacgcctacacgggctgttgcaggaggcccagagcgacagggccgacgacccaacagcgggcgggcctacccctgaggacacgaagcccgagcccggcgagattcgcttctacaagaagacattgcgcaactcccgcaagggtgccgaccatgactcactggagcggataaaggactgcggccataacgcctggcaatcagccaacaaggctgacaaggccaaaaaaggcatcgcccggctggaaggaagctcggactggagccaggtccagcattgcggcacatgcactggcggtggcgtatggcgcgtcaagtggtag

SEQ ID NO: 507448 - DNA, 279 bp, Stenotrophomonas maltophilia
atgaccgctaccgctacaccgacctcagcgggcgatgtcttgcgcaccgctgccacccagcttcgcaatgatccggccgcagaaagcctggctatctccttggagaggctcgccaatgcgttgcgtcatccgaacggctacgtgatcaaggcatacggcgcaggcattcggcacgacttgtgcgccgccactgtggccgaagttcaacgtgcggcccttcgcgaaggcatgctgcccaacagctacacgatcgagcccttcttgctacttcgaccctga

SEQ ID NO: 507449 - DNA, 936 bp, Stenotrophomonas maltophilia
atgttcatcatgctggagtcgcgcacggacatcgctgccgcacagaactcgttgaagtctacgctggaggcccaatcagacaagacggtcaagcgcacgatcggctacccgggcggccacacgccggaccagtggttgagcgcattcggtaaccagtggttctggtcgggcaagacgagcaagcaggatccgtccgctcgacgcagtctcaactggttcggcttctactccgacgaggctggtgtagacatcacggtggagatcaacaccgttccagaagggcttaacaatcgcatcggcggcttcttcgcccgacactccgagacgggcgtggtctatctgttccactccgctcgagttggagggggccgaaaaggggtcggaaaggaagcttttctagcctggagtgcacacgaaccgcagcacgtcaccaccgcagacggcggaagccgggagggagtgcttgttgggcccgtcagtggcaagggcgcaagtcgctcgatcctgcgctatgtccaatcggtcgcggatttcaaacgagcggtgagggagggcgcgattgacgagcctgctttccaaaacaaacttctgaagttccgcgaggtggttgaggcactcaaggtatggcgtgaggagcaaggcctcctgcggggccggcggctcgtcaagagtgttctggtcgacctgggcgtggagaaagggcggagcaacaagctcgaagaggtgtacgaagtcaaaacctcgatcgaccgcagttgcgtgtatggcgggatcgggcagctaatggtccatgggaacggcgactgtcggcgtgtgctggtgttgccggcggacggtgagttgctcgctgacctgtcagcggcgctggatgctctgggcatcgagttggtgcgctaccggctgggagccgcaagcgtcaagttcggccatagctaa

SEQ ID NO: 507450 - DNA, 372 bp, Stenotrophomonas maltophilia
atgagcatcgttagcaccctgatcgacaaggctcggcagagggcaggaatcgcgtcagatagcgccttggcggcgcaatttggtgtgcaccggcaggcggtgtcgaagtggcgaaatggcgatgcctaccccgatgaagagcacatcgcagagatggccgtcatggccggagatgatcctgtgcaatggcttgtagccatcaaagcaatccgtgcggaaggtaaggctggcaaggcgtgggctgcgctcgccaaaaggctggcgacagctgcaatggtggtactgcttgccgttggcttcaccctcccccgcgacgtgcaggccatgccgcaggctggcaacgccctgcacgatatacattatgcgaaatga

SEQ ID NO: 507451 - DNA, 354 bp, Stenotrophomonas maltophilia
atgcatcgcctcaccctgctcgccgccctgctctgccccggcatcgtcaccgccaccggctgcaccctgcccgccacgctcgaccagcgccagaattccggccgctggaccctgcagccccaggccagaaaaccgacgccggttaaatggcgccaccaatggggtcagagcccgtgccgaccaacggtcggcacccaccatcagcagcaggttccaacagatcgcggccacctgtctaaggcggggtgggtccggttgcgggggcgtgagcgccatggatggcgcgaccgagcctccatggacggatttacggcgtcccgcgtaaccggacccaccccgccaccccacggatag

SEQ ID NO: 507452 - DNA, 381 bp, Stenotrophomonas maltophilia
atgccgtcgatgacgctgatgatctcggcgatcttcttcgacgaggcttcgatggccgacatggtggtgaccacctggccgaccacctcgccgccctgcgaagcgacgccatgcgcgccgatggcgagctggttggcctggcgggcgtgctcggcgttctggcgcacggtggaggtcagttcctccatcgaggcagcggtctcttccaggttggcggcctgctgctcggtacggcgcgacaggtcgctgttgcccgaggcgatctcgccggcggccgagctgatcgcgcggctggactgcttgatgcgggtgacgatttcactcagctgcgcggcggtggcgttggcgtcgtcgcgcatgcgggcgaacacgccctggtag

SEQ ID NO: 507453 - DNA, 540 bp, Stenotrophomonas maltophilia
atgcagttcaatgcgattggcatttttaatctggttgtttatcgtcccccgctcgctatcttcccccctcctacgcatcgcggttgctgccttaccctcgtgctgggtggcttcgcgagccagcacggcagcgaacccaatatggccatcagcttcggcggcatgcgcttgcttagccagactgcgatgatcgacacgttcagcgacctgtgctcgttccagatgcgaattgatacggtcagcaaccgcttcacgaagaatgcggatagcctccggacctgcgccaccacgcgcatcaaattcagcacatgcacgtggacccagcccatcaggaccgatctgacgcggtgtcatcaggagatgcacatggtgattgcgctcatctccgttcttatcgggctcatggactgcaacaagcaccgcaacctgatagcggtcaaccaacatctgacccaagtcgcacgcgagcgcacgacgctgcgcttcgttcagttctgcaggcagagcaacttcaagctctcgcgccgtcctggcgtttag

SEQ ID NO: 507454 - DNA, 240 bp, Stenotrophomonas maltophilia
atgggagtggatgacccaaacaccactgcgccccgcatcagcaggtatgagaggggccttcataagcctgatctggagaccattgagaagctcgcggagcttctggatctcccagccgcttacttccttgctgcctctgacgtggttgcggaggcaatcttggtgctgacacagcttgatgcccgaaaacagaaagaagcactggcgcttctaaaaagcctcgcccccgctagcaagtga

SEQ ID NO: 507455 - DNA, 426 bp, Stenotrophomonas maltophilia
gtgggcgccacagtcgagacgaaggaagctgtgggcacctatccctgcatggacaacaccatgaaccgacgactcacccttgcgctcatcgccaccacgttgagcctgctcagcgctggggcctttgcccagtacaccggcccgggcgccacccatgccgtcaccacggttgccgaggcgcgcgcccagcgtgacgatcagccggtggtgctgcggggcacgctggtggccaggatcggccacgagcgctaccgcttcaaggacgccaccggtgagatcgatgtggaaatcgacgacaaggatctgcccagccaccaggccgtcagcgcgaccaccgtggtggagctgcacggtgaggtggatacgcaccgcttcaagcccatcgacattgatgtggagtacgtcgccgtggtgcctgcgcattga

SEQ ID NO: 507456 - DNA, 744 bp, Stenotrophomonas maltophilia
atgtacagatgggtaagtggaatcgtcagctatcgcacgttctatatctggcgggcgcgctttcgctactacacccggaacctggatctgtggacgctgatgagcgggctatgcattgccggtctgctgctggtgctgtggtacctgtggcagatgctgggcgtaccgccgccgcgcgtgcaaccgaaagccgcggcgctgcgcatcgaaggcgtcacccgcgaggcgatccatcgcatcgtgctggtgcgtcacgctggcagcacgcggggggccgagttcaccacgccggaggacgtgcgggcgagtacgctgcgcacgatgcgggtacggcaggtgatggacagcgaggtggtgtggcgtctgaaggccgacatgctggcggacatcgctgactacatcaacgtcacaggcgggtgcttcccctacgactgccggcagattcgggatcggttggaccccgtgcgcaaggccgctgtggagaatgcgcagatcaacgcctcactggcgacgatcctggacgtgccgctggaccagatgccgctcttgaagggcggcgagcgtgagcgggtgaagagtgggtggtcggatacgttcaacgacgtctactttcaggccggcttgctgcgggacctgcaggccatgcatgcgcatatgatgcgggagtatccacagcgggcccccgcgccctggttgccacagttgctcagcgacccgctgcgcgatacccgtttcgtctggtag

SEQ ID NO: 507457 - DNA, 2391 bp, Stenotrophomonas maltophilia
atgaataagcaggcgctcagcgaacgtgacatctgcaccaagttcatcacgccagcgctagaaggggctggatgggacgtcctgacccaggtacgcgaagagtttctgctgaccaaggggcgcattatcgtgcgcggcaaactgcacacacgtggtcagcacaagcgcgccgactacgtgctgttccacaagcccaacctgcccattgccgtcatcgaagccaaggacaacaagcatgccatcggctcgggtatgcaacaggccctcggctatgccgaaatgctgcaagtgcctttcgtattcagcagcaatggagatggcttcctgttccacaacaagatcgccaaggacggtgtgatcgagcgcgaactgagcctggatgagttccccagtgccgatacgctgtggcaatggtgggcagagcatcaagggctgagcacacagcaacaggccctggtagcccaggactactacagcgacggtagcaacaagacgccccgttactaccaattgctcgccatcaacaagaccatcgaggcgattgccaaagagcagaagcgcattctgctggtgatggccacgggcacaggcaagacctataccgccttccagatcatctggcggttgtggaagtcgcgtgccaagaaacgcatcctgttcctggctgaccgcaacatcctggtcgatcagaccatgaccaacgacttcaagccgttcggcgcagcgatgacaaagatccagaagcggcaggccaacaagtcgtatgagatctacctgtcgctttaccaggccgttaccggtaacgaagaagaacggaacatctacaagcagttcagcccggaattcttcgatctgatcgtgatcgacgaatgccaccgaggcagcgccgccgaagattcggcctggcgcgagatcctgacgtatttccattccgccacacagattggcctgaccgctacgcccaaggaaaccaaggacgtatccaacatcgactacttcggtgagcccatctatacctactcgctacgccagggcatcgacgatggctttctcgcgccctacaaggtggtgcgcatcgacctggacaaagacctgaccggctggcgtcccgacaagggcatgctcgacaagcacggcaacgagatcgaagaccgaatctataaccagcgtgattttgacaagacgcttgtgctggaacagcgcacgcacgtggtggcgcgcaagatcagcgaatacctgaaagccagcaaccgcttcgacaagaccatcgtcttctgcgacaacatcgaccatgccgaacgcatgcgccaggcgctggtcaacgaaaacgccgaccttgtggcgcagaaccaccgctatgtcgtgcgcatcaccggcgacaacgaagaaggcaagatggagttggacaacttcatcttcccggaaagcaaataccccgtcatcgcgaccacttctaagctgatgaccacgggcgtcgatgctcagacctgcaagctcatcgtgctggatcagcgcatccagtcgatgaccgaattcaagcagatcatcggtcgcggaacgcgtatcaacgaggacttcgacaagtactggttcaccatccttgatttcaagaaggcgaccgagctgttcgccgatccggctttcgatggcgatcccgtgcagatttatgagccaggcccaggcgagtcaccacttcctccagatgaagaagatggggaggcgtcgcctgacgatgaattcacctatcccacgccggatgacaaccccacgtaccccgggggcgtagccgaaccgctgccaggtgaggaaggcagcaacgtgcgccgttacgttgtcgccaacgtcgaggtcaaggtggtggccgagcgggtgcagtatttcgacgccaacggcaaactgatcaccgagtccctgaaggattacacccgcaatgccctggccaaggagttcgcgtcgctcgacgatttcctgcgccattggagcaaggccgagaagaagcaggccatcatcgatgagctggctcatcagggcatcttcttcgaggctttggccgaggaggtagacaagcaatcaggcaaggatttcgaccctttcgatctgctatgccacgtggcctgggatcaaccccctctcacgcgcaaggagcgggctgagcaggtcaagaagcgccattacttcgccaagtacggcgagcaagcgcagaaggtactcgaagccctgctcgacaagtatgccgacgaaggcgtggccgccatcgaggaaacgcagatcctcgccatcgcccccttcaaccgcctgggcacaccgatcgaactggtgcgtgcctttggtggcaagacccaataccagcaggccgttggcgagctcgagcgtgagctctaccgcgcctga

SEQ ID NO: 507458 - DNA, 1479 bp, Stenotrophomonas maltophilia
atgtcacttgcaactctcatcaaagctatccaggacatcatgcgcaaggatgtcggcgtcgatggcgatgcccagcgcatcagccagatctgctggttgttgttcctgaagatctttgacgacaaggaacaggagtgggaactcacccagtccagctaccgctcaccgctacaaagccgctttcgctggagcaactgggccaaggatccggaaggtatgaccggtgaagagctgatcgacttcgtcaacaacgatctcttcccgtccttgaaacagcttgccaccaaggcgggcgtgtccgcgcaaggccgggtgatcggctcggtgttcgaggatgcctacaactacatgaagtccggcacgctgctgcgccaggtgatcaacaccatcgaagaagacgtggatttcaactcgtccagcgaccggcacttgttcaacgacatctacgagaaaatcctcgccgacctgcagtcggctggcaacgcgggcgagtactacaccccgcgtgcggtcacgcagttcatggtcgatatcctcgacccgaaactcggcgaaagcatcctcgacccggcctgcggcacgggcggcttcctgacctgcgccatcgaacacctcaagaagcaggtcaagacgccagatgacaaccggctgctgcaagagaacatccatggcgtcgagaagaaacccctgccgcacatgctggccatgaccaacatgatgctgcacggcatcgacgtgcctacccggatccgccacgacaacacgctctctcgccccttcaaggactatggcccgcgcgaccgggtggacatcatcattaccaacccacccttcggtggcatggaagaggatggcatcgagaagaatttcctcgccaagcatcaaacccgcgagaccgccgatctgttcatggcgttgatcatgcacctgctcaggcacgacacgggccgtgccgccgtggtgctgccggatggcttcctgttcggcgagggggtgaaaaccacgctcaagcgcgaactgctggaagagttcaacctgcacaccgtcgtgcgcttgcccaagggcgtgttcgccccttacaccagcatcgctaccaacatcctgttcttcgagaagggcggtcccacaaaggacgtatggttcttcgagcacccctacccggcaggctacaagagctattcccgctccaagccgttgacgattgaggagttcgaccttgagaagtcctggtggggcggcccgcagcgtaagggacgcaagattaccgagcatgcctggaaggtacctgccaaggatctggctgctcgcagctacaacctggcctgcaagaacccgcatgaggtggccgtcgaactggtggatccggacgagctgatggccgaataccaggacatcacccgccagttgcacgctgcccagcaagcgctgaaaaccgaactgctggccgcgctcaaggccaccagcggagaggcggaatga

SEQ ID NO: 507459 - DNA, 1041 bp, Stenotrophomonas maltophilia
atgagcgacaagcccgtgtctctcgtgtcggccccggaaggctacgccaactggttgggcgagctgaagaaccgcatccacagtgcccagcagcgggccgcgctggccgttaaccgcgagctggtacatctctactggcagatcggtcgtgacatcctgcaacggcaggccgagcagggctggggagccaaggtcatcgagcggcttgcgcacgacctcaggacagcctttcccgagatgaagggcttttcccgcgccaacctgatgtacatgcgttccttcgccgacgcctggccggacgcggcagttgtccaacaggctgttggacaattgccctggggccacaacctggtgttgctggccagactgaagcaacccgaacagcgcctggcctatgcccagcgcgccgtggaacagggctggtcacgcgccacattggaaattcatatcgaatcccatttgctggagcgggaaggccaggcgatcaccaacttcgccgagcgtctccccgcgcagggaaccgatctggcccggcaagtcctcaaagatccctacctgttcgacttcctgcacgttggccaggaagcgaacgaacgggatatcgagtcagcgctgatcaaacacataacccagttcttgctggagctgggtgcgggcttcgctttcgtcggccgccaggttcatctggaagtaggcggtgacgacttctttatcgacctgttgttctaccacctaaagctgcgctgctacgtggtcatcgagctgaaagccgagaagttcaaaccgcagcaccttggccagttgagcttttacctcaccgccgtggatatgcaggtaaaggccgaacaggacaaccccaccatcggcttattgctgtgcaagagcaagaacaccgtggtggccgaatacgcattgcgcgacaagacccagcctataggcgtggcggaataccaattgattgaatcccttcctgaagaactgaaaaccagcctgcccagcatcgaacagatcgaacgtgaactgggaggcgatcatgaataa

SEQ ID NO: 507460 - DNA, 1692 bp, Stenotrophomonas maltophilia
ttggcgtatccgattgctattcctcctatggaagagcaagcccgtatcgttaataaatttgatgaactgattgcacgctgtgacgaactagaaaggatccgcaatgcacagcaggaaaaacgcctgatcgtccataacgcggccatcaagcaactgctgaacatcgccgaacccgaccagcaccagcgcgctctggccttcctcgccgaaaacttcggcgagctctacaccgtcaaggaaaacgtcgccgaactccgcaaggccatcctgcaactggcggtgatgggcaaactcgtcccgcaagactcggacgagcagcccgccagcgaattgttgaaagagatcgaggttgagaaacagcgtctggtgaaggaaggtaagatcaaaaagcccaagcctttgccaccagtgacagaggaagaaaaaccgtatacgttgccgcgggggtgggagtgggtgcgtgttatcgatatagttgatgttggaactggttcaactcctgctacaacaaatagagattattatggtggggacgtgccctggtacactagctctgcaacgaataagtcgtttgctggcaagccagaaacctttattacagaaaaggcaataaaagaaaccaactgcaaggtttttccttcgggctctttaattattgcactatatggtcaaggaaaaacaaggggccaaataagcgaattgacaattgctggggccacaaaccaggcgattgccgccatggtattttttgactcttccatcggcgtgaagaagtacctgaagtatttctttataaagatctatgaggaaatacgaaaaatggcggaaggggctgcgcagcctaatctgaatgttcgtaaggtgaaggaaacattagtcccactcccgccactttccgaacagcaccgcatcgttgagaaaatagacgcaattatggctctatgtgactcgctagagcagcagatcgacgccaacaccagcaagcagacagaattgctgagtgctctggttcgtgcgcaatcgcaaggtggcgcagttgaagatacccagcgatcatcacgttcaacagcccaagttattgacctcgccacctaccgcgcgtgcatcggctgctatacgatcaacaagctcgccactgcccaatacttcggtcgcactgccgccgccaaggtaatgtacttggcgcaagcgcacgtcggcttggaactgaatctgaaacccgaacgtgaagctgctgggccactggatacctggatttatgatttcgagcggcaaggtcaagacaagcgctggttcgaagtcaatgaaaagaccttggctaacggcgggaaaaagacggaataccgctgtttgtcggcgttgtcggagccagcagcgaaagccgaagcactgatgtcgcccggccagaagactgaatttgaccgtctgatctacgccctggcagacaagaagaccgaagaagtcgagatcatcgccacacttttcgcggtatggaacgattttctgatcgatggtgttcaaccgacggatgcgcagatcatctccgatgttcgcgaaaactggcacgagcgcaaagcacgcttcacaccggccgaacttgggcgatggcttgattggctacgcagagagaacatcattcctctcggactgccaccgagaaccgtgcagcaatcaagattgggctttgattaa

SEQ ID NO: 507461 - DNA, 3033 bp, Stenotrophomonas maltophilia
atgaccaacctgcaagatctgggcctcgcctatcgcaaggcgaaagttgatctctattattcgtcccatgcctctctggatgatattgcaaactatgaagaaaatttgcattccaacctttccttgctgcaggaaaagatcaatggcgaagacgaagcctgggtgacatcaccggaattcataggcacttggacactggtcaccaagtccgtcgagatggattgctgggcgaagtacaagaaagagaatggcggtggattgattttctcctcgcccattgatgagtggcagcatgcgttgaaagccttggctgagaaggaagtgccagaaaagccaaaagccgaattccgaataatggcccgatgcagcctggactttcatgtgctctccaccttatggatgctggaagtcgggcagttattcgatgcaagattgagcgagtgcgcatatggcaaccgcttgcgccgcactcaagatggaaaaggcatcaataagctgtcgcttggttcgttccagccttatctgaagccctttcgcgactggcgtgacaagggtattgccgccatgcgtgccgcgctggatgccgacaaaaagattgtggcattaactgcggatgtcagctctttctatcacgagctgaatcctggcttcatgttgaatccaagttttagaaaggaaatacttggcataaagctgaataggagaaagaaaaaactacaccgcttgttcattcatgcattgcaggcctgggcagcagcaaccccgttgaagaaaggcttacccgtggggctgccggcatcggctattgtcgccaacatggcgctggtcgagctggatcgctgcatcgaacatcaggttgctcccatctattacgggcgatacgtcgatgacattttgctagtcatggagaacggggctggcttcgattcgacgctggatttatgggaatggctgtttggccggtcaaacgaaatgctgggctgggtggatcaaagtaaaaagcaagttcgcttcaggcccgcttaccttagcaaaggtaggagtaaaagccgggtgcgttttgccaatggcaagaacaaggtattcattctggccggtgagccgggcaagaccttggcggacgccattgctcatcagatttacgaacgcgccagcgagtggcgagccatgccgcggttgcctcgatccgctacgcatgttggcaccgatctgttggccgccacacaaagcgacggcgaggccgccgacaacctgcgcaatgcggatgcgctgaccatgcgtcgggcaggcttcgccataaaacttcgcgacttcgaagcctatgaacgcgatcttttgcccgaagcctgggcagcacatcgtcgcgcgttcttccgcgccttcacccagcacgtgttggtgttaccgcagtttttcgacttggctgtctatctgccccgagtcattcgcctcgccacggcctgtgaagactttgccgatctacgccgaattatcgaagcgctgcaaagactctgccagcaggtacaggagcaatgcgacatcagtgtcaaagcgtggcatgagaaaaagagtaagccgaacgctacggagatgctggatcgctggaaagggcagcttttttccagtgttcgggaaagcataacggccgcatttcctccccgcttgtccaaagcaggcaaacaggcgtggaagacctatatggccgactgtcatcccgtcattgaccttgatgcttttctgtcctggccgttatccgtaaaaagctttcaagcacagcaggcccgcctgttctcgcttgaccttgcacatctgccattccgcttcatcgggctgccgaaggaaatggtggcgcagcgcggtatccccgccaaaaagaccattgtaggctgcgacaaagctgccgagttgttgtctagcgctgtattcgagggcgcgcagacacttacccagtggatcggcttcaagcaattgccgcaggggctgccgttcgcgactcggcccttcaatctgccggagctatttattcttaatcgccatgcttatttagaggcgacgcaggacgatatgcgggcggtagtattgtctgtgcgtggctttgagttgggagagaaaacgcctctcttcgataaaaacaacgtactgcaagtaccagatggtgtaactccaaggaaatgcagtattgccgtatccagttggcaaacaagtctggatagctggacagctagtgtgatgcgcatgccggatcccgacgccgaacgctatgtgcgcctttgtcgcctgctggatggcgtaatcgcccagcccagggacagccgctatctgatcttgccggaattggcactgcccgcgcactggttcattcgtatcgctcgaaagctgcaaggccgcggaatttcgctagttacgggcatcgaatatctgcacgccagcaagtcgcgggtccgcaatcaggtttgggcagcgctctcccatgacggtctgggctttccctcgcttatgatctaccgtcaggacaagcagcggcccgccctccatgaagagcaagaattgcagcggctggccggattggagatgaagccggacaaggcctggaaaacaccgcccatcattcagcacggcgactttcgcttcaccatgttgatctgcagcgaactgaccaacattcgctatcgcgctgatctgcgtggcaaagtggatgcgctgttcgttccggaatggaatccagataccgaaaccttcaatgcattggttgagtccgcagcattggatatccatgcctacatcatccaatgcaatgataggcagtacggcgacagccgcatccgcgccccttacaaggacagttggaagcgtgatgtgctgcgggtcaaaggcggggtcaccgattactgcgtgattggcgaaatcgatgtgcaagcgttgcgtcaattccaaagcagccaccgctcaccagcaaaaccattcaagccggtgccggatgggttcaatgatgcgatggatcatcggcgaaagatattgcctttgggggagtga

SEQ ID NO: 507462 - DNA, 507 bp, Stenotrophomonas maltophilia
gtgagtgcatcgcaggtgatgagcgcgccgccgagcgcgggcagcgtgctgcgaactcagctgcccggtgcggatttcgtgcatgcgtgccatgcgaccacccgtcgtgatgggcgctcggccttgcaggcctatcgcgacatggccgcgagcattcccggttggttcgatggtctgatggcgctgcgcaaccaaggcatgcgcctgcttgggatgaagcaccttggctcattgcgtgcggtgcaggacaccgacgatccggctgccggccagcggctgggcatcttcaccctgcagtcgctggatgacgatgccatcgtgctggaagacgatgatcgccacctgcgcgtacagctggccctgcaatggcagggcgatgcgctggaagtggtgacggtggtgcatacgcataacgcattcgggcgcctctacatgctgccggtcgcgcccgtgcacaggttgatcgtgccgcatctgctgcagaagcaggtgcaggcgtaccgatga

SEQ ID NO: 507463 - DNA, 282 bp, Stenotrophomonas maltophilia
atgggtgagggcgctttgcttgcgaagcactgcttcgcaagcgcccgaacgcacagccgccagcggctgggccgggccccggagggggacttgcagcgtcccccgcaaccggacccacctcgccatcccacggatagccagctgttgctgttgctgttgcctctgcaggtgcagggcgcagccctgcaaaaagaaaactccctacctcacggccactgcatctcgcccttggccaccttcgcactcagttccagcgacgccacgcccgccagcttcggatag

SEQ ID NO: 507464 - DNA, 231 bp, Stenotrophomonas maltophilia
atgcgaagtgcaacgcgctgcagccttctgttcggcttgcttgttgtctgcacaagtgtggaggcgggtgaggttccagcggtatcgggactgctggccacgcccgtcgagcaactcaggaaggacgaactgcaatacctgcagcgaaccgttgctgatttcgggcagctgcagcgctatcgcgatgcaacgcacagttgcctgccgcagtacccgggcaggctcgcgtag

SEQ ID NO: 507465 - DNA, 1605 bp, Stenotrophomonas maltophilia
  misc_feature (1553)..(1562): n is a, c, g, or t
atgagcgccgtcatccctgtttccgcacctgacgacgcactggatgtgctgaccctgcttgcgctgaagatcgcgccgcgacagttcgacctgagctatcggttctccaacatcagcatccgtgaccagatcgtgcgggcacagatgctgatccagcagcttcacgccctgggtgcggtcggcgccgatgcagtgaagacagatcccggcccgtccttcgacctgctcatctgcggtgccggggcagcgggcctggccgcagcgcttgaggccgaccgtctcaagttgcgcttcgttctcatggacaccgactcacaggctggcgtgggcggagtactgcgttcacccgccgccagatatgtcagtgcggccatgtacgaatggccgcacagcaatcatgccgaccaccgttacccgctgcggtcggccgcgtttggcgctgcgagtgtggggctgcagcttcatatgactaagccgttgccggcggcagtggtgggtggcgtgctcgatgctgcctacgcaaccgaggtggctggctggatccagcatgcggcgaactggggttcgcaatctcacatccggagtgattcctgtttcatcaggggagcaacgcttgagcagcggtccaaggaacgtttgaagcagatgacaatcgggccggcgagtgttcatgcgattccactgaaagcgcgcccgttgcctgccctgtacatcaccgccgcatcgaacaccgaggcgcaccacttccgcttcgtgatttacgccatgggctacgcgaaagagaagaaccagtatgccgagggcctggagtgcccatcggcctactcgaacacgggattctgggactgcgacgaggtcatgaagcctcgtctggggttcaagcctcccccgggggacaagcattggcgtccacgtgtggccatcctgggttccggcgacggtgctctgcaggatgcactacgctgcctgttgaaggttgctcatccgcttgatgcttggaaccgtgtcattgcgaagtcgaaggtggccgggtccgtcgagatcagccaggcattgcgcgagctggcaacggcggacatgcacgcgacgatggcagccacctggagttcctcgccaacgatctacaaacgtctggacaggcgctttgcccttgtcgccaggaaacttctgaattcagggaaggtcggttcggctgtgagcaaggccgtactgaagatgctgcgcaaggatgttgacgaggtgatgctggtcacccattcggggcactacagcaaggcatacgcgctgaacaggttcctgctgatcctgctccatcgcatactgaggcgcgaagccgccaacggccggccccgcttgattctcaggtctgggccggcgacggatttcagtgtcaatggcacctccccgggtcagcgaggcggtaagctgcagttcgcctccggccccgagacgtttgatctgatcatcgtccggggtggattgaagacggataccgaaaatgcgtttccccaccgggtcggcctgtccggccgggatacagggcgggcggggcnnnnnnnnnncctcgggcgtgttcccctgccgatccgaccgccactactttga

SEQ ID NO: 507466 - DNA, 819 bp, Stenotrophomonas maltophilia
atgtaccgttttgatccaaacgaaaatccgtttgtggaagacctgatgcacctgctgggtgtgcgggggcgccagttcccgggacgatggcacctttcaagccggttttcaccaggggagtttcgagagcttgcgcgtgtctacttgtcgaggctctacggcgtaagaccgggcgggtacctcgactattcggaacccggacccgggagacgggtgcgctgcagtgtgcgggtggtgctggatggcgaggatcatctgttgcggcgggtgctcggctcgatacgcggtcaacggacgtctggcggtgcgccggacgaaacgcggatggtcctggtccatgtgggcttcaacggcgtgaccgagctcttcagcgggcggcggcaggtacttggccgcagcgtgcgcgcgctttggggcaacagcacgtccactctctatgatattcgcgagccgcgtaggttgaccctgtacgactgggtgaacggcgaattgaatccaatcttggatgaagaagggcgcattcctccgctcgatggccctgcggcgaggcgcgcctattgggacgatgccgacgatcaggtgggcggcgccttgtcgccctattcgtatgatcctccgcgtatcaacgcagatggccagcgcgaccgcggagattccggtggcggttccggaggcgggggagacggtgaaggaccagatggccctgatgatcgcgatggaccagggccggggcgtggtggcgtgatggaagtgcttgatcacccggttctgttttcagccgatccgcagttgttggccgatatcctggagaacctgtga

SEQ ID NO: 507467 - DNA, 1020 bp, Stenotrophomonas maltophilia
atgaagatccgttcgaacgacacgttgatgcggcagtgggagatgctgcgcatgattccgcgcgctccgcgcaggatatccgtcaggcagatactggagaatctggagccgctgggcttcaggaccagcagtcgcaccattgaacgggacctccagaacctttccacgcggttccagctcattgccgacgacagtgaaaagccctttggctggagttggtccagggaagcgaacttcgccttcacgcccaggctgtcgatttcgcagagcgttgcactgctgctttcgcatgcacatctgcgtcagctgctcccggcaacggccatgaatgagctgatgcccgtgttcgacatggcgcgggcggaagtctcgacgtcgggctggggggagtgggccagcaggaccgcgatcctgcccatgggcccgaacctgctcgcccccgaggtggaaacggccgtacaggtggatgtccacagggcattggcatcccgacgctgcctgtcaggctggtaccgcagcaaaggcaaggacgagccgaaggagatgatcatgcatcctctggggctgctgatgcgcggttctgcgcagtaccttgtctgcatgctgcgggactatacggacatccgccacctggcgttgcatcgcctgagtggaacccgggtgctggagatggaggcaaggagcctgccggacttcgacttccagcgctatgcgacgaccaccgccaccgcgttccaggggcaaggacgcatcgtgctggaggcgcgcttccgggcgcaggctgcggagcatctcagggagacgcccctgtccgaagatcagacgatcagtgatctgggtgatggatggatccggctgcgcgctacggtggaggacgaccagaccttgcgttggtggctgatgggcttcgggagcaacgtacgggtcgattccccaacgcacctgtgcgacgccatcggcgcggagttggctcaggcagcaagctactacgcccgcgatctggaggagaccgtgggctga

SEQ ID NO: 507468 - DNA, 1026 bp, Stenotrophomonas maltophilia
atgattccaatcgtagtcggggccgcgatggcggccagcgcgctgtatggcatctacaagggcggcaaggccgtggtcgatcacaaggatgccggcatcgccaacgccgatgcaaaagggctgatcgagaagggctcgtcgttgctggagacgcagcgcaagcgtaccaacacggtgcttgaggactatggtgcacgcaaactgcgtgctttcaatggggggatcgcagacttcatcgatgcatttggccagctcaagaacgttgaggggatcggctcacccgaactggacaagctggtgcagggcgatttcaccacggcgtcgctggaaggcctgaagcgggactaccagttgctgatggactcgggcctgggcctgggcgccgggctgggaagtggcgccgcgttggcatttggtgcgtacaacgggacgatgctgctggccagtgccagcaccggcactgccatttcgaccctcagcggtgttgcagcaaccaacgcaacgctggcgtggctgggcggcggttcgttggctgcgggcggattcggaatggctggcggcaccctggtgctgggtggcctggttgccggtccggcgctggcgatctttggctacgtggtgggcagcaaggctgaagccgcgctggccgatgcacgccgcaacaaagaggttgctcgaacccattacgacgaggccgtgttggccgccgaacagttggcagcggtcgaggccgttacaacgctcgccaacaggacgttctccaagctgtgcatgtcgctgcgtcgtggtgtagccgatatccgtgatgtcatccgggagcacggctgcgatttcagtagtttcccccagcaggcgcgggagcgggttttccgtgccgtgaagattgcccagctgatcaaggtgatgatcgataccccgatcctggatgacgcaggagcgctggtgctttcgaccgagaagaccgtggccgatgtggatgcggcgatggtggtgatgaagggcgaggagcccgccaaggcggcttga

SEQ ID NO: 507469 - DNA, 555 bp, Stenotrophomonas maltophilia
atgttcctttatctgcttccagacaccgagcaggcaaccttcctgaaggttgcgcgcctgctgagcgtgagtgacaacccgatgctgtgggacggaaagacccacgaagaagtgactggcgataccaacctgagcaaggtttcgctggatgaatccgaacacgaacgtgcgatcttcgacagcttttcccgtgagtgcggcaaggtatatcggtccgacggggtgacgaaggaactgttgacgcgcctgcagacgatgccgctggtgcgccagagcgacccggtggagcgggcgcgggtggcgtgcgaggtgctcgactcgctgatcgacaaggccatggtcgaagccgcgcagccggccgtaccgaaggtgatgctgtatgagttgatgctgcttgcactggccgacggtgaagtgtcgagtgtcgaggaagcacagctgcgtcgcctggccgatatcttcggtattgacgactacatctacaacgacctgcttgagcgcgcggaaagtatcaatcgcgaggccagccgtaccgttgccatcattcttgagtaa

SEQ ID NO: 507470 - DNA, 1551 bp, Stenotrophomonas maltophilia
atggaacccaatgcaaatgcagatgacagtgcccgcgaaacgtcgggcaggcagatcctggacgcagcgacgacgatgtcaacgctggagactgtccaacgctatggcaatgctaatgccgaatacatcaaagggtataccggaagagacgaactgaccggtcagacatttacccatggcctgaagaagatctccgggtacaagcttgatccggtacgtccggaaaacagcattgcccagcaggccggctatgcggctgaggtcgcagcgaccattcgtgacaatgccgaggccatcatcagtgggtcacccgttcgcacggtgcgcagtgatgaccatccccagtaccggcggaacgatgatcgcgttgaccgggtaagggtgctggatggccagatcattgaaggcagccagtcacagatgaagttcgtgggcaaccgtgaccggctccttgagaagatcgctgcgcccgatggagagttctcgcgctatcgtgggctgaagttggagctgccctcggagcagtacgtcgatgccgaggcatattgccgggcgcaggcagcagatctgcgccgtcaggcggacgtggtcgacgcgaggggcaagcctgaggtcgcactgcatcttcgtgcgaaggcagacaactatgagcagctggccggcaaccttctggatacggggctgaccagtgacgatgcgaagttctatcgtacccatccgcggatggcgacggtgcgcgatatcgcgcataccagccacagggcaggtcttgaaggcgcgcgcggggcgttcatggttggcgcggcgatcagcatggcgaccaatgcctatgcggtggcaaccgagcgcagggggatgattgatgcgggccgcgcagtcctggtggatggtgccgtctctgccggcatgggctacgcaacggctgcgtccggggccgcattgaccgcagtgatgcagcagtcaggccgacagagcctgcaggtcctttcccgtacagccgctccggccatggtggtcgacgtctgcgtgaccatgaccggctgcatacgccgctacgccaggggtgagatcgacggcgtccagttcctggatgagatcggtgagaagggttccggcatgatggcttcggccatgatggcggcattgggccagatcgcgattccggtcccggtggttggcgccgccatcggcgggatgattggctgcacgctttcatcgatcttctatcgggaaacgttggaggcggcccggagtgcagatctggctgccgagaggctggccttggcaatcgagctcaataaggctgcccgtgaagaaattctggcgcagcgcttggcgctggcgcagttcattgcggccgagcttccagtgctgaacgacgagacggcccagttgctgtgtgcactcgataccacccagccggagattgacgccgatggattcgcggctgcaatcaaccgctttgcccttctgctgggcagccgcctgcagtttgcttcgctgcaggagtttgatctgttcatgacgggtgacgagccgcttcggctttga

SEQ ID NO: 507471 - DNA, 1083 bp, Stenotrophomonas maltophilia
atgaacaagcgtcattccgagctcgtgatcttcattgacaatgtcgtcgcagaacttcgcccggtgctggcctggatcgagcgccatccggtccttattgcgtcgattgccgtacttctgcccagcgcaggcatcctctactacgccgtcagggaagagctgcctctcagcctgctttcgtccgatgccgtttccgcactccccatgatgcttgcggtgaccgggctgcgcgtccttgccctggccgtcatgttcctttcccccatcgtactgtcccccaatcggttctcgtatatcccaggccacggaatcaaactgctgccggacgctccggcgagccggaacaggacgctctggcgctggagccttgcgctgatcactccgggcgtactgcatttcagcggaatctatgtcgcatccttctacaccgagatttcagatgcagcactgtggttcagtacgattggctgcctgctgatcttcgttctcctttcccgctgggcgaagcccgatgacaggaagcagaaatggctttccttggatagctacttcctgctgggcatggggctcatgcaactgctgtccatcaacacgatcatgcggctcatgctcggcctggtctccagggaaagtgatctggtgattggcatgtgcctgctcacggccgcagtagcattgggcatattccagtccatcgtcatcagagtggtcgatgaactgagtggacgatacggcgttggtgtacttgcactctcgttcgcctcgatcatggtcaccgtggccatgctcttccctccgaccggtgcatacctggcctcgcaggttgtcaatccgccaagcggaaaatcccgcggctgcatgacgctggatctgcgatcgcgtgacagcgcatcccgcaagctcctgatcggtgatggtaccgctacccatccggtcaacgttgtctactcgaccagttccgtgctgcttgtacgcttgaaggatgacgacagcaggaccatccatcgcatccccatggaccaggttaccgagttcaacccgtgcccgcgggaaacagacaccgagaagtcacccgggacataa

SEQ ID NO: 507472 - DNA, 1149 bp, Stenotrophomonas maltophilia
atgttccgtactcctctcttccgctcggccgcgctggccgttgccgtttcgctcagcctcggcgtgcccttcgcattcgccgacaacgcgcccgccgccagtgccaccaccgccgctgtgcagcgccaggccgtggccaaaggcctgtacgagctggcctacagcccgaagcagaacgccgtgttcgtggcctcgtccggcggcttcggcgatgacgccggcccggcccaggtgctgcgcctgaacccggccacgctggccgtggaaacccgcatcccgctggagcgcaaggcgttcggtgtggtgctggatgacgcccacaaccgcctgtacgtgggcaacaccgtggacctgtcggtgaccgtggtcgacaccgcgcagaacaaggccgtcggcaccatccagctgatggagaagaagaccggcaaggacggcaaggccgcctacacccacgacctgcgcgagctggtggtcgacagcgccgccaaccgcctgtacgtgaccggccacagcagccagccggacgtgagcagcgtgctgttcgtgatcgataccaccacgctgaaggtgatcaacaccatcgacggcctgggcaatgccaaggcgccgggtctggcgctggatgcggccaacaagcgcgtctacaccagcaacctgctggccgacctggtggtggtgggcaccgagtcgaacaaggtggtggcgcagcacaggatcgctgccgagcagccgatgaacatcgcgctggacccggccggcaagcgcctgttcgtgaccgaccagggctcggaattcctgcgtggctaccaggccaagagcagcggcctggtcagcaagcatccgggccagcgcgtgctggtgctggaccgcagtaccggcaaggaactggccagcatcccgaccgatgccggcccgctgggcatcctgctggatgcaccgcgcaagcgcctgtacgtgaccaaccgcgaagccggtacggtgaccgcgtacaacagtgacagctaccagaaggtggcgacctacaaggtgccgacccacccgaacagcctggcgctggatgctaagaacaacgtgttgttcgtcagcatcaagaacggcgagaaggacgacaagggcgctgacgagagtgtggcgcggattcagttgtaa

SEQ ID NO: 507473 - DNA, 786 bp, Stenotrophomonas maltophilia
atgaacattgcccgttatccggtcgcatccaactacgtgccgcaagccgcacactgctgcaacaaaggaaagcacctagatatattcattctagacatggaagaaatcatgaagaacgaaaagccatccaaggcacctcgccgcactcgacccacaggtgagctcgagaaggaactcggcgatcaaattatgcttctgaatctggcatgcaattcatatgatcaggggatcgaagtcgcagccaaatacatctctgtttcacttcgattgctactgaaccaccacggccgccagcagtcgctgctcgaacagttgggacatcgaaacggaagattctacagctcatgcgcgccgcttaacccgagaaatcttctggctgaacacggacttgttgtactcagggtctctgccgatggaggctcatacattcccagaattgcagcaggcttctcgcccaacggcccagtaagtgtttcctttgagacttggtggaacacacccgtcttgaaagactcaaaaggaagaaccttcaatcggagagagctggtagagaaggtagccaataccgacggaggagctcatgttgatgctcagctcgacgaggcttacatggagctttccagagacaactctcttggctggactttccaaaatggcgacattgccagcccccttgctgggcggcctgaattggcatgtatgaggcaaattgcacacgagcttttgatcacgcttgagaagcgcttccctcagctattcgaaaaaaccaaagaccaagcatcatag

SEQ ID NO: 507474 - DNA, 309 bp, Stenotrophomonas maltophilia
ttgaacactcgcctgaaattgagcttcaccctgaccgcggtcctgtgcggcgcgatgcttgcgaccacggcctggtgcaaggacgaccctgcggccggtgcgaagctctacagcgcaaactgcacggcctgccacggtgccgatcgcgctggcatgccgggcgcgtttcccgcgctcaccgacatcagcaaacgactgcagccggcgcagatcaaggacaagatcaggaagggcggcggattgatgccgcccttcccgcagctttcgcaacaggaaatcgatgacatcgccagctacctggcgaaatag

SEQ ID NO: 507475 - DNA, 327 bp, Stenotrophomonas maltophilia
atgaatgcactgaccctcccagagcccattgccgcgtacttcgcggccgagcatgaccccgaagccctcgggcgttgcttcaccacccaggcgatcctcaaggacgacgggcacacgctcaccggcgtcaacgcgatcaaggccttcctggccgaggcatcggccaagtaccgtgctaccagcgtgccatgcgccatcgcgcggcaggaacactgtcacgttgtccgcgccactgtcagcggcaattttccaggcagcccgatcctgctgacctaccgtttcgaactgcaacgaggcctgattgcagcgctggagatcactgcatga

SEQ ID NO: 507476 - DNA, 549 bp, Stenotrophomonas maltophilia
atgatcacgtccacgaccgccaccgccgcctccgacggggcgccgcgcaccgttgccgaggccctcggccagatcgtctggctgctttcacagtcgccgctgcaccgtgagatgcagttgaaggacctcgaatggtcattcatgccgccgctgctgaaggagcagttccgggtgttccgtttcggcacactaccgccgctgccgggcatgcaggaagccggtgcggccttcgccggggtgacccagcaggcactggaacagttgccgcttggcgttgcaatctgggccagtctttcagaggaggccgagcgcaagctggaagtcggcgagcggctggaactggacgactggaacagcggcgatcgcctgtggctgatcgagttcatcacccccttcgcccagcccggcaacggcctggccgaggccatgctgggcgatctgctgaccgggccgttcgcggggcgcagcctgtccatgcaccggaccgatccggccaccggccggcgtgacaaggtgaccctgggcggcgtgccgtcgcaggcggcctga

SEQ ID NO: 507477 - DNA, 12537 bp, Stenotrophomonas maltophilia
atggctgaattcaattcgcagttgaagtcgattctcgatattctcagggcgcgaggtggcgaatcgctgcgcgccgcgaatctgattcagagagcactggagggctccccgcagctcatcctgcagttcaatcgcgcggcgcttcaagggaagctgaaggcgattgaacttcttccggagagtgccagcgagggcgggcatctcgacgacggggtcatgcggctgtcaaggaacgcgctttccagaggcgttggcacggcagtgatggacaacctgagatccacgctaggtcatgagatcgggcatggcttgttcagtggtgctgtcgatgctgcttccgggaatttctcgaatgtagtgatcaatctgtcgcagttccgtgattcggatcgcaactacaccatagcgatcaagaactatgtgcttgcagcacgtgccaacgaggccgtcgcaacaatcaacgggtggaatgccgtccgcaatgaaatggttgccagcaatgggggcaagccaattgatcgccaggcgctgttggaacgcatgtactttgtgcgcccggactgcgtaacaaggttgcccagcgggctttacgaaactgcccccgggatcgtgcttgatcagaatctcgttctgcaacagacagcggccaacatcgaagcggtggccgtatgctacttcgatgatccacgttcaaagctcggcccgaacgccaatctgagctatcacgagtactacacgctcggagcgatcaacaggattctgtattacgaatccgagtatcgccgcatcttgggggccggaaagcccaatgcgctgaccatcgattttgcagcactcggagtggatagagcaaagctggaggcatcgggcttctatttcaccgggaacagtgaaaccctgggaatctcggatggtccgaacaactggacgaccatcacgcgcaagggctcagcgacacccggctggaactccccgtatgcattgagttggctgttcaatgccgacgatgggctcttgcagaagattgccttggcgggtgggctcggcggagccatcggcggcgccgtttcttcggcactgcgtatcaaggatcctgcatggcgggtgctgagttccaccatcctgacaaccgtcggtgagaatctggcagaggccatccaagccggcggtgtgtctgtaacgcttccgtcgggagtggtccagaacgtccttgacgaccttccggaagagttccaggccaacctgcgcagtgcaggtgtgggtgcgatctcctcctacctggccgcagagctgatcagctcgcttggtattgaaggaacgcttggcgaactggggcaaaccgtcgcgtcggcggcgatcgcgcagatcatccagaacgcggcagcgatttccaatggcgcgaacatcagcctgttcaatggcatcaaatccgcccagctgttcaatgcggtgggggcttatgtcggcgcgcgcatcggtgccagcctggtagagttcgataccatcggtggccagatcggtgcgcaggtgggatcggccattggtgcttatgtcggtgcatctgcggcgacgacatgggctgcagcgggcagtaaagtgggtggggcggcatacggcgcgatcggtgcggcagtcggcgcattggtcggctacatcctgggaggactgatcggctcgttcttctcaagtggaaagccgcggtcgtgggccacggtcagctgggaagagacatcggagagtttcgtcatcagcggagtgcggtcacgctccggtggctccaaggccggtgcgaagatcctcgccagtgccgtggcggagaatctcaatgctgtgctgaaattgtccggaagccgggtagcctctggtagctctgtcgatgggggcacctttggcgcgtatggaaaggagtatcgatactggtcggcggctcccgtcgcgttctccagcgcggaagagctgatcggatacggatcggcactggcactgaccaatcttgccgggaagatgatcggcggcgacatccatatcaagcgcgccctcgtgcaacacctggggatgctgccgtcttcgcgtgagttcaacgtgacgtctctggtcggggatcttgcgatggcggccgactacgggcgctatctgatggaccccttccagatcaacgcgctcattgccggcgctccggaaagcggactggcagcacaatgggctatcacatttgcgcgtgccacagaacttgggttgaacaagcgtgcatcgactgactgggtaggcggatttgcggcatggatggatcagttgcccgatggggagctgaatggcgtaggcctgaatgcggcgaacgtcgttgcatcgcttgacagttcgagtggacggaagttcctgttcatgggatggagcggcgaggagctcctctctattggcgacaccatcgtcaccgcagacaaggatcgcatcctcggtggcaccggcaacgatagcatcatcgtcaatggtgcaacgctgtccagcaccactggcctgctgatcaacggcaaggccgccccggccacccatcgcatcggcatcgctgcggtcatcgatgccggtgctggcgacgatctggtccgtggcggggatctcggcaacgatctgctcggcggcagtgggaacgacacccttgtgggtggcctgctcgatgactggctgtttggcggtgacggcaacgatgtgctgttcgccggcaatgtcaccaatgtgaacttcgccatcggtgatgccagcgcacaggcgttggcgatcgctgcgcgtggtggcaatggcaactacctcgacggcggtgccggcgacgatcgcctgtatggcggcaccggttcggactggctggaaggcggcgctggcaacgacctgctggcgggtggcgagggtggcgacatcatcgccggtggcgccggcgatgatcgggggggcaatggcgaagcgcgcctgttcggtgggggcggcgcggaccagtacctgttccggctcggtgacggccgcgatgtggtctacgacgaagagggggcgggggccatccgcggcagcggcgacagcttgaatgaccgcctcgcgaagatcgccaatggacagctggcgcgcaactgggctggtggcggcgattacgaggtcaacggctcggtgaaggggggggaggacgcgatcgtgttcggcaccggcctgtcgctgcagaacatccagatgcgtcgctcctcggccagcggtgccggcaacgacctgatcattgccctggtcagctatgacgccgccggcaacgcgatcctcaccggcgacgagctgaccatcaaggactggttcgaatcttcgcatcgcgtggagtggctgcggtttgccgatggcgaggacatccgcatcggcgatatgacctcgtacatcatcggcaccggtggctcggatgtgatcctgggtacctacggtgcggacttcctgtatggcggggctggcaacgacgagatccgcggcctggccggcaatgacttcggcaatggtggctcgggcgacgatttcgttgctggcgatggcgaccaggactgggtgatgggcggctccggcaacgatcaggtgctgggcggcgcgggcaacgacacggtgtttggcgatgatggcaatgaccgtgtgtatggtggtacgggttcggacctcgtggtcggcggccgtggcaacgacgaagtggtgggcggtgaaggcgatgacgtcttccgctaccagcgcggcgatggcgacgacattgtcatggacgactatgtcgacaactgggatctggtctgggagaagggcgcctacgtcaacggctatgtgcgtaatgccgatggcaccgtcagcaaggacggcgtggtctatttcgacggttccacctggatcagccacaacgactggaacgacgaggcgcaggtgctgcgccggcacaagggcgcgctcaatggcctgatagcgcgcaacgcgggtgttgattcgctggaatttggcgttggcatcgatatccaggatgtgatgttgcagcgcgatggcaatgacctgcgcctggtgatcggtcgcgatggtgagaaggagcgcctctcggcgtccagtgaccggatcactatcagggactggtacgcactcggcggatcgatcgagaacatggtgtttgccgcgaccggccgccatgcgctcaccgacatgaccctgcttgggggtggcgatggcaacgacacgatcgtcggtacggctggcaaggactggttgaccggcaacggtggcgatgacgttatcgacggcggtgcgggcaacgacctgctgatgggcaatgagggcgacgatacgctgcgtggcagtgcgggtgacgacatcctgtacggcggccagggtgacgatctgctgcacggcggtgccggcgcggacaccctgttcggtggcggtggcgtggacatcgcctcttacgcgggaagtgcggcggtgcgcgtttacctggaaggcacgttcgccaataccggcgacgccaagggcgatgcctacagcagcatcgaaggcatcgagggcggcgccggcgccgaccgcctcggcggcagcataggcgcagatgtgctgcgtggtggcggtggcgcggatgcgttgtacggcggtgagggcgacgatgcctatgagtacaacatcggcgacggtagtgatgtcatctatgaaggcgcattctatcttgatgaggtgatgtccagctcagggacgttgggatcagcctacacggcgtcttgggagtatctgggcattggcgagacaacggtgggcaacaagcatcagtatcggttgacggtcaaggagatcggatccggcactgttgtctaccagagcgtggacaaggtggacttcctgtttgacgccccagtgacgaacgcgccagcctccaccacgtggccatcggcgcaggggcagttccgttcgtcgacctggcgaaacgggccaaatgggcaacagatcgtacgcgaagtgttccaggccatcgacgggggccaggatacgctggtactgggagcagggctcagcctctccaatcttcggttggcgctgagcgggacgacgctccaggtggatgtcttcgccgcacagaacggtacgatcaagctcgccaatcacacgaatgcccaacgtcgcgtcgagttcatgcagttgaaggacggactggtgctggatctgcgccagttccgccagctttcccaaggcggtagcgcgagtgacgatgtattgttcgggtccgatggcgcggacacgcttacgggtcttgcaggtcacgacgtgctggcgggtggagatggcaatgacacgctgcggggcggcgacggcgacgacacgctggagggcggtgccggtgccgatatcctcgacggtggcagcgaccgcatcagcctcggccaggcggcggtggcgggtgaagcctatggcgatacggtccgctatgtgacgtccaccgcgtcgctggtgctggatttggccgcgggcacgctgtcgggcgggcatgccgatggcgataccctggtcgcagtcaacggcgtcagcacgctggagaacgtggtgggcagcgacggcttcgccgataccatcagtggtgattcgcgggccaatcgcctgatcgggctgggcggcaacgactggctggatgggcgtgggggcgatgacgtgctcatcggtggtgatggcaacgacaccctgatgggcggcgacggcaacgatgcgttgtccggcgatgccggcgatgaccgacttgaaggtggcgcgggcaacgatgtgttggccggtggcgcgggtgctgacgacctttacggtgggctgggcgacgaccagatcagcggcgatgtaggcaacgacaaggcctggggcggcgaaggcaatgacaccctgggggggcaggatggagacgaccagctctacggcgaagccggcaacgatactctggtgggtggcgcgggcgacgacctgctggacggcgggaccggcaacgacaccctggccggtgaggccggtaacgacctgctgcggggcggtgatggcaatgacacctacctgttcgatcgggagggcggcaacgaccggatcgaagacgcactgggcgtcaatcgcatcgtgctgcagaacgtggccaaccacgaggtctggctgcagaaggtgggcaacgatctgctggtcagcgtgatcggaggcagcacccggatcaccatcgcgggctactacaccggctccagtcggatcaccgagatcgcgaccggtgcgggctcgcttttcctcgcccacgccgagccactgctcgcggcaatggcggcagagtcggcgtccgtgccggccgggatgtcctccagcttgcagggcctgctcggcacctactggcagaactcgaacaagccggcaccactggtcgagacgcagtacctggccaccgatgaggacgtgccgctcagtggcagcgtcaatgccgtcgaccatgatgggaacatcaccgggtacacggtgatcaccgcacccggtatgggggccgtcacgctcaatgcggccaccggcgcctgggtctacacgccggctgcggaccgccacggcaatgaccgtttcgtggtccgggtgaccgatgcggacggcaataccgccgaccagatcgtcgatctggtggtgcgctcggtcaacgacgcgcccagcgacatcctcgcacccggcccgctggccgtggacgagaacgccgccaacaacctgtcgctgggccgcttcggtcatatcgatcgcgacggcgcggaagatacggccaccttcaccctgatcaatgatggcggcgggcgcttcaagctcacggccgatggcacgctcagcgttcgtgacggcaccaagctggactatgagaccgccaccgcgcacaccatccgggtacgcgtgaccgacagtgccggcgcgtggttcgagaaggacttcaagatcgacgtccgcaacgtcaacgaggcaccgttcacgccgacgcggccaccgaacaccgcacccgtactggccggtgaaaagacgggcgccggtacggtggtaggcaccttcgtgatcggggaccccgacaagaccacgccgaccctgcaacttgtagccaacccgggcggtctgctggaggtggtgggtaaccaggtacgcgtgcgtgcgggcgttgcaatcgacttcgaggcgctggccgccgcccaaggcgcgaccttggtcgatctggatggcgacggcatcaaggaggtgctgctgaccgccagcgtgagggcgtacgacggcagcctggcatctgcttcgacgctcagcttcacctatgccatcgaagacgagaacgaagcgccgacggcagtgatgttcgcggccaccaccaccagcttcagcgaaaccgatcgcgttcccaccggtaccgcgctgccggcgatcctgctcggcacgctgtcggccaccgacccagacaccacggccggcagtgatttcgccacgatggtgtacagcgtgtccgacagccgcttcgagatcatcaacggcaaccagctacgcctgaaggcgggtgcgatcgttgactatgaggcgggcagcaacgtcaccgtgacggtcaccgcgaccgatcgcggcggcgccgggttgagcgtcagcaagcagctggtcttcaccgtggtcaaccgcgatgactacctgtacggcactgccgctggcgaaacgctggtcggccaggccaaccgggatgtgatccaggggctcggtggcaatgacatcatcaacggcggcggtggcaacgacgacctgtacggtggcgatggcgatgacaatctgcgcggtgaggctggcgacgacaaactgtggggcgagctgggtcgcgacacgctgtacggtggcgcaggcgtcgacgaactgcgtggcggtgatggcgatgacaacctgtatggcgaagacggtgatgatcgtctgtacggcgacgccggcaatgacatcctcgatggcggtgccggcaatgacctgctggaagggggcatcggcaatgacacgctgcgcggtggcgtcggcaacgacatcctgcgcggtggtgatggcgacgatatcctcgatggcggtgccggtgccgacaccctgtccgggggcgtcggtgtcgatacgctgacctacgcctcggcgacggcgggcatcgtgctgaacctggctaccggagcacatggtggcgcggccgctggcgatgtgctggaagatgcgttcgagcgcgtgatcggcagtgggttcgacgacgtcatcactggtggcgcgggggatgattacatcgagggtggcgcaggcaacgacaagctctatggcggtgctggcaacgacacgctgtatggcggtgatggtgacgacctgctcgatgcgcaggccggcaatgacaccctgtatggtggcgccggtaacgacatcctgattggtggcgatgatagcgacgtctacttgatcgaccgcaactccggtgccgacgaaatccgcaactacgactccagtggcgacgatatcgacgtcatcggctatcgcgacatcagccgcaatgacctgtggttcagccgtaccggcgatgacctggtgatctcggtgatcggcaccagcgtggtgaccacgatcaagggctggtacacgaccaccaatgccaatgatcgcgccaactacaagattgatttcttcctggccggcgagcacgccagcagcacgatcaatgcagaggcactggtcgcgctgatggccggtcgcaccaagccggccacggtggcggcctatcaggcattgcatgccgacggcacgttcgagaaccagtggcggcactactgggatggcaacggcctgccgtcgatcagcatcgtgccggatcagtcgatcaacgaggatgggcaggtcgccctgcagttcaccgtcggtgatgacctgaccccggcatccggggtcaccgtacgtgccgtggcggtggatgccactgacctcacgacggtggtggcctggatgaatactccgagcatcactgcgggggccaacggcgagcgtacggtgacgctggtgccgaagggcaacgccagcggacgcgttgcgatcaagctgatcgcaaccgatgccggtgggctggtgaccgagcgcgtgttcttcatgaatgtggcgccggtagtggacgcgccggtgattacccgtgccgtgcaggtcggcaagacgcttgatggcggaacgctgacgctggacgtgcaggctgccctcaccgacaccgacgggtcggaaacgctggagatccgaatctcgaacctgccgaccgggctgaccctgaacaagggcacgaacctgggcaacggcgtgtggtcgctgacgccggcgcagctggccggtctggcgctggtcggtccggccacgtggtcggccgacctgaccggcactgcggcgctgacggtgaccgccatcgccaaggagaccgcgacgggcaagaccagcagcaagacgcagaccctgtcggtcaccatcaatgcgcgtccgaccgacatcaccgtggaccgtgcgctgagcacagtcgagtcgacctcggatgcaccggtggccaatggcaccgtgctgggcaacttcgcacgggtggatgcggacaatgacagcttcaccttcagcctgaccaacaacgcaggcgggcgctttgcgatttccgcggccggcgtgctgacggtggccaatgccagcctgctcgactacgaggccaacacctcgcaccagatcgtggtgcgggtgaccgactcgggagggttgacccgcgacaagacgttcaccgtggcggtgaccaacgttgatgaggcgccggctacgccgaccgtctccagccaaccggtggcaatcgccgccgagaatgcggcgctgggcggcgttgtgatcgccaaccttgcctccagtggcggcaatggcagctacagctatgtgctggagggcgacgcgcgcggctggttcaccctggtcggcaaccagctgaagttccgtgatggcctggccctggatttcgaagcgctgaaggctgctggaatggccgtgagtgacgctgatggcgatggccgccaggaggtggtgtactcggtgtcggtgaaggctgtgtcgggtgggttgacctcggcgggggcgcgcaccatcaccgtgcgccttgaagacgtcaacgatacgccgcatggcatcaccgttgatcgcacgctgagcatcgcggaaaacactgccaacggcgccgaggtcggtaagttcagtggccaggaccaggacgtgaccgacggcctgaccttcaccctggtcaacaatgctggcggccgctttgccatcaccgcggctggtgtactgagcgtcgccaatggtgggctactggactacgaggccgccacttcgcatgcaatcacggtgagggtgaccgacacccacggcgcgacccgcgaccaggtgttccaagtgggcgtgtccaacgtcaacgaagcgccacgaacgcctgacgtcgtgcagcacgtggcgctcacctccgagaacaccggcgtgtccgggcaggtggtggccacgctgtcctcgtctgatccggacgggaccgcgccctcgtaccagatcatcaacgatccgtttgcctggttcgccatttccggcaaccagctcaagtacaacgtcagcagcttcgatttcgaagcggttgcaccgtacctgcagctgatcgacggcgacggcgatggccagctggaggcgtactacaacgtcaccgttcgtgcgacggatggagcgctggtgtcgggcaatcgcgagatcacggtacgcatcgaagacgtcaacgaggcaccgacgacctggggccagagcctgacgctggccgaatcggcgccgggggcggggcagaccgtgttccagttcaccaactggtccgacccggacagccagtggtacaaccgcgaccaccggtttgccatcaccggtggtgccagcaacctgttcggcatcaacgccaccacgggtcagatcgcgctgcacgggcagctggattatgagaccgcgcagagccaccagatccaggtgacggtcaccgatcgtggtggcctttccagcagcacctgggtgacgatcaatgtgcagaacgtcaatgagcggccgacggtcgtccagacgcaggacagcaactacgtgtacgtgctctggggaagtgaccaggaggacatcttcagccgtctggtgatcaccagcgcggtggaactggtgagtactactggccagtactgggacacctataccaacgagacatcgttctttgactatgggaccacgtcgaaggccatttccggtgatggtttcctgaacggttactactacaacggcacgcttgccacgcggatcgtgaatcgtggaaaccggcgtcaggtgaacgacggaaactggggcgatccgcgcggaagcggcgcgggctactaccaggagacctactacgacacctactatgaaatcgtcatccagagcgtggacagcgctggcctctggagtgatccgctgaagtttgtcgtcaacgagttcggcgctcgcctcggccctgtggttctcgatctggacggcgacggcgtggagaccgtgggctgggcacagagcgccacgcgctttgacatggacggtgatggcgtgcgtgatctgaccggttgggtcgggccgcacgacggtctactggtgctcgaccgcaatcgcaacggcacgatcgattccggcgccgagatctcgttcacggccgatcttgcaggcgcccattccgaccttgagggactggccgcctacgacagcaacggcgaccgccgcctggatgccaatgacgcccgcttcagggagttccaggtctggcgcgatgccaaccgcgatggcatcagccaggcgggtgagctgctgacgttgcagcaggccggcgtggcgtcgatcaaccttgatgcgcgccgtaccgggcagatgccgggtacgtcggtggacaacaccacctatgccaacggtcagtacatccgtatcgatggcacccaggcggccctgtcggacatgttcttcgctttcggcgagcgcaatcaggagggcgacgatgacggcctgaacctgaatgctggctccggaaagggcgggcgtgacctgggtagcggtgatgccgcctccggacgcgtcaaccgccgtggcggggatccacgcttcacgcctgcaactgacctgccgcaggccccggtggcacaagccgtgacggaactgggggatcatttcggtggcgttgagcccaccgccgccgagcggatgcagcaatcggctcggtcggaacagcgtgcccccatcgatgaaagcattccgtccggcccgacaacacagcgctccgccttgcatgacaatctggcgctggcacagaagaagcggttccagatgatcgaagcgatgtccacgttcgacgctcagccctatgcccagggcatcagcacggcggcgcgcgatccggccgccatggaactgttgaccgccattcccgactataggatttcccgttcatga

SEQ ID NO: 507478 - DNA, 621 bp, Stenotrophomonas maltophilia
atgaacgtggtcaaaggcttgaggcagatgttcactcgggaagcgggcggcttcctgcttggaatgatcctgatcgtgcctgccaatgccatggccgccgagatcaccaagcgcaagccggcaccctctggagatatcagtgccgaccttctctcccagcggattgtcagcctgctgtccgagcagcgggcagtacccggattcaaggggatctcgagctcgagctggaatcgtctttccgctcgccccatggcgccctcgccttaccgcactggtgtgttgcggatagacgccaaggttcgcgaaggctggaactactggattgaatccagagagcgccccaatggcgggaacgtcgttgcgttctacgtagtgggggagcaaggccgccgggtaccagggtactgcaccttctctttcgcggagtttgccgatcggctgagaagaaacggctttgatcacacgcgtccccaggtgccgccaggctctcctcgcatacattttttttctcgaccacatctgcccgtggtcgtgatcacttacgtccccactggatccgtcagcggcgaatcctgtgtggagagcatccaggtcgaaccatcggagcagggaaatggctga

SEQ ID NO: 507479 - DNA, 1395 bp, Stenotrophomonas maltophilia
atgttgaaaggactgaggcatcatttgggcatcctgcgcgagagcctgcgcgcggagcgtgcgcagcaggacccacgcagttcggccgcgccggacttcctgccggcggcgctggagatcctggaaaagcccccgaacccgatcggccgcaccgttctctggctgctgatcgcctttctggccattgcattgatctggtcgtgccttggccgcctggacatggtcgccgtggccgaaggcaaggtgattccgcgtggcaatgtgaaggtgatccaggctgcggaccagggcgtggtccgtgcaatccatgtggtcgaagggcagtcagtgaaggccggcacaccgctgctcgaactggatccgacggtcagccatgccgaagtcgagcaggcgcgccaggcgttgctgaccgcgcagatcgatgtggcacgggcgcaggccgtggttgaccacgttgccggccgggccggtcgcttcatcgcaccggagggggcagctgacagtattgttgccgtccagcaggcactcgtcgccgccaagcagcgcgagttcgattccaccgtgggcggcttgcagcaggagcgcagccagcgcgatggcgagcacggcatgatcctggccgagatcgccaagctggaagagcagctgccgctggctaccgaccagttgaacaagctggaggagctgagccgcgacaactacgtgccgcgactgcaggtggccgaagtgaaagagcgtgttgtcggcatgcgccaggacctggctattcgccgtgaagagcagcgcaaagcgaccgccgcgcaactggcggccagccagcagatgagcaagagccgcagcgagttcgcacgtgaagcactggatgcgctgactgaggcggaagcggcgcgcgcactgcgtggcgaagaattgaagaaggcccatgacaaggctgggcacacggtattgcgcgcacccgtgaatggcgtcgtgcagcaactacaggtgcacaccatcggtggtgtggtgaagccggccgatgcgctgatggtgctggtgccgcatgacggcgagctggtggtcgatgcgatgctgcccaatcgcgatgccggcttcgtccgggaagggcagccggtggaggtgaagctggaggcctatccgttcacccgctacggcgtggtggatggcgtggtcgagactgtgggccgcgatgcgatacagaccgagaaggaagggttgcgctatccggcccgcgtgcgcctgctgcagccctggatcgaagtggatggccggcgtcgcgcgctggcgccgggccttgccgcaacggcggaaatcaagaccggtgatcgccgcatcattgaatacctgctgtcgccgctgtccaggcgcgtgcaggaagcggggagggagcgatga

SEQ ID NO: 507480 - DNA, 2139 bp, Stenotrophomonas maltophilia
gtggacgatgggggcgcgctggcgtgcttcgtcgccctgttggggtttctggatcggcctgccgaccccgagcaactccggcaccagctgggccaccccgagggccgtatcgatacacaggatctgttgcgcctggccaagcggatggacgtcaaagcacgcgtggtacaggcgcgggtaaccgcgctgcgcgaccatccgctgcccgccatcgcctgcctggccgatgggcgctatacgctcgtgctcaaggctgacgccgagaacgtgttgtgtttcgacgcggcggccgacggacgcccggtcacgctgtcccttggcgagttctcgcaggagttcgatggccgcctgttgctgatgaccacgcgtgaaagcgtggccggcgccgcgaggcgcttcgatgtcggttggttcattcctgccttggtgaagtatcgccgcctgctgcgtgacgtgctggtagcctcgttcttcctgcagttgatggcactcataacgccgctgttcttccaggtggtgatcgacaaggtactggtgcacaaaggcatcaccacgctggaagtgcttgccctcggcctgctggtggtttcggtgttcgaagtgctgatgggcgggctgcgtacctacctgttctcgcacaccaccagccgcgttgatgccgaacttggctcgaagctcttctcccacctcacgcatctgccattggcctatttccaggcgcgccgggtgggtgattcggtggcgcgcgtacgcgaactggagaccatccgcgagttcctcacctcctcagcgcagacggtggtgctggatctgttctttgccatcgtgttcctggccgtgatgtggctgtacagccctgcattgctgctgatcgtgctgatcacgctgccgctgtacgcggtggtggtcatggtggtcgggccgatgctgcggcgtcggctggatgagaagttcgtgcgcggcgccgaaaaccagtcgttcctggtcgaagcagtgaccggtgtggagaccatcaaggcgctggcggtcgagccgcaggcgcagaaccgctgggacaagcagctggcgggctacatccaggccagcttccgcgccagcatgctggccaactggggctcgcaggcggtacagctgatccacaagctggccacggtggcgctgctgttcttcggcgcgcggctggtgatcgacggcaagctgaccgtgggcgaactggtggcgttcaacatgcttgccgggcaggttgccggcccggtgctgcgcctggcgcagctggcccaggacttccagcaggcgcgcatcgccgtggagcggctgggcgacatcctcaactcgcctaccgaaccggccagctcaccctcgcgtgccagcctgccggcagtggatggccgcatcgcgctggagcatgtgtcgttccgctatcgccccgaaggccaggaagtgttgtcgtcagtcagtctggagattgctccgggtgagatcctcggcgtggtcggtccctcggggtctggcaagtcgaccctgaccaagctgatccagcgcctgcacaccccggagcgtggccgtgtgctggtggatggtgtcgatctgtccatggtggacccggcgtggctgcggcggcaggtgggtgtggtactgcaggaaaacctgctgttcaaccgcagcgtgcgcgagaacatcgccatggcagacccggcgatgccgatgagccgagtggtggaagtggccaagctggccggcgcacacgatttcatcctggagctgcccgaggcctacgacacacgcatcgacgagcgtggtggcaatctctccggcggccaacggcagcgcctggcgatcgcgcgtgcattggcgatcgatccgaagatcctgatcttcgacgaggcgacctcggcgctggatgcggagagcgaggaagtcatccaggacaacctcaagcggatgtccgccggccgcaccgtgatcatcatcgcgcatcgtctgtcggcggtacgccaggccaaccgcatcgtgaccctcgaacgtggccgcatcaccgagaccggcacgcacgaggatctgctgcgcgcgggaggccgttactcactgctctacaccaaacagatgggcctgcccgccgtggccgccccgttgaactga

SEQ ID NO: 507481 - DNA, 219 bp, Stenotrophomonas maltophilia
atggcgtttgatcgcaacctgtatgaggattttgctccgaacgatgtttgggcggcgtggctgagcgcactttcggagcactttgcagatatcgcgatgtgcgcggttcgatgttcagagtgctccgacaggggaagccccgtggaaattgagcgaggtctggatggcctgcgctcctactggctggaagatgggaacttcatgcgtgatcatttctag

SEQ ID NO: 507482 - DNA, 396 bp, Stenotrophomonas maltophilia
atggtcagcttctggtttccctccagccccgacatcgattcgctgcgcaggcgcgcgatcgccaccaccgcacacgagttccagcatatcgccactgtattgtcagggcagcctcggcgcggcagtcagcgtgaacctgacgcctatctggcaggtgcatgtgcccagctgttgatcgaaggcgcccttgcacgtgcggacctccctggcggacacgacccccgagctgatccgtttctgccacccgcggccaggcactccgcgcatgcgggcagtacgaccgcaacagcgctgctgcggttcttcggtgacgcggaaaccttgcgcatcaatgagggaggccgccacctggtgcagcattgccacgagacgatcggttttcccctgcagcagtga

SEQ ID NO: 507483 - DNA, 789 bp, Stenotrophomonas maltophilia
atggtgtttggcccaggagccgcacctacatcgaatgtagcgaggtcgtacctcaactcggtagccggaccggccgcagctgcggcccacgcgttcgcaccatccggatcgacaagtcgaaggagggttcctgttcgatgccattggaactgcttggcggcgatggtggatccttgccggccatcgaacagcagcagagttacagatccattggcagggaaggctatggatgaacccgagacgtcgatttcgaactgcgcggcatctggcacttctgatgtcgacgcctgcagaatccgctcgaaccagggtaggccattgcgttctcctccgccgatcttgccaccgatcctgccttctatccggcacttcttggtttcttcacacgatgcactcaactgccactccattggcccgcagccggcagaggtgagagtgatacctattgccaccacgatagttcgtagattgctcattggtattctccgtgtaggacttcgattgaccgatcagctcgaccagccgactcggcaatcaatgcgtatcgactccggctcgatcaggcaatcggaattttttcaaacacctccagcaggtggctccgggccacgtttgaactgccagacgaacgctcaggtcgtgccaatggcgacatttgagtctccagtcgcaacacgtggtgaatgcgttcttgcgttcagcccatcagatagcgcagcacgccggccgaggccacgccgatcagcaccgtcggcagcatcgacagccgcgtggcggccagcagggtga

SEQ ID NO: 507484 - DNA, 12393 bp, Stenotrophomonas maltophilia
atgtcgcacccgcattcgcccaccgcccgtttccctgctgccctgtggcgcagccacccgatggcctgggccgtcgcagtggccctgggcagcgtggtggctccggccactcaggcccaacaggcgttcagccccggctggttcgccgagcgcggtgcggcgcagggcgcggccgcacagagcgggcgcatgcccaatggtgtgccgatccagttccagctacccgcgcagcagcaggatgcggcacggcagaagctgcagcagtcgatcgacaaccttggtacggccgcgcaggccatcgccctgcagcagcgcctgcaggaacaggcacggcaggcgcgccgcgaggcgggattcgtagtggccgatggcctgggcaaggatggcctgaaggttgacgagaatccgttgacgcgtggctggatcaatgcgcgcgacgcgatccagtcgcaggcggccgacgggcgggtgctggtcaacatcgagcagaccgccgaccaggcgatcctgaactgggaaaccttcaacattggtggcaacaccacactgaatttcctgcagaaccccgactgggccgtgttgaaccgggtcaatgatcccgccgcaaggcccagccagatccttggccagctgaaggccaatggcacggtgttcgtggccaaccgcaacggtgtggtgttcggcaacaacagccaggtcaatgtccgcaatctggtggcagcggccgcacgcatcagcgatgcgcagttccgcgagcagggcctgtacagtgccgacgcgaacacctcggcgctgaccgacgccgtgggcaaggtcatggtcgaacgcggtgcgcgcatcaccacgcacgaaccgaccacggctacacggggcggcggttatgtgatgctggctggccacagcgtggaaaacgcgggccagattgaaacccgcaagggacagacccagctggccgccggtgacagtttcgtgatccgtcgcggcgtgggaaccgcccagaacaccgcgtccaccacccgcggcaatgagattgccccgcgcttcgtcgctgacagcacggcgggcagtgttcgcaacagtggtctgatccaggcgcgcgaaggcgatgtcacgctggccggccgcaccgtcgagcaggccggcgttgcggttgcgaccaccacgttgaaccagcgcggtacggtgcacctgttgaactcggcgtccgatgcggccggcagcgtgaccctggccgccggctcgaccacggcagtactgctggaagacgatggcaagagcacggcgctggacagccagcgcaacgcgctcatcaaggaatcggccgagcaggacaagctgcgcggttccagcaacagtggcaccttcgacaatctctcgcgcctgcaggaccgccgtgagcaatcccgcatcgaagtcgtctccggcggcgatgtgaacttccaggccggttcgctggcggtggccaccggcggccaggtgatcgccgacgccagccggcgcagctatctggatgatggcgcgcgcgtggacgtctccggtgcggtgggtgtgcaggtggcgatggaaagcaacaacgtcaaggtgaaggtgcagggcaatgagttgcgcgattcgccggacaaccgtgacagcggcaagctgatcagcagcgaggtgtggatcgaccgccgccagttgaccgaagttgccgccggtaccggcggttatgaaggcacgcgctggtatgccggcggcggcctgctggaagtgggtggctacctggacaatcaggggcattcgatcagcgaatgggcggcgcagggcggcaccgtccagctggcaggcaaggaagtggtcagccacgccggttcgcgcatcaatctggccggtggcagcctggatgtgcagtccggcgtggtgcagcagagctggctgcggggccgcgacgggcagttgtaccggcttgatgatgcaccggccgagatgctgtacgacggtctgtaccagggctatgaagtgaagcaggagcggtggggggtgaccgaatcgttccgcaatccgctggtggcacccacccagcgtttcgacaatggctataccgtgggacgcgatgctggccgcctgttgatctcggcgcccacggccgttctgcagggccaggtggatacggtggccttccagggcgcacagcagacgcgccggcccgatcaggagcaggagggctacgcgcaggcacagacggcggcggcccgcaacgcccagctctggctcgggcgtttcgacaacagcgggcgcagcgcggtgttcgactcgaatgtccgcattggagcgctccaggccgacacccggccgtggacgctgcaggcgccagtcggggaagcacagcgcaataccgtgtggctggacagtgaggtgctgagcgcccagcgatgggggcaggtggacctcgcatcggccggtcgtatcgacctcgacggcacgctcaggttgcaggagggcggccggcttggactcaccgcaagccgcgtcaactttggtggaacggtgcagattgccggcgggcaggtggaagccggaaatctgcttgcggcgcttggcgggcccacggcattgctgacgtccggacgtggtgcggtggatgttgcggccggcgcacggatcgatcttggcggcggttggggcaacgcgcttgctgcgccggatggcggtcccgcacaggcgtggatcgacggcggacaggtgcgcttcaacagcagccacgacatccatgtgggcgagcgggccgcgattctggtcgatgccggcggcgcgatcgatgccagtggcaaggggcgcgtaggcaagggtggcagtgccagcctgctcgcggccagcaccgaggttggcactgacggcagcggacggatccgtatcggcgaggacgcacgcttcagcgcgctcggcaacggcagcggcaacttcacgttggcaaccggcggtgtggtgtccatcggcgcgcctggcacggatgcatcggcggcgtcgttgcgattgcagccagcactgttcaggagtggcttcgccggctatgacatcgccggtcacaacggcttgacggttgaagagggtacccagctgcaggtcgaacgaccggcgctgcgcctggccgagggcgcacagcaggcactggcccgcgagcagggcgttcaggcctggacgccgtcgctgtatgaggcggatccggccagcgggcgtgtatcgcagcgcggcggcgcgagcttggcactgcgcgcagggcatctgctgtccacggccgatctgcgcgttggcaagggtgcaaggatcgaggtcgatgccggccagtcgatcgaactgttcagcgccggcaacctggacgtggctggcggtctgaaggcggccggcggccgcatccgcctggatgaggcattcgatccgtcgggcgtacgcggcgatgcacgccgcgagcgccagtggacaatcgctgaaggcgcactgcttgacgtgagtggcgatagcgtttccctgcccgacgcgcgccggacattgcgcggacaggtgcgcaagggtggaacgatcgagatcgggggggcgctggactgggaagaccaggacaacgtacgccacctgccgcccgataccttcgtggtggtggagcgcggtgcgcggctggacgcgtccggtgcttcggcgctgctggacattgatggcagcgggcgcacccgggtggacagcgatggcggcagcatcgtgctgcgcgcgggcaatgcgctgtacctgcagggcgaactggacgcagcagcgggcggcgacggcgcgcgcggcggcaccctcggtgttgcctttgggggcggcacctacggcagaacggcattgggcaaggacgtgctggcgccgcgggtgatctcgctgacccagcacgccgcgcagacggcggacctgcctgcacgccttgagtacggccatgcggcactgtcggtggagcagatcgaggccggtggtttcgatcatctggccctgttcggcgacttccgcgcccagggagatgtcaatctgcgcatggaccagagcctgcgcatccatggcatgaatgagcgcgccctggggtttgcggagggcaacagcgagggcagccgcctgttgctgagcgcgccctacgtgcgccttgcgcagggacgctggtggcagccggcgggggagggcacgctgcggccggtcgaggcgcggttcgacgaagggaagcaacatcgtttcgatgtgaaggcgaacctgatcgacctgcgcgacgttagctggctggcgggcttcgaccatgtcaacctggacagccgtggcgacatccgcctgctggcaccgggagccagcagcgcccaggaaacttcgttgtcgtccccgggttcgatcgatatcagtgcagcccgtctgtacccggcggcccgggcgcgcgggcgcatcgtcgctggcgttgcggacatcggtccgtcgggacagcctgcctggcagaacccggaagctgtattgcgcatccacggcgttggcagtgccacgcaaccggcaccggattcggcattcggccgcctggaactggtcgcggcgacggtggtgcagggcggcaacgtgcaggcgccgtggggccgcgtccaactgggtggcggtgaaagaaacaccaatcgcgccagccgcgtcgacctgctgggtggcagcgtgacctcgatcagtggcgccggcctggcgcttccgtttggcggtaccgtggacggtgtgacatggcgccggaacggcgccgagttcgatgtgctggttcctggatcgatcgatgccccgatcggtgtggatatcgtcgccaacgccttcaacggtgccgcaggcagcatcgtggatgtctccggcggaggtgagttgaccggcgctgcgttcgtcgccgggcgcggtggctcggtcgatgtcctgcggcattcgttggcggatgccaatccacgctatggcttcagtcgcgcgggcaatgcggtctacgcaatcgtgccgggccgagcggacgtgcaggcaccgctggcgaccggtgacggcagcgtcgatccccgtgtcggccaggagatcgtcattccggacggcgtgcctggactcccggcgggaacctacacgttgctgccggcgaactacgcattgcagaagggcgcattccgcgtcgagatcggcgccgagagcgcgatgggcaacgtctcgccggtggcgaccggcaccggctcctggcgcatcagcgggcaccgcgcgcagggcctgggcggggcggtgtcgccgttgctcaccgacctggtgctgacaccagcggaggcggttcgccgccacgccggctacaacgaaacctcctacaacgcgttcgtgcacggcgtggccgagcggcgtggcgaagcgctgcgctggcggacggtggatgccgggagcctcaacctggtgttcggtgaaggcgcaggacggtcgggtaccccggcggcaaccttcctcggcctgtcccgctttggcgccggcagcagtgacgggctcggcggcacgctctcggtcaatctgcgtgtctccaatggtgcaacgctggagatcgccagcgagggcgccgatgccgccagcgggcgcggcgctaccgtctccgataccacgctcaatgcattccgtccggtaacgatgctgatcggcggcacgctgcggcgcgatgcaaccacctatgcgctggagggcggcgcacagcacatcgtggtgcgcaacggcgtcaacctgacggcgcaggaagtgctgctgtcggccgcgttcggaggcaggggtatcctggtcgagcagggcgtttcgatcgacaccctgtcccagtcgggcccgtcgagcgtggcgcagcccacggcgccctacctggtcgcgggcggcctgcttgccgtgtccaaccagcgcctgacggcgctcagtgcacagggcggaagtgccggcgggccggtagcgatcgacatcggcggttgcgaggcggactgcagtgggcagacccgcttgctgtcggcgggcagcatcaacgtggtcaccgacggcgccttgaacatgggtgactcgctgagctatggcacgcgccagctcggcctgggcatgtccgcactcaacctgggcagcaccgaggccattgcgatggcgtcggcggccggcggcctgcccacgggcatgaccatgaaccaggaggtgctgcagcggttgctgcgcggaaacaccgccatcggcgctcccgcactggaggcgctcagcctgaccgcgcgtgatgccatcaacgtgttcggcagtgttgacctggatacgcgcgatggcgcgaccggtcgcagcagcctgcgcaatctggtgctgggtgcgccggccatccacggctatgctgccgccaccgaccgcgcgcgcatcttcgccgacacgctggtctgggatgggacattggccggcaccgacctgcccggcggcgagctggcacaaccgcccggcgaggcgatggtgggccggctcggccaagggcagctggagatcaatacacgggtgctggaactggggcgtgcgccgttcacccgccccaactcgtctgtggcggccggtcgccaggtgctcggctttgccggcgttaccctggcagcgtcggaccgcatgctgttctcgggcaagggcagcctggacgtcttccagcgccagcgcgactacgtggcaggcagcggctggcagttcagcggcggcgcgctggatatcgtcaccccgctgcttacgggtaacgcgggtgcgcagctggcaatccgcaatggcggtacggtgcagctgcgcggcgccgcggcgaccgcgggcagcgatgcgttgggtgcggagttgtccatcacggccgaacgcgttgtgatcgacagcaggctggcgctggcgtccggcaggtttgaggccaacgcacgccagggcgtggtgcttggcagcaatgcagtgctggacatggcagggcgcaaggtcagcctgttcgacgtggacaagtacagctggggcggtgacgtggcgctgtcgagccgcgaaggtgacatcgttgccgacgcggcgtcgcggatcgatctttccgcccgcaacaaccgcggcggccgcttgaccgttgctgcgctgggcccgcagggcggccgtgtcgatctggcaggttcgttgcttggcggtgccagcggccgctacgacgccggtggcaccgaagtgccctatgacggtggcgaagtggtggtgcgcgcacgccagttgcaggacttctccgggctcaatacacggcttaccgccggtggtattaccggtggccggaccttccagttgagcgaaggcgacctggtgatcggcgatgaggtgaaggcccgcaacgttgatatcagcgtcgatggcggcagcctgcaggtcaatggccgcgttgatgccagtggcgaacaggtcggcagcatccgcctgtccgcccgcgacgtgctgcgtatcgatggcacattggacgcgcatggcagcgccttgcgcgtggacagctacggcaagatcatcgacagcccgaaccgggccatgatcgaactgacctcggccaacggcagcctgcagctgggtgcggctgcctcgatggacctgcgcgccggcacgtcggtggccaccggtagcgggccgggccagaacgacggccgcgcacgcggcagcgtcaagctcaacgtgccccgcgtgggcagcaacgatgcagcgatcgaggtggccagcggcatccgcatcgccggtgccggcgacgtgcaggtcaacgccttccgcagctatgattcggcgcctttggccagcgctccggacgtgcatggccatcgtccgcaggtgatcaaccagcaatggttggatacggtggtggatccggacaacagccaatggatgaacgccgcgctggccaataccggattgcagcagcgcatctccgcactgggcagctatcgcctgcgccccggtgtgcagatcatggcgcgaaccagcagtgacaacccgcgcggtgatctggtcgtggccggtgatatcgatctgtccggctaccgctacggaccgcagtcgaaccgggccgatcctgcgcgccgtggcttcggtgagtcggccgcgctggtactgcgtgccgagggcgacgtcaatgtctacggcagcatcaacgatgggttcgcgccaccgcctgccaatcccgatgaagacggctgggtgttgctggaaggacgcagtgcgggttcaccgaacaccgcgtttggcggtgacctgatcgtgccgggcgagggtgtccagctccagggtggcaccgagttccgcgccggtgccacgctgaattatgcgctgcccttcgaggcggtaaccctgccggccggaaccgtgctgccggcggagatggtgttgtccgggccgctgctgctgccggccggtaccgtgctgggcgcggtagtgaccacagacagcggacaggtgatggtggccggcaccgtgctggcacaggcgctggcgttgcagtccggtgcccgactgggtgccggtttccgcctgcgcacgccggcgccgttggccgcacaggtgtggccggccggcgtcgccctgcccgtggcgatgaagctttcaggcgcgctgaacctgcatgccggtgcgatcatcccgtcgatgaccaaggtggagctgccaggcgatgcaccggtgaagctgcgggcggccgatgccagcggacgccagggccgcaactgggcgctggcggccatgctgcccgaaggcaccacctcgtgggacctgaccgcggtggccggtgctgatacgaccgccgccgatccgcgtacccggcgctgggggagtgacggcagcatcgtgctggccgacagccactacagcaccatcggtacggtgaccacgacgacggaatggaagggcgaccgcgtgatcaccgtggatggctcgctggatctatggggcgatgagtcgtgggtcggaaaacccgtagcggatctcgctcgggagcttggcatgaccgagagcgatgtctgtgattccggaccctactgcggtccggccccgcgcctggtcgacaaggaaggctcgctggcatggtggggcgatgaatcgtgggtcggccgcccggctacggaactcggggccgagatgggcatgtcggaggaagaaatctgcgcggcgatgggctactgctatggcggtggcacgttgactgaagtcacgacctatggcaagcgcctgggtgcaccggcctggagcgtcctgcgcaccggcaagggtgacctggcgctgctggccgcgcaggatgtgcgcatgaagtccggtttcggtgtgtacaccgcaggtgcgccgacggcgctgggtgatggccgtgacacgcagttcaccccggggcgggccccagtgcccaggaacaccgcgctgctgggcccggtccaggcgtccggccgctacgatgccgccatcgccacttaccaggcgtggtatcccgaccagggtggcaatctgcacgtgcaagcgggccgcgatatcaccggtgatacctggagcgcgcgcgcagaggcgggcacgccgcagcgcgaccaggccgggcattccagcgccgcggtgggcaactggttgtggcgccagggatcgggcacgactgctggtgtagtgcagagcgcaaccagctggtggatcaatttcggtacctacagcacggtgggccctgagctggatgcgacgcctcgcctggtcggctttaccggtttcggcacgctgggcggcggtaatctgtccctggaagcaggccgccactggggcgtgatcgcgccgatgggcaatgctctgggattgttgacggcgccccattccagcgcgatcgtcgcggcggtcgggtcgaccggacgggtcagcaacggtgaactgcatctgacggggggcggagacctgacgctgcgaagcggcggagcggtcaaccccggcctgcgcgcaagcgcgcagcagcccgagggtttccagcaggatctggatctcaacggcaccgtgaccaatctacgcggcagcacgctgctgcaggcggcgcgcatcggcggtctcagcgcgatacaaagcagctacggcacgttgggcctgcacaatccgttcgtggccgacgcacccgttgcgatggccgggccggtgctggtgctgggcgattccaccgcccaggtgcaggcgcgcggcgatgtggtactgggtagtgccgccgatcccggccgggttcccgtggccaatttcaacgatatcctgctggaagggggcggccacgcgtcgggcacaagctggttctcgctgtggacgccgcgcaccgcgctcgacctgttctccgcaggcggaaatctctcgccgggcctggttggcacgcagcacacgaccggcagcaaccagggtagggaggtgatcaggatcaaccccagcaatggcgatgcctatctcaactactggttgtatccctcccggttcacggccatcgcggcctccgggaacatcaatctcgccagtctgcgcagtggcagcgtgcccgatgcccaggacgtcatcgtgctggcgccctcggcgtcgggtcggctggaggtattggcgggaggatcgatcctggctaccgaccgggccactcagattgtgcgctcaagcagtgatgcccgtgtccccggcccattcaatcccggcttcatcgcgcaaggccccggaaacgcgggaaccgtgcgcagcaatgtacccgcggacgggaacggcgccagtcctggcactacgctgccgtactttgccttcggtcccaataccgcgctcggcgtgctgttgccaaccacaccgaccgtggccagccggttctatgcagtggccggcgatatcatcgggctgggaagcggcgacaggcggcaactgtcgcgcaatgccgagaacggcgcgcgtaccgtattcgactggtacgaagcaggctcggcggtacagctgcgcgccggtcgcgatgtgatcggcgcggatgtcaccgcgctcaacaccagcggtaccgatatcagcgggatcgaagcgggccgggacatcatccgcagcaacctgacggttgccggccccggcaacgtcgaagtgagtgcgggccggcagctgcgccaggaagaggccggaagcatcgtgagcctgggcggcgtcgtgcaaggcgatgcccgtcccggcgccagcatcgcagtgactgccggcaaccagggcattgatttcgatgcactgcgcacgcactacctggatccggccaacctcgccgattcctcgcagtcgttggctgcgcagccgggcaaggcggtgaagatctacgacaaggagttgagggagtggctgcagcagcgcttcggtctggcggttgatggcgccgaggccctggcagcattcgaccggctgccgaaggaacagcagcgcatcttcctgcgccaggtctactacgccgaactgcgtgaaggtggccgcgagtacaccgatgccgaaggtccgcgtttcggttcttacctgcgcggccgcgaggccatcgccacgctgatgccggacaaggatgcgacgggggcgacgatccagcgcaccggcgacatcctgatgtacggaggctccggcgtgcgtaccgaagccggcggcaacatcgagctgatggcgccgggcggacagatcgtggtgggtgtgcagggcgtggtgccgccggccagtgccgggctggtgacccaggggcagggtgacatccgtctgttcagccaggacagcgttctgctggggctgtctcgggtgatgacaacgttcggcggagacatcctggcctggtcggagcagggtgacatcaatgccggtcgtggttcgcagactacgttgttgtacacgccaccgcgtcgcgtctatgacggctggggcaacgtgatcctgtcgccgcaggccccggccagtggtgcaggtatcgcaacgttgaaccccattgccgaagtacgaccgggcgacgtcgacctgatcgcgccgctgggcaccatcgatgcgggcgaggctggcatccgcgtctcgggcaacatcaacctggccgcgctgcaggtgctcaatgccgccaacatccaggtacagggtgaaagcaagggcctgcccgtgctggccacggtgaacgtcaacgcgctggcctcggccagtgcagcagccaacagcgccagccaagcggcacaggatgtgatgcgcaagagccaggatgatgcgcggcgcaaccagccttcggtgatcagtgtgcagatcctcggcttcggcagcggcaccagcagcatcaacccgccggcgcgtggcaatactgccaacgctggctatgacgccaacagtgccttccagttcccgcaggcaagtcgcgacgagggcacgcagcgccggtag

SEQ ID NO: 507485 - DNA, 855 bp, Stenotrophomonas maltophilia
atgccaaccctcgccgaccagctgttgcaggaagccggcccgcagccccctgcggttcacgccagcaatgatggcgcggtggtgctgctgcgccaccacttcgacgcaggtgaaggtgagatggggcatccgcaccagcttcgcctgggcatggccgtgggcggcggcggacgactgcagcagcacaccctcaacggtcttctgcaggcatcctggcgacctggccagttcaacctggtgctgcccgcagacaccggcacctatgtcagcccgtcagtggatctgatcgggatcgccatcgatacccgcatgctgccgcacaacgtgcagacgctgcatcacctgcagccgctggcggcgcggctgcaccgcgatccggtggtgtccgcggtgctgagcgcgttgtggtgcagcacgcaggccgatgcctgcctgcccggcttccttgagcatggcgcgcaggtgctgctgcaccgcctgggccagcttgccggccaacctcgcgaggcacgcggcaccacgtccgcgctgtcggcacgacggctgcgacaattggaggcctacatcgacgcgcagcacggtcgggcgctgacggtcccacagctggctgctgcagtgcaaatggaggccgcaacgttcagtcgggcgctacgcgcggccacaggcctgccaccctacgcgttcctcacccagcgccgcatgcactgggcgcgcaccgaactcgcgcagggccgccgtgtcaccgatgttgccctggccagcgggtatgccaatcccagcaagttcagcgcggcattccgccgcgtgctcggctgttcgccgtctgcatggatcgcgcagtcacgtacccggtag

SEQ ID NO: 507486 - DNA, 837 bp, Stenotrophomonas maltophilia
atgagcgatgcacctgcaccaccgccgccaccggaagtccccagcaccgaccagatcctggaccagcatcgggacgccctgaagcaacgctttccgctgcccgacccggaaacgctgcgccgccggggtggcggcgcgaagcgggtactgcccgtgttgctggtgctggccggcgccgtactcgtggccgacccggcctggcaggtccgcgattaccagaccagcgtgggcgaacgccgtgaactcgtcctggccgacggcagtcgggtacagctggatgcaggcacccgcgtgcaggtgcgccgccatctgcgctcccggcaggtgctgctggaacaagggcgggcacgcttcgaggtgcagcactcggcctggcgacgcttcggggtggatgccggcccggtccacgtgcgcaattacggcacggtgttcgacgtcgaccgccagggggaactgagcgaagtgacactgtggcgcggcgaggtcggcgtgcgcgtcgacgagggcggcagcgaacagcggctgaagccagggcagcgcctgctggcccagcgcggttcgctgtcgcctccggaagccatcgatccagagcaggcggactggaccaccggacgcctgcagttcgaccgcatgccactgagcgaggtcctgcgcatcctgcagcgctatcacgaccgccccatcgtgctggacgacccagcgctggggcccctgcaggtgtcgggcgtcttcgatgccgaccgcgcccagaccgtactcgcgctgctgcccgagatcctgccggtgcaggtgcatgccggcaccgatggcagcctgcatctgcgcgcccgcgattga

SEQ ID NO: 507487 - DNA, 1059 bp, Stenotrophomonas maltophilia
atgccatcgctgtcaccccgccgccccctggtcgtgctggccctgatcatcgtgatggcggccatcttcctggtcgatacggttaccgactacgccgttgccgccgcctgcttctacgctgccgtcatcctggcggcgtcacggcgcctgcccgcacgcggtctcatcctgcttgccgcggtctgcatcgcgttgaccggcctcagtttcttcctgacccgcttcggcacctaccgcatcggcctggtcaattcagcgatcggcatgctggtgatcggcatcaccacgtatctggcattgaagatggaagcggccaaggccgcggtgcaggatgcgcaggcccgcctgctgcgggttgcccgcgcctccaccgtcggcgagctgaccacctccatcgcgcatgaagtgaatcagccgttggcggccatcgccagcagcgccgaggccagccagcgctggttggcccaggatccaccgaacctggacaaggcacgtcagaccatcgcccgcatcgtcgccgacgcccatcgtgccagtgacgtgatcgcccgcatccgcggcctgacccagggcgctgcacctgagcgccaggccttcgacctcaaccaggccgtggaggaaatgctggcgctgtcgcacagcgaactggagcagcatggtgtgacggtcgcgctggtgctgggcagtgacctgccccctgcccatgccgatcgcgtgcaggtgcagcaggtgatcggcaacctcatcctcaacgccgtcgacgcgatggccggtacgcccacgggcgagcgcaggctgtcgctgctgaccgcgcatgatgggcacggccacgtcagcctgagcgtgcgcgatcgtggtatcggcctgccggcagagcagcccgaccgcgtgttcgatgcattctggaccaccaagtcgaacggcctcggcctgggcctcagcctgagccgctcgatgatcgaggccaacggcggccatatccgcgccgaacgaccagcaggcggcggtgcctgcttcgtcttcgacctgcccatcgccacggacgttcaacatgcgtaa

SEQ ID NO: 507488 - DNA, 837 bp, Stenotrophomonas maltophilia
atgtccgcgcctaccctttccaccaccccggccgggccgctgcgcggcgccgaacacgaccgtggcctgcaggcgctgcgcgtccacgtggttgacgtcacgcagccctgcgcgagcctgcttcggctggtcgtacagctgccgccacaggccgagctggcaccctggcagcgtgccaacaccgccgttcgcatccagctgggtgccgcgtttaccgatgtgtcacggatctacaccgtgcgcagcgtcgacgcgcaggcgcgccgtttcacactggacgtggtgctgcacgaggctccggggccgatgctggcctgggtgcgcgcactggagcccggcgacgccttcgatctcaccggtccgcgcccgcatctgcaggtgccgcaccgcgagggtagcgttgccctgctgttcgccgatcagagcgccatcccggcactgtccgccttgctgcagcagtggcccaacggcctccgcgcgcaggcctggatcgcttcggatgatcccttcccggtagacgaactgcccgccgtcgaaggcgtctgcatgcagcgcgtgtccacgggcgctatgccgttgctgcagcaggcacgccgtctgcgcacgggggcaaacaacaccgtctgggccgcaggcgaacgcgaggagatgcgcgccctgcgccgctacttccttgaagcgtgtggtctgccgcgcgcagacgtcgccgtggccggttactggaaacacggccagaccaccaccgagaccgaccagcgccgccgtcgcaactacgagcgtgtgctggcgcgcggcggcggactgcaggacctcgacgatctcgccgacgacatctga

SEQ ID NO: 507489 - DNA, 444 bp, Stenotrophomonas maltophilia
atgcttgccagcgcgaacccggcgccgcccctgttggcgggcgccggtgccgccgcgctggtgtggttccgcagcgaaggccccagccattcggcgcgcgcgggcaccctggcatcgctggcgctgatcggtctcgcggcctggtccgcctccagcgcggacgtgagcctcatgccagcaggtatggcggctgtcctggtggctgcgttgcttgccctgcgccttcgggccgtggtccgcatggcccgccgcctgcaggaccgggtggacgcaacggccatggaatcacggtggagcaagctgcctgcggccgtatcgaccctgctcgcacagcacctgcgcgcgaccgcaacactggcgcccgccctgcagcacacgctggtgctggccaccctggcctgggccgcccacgaagaagcgcagaccctggaacggccacgatga

SEQ ID NO: 507490 - DNA, 1305 bp, Stenotrophomonas maltophilia
atggatgttttccgcactgcactgattgccggtgttgcctgtgcagcaggaccggcatggtccgctgaatcaccgatcgcagacgccgacgcgcgcggaatcttcatcgaagcacagcacctgtgccaggtcgatggcggccagctgtgggggcaatccctgtgcgggccgatgatgctggtcgatccgaagagccgccaggtcaccgcctcgcatgcggatgtacacggcgcgttgaaggggcgtggcgaggtgttcgtgggccagcttccgcccgatgcgatcgttgccaacaccgccgtggaatggtccggcatacgctggacgcaactgctctggccattgccgcaggacgtgtccaggcgcagtacgctgctggctcacgaaatgttccatcggttgcaaccggcgttgcccatcaccgcgccgaccgaaggcggcaacgagcacctcgacacacttgaaggacgctactggctgcagctggaatggcgcgcgcttgcggatgcgctcacggccaccgatgcaatggcgcagcacactgcggtgaacgacgcactcgccttccgcgccgagcgccaccgccagttccctgcggcagcgcaggaagaagcggcgctggaattgaacgagggcctggccgagtacaccggcgtgttcgtcggcaacccaacgcgctccacacgtatccaggcggcgctgcatgaccttcgcgcgcacgttgccgatcgcagtttcgtccgctctttcgcctatgccaccggtccggcctatggcctgctgttggaccaggcggcccccggctggcgcaaccatctcgcccaccccgcccgggacctcggcacgcatctggccgaagtgacccggaccccgatgcagcggggtgcgaccgagctgcgggccgctgctgcgcgctacggcggacgggcactgcgcgaagccgaaatgctgcgcgaacggcagcgcattgcgcagctggaacacaaccgtgcgcgcttcgtgacaggcccggtcgtgcggctggatctgcgcagcatgcgcatccagttcaatcccaacacgatgcagtcgttgccgggccgtggcacggtatatccaacgatgcggctgaccgacacctggggcagcctggacgtcaccgacggagcgttgatgcagagcgactggaaggccgtgttcgtgcaggcacccgcaactgccgacccgccgctacagggtccagggtggtcgctgagtctgaaaccaggatggttactggtgccgggaacacgcaacggcgattacgtgttgaaggcgaccccctga

SEQ ID NO: 507491 - DNA, 3357 bp, Stenotrophomonas maltophilia
atgcgcaatgcatggatcaaacgaagcaaatgggttgcactgaccctggtggcgggtgccgcactggccgccgctgccgtgggcatacgcagtaccggtgcccagtcaaagaccggcaatccctcggtggacgcgcgcgccggcaatccgtccgggcctgcggcacgcggtccgggtagcggcttcgccgagctctccaaccgctatatcgtggtctaccgcgaggagccgctggccacctacaagggcgacatccagggcctcgcggcaccggaacgcatgcgcccatccgccagcgccgcgcgtgcagcggcagccaccggcaatgcgccgacaccgcgcatcgctgtaaagggggcacgctcgcaggactatgtgcgcttcctcgctgaccgccaggtacagcacgaggcccgcatcaatgcagcattgggtcgcagcgtaaaggtcgaacggcgcatgcagcatgcgatcaacgcatcggtgctgcagatgaatccgcaggaagcggagcgcgtgcgcgcacttcccgatgtgcagctggttgaagagtacagggagtatgagcaggacaccgacgtcggaccggggttgatcggcgcacctgcgctgtggaacggcacacctgcgccgttccgtggcgaaggtgtggtggtcggcgtcatcgactcgggcatcaacttcggcagcccggccttcaccgcccgcgccgaagatggttacgagcacgtcaatccgctgggcgcaggcaactacctcggtacctgcgcgccgggcggcatcgacgaaggtcgctgcaacagcaagctgatcggcggctacgacttcgtctgcggtgcgccgggcaaccagtgtggcgttgcggacgtacgcgaggagcctggatttggtgacaccaacggtcatggcagccataccgcttccaccgccgccggtaacccgcacactgcgtcctaccgtggcaaccagatccacatttccggtgttgcgccgcgcgccaacatcatcgcctacgacgcctgctacaccgaggtctccaccgggcgcggcttctgcccgaacacctcgacgctggcagcggtcaaccaggccctcgccgatggcgtggtcgacgtcatcaattactccattgccggtggcaccgcgccgtggggagaggcggtctcgctggcgttcctcaacgcatccgatgccggcatctacgtggccacttcggccggcaactccggcccaggtccgaacacgatgggccatctggaaccctggaccggcagcactgcggcggccacgcatggccgcggcgacatcgtgctgttcgctgcggtcagcggccccggcagcgtgccgccggcgctcactgccatcctgctgaccgaaggctcgggcggcgtgccgttcgcaacgccgattcctgcaaccacgccgctgcgtgtcagtgcaggcatcgacagtgccaacgatgggtgcgcgccgttcccggccaataccttccagggcgccgttgcggtgatccgccgtggctcgtgcaacttcagcgacaaggtcaacaacgccgctgcagcgggtgcgatcgccgtgctgatcggcaacaaccagccggcccccatcctgcccaacgtggccggggcgaccattcccgccttcgccatcgaccagtcggacgccaatgcactgcggacctttgcgtcgagcgttggcaacaacgcaaccgccggcattgcctatccggccagcaagatcagcaatacgccggatgtgctgggcgacttcagttcgcgcggcccggccgggatctttgatctggtcaagccggacgtgaccgccccgggtgtgcgtgtgctggccgtgatcgcaggcaatgaggtgaccggctcggagaacgccgtcggcctgatggacggcacctcgatggcatcaccacatcacgccggtgccgccgcgctcctgcgccaggcgcgtcctgactggaccgtgcaggagacacgctcggcgttgatgatgaccgcgcggcaggaggtgctgaaggaagatggcgtcacaccggccgacgcattcgcgatgggcgctggacgcatccaggtggaccaggcactgcgcgcagggctggtgctcaacgagaccaagaccaacttcctggccgccaatccagccaatgggggtgaagtgtcgtcgctcaacatcgccagcctcggcaagcgcagctgcgcggacagctgcagcttcacccgcgtgttccgcaatgtgctgccgacccggcagacgtggacggcgaaggtgcagggcctgaccgcggttgtctcgccatcggtgtttaccctggcgccgggtgaaagcaagtcggtgcgggtcatcgtcaccaccggttcggtaccgaacgatggcagctggcgctttgccaggctcaccctctcaccgcagggcggtgataccagccagccactgctgcgcctgccgatcgccgtgtcggtgccgccgccgcagatcgccgccacgccgccgacgaactcgctgaccctgccggccggtggcagtggaacggtgaacctgcagatcgccaataccggcggctcaccgctggaatggcagatcgacaattccggagtgggcacccgcacgctggtagcgcaggcgccaaacaacgccaatggccgtcgctcgacgcgcttcaccgatgcggcgacagtgggtgcacgtgcacagcttggtgccgatgatttcactctgggcgaggccaccggcattacccgcatcgtcgctgacggcttcgtcaacggtggctcgctggcaacttcgaccaacatcaactggtcgatctaccgggatgttggcggcaatccggagggcaatccggaatcgagcccgcagctggcgctgtggagctacacctccaccgtcagcggtccgggcgtaagaacgtcggctacgctggccaccatcaaccttgacctggccgctgcaggccagaacgtgaacctgccggcaggccgctactggctggtggtctcggtgcgcgcgccgctggctaccagctggttctggttcaacgccaccagcggcgacagcgtgtaccgcagcgcgatcatcaatcccgatggcagcggtgcctggtccgccaccgccggcgcgcctgggttggcctatgggctgggcggaagcaatgcgtgcggcgccggctggatcggcacaccgacccgtgccctgggccgcatctccgcaggcggcagccagagcacgcaggtgcagatcaatgccagcggcctcgcgccgggcagctattcgggcttcgtctgtgtcggcagcaatgacccgagcacgccgaagactgctgtccgtgtcgccttgaccgtaacgccgtaa

SEQ ID NO: 507492 - DNA, 1254 bp, Stenotrophomonas maltophilia
atggacctcgggggtaccgtgaagacgatgcacaagcacatccttgccgtggcactggccatggcaaccgcaccggcgtgggccggtgatacctgccagctggacgatggcttcggcggcgtgtccaacggtggcgccagcgccggtggtgccgcctcgctggcgtgcggcagtggtgccgatgccagcggtgatctatcggcggccgtcggaaccggcgccagtgccagcggcaccggcagtacggcgatcggcgcagccagcagcgcctccggcgaccagagcgccgccgtgggcgtgggtgcttccgcctccggcgccaacagtgcggcgatcggcgacagcgccaccgccagtggtgacttcagcagtgccagtggctcgggcagctccgcaacgggctcgttctccaccgcgtcaggcgctggcagcaacgccacgggcgaaaacagcaccgcgctcggcagcttgtccgaagccagtggcaacaacagcagtgccgtgggcaatggtgccatcgcttctgcaaacgacagcgttgcactgggcaatggctccgtcgccgaccgtgccaactcggtatcggtaggcagcgccggcaacgaacgccagttgaccaacgtggccgccgccacgcagggcaccgatgcggtgaacctcaatcagatgaataccgccaacgccaatacgctgacttcggccaacagctatgccgatgcgcgggccacggcgaccatcaactccgtcaacgcctacaccgacgcgagcagcgccgcggcagtgacgacctcaaaggcctataccgacgcgagcagcgccgcggcagtgacgacctcaaaggcctataccgatgccagtagcgcaaccacgctctcctcggccaactcctataccgatacgaagtccgcgcaggcggtgacgacggccaatgcctacaccgaccagcgcctggcgcagttcgcgctggacaacaacgggctgaagcaggagatggaacgccgcctgcgtcatcaggaccagcggatcgatcgcatgggcgcgatgagctcggcgatgttgaacatggccatcaacgccgccggctcacagagcccgcgcggtcgcattgcggtgggtgccggcttccagggtggcgagcaggcgctgtcgatcggatacggtaaacggatcggcgagcgtgcttccttctcgctgggtggtgccttcagcaatggcgagaggtctgccggcatgggcttcggcgtagacctgtaa

SEQ ID NO: 507493 - DNA, 339 bp, Stenotrophomonas maltophilia
atggtcattgcatggctgctgctcggtgcggtgctcgcggcacccaccgcgaaaggagcgccgatcgattggccggacacgctgttgaaggatctggacgctgccgacgccgccctgcgtggcagtcatccgggcgcagtggatctgcggaatcccgggttcggcgcgcagctcgacgaggcccaggcgcttgcacgttcgcgtgcaggtcgggtcaccaactaccagggctactggtgggcgatgaaaggctatgcggcgttcttcaacgatgggcatgtcagcctcaacgcgcttgccgacgctcccgatgttccaacgcagtggccgggttcctga

SEQ ID NO: 507494 - DNA, 894 bp, Stenotrophomonas maltophilia
atgtgcgaactgcctcgtactgcgcttcaatgcgcgatgttgatcatgctggtgcctttcgcagcaggtgctgcggtcaccgaagttcccttcgagctgggcaaggatcaccggatctacgtggagggtacgatcaacggctcgcgaccactgcgctttctcgtcgatacaggcgcgtcggccatggccgttgccaggcacatccagcaggacgcgaagctggtcattgacgaccagagtgagaacaccggttccgatggcgtcacgcttctcgactacagcacgcacaacgccgtgcagatcggcggcgtgcagcgaccgatgggggccgtggtgatcgactacacggggcgccccttcgatgcggtactgggctggaccttcttccagggcaaggtgctggagatcgactacgaccgcagcctgctgcgcgtgcacgacgatgttcccgaccttgcggggtatatccgggccaacgtgcgctggatcgacaatatcccagccatccaggtcacgctcggcaacggcagcagcagtttcgcaccctggcttaccctggacaccggcagcaacggcaacatcgacctgtcctacgccttcggcagcgcccaccgcctgcaggaagcgtttccggaacgacttggaacatcacagttcagcggcagcgcgggccggaagatccgcgcggtggacgtgcgcgtgcccgtggccagcatctcgaccctgcaactgaaggggccgaaagcctcgatcaccgtcgatgacgatggctccacggacgacgggacgcttggcagcgaagtcctgcagcagttcaatatcctgctggatgcccgttccggcagcatctatctgcgtcccaaccgtcgcttcgtcgccaccccggcggggtga

SEQ ID NO: 507495 - DNA, 927 bp, Stenotrophomonas maltophilia
atgcccaccgagatcaatgacgatggccttgattccacccttctgctgaagggcctgtttccgctgccgaagttcatccgcttcgtccgggagcgttgcccaccaggaagctttgatgaagcgatgctggtggagcagtggcgggatgcccgcgccctcgtgcgtcaccttcatcacgacgaagcagacgacgccgatgccatggacgtcctcgacctgcccgaagagatgcggccactggccgagcaggcgcttcgccaaccctcgatgcaccgcatgacgagcgtggtgccccgcagttggcagatggtggagatcgaccggctggtggttttccaggagtgcatcaacctgcgccacatcgatcagcttgcagcggccacggccgcgtcacccgatgcaagcgagatcatggagctggtggcgcgacgtggacgccacgcacatccggatgtgcgctttacccagtccgatggcatctacacgttcgcatctgcgtccaacgacctgcgcttcctcgacgtggcgacgatcgaccctcgcaccatcgccggttacgagccgttcggcgcagccagccacgcccttgtcgtctatctcggtttcagtgacaacctgatcagcgccacacgcattggccgccggatcatcctgaccaacggctcgcaccggctgtacctgctgcgcaggctcggcttccgccatgccccctgcctggtgaccgatgcgtccgacagcgatctgtccgacgtgttgctgcccgccgcggtgaagcaggatcggccgttctatctgggcgcttcgcgaccgccgatgttcaaggactacctggatccacgcctgacctgcaccgtgccggtcacccgcaagcactatgcgctcagggccaagctggatctgcagcggatcacggttccagcggtgtag

SEQ ID NO: 507496 - DNA, 702 bp, Stenotrophomonas maltophilia
atggaccagcctgaaaccacctacttcctttcgaagcacgcacatgtctgtgtgaccggtgacgcaatggtcattcttgatcaggcctccggcagctatctctccatcgatcggcgcggagcggcggcgcttggcgggctggtgcaggactggcccctggcttccgatggagcgccgaggccgaggatgctgcagtcgctgcttgatcggcgcctgatcacccaggatccgctgcgtggcaaatccgcagcaagtgccgaaatcgcgttgccccggcactgggtgcgcgagggcgagtcccgaggatgtccgccgatcacggcctgcgatgtgcgccgcttcctggcctcggtcacgcgcgcggcctgcagcaggacgttcctgcctttcagctacacggtgtcggcagcccgcaggcgcggtcaggcctccgtgccgggcgaggtggatctgcagcagctggccctcctggtccgggtgttcgattggttgcgaccgatcgccttcaggaagaccgatgagtgcttcctctactgcctggccatgcgtgagttcctgtcgcggtacggcatcgttcccgcgtgggtgttcgcggtgcgcacccagccgttcgcagcgcattgctggttgcagcacggcgaccaggtcctgaccgacatccccttcaatctgcgccggatgacgcccatcctggtgctgtag

SEQ ID NO: 507497 - DNA, 1842 bp, Stenotrophomonas maltophilia
atgtaccgatacatcgctctgttctggaacgaacattccgaatccgctcgtgcgcaggctttgcaggccatggaacggatcgaagcgggccgccccgtaatcgcctgcgtgatgaagggctgcggcggcgccatctatgcccagaccgacaacccgggctacttcgagtacagccggtccggtccgctggtggtactcggcaagctgttccacaaggtgttcgccgccgataccgttcccgcacaggcatttcccgatgctgcatcggcagacagcgcctgcagtacgcagggcaggagcctggtggagcagtactgggggcgctacgttgccgtgggctaccagccggataccacccgctggttcgtgctgcgcgatccgacagcggagattccgtgctacatgaccacggtcgatcagttgacggtggtcttttcgaacatggaagactgcctgctgctgggagtgggtgacttcaacgtcgactggtcgttcctgtcctattcgctgctgttcccgttccgtgacggcctgcagacaggcttcgaggaggtcaccgcgctcgaagcgggcgaggcagtgacgatccgtgatggccggccgatcggccggcactaccagtgggatgtggtgcggcaggccagtgaagcgcccatcgaagatctggaggaagccgtgcaactggcacgtgcaacgctgctgggctgtatcggtgcgctggcgagccagcatcgatgcatccagcttcagttgtccggcgggctggactcctccatcgtcctcgccggcctgctgcatgcgccctccgcaccggaggtgaagtgcgtccatcactacgatgccggcattggtgccgatgagcgcatgttcgcgcgcatggccgttgccggtgcccgtgaatcctccggaagacgctgcgagttcgtcgagtacctgcggcagccgcactgctcgctggaagagatcatggatttcccgcgaaccgcgcgtcctgcgcattgctcgggttacctgctgcatcggcgcgacgtggatgtcgacgtggacacggtgcagttcaccggtgtcggcggcgatgcggtcttcctccgcttcaagggcaatgccgctgccatcgactatgcgtggcggcgtgggatcgaccgtgactttttccgtgtcgcgttcgaaaccgcgcagtcgggcgattcgctgtacggggtattcaaggatgccttcgtccacggcgtgctcaagaagccgggcaacatcaatggccgctggggcaacccgtgcgaatgggtgaaggtggatgcgtccgaacaggatggcgtgccgccggcctggctgcggcatgcacgcgcacaggggcacaggctctctccgcacaagctggcgcacatcggccggatgatcttcccgaccagcgtgctcgatcccttcgagggcgccggacgctggcacggcgtatcacccatcagcgcacagcctgtggtggaactgttcgcccgcctgccgctgcacctgctgatggccggcgcggaagaccggacgatcgcgcgtcgtgcactgcagggcctgctgccgcaggcgctgctgtcgcgcaaggtgaagtcctacctcgacgatcactcggtggcggtcacccagcggcatcagcagttcatcaggggcctgctggtggatggtctgctggcgcggcggggctacatcgacagcgcatcggccgacgcgggcatccgcagggtcagcccggatcactcatcccaggtgctgggcatcttcggtccacaggtcaacatcgaagcctggctcaggcgctggatgggccggccaggcgcgcctgcggccggcgtggcctag

SEQ ID NO: 507498 - DNA, 1359 bp, Stenotrophomonas maltophilia
atgagcagcctgtcgatcgcagggcatgagatccgtcgcctgcttcgtgaccgggcgttgccggtgctgcttggcctgctggtggtgctggcggcctatgcagcatggaatggcagtgcgtgggtcgggcagcgcgaggcagccatcagcctgatcaacgcggaagaacaggatgccatggaccgcagccgggggttcgttggcaaggcgccgtcggtactgccccgcgtccagccggtgctccctcccggcccgatggcggcattgtcgattggacaggcggacgcctacccctacaccgccgatgtggttgcgctgggtgaccgtacccagctgctcaggcatgtgtggtccgacatcggcaatcctgccgtgcaggccgctggccgattcgacctggccttcgtcattgtgtttctgctgcccttggtcatcctggcgaccaccttcgatctctggtcgcgcgaatgcgagcgcggcatcacagcgttggtgttgtcacagcccatcgcggcaggacggctgatcgcggtgaaggccctggcccgaggtgccatcgtgctgctgcctgcgctggcgatcatcattgccgttgccgctggctcgggcgcaatacgcccttccggcctggccgtgcttgccctgatcgtgctcgcctacggcagcttctggctggcactggcggtgcttatcggctgcttcgcccggcgcaccaccgaggccgcgatcgccgctggcgcactgtggctgctgatcgttgtcatggccccatcactggtcctggcagcggtgaacctgatggttccaccgccctcgcagatgcaactggcgaccgcactgaaggcgcagctggccggcactgcccgccagcagcagcagcgccacgcggcagcctcccccgccacccgttcgccagcaccgcgcattgcggacgccgtgcgcgtggcctatgccgatcttgtccaggccgatcaggccatcgcgcccttgatcgccgcgcatacggaggctgaggacgtgcgacgccgggcactcgaccgggcgcgcctgctactgccgtcggtcgcggtgcaggatgcactggaccgccttgccggatccgacgccgaccgggcgctggcgttccagcagcaggtcctcatgtactggcacgcacgtcggcagctgcacaaggcctatctggaccgtgacgtgccacagacgctggccgagtacgacgccctgccccgtttcgaattccaggacacggcgggcgccctgcaacgcggtgtaatgatcgacctggccgcgttggcggtcgccaccctgcttctgctgatcgcagcctggtcgatgcggcgtcggctggccaccccctga

SEQ ID NO: 507499 - DNA, 1464 bp, Stenotrophomonas maltophilia
atgagcgatgcctcccccaccttctccagacccgcatccgccgtgcgccagaccctggtcgttgccgcgacccagctgaagctgatgtggcgcgagcggcgcctgttgtggctcgcgctgaccctgctgctgcttgcgggagcgtcggttaccacgggcgcagcacggctggcgcagcaggcccaggagcgccagatcgtagcggagcaggaggccgggctatgggacagccagggcacgatcgacccgcatgctgccgcgcacgtcggccgcgccattcccgcgccggtgcggccgctggcggcgctcgacccgggcatcacggatttcgtcggcacctcggtgttcatcgaaggccatgcgcagaacccggcccggcaccgacccgtcgacgccggcaccgcgctcagccggttcgatggcttctccgccgcatgggcgctgcaggtcgtggcgcctctgctgatcatccttgccggattcgccagcctctccggagatgtcgcccgcgaaaccctccgccaggagctcggcagtggtgcatcggcccacgtcctgatcggcggccggctgatcgcgctggcaacggcatcgctgctgctggtgctcgccctgctggtggtcagtgttcccggcatggccggacgcaccctcggcacggccgacatcatggcgctgattgcgatgttcgcggcgtatgcgctctatctcctggtgttctgcgccatgaccatcggcgtctcggcgcgcttcagcgcagcacgcacgtcgttggtggtgctgctcggcttctgggtggtagccaccctgctcgcgccgcgggtggcccccgcactggccgaatcactgtatcccacgcctactgcccccgcgttccgggcggcggtcagcgaggacgcagagcacggcgcagatggccacgacccggcggacaagcggctggatgcactgaaagcagagatgctggcacgctatcaggtgaaggacgtggacgatcttccggtcaacttccgcggcgtggcgctggagttcgccgaagccaattccaccgagacctacaaccgccacttcgaacgcatctacgctacctaccagcggcaggcgatcacgcagcgcgccttcgcggcgctgtcgcccaccctcgcgctgcaggccgcgtcacgggcactggcgcgcaccgacttccctgcacaactggcgttcctgcgcggagtcgaagactatcgctaccggctgatccaggcactcaacctggaagtgaaacagcacaaggccgcgaacggcagcaagcatctggccgatatcgcgacccttacccgctccgtggcgtacagcccgcaacaaccgccgctgggccacatcgccgcggcacagtcggtgaatttcgccatcctgctggcctgggtgctgctggccctggggctggtgttcacgtcggcgcggcatctcgggagtgccccatga

SEQ ID NO: 507500 - DNA, 2385 bp, Stenotrophomonas maltophilia
atgaacaacgcatccaccgccaggccggcggcattggtggtcgccagcctggccgccgctctgcagctcaacgctccggcaatggcgcaggatgccagcgttcccggcagtcctgtccagggcgaccggcgacccgataccgccacgctggacaaggtgatggtcattggcagcaacatccgcgatgccattggcggcggcgcctccccggtcatcgtgatcgaccgggaggccattgatcgaaccggggtggcctcgttgcagcagctcttcgagaagctaccgcagaacttcggcggtggtgccaacggcgccaacgtcggcaacctcggcgtcgaccgcgataccggcaacaacttcggccagggcaccgccatcaacctgcgtggcctcggcacgggcaccacgctgacgctgatcaatggccaccgcgtgaccccctcgaaccgctatcagtacgtcgacatctcgctgattccgctgagtgccatcgagcgcgtggagatcctcaccgatggcgcctcggccatctacggcaccgacgccgtcggcggtgtggtcaacatcgtcctgcgccgcgatttcaccggctatgaaacctcactgcgctacggcagcgtcacccgcggcaacatggacgagtaccaggcatcgcagtcggccggctggtcgtgggagggtggccacctgatggccagctacgagttcctgaagcagtccaacctcgccgcggtcgacaaggacttttccaggaacgtcacggtcaggccgtacgacatctatcccggctcgaagcggcacagcctgtatctggacggcgtgcaggcgctcagtgatgtgctgacgctcaacttgaccggctcctttgccaagcgcgagatggacaccaccatttccggcactgccgacgagacccgcctgttcccgcacacgcggcagttcgatgtgttcgccggccttaccctcgagcttccgcgccagtggcaggcccgtctgaattccggattcggcagaagcgacgtctcctacgagagaaccaccatcaccggcagctcggtcagcaccgcaccgccgacggatacccattccgaatcgcgctacctggagatgatcgccgacggcgagctgttcaatcttccggccggcggcgtacgcgcggcattcggtgcgggctaccgccgcgatggctatgaactgctcgatcaccgtgggcttgagaagccgctggatctgcagcgcacgatccgttccgctttcgctgagttcaacattccgctgctggcagacatgcctggcgttcgccggctgtcgctgactgcggccgcacgctacgacgactacagcgatttcggttccaccctcaatcccaagctcggcctgctgtgggaagcaacggaaggactttcattccgcaccagctacggccgctcctaccgggcgccggtctaccaggacatgcagctgaacaacaccgtggtggtggccaaagtacccaacccgagcgcggccaacggaagcacggtgctgatgatgctctccaacggaaacccggatctggggcccgaacgtgccaagacctggaccggcggcgtctcgttcgcgcccccgtcgctgccgggcctcaagatcgacgcgaactactatcacatcgagtatgccgaccggatcggcagcggtttcggcggcagtttcccgtcgctgttcctgcagtccaccgcgccctatgcggacctgctgaccgtcaacccgacgccgcagcagatccagcaggcgcgccagctgggtgcctccggcctgggcctgttcgtatcgcgggtgggcccttatgccctggcaccaggaaccgatgaaaccagcagcgaagtcatcctggacaaccgctttcgcaacaacgcgttcacttcgcagcgcggcgtcgatttcaatgcctcctacgatttcgacgctggccagacccgcatcgcgttgaaccttgccggccagtacatcatcgattccaagcgccgcgtgaccgccacctcgcccgaggtggacgcggtgaatgcggtgtacttcccggtcgacctgaaggtgcgcggcggcctcgccatgagccaccggcaggttgccggcgggctgttcgtgaactacgtggacagctatcgcgatcccgccaaccgcgccgacccccatgtcagctcgtggacgacggtcgacctcaatctcaggtatgacttcagcggtgctgccggtgccggacagggcacttcgctggccttcaacgtgcagaacctgttcgaccggaatccgcccttcatcgtcaacagcatcaacaccggtttcgacccgaccaatgcaacggcgctcggccgattcctgtccatgacattgacccatcgctggtag

SEQ ID NO: 507501 - DNA, 1650 bp, Stenotrophomonas maltophilia
atgagaatgttcgcgctgccgccgccggtcaccgagatcctcaccgcgtactggaaggcggaccgcaggctgctgctgttgattgccgccatcgtcgtgctttccagcctggccacggtggcagcgccgtacctgttctcgcgcctgatcgaccgcatcagcacggaaggcatccgtgaactggcgggagggttcctgctctacgcggtgatgctcggcgccgccagcatcctgcagaacaccgtgcagtacctgtcgttcctcagtggcgagaacctgggtttcatcaccagcacccgctacttcgcgcggctgctgaagaagacacacagcttcttcctggattacaacgcagccgaactgcaggtggccggggagaagggccgcaacgccctgaagatcgtggtgcagctcggcctggtggtgttcattcccagcgcactgcagatcctgctgaccctgctgacactgggtgcgctgatcaacctgcagatggtggcgatcgtgctgggctacggttctgtggccgtcacgctctcggccatcgctacgcggcgagcacggatccatcgtgaggcggcggtcgaagcgggccagcagaatgcgcgcttcgtcggcaatgcgatgaacgcgatggagacgctgcggcagttcggcggcagcgcgtggatgatccagcgcttcgaacagaaggcccaggaggtgcgcgacagctggcgggcctacgtgctgcagcgggtgggcttcatcgcgctgctgggcatcggcctggcggtcgagttcatcgtcaccttcgcaatgctgctcccgcgctatcagagcggtgacctgagcgtcggcgatatcgtgctgttcaacctgctgttgctgcagctcaacatgccctttgaaatgatggcgcgctcgatcgatgacgttgcccgttcgtggacgctgctgacgccgctatcgtccctgtgggcggcacccgaagagcggcaggcagcaaacgccggccgattccacggagaatgcggccggatcgagttccagcatgtcagccatcgctacggcaatggccgcggcgtccgggatgcgtccttccacgccgggcgcggcggcatcaacttcctgatgggggagaccggggcagggaagtcgacgctgttcaagctggcactgaagtcgatcgagccccagcacggtcgcatcctggtggatggcatcgacctggccgacatcgaccgtgccgcgtggcacgccgccgtcgccgtcgttccccaggatgtcatcctgctcaacgagagcctggccgacaacatcctgctggggcgcccgcgcgacgacacccggttgcgccgcgcgacccacaaggcgtcgatcctggccttgatcgacgcgctgcccgagggctttgaaaccacggtgggcgagcgcggcctgaaactttctggcggcgaacggcagcgcatcgccattgcgcgtgcactctacggagagcccgccatcctgttcctggatgaagccagctcggcgctggacgaggcgaccgagcgcgagatcatgggccatatccgcgcgctagccggtgatgtcacgatcgtggccatcacccatcgccgcagcgtggtaaccgcagccgaccaggtgatcgtgctggccacgggctga

SEQ ID NO: 507502 - DNA, 816 bp, Stenotrophomonas maltophilia
atgaagcgctggattttcctggcattggccacgctcccgttcgccgccggtgccgtggtcatccgcgatgatgttgacgatgccaggtaccggatcgacgcatcggtgttcccggcactggcagacatgccgggcgaggggcacggcgtcctgatcgcgccgcagtgggtgctgactgccgcgcatgccgcgccgatggaggggatggatgccacgatcaccatcgatgggaagggctacggcgtcgagcgtgtcttcctgcaccccggctaccggaggatgcccgaggcgctgggcaaggaagcgatggcaaccgggagcgcatcgaaaatccatgcgtttctggcagcgtcggacgacattgcactgatcagacttgccgccccggtgagcggtgtgccgccggtcgcactctaccgtggcgccgacgaggtcacgcaggtcgcctccctgatagggaaaggcgccaccggcaacggtgccgtggggctggcgcccggcgggccgcatcgtacgacgctgcggcgagcctgcaacgcgatcaccggcggcaacacgcgctatctctggtaccggttcgatccacctccgcagggccttccccttgagggcgtgctcggcaacggcgacagcggcggcccgctgctgatcagtaaggaagggacctggcagctggtgggcctcggctcctggatcaccgccgttcccgagcatgcgctagaggcgggcttctatggccaggtggtttacaacgtccgcgtgtcccgctacctcaactggatcgaaagcatcatcgagcgtgatgcgtcacgttaa

SEQ ID NO: 507503 - DNA, 849 bp, Stenotrophomonas maltophilia
atgcgtgttttcccggatgacaactttctggattcagcttgtcggtcgatttccggtgaagctgccaaggcgctcgtgagcttgaaaggcgggcgaatcgctgaagatgccgtatctgtcatcgaagactggtttgagccgtccctcgagaaggcgcgcctgctggcggatcttgatgaaagaatcaggatccacagcagcgaaggggaccaggggctgctgcggcctgcgctgaaggcccgggcggtgatcgcggcatctcccgagcccgcgcccgatgactacgagccttcattcaaagtagtgcctgcgacaacgctaggtggcgactggaaatccgactgcgagaccgactgcgtgattgtcgatggtgatctgatcgcagacggcacgctgatactgaacgatctgagcgagacgctctgcgtgatcgtactggggagcctcagggcccggaatctcgactgtggtggttgggtgttcgtgcgtgatgagctggaatgcgatcatctgtacgcgtgctcactcaatgatgggattctgtccgtaggtggcaacatcactgttcagaccttcctcgagaccggcacctacacacaagtggcggggcacctgaccgctagctacctcggcagcacccacaactccattgacgtggagggcaaagtgaactgtccaggcttcgaaagacggtctgatagcgactacttgtgcgaatggatcgatcctgtgttgctggaagccgacgattccgacggcgattggagatgcggacgccaacggtatccgtcggctgactatccagagcggatacgcgcggggggcagccccatgaagttcgtgctctag

SEQ ID NO: 507504 - DNA, 132 bp, Stenotrophomonas maltophilia
atgaacgatgtagagaacgacgcgcccgattccccgcgagacgatttcacgccgctgctggaccgggatgaggtactgcaggatgagcgcgaggatcgacttgggttcgcccggcgcacgatgcgctgctga

SEQ ID NO: 507505 - DNA, 384 bp, Stenotrophomonas maltophilia
atgcaagagaagactcatcacctcaggatggcagcgacaggaatcacattgctactggccgcctgtacctccgtcggcgacatgcgacgcactggacacgtcgcgacattctcgtccgatcagaatcccttggctgcggccacttgcgtacgcgatgcgtggggagaggtgagcattgggggatcgcactggcagtacgtcattgagccccgttccgatggctactccgtgtccacttccaacggcggcgtcccggcagagtttgttgagatcacccctcaggctggaggaggaagcgagatcaagttctacagcaagttcctgaagcgccggcaggcacgctacatcgaggccgccacgcaatgcggtgcccgcacgaagtag

SEQ ID NO: 507506 - DNA, 480 bp, Stenotrophomonas maltophilia
atgatctccggaacgcttactcaagagcatcatctccacgcacttcgcctgcaccggcggaaggcggtaaaggtactggtaggggtcctgctggcatgtgcggtgatcggcgttgtcgctcttgccacggaccatcacttctctggccttatcctggtctgcggcggcgtcggtggcgcgatcagtgcgttcgcccagtccaggctgaccctgccccgtcaggtggccaagatccaccgtcaacaggcgagtctgcacgcccactacacctatagctgggacgaagagtggctcaacgttgcgtccgagcatgtgcaggccaaacggcggtggtcggattacgccaaggtgcgggagaacgaggaagtgctgctcctctaccactcggacgtcatgttcgaggttctcccgaaagcatggttcaacggccaggcgcagatggatgaattccggagattggcctcgcgcgcagcgggctga

SEQ ID NO: 507507 - DNA, 987 bp, Stenotrophomonas maltophilia
atggcgttgagcaagtggatgatggccgcctgcacggcagcggcactggcaacgggcgcgcacgccgcgccgccggccacctcgggtaatccgatcctgcaggggtggtatgccgacccggaagcggcggtatttgcaggccgctactggatatttccaaccacctcggcggactacgatgcgcagattacgttcgatgccttctcgtcgcctgatctggtgcattggacaaagcatgccgacgtcctgaacgccaggaacgtgccctgggcgaagcgcgcgatgtgggcgccgtccgtcgtggaaaacaacggcaagtactacttcttcttcgccgccaacgacatcaagaccgatagcgagctgggtggcatcggcgtggcggtggccgaccgcccggaagggccctacaaagacctgctgggcaagccgctggtcggcgctttccataatggtgcgcagcccatcgaccagttcgtcttcaaggatgacgatggcgcctggtacatgatctacggcggttggaagcgcgccaacatcgtgcgcctgaaggatgatttcaccggcgtgctgccgctgaccgatggtttgctgttcaaggagatcaccccggcgccggaatacgtggagggcccgctgatgttcaggcgcggaggccgctactacttcatgtggtccgaaggcggttggggtggcccggattactcggtggcctacgccatcgccgatacacccaccgggcccttcaagcgcatcggcaaggtgctgcagcaggacgaggccatcgccaccagtgccggccacaactcggtgatcaaggtgccaaatagcgaccgctggtacatcgtctaccatcgccggccgctgggtgacaccacgcgcgaccatcggcagaccgccatagaacgcctggaattcgatgcgcaggggaacatcctgccggtgaagatcacccgcgagggtgtggccgccgatccgctgcgctga

SEQ ID NO: 507508 - DNA, 426 bp, Stenotrophomonas maltophilia
atggcacataacggcagcacggcgatcgcgccgagggtcctgtacgtcgcgggggcggcagcggtgctgatcagcctgttggcctggtcggtggaatggagtgggctggcctatgtctgcccttactgccgcgtgcagcgcaccgtcatcggcgtgctgggtctactgatgatgtctgcacggccgggtggcatcgtcgtgccgtggctttcgaacgcgatgggtggtttcgcgttcgtggtcgcggcgatgcagcacttcaacggctggaagcgaatctccgccggcgaattcagcttcaatgcccagtggtacatcgacccatggctgctgtccggctgcgcgatgctgatcctggtggcacagctgatgctggtgcaggccgcctgccggcgcccggtgcacgccgctctggaggccgcatga

SEQ ID NO: 507509 - DNA, 417 bp, Stenotrophomonas maltophilia
atgtggcagcgccgcacctccctggccgaactgcagcggcaacgcgatgtgctgcaggctgagatggatgcggatgcccagcgacgggtctcacggcttccgccggatgatctcgtggcagcgctgatgccgcaggcgcaccggctccaggagctcaatcagctgatcctgcgggctacaccgccgcgtgaactgatgaagcgcctgaaggcgcttgagcgacagctgctcgaacccggtgcacagagcgcaggcgtgcggaaggagctggaagatgaactgcgcgatctgcacctgtacttcagcaatccgcgccgtcgccccttgacggcgaaggtcctgctgatcctgttggccagcgttctggccgccttgttcctgccggggctgcttgtggacctgctggtcgctctctag

SEQ ID NO: 507510 - DNA, 951 bp, Stenotrophomonas maltophilia
atgtcctcaatatacgccaagcgtacgctggccattcccccacgtacacctgcacgcgtgaactatctcttcccgatcttcgcctgcctgctgtggggcgcgaacaccatcgtgaccaagcttgcttcgggctcggtcggtcccatcgatatcggcttcttccgctggctggtcgcggcggtggtcctgctgccattcgcgctgccgcggctgcgcggcaatctgccgaccgtgcgcgccaacctcgggcgcttcctggtgctgggctgcctgggtggggtgatgtaccagtgcctggcctaccatgcggcgcacttcacctcggccaccaacatgggggtgatccaggcgctgattccgttgatcgcgctggcgctgtcacgcgtgttcatgggccatccggtgcgtggtacttccattcttggcgcggtgatctccaccgccggcgtggtggcggtggtatcgcagggcgacctggcacggttggcggcgcagggcctgaaccgcggagacgcgatcatgctgatcggcgcattggccttcgccgcctacaacgtgctgatgcagcgctggaagattccgctgtcggtgctggagtcgctgttcctgcaggccacggcggcctcgctgatcctgctgccactgcagttgctggtcggtaccggggtgagcaatctgaccgccgttggttgcatcggcttcgcggcggtctgtgcctcgatcctggcgccgctgacctggatgaccggactttcacgtctgggcgctgcgcgcgtctctggcttcttcaacctggtgccgatcgtgaccgccgcgctggccgtgctgctgctgggcgaatcgctcagtggctgggtactgggcggtggcctgctggcggtgtccggcgtggtattcgccgagtacagcgccaggcgcgctgctgcggtgccgagcgagcagcccgcctag

SEQ ID NO: 507511 - DNA, 1485 bp, Stenotrophomonas maltophilia
atgaacaggattggattgatcgcattgctggcctgtatcgcccccgtccatgcagccagccccctgttgtccggcagctttgttcacgtcggctattcggccaccgacgaacagctgccagccgcgcaattgccgctgttcctggatgaactgcaggacctcggcaacgacacgatcatcctcggtcaggtgcgtgccacccgtgccggcgtgggatgcgccagcggtgtgcaggatttcgaatggattgccggctttcccggcaagctcggcaccgtgctcgatgcggcagccgcgcgcggcatgaaggtcgtggtgggcaccacctacagttcggggcagtgcgccaccttctggcagggccagaatgcaacggccgtggcacaggatgcggcgcagtcgctggcgcagcttggccagcagtacggatcgcatccggcgttcgccggctggtacatcaccgacgagccggcacaggtgccgattgatcgcgcgtcgttctatcgcgcgatcgtgacggcgctcaaaggcagtacaccctcgcggccggtgatggtggccccctacctggcgtcatccagcgtggatccggtcagcgtgggccgggctgctgcacagttccgtacagccaccggcgtggacgtgcagatctggcaggacggcatcggtgctgcctcgcatgcccgattgttccagtgggatcgcgcgggtcattccaccgaggcgtactacgaggcgctgtcggcggcgctgggtgccagcggcctgtgggccgacatcgaactgttcaaccatggcagccccttgttcctggagaccggcaacgggctgtccggtgcctatcgctccgcgtcggtgcagcgcatcaaccagcagttgtggagtgcgcgttcggccggcaagcgcgttgcctggctcaaccagtaccacatgtccgaggtggtcggccccggccagggctatggcgaatcgccgcggatgatgaacacctatcgcgggttgtatggcctcggtgcgtcctacagtgtcgatccggtgcagaccacctacagctacagcacggcgccggacgcaaactatcccgacagcaccgggcatgaactgttcgatcgccgggtgggggatccgcgcaacccgatggatgccggctgggtgggcgtgcacggcaatgtcagcatcaccatcgacctcggccagcgccggcgggttgactggatcggcctgcacacgatgacccgcccggcctggggcatcgtcacgccgacgtcggtggaggtgatgtgcgctgagccgggctctgccgcaacccgcatcggcgtgctgtcggcgccattcacccaggccgggctgagcggttcgaccgaagaggaatacgtgctgggcaatgccgcgccgctggccgcgcagtgccgcacgctggagctgcggttggccaatggcagctggaccttcctcagtgaaatcgagatggcagccgaacagtag

SEQ ID NO: 507512 - DNA, 822 bp, Stenotrophomonas maltophilia
atggatgacgtctcccgctgcgcgggggcttatcgagggacggcgctgacgcgccgtccttttttgttgctggctaccgtgagtagaagccggcggtgtgctgcgctgagggcggatgggcgtggggccagcgcaaaacacgccgtaaacccatccatgggggctcggtcggcgcatccatgcgcctcacggttttgcgctggccccacgcccatccgcttcaagcattgcccgcgccttcttctcccgccgggtagccggaagaagaaagatcaaattcaaattcaaattcaaattcaaattcaaagtcaaaagccgaagccgcaattcctagctttgcctttgcctttgcctttgcttttgcccttgctcccgccttggggtctgatgcgtccgcgcccgcaggaaactgtcatgggaggcagggggcctcagccaggaccgttggcgccatgggctcgaggcatgcctcgggcgggttgggcaggacgcccaaccccggtcttgccgtgtgcgcaggaaagcgcacacgagcaaggcgccatcgagcccccatggatgggttcacggcgtgtcctggctgaggccccctgcctcccaagcacaacaacgactcggcgccaaacgcctcaaccccgcgctttactcggattcaccagattcccgaagaagatcgcgttgatcagcagccggtccgtcccgtgccagtacttgcggtgcgccggatcatcggcaaacagcacaacgttaccctgcccctgcgccgacaccagcaaccatgcactgcccgccacccgcgtacggttgcgctcggacaggtaa

SEQ ID NO: 507513 - DNA, 342 bp, Stenotrophomonas maltophilia
atgaaagcagtgactgccgtgccgggcgtcacgatggtgatgacgctgcttctttccctggcaggtgaatcgagagcaggcggcgtgatcgagtgcaacaactgtccctctcccagcgatgcggccttggcctcgggagagggactgacggttgtggtggatttcgagagagccgagttgacggctttccacgttgaacatgaccctgagcgcagaaagtggcgagcacatccgacccaggttccagcgcagattgaaatggcttttctgcggatcctggatgcgacgctgtcagcagggcaagcgccgctcatgcagcaatcaccgcatgagcagcagtga

SEQ ID NO: 507514 - DNA, 147 bp, Stenotrophomonas maltophilia
atgctcggctaccggggcctggccgcgctgcgcgcggcagccgagcgttggctcggctctacaagaaaaccggaagccttattccagccccagccagccgccgatcacgccgcgggcttcgtccacaccggtacggtcttcgcctga

SEQ ID NO: 507515 - DNA, 519 bp, Stenotrophomonas maltophilia
atggccagccccagactccgctacggtcgttactccagcaccggtaacgtttattcactgaccacggcaacccttggccgggagccgttcttcgcggatgccgccaatgtggcgatcctggtagatgcgctgcgcttcgtcgaacgcagcggtttcagccacagcctggcatgggtggtgatgcccgaccacctgcactggttgatgaaactgcgcagtggaacccttgccgagtgcatgtcgctgctcaaatcccgcagcgggcggctgttgaaccagtatctggatcgacgcggcgcactgtggcagcacggctatcacgaccatgccgtgcggaacgacgaatcccttcacgagaaggcgatgtacatcctggccaacccgtccggagcggcctggccagcacgttgggcgagtacccgcatgcatggtgccgttggccgttgtagatgccggggggcggaacgaagagcatccacgcatggcgtggatctacttcagagcgccccacatcagtag

SEQ ID NO: 507516 - DNA, 2859 bp, Stenotrophomonas maltophilia
atgaacgttcgtaatcccgcagtgcggctgggccttctgccggctggcattgcgttggcgctgacgcccgcctttgcttctgcgcaggaagcaaaggatgcgaccaccctggatcgcatcgaaatcacgggctcgcgcatccgcggcgcctcgatggagacccagcagccggtcctcacgctgagccgtgagaacctggaaaagcagggctacaccaccgtcgccgatgtcctgcagaacctgacctcggcaggttcgccggccatttcccgcgcggactcgctgtcctccggcgaaaacgttggcggctactacgtcgacctgcgcaaccttggcgcgcagcgcaccctggtgctgatgaacggcaagcgcctgggcgcgaccactgccggctaccaggatctgagccagattccgatggccgccgtcgagcgcatcgaagtgctgaaggatggcgcctccgccatctacggttcggacgccattgctggcgtggtcaatgtgatcacccgcaagcgtttcgatggtgctgaagccagcgtctacgttggccagtacggccgcggcgacggcgacaccaacacctactcgttcaccctcggctctgaaggcgagcgtggcggcgtgaccctgtcggccgagtactccaagcaggatccggtgtgggcgaaggatcgttggttcagccgcgacggcggcctgggcccgaattcgacctctgccgactggagcccgctgagccagaacagcacctggtgcgacccgcgcgtgtggggcgactgcaagccgcgcgctgcaggccagccgcagccggagtggaagaccctgaatccgggcggtgacccgaagaatgcggccgactaccacctgctgactccggccgagtactccaacgccaaccagcagatgatggtgcagaccggcatcgagcgtaagtccgtgtatgtcaacggcagctacgatctggctgattcgatcaccttcaatgctgacgtgctgtacaaccagcgcaccaccgaccagcagatcgcgggttacccgtaccagtcgctgtcgttcggtaccccgctgtcgaaggacagcgcgttcaacccgatcggccaggacgttgagttccgtcgccgcctgtgggaagtgccgcgtaccaccaagagcgacctcaagaccctgcgcttcgcgccgagcctgagtggcttcttcgagttcgccggcaagacctgggactgggacgttggcgcgctgtggaaccgcaacgagctgaccaagaccggctacggcgacatgagcctgatcgcttccgagcaggcacttggcaagtcgttcatcaacggccagggcgttgctcagtgcgggaccgccgccaatccgatcccgctgagccagtgtcgcccgtggaacccgctgctgccttacggcgtcaacggccagggctcgcttgccgaccgtgatctgcagaacttcctgttcccgacctacaccgacactggtgtgaccaagaccaccagctacaccgccaacctgtccggttcgctgttcgagctgccggccggtgacctgggtgtggccatgggctacgagcaccgcaaggaagaaggccgcttcgtgccggacgccttccgtcagtcgggccagtcgaccggcctggcgtcgaccaccacctcgggcaactactcgctggatgagttctacctggaactgaacgtgccgatcctgtcggacctgccgtttgccaaggaactgaccttcaacgtcgcaagccgctactctgactacagcaacttcggtgacacgatcaactcgaagttcggcctggtgtggcgcccgatcgacgaactgctggtccgcggtacctacgcagaaggcttccgcgcaccgaccgttgacgatctgtacggcggcaccaactcgagcttcgagcgttataccgatccgtgcggttcgacctcgccgggcaacgtcgctggcaatgctgcctgcgccgcggctggcgtgccggccaactacgtgcaggtcggccagggcttcgcgccttgcagcaccttcccgtgcgcgaccccggaccagttcgtcagcggttcgaattcggctctgaagccggaaacctccaagagcaagacggttggcctggtctggagcccgcgttgggtgcagggcctggacatctcgctcgactggtaccgctacgagctgaagaacatgatcatcgctgacagcgttgatcgcatcctgcgtgactgctacgtgctgggcaacgcagctcgctgcgaaggcgtcacccgtgccgctgatggccatatcgaggcgctgacctacggcctggccaacctcggctcgatggagaccgaaggctacgatctgggtgtcaagtaccgcctgccggaactgtcgatcggcaagttcagcatcgactggcagaccagctacctggccaagtacgacgaagccggccagaacaagaagggtgagaacatcaccatcggtcgcgttggtgagccgggcctgttccgcgtccgttcgaacctgggtgtcaactgggagctgggtgacttcggcgtcaactggactgcccgctactactcgggcatgaaggaaagctgcatcgacgacgcatggtgcgacgctccgaaccactacgccaatggtgagccggatccgctgcgccacaccggctccaacaccttccacgacgtgcaggtcagctggaaggctccgtgggatgccaccatcgccctgggtgcgaacaacgtgttcgatcaccgcggtgcgctgcagtactcggcgccgaactcgagcttcgcctactacggtggcttcgacgtcggtcgcttcctgtacatgaagtacacccagcgcttctga

SEQ ID NO: 507517 - DNA, 210 bp, Stenotrophomonas maltophilia
atgaagtgcacgctgttgcacaaactgtctgctgctgcactgatctatgcaacattggtgggtgcggtgtttgcccagaccggtggcgtctgtgggggcgggctgtactgcgaggagctgcgtcaggaatgcctggctgcaggcaagtcgaaggtcctgtgcgatctgcagtatcgccactgcgtgcaggatgcctgcggcgcgcgctga

SEQ ID NO: 507518 - DNA, 1545 bp, Stenotrophomonas maltophilia
atgctggcggtgcacatccttccatcggagcccaacatgacccgcagcgcctctacctccgccggccgtttccaggttcgtcgccctgtcgtggctgccaccctcgccgtgctctgcctggccctggccgcggcccttcccgcgcaggccagtccggcggcgctgacattcgagccctacacactgcagaccaagggccatggcgatattcccgccgagatcgccacgctggaggtgccgcgtcggcacagcgagccggacggtccgcgcctgcacctgaaggtggtgcgcctgcgcgcgacggccggcaatggccgcgcggcaccggtggtctacctggcgggtggtccgggtggttccggtatcgacactgcacggggtccgcgctggcctgtgttcgaccaggtgcggcgcgaatccgacgtgctgctgctcgaccagcgcggcgccggccagtccgagccgccgccggaatgtccgcatgaaacacgtttcgacgacgcccaacccctgcagcgcgatacggccctggccgcagtgcaggccacggcggcgaagtgtgtagcgttctggcgtcaggccggcgtcgatctcggcgcttacaccacggccgagagtgccggtgacctcgacgacctgcggcgcgcgctggacgtgccgaagatcagcctgtggggcatgagctacggcacccatctggccttggccacggtacgcctgcatggtgccggtctggagcgcgtggtgctgatggggtccgaagggcccgacgatacgctgaagctgccgctgagcagcgacgcgctgctgcaggagctgacagtgcttgcgcgcaaagacggcttcgacgatctcgccggatcggtcacccgcgtgctgcaagcgctgcgtgagcagccgcggcagggccgcagccacatgcatgcgggcaagcaggtcaccatcggcctgtacgacgcgcagatcgtcatcgccaacatgctggggcagcgcatcacccagcaatggctgccgttggtgctgcgcgaggccgagcgcggcaactacgatccgctggcagacctggtgctgatcgggcgcgcccagttcgcacagttcccggccatgggcctggcgatggacgttgcttccgggcagagcccgcagcgccgggcgctggccgaagcacaggcacgccagagcctgttcggcgacgggctgaacttccccttcccggccatcggcgaaggcctcggcctggccgatctgggtgagggcttccgccggccgctacacagtgaggtgccggtgctgttcatcagcggcacgctggatggacgcacgcccccggccaatgccgctgcactgctgccggggttcagcaacggccacgcgctgctggtgcgcaatgcaagccaccacaacgagctgtggaccggcaaccccgccatcgcccgcaacatcgtcgacttcctcgctggccgcgccgtgagcgacaccgtgctggacgtgccgccgccggtgttcgccacccacagcagtgagtcgctgggcggcaagcgataa

SEQ ID NO: 507519 - DNA, 1719 bp, Stenotrophomonas maltophilia
atggccgccatgcagatcctacgaaccctggctgtcctcgttgtattgcttgcggccgtcgccgcgtggctgatcgcgacgacgcccccgcccggaatggtgcagctgcgcggggcggagatggcacctgcgaacctcggagcatccggccccctgccgacgcgaccggcgcaggacctggcttggcagccactggaccaacgcgcgctggcgcgctggcgcggcccgtactggctgcgctggcatgtgcctgcgccggctgtcgccggtgatcacggccgcgccctgcgactgtcgctgcgcgcggccagccagctgtactggaatggcacaccgtggatcagcaatggcgtggtcggccgtaccgccgaagaagagcggccgggacgcatcgacatcgtccgcgtgctgccgcctccttcggccaacgccagcgatgagctggtggcgcttgcgtccagccaacagcaacgctttgctctgcatggtgccgatgcgatggtactgatcgcgcctgccgccgtgctgtacggccaggtgatcctgccgtggctgatcgccgcgttcgccaccggtgcgctggcggcagcgtgcctgtacttcctggccgtgctgcggggacaggcgcacaaacccggcgcgcggctgctgctggcgctgggggtggtgggacttgcactgcccgcggtcgaggcgtggcgatcactgctgggctacacctacccgtggcacggcgttcgcctggtcgcgctgcttgcactgcatgtcatcgcggccgtgctgctgccagcctatcttgcgcgtcgcttcgaggtggtcgtgcccaaggcaagtggtttcatctatctggcgctgatcatggccgcggccatcgcattgcccggcttcgacacccgctcagcggcggtgctgctgttgagcctgctcgcctcggtgtgggtgctgctgcgcacgcctgcggggcaggaagaccgatggccgatcctggcgctgctgtctgccggcctgctcgcgctgctggtcgcacgcggcgccttccttgatggcccttacttcctgctgctggcggtgctgatggtgttcctgctactgcgccacgctgcccagttgcaggcgctagaccggcacaacgcccggctgcgcgaagaacgcgcgcagctgtcgttgcagttgttgcaacggggtatccagccgcattggctgatgaacacgctgacctgcctgcaggagctgatcgaacagtcaccgatgcgcgccagccgcctggtggagtcattggctgatcagttcgatcgcctgcgcgacagcagcagccgccagagcgtacccctgcaggacgagttggcgttgtgccgcagccatctggatatcgtcggtcttgctctggaccggcgcatgatgctggacgtcgagggcgaggatgcggcgatttcgttgccgcccggcatcctgcatgcgcaggtggaaaatgcactgacccatgccggtgctgtcgcctgtgcactgcaccctttccgcctgcgcgtgcagcgcgacaacgcgcgctggatactggaactgcacagtgcgcgaggctcggccccgcatcgcggacgtggcaccggcacgcgctacatcgaggccagtctggcggcagccagccccgccggctggagcttcgtgcagggcatcgacggtgaccactggtgtggccggatcgagctgacatgcgcatcctga

SEQ ID NO: 507520 - DNA, 1773 bp, Stenotrophomonas maltophilia
gtgaaaacccgtcttgccgttgccctgctgatcgccctgtccgcccctgctgtggccctggccgcgccgcccgccaccgccgcgccggccagcgtggccgccgaatcgcccgccgacgctgccttccgcgcgctgtacgagaaggaatggaagtggcgccagcaaggcggcggcgaggccagcgaggacgaagacgctccggccaacgccacccgcatgcccgacgtcggcccggccgcgcagcaggcgcgcctgaaggtgtgggacgagaccctcgccgcgctgaagaagatcgatccgaagaccctgtcgcccgacaaccaagtcaactacgcgatctaccacgaccaggtgttcaacctggccgaagagacgcgcctgcgtggctacgagatgccgttcaacgccgactcctcgttctggtccaacctgtccttcatggcccggcgcgagatgaagaccgtgcaggactaccagaactacatcgcacggctgaacgatgtgccgcgctacttcggccagcagaccgacaacatgcgcgctggcctgaagcgtggcttcagcgtgccgcgtgccgtgctcgatggccgcgaggtctccatcgccaccgtcgccgaattgaaggacccgaccgaatcgccgctgtacgcgccgttcaagaagctgcccaacaccgttccggcggccgaacaggccaaactgcaggcgcaggcgcgtgaagcgatcagtggcaaggtggtgcccgcgttccagcagctgcgcaccttcttcgtcaacgaatacgtgcctcaggcgcgtaccaccctggccgccgaagcgatgcccgacggcaaggcgtactacaagcagcagatccacgaatacaccacgctggacctgtcgccggacgagatccaccgcatcggcctggatgaagtcgcacgcatccagaaggaaatgaacgacatcatcaagcaggtgaagttcaagggcagcttcgccgaattcctgaccttcctgcgtaccgacccgcagttctacgccaagacgccggaagagctgctgtcgcgtgccgcgtggatctccaagcgcgccgatggccagcttggcaagtacatgacgctgccacgcgcccgcttcaccatcgtgccggtgccgccggacattgcgccgttctggaccgccggccgcggtggcatgggcacctactggctcaacacctacaacctgccgtcgcgcccgctgtacaacctgccggcactgaccctgcatgagtccgatccgggccacgcgttgcagggcgccatcgccgccgagcagaagaacctgcccgagttccgccgcaacgcctacatctccgcctatggcgaaggctgggcgctgtactgcgagaagctgggcgtggaaatgggcatctatgaaaccccgtacgaggatttcggccgtctgacctacgagatgtggcgtgctgcgcgcctggtgatcgacaccggcgtgcacagcaagggctggacccgcgagcaggcgttggcctacctgcgtgaccacaccgcgctgagcgagcatgaagtgaccaccgaagtggaccgctacatttcctggccgggccaggcgctgagctacaagctgggcgagatcgccatcgtgcgcctgcgtgcgcaggccgagaaggagctgggcgacaagttcgacatcaagggtttccacgacaccctgctcaagcagggctcggtgcccctgccggtgctggaacagcagatccaggcctacatcgccgaacgcaagaaggcctga

SEQ ID NO: 507521 - DNA, 477 bp, Stenotrophomonas maltophilia
atggcacgggtctttacagacaccatggtgctggttggccctgaggcgagtcattcccatgacatcgtccgcattacctcgcacatttacgttgcaagccagaagttcttggaagcctgcctgaaatttgatgccaagatgatcgatttcaggcgcattccccatgtttcagaggagggatggacgacttcaaagagcgagtacagtgccatcatcttccatgagacctgcctctcctccgtcgcctctgaggaaaaccagatggcgtatagcaagtatggagagtctcgcaggatcaagaagctgcgcgtgaaaagctccttcaaagaacacttgttccggcttaaaaacatggaaggctccagcaacaccttgatctgctcggaggactttcgtgcttacgtcggggatagtctcagcggcgtcgaatttgttgataccgcggatgtggagtggccgcgaatcaagccgatctga

SEQ ID NO: 507522 - DNA, 1119 bp, Stenotrophomonas maltophilia
atgcgcttgcaggctcttctccccgcactgctgctgttcgccgcgctgccagccggcgccgacgcgttgcagtgtggcgaataccgcagcgccgatggcggcatggcgttggtgttcaccacccccagcagcggctgccaccacgctgacggcagcgagcctcagccgctgtgggttgatcgcagtgcggcgcagacgcgcctggtcatgctcgacgatggggtggcggagccgatccggatcagtgccgatggccagcgcatcgaggacgacggggtggtgacctacacgctgcgccagtcccgtgcctgcaccgtcgagcccagcacgatggacggcagctgtcgcgccgccggcagccactgcattgcgcagctgcccacggcctctcccggccaggcccagcgcgcgtgcggcgaaggcgttggcgcgggctgctcggcgctgttgcgacaactgcgcgatggtaacgccgcagccgctggtgacaccggcgccgccctcttcgagcgcccgtccgcctgccgcgaacacacgcccgagcatgacccgcaggcctgcgaggcgctgaccggtgatgcgctggccaccgcgatgcagcgggtgggtgaacgcctgcaacaggaagacgaagacgcactggattcaccgcttccggccgctgcacgcgatcgtctgcagcagctgtgcctgcagcaccgcagtggtcgcttctgcgtcgaagtggccgaacagcagttgatcgcgctggaacccgcgttggcggtgcaggccctgcaggtggtctgcgatgcaggccgcatcagtgcctgcgaacgcgtcgcaccgctgcgcgatctcggcgcggacctgcgcctcgtcccggcccagcgggtgccgtgcggccgctatcaggccgacggtggcgtgatcgacaggctcgacttcggcgatggcgcgcgtggccgtctgcatgacggcgcgatccacctgcagcagaacggcgaagcccttgtgctgcgtcagctctgcaatggcgacctgcttggtatggatgcgcagacgggatatcagcgttaccagccggtgcccggcacggcacaatgcacgcccccgcgcgagggccgtggttcgccgtag

SEQ ID NO: 507523 - DNA, 1197 bp, Stenotrophomonas maltophilia
atggtgatgctgtccattgtgctgcaggcatcctccgatccggtcccgggacgcagcgggtcgctcttccgtccacacctggacgtgcgcccgggagcacagcacgcggcggcacctgatcctgggcaggggttgacctggcctgatgccaaagccctgctggaccaagggtatgcctggaatcaggcggccatggccggtggtgccgtgaccctgctgaaacccgggcaatcaagcgcccggctgcgtgccagatacgcaacgtcaggagtgttcggcgtgctcgggatcactctggtgcaagggcgatcgtggacggcggaggaagggcaggctggaagtcggatcgctgtgctgtcacgggcactcgcagcggtcgagtgcccggccggatgcatcggtcatccgctggagctgagcgggcgcacatacacggttgtcggcgtggcggaggactggcatccggtgccgatgttccagggagacgtgacccgtcgtcctttcgtggaacccgatcagatctatctaccggttgaaactgccattgcggacggattgaccgtggtcgacggcgtggcggtctggggcggtggggagggagtggaccttgctggcccgcaggcgtcctggctgcaactgtggacatggttaccgacagtggatgacgtgtctggataccgcgcgatgctgaacgcgtacgcgcaagcccgggatctgcaggttgacccggacagcgatcaggtcgggctctggccgctgatggcgtggctggaccgacaggggctggtccctgaacgcacccggacacagcttcatctggcactgcttctgctggtggtctgcatcgtcaatgcagccgcgctgctgggattcagcctgggcgcgcgccgtcgcgagcttgcgatacgtcgcgcgctgggtgcccggcggggggatgtttttgcccagctcatgtgggaatccgcatcgtcgggattggccagtgctgcattggcggccattgcgtatgcggtgggcatgcggctggtggcgacaggggaggtgcttccgtcggccatcactacgctggaccccgcgtccgtactgatggcagccggggttgggttcgcgacagcgctgttgtgcgcgttcatccccgcgctggaagtctgccggagcggatcgctgtcgcggttgtttgcaaagggagcggcgtga

SEQ ID NO: 507524 - DNA, 1200 bp, Stenotrophomonas maltophilia
atgctggattcaatgcaggaagtccgcaaccacctgggccgcgcgtcgctgctgtttgtacaggccgcactggccagcctggcctgcgcctttgccctgcagtctgccgcagatggtttctcacgattgaacacgcggggcatcgagggagcacaggcgatcggtgtcatccgggtctccgatatcgaagagagggtggcgccttcgttggtgcgatcggacctctccgccatccagctccctggcgtccggcaggcggtcgccagcgattcggttccgttcggaggcagggctcatcattacggtgcatgcaccagtgatgcagccatggcacacgccatggcggctggcagcagcgacgtggcaggctgtgatcgcattcccgtgataaccgccagcccaggcctgttgacgatgctgggggcacaggtggtgaaggggcgtttgccggcagaccatgaggcgaccgacggcgcgccggtcgtgctgatcagcgaggcattggccgtccatctgtttggctcggagagcgccgtgggtcgtcagctgtacttcgggccgggaagcagcagggtgatcgtgggtgtgttctcgtccatcgtcgggcctgcgccaagtggaaacgatcgggactcgcagtgggcgctgtttcccggttttccaaccggtgcgagccgctattacctgatcggatcccacgcggaggtggatcgcgtgttgcttgaccgcaccgttgaggcgctgcggcagccctatcgcgtcgtgaatccgacaggcgttgacacgttggccggatatcgcgatgcctaccttcgtgcagaccgcttcacgacggccatgctcgctttcatggcagcggtggtcctgggtgtgctgatggccggcgtgtccggcgtggtaggcgcatggctggagcgtaggcggcgctccatcggtatccgtcgaacgttgggtgcgcgcgcatcggtgatcttcacggagatcatcttcgaagtcagcattttcaccatttctggcgccgtgctgggcgcgtgttcgctgtacctgttctggtcgcccgaggaccgaagctcgatatcgtcgtggctgacagggttgatggcgttcatgttggtgatggtggcgagtcttgctgccctgctgccccgtgcatggcgaacggtgcgggaggagccattggcgttgttgaagccgttctga

SEQ ID NO: 507525 - DNA, 927 bp, Stenotrophomonas maltophilia
gtgagcctcgcgctgcaggcgggcgcgctgccggcgcgggtgctgatcctcggcctgggctggagtggccgcgtgttggccgcgcagctgcgggcgcgcggcgtgcaggttgcgggaacagtacgcgatccggcagcggcccccggcgatggcctgcgtcggcaccggttgcaggctgacgcctcgccttcgccggccctgctcgaggagatcgcacacgccgaggccgtgctgtgcagcgtgccgcccgatgccgagggcgatcctgccttgcgcctgctgctgcccgcgctgttggccagcccggcactgcgctgggtcggttatctgtcgtccacctcggtgtatgccgaccgcgctggcggttggatcgacgaaaccagcgccgcagatgccaccggggccgtcggtgtgcagcgcctgctcgcggaagcccagtggcgtgcactggccggacaacgcggcatcgcctcggcggtgttccgcctgcctggcctgtacgggccggggcgcaatgtgctgctgcagctggcgcaggcacgcgcccgccacgtagtgcgccctgggctggtgttcaaccggctgcacgtggatgacctggcaacggtcgttatcgcgtcgatgcagcggccgtgcgtggaggggctatacctgccggccgacgacgaaccggcaccaccacaggatgtgctggccttcgccgcgcagctgggcgggtttgcgatgccgccggccgtggcctgggacgatccagcgctgagcccgacgctgcagcgcttctaccagagcaacaagcgcatcgacagccgtggcacgcgtgcggcgctggggtgggcaccacggtttccgacgtatcgggaaggactgcaggcgctggccgcttcgctcgccgggcatggcccggcgctaccggacagcgctttgtag

SEQ ID NO: 507526 - DNA, 609 bp, Stenotrophomonas maltophilia
atgttgctttcctttgcgctggccgctgccatggccacgtcagcagaaccgccagaagcgcccgattgccgctacgaccgtgcagcgatgctggcgatggaaccggatgcgttcgatcaggacctggaaggtggctggcgcacgctggccgaccgtggctgtacccgcgaagcggccgacctgctgtccgcctacggcgcactgccccaggcagaaggcaatgtcatcatcacgtggcacgagggccagctgcgcgcggagctggggcagaccgcgcaggcgattgcgctaatggaacgcagccacaagccagtaaacgggagcgacccgggttactggaatgcctacgtggacggcatggtcgcgttcctgcgccaggaccgcagcgccttggagaaggctcgtgcgaggctggtcgcgataccgacgcccaccgcgatcgcggagaacatcaaggacggccgctaccacttcaccaccgagggcgggcagcaggtgcggatgccgtggccgccgaacctggacgtgcttgatggactgctgcgctgcttcggcaaaccctacgtgaaggcctatgggccaggctgccggaatccggaaggccgttga

SEQ ID NO: 507527 - DNA, 315 bp, Stenotrophomonas maltophilia
atgacccaggaacatatcagccacccggaagggttgccgaactgcgccgtcggccaccgcgcgcgccacatctacgacaagcgttgcgcctccgccggcggtggccacctggtcgagtgcgcctgtaggtcgaccagcaagcatgccgacgcagagagggccatcgcctcatggcggcggctcaatcgccccgcgcgcagcgcgcgccaggcgccggcaccgacagtcggcgacaacgttctgcagttccagcttgggctggccgaccgtcctacgaaggctcgccgcatcggagggcatcatgggcgcggctga

SEQ ID NO: 507528 - DNA, 1392 bp, Stenotrophomonas maltophilia
atgaagtacctatctctcttctccggtatggaggcggcccaccttgcgtgggcgccgctgggttggacgtgcgttggcgtcgcggagatcgaatccgctgcctgtgcactgctgcgctaccgcctgcctcacctgcccaatctcggaagcgtcaccgagatcacggacgaacgaatcgcagcccttggtgcgttcgacgtcttaatcggtggtagcccgtgccaggacctgtcggtcgctggtagacgcgcgggcctcgctggtgtccgctccagccttttccaccatcagatgaggatctttcatgcagctcgacatctttgcggcacccgctggctcgtctgggagaacgtgccaggcgctttcagcaccaaccagggcagagactttgctgtcgtggttggttcgatggcaggatccgacctgcctgtcccccagggtggctggggatccgaaggcattgcgttgggtgacaacggtctcgtcgaatggtccgtgcttgacgcgcagtggttcggagtggcgcagaggcgccgccgcgtgttcgctgtcctcgatactggaaactggtcagatcgaggcccggtacttcttgagcgcgacagcatgcgcggggattctgcgccgagccgcgaccagagggaaagcgttaccggcacccttagcgcgcgcactcaaggcggcggcggactcggaaccgactttgagtgccagggcggcctagttgctgggacgttgagcgccaatccgaaagcggctggcagtgcaacccaacaggatgcccatgccggccttctcatcccggctgttgcgcacaccctccgcgctgagggattcgacgccagcgaggatgggaccgggcgcggcacaccgttggtgccagtggccttcgacaccacgcaggtgaccagcaaagccaacgtgtccaatcccaagcctggggatccgtgccatccgctgctcgctggtgcacatgcgcccgccatcgcattcgactgcaaagcggcaggcgacacctctttctcgatcggcgacatgccgggcacattacgtgcccagcatggcggtggccacgccgcagtcgcttacacgaccaagctccacaacaccgccagcaacaactcagggaagttgttcaaggaacggacaacttgtctcgatgccaacagcccggcaccggcattgctgactcccaaccaggtgcgtcgccttaccccgcgtgaatgcgaacggctgcagggtgcaccggacgactggaccctggtcccaaacactcggcgcaagccgatggccgacggaccgcgctaccggatgctcggcaatagcttcgctattcccgtaatccagtggatcggaaagcagatccaagctgcacacaaggcaacagcatga

SEQ ID NO: 507529 - DNA, 810 bp, Stenotrophomonas maltophilia
atgagttggagaaattcacgcccagccccatccgcgacggaacatcagcagcgcccgttgtgctctggtgacggtcagagcttcttgagcgagcgtcgcatcactgagaacatcggcctacgccaggccaagtttagtcatgacggcgtgcgtccgggtctgaagagccttgctggcatccatgagcctatccagcgtaggcacaatcgtcttcaagtagccgtccaatcgcggatcgtcgttctgggcttctgctgccgcgttcgacgtgaatttaaggccgcgcaatcctccgataagcaggagcgcctgacctgcagccgagtcatcgagaacgtggacgcggccaatcacctctgccaacagcttcacatcaataccggccacctgatctgctatccggcggcggaagttccgatcccccatgtaggcctttctgatgatgtcgccactaaggttgttttgaacatcctccagagcgcgctcagcgagcagaacatccgggtacacgtagagaagcagcccttccccttctcgcgtatgtacagattcctcgcgcgaccgcgccctggcctcaatctttgcgacttgatcgctagtggcctgcgtcttcgtgccaagcctgtagacggccacacctaccccgagcgccaccagtccattgatgtaatcggcaacagtgccccaatcagcagcgagcgggcaaaacgccatttccattttattccgtccgtaggatgcaggagcgcaatagtcgcgctcctagaaagaacgtgcaagacacgccgacggggatggtgcattcaatga

SEQ ID NO: 507530 - DNA, 381 bp, Stenotrophomonas maltophilia
atggataagcccacctacagctggtccagcaacagcgagacctacatcggcgacttcggatcgatcgatgaggctgtgcaggacgccttcgacagcgggatcgacgcagagggcgtgaacgtcggcgagaacaactatgtcgatgccggccgcctggtcgatgttgaccacctgatcgaccagttgcaggacgccatgttccagatcgtcggcgaggctgcagacgcgttcctgacgagcgtttcccccgagaagaaggccgagctggcggagcttactggagcatgggtgcgcagcgcggacagcgccgtctattgggaagtgaacaaccccagcttccaccgcttcgccgactacggcctgcggcaggaggccgagtaa

SEQ ID NO: 507531 - DNA, 288 bp, Stenotrophomonas maltophilia
atgaccggtcggacgcaagggccttgggcataccaagagcagagcgatgcctacacgcacatcgtgcgcggacccaacaaccgcttcatctgccagctttcccaggacagttcgggcgaaagcgagagaaccgcacgcctgatctcagccgcgccggaaatgcgcgacgagttgcagatgctctgcgacgtactcgaagcaggggcagagcccttgcccatagaggttgaggcccgaatcgccttcgcgcgagcggccatcgccaaagccaacggtgagcagccatga

SEQ ID NO: 507532 - DNA, 240 bp, Stenotrophomonas maltophilia
atgagcgctgtcatcctcttcttcccaacccgccgagtccgcgcaaaggccgtcgccgacgccgtgcgccacgccgcgctgcgcctcggataccaccctcacaacgcggacgccgccgctgccatcgcgcgcagggacttcctcagcggccgatacagcgccgcgcgcgccatcagcgaaatggtcgaccagctcggcgtcgccatgcgccagaagcgcgcccaaggcggtgttgcatga

SEQ ID NO: 507533 - DNA, 237 bp, Stenotrophomonas maltophilia
atggccgcagtcaccacaaccagccgcggcgcagcccgcgtcgaaacccggccccccgccggaaccatcgtcgtcaaggtcggaggctccgccctgctcagcctgacatcggccgaggcccgcgagctggccgaacacctggccgtctgcgccgacgcgatcgacgaaggcgcgaccgaagtcgccaccatcgcccgctcccagccgctggctctccagcaggcggacgccgcatga

SEQ ID NO: 507534 - DNA, 528 bp, Stenotrophomonas maltophilia
atgagtgcatggaggcgcataggcatcgccgcggcagttgttgcagcactgatcagtggagcagctactgcagccgatctcaccgaagaacagcgcaccatcgtgcaagtgttcgaagcgcctgcggccgataaggcagcggtttttagggccggccgacagtggatcgcggagaactttcggtcagccaaggcggtgatcgagtacgaaagcgcagacgacggaacgatcataggaaagggcttcatcccctacccgtgtgcaagcggatgggagtgtgtggcaaagcccgactggacagtcccgttcacccttcgattcgaagcgaaggatcatcgcttccggctgaccttcagcgatctacgcatccagtggccagcaaagttcgccaacggcgtcacccagccggcaggtgacattgctgtcagaaagcagaaggacctggacaagatcaaggaaaagctgattgaagccggaccgggcatccaagctatggtcgggaaggcgaagccgaccgacgattggtag

SEQ ID NO: 507535 - DNA, 669 bp, Stenotrophomonas maltophilia
atggacaagtacgaacaacgccgccttgcgctgcgcggcctagctgacgatctcgggcgcggtgccctggccaagatcggggcaaagatcggaaaggacgccagctacgtgtcccgcatgctctacgagccgggcaaggccggccggaagcgcatcggtgaggacacgcttgccgcactcgccacggcctatccagatcgatttccatcctctccagtcgcacaggtcttagagactgagacacctcccggctacgttcgcttccatctgttcgagggagcggctggtatgggcctaggtgtcgtgaatcaagatttcccagaggtaatgcaggtcatggaagtggccgaatgggaagtgcgccggaagcttggtttcctccctcggcctggccggatccagatcatcaccggccgtggtccgtctatgcgaccgaagattgaggatggcgacatcgtctggatcgacacggcttgcgactacttcgacggcgacgactactacctgatcagctacgccggcgagactcagatcaagatgctgcagaagcgcaacgacggcatgtgggtagtcagcgccaatcccgagttcaaggaatggcgctgcgatcccaccgagctttctatccagggcaaggctctggtccacgcaggacttcggaggttctag

SEQ ID NO: 507536 - DNA, 411 bp, Stenotrophomonas maltophilia
atgcgcgcgctgaatcgaatcgtggctgcttggcgcgcgctggtcgccccctcagtttccgtgtcacgcgaagaattggacgcagcgaaggccgcctggatgaagctgctcgcgcgcgagcccaaggcgcaagcagtctcattcagcgtgctttcgaacgcaggcgatggactggtgttgagggtggccttcggcaaccccgcatgcagggaaatggagttctgggcgccccttacatccacttcgcacgggattgattcgaccctgggctggatcaagttcaagcggggcatggccttcaactccactgtgctgtttgaagccattgaagtgcgtgcggcatgtagcgcagaccttcctccagagccttctctgcgagcttcgatagcgcttctgcagggagggacttga

SEQ ID NO: 507537 - DNA, 468 bp, Stenotrophomonas maltophilia
atggaaatcaaggagatgcgtcaggcgattcttcgacgcctggattccgcgccagcggacatctttactggcgaacaactgtccgatttgggtgacgttcgaggtgttctgaccgaggtcagctacctggaggagctcggcctgctgaaggctgagtactgtctttcgggtaaggtggcctgggcgcaaatcacgagcagagggcgcgattacgttgatcccagtggaggaatcggcggcgaactcaacgtggtcaccgtcaagcttcacgaagacacactccgtcagatcttcatcaaccgagtgaatgcgtctgacgccgacagcaccgtcaaagcgaagctgattgaccaaatcaagtccctccctgcagaagcgctatcgaagctcgcagagaaggctctggaggaaggtctgcgctacatgccgcacgcacttcaatggcttcaaacagcacagtggagttga

SEQ ID NO: 507538 - DNA, 531 bp, Stenotrophomonas maltophilia
atgacttgccgaacctcctctttgaactggctggacgtgctctacaactccgtgcgcaagacgccgggcggagtagccgatgcagctgcctacctggccgaccgccgcggcaagtcgatgcacccggagacgctgcgcgcgaagctgcgtggtctggaaggtgagtcgctgacgatcgaacacgctgagctgctgaccgagtggatgcaggagaaggcgggcgggtgcgagtacgcgctggagtggatgcaggcgctggccggccagttcggcatggccgtcgacgcggttccgccgccgccggagggtggttggtcggacgagatcggcgccattcagaccaagctgctggagatcacttctcgcgtgggcaggctgtcgggcaccgccgttgaggcgatgctggaccgccggatcgatagcgacgaagccgagctgatggtgagcgaggtccgtgcgctgcgcacgatggcgcatcgcctggagcgcaacgtggcgcgcgcagcggcgaaggggagggctcgcaagtga

SEQ ID NO: 507539 - DNA, 414 bp, Stenotrophomonas maltophilia
atgcaggctgaccgcgcgctggagctggtgctgccctggccgagcaaggatctgtcgccgaacgccagagtgcactggcggaggaaggctgaggccacggcgctgggacggcagcttgccgctgtgcgtgcctacgaggcggggtggaagggttcgaagctaccgccgggccgcctgcatctctggctcgacttttaccaggcgccggggaaggcgcttccagacgacgacaacatgattcgcaggttcaagccgtatcgcgacggtatcgcccaggttctgggcatcgacgacaggcgattcgtcatccatccatatgtgcacgacgagcgccgtaagggcggtcaggtggtggtgcggattacgggcgggccggcggcagccggccactcaacgacaggggaacgggcatga

SEQ ID NO: 507540 - DNA, 456 bp, Stenotrophomonas maltophilia
gtgaccgagcccgtgagcaccctcaagaccatcgtcggcatgttcactgcggcggtcgtggcgccggctaccgccgacgcattgcgggcagcagagcgcatcatcctgggagttccccagtcggtgcttctggtggccatggcaggcgcactgatcggcgtgcttctgctgccggaaaaggatgcggaacgggtagcggcggatgcgaaccgccgtcgtggccatcggtttctgcagaccgccgcccgctgggcggccttggcagtggcggtcctggcatacgccatcgtcgcggcttgggtcatcgctgtggccgcctcgatctggccgaccctcgctggcgcaccgcagctgcccctggctggcctctccggtgtcctgatccgccggctgctgcccggctacgtgcgtctggtcgagaaggccactggcgcaatcggaggcgacaagccatga

SEQ ID NO: 507541 - DNA, 483 bp, Stenotrophomonas maltophilia
atgagcgtgctgctgaggtttctccgttcggtgtgggagctggtcatcggcgctgcagctgatgcgttccagtggctgcgaaagccgggcagcaagatcaagctcgtctgcgcggtgctggccttcggctgcctggtctctggtctctcggcctatgagaaggagcagcgaatccgcgatctcagcgcgcaggtagtcaaggtcaaggctgactggaaggcagatgccgagcgcctgcaggccgatgtggacagccgcgaccagcgactggccgaggtcgctgccgctctccgcgccgaggccgtgaagctggacgcgttgaaggctgaaagcgcggccgctctgcaggcgctggcccgccgcatcgaatcatccgagaaggacgcagccacctggcgcggccgctacgagcagcggcctgatacatgccaggccgccctggagctactcgactctgcctgcccagccttgaaggggtactga

SEQ ID NO: 507542 - DNA, 282 bp, Stenotrophomonas maltophilia
gtgcgactgatcgtcctggttacggccttctgcctcgcatcctgccagtcgtcggcgcccaagcccaacccgccagcacccgctgtcatccgtgtgcctgttgccacgttcgtccccatcgatgcgtcgctgacgaagcgctgcacctgggcgcgtgccggcaagccgtctgctgtgttcgaggtgagcaacggccgcaagcgctgcctcgatctgtacgaggcgcagttcgatgctatcgagcaggtgcaggggaagcccatcccttcggacggcagctga

SEQ ID NO: 507543 - DNA, 369 bp, Stenotrophomonas maltophilia
atgccgcggcgggcaccgaagcacaacgccatgccgaggcaggcggtcgtgcacgtgccggccgcagcagtgaggcagaccacggctgagcgcgggtatggcagcagatggcagcgcgcccgcgcgaccttcctgctgaggaatccgctctgcgcagagtgccagcggactggccacgtcacggtcgcgacggtggtcgaccacatcaccccgcacaagggaagccaggcgctgttctgggacaccgacaactggcagcccctctgcaagccctgccacgaccggaagaccgcgaccgaggacggcgggttcgggaactggcatcgaggtgtcagggcaaccccgaaatgcgcgcgtggacgcgaatga

SEQ ID NO: 507544 - DNA, 417 bp, Stenotrophomonas maltophilia
atgagaggacggaagccgaccgctccggccctcaaggtgattgccggaactgcccggccggaccgtgaggcgccggacgctcccgagttcgacctgatcgaagtgttccccgacccacctcagcacctgaacgtcaacggggctgcaatgtggaatgacctgggtccccagctggtggcagccaaggttctccagacggtggacctgtatgcactgcagcagctctgctacgcctggcaggtccaggtggcaaagcagatggcaggggtggatatcacggccgctgaacagaccgcgctgaaagcgctgatgtccgagttcggtatgacgccggcgagcagacgcaaggtgagttctggtggcgccgagaaaaagcccggcaacaagttcggcgccctcccggcgctcgccaagtaa

SEQ ID NO: 507545 - DNA, 1677 bp, Stenotrophomonas maltophilia
gtggcggtggccatcgactacgcgcaggaagcggtggaggatcggaagggcaaggcattcgggttgctgatccgccaagcggccagacgcttcctggacgacctagctcgcgcgaagaagagaggggcagcgttcacgttttcacccgcgcatgcagcccacgcctgcggtttcattgagctgctgccgcacgttgaaggctcttggcagactcccgagatccgtctgcaccggtcccacgtcttcttcgtggtccagctgttcggatttcggaagctcgatggcacccgccgtttcacatcggcgctgtttgcggtcgcacgcaagaacgccaagtcgacgttggcctcggcgatccttttgtattgccaatgctgcgagaacgaggaaggcgcccaggtcatttcagcggctaccaccttcccgcaggcttcgatcatcttcaacgtcgcaaagcggatggtggagaagacgccggaccttcgggaggcgtatgggcttgagacctgggccaagtcgatcagccgcatggagatcggcgccagcttcaagcccatccacgcgaaggcaagcactcaggacggcttgaacccgtcccacgtggggcttgatgagatccacgcgcacaagactcctgacctgctgaacgtcttgcagtctgctgcaggtgcccgacgcaacccgctctggctgttcaccacgaccgagggatataccaatcccggcccctgggctgagatccggcagttcgtgaagcagttgctggccggcgtgttcaagaacacggccgaccactacctggcagtgttctacgcggtcgacgaagacgacgaggactttgacgagtcgagttggcgaaaagccaaccctctgatggaggtaaacccgcatctcctgggagctatccgaaaggaggcggtcgaggccaaggccatgccgtccaagctggctgagttccagatcaagcggctgaaccggccggcctcggcggcaaacggctgggttgcactacgaaagtgggctgcctgctccggagtgatcgacctggaggcgctgaaggacgttccctgctggggtggactggatctggccagtaccagcgacctgacatcgttccggcttgtctggcgagtggacgggaagatcatcacctggggccgccgctgggttccagaagaggcagtaaagcagcgtacggagcgcggcacggtgccgtatgcgggctgggtcgcgtctgggcacctcgaaaccaccgagggcgaggtcaccgactacgcccatatcgagaggtcgatcctggacgtcgtctctcggttcaatgttcagtccatcgcgttcgatagctggaatgccaccgaggttgtgggccgacttcttgccgctggcgtgccgatggtgcagttcatccaaggaccgaagtcgtatcaccctgctatgcaggatctggagcgcgcctacgtaggcaagcgcttcgtccatgacggcgatccggtgctgacctggtgcgcttcaaacctggtggcccggcgagaccagaacctgaacatggcgcccgacaagaagcgatcaagcgagaagatcgacgacatgactgcgctgctgatggctgttggtatcagcatccccgttgctgaagaaaagagtgacaagaagcttgtcctcatgaccctgggatag

SEQ ID NO: 507546 - DNA, 228 bp, Stenotrophomonas maltophilia
atgagcaaggtcgatatcgtcggacgcggcggccgagtgatcagcgtgcatcatcgtgttgctgaggcgctggagcagcgcggcggttacctccggcgtgacatggtggcgcaatcgcccgtctcgccgaatccgggcgcgaaggtgcttgcgtctggaaaggcgaagaagaaggccaagaagaccgcagacaaggccgcacagccgaacaagggtgtatccgaatga

SEQ ID NO: 507547 - DNA, 396 bp, Stenotrophomonas maltophilia
atggttgagttcgtgaccaaggcacaggcccaggagcagctccggcttgatcctggcgccgatgaatcctggctggaatttgccataccggccgtcagcgcggcggtggatagctggctgaagtcaccgtggcgccgctacgagctgcagagggatggcgctggcgcgccgatcatcggcgccgacagcatcccgttgccggttctggacgatgaagggaagccggtgcttgcttctcaggtggtgctggccacgctggtagagctggccagccactacaggtttcgcgagggcgagggcgacaacaccgtgcccgccgatgccgggcatgggtacgtcctttctcgcgctgcaacggccctgttggcgccgctacggcgttccacggtggcttga

SEQ ID NO: 507548 - DNA, 207 bp, Stenotrophomonas maltophilia
atgaacgagcaaagcgaattgctggccgccctgcgagcccagaccgaggcgacgcaccagctggtggcggcgctgcgggaaaagaccacggccgaccaggagaacgccaaggcggttaaccggctggtggactacctctgtgacagtgagggtggcgacgtggagccggccagcccgggcaactacctgagcgggaagccgcgatga

SEQ ID NO: 507549 - DNA, 336 bp, Stenotrophomonas maltophilia
atgatcgctgccggccgcctgcgccatcgggtgcagctgcagcgtcaggtctacgggcagtcgcctgtgaccggcgcgcagaccgtcagctgggagccgctggccgatgtgtgggccgaagtggcgccgctgtctgcccgcgaattcgtggcagccaaggcggtggacagcgaggtcacgttgcgggtgaccatccgtcaccgcgaaggcgtgaccgacaagtgccgggtgctattccgcggcaagatcctgaacatccatggtgtgctgcccgacccggtgagcggcctggaatacctcacgcttccgtgtagcgagggtgtcaacgatggctga

SEQ ID NO: 507550 - DNA, 483 bp, Stenotrophomonas maltophilia
atggctgatggcatccgattcgacgtgagcggcctggacggcatccgcaacaagatggcgcaggtgaagcgcgaggtgaactacaaaggcggacgcgcagccctgcgccgggcggccaacgtgctgcgcgaccaggcgcagagcaacgcccgccgagtggacgaccacgaaaccgagaccgccatctggaagaacgtcgcggtgcgctggaatggccgcgcgttcaagcaggatggcgtgcttgcgttccgtgttggcgttctgggcggtgcccaggccggccgcgccgctcagcaggggaccagcaaccccggaggcatcacttggtactggcgcctgctggaattcggcacttcgaagatggctgcgcagccgatcttccggccggtgccggaccaagccggccagaaggccgtcgacgtgttcgcgcgcagcttcaaccaggcgctcgaccgcgtgctggcgaagcagggggcggcatga

SEQ ID NO: 507551 - DNA, 366 bp, Stenotrophomonas maltophilia
atgatcccgcccatcttcccgctttgcatcgcatcaccggaggtgctgctggcctttggcgacgcgccgacccgtgtatatccgttcggactgatcgagaagccgcctgcgctgccctatgcggtctggcagacggtaagcggaagccctgaaaacttcctggcccagcggcctgacatagatgcgctgaccacgcaggtggacgtttatgccaagaacgaagcagccctgattgagggtgccaccgcactgcgtgatgccttcgaacctcgcgggtacatcacccgctggggcggccagatgcttgaccccgaaacgaagctgctgcgcctgtcgttcgatgtggactggctggtcccccggtaa

SEQ ID NO: 507552 - DNA, 720 bp, Stenotrophomonas maltophilia
atgagcatcctgacccaaggaacccagctgtacggcctgatcaacggcactgtccgcgagatcgagtgcatcacggccttcaaccccggcaccgcgccggcggaccagatcgatgacacttgcctgtccgagaccaatacgcgcacctacaagaagggcctgcgcacgccgggccaggcgtcggtgaccatcaacgccgacccgaagaacgagagccactacctgttctggcagctcgccgagcaggtggacggcggcgacccgatccagtgggccatcggctggtccgacggcgtggacattgagcccaccgttcagcaggtcggcagcatctcgaacatcgaagtgaccaacggcggcaccggctacacgagtgcgccgaccgtggccatcactggcggcggtggcagcggtgcaacggccactgccatcgtcgattctggctcggtgatcggcgtcaatatcaccaaccctggcaccggctacaccggcacgccgactgtcgctttcaccggcggcgctggcaccggcgccgcggctacggccgagcgctccacggtagacgagctggtcctgccgaatacccgcacctggtacaccttccaggcctacgtgagcgacttcccgttcgacttccagggcaatgcggtggtgaccactgccgcgaccatgcagcgcagcgggtcgggcgtctggctgcgcaaggctgagacgccgtga

SEQ ID NO: 507553 - DNA, 390 bp, Stenotrophomonas maltophilia
gtgagccgggccccgaagaagtccgccaccgcgcgtgcggtgagcctgagcgtggctggcctgctgcaggccggagcgttcactggccggccagtggagaaggagatccgctggaagcagggcgacgaagagttgactgccactgtctatgtgcggccgctgggcttccaggcggcggtgtcggatgtgctgtcggccacgaacaagcacgacggcgtggccggccgcatcgcggccagcatctgcgaccaggacggcaaggcggtgttcaccgttgctgatatcaccggcgaggccgatccggaccgcggcgccttggacggcaacctgtcggtggcgctgctgatggccattggcgaggtgaacaacctgggaaaagctacgagctga

SEQ ID NO: 507554 - DNA, 144 bp, Stenotrophomonas maltophilia
atggatgcagctacagggatgctggccgcactgttcgtcaacgccaacaagaagcctggttcgaccccgttcaagcctgccgacttcattccctacgcggacgccgagcccatcagcctcgaggaggcgatgaagcagtggtag

SEQ ID NO: 507555 - DNA, 2499 bp, Stenotrophomonas maltophilia
atgtccaggaaccttggtacgctgaccatcgacgtaatcgccgaggtcggcggtttcgcgtccggcttggacaagtccgagcgccgggcggagaagtggcggaagaaggtcgaggccgaggccaaaagagcgggagccgctcttgctgctggcgttgcagtcggcatcgccgggctggcggcagttgctgtgaagttcggacggaacagcatcgctgctgaaaaggaagttgcccagctcgacgccatcatccgttccaccggcggcgcagccgggtacacccgccagcagctgttggacatggccgatacgcttgccgacaagtccaccttcagtggcggtgagatcgtcgaggcgcagacccggctcctgtcttattcgggaatcctgtcttccaacattcctcgcgcgatgcaggcggtgattgaccagtcagcccgcctcgggatcagcgtcagccagtcggcggagactatcggtcgagcgttggaatcgcccagcaaggcagcggcggccctagcgcagcagggcttcggcgcggccttcaccaaggaggttcgcggcacaatcgacgagttggtgaaggccggtaaggaaggcgaggcccaggtgatgatcctggagatcctcgaggaatcgtatgccggcgccgcactggcggcgcgcgacaccttcggaggcgcgctgaccgcgctcggcaatacactggatgacatcaccacggccaaggacggaagtcttaagggggcaaccgctgccgtcaacgagctcatcgacactctgaaggacccgaaggtcaaggagggattcgacagcattgtcacgctggtggccaatctgtccagtgagcttgcgaatggtgttgttcagatcgccggtttcattaccaaggtcagggacctcgcgaagctagacgccggcggaagcgtgcaggatgccggtgaggctgcactcaacgagcagatggcccgactgaacgggttgatcaactacgcgaagcagaacaagacaggtctcctcgggcttcccctgacggattcccaggaggctgccaggctcaagcagatcaacgatctgacccagcagcgtatcggcatccagcgggagctgaccgagcgctacaagtaccagcgggcagcggaggcattcaagggcgtcaccggttcagtagatagcacggcaaagttaagcgacagtgcggccagagaggctgccgccgccgcagccgcggacgcagacaacgcgaagcagcgcgttgccagccagcagcagcttcagcgcgcttacgaagccagcgggctacagctcaggcgccagatcgagttgttcgacaccagcgcggaccgatctggcaaggccaccgagctgcagcgcctcaactttgaaatggcgcaggggagccttcgaggcctgaacgctgcccagcaagaacgtctgcgcacactggccatcgagattgaccggttggcaggcgtgaagtcagcgaacgaggaagcggccaaggccaccgaggctttcgtcaagttgaaggacgagctgaacaagaaagactcgctcggcgtcgacttggcgcgagaccgcctgaaggtcctgcaggcggctgccaatgttggtgcggctaatgatcaggactacgcagcaactgccgcaaaggtgattcagcaggttggagggagtggcgcggccgactacaaggggccagatgctctctatggtggatcaagcggcgagtttgcaaagatcgattcggcccaggaagctgagcggcagaagttcgcggcgcagctggaagccctggaggagaatagacaggctcggtttgatctcgaagcagagtggaatgcgcaggagctgcagctgcgtcaggagcacgaagccaacttgtcacgcctcgacagagcgcggtggcaggttgcggccacggaggctcagtcggctctcggaagcataacggacgtgatgcggactagctttggcgagcaatccgcgctctacagggctgcattcgtggtccagaaggcggcagctatcgcccagtctgtcattgcgatccagcagggtatggctatggccgccgcaaacccttggccgaccaatcttgctgctatcgcttcggtagcggctgcaaccgctggcatcgtctccaatatcgccgcagtaggcatggcccacgacggtatcgacagcgttcctgagacaggaacctggctgctgcagaagggcgagagggtcaccaccgcggccaccagcgccaagctggacgcaaccctcgaccgcgtggcacgcgattccgccggcggtggccggggggacaccaacgagttcaatttcaacgtcaacggaaccatcagcgagcgggaacggctgatgctggagcagaccgtcacgcgtgcggtgaccctggcgcggcaggaccgtgtggcggacaccacgtccggcactggcccgcaatcacgcgcgatgcgatcgaactggaatgtcagaaggaaggtcgggtaa

SEQ ID NO: 507556 - DNA, 459 bp, Stenotrophomonas maltophilia
atggcgctgatcatgcagccgaagtggttgcccgaaccgctgcgcgagggctatgggctgcgccacgtatcaccgcagacacggtccaccttcgtaagcggacgatccctgccgcggcgggcctacaccgcgaccccgagccagaccgaggtgcgatggctgctgaatgatcagcaggctgctctgttcgagaagtggttccaagagcagctattcgatggcgtgtcctggtttgcctgccgccttcgcagcccgctgggcatggactactacaaggcgcggttcaccgacatttacgacggtccgacgttgaccaacagcaatctgtggatgttcaccgcgcagctggaactgtatctccggccgctgctggctgatggttggtctgagtacccggaaggcttcctgcaggccaatgtggtggaccttgccgcaaacagggagtggccccagccatga

SEQ ID NO: 507557 - DNA, 483 bp, Stenotrophomonas maltophilia
atgagcatccttgagcggctgtatgcctccggtggtagcgagattgagcacgagacgttggccatcaccgtcggtggtgaaacccactacctgaccaagggttgggaggacctgactgcggttctggagacgggccagacggtgaccttcaaggcctgcggcatggacgtggccaagccggcgcgcaatgccgacggcgtacaggatctgcgcttcgcgctgaccaacattgatggcgtggtgagcaccaagatccgtgccgcgctcgccgcacgacaggagatgacggtaaccctgcgggtctacctgagcagcgatctgctggcgcccatcaagcgtccgctctcgatggtcatcaagggcggccagtggtcggccaccgaggtccagatcaccgccggcttcatgaacatcctcgacacggcctggccgcgcgatcgcttcaacctctccaaacaccccggactgcgctacatctcatga

SEQ ID NO: 507558 - DNA, 378 bp, Stenotrophomonas maltophilia
atgacgattgaccttgaaaagtacctggacgttgtctgggtcagtggcggccgcgtgttccccgaactggactgctatggcgtggtcaatgaggtgcggcgggatcttgggctgccggcgtgggatgagcatcctggggctaccggtgacgatctgcccgagctggcacagcaggcggttctgcagcacgccggcagcgacctggtagagggtgccgtggcgttctgctacgagggcagcatggtgactcacgttgccgtgctggtggaggtagacggacgcatgtgcacgttggaatgtaacgacggccgcaacgtgacggttctgcctgtggcgcgcttcgagcgccgcttcaaccgcgtggagtattacgcgtga

SEQ ID NO: 507559 - DNA, 3063 bp, Stenotrophomonas maltophilia
gtgatccgggtgtttccttcccgcatgcccggtgaagcgctggaaacccaccagcatggccggatgacggtggacagctggctgcgggcgaacgtgcatggctacaccggagagggtgagcagccgatcgagctggaggtggacggcgcgccggttgctccagaggcgtgggcaagcacctggatcgacgacggcagcgacgtgcgcatctacccggtccctcattacgagggcattgccgcggtgatctattgggttgtggttgcggtggtggccgcgtatgccatctacatggccaacaacctgcctggcagtcggaacgggcagggcgacagcctcagtctcgacacggcgcgggcgaacacggcgcgcttgggtagccccgtgcgcgaggttctggggcggtgccgcgtttgggccgactacctggtgcagccggtgtctcgcttcgtgggggagaagtcctatcggacccacatgttcgtgtgcgtgggaaaggggaggcacatcatcccggtgggttcggcccggctgggaaacacacccatcagctcgttcggcagcgatgtgcagatgaccatctacccaccgggcaccgatgtcggtggcgacgtgcgctccgagaactgggtgaattctaccgaggtgggggctaccgcctccggcaccgccggtctggatctgagcgacacggcagacgtttctacgggcatcaacgcagactcggtgacggtatcggggaatgtgatcaccctgaacaacgcgacagtcacagacgcgaacggtaacgagcggccgaccagctccgtgcccagcagctgggttgtcggcgccgtgctcacgctaaaggtcgcggcttccttcaacgcgaccaccagcggcctttactcgatcatcgccggcagtgctgtggcggaactggcgccctacgtgggcatgccggttctgctgacctacaacggagccgattacgcgttgttcgtggccagctacgttcctggctcgcccgcagtgcccggtgttggtggcagtgctgcccgtgtgacgggctcggccgctgcgagcaacttcgacttcagcggttctccggtcaccttcgggatcagctggcggggaaccacctacagcgtggcgctggtggccaactacatcaccttgggcgtgctgctgactgccttcaatgaccagttggtggacagcggcttggtggctacccagtccggcggtgtggtgacgattgctgaggcggccagcccgtttgctggcgggagcatcacccacagcggactgccagcttctgtcttcggcagcagcccaacgtctacagcaggtgtggccacgaccggtggaacgccggcaacgcagcctcgtataacgctggcctatgacggcccgaccggaactgcttttggaggcctgccgcctggtgtggtgtcgctggcaatgtcgcgtggccaaagtgactatcgaattgcggccgtttccgggctcaccttggccgtggaacggcttacagaggctggcgtggtcgacacgagctggccgggctggaccaaccggacggccactgactacagcgccaccgggttccaggagggcgaggagtggttgggaccattcctggtgtgcccgaacggcgaaaccaccgatgcgtttgaatacgacttcaacttcccaagcggcctgatctggtacaccagcaagggcaacaagcgcacgttcacggtcagcatccgcgttgggtatcgggtgtatggctcgggcgcgccctggacggttcggacccacacgtacaccggatactccgaggatgcggtgggcttcaccgagcgcatcaccctcggagccccggggcaggtcgaggtgcgggtcaggcgggtgaccgagcgagggggaaattcggcacgggatgcctgctactggcagggcctgcgcgcgcgcctgtcgcagcggccgacgcgctacgacgacctgacgaccatcggcctgacggtgaccaccgggacgaagttggcggcgcagaccgaccgccggttcaacgtggaagctactcggctgtatgaccagggcactgcgcgcagtatcagtggcgcgatgatccacgtcatgcggtcccttggcctgccggctgaccagatcgacacggacacgctgcagcatctggaggacacctactggacgccacgaggggaattcttcgacttcagcgcggagaagtccggcaccagcgccttggacatgctgcagatggcggcgcaggcgggtatgggctacttcctgctgatcgattcgatgtgttcggcaggccgcgaaggggtgaaggggtggcgaggcgggatctcgccgcagcgccagcttgagccgctcagcacgtcgttcatttcgccgggcccggacgactacgacggcgtggacgtgacctacgtcgacgaggtcacgtgggcggccgagacggtggagtgccggctgccaggtgtgaccgagccgtggaaggtggagacctacgagctgcagggtgtcggcacgcgcgatcgcgcgtatcgcatcggcatgcgccgcctgatgaagcaccaaggccagcgcctgacctacaagaccaagaccgagatgatgggcctggtctaccagtacggcgaccgggtgaagctgttcgatgacattccgggttcgagcaccaccagcaccatgatcgagtcggccaggctggacggtactcggctgctgatcgaggtgggtgagtacctggactggagcctgtcggcgccgcggtgcctggtgcgcttccaggacggaacgctgtccggcgtgatggtgcccacccgcgtggacgaccaccgactgaccatcgccgcctcggcactgccgggggagcacgccttcaatacctggatcatggacgacccgacgattgacccgccggagctgatcttctgcgacagcacgcgcgctgggtatgacgccgtgctggccgagctcacgcctggcgaagacggctcggttgagctgaccgccctgcagtacgaccccgccttctaccaatacgacgacgccaacgcgccgtag

SEQ ID NO: 507560 - DNA, 2622 bp, Stenotrophomonas maltophilia
atgacgaccttcaaaaccggcaacccgctgggttcgaactcgcccaaggatctgtacgacaacgccgagaacctggacgccgcgatcaacagtgtgcttaccacctggcgcgatcggttcggtgtgcagcgatctacttgggcacacatggagcagctggcaacgagctacttcatgaatggaagtatgccagcttacgcgctcaaggcagaaattccagtaggtgggcttacgcccgctgataccggtcggcagtttgcagttaccaacgatcctgattctgcaaacaacgggacgtggcgatgggatggaactacgctggttaagtcggcagatagagtgagcgtgatggaaacggtcgtttcgatcgcggctcgtacttcggttggcaagaacttgctgaacccggtcgtgtctctcgttggctactacctggaccagttcagttcaatccccgtcgccagtgctctctactcggtgtctgattacatttcggtttccccaaataccctctatagcgcgacctcggaaactggaggcttgcgattcgtaacgttcttcaatggaagccgtcaagttgttggcggaggcagttccagcgcacagaacacactgcgtagctttaccacaactgctgaaaccaggttcgtgcgcgtgagctatctgaccgcgtctgttggcagccttcaggtcgaagccggccccgcgacggagttcgaagcgttccatcgtgaggcatatggaccggacggtgcggctgttcacgctgtacccatcaatggaagcgtgagcactgagaaggtgcaggatgaatccattacgcttccgaaaaccgcgtttgcgctgcagaccaagaacctctacaacgctgccgatcctgatgtcatggatggctactacatccagaacgtgtccggtgcggctgcaccgaatgcgatgtattccgctagtgggtggatcccggtaaagagcggtgtcacctacaccagaagttattcgcatcagggtgcgctctacgatgcaaatcgcgccttcgtttctggtctgaccaataccggcgcttcgccgactcagttcacgccgactgtggatggcttcgtccgactgacggtcctgctttccgggaaaagtgccttccagctggagatcggatcggctgccactgactatgagccctacgggtacatgattgatccggcggcggtgccctggggtaagtcagggatcgttggcgcgcaggtctgtgacggcatcgtgctgccatcgcagacctactgtgtggctgggaccagcgccgatgtagaacaggcgaatctgtatttcagcaatatgctgatgggctacttcgctgacaagaggatcgacatcactggaacctatggccggcagttcggtgacttctggcgtatcgagcctggtagcgggaaggcccactacggtatcggcaccggctcgttcaccctcaccgtttctgtgaagaactatgaccgtcgcgtactcctacagaagtccacggctgtgactgtcttcgcgaaggctgtcgctgctgtagatgctgagcggttgctgtggatcggggattcactgaccaggaatggcctctttctgaatcatgccgctggaaagtgcggaacgacattgcaaggaggtcgccactttgcgaccgatcccgccggcctgaaccgcgagggccgcggcggttggacgctgctgcactacttgagctatttcgcgagggcagacggcctcgacagccccttcatgttcccagatggcgtggctggtgccacctaccggggcaacgtggtcttctggcgtaatgcggtcaagacggggcgaactgaagcggaggaatacaactttggtggttttgagaagcttgcccgtggctgggcagattcgggttctttcatctacgacacggccaccggttatccgttgagcccgcaggttggatgggtggtgtatgacgctgcgcaggcagccggcgctcgcttccgtgagtggtctggcacggcatgggttgcctcagcagcgcagccgtcgacctggtctttcgatttcggcaagtacctggcgcggttccccgagctgttctctgctggtgctcccaaccgtgtcggcttgctgctcggcgcaaacgacttccaggacgttgacgaggtcgacagcggaaccttcatcggacgcctgcaaacgatcatcacctccgtgcgcgcggcgatccccgccgtgcacgtgatcgtcggtctgccgaccgtgggtgggccacaggatggcttcgggctgctgaaaggctgcggccagaccgcgtatggctataccaggaacatgcaacagcttgcctcggctctgcttgcgaccttcgacacggcttccatgcgtgcagggcggacgtggatcgcgaacttcaccggcgtggtggatcccgtgtatggcttccagacgaacgcggagcagcccaacaagtactcgtccaagtcagtgctgcgttgcccggacccgatccacccgaccccgaacaatccgcctactgctggcaccgacggtgaaggggtggggcagttccagatgggagatagtctggctggaacgctgatggcgatccgcgcggcaggctga

SEQ ID NO: 507561 - DNA, 777 bp, Stenotrophomonas maltophilia
atgacccgtcacttcgctgccgatgatctcgtgcagtttcagtccaacaacctgaatttattcaggaaaagcctcgttacgagcgttgtctgcgaattccggttcccgacgcttatcgagctgggcgatgcgaagccaccggctcgctttgtgaagtctttgcgaaagaagtacccccatatcgagactgccacagatgtgagctttggtttcggcggatcttcagagagctctcattcccatatatttcgtgcgcttcgaggcggctggtctgtgtctctaaagcacagctcgctcaccattgagacaagcacgtacacaggatatggggagttgcttgagcgagctctagaagccgttcaggctgccgagccaatcattgattcggacttttggacaagaattggcctgcgttatgtgaataatctgccgggtcgctatgatccccttcgcaacggatggatcaatccagctctgactgctcagtttgctgatggaacattccgaggcattaacgagtttgcgacgcggttgctgttaaattctgaggatgggggttgtctattgcagacaaaccttaaacgaaatcctaaaaatggcgaagttttcgtcccgccggatttcattgtggatgtagactcgtttaggaacgaggttgcacttagtgactcgaagagtgcactcgatatgatgcatgcccaggccttcaactgctttgattggtcgttgggtgatgctgcgcgcgaacatctggctggtaataacggggaacggtga

SEQ ID NO: 507562 - DNA, 270 bp, Stenotrophomonas maltophilia
atgattcgattgctgcagttgaatgaacccgacatcgtcgggtacagaaggcgtgtagttgagaccatcgaattggccaaccttcgtcgcattgaattgaacaagaagctggcagaggcaaagaaaaagttcagcaagggcttgctctcagccgctgagctggccaatgttgaagcgataattgcgaggagcatgagtacagtgctcgatatcattcaatgcaatgacggcactaaggctccccggccgttgccaagaacggtgaagtag

SEQ ID NO: 507563 - DNA, 1113 bp, Stenotrophomonas maltophilia
atgagcgtcgttcacaatgaagtgacatcctcggctgcagtggcctacctgaaatcccgcaaatggaacgagtctggggagttcccaggtttggcgactctttggtccgcgccgaccaatccggatatccaggtggcagttccgacggatgcgtcaatcgcagactacgccgacagaatgtcagacgttacgagagaggtggccgaatatgaggggcgatctccagcgagcgttgttgatgacatgcttgggcgcttctctggaattgtttcggtacgcgttctcgggaacgataccagtctcggaaaaattccgattagggacggccttatagcggtcgccaagttgaaaagcttgtttactgctgcagcactagcgttgggtgggaagcgccccgtatacggcggtaagattccagaagtcgcaaagggatatcttgactccctgctcttggggcagaccgaaatcggcagctatgtaattaatgcgtacgcaccatctgagtggtcatctcaaagaagacctgagcctacttacgcgcgttccgtaatttccagtatggctgttgcgctcgaagtaattgagggcgtggctgcaaaagacatagatacggcggatcgatttgctgagctcgaccaagctgtatcttacggagtgagcgcaaacttgtgtgatgcactgttgggtttcgcaggtgcccgaggagggcgcccgtttgagattgctgtcaagtctcccttcggtggtcttgttgagggcgttgacaaaaaatttcactttggagagggttcggcatcaaggcttcggattgcatccggctactacaagggcgactacgttattcccagcgtgacgctacttggaatagtacgcgacctgtcaaggtcgaatccttctgatccgggagaagtagttatacaggcccgtgttgcggatgctgagcgatctgtaaccattcaattgaatccggtcgattatcacatagctgttttggctcatgatcaaggtgcgctggttagatgctcagggagcgtccgcatcaaggccggtagggcgacgttactgcagcctcacgggttcacccttgtcgaagtagggcctccactcctatga

SEQ ID NO: 507564 - DNA, 411 bp, Stenotrophomonas maltophilia
atggatttccgttttgacgccaaggaaatcggccaggagccgaaggatcccggacacacctggatacacctgtatcggtcggaagatccgaacaagcagttttcggtctactccaccagcctgacgggcagtatggactggaatcgcctccgaaacggaaacctcggcggaagggcttttctgtctttggatacgctgctggcttacggtacgggcctggaaaaactggtgtggcaaatccgcggtgcgcctaacgctctgggtgtgacggaaagttacgccaagggcgtgctgcccatcgcgacgatgcgcggcaagctggcgaagattctgaagctacgtgctgaactggaccggaaagcggggaaattccgcagcgaatgcaagctgccgattgaagtttcagaatag

SEQ ID NO: 507565 - DNA, 990 bp, Stenotrophomonas maltophilia
atgagtttcaaggcactgctgacccgcaagaccaacgacggcgtttccacggagctggtcgatttcgatgaagccaacctgatggatggcgacgtgctggtgcaggtcgagtactccacgctgaactacaaggacgcgctggccctcaccggcgcgcgcccggtgatccggacgttcccgttgatccctggcatcgacctggctggcgtggtgctggactccagcagcgtcgacttcaaacccggcgaccgcgttgtgctcaatggctgggatctcagcatgggccaccacggcggcctcgcccagcgcgcccgtgttcgcggcgaatggctcaacaggattcccggcaacctgagcacccgcgacgccatggccatcggcaccgcgggctacaccgcgatgctgtgcgtgctggcactggaagatgccggcgtgacgcccgataggggcgacgtgctggtaacgggggccaacggtggcgtcggctcgatcgcggtggcgatcctttcaaagctgggctatcgcgtggtggccgccaccgggcgcccggaacacgccgagtatctgcacagcctgggcgccgccgagatcatcgaccgcgcgcagctttcagaaccgcgcgagcggccggtgagtgctgagcgctgggccggcgtggtcgatgtggcaggcggccctaccctcgtcaacgcccttgccgagacgaagtaccgcggcgcagtggccgcgtgcgggctggcgcagagtgatgagctgcatggctcggtgctgcccttcattctccgcaacgtgacgcttgccggcgtggattcggtgaatgcgccgcaggccgttcgccagcgtgcgtgggaccggcttgccaccgacctggacccgcagaagctcgaaagcaccgtgcagctgattgggcttgccgaggtgctggacgtctacgaccagatcatcccaggcaaggtgcgtgggcggattgtggtggatgtgaatgcctga

SEQ ID NO: 507566 - DNA, 666 bp, Stenotrophomonas maltophilia
atgttcgctggacagcatcggggtgtggcacctgccgtgccaccgcgttcctatctgacaggaagcctgcatgtgacccagggagctcccccaccgtccccttccgcacgcactgtgccaccgcggaattcgccgggacttacggctgccgcatggaatcgccgcccacacaatgtccgcgcgcccggcctgcaacattggccgctttggctgcggacagtccccgatatcgagcgcgctggcgtgttgatgcggctgttcggcgcgttgtttctgctgctgcccggcattgcgctggtggcttcagcgtatcggcatgcgagcacagcggtggcgacggccgtgctcctgttcgttgccgtgcatgctgcgctgcatgggctggcggcatggcgggcggcaaccccacacccaacgccaccgctgctgcgggccctggacggccatgccgctgggataatgattgccagtacgctgctgatcgccatcggtgcaggaatggcgaagctgcatgcttcgaccttcccctggttgttggccagcgcggcgattcaactctgcgctgcgcgcatcgcaggtcaccggctgcgaaatgcactgctggttctcggtagcgccctgcagttcatcgccgtgacactgctcgctcttcatgccgcgcgctga

SEQ ID NO: 507567 - DNA, 942 bp, Stenotrophomonas maltophilia
atgctgtacgacgtcgtcattgccggtgctggcccggttggcttgttcctgtcctgcgaactggcccatgccgggtgttcggtgctggtgctggaacaggccgggtccgctgattcgccgttgaagcgcctgccattcgggctgcgcggcctgaacgtccccacgctggaggcactggatcggcgtggcctgttggacgcggtcgtcgcgactcaggtgctcaagtccgacaagggcgcgccgccgctgggcaccgcccattggctggcgcaaccgcgggcgctgggtggccacttcgccggcattccgtttgcgttggacgacgtcgaccgcacgcgctggagctggcgcctgccgacgccagtgggcactcagatggcggtggagctgcaggccctggaaacggtattggccgaacgtgcgattgcgctgggcgtgcgcatcgaacgcgggcgtgcggtacaggcggtggatgcgcacgaggcgcaggttgccgtgcacatcggctccggcagggtccacggccgctggctggtcggttgtgatgggcccgcagcacggtacgcaagcaatcgggcttcatctttgctggaaccgggccggagttcaccggttacacgctgctggtcgaactggcagatgggtgtgtactcacaccgggccgacagttcaccgatcacgggatgtgcaatttcaacccgccaggcctgctggcgctggccgatttcgacggtggcgcgggccatcgcacgccactggaccggcactccgcgcaagcgttgctgcggcgggtgtctggccgcgaggcaacgatcactgcattgcacctggccacgacatggaccgatgctgcgcgccaagcgacggcctatcgcagcggccgtgtgctgttggcaggtgatgccgcgcacatgcattcaccgttgggcggccaggggctga

SEQ ID NO: 507568 - DNA, 759 bp, Stenotrophomonas maltophilia
gtgaccggaaagaagtcgatcgccgaggaactgattgacaagaacctgggctatatgcaactggcgctcacgtcggtgagtgtgctggatgttgccggcgacgtaacgctggatagcgcaaagacccgtgcgatgtggttcattgggctgggcaccggcggaccggccgttacggcgggcgccatgctattgctgtaccagatcgccatgtcattgttcattggttttggtccgctgttcatcctctgcctgctgtttgagcagacaaagtccctgttccaacgatggttgttctatggcatcggcaccatgttctcgatggcggtgttggctgcgatgaccggcattgccatggaaatggtggcgcgcgtggcggcttcgttctggggcgcgtctgcgctgggtgcactgctggggtcgaacctgaccgagggcatgagcagcatggcgctgcagcagggcggcatgggactgattctgacgacgctgatcctgactgcgcccccaatggctgcgatgttcttccagggcaccctgggtaccttcatggcatattcgcagataggtggtagcccggtagcgcaggcgcccagctcaaacggccagccgccgggtagttacatgccgcctcagacttctaatgcggagaagcatgtttcaccaccagtaacctatgcaaccagtggaaggtctataggtgaaggcgggtctagcggaagtcttgggcctggtacgcatggcaaggctgctggaagttag

SEQ ID NO: 507569 - DNA, 303 bp, Stenotrophomonas maltophilia
atgggtgaaaagggggatacgggagttgcaaagcagaagtactcccgtgaagaggctgagcaggaagcgctaagtcaatgtgcgacgtggggtgcgcgaagctgcgtggtcaagatctcgtatgagaaccagtgtgtggcgatcgcgtctcccacggcctcccagacaggcgcgcatatcgcgcgtgatggcattattgccagagcaggtgctgtagcgctctcgggttgcaagaagcaggggggtgtcgggtgtgaggttatgtactccgagtgcagcgatcccatctttgagaagttctag

SEQ ID NO: 507570 - DNA, 627 bp, Stenotrophomonas maltophilia
atgagccgtggtgcaaaaaagaggattgaggctgagcccgcgttttgtagctgcgcttgggcccgtcttaaaggtgagggtttcatgcgatctactctatttaacctgctgtctttgggaatcattgcagcttcagctttctctgcacgtgcagaaggtggagcctgccctcccggttactaccccgtggggggacaaggggcaatggggtgcgcaccaattcccggcgcggcgtctggtggcgccgcccagcagtctccacgtcctcctccgcaacctacgggtgagtggatcaagacctggggcggaattgcggtatccgccagcacttccgatgccggcgtttctacggggcaccggtcaaagaaggaggcggaacgcaaagccgtctcagaatgtgctgccagtggagcaagcgattgcaaggtcagcatgacctatttcaatcagtgcgtttcctgggtcatcccgagcggaaggactggaaatggcctgtcaggaattggcaccggtccgactccgggtgatgccgagcgggctgctcagggagtctgcaagaatgacaagccgggagcctgtgctcctgtgtatgcaaattgtaccgagcccttgttcaggaattactga

SEQ ID NO: 507571 - DNA, 807 bp, Stenotrophomonas maltophilia
gtgggtccccgagaatggcaccgcaggtgtgacccacgggttgaaacaggtcacagaaggcttgcaacgctttgctccttcaaccacgcatcttttgatggcgacagctatcgcctgccactcactggactcgatttatttggacatgtgaaatttggcaacggctctccatccagtcaacccttcgcccaacggttgcggaggcataggggggcaatagcatcaatacgccttgaagatcggctctgtgcaatccgcgtagaaaacctcgcatgccccggcttgatcattcgtgcagcctttctgagcttcgcgctccgccacgtcgagtgtcggtcctcgtccaatgccagagccaccctgacctgtccggccgctgggaactacccatgccgcacactgattgaagtaggcaagcacaagcttgcgatcgttcgcacccgcggaagcacatttgccaagggcttcctgctccgctccactcttccttcgctgccctgtcgatacacctgcatccgaagttcgcttggaggtggcaattgcaccccaggtggtgacccattctccagacggttgtggcggcgaaatgggagcggtaaccccgccattgtttgctcccgggataggcgcacagccctgtactccctgtcctccgatcggatacataccagaggggcagttgccctcagccatcacggaaaaagacagagtcaagaagaaagatggaatagccagcctagtgaaccacttcattacgtgctccaagcgccaaggcaagcatccatggtcggggcgtctccccgttga

SEQ ID NO: 507572 - DNA, 657 bp, Stenotrophomonas maltophilia
atggatgtagccatgccgacacgcaagggacgccatctggtaccgatgggcctcttgctggcactgacggcctgctcgccttacgcggacgcagagcgtgacgttgccgcaggtggacgcggcatggccaagctcaacccgtcaccgcagcagggctacgagctggtgctgacactgaaggacgcgccgggcccgttcgcgattgttgagggctcggcccagtacgacgccagcaactacgcagactgtggacggatcgtgcctgcaacgggcactgcaggccgcatcaccagccaggagcccgtcaccctgcacaaggtcggcgagcacgaataccgcggcacgttctacctggaccgcatgctggacgaggactactacgggcgtggcgtctgccattggtcgctgacaggtgtcggtgcgatgttgcgcgccacgaacggcaaggcggatacgcgattcctgacgttcatcgacaagaagcgcatggacgcggggagccaattgacacggtactacccacgcgccgactacccgcggatcgaagagatcaccggatacggagcgagcggcaaggaagatccttcagcgtacaaagaagagctgcgcaatgcgctgttctcaaccaccactactgtgcagaagcttgtgccatga

SEQ ID NO: 507573 - DNA, 417 bp, Stenotrophomonas maltophilia
atgatcgacatcgaccacttcaaacggctcaatgacacctacggccacccggaaggcgatcgtcgcctgcagtcggtggccgccattcttgatggctgcctgcaacggggtgacgatctgctggcccgctatggcggcgaagagttcatcgccgccctgccctcgcccgatgccgcccacgccctgggcctgggcgaacggctgcgcgcttcggtcgaagccgcagccctgcccgcccctgaagccaccgtcaccatcagcatcggcgtggcctggcaggcaccgggcgaagaccgcgatccgcgcgacctggtcgaacgcgccgaccaggccctgtatcgcgccaagcatgccggccgcaactgcgtacgcggcgacaccggcaccacggaagactggtccaggcgccgcgtctag

SEQ ID NO: 507574 - DNA, 459 bp, Stenotrophomonas maltophilia
atgaaccgagcgaactggtttgtggtctctcccgagggtgccaaagcggttggacagctccatcactttgtgaccaccggcacatcgttgccctcaaaattgatccacctggtgttcttgcgcgtttctcaactgaatggatgcgcgcactgcatagacatccacacacgcgatctactcaaggaaggcatgcccttcgacacaatcacccttctgcctgtttggcacgaagcctcgtacctgttctcggagcaagagcgcgccgcgttggcatggtctgaggaagtgacgcttgtcagcgagacccacgcatctgacgaggcgtatcaggccgtggccgcagccttcagcgagaaggaccttgtcgatcttacgctcaccatcgcggcaatgaacgcgatcaatcggctaggcgtgagctttaggctcaagccccgtgccaagcccgctaccgagtaa

SEQ ID NO: 507575 - DNA, 279 bp, Stenotrophomonas maltophilia
gtggggctctacccgggcctgccgccgcgcgaggccgtggaccccctgaccgacagcacgctcatcgcgccggccacgcctctgccgggcctacccccgacccgcgagcagcagcaacaggcccggcgcctggctgaggctggggcgaaggagatcgagcggatcaaggcagcgctggagccgcgcaagccgccggcggagacgaaaccccgagcgagggacatccgcagcaaggcgcggttgagggcggggctgcagcagatgcgcggcggtgtgtag

SEQ ID NO: 507576 - DNA, 387 bp, Stenotrophomonas maltophilia
atgacgatgaccgcagagaacgagttccatgatctgatcgccaagctgcaggcttggttccgtgcggaagcagccgccagtacgctggatgcgctgatggatcatttctgcaccgacttcagcatggtcggtattgccgggcagcgcctggaccgcgaagccctggccggcatgttcgctggcggccatggtgcccgcccgggcttgcgtatcgaaatcgatgccctgcagttcattgcggtgccggcaccgttggtgatgctgcgctaccgtgaagggcagggcgttgctgaaggtgggatggcctggcgtgaagcactggccgtgctgcggcaggaagacggccgttggcgttggctggcgttgcatgaagtaacggcagcctga

SEQ ID NO: 507577 - DNA, 291 bp, Stenotrophomonas maltophilia
ttgccggtgctgctgcgcggccatcagtaccaggcccgcctgctgccgggcgcggaactgaccgccaatccgctcaatctgctggcctatgacctcgcaggcgtggatgatgtgggccagtggagcctggtcgtggccggccgggacgcagtgcagggcggcctgggcttcattctgctggcgacccgtgtggacgccggcaccggcaacgaggccagcgctgaagagctgcaggaccacgcctgctcggtgttgaccggcgcaggcgcatcgctggagcgggtccgctaa

SEQ ID NO: 507578 - DNA, 282 bp, Stenotrophomonas maltophilia
atgccatggcagaagatcggcgaacttcctgaccagcgattcgtcggcccctacggcatcgaattctggcgtatccacaaaggccaggtcttccaccagggccggctgctgcgcaaggccgacgcggccagtttcgagttcatccccgcacacaatttcgtcgcgcgcgatgcgcccgccgtctaccacgccaggacccgcctgcccgcgatcgaccgcgacagcttccgccagtgcggtggttactggcgggacaggcgcaatactgcggccggtgcataa

SEQ ID NO: 507579 - DNA, 945 bp, Stenotrophomonas maltophilia
atggacaagcacgataagatttttgtcgcaggacaccgggggctggtgggtggtgctgtggtacgccgtttgcaggcgttgggatatgacaacctcttgctggcagggcgcgagcgcgtcgatctcagggatcgcgcgtcggtcgaagcgctctttgaggccgagaagccggccatcgtcatcctggctgcggccaaggtaggcggcatccatgcaaacgatgcgtaccctgccgaattcttgtttgagaacctgcagatccagaacaacgtgatcgacgcggcataccgccatggcgccaagaagctgactttcctgggttcgtcgtgcatctaccccaagttcgccgagcagcccatccgcgaggattcgctgctgaccggaggcctggagcctacgaacgagtggtatgcgatcgcaaagattgcgggcatcaagatgtgccaggcttatcgcaagcagtatggattcaacgcgatcagcctgatgccgaccaatctttatgggccgggcgacaacttcgatctgcagaactcgcatgtgcttccggcgcttctgcggaagttccatgaagccgctgagcgtggtgacagcgaggtcgtcatgtggggtacggggacgccacgccgtgagttcctccatgtagacgacatggcagccgcaacggtctatctgactgagacctacgaaggctcggacatcgtcaatgttggtgtcggtgatgacatcagcattcgcgagcttgcggagctggtgaaggacgtcacaggtttcaagggcgagatccgcaatgacaccagcaagcccgatggcaccccgcgcaagctgctggacgtctcacggttgaatgaattgggctggaaggcttcgattgagcttcgggaaggcgtcgaacagacgtatcgctggttcctcgacaatcaagggcgcctgcgcgccgcctaa

SEQ ID NO: 507580 - DNA, 483 bp, Stenotrophomonas maltophilia
atgacccatttgaccgagcttccaccacgtcacttgaatgcagctgacttcaaggccgtggttcgggacacgcctctcgtgtcgatcgatcttctggtcatggatcagcggcaacgtatgcttgtggggttgcgtaccaatgaccctgcacgcggattctggtttgctccgggtggtcgcatccgcaaaggcgagaacttcaaccaggccttccgcaggctgactgaggctgagctcgggcaatcgctggatatcagcgaagccaccttcgttggagcgtatgagcacttctacgccgaagactttaccggcgcatcggatgcaggcacgcactacgtggtgttgacgtactccatcagcgtggatcccgcgggaatggctctgccggaggaacagcatgctgagtaccgttgggtaacagcagaagatgctttgtccgatgcctcgatccaccccaatacccaagcatacgcccgcaaatag

SEQ ID NO: 507581 - DNA, 765 bp, Stenotrophomonas maltophilia
atggattcttcaaaaaggaagacgatccgcattgtcggtggcagtattgacgcactggactggttcgacgcgttgtctcttcttgcgtcttgggccgcgaaccatgaaagccgcgtagtctgcatctgcaacgcccactccgtcgtaaccgcacgtcaggacaaggagttcgcagcagccgtgaactctgccgacatggcaacgcccgatggtgcgccggtggcctggctcatgagacgtcttggggcttccggacagcaacgcatcaatggtcccgacctgatgctcaagtactgcgaggcagccgccaagcgcggcgagtccatctacctctatggtggcgctgagacgaccttgagcattctctgcgacgagctgcccaaacgattccctggcttggtcattgccggctcgcactcaccgcccttccgcgcactcagcgaagaagaggatgctgccatcgtgcgcgacatcaatgactctggtgccgggacgatttgggtcagcctcggctgtccgaagcaggagaagtggatggcggcgcaccgtggccgcatcaatggcgtgatgatcggtgtcggcgcggcattcgactaccatgcgggtgttatctcccgggcccccctctggatgcagaacaatggcctcgaatggctgcacaggcttgcgagcgagcctcgccggctctggaaacgttacttcgtcaccaacaccctcttcatttggcacgctgcgcgccagcttatgactgcgcagtcgaaatga

SEQ ID NO: 507582 - DNA, 1140 bp, Stenotrophomonas maltophilia
atgaaaactgtagtaatttctcaacatagactactccattaccgcatggagctctttcgaatactacgcgattcatgcgcgagcaatggcattgacctcagacttctccacggccaacctacccgccgtgaaattttgaagactgatgttggcagccttccctgggcggatgttgtcacgaacaggtatattgaaattgcaggaagagactggctttggcagcccacaccgaagcatctaaaaagagcagacctgttcattctcatgcaggagaatagactgctttcgaactatccgaaaatattcggattgaccgaaagaaactctcagatcgcctactggggacatggaaagaacttccagtcaaagtcacccaatggccttaaggagcgatggaagagagccactcttgggaaagtggattggtggtttgcatacacagactcgactcgagacattgttgcatcacaggggtacgacccgaataggattaccgtactcaataatgcaatggacaacgatggattcaacagggatctcagcgctgtttctgccgaagacatttctcgccttcagcagcagctagaactagctgacggcgcaccgctgggaattttctgtggatctctctacgaggacaagagactcgactttcttattgacgcatgcgacgtcattcattcaagccgcccggatttcagactggcagtgataggtgatggcccgagctctcagtttgtcaaggatgcggctgcgaaaagaccttggatgaaagcggtaggtcagaagagggggattgacaaggctgtctacttcaagagagctcagatcgttctgaaccccggtctcgttggccttcatgttttggatgcattctgcgccggcttgccaatgttcaccacttcggacgccatgcatagtcccgagatctcctaccttgagaatggagagaacggcatcatttgtcccggcgacacattggtgtatgccaacgctgttctacagatcctggagaattcaagcgagcttgagtccttgcagcgcgccgccaaggaaggcgcaagccgctacacgcttaagaatatgtgctcaaactttgtagacggcattcaaacctgcctcagcaatccgattcgatag

SEQ ID NO: 507583 - DNA, 606 bp, Stenotrophomonas maltophilia
gtgaagaatagaattctcgctggaattaggcgaatcaggacagcgctcacgctgcggaacaggtccatatcacgtagcggaagggacatccacatcggctcaaattgccgcctgtgggccccaacaggaattcaaatcggggattcaacttacataggccacgatgtttcgatcgaatgcgatgccatcataggaaggtacgtgctgatagcgaaccgtgtggcatttgtaggaagaaatgaccatgactacaggtcggtgggtgttcctattcgattcagcccatgggttggcggtgagccctcaatgcattctgactccagacttgttatcgaagacgacgtttgggtagggttcggagcgattgtcctctccggcgtccggattggcaaaggttctatcattgccgccggcgcagtggtcaccaaggacgttgagccctactccattgttggtgggaatcccgcaagacagatatcccggagactgcctgatgcgagtatcccgaaacatgaggaattgatttcgcgcgggaactttcgcttttccgagcgtggctatgaatactgggaagtatcgccagcaaagagtgagatggagcactga

SEQ ID NO: 507584 - DNA, 1344 bp, Stenotrophomonas maltophilia
atgagaagaaattcggcaatctacgtcctcctgatgacggcgctcgcatcgattctcatcctgttcgagagcgcacttcctcaaccaattgcggcgtcatttgcgtcaagcgcccttctctcgatctgcatcggcgcgctggcgttccatctgctatcgacaagaagttccccgtacacaattctcttcacgttcacgctagtcttttatgtacttggcctactcccaatcacgagtcggcgaaattacatcgactctggcttttggacggcgctactcattacctcacttgctgcaatgctagcaggctcctggctggccaaagcaaccgcccggaaacgagaacaccactccattgcagctatttcaaaatttcgaaccctgacgatttacggggcatcactagctgcagccatctatattgtttccacagcgggactcctcctatttaaacccgaggcccgattcagcgtgggcagcacatgggtttatctcgttgagttctcgattgcagccacgatttgcatcgtttccgagcggtttgtctcatccaagcctattggaaagctgatgcccattgccatcgcggctcaatcagtcatgctactggcaatcggttacagaaatcagctggccctgctctggctaggaatcggcctcatttatttgttcaccaaggcaagcaagctgagatccaagtcgatcttcgtaaagtctgctgctgcggcgtttgctgcgctactcttgatgtcggcactgctgtatgcgcgcattgaattctctggtgatagcattattagctggaacgccagaattgatcagttcgacattgtccttgcagattacatgctcccagtactgagcatccacgatgcatcacgagagacgatgggtgttgcgcagatcgcaatcgataggattggtgacattcaacaatccacatcgaacgtgggtttctttttcatggacatgatgacacttctgccagggcattcggaaaccgccacagcgcttctcggccaggtggtcggaaactctgacgagatgtatctggttcccggattaatcggcgcactttatatatcattcggcatcgttggagtcattgccttctacgcactggcgggattcgcccttcaacgactttggatttcctaccaacgatccggcaacgccaagaccttctccttggcaattgtagccgtcatctatcttattcagatgacttatcgcggcattccaaagccgatgtacattgcagcggcagtaatagttatctactgcttcggcagcagcaggaaaatatcagcccaaggaagcacggaggccagtggtgaagaatag

SEQ ID NO: 507585 - DNA, 1074 bp, Stenotrophomonas maltophilia
atgctgcttgcagccggcctggcgcaagcagcctttcttactccaatgactttttatactgctggaaagtccaaagcttacaatcgaacgatacagcgccgaacgcttaaactgctcacagcaatatccgggtttaccttgcccgtaattatcgcggcggggttcgtactgtgggacaatgcagaacaacgtaatatattcgcaatcttttctctcattggattcgcaaatatctttcgcgaattctttgtaagatgcctgcttgaccgcaagtcattcgccgcgtcgacgctggccaacctcagcttccttggggtaatggccactcttgaaatatcgttactcatactcggatcgacaaaccttgttgatcatctcaccgcgtacctcatcgcactcgcggctgcagcagtaacggcctccttattcgcaaaactcaatcctttcgcactcccgaaaaagtcggatgcccgcctgctctactttctactccgatccggaaagtggagctgcataacgaccattgcattcaacttacgaacacaggccccgaatctgttcgcgtttgggtttatcggcctgacgggcatcgcccagctgaactctcatagaatacttgtatccccccttcttctgataattcccgccataacgcccacccttctgagaactcttgcagagagccacaagaattcgaccgacaaccaagaagtgaggacaggcaagcttgccgtgatagcaatggccatcggcacaacatacacttgcgccctcgcgatcatctatcccaccctgcttcaccacatattcccgaagtacaaatccgactggtttattctcacgggatggggagtatatgggacgacggttttcgttcgatcgattattgacgtttcaatccaagcgaaaggtcgttttcgcagtgcctcactggcatcaacggggatcagtgcaataagcatccccatagcaatcgtactttcttgggcctttgcagagcggggcgcattgctttcaataatagtagcggagttaatgctactgatcacacttgcccaggtatcgcgcaaatga

SEQ ID NO: 507586 - DNA, 1122 bp, Stenotrophomonas maltophilia
atgtctaaacgcgcacttatcacgggtgtcactggccaggatggctcttacttggcggagctcttgctggacaaagggtacgaggtgcacggcataaagcgccgggcctcgctatttaacacacagcgagtcgatcatatctatgaagacccgcacaagccagatccccgcttccacctgcactatggagatcttactgataccagtaatatgactcgtatcatcgccgaggtccaaccagacgaagtctacaatcttggtgcacagagccatgtggcggtcagttttgaatcgccggagtacacggcggacgttgatgcaatcggaaccctgcggcttttggaagctattcggttcctgaagctcagcgataaaactcgattttaccaagcgtccacttctgaactctacggcctcgtccaggaaaccccgcagaaggagacgactccgttctatccgcgtagtccatacggcgttgcgaagctctacgcatactggataacggtcaactaccgcgagagttatgggatgtacgcatgcaacggcgtgcttttcaaccatgaaagtccgcgccgcggcgagactttcgtcacccgcaagatcacgcggggcctcgccaacattgcgcaggggcttgaaaactgcctgtacatgggcaatcttgatgctcttcgtgactggggccatgcaaaggactacgtccgaatgcagtggatgatgcttcagcaggaaaagccgcaggactttgtgattgcaactggcgttcaatacagcgtacgcgacttcattacactgtcggcaagggagcttggtctggagcttgagttcaggggcgccggtgtagatgaaatcgcagtggtctgcggaatagatggcgacaattctcccggagtcaaactggggcagacaattctcagaattgacccgcgctatttccgccccgcagaggtcgagacgcttttgggggacccctcaaaggcgaagtcagaactgggctgggttcctcagataacccttgaggagatggtctcagaaatgatcgaggcagatctccgcaccgccaaacagcatgcactcctgcgccatcatggcttcaaggtaccaattggcaaggaaggctga

SEQ ID NO: 507587 - DNA, 1167 bp, Stenotrophomonas maltophilia
atgaaaatcgcagttgttgggacgggctatgttggcctctccaatgccattctactggcgcagaaccaccaagtgtccgcacttgacattgacgaggcccgtgtcgctctgatcaatagcggccgctcgccgctggaagatcgtgaaattgaagaattcctcaagaatcgccagctcagcctgaccgcgaccgtcgacaagcacgaagcgtacttggacgcgaattatgtgatagtcgccacgccaactgactacgacacgcgcacccactgcttcgatataagctcagtcgagtccgttatcggggacgtacagcgaatcaatccggacgccgtggttattataaagtccacgattcccgttggttgcaccaaggagctgcgcgaacgattcagaacggacaaaattattttttcgccggaattccttcgcgaaggaaaggcactttacgacaaccttcaccccagccgtatcatcgtgggcgaacgctctgaacgggcgaaggtgtatgcgaatctcctcaaggagggcgcgattgcgacggaagtgccgattcttttcactgattcggctgaggctgaagcaatcaagctttttgccaacacttatctggctatgcgtgttgcgtacttcaatgaattggacacctacgcgacgacccatggactggatactcgccagatcatagaaggcgtaagtctggatccccgcatcggcgaccactacaacaacccgtcgttcggatatggcggctactgccttcccaaagatacaaaacagctactcgcgaactacaaagatgtgccgcagaacctcattcgcgccatcgttgaagcaaacagtacgcgaaaggactttatcgccgatgaaataatctctcgccaaccgcgtgtggttggaatctatcggctcgtcatgaagtgcggttcagataatttccgcgcatctgcgatccagggtgtaatgaagcgcatcaaggcaaagggaattgaagtgatcatttacgaacctgcactcaaagagcgggagttctacggctcgagcttggtgcccgacctggcgaccttcaaatggagagcggacatcatcatcgccaacaggatgtctgattccatcgacgatgttgcccataaagtatatagccgcgacttgttcggggcagactga

SEQ ID NO: 507588 - DNA, 162 bp, Stenotrophomonas maltophilia
atggcacagcagaaccagaacccgaaccagaagcagcagggccagcagaaccagcaggatcagcagcagggccgtggccgcgaccagcaacagcaacagcagcaggaacagcagaagcgcaaccagaaccagcagcagggcggccacgacgaagaagaatga

SEQ ID NO: 507589 - DNA, 1080 bp, Stenotrophomonas maltophilia
atgcgcatgacggttgctgtgctgggaatgatcctcatggtcttcactgccgtggccgatgccagcgaggcgcaggcagccggcgagcgccacggcgccaccacggtggccagcgcggctgtacgcgatgcgcagcaccacgacgcgctgcgctacacggtctggtacccagcgctggccggcagcggggaaaccgccctgaccatcggcccgcccgacgcgccgctgttcgacgtcggacgtgccgcgatggaggctcccgtcgcaggtgatcgcctgccaacgctgctgctctcgcatggcaacggcggcagtgcgcgcatgatgggctggctgggcaccgcgctggcgcgggccgggtatctggtgatcgcggtcgatcatccaggcaacaacggcattgacacgatgaccctgcccggcagcatcctgagctggttgcgtgcggatgacctgcgcgccgccctggcggccgtgcgggccgatccagtgctgggcccgcacgtcgatcctgaacgcctgggggttgccgggttctcggccggtggctacacggcgctgctggcagccggtgcacgaccggacctgcagcgactgctggccttctgcaccgcacatccggacgacggcgtctgccggcctcaacaggaggccgcaacgcactcaatggaagcgcgcgttgccgctgcggcctctccagcactggcgccatggatctcccaggccaacgacgcgcgcgccattcccggcgtgcgggcggcattcctgctggctccggcgatcatccaggccttcgcgcccgagcagctgtcctcgttgcggctgcccgtgtcgatcgtgctgggtgaggctgacacggtcgcgccgccacagaccaatggcgcggccgccggggtcctgattccgggcgcggaactgcagcgcttggccgatgtgggccactatgatttcctggccgcgtgcaccgcgaccgggcagcagcggctgcaggacctgtgcactacgtcggtgccaaaggcacagacccacgcgcaggcagtggatgcagcgatacggttcttcgaccattcactgcgctag

SEQ ID NO: 507590 - DNA, 2079 bp, Stenotrophomonas maltophilia
atggcatctagaaaaaagagtgctgacagcactggccagcaacgcctggtgatctgtgtgagagcagtaggcaggaagaatggtgttgtcaacatcgacttcagcttcattcgtcactggctaggtccgtgtgcacaaaagcggttcgcagaagccatcactaagcacgctcgcgaatactcagcggcccagacgacatatgcagttcgcaaggttctaaggttctggcacaccctgtgtgcggaaaggggttgggctgcgccaaattcaagaacttgcagcgagtccctagccctgcaaatctccgaacttcggggtgaattttacttgagcagggcgaggtccggctgcgccgttaccactattacaaacgagtggtccgcgttcctgcggttccttccaattctggtggcctgcggtgcgatcggatccgtcgaggcaagggcagcggcctttgccgcgccgagcaagcggctcgttattgctgaccgcgaagcagctgcgaactccgtaaggcgcttgagtaacgcgcccaagtctctcaattctgcgagggactcattcaatgacaacttgcttgagccagtatccatcattgatggaagtacggattatcttagtcgctaccaacagagacttggtggcgcgattgggtcgatccttaggtgcgcagtcaaggattttgagggttttgagctggcgcgtcaggttgggctcgagatgatcagtcagaccaccaagcgcgagatcgtgaacctttcgtcccagacgccgaaatccaccacgcgcaagatgtggtcgcaatttatcagcgaaaaccccaatgaaagcctgcgactcgcactaggaatcgtagttcacgaaatgcagggggcgcctcagttgcgcgtcgagattgaccgagtaacccaaaggtcaacatatgccgacggatcaagtgcttgctgggacttggtggctacctacggaaaagatgatcttcttccctacctaggtatcctgagtggcagggttgcggcggtttgtttggcaatcttgataatagaacatccagtcctaaatccaacatctctctaccgagcaaaagttgagcgaatcggcaatggtggaagctacatcacatcagatgggctctccggaaagcccggcactcggttaagtgtggtgaagcttcgtgcgggaacggaaaagagcgcctcgctctcgccgctttctcagcgagtgctcgccagggtattcgagtggtctgaacccttgcggaagcgacttcgtgcagaaggaaggtttgaagaagccaactgcttatggataggcattggactcggcggaaacgaagtcaaggcctttggagagtccacgctacgccgcgcattggccaatacggagaaaagccggaacctgggcatcggtgagcgagcagtcgcaaaccgaaagcaggtcttcatggaacggcatcctgagctggcgcgctggcgtcggaagatctcctttaaatcgcttcgcatgagttcgggagtcctgaagttccttgaatctgatggtgacatcactgaggcggcgaggatcttcggccatcgtgatgtcgacactactctggggcactacatcccaaatgcattgcgaattgcattgtttgagaggcaaattcggaggcatcagaaccgccttattactcagacagaacttgacgcaggtcaactccttcgggctacggacttcagctgtattgaagacctacaccagtttctttcctcaaacggcgcaagtgcgggccgagttgctgatcctgtcgtcagcgtggtcgggacaactaatgactcgggactgatcatctatagggatccagatgctctcgccgtggcaatgctctacggagaccgtttggagaacgcaagcgcaaagtttcttgatcatccagatgctagaagcggcatcgcaccgcgcttctggaaggacttcattgacagaataacggctcccttgccagctgcaatgggtgatctgactgaactggtctccgcggcgctagcgagaaagggcgctattggaaacggtgtgaagctcccggagatatggtaa

SEQ ID NO: 507591 - DNA, 1902 bp, Stenotrophomonas maltophilia
atggcatcagttcctcaggagatcctcaacttcttcgagcgtacaaagcttggcgttcaggaaaggcctcgtccgtggtggctgcagacagatgcgtctgagaacttatgggtggttgatattggaaagagtgaccttcgagaggtgaacgagaaggttcgcggtggtcttctgctcagctgggacacattgcttccgctcggaaatctctgcgaccatgcgcatgagagggtgcgttcggaatgcaaggcgttgctaattgcagtagcagacatgcgcggctcgacacgagccttatacgacgtgctccgaacgctgctgaacttcgttgagttcctggcgttgaagtacgagcgtaagctgctcgctcaaggtttaagcatcgctcacatcgatgacgttgaagactttcttgaggcccattccaatggaggtacgtgcgcgacaggaatgtttattgagcgctttgaagactgtctgcgtgagcatggagtatcccgatcccgtcgcagtatgcctgccttgatgaggctgtttggggcggggggacgtggccagttgagttttgtcggtatcggtgctgcgatatctgtggactggaaccgactccgagctagcgacgtgttcctaagttttctatcgcagtatggctacgccaataggcgtgtctcatccccaacagttcgtacgactacaagatgtgcagaggttctggcaacgctgagtgaggcggcacatgccgtacccgctcttcgacgctgggcactggggaacgttcaactcgttcgcgacacgtgtcgaccttatcgtggggacgtaacaggtcgcacgccgactatgccggagccagtgttcaggcaaatagttctgaaggcagcttcatggatgttgaatgaggcgcctgcccttgagcgatgcattggggatctcgtcactcaagcagttgaactcaaagggagcaatgaatgcttcatcaggagtctgaatcttgtcgaaaagaacttcccctggaagactcttcaaggctgcgccgatcatgtggacgggcgtcatgtgcgtcaggactaccataggacgctccctctatctttcagcattattaggatccacctcggagtgtgctacacattgacctcgctactctcatgctcgcgcctgacagaggtctgtgacctctcacctgatgccctgttctcagtggaagggcgtgaattcctcacggtggagcaggcgaagagagggagctttaatgttcgcccgtcatttgataagccggttcctcggatagttgggatggcaatggcatcattggagaggatcaaaagccagctcttgaggctcattagtgtggatgatgagctgacccatcatcgcgcattcttcttcgtcggattgcgtggaataaggcccttcaacaagtcagaccctggagaagttcttcgctcaatgagcgcctactttgaacttgaagatgagactgggatgccatggatggtggcttcgcatcaattgcgtcgtgccttcgcaatgacgttctttcactccgaggacgcagagaccgcgcttcccgctctatcttggttgatgggtcatcatagtgtcgagaagacttggcgctatgtgcgcgagacgatgacaggcaaagagataagtcaggctgaggcggagatggcaatggcgtccgtatgctcggacgacgcgtctagttccgcgcttagactgaaggatctgcttctcaggcacttcggctgtgaggaccttgctgtgcttgaccgggatgaggcattggaatacctggagatgctcgcggaaactgacgagatcagagttacgcctatacagatctctacaggagatcgaagggcgtttaccgtgcttgtttcattcaggagcgagagctga

SEQ ID NO: 507592 - DNA, 483 bp, Stenotrophomonas maltophilia
atgccgcgactgcagaagggtgaaactgcgagtggtgttcgcgccaagcagctgcgcgcgcaggctagcgttaaggcaatgatcgagattctcaacgaggcggtcgtttcaggcgcatttctggatggtgacgtagacgtgttccggcgcgtaagcacgttggcgaccatggacgacgtggcgagagggatatccccaatgtccgtgagaacacttcgtgacaacatcgatgcgatgtacggcggcgggatgaaggcgtttagggctacggtcgcagagatctgcggggtgcccactgcagcagcagccaagtctgtagaggagccttggcttgaggatgcggtgctggatatgacagctaggtacagcgatcttctccagaggttcaaacgcgtggcccttgactctgctgttgctgaggaagagataaagcgccacttcagccgatatcgcggccagagtaggcttcgggtggtgaaatga

SEQ ID NO: 507593 - DNA, 1368 bp, Stenotrophomonas maltophilia
atgacacttagtggaagtttgcgtcgttcagcaagcaaaagcttcgcgttgcccgggtttggaattggttcaactgctcgtgatcgcgccagggcaagtagaatgcccgtcgtcttctatcctgatgggctgtcgtgttggcaggtcaatgcgtacttgattcattgccatcgggctgggttgaagatgggcactatcgccacctacgccagtgagctaagtctattggtgagattcctgcatcgatcgcgactggatatagaccagttagacgacgatcacctgatcgacttttcagactggatggttgaacggaaaaagtccagcagtcgtcatatcaaccgcgttctctgtcgggcgattgccttcctgacatggattgagtgcatatgcgtcggttcagcgcaagttgggcgagcgggcacacatgcattgatcaccgtagagcaaaggtcggctggatctcggcgtgataagaggcctgctagtcatcggcatgtcgcgatgcttccaaacagtgcaaaaagaattgttcgcccaatgcctctggctacatttcatcagctgctgaagcaatgccagcgcagtgccaatggaagcttctgccaagctcgaaatcgcgtaattcttctactcttggctgaatcggggattcgcagagaggaggctgtttggatacgcgtacaggatgtggcggctgccttgcaagacgccgccggcggtctgcgcgtcagaacctcaaagagagagggcaacccattgcgggtggttcctgtgcctgagttcacgctgcgtgaggtggcgaagtacatccgcgttcaacgtgcaatgatgatgcgaaggcaccagaaggccgggagattagatcgtgaccaaggctggctgttctgttcagagagcggaggacagttggcgccatctaccgtgactcagttgttttccgatttgcggcgtttggcgggcatatcggagcgtgcgacagctcatatgcttcggcaccggtacattacccttcaggtcattgatagagtcaggaggcttcgtagcgtgggtatattaggcgtggaggctgcatctactgtgttggcgcaagtggcatcgcttagtgggcactcttcgccggcgagcatgtgggactacattgactgggcttatcaggagatggctgcatcagcggagagcgagggcgatctagaggttcagcagttgattgatgagctggaggtcctgcgagtggttgcagatgagagcgccataggaaaggagcttcttgtgcgggttcagggggcccttaggtctcgattggctgctcctccaaaacttggtgtgcttgctcaccagtcgatcggctctagaagactggattag

SEQ ID NO: 507594 - DNA, 2091 bp, Stenotrophomonas maltophilia
gtgggggaatttacgaagcgagtccgcgacggcgaaatcgccgggccgctgaggcaggcattcacgcctgacaagtggaaccgcgcattcggtgacctgcccgcgccggacgccgtagatcacgacatacatgccgctgggctagccctacacgaaaagctcgcggtgattcgcggggtcctgaagctttcctcatccgacacgatttccgcgacgaccaaacttcgggcgtttcttgcgatcgcgaactacgacttattcgtcacgcgcgataagaccaagctcgcgatcgagaaatttcaggcggatagagagggcgaatcggatgagatctacgccatggaggaaatggcgggggtgaaactcagcttgccagggggattcgactggatgcccaacgaggtcgtggaaagccttgtggatgggatcgaactaccaatccgggttgttctgcaagccaaccctggcttggccggcaatcctcgaatgaatcagatcccgtggatcgaggccggccgcgagctgaacctaggcatcctgtatcgcttcgccgaggacgtgtgggatgactgcctctggaacagttacaagatggtcgacaaggggcgagtcaaggttttcctgccgcaggatatcgatgtactccgagcctatcggataggtctggcgcgccggacttcgctctcaatggcttttaacgtagtggcgacgcacttccagcgcgacgtgctcgctagcggtgcgcggctgagagtccgtgaggtctacggcatcgagcgtcgtggtaaacggcagatcatcaaggtcgccaagcacggcgtctctaccgaggtgatccaggacctcactgtcctgcgcacccatgccgccgagccgtattacggagagttgcttgaggaacgtcttgaatctctccaaggattgaccttgtccgcgctcatcgacgcctggacggtcatctcgcgcgccgcgcatgtgctggttcagtccattggcgagaaacatgcccgtaatgttggggacgatcgtgtgcatgcctggatgcccgaatacgcgcccacgctgcaggtcggggcgctagtggacgcactagcggccgcgaccgggatcaacaagccggagggtaggcaaatcgtggagttcttcacgttccgtggcaatgcgggacaggagatctgggcgcagccactggtacctgttgggccggagaccgtggtacctatcttcgcagcggtcgtatcccctaatttgaggcggctagtcgatgtgtggatgcgacaggccggcgtggacctaggcagacgaggacccgcgttcgaaacccacattcggaaggttgtcatagacgcaattcggggatcgaaactcttgtcccccgtagccgcgtgcattgcggacgactatacgttcagagccgctggcagccgcgaggagcagatcgatctgatcttctccatcggcaacaccgtgttcgtggcggaagccaagtgcatcctcgagcccaccgatgccaaaggcatcgccatgcaccgcaaaacagtgctgggcgctgccgagcaggcgttgcgaaaggccaaagcgcttgaggataaccgcactgccttcattggggatgtgcgccggctcggcatggcgttggccgaagacttcagggtcaaacccttggtcatcgtgagcaccagcacccacgttggcattgccgcgcggactgtgcctgtaatcgacgagtacattctcggccgctttttagatggcgagctggaggacatcgcctatcagccgggcgatccggcttcctcgaagcgactcaagacccggttctactccaacgctgctgaagctgaagagcgcgctcccggttactttgcatctccgccgcagatgaagcgcttcatcgatggtgtgcgcggacgtgtcgtgccgatctgcgccgcgaacggaagtgattgggagggccacatcgtgacgatggaatgcgtgacgggaggtgtcccactctcacttcaaaagcaggcgagctcggagatcgcagtcgtacccgtcgcgggaatcgctcacgaagaccaagtcggcgagccaaacgaaaattga

SEQ ID NO: 507595 - DNA, 4293 bp, Stenotrophomonas maltophilia
atgcctgtttccgattccgccctgacccgatcgttcctggacctgtccaagaaggacgatgccgagacccaagactatgaattcctctacggcctgctgcccggcggggacctgacctgggaccagctgctggaagcggaccgggtgttgatcgtctccgaggcgggtgctggcaaaacctacgagtgcaaggcgcagcaggagcgcctcttcgcgcaaggcgagtcggcgttctacctggaactggcgagcctggccaattccacgccggaagcgcaactcaagccggcacagcgccagcgattggagagctggcggagcgcgcagaacgagcgagcggtgtttttcctcgattccatcgacgagctgcggctgaccccgcactcattcgccctcacgcttcgccagttcgccaatgccttaggggacgctctcgaccgggcctgtatcgtgctgacgacgcgaccgggcaccgacgatcgtgccatcgtcgagaacgagctgcctcttcgacaggtcgtgcgcgtaatagaggcggaggaagcgtttgccgacgtggccatgcgagtggagctgccccaggacgccagcgcgatgccgcggttgcgcttcgtcgcactggcgccgctgaacgaagcgcagatgcgagcgttggcccatatcgaaggcgtgggcgatccggacgaactactgaaagctatcgaggcggcgcacgcccaagaatttagcaagcggcccctggacttcgtcgagctgtgcgcggactggaaggcccacggccgcattcgcggtcaccgcgaccagttggagtcgagcatcgcggtcaagctgcgaccgcgcgcccgcagcgagcgcgatgaaccggcggatcttcagcccaacaaagcgcgcgagggcgccgagcgcttggctctcgcggcgctgatgacgcgcaatttcaccttgtggcatgacgctgaaaccggccggggacacggcgccgacgcgcttgacccccagtcgctcctgagggattggaccgctgcggaaatccaaaccctgctcgaacggccgctgttcggctttgcgtcctatggccgcgtgcgctttcacaatcgttccgccatcgagtacctagcggcctgccggttgctcgggctgatgaagcatggtttgcgcatgcgcacactgcagcgtttactgttcgtgacctcccccgtcggcctgaaactcgtgcgtccgaccatgcaaccggtggcggcctggctggcctcgctgttggacccgattcgcaatgaagtgctggagcgcgatccgagcatcttgctgcgttttggcgaccctggcgcattgcaaccagcgatgcgcgtccaagccctggagctgtatgcccagcgctacgggagcggtggctggcgcggcatgcacgtgccggcgctgcaggcgcgccgcctggcctcgccggagctggcgcccacaatccgcaagctgtgggacgcgggcatcgaaaacgacgaagtacgcgagacgctactcgacctgatcgaaaccggccggatccatgcctgcgcggacatcgcttttgacgtggcggtggatgtcgcgcgcgacgtgcgcgagcgcctggacggcctcaagggcctggcggcgaccgatgacccgcgtctgaccgggctactcgaccagatcgcctcccagcacgccggctggccgccagatctggccaagctggcgatcttgtatttgttccccgccaagatgaccctggtccagatgttggggtccctgcgtgccctgaagtaccgtcgcttcgacgcgggcggcatctcgagttttctgcccgatgcaatcacgcgcgcgcgaactgccccagtcggcttggagctgcttcgcgacggactgacgcattacgtcaccgcggactgcgcatgggaccctgtcaactatcgcatgcgcaccggtcgacgcgaccttgtcggcccgctcacgcgggtgtgcgagctgcaagtacgggatcgtgccgccgatggcccgttggccgaatctgtcgccctggtcttgcagctgtcgcgcgatgacgactacgccgacgatgacacccgacgcttgcgcgagctgcttatcaccgcacgcccctcgttgcgcgccgccgtgttctgggaacaagatgcactgctggccagcaggatggccggcaaggatgccgatgatcggttagtgcgcatcttgtgggcgccctcgctcgcgctggatctcgccttggaccaagcctggatggaggcggccctgggcgatatcgccataccgcctgcacggcgacgcttagtgctggactgcctcattcaaacggtacgtggcacggctcttgctctgtccacgctcaaggcactgcggccgatggtgagcgataccccggcgctggcggcccatctcgatgaagccgtaggccacatcgaaaatcccccgccgctgccacagtgggcagaggagagccaaaagaaaatgcgcgagcgcgagcgcaagcaattcaaggatcgcgccagttggaagttgttcttccgcgagttgaacgatgcccaaggccagcgcctgtccgcagatcgcgccgccaactcggctattaacttggtcgaagtgatgtcgcgcgtgcgcgacgacagccagcacatcggttggaatcgaggcttcctcgagcgcattttccccgacaaggttgcgcagcttcgtcagttgctgatcgaccagtggcgcaaggtcacacccaccttgccgtctgagcgtcccgaagaacaacgcaactggtactacaaaagctggcgggtgggactgatcggcctctatgcagaggccgaagacccggactgggcgcgacggttgacgaaggccgaggcgcagttggcgatgcgctatgcgctcacggctatgaacgggttgccagcgtgggtgggcacgttggcgcaggcacaccccgaagtcgtccgggacatgctagcgcccgaactggaggcgcaactgaacgacaccggcgagcagtccacgcattcgtccctgcttcagtacaccgaacactccggacccagcgtcaacgccctgttcgtggacacgatccgggcctggctcaacgctgccttggcctccggcgcctccctccacggatccaacaagttcgaacgagctatcgacctgttgctcatccacggtacgcccggagatgctgcgtcgattgttgccgccgcgcaaacgttcatagcgcgtggcctggatcaacaagggctgttgttctggctgcccctgctgttgcggcttgccccgcgccaggctgtggacgagatggagcggttggcagcgcccgtcacgcccgccctcatgtcgatcgtgacagattggctcggcgtgctgttcggccatcactcacgcggcgaggccgtgaccacggagctgctgacggaccccgagctgttgtatcgcctagtgctgctggcttaccgccatatccgtgtcgctgacgatcgcgagaacgatgggcctaggcgatcagattcgcgcagcaatgccgaagtcgcccgaagccgactggcccaactcttgttcgaaagcaaaggtgcggtcgcttgggagtacaagttgaagttcgcgcgagatcccctggcggcgcacttcagagaacgcgtcaccgccctggcggagcagaccatggcgcaagaatgggatgcaccgctgtatcgcctgtcggacgtggccgcgctcgaatcgatccatgacatggcgccagttacgcgggcggatatggcggccttgctgcttgatcgcctgggcgagcttgatgatcggctgcgccaggattcctccccgcggcaactgtgggctcggcttagggaagaggcggaactgcgacggctggttgccgcagagctcgagcacctggccaacggcgcgtacagcgtgtcgcaagagcaagtcaccggagaggagaaggaaacggacgttcggctgcgctcctctggctatcccatcgaggccgtgatcgagctgaaggtgggtgacaaggactactcggtggcggacttgcgcaaggccctgcgcgaccagctggtgggtcgatacatggtgccggaagcgcgccgagtgggctgcctgatgatttcgcttgcaacgtccaggcaatggaaacaccccgaggacggacacctgatcgatgtcgaggaagtcatcgccctgctgcaggtcgatgcggacgacatcgtcgccgggctgggatttgagtcgctgctcgtggttcgtcagctggacttgcggccggtcgtattgccttga

SEQ ID NO: 507596 - DNA, 1230 bp, Stenotrophomonas maltophilia
atggcataccgatgggcagagggaagcaagcccaacccggtccttgaatcagttatggagtctgtaagcctatcggatggcgcggtggggatcttacggctgagcgtgtacggagacatcgccgtcctggcctcgatgcttcagggccaacaggccgacgacggcatcgacagagtcgacttgatctgggacgtcctgcacgggatcaacgccccagtttcagcaactaaattgctcagcctagtaaatgtcgcgcgatctgcacagcgaaagggaggtctaaagaaatttagccttataaccacactgtcgacggatggcgcatggctgcctagaagcttgcaaatttgcgagttacgagcacagtttcgaaaaacacttccacgaaaattcaaatctgcgcgcgcgcagctagtagaggaacagattcggacaggaattattcacgaggaccttgacagctattcattcgttcaaattgatgtagaggcggagagcgctggcgcggcgttcgccaaatcagatcgggagctgagaattcttcgtggcctgatatgtttgctgtcgaatccaagttttgagaagacattgcttggctcagaacacaagcccatcaacgttctgcgcacagggcacttccatacgatccataatactgatggctcggtcgcaaccgatttaatctggtacgagcccaattatagcccgagaatcacgttcacccccaggaagccaagcgttctggttgatgtgctaaagaagaccttgcggagaatgcgcaactgcccatacaacggccgcttggaacaagcggtcattcgcttcgccagcggcttcgatgaaagcgaccctgacgctgcattcctgaagtgctggtccgcacttgagtccatcctctcctcgaacgtggcagattacaaacaacttgtgcgtcgatgcatttttctgtacgaggatcgcgattaccatgaatcaattcttaaacagctcaccgagcacagaaacgctagcgtccatcgcgtatcggacaactcattgactaaatcgttttgctacttacttcagaactacttcgccaccgcgctaaagttccatatccgcaactacactcgcttttccaatttcgaggaagccctcaccttactgtcgggcccagtgagtcaatcagatgttaacgctgcgatggcgcgcgccctgttcgccaagcgatttcttgcaatcaagccatga

SEQ ID NO: 507597 - DNA, 1185 bp, Stenotrophomonas maltophilia
atgacgctagaaaatgacattaggacctacgtcaatcttacacacgccaacgcatggcgaagagtgaagcccggcagtacgccggacgagccagcgttggtcagctcgtttttgtcctcggagatgtaccgcgggctccgcgtcatcttgcgcaactatgcagcacccggcgtgtccaatctggtgcggggcatcttcacccatcagaccccaaaggtgaagatgaagggcgccgataattcgacggagattggagacctgatgctggtgcaccagcatttcacgcgcggcaaaggtaaaccaatcgcggtcacaggcaacgcgttgctcctccaggccaagcgcacccccaccacctccactggctcgctggcgtcgacattggaggctttgcaattccagctctaccaaagctgggcgcctttcgtgagtaccaccggtcgtttgccaacagcgccacccggctataagcggtgggatttcaaccgtcccagcgcttctggccccgctacggcagcggcgggctatttggccgtgttcaaccagcaagccttctcggtgcctaccgcaatcccgcaatggagcgcgcccgtttcgccgagcgccccgggacacgcgttgatggttggcgcgtatccggcaagcagcacttggtcggtggggaatgcacctgcggccgccgcacctccgtctggcggcacatcctgtccaacggactttgggtccgcattcgttgagtttctcatgggaacgcgcggccggcgattcgtgcctggcgtgcatgcacccacagaccattggtcggtttttgtgaaccacatgcttcgagaatcggcacgctcgaccagctacgtctacaggtcgaagaatcaaagcattgctggcgcgcctcgtggccggagcttcatgcacctcgctgcatctaccgcgctttggcacgccgtcgaggaggagatggacaacttcttgtggggtgagggagattgttccttcagcatggccaacgagttgctccgttggattgataacttgccagtcagcgaagaggatgaaccgccgccaagccagtcactgcttcctacctccgaggagggcgggcacgttccaattctgctggtgttaaccgtaggtgaggaggagcaacctttttcctgcgtatctggcgaccaagcgcgcggcggctga

SEQ ID NO: 507598 - DNA, 1563 bp, Stenotrophomonas maltophilia
atgaggtttgtcgtcaagttcaggtcaggcggctcgcccacgaccaatcgctacccccacgctgtgctcgtgcaggacaactgggatgattatggctataagaccaccttccacgtaacactgcatgtgtcagccgaagagagccatgatctcggcaacatcaagatcattgaggcgggtcgcacgagtggctacaccgaaatgcccaagcggccattctctaaattgcccgaaggccacgcgtcgctaggagccgacctcaactattatgaaaagatctataaactcgggcgcaacgtcttcgagccgtacttgagaggtcttcgagatgttgcgttcgacgacgagatcaaggccagcatcgaagatagcgaggcgtatcgggtttcattgttgcgttttggcggtgccgagcggacgattggggacgccgcccgattgctgcgtgcacctacccttcccacgaaacgcagaagtgcgggcttcagagtcaagttcaagactcgggtggcgcagcggtcgaatgccttcagggtcgacttcgattttcggcgccgcggtcggctgccgaaccgcatcaacgctctgatcggatacaacggcactggcaagactcggctactttcgaaccttgcgatcgtggcgagcggatacggctatggtagcaaaagagacgtgttggacgatgcagctggtcggttcgtcggcaatgcgccaccgtttaaaaccgtggtcgtggtgtcctatagcgcgttcgacaccttcgtcattcctggacgcaccgaggcagagaaggagaggctgcaagagcgtggagaaatcttcggatacgtctattgcggccttcgagaacgatcgggtgatgtcgcgctaaacggtgagcaggcctatcggctgcgcacgccggcggagatccagacagagttcttgtcggcgctcaagcgcgtccgcgaagccgatcgcatcgccgacctgctggagatattgaagccgctcctgcgcgacccgtcgttccagcgcatcggactgactcaactctacgccaatcgcgacgacgaggagctgggcgagcttttccgcggtctgagcagcggtcacaaggttgttcttaagattgtcaccgaactcacggcgcacatttcgggatcggagcctaccttagttctcatcgatgaacccgagacgcacctccatccaccgctgctcgctgcatttctcaagagcgtgcgggcctgcctggaggcgttcgacggctatgcaatcatcgccacacactcgccggtggtcctgcaggaaactcccgcgaagtacgtccaagtgctgaggcgagcggctgaccagagccgcgttgtggcgccaagtgtggaaaccttcgcagagaacatcggcgtcatcactcaggaggtttttaatcttggcgacggctcagccgattggcacgagacgctgagtacactggcgcgtcagagcacgcttgagagaatcgaagaggcgttcggtcggaagctcggcttcgcagcacgctcctacgtcttaagcattcgcgatgaaatggaggaatag

SEQ ID NO: 507599 - DNA, 852 bp, Stenotrophomonas maltophilia
atgcgctcgattccaatgctcgctgtcgatgcgacgaatttgttcgatgagattgctgcggctaagcgccaaccgcgacgcagcctgatgcaggcggcgcgcgcgggggtgcttgccgcctatcatggctacgagagtgcggtccctgaggtaggcgagctagacgaagccacgttaaccgacccgcagaaggaggcaatgcgtcacgcattcaccgtagagaccgagccgatggcgaggctccgcggcaatctcctgaagcggatcagcgtcgcgcgttgcccgttctgcgggatcagcgaatcctcgacgctcgaccactatctgccgaaggagcaatatccggagttctcagtatttccgaagaacctcgtaccgagttgtgcggtatgcaacacgcgtaagcgagatcgcatcctagacgaggggacgaaggtacggatgtttctgcacccttgctacgatgtagtcccgaatacggagtttctgacggtgcgtgcgcgcatggaggcggaagccctgatcctctcctacaggctgacgcgaccggtggggatgacgctacgaaccttcagacatctgcgctcgcacttcaacgagcttgatctcgctgatcgttacaggcggatgggcctcgagcatctgggtgggcagtatcccgcgcttcgtcgcgcttatggttctagtgagaacgcggagcgcgtcgctgagaagctgatcgatggagcagtcgacttcgaggaagtgtcaggtcccaaccactggctcgccaagttgtatcgagcactggcaggcaacgacgatttttgcgatggcgggttcgagctagttcgggttcatgctgggctgtga

SEQ ID NO: 507600 - DNA, 477 bp, Stenotrophomonas maltophilia
atgctggagcaggccgtcctttcgttggaacgtgcctatgaagcccttgccaaggatgccaagccctacaatccacctgaaccagatcgcatcgcctggcttagttctgcacgcctacttacccagtatcagtggatcaagaaacgggtgacttccgtcccgcataagcttgttctggaggaacaggaagaacactggcggcatcgcttctatctactcctgcagcccctcagtggtgcccagggagtggggtactacagcgacagcccttccttggcagagaaagaagagcccattgaaccgatgtcggcagtggtcgttcatacctttgcaaaatggccggaaggcaaagtggatccgctcgccgctcttcagcgcgatagcatcgaccttaatgccgagttccttaagggcaacatgggtttgcagcgctaccttgacggtcgtgggttcattagatccaccggccaggagtga

SEQ ID NO: 507601 - DNA, 360 bp, Stenotrophomonas maltophilia
atgaaagaggaactttggttcgtggccgaatgcgaggacccggtggacaacaaacactatccagtctgggtgcataggatcggctcgtctgcaaggctaacagtggacggtaggggtaaagggattcttgttgatgcgaagactgaggacgaagtcgtgacccagatcctcatcgagcttcaaatggaggtcgagaagatccttagccgggcagaggtcgcaagggcgacgaacaagcacctagaagaagcggaggaggcatcctcggatagcgaagccgacgactcagtgcagatcattgacgaggaatcagaagggccttccgattcggcacaccagcagcagagttcggccccctga

SEQ ID NO: 507602 - DNA, 1686 bp, Stenotrophomonas maltophilia
atgaccgacctacatagccgctgcaactccaagctcaagcaaatcctcaaagcattcaaggcggccactgccattgccggcgtcgctgtcagggaggcaaacgtagcgctgaagtccatacccgacactcagccaagaccggtcgctcagctcctggaggactccctgatcagctacaagggtgatctcatcagagctcggaccaatcgcaagaacctcaggcacgaagtactgtggaagcgcctatggggtcggcgcaatgtccagaaggcggtggacgacgccaagtccgcgcttcgcagcaggagggagtatgagttgagcgatgatgccgttcgcgagcgcgaagctgactgtaaccaaagggcggccgagcatgccgctcatacctcgtgcagcaaagcactgcatgaggcggtgaacaaactgcagcgtcgtgcgcaggaggagcagcatctgcagcagtactgcgagccacttcgcgaggcttttgcccgaagagcttggctcgctggaaacactgaggaccttctagaccggtcggtgggagacacgcaagcacacgcttggacctctgccgccaagcggatccaagagatacttttccagaggctgcctcccgaggatcagttcgagcagtggaaggcagagcacatagatatcctcgcggacatgaggaagcagggcgctgggttcgtcgctacggccgcacaccccggactgttggccccgtcgctggcgcttgccaagctccgctttcacccttcagcttgggccaaatctgtcgggggcatcgaagaactgccagatcgttggtatgagttgcctgtgagcgtgatccatcgcgaggctttgattgagccagttcagtggatcatctactgggcctttctcaaccagggccagcggttcgccgtggacacgggaatggtgacggcgcatgaggatgtgctaactggaatgctgacatacgcattgaagggagagcttgaagggtccgcgaaacgccgtctatttcagttgggatatccgcgggtcacagcgaacattgacattcttcagctcgccggaatgaatggagagtttgagaccggggcggacattggcttgatcatccacctcgacgtcggcaacctcaatgtgcacaaggttgcgctgctgcaggcgaaggtcagctcgagcaacagtgctgaactcggaagcagtccatctggctccaagaaactgacgcaactacaaaagctgcatgatgctgagagggacttctaccttttttatcacaagaccagggggatagctcccgcgacccttcccacggtcaccgcagtcaatcactttgtgaagaagcataagatgactgcaggcgacttgttgaaagagaacagatccgtcaagacgcgagagcacggatgggatctggcgtcctttgctgcctttggactctgctcacctaaaaatgcgatcggcaaagacatccctttcggcggcagttcgcttgatgcgatgacagacaacggaaggagcactctgcctatctacatgatggtcgtgtccctgagtcatgatgactcggagtaccagaaggttatgacccccctgcacgagagggggtaccgcacagtcccggaccctgacagggagaatgtgccgagcagtacggcggatgcgcgctatcttggaggctaa

SEQ ID NO: 507603 - DNA, 378 bp, Stenotrophomonas maltophilia
atgcgcgaactccctaatacagaggtggtcagacttgcggaagccgctcgtcagaccttccgccagatcgcgacggcatggtccttgacctaccaggagcaaagcgctctacttggccagccggtagaaattgcctttgctgtcctatattcaagcgcatccggtgctacccggccagagacgcttgagcgcgtgagctacctgattggcatttacgttgcactgcacaacattttttccgatcagcggcaggccgatggctggatacgtcggacgaatactggacgtctgttcaatggtgctagcgcgctggcactgatgtgcagcggccaattgatcgaccttgccgcggcccgtgagcacctggagacgaactga

SEQ ID NO: 507604 - DNA, 429 bp, Stenotrophomonas maltophilia
atggaatatcacctgacagagggacagctcaatggcccggctgaaatgtcggccattgctgatctgtcagcccgcgtgggagtggcacttcccgagagttaccttgaattccttagggcgcacaacggtggcgaaggatttattggcgacaactacattgtcttctggaaagcggaagaggtggtcgacttcaatcgtgagtatgaagttgaatcatacgcgccgggcatattcctgttcgcgtcggacggcggcggggagggatttggattcgacacactggacgcagcaatgccggtagtgcggattccattcattggcatggaacgtcagtacgccctcccggtagcgcgcgacctccccgacctgtttgctcgactgcttgcagatcagcctgaggacgagcatgaaatcaatccggcaggctga

SEQ ID NO: 507605 - DNA, 390 bp, Stenotrophomonas maltophilia
atggatgccgcggccaagcccccatggatgggtttacggcgtctcccgcaaccggacccacctcgccatcccacggaatgcacgctgttgctgttgccgttgctgttgcttcggctgttgcttcggctgttgcttcggctgttgcttcggctgttgcttcggctgttgcttcggcgggtgcagggcgcagccctgcaaataaacccctactcctgcggatcgcgggtgatgtggatatccgtcggggtcgacagcggaatgttccgctccgccaggatctgcagcaggctgaagtacagatcgctgcgggtcgcatacacctgccgcgggctggctacgtacgcgaagctgttgatggtgatctggccaccggcaatgctgtcgatgtag

SEQ ID NO: 507606 - DNA, 303 bp, Stenotrophomonas maltophilia
atggggaggccgcgcaggccgcgggtcgatccgtcacaacgcgtccccgccgggtatttccagcagggcctggttgtccggctggccagcctgccctggatggcgttgggcgtggtggtgcttggcggcagcgcaacgatcccgcttgggctgggcatggtcctcatcctggtgaactgtgccggtgccctgtatctggcggactacctgctgcgcctgagggcggcaggcggtggcctgcactggctgaccatgttcttcagtacgccggtgctggccctgttgtattcgatcgcactctga

SEQ ID NO: 507607 - DNA, 426 bp, Stenotrophomonas maltophilia
atgcgagtaactaatgctggggcggtgttgggagtgatcatcgccgctgggctgccgatggcggtttgggcacagtctgacgatcacggtatccgtttgagccggcaggggctgggggaggcattccctgcgacggtcaatctgagccaggatcctgcttggcaggtctacggtttccagcgtgatggtatttcctatttccaggtaaatgacctcgctggtcgtatccaggtcatcataggcaacgctggtggagttttctgggcgctcccggccggcaaggcgcagatacctgtgtcgttgccaggccagccgttgccagtaccaggcaatgcaatccgctcgctggtctatcgcggaaatggtttcgtgttggtgcgctacagcgccggtacaagtgcggtctgggccatcgaaacgcagtaa

SEQ ID NO: 507608 - DNA, 1533 bp, Stenotrophomonas maltophilia
ttggctgtgctgtatgccattgcctgttgggccacccgccagttgtcccttgatcagttctacctacctgccggcgttcgcgtggctgcagtgctgctatgcccaacgcggttctggccttatctgctgctgggtgagtacgcctactttgcgcagatgcgattgccgatggttgaaaagtacggcgcagcctgggccatcctcgcgtcaggcgtgctgatgcctgcagtaatgctcatcacccgctgggcccgcagcttttttgcgaactcggtcacatcccgtcttctggccatcgcgttcctttcctccgtcgtggtcactctcttgaatgtgagcctttcccaactgctttggccaacgccacccgcagattcggcgcttgcgttcctttcccgtgcagcacgtttcagcgtaggtgatttcattgccatccttacggtgactcccctcgcattgctttgggcaatgagaaacaccgaaccacactggaagaccattttcacaggccccaccgccgtggccctgttgttgatgacattgctcggcgttaccgcatcgttgattcccaacgaagccagtacactccggacgtccctgcagttactgatggggctgcccgtgatcgcactcacgtgcctgcatggctggcgcggtgcggccgtcggcgtaccgatgctgaatctgattattggcctgacaacgccaaagccctatgcagcagcctttgatgccgcaacgttcaccacacagcaaatcatggccatcacgggagtagcactactgctgcttggctcccgtataagccactttcgtcggcgctatcagttgcgtgaggtgggcgaaaagaacgccatcaaccttgcgcgcagctcgcacctggcgagcgagtcagatcttcgcgaacgcgcgattcacctgcgcaagctgggtgacggcatcgacctgtcgctttcggaagtcatcaactggctcaacagccacggtcattccgcaattgccaacagcctgactcacacagccaatgtgcactcccggctgttccgcgaacaggcaagcctggtgtatcccactgctcttgagcagttgggtctgtatgttgcactgcaggccggaggcgtgcgctcggcgtgggtcaatacgcaccgcgtagccgaaccgcgccttgccggtgatccctgccgtctcagcctggacttgcagctgacggcataccggactctcatcgatgccgtttctttgttgttgaagtgcgaatccgggcaggtcatcgtccgggcacgctgcgtcaacgcgggacaacagcgaggaatcgtcatgacagcctcgctgctggatcggcatcgcgcattgtccccaacaaccgtcagtctcgtcagggagcggttggccgggcgtgcgctggcctttggtgggtccgttcactgtcgccaaagccgcatcgtcatggtgctggtggagcctggcaccacgacactgcgtgagtcgcaagaagggagttcatttggcgcccgagttgcatcttccgcctag

SEQ ID NO: 507609 - DNA, 1065 bp, Stenotrophomonas maltophilia
atgagtacccgattcgacccacccgagagcggcccgcttggtcccgacgtcgccactgtcgtcaccgcccccatcgtcgcccctcccagcgaaagcgccgtttcctggggcgcgatcttcgcaggtgccgccgctgccgccgcactctccctcatcctgctcatcctcggtgtcggccttggcctctcctcggtgtcgccgtggtcgttcgaaggcgtcagcaaggaaaccttcggctggtccagcatcgcctggctcaccttcaccgcactggccgcctccggcctgggtggctacctggctggccgcctgcgcaccaaatggacgcagatccatggcgatgaaacctatttccgagataccgcgcacggcttcgtgtcgtgggccgtggccacgctgctgactgcgggcctgctgacctcggccatcggcggcgtgctgggcgccggtgcaaaggtggcgggtgccactgcaggcgctgccgcatccacggccggcgttgccgccgcaggtgccggtagcgccgccgcggccgcaccggaaggcgacctcaactattgggtggattccctgttccgcaatgccaccaaccccggtgctgccgatcccgcggcgccgccaccgccgggcgcgccgttggatccgaacgcggctccggcgacggcaccgaatgcgggcccacgcgaggccggcatggcgccgccgcgcccgatgccgggtcgtgcgccggccggcgaccgtcgcgaactgcgcgccgaagtgaaccgcatcatcgtcaacagcctgcaaggcgatggcttcgacccggccgacacccagtacctgtcgcagctcatcgcgcgcgaaaccggcatgagccaggccgaagcgcaggcccgtgtgaccgatgtgcagacgcgcatgcgtgccgcgctggagaaagccaagaccaccgccaagcaggcggccgacgatgcccgcaaggcagcagcgtatgccgcactgtggctgttcatcaccctgctgatcggcgcgttcttcgccagcctcagcgccacctggggcggccgccgccgcgacctttga

SEQ ID NO: 507610 - DNA, 5169 bp, Stenotrophomonas maltophilia
atgaaccgtatctatagacgtgtgtggaatcgaacccgccaatgctgggttgttgccagcgaactggcgtcgagcgcaggtaagccgcggtcaacggctgcgggcgcagtgttgcttgggcttgttcttgcggttccctcagcagaagctggcgacatcattgcggctgatgagtgcgatgaatccatctggcaggcgctgtgcttgaactcggaggtgcgcgcaggatcttcttccgcatactcgctgttctcagctacgccacgtgcgggcatcaatgcgctggaacttggctatcaagcgaaagccaatggctatggcagttcggccgtgggtccggaggcgaggtccgagaacttctactccgctgcgttcggctggagggcgcttgccggtgaacactacagcgtcgctgtgggtgccaacgctcaggcaactgggggctcggccatagcgatgggtaacgattcaaaagcatccgcctcgagcgcagttgcgattggccgacaggccaactccagtgggaagtcgtctgtcgcgcttggagcttcggccattgcatctgcagatagcgctcacgcgctggggtatctgagccaggcaacggcaaattacgcgactgcggtgggaacagtagccaaagcattcggcgcatactcaatcgcagtgggcaaccacgcgacggccattggcgacgacgccatcgcaattggacgaagcgcaaggaccgtggacagttccgctggcgtgtctcgtatcgccatcggcggaggctcgtttgcgggctcggatggatggacgggagcaatcgcactgggcggtctgtccagggccgagaacgatgctattgccttgggctatgaagcgcgggccttgggcgagggggcgctgagcatggggcgcggggctcaggcatcagggaagggggcgactgccttcgggaaatctgccttggccaaaaatgagtatggtattgcggttggctacgaagcgctgacgggtagcactcacgcaaccgcagtcggtactcgttcgagtgcaactggaattggcgctacagcttatggaaattcagcctatgtgaatgggcgcaatggtctggcagtaggtagtggctctcgtgtcgacaacggcagttcagagggcgcgatagcgatcggcgccgattcgcgcgcgggcgcggatggatacaacggcgccattgccctcggtggcaaaagcgctgccagccacgacagcgtggccattggctacggcgcatctacgagtgctgccggcgccattgcgctgggtcgaggttctgttgcgactgaagcaaatacggtttcggtaggtagcggaaccaccaagcgccggatcgtcaatctggccgatgcgaggctgtccagtaccagcaccgacgcggtaacgggcaagcagctcaatgtcaccaacggtaatgtcgccagtgctcaggtcgcagccgatgctgcaaaggcgacagccaccgcagcacagtccaccgccaatacggccaataccaatgccaacgcagcgttggccaaggccaatgcggtcagcggcctggtcagccaagtctcggccagtggtaacgtgcgccttggcggcgagaacactggcaccgtgctggatgtccgcaacaagtccaacgctgttcgcagcatcactggcctgaaggatggggcgctttctacatccagcactgaggccgtgacgggtaagcaactcaatgcaaccaacgccaatgtgacgactgctcagacggcggccgacgccgcgaagacgacggccacagcagcgcagaccaccgccactacggccaacaccaacgccaatacggcgctggccaaggccaatacggtcagtggcctggtcagccaggtatcggccagtggcaacgtacgcttgggcggcgagaacaccggcacggtgctggatgcccgcaacaagtccaatgcggtgcgcagcatcaccggcctgaaggatggggtactgagcacgtcaagcacggaggccgtcaccggcaagcagttgaatgccaccaacagcaacgttaccgccgtgaagtccacggcggacgcagcgcaggcgcgcgtggcggtactggatggcctggtggggcaggtatcggcaagtggcaacgtgcgcctgggtgcagacaacaccggcaccgtcgtcgacgtggccaacaagagtggcgccaagcgcaagctgcagaatctggccaatggcgtgctcagtgcgtccagcacggatgcagtgaccgggcagcagctcaatgccaccaatagcgaagtgaccagcgtgcgcacggcggcaaccgcggcgaagacggcggccgacgctgcccgtggcgtagccgatggcgctgttctgaaggctgatgccttgggcggactggtgggccaggtgtctgccagtggcaacgtgcgtctgggtgcggagaacactgggactatcgtggatgttgcgaacaagagcggtggcaagcggcgcatctacaacatcgccaacggcacgctgagtacgggcagcacggatgcggtgaccgggcagcagctgtttgcgaccaataccacggtggagacgcagcggcaggctttggcagggcatgcgcagcagctgaaggatcaggacgggcgtatcgccgacaaccggatcgagctggatgcgctgcgtgcggacttcgataacttcgatccggatctggatggcgtggtcaagttcagtgctgatcgtcgcctggtggacatggaaggcgcccgcgtatcgggggtggcagcgggggatatcagttctgcgaccagcaccgatgcggtgaatggcgggcagttgtttgcagctaatgagaagatcgcggcgctggaaatggcaggaggattcgtatcagtcggtgctggcggagatcagaaggcgtcgagtgcagggctgggatcagtagctattggagactcggcacaggcaactcctgatggtgagggtggagttgcccttggtgcatatgcacgtgctatcgggaagaattctatctcgatcggccgcgcagcattcgtcgcgcaggacgcggaaggtgggtttgctttgggggtcggtacatctgtcaacgcgagtcagggaatggctttgggtgcagaaagcagagtccaagctggggctcataatgctgttgcaattggctatggttcgattgcgtcccagcctgacacagtgtcgtttgggaacgacaacgtccaacgcaggttgacggggatttcccgtggcacaggcgaatacgatgctgttgctatcgtgcagttggctgagtctctctctgccttgggcggcggggcagggctggatagctacggtggtgtgaacaaccccatctacaacgtccaaggtgggacgcagaccaacgtcggagacgcgttggctgcactcgatggggcggtgatcaggtcaggaagccgagtagatggtctcgaaggtcagctgcgtgcgacgttccaacagtcgccctcgacccgggcggatggagttggtcagctgaacttggcaggcgcgcagggcatggttctgtcgaatctggccgatggacgcattgctgcaggtagtcgtgatgcggtgactggtagtcagctgtacgcggcgaagcaggacatcgcgcggaacaggagtgatctcgacgcactccgcgacgcggaaaattccggtgttgccgttgccgttgccgttgccgccaaccctggtggcgtaatcgacttcggtggcgcgacccttacaggtgtagccgatggaatgctgttgcctgagagtaaggatgttgtgaacggggggcagttgtatgcaaccaattccaaagtcgcaggtttggaagagcgtacagaaatgctggcggtcggatcggaactgcatagggagcgcgctgaggcaggaatctacggcgttgcgctcggtagcggagctcaggcttcgatggattctgaaggggggacagcagttggcagctatacaagcgcgctcgggaagaactctgttgccttggggcgtggcgcgtatgtcagttctttcgcggaaaatggatatgcgctgggcgcaggtgcgagagtggaccagagcggtggagttgcgttgggaacctatgcaattgtcacggaagatgctttggagtccgtcgctctcggggcctattcgtatgcttcagaaaggggggtggtttcctttggcagtgattcgctcaagcgtagattgaccaatgtcgctcatggggtcgctcagcatgacgcagccaccatcggccagctccgcggcgccctgtccgccctcggcggcaacatcgacgccaacggcaacgtcaccacccccggcttcaacatccagggccagcaccagaacaccgtcaacgacgctctcaccacgctggactccgccgtagtcaccaccggctcccgcatggaccgcgtcgaaacccagctccgctcggtcttccaggaaacgccctccacccgcagcgacggcaccgcccagctcaccctggccggcgccaacggcatggtcatctccaacgtggccaacggcctgatcgccgctggcagccgcgaggcggtcaacggcggccagctgcacgccgtgcagcagcagctcaacggccgcatggatgggctggagcagcgcgtggatggccagcagcagtcgcgtgcgttggctacggcttcggccgcaccgaccgagcaggtcacgccaacaccggaagccagcgattcgccgcaggtagcctcggcaggcgagggcacgtcgcccgcgccacagccgaagtcgaagaaggacgacacgccgtcgcccacgccgcaggtcgataccgccgaactggagaagatgctggcccgcgccaacgaatacaccgatggcgcgatcagcaacttcgaacgccgcctggacaagatggacaagcgcttcaaccgcatggccgcgatgagcagtgcgcagacggccatggccatgaacaccgccggcctggccacctacaaccgcctcggcgcgggcgtgggctatgccgaaggcgaatcggccatggcggtgggctaccagcgtgtgctcaacgaaaagggctcggccaccttcagcctcaatggtgcgttcaccaatagcggtgaacgcagcatgggcgtgggtgtgggcatcggctggtaa

SEQ ID NO: 507611 - DNA, 648 bp, Stenotrophomonas maltophilia
ttgctcaggagaatcgcgcactggaggcctcgccccatagcggagaacaagatattcgtagctgcaattgcaactgtgggcgccggtgcggcacttggagttctgaaatacttcgacgtttttggatcaagagcgatcgtcgaacttctcgccttcgcggtttgtgtctggctacttcccaatgagcccaggagagagtggactttccggcttggcgctgccttggttgccattgggatcgctggaggcgcgatttgggtttacgtcgttggaatccctgcaataccgcacacaaaattcatcccctttagcgaaattccaatcaatttctatgttcttggcttgatttcgacctgcatcatcggacctcttttcgaggagaaggtagtgagacacctgctctttgatggcgtatctcactacttcgggcgcgtattgggagccatcgtggttagcgcggcatttgctgcggttcacgtcgacgccgttatctcgtcattcctattttcgatactgctatgcattttggcctatccattcaacctgagcacaacccagctggcgacagtccacggcacaataaatctcacaataacgcagtgggtcatattctacccgacgctcagggactacggaattcagtcgtga

SEQ ID NO: 507612 - DNA, 2067 bp, Stenotrophomonas maltophilia
atggttgcgtcgcatcatggcaacaacattggactgcgggaactccgtcgtcgccatgccctttcgcttaaaggcgcgacgcttgctcagatcattgaaactggaggcgcgctcggctttcgctgccgccccctgcgcttggacttggagcacctgagccaacttcaactgccctgcattgcgcactgggacctcaaccacttcgttgtgatcagcaaggtccgtcgcaatggcgtgaccgttctggatccggcctttggcaaacgcaggctttctctggatgaggtctcgcgccacttcaccggaattgcgctggagttgcacccaactgccgagttccgtgcagtcccgcgcccgccggccgtctcgcttgcgcagctgacggggaagatcgagggattctggcgtgctctaagcttgctgctgcttctgtccattgctcttcaggtgtttgttctgatagcaccattcttcatgcaatggaccgtggatcaggccctcattgcccatgacagggacttgctgaccgtgctgggcaccgggtttgccctggcgctgctgctgcaagtctgcatcgggcaagtccgaggacgggcggtcatctacctgtcaaaccggctcaacctgcaatggaccggcaacgtcttccggcacctgttgcgtttgcccctggatttctttgagaagcgccatttgggcgatgtcacctcacgcatgggaagcgtccaggctatccagcaaacgttgacgatcagcttcgtagaggcgctcattgatggcctcatggcggtggtgacgctgggaatgatgctgctctacagctggaagctggcgctggtcacgttgcttgcagttgctctgtatgcaatcgcgcgtgcttgtgccttcgccccgctcaggcgaggcacagagaggcagttgatcgccggggcacggcaggagagccacctgctcgagtccatccggggggttcagtcggtgaaagttgctggccgagagtccattcgccaggccggctacttcaatctcatgaacgaaacggtcaatcacgacgtttggctagcaaagtttgggctgagcttcggcggggccaatcagttgctgtttggactggagcgcattgcggtaatttggctgggagcactgctggcgatggagaacgtgttctccgtgggcatgctgattgcctacatcgcctacaaggaccagttttcacaacgagtgggagccttgatcgacaagtgggtggagttccgcatgctccgtcttcacggcgaacggctctccgacattgttcttaccgaaccagagaacctcgcttccagcaccagcgctctgtcgccggacggcatccgaattgaggtcgaagggcttggattccgctatgcccccggagagccctgggtgctgaggaactgtagttttgtagtggatcctggtgagtcagtcgccatcatcggcccatctggctgcggaaagaccacgctgatcaagattctcctcggccttctccagccgacggaaggtgagatccgcatcggaggcgtgcccttgtcaaaggtcagcgtaagcgagtatcgccgcatgatcggcgcggtgatgcaagatgaccagctcttcgcgggaagtgtcagcgagaacatcgccttcgaagacgatcaccatgatgaatccagggtgcgtgaagccgcagagttggccgctgtgcatgacgacatcgcagcgatgcccatgggctacaacagcctgatcggcgacatggggacgaccctctctggtggtcagaagcagcgggtgatccttgcacgcgccctgtatcgcaagccccagttgctcttcttggacgaggcaaccagccatcttgatgttgagcgggaaaggctggtgaatgaagccgtccgacaacttgagctgacccgggtgatcatcgcccatcggccagagaccatcgccagtgcagaccgggtgctgatcatgcacgcgggcgcggtagcgcgcgagttggtgcagaacgcatcaagctccgcgaaagccgcacgggacggccttgaggggggcctcgcatga

SEQ ID NO: 507613 - DNA, 1245 bp, Stenotrophomonas maltophilia
atgagcggcctcttccgcaaggaagccatcgatgcccagcgacgaagctggctcggtggagtgtccctggcgcaaccgctccgtttctggattcttgcggtgttcgcagcgatggctgcctcggccatcgtcggcttcctctacctgggcgagtattcacgcagatccagggttatgggcgagcttgtgcctgatctcgggctttccaccgtggtcgctccgtcggctggcgtggttgcgagactggatgtcgaagaaggcgaccacgtccggcgccaggacgggctgctgacgatcaacgtgccgcgggtcacctcctcagggcaggatgccgtgtccacgttgcttgacgcacagcgctcccgtatgaccagtgtggaggcgatgagcgagttccaggacaggcagctcgcggcacaacaggagggagccaaggcccaacgctcggcgatgctgcgcgagctttcgcagattgaggcagagatccacacccgcggcgagcaggtgcgaattggtcgcgagaccctcgcccgatttcggagcgtcgaggatgagcgctacgtaagcctggttcagatcaaccaacaagagcaatcgatactcgaggcggtcaacgcgcaacaagcccttcaacgccaagcgacctcgattcggcggaacctggctgaactggagcagcggctcgcagaaattccccatcagaggctctccgccaaggcggcctcggaacgtgatctggctgcattgagccaggagaccgtccggatggaggccgacggggagctgctgcttcgcgcaccagtaactggactggtagcaaatcgactcgtcgaggccggccaagcggtgcagccgggccagcccattctcagcctgctcccccaggggtccgagcttcgagcacaactgctggtgcccagctcggccattgggttcgtcaaatcgggcgacagagttctcctgcgctatcaagcctatccttaccagaagttcggcgcccacgaaggaacggtcatccgcatctcccgcagcgcgttgacgggagcccaggagggcagcgatgcaaagcagtccctgtatcgagttctggtctcgttggaccaacagggagtgctggcatacgggaagatagagacgctccgcccgggcatgcagcttgaagccgatatcatgggcgagcgtcgcaagctctacgaatggctgttggagcccctctactccgtgactggaaaactgcgaggctag

SEQ ID NO: 507614 - DNA, 210 bp, Stenotrophomonas maltophilia
atgagtgcgcatccgcgcaaacggaggttaagagtggagagcaacagaaggaaggcgttgtcgattgccctacaggttaagggcatggtgttcctagcacccgcatgtttggaaatttggcagggagtgatgcttccaatggacgcaatcactgcatcgctactgatgcttgcaggtatcttgatggggaagaacggaaccgccagctaa

SEQ ID NO: 507615 - DNA, 666 bp, Stenotrophomonas maltophilia
atgtctattgcacccgcgccccccgtcttccctgatcttcccgaagacaactatggagtccatgtggatggtgatatggacgcaaagcggcttcaatacttagtcgcccaagttggagaggccaaggtcaggaaaagcgccgaaaagagcaagttcaagccaatatttgtttcaacgctactgaagcgattccaaattcgcgtgccgacgcacatatacgcacgaatcaacatcccttcccacagagtttatgtccttgccgtgccagccgaggccaagttcaaggttggacaatctggatactggactcagcgtgcctatgctttttccaggggaaaactggaggaactggacctcggtcgcagcgtaggaataagtttcagcggggaaagggcgatagcccttgcagctgaacaagcagtgctttcggaattttccgcgtataaagttccacctccgaactacgtagcctatggaagcggagggcataaagaatggctttccttggacgcatatgacgctgtcatagatcagatccgcgcgtttgaagccgaccaacctcgccccattcttacgcttcgggacgccctcttgttcgacagcctcctgtggagcaacgacacaaacttacccatccgcccaacttccattcctaaagggtcatag

SEQ ID NO: 507616 - DNA, 465 bp, Stenotrophomonas maltophilia
atgagctcttacgcgaacgtgggctgcgcgtctgttcttctcggaggggccggtctcgtcttcgtcggtggcggcttggagatgctccagaacggaagctcatttgggtggctggcggtcttgggaggcattggcacctggctggtgctggccttcctctcctggatcacccagcgggccaaccgtcgacgggcgtggatcaaccgccagccgttcccccactacgcagaacagggcctcccccgtgggggcttctggcggggcttcctctggacctgggccggggtcatcgctgtccacatgctagtgttcctgatcagcggcttcgccgaactgctgctcaatcccgagcaggtgcgcgggtggatggcactggccgggctcgcactggtgcctgcgcacgtggtgctgcccatgttgggcggcatcgcctatagcctcatccactctacctccgtccgctaa

SEQ ID NO: 507617 - DNA, 324 bp, Stenotrophomonas maltophilia
atgaagcccgttcgcaccgtgctcgcatcgcttgttgccgcgttgagcctttctggatgcagcagcaaccagccgtccgtcgaagaagcccaaactgccatcggggccaccttcactcaggtttccagtggatccatgaccgtgatcggctatcgggacttcacgctttcaaactgccgaaacgccgccccctctgagggggtcgtttgtgaccttggaggagaggtcgtcctcaatgtgtcaggcgccgaactggtgcgcccgatcgtggagcccgttcgtttcagcaagtcccatggcacttggaccgcccacaggccctga

SEQ ID NO: 507618 - DNA, 429 bp, Stenotrophomonas maltophilia
atggggggggggcatctgccattttggcagatgcgtgccttatcatgccagtccgtgcagactaaggagctgatccattgcccgtcccccatgcccgctccgctgcccgcaatctctgtcttcggcctgcgccttcgtgcagcgcgtcaggccgccgggttgtcgcaggtcgaactgggggcgttgatcggcatgagtgagaaatcggcttcgtcgcgcctgtcccgctacgaacgtggggagcgagagcccgacggcgaaaccctggaagccctaagcaaggcgcttggcgtgccgccggcctacttccacgccagctcggatgtgttggcggaagttattttgttggtggcccgactgccccttgagcggcaaaaagaggtgttgggcctcatcaaggtatacaccggcgacagcgtcacaccctga

SEQ ID NO: 507619 - DNA, 1641 bp, Stenotrophomonas maltophilia
gtggccggcgcggcctatagcgcgggcttggatctcaccgacctgcgcacgggggagcggcacgactacacccgcaagaacggtgtggtcgcctcgggcattctgaccccagcgggctcccccgagtgggcccacgatccggccaaactctggaactcggccgaagccgccgagacacgcaagaacagcgtggtggcgcgggagttcctggtgtcgctgccgcacgagctgaccgacgaccagcgcgtcgacctggcccgcgacctcaccactgaccttgtgaagcggttcggctttgcggcgatgttcgcgatccacgtgccggacaagaacgccgacgagcgcaaccaccacgtgcacatcctcgccaccacccggcggatggagcccactgggctgggcgccaaaacccgcgaactggacgaccgcaaaaccggtgcggtggaagaagttcgtgcaaaagtggcgagtaccatcaatcagcacctggaacgtgcaggcatgtctgcacgcgtggaccaccgcagcctgttggaccagcaagtggcggcggccagcgccggggactttgcccgcgccgccgaactggatcgcgccccggaaccgaaggtaggccgcacggcgaccgccagcgctcgtcggggcaaacgcagcacccgcgccgagcgtgtccagcgggtgcgcaccgagaacgcccatcacgcccaagcccaagccgaccgcttccgcgaactcaaagcccaagctgccgtcgatgggcggcttcagcacgtggacgagcaggctttgcatgcccgcgcccttttggaacgcagtgaggcaggccgggccaagctggcccaaaccatccccgccgtcccaccaaagaccgccgttccgcgacctgcgaaacggcctgcttcccaccaaatcgggtcgtccaaggcccagcgcgccaccaaagtggcaggtcatcggctgggaggggcagcgcctaggctggctccgcaagtccacacaagagtgatcggcaacggctccaaggaaagcgagcaggtggcgcgcgtggccaacgcctggttggctaccctggaaaaggatttggctgacctcttgaataaggcattggcctgggggcagcaccacgccgacccgctgccccgcgccctggcccgcgactacctccacgccgaaggcgaagcccaggtggccaccgtgctgcgcgaccaggccaccgctgatctcaaacaggcgcggcgcgaccggcacgacgcgcgctactaccgggacaaaggccaggcggggttgaagggcgccggcaagctggctgaccgcctgggctggacgcccaagtccctgcgcgacttgcaggacgcggccaagctctccgaggaccaggtggccatgaccaagcagtccgagcgcttcgctatagccgcccatgagaaggctacgaaggaagccgagcggcaacgccagcggttgctccaggcgttccagaatgcgcacccgaccgaggaattccggttccccgatcagtggccgccagtggtcccgtcgcccacaattgagcggtcgccaagcaagcagcccggggcgggcaccggcttcctgcctccgcggttggagccgccgcgctttcgacggtcgggaccgcgttaa

SEQ ID NO: 507620 - DNA, 759 bp, Stenotrophomonas maltophilia
atggccacgcggtccccaagctttggaaagcccgccagtccccacttgtgggggcgtccggcggaagggggtagcgagtgcgtaagcgctcgcggggtgtcgggggccaagcccctgaccgcgggcaaactccgaaggagtttgcataaccgcgctcttgtcgttttcttcgggcgcttcgcaccctttgaaaaccacttgagaaccgggctgctcgctgcgctcgctggcccctgtatccagcgtcccatgcacgcaaaaactgtcaactttttagccaaaagcaaaagcggcgctcgctgctcgctcgcgtcagggaatggggcgttgcccccttgccttcggccaattttctggttgcatggtttatctggggctggttgcaggtgtgttgtggcggacgttgaaagacaaaaactaaagctatcgaaactgttggacgtggccgccaaagagcatgccaagctcatggtggccgagaagcaacagaaagcacgggaggcccgccaagcggcccgggagaaaggcaaggagcgcgccaagctgttccgcagcgccgatgctcatcgaaaaatcgtgctgggcggactggttatcgctgctggcgtggacagttgggatccggcagaagttgtcggaggattgttggttgtaagcgagcagctgttgctacaaccgaaccgacgcaatgctctgcgtgaaaaaggcatcgcccatttggaggcgagggctgctactcgaaggtcaggacaatcatga

SEQ ID NO: 507621 - DNA, 411 bp, Stenotrophomonas maltophilia
atgaagaaccagaagggcttcaccctgattgaactgatgatcgtcgtcgcgatcatcgctatcctggccgctatcgcgctgccggcgtactccgattacaccaagaagtcgaaggtctcggaagtcgtgctggccgcttcggccctgcgcactgccgttgctgaatacgcgtcgtcgaacaactcgctgccgggcagtggttggagtggcttcgaggcccagtcgtcgaagtacgtgagcagcgtcggctggaacggttcggtcatcaccgcaaccgcgcagggcattggtgctggcgtcgatacctcgaccatcaccctgaccgcctcgctgaactcgaccaatggcaccgtgggctggacctgtggcggttcgatcccggctaagtaccgtccgggtagctgccagtaa

SEQ ID NO: 507622 - DNA, 1938 bp, Stenotrophomonas maltophilia
atgtcgacactgcgcaggcttgcgccatggtgctttgcgctggcgcttgttatctatctgcggccatatacgggaatacgccatgatgccaccttgtatctggcgcaggcattgcgtctgctcgacccggatatcttcaaccgtgacttgttcttcgttgccggcagccaggccgacttcaccctgttcccgcagttgctggcgtccttgctacgtcacttccaacctggcgacctttttctcgtcctgagcctgctcggacgcatcgcattctacggcgccagctggtatctgattcgcgcgctgttccccccagcttggcgctggccgtcattgttggcactcatcgtgatgccgacacgctatggcgcctacagcatttttgcgtatgcagagcccttccttacgtcgcgtccctatgcagaggcgatggcgcttttcggactggggtttctggtgcggcgcaagcacatggctggcatcttggtgctcggcgcagccggcattcttcatccgctgcaggggtttgccgcagtgctgctggcatggtgctggctggtcctgcacgaccgccgctggctttggtcgctgttggcgctaattcccgtcattgccctcgcggcatttcgtgtcgggccctttgcaggcttggtgatatcgattgactatgactggtgggaactcatctacatgtctagtggccagatctatctgggtacatgggaacccagggactggtgcattgtcctagctgatttctacttcctctacctgctaagccggcgtgcgcaagccgacagcctgctcgcgcagttctgtgccgctgctttggccgcgtttgctatcggcatgacgttcagcgctgtgcttgcagatttgctgcagctagtattgcccgttggcctgcagtcttggcgggtgctgtggcttgtgcattggctcgcaatggcaggtattccctatctagtctgggagcagtggcaacgtacgcctcgtgaatgggtgcccgtggtgcttttggtggctattgcgctgacgggcgcaagcatctcgcgtattacgcttccctgggcggtgctcggtctcatcccacttcacattctgtggccgcatgtgacacgcaaagtgagtgcgccaactagggccatcgtattggtaggcttagttgcggttattgtcgcggccacattccgctatcagatgcgtgcttggctggtgttcgaggtgtttgggggtgatttcgagcgagttcgccaagacgtcgtgatcttgggctatcccttgtttgccggagcgctgagtttcggtctggtctggctttatgggcgtggccctcgatggggagcgctgctcggagctttgagtattgttgggctggtgggctcgttcttgctctgggactccagaagtccgtggacgcgggtaatggagggatcccctggcaccaacgtgtttggtgtcgcattgccgcgcgatgcaagcgtgtactggtatgcaaccgaaccttcaccgctagggccgtggctggtgctcaatcgcgccaattacttcagcatcttccaactgtcagggcagatgttcaatcgcggcacatctatgcagggcatccagcgtcagctccaggtcgggccggtcaacagccaaggcgagatctgtgacatggtcaacgccgtcaacaaggacccgcatgcctgttggatcggaaagccaggcctgcaatacatgtgctcgccctacagggacgtgccagcgccggactatttcgttctgccgttccggcagcaggagcatgtactgggaagctggacgccgcggcatccagacagcgggacgccgctgggcacgttctatctctaccgatgcagtgactgggccgggcagggaattccagaaagtgagaatcggcttctcgctccggagggtttgaatgaagcctga

SEQ ID NO: 507623 - DNA, 465 bp, Stenotrophomonas maltophilia
atgaagcctgatcgtgccgctcgaggcttgctgcagtacatgcaatctcgcttcgcaatcgtggccgaaggcacacgctatctgatggcatcggccgttgcgttgtgcgtggaccttggtacttttgctttgttctcgtggtggtggggcggttggtactacgccgctgcaggcggctttctcgcaggaagtgtggtggcctatttgatcagcgttcgctgggtgtttgctcggcgcgtggtcagctctgcttcggcggaattggccatattcgtgctgatcggttgcttcggtctgctggttgtccaaggcgtcatgtgggtctgcattgagtggcttggtatgccggggagcattgccaggctggttgcggtctggttctcgttcacgtcgaacttcgcattgcgcaagttgattcttttccggtcgcgggggcgcgaacgggccatcggggaggtggcatga

SEQ ID NO: 507624 - DNA, 1545 bp, Stenotrophomonas maltophilia
atgagcaagcatgttgtaatcatcggtgcgggtccggcgggcttgaccgccgcgttggagctggttgggcagccgggtgtaaaggtgacggtgctggaggcggatgactgcgtgggtggcatctcacgcactgttaaccacaatggcaaccgcatcgatattggcgggcaccggttcttttcgaaatcggactgggtgatgcagtggtgggccaacctgatgcccatcgaacacacaggcgacgttccgttgaaccttcgctaccagggccaggcgcgtgagggcttgccaacgggggcgcctgtggcagatggctcgctgccgactgcgatgctggtgcgcaatcgcctgtcgcgcatctatttcaatcggcgctttttctcttacccgttgaagttgaatgcggacagtttccgcaacctgggtgtgggcaagtccgtattgttcggtttcagctatctgcgctcgcaggtcagcaagatcgagccggaagtgagtcttgaagactttctcgtcaaccgcttcgggcagcgtctttatcgccagttcttcaaagagtacaccgagaaggtctggggtgtgccctgcaaccagatcagtgcagagtggggcgcgcaacgcatcaagagcctgtcgatcaccaaggcggtgctgcatgctgcgcgaagcgcgctgggcttgaacgggaaggctgaacagacttcgttgatcgagaacttcctgtatccgaagcatggccccggtgagatgtgggaaacagctgctcagcagttcgtcgcgcgtggcggcacattgctgatgaagcatcgtgccgttggactggaagtgggcgatgaccaagtgcacagcgtcaccgtacagtccggggcaggcgaagccttcaagctcgagtgctcgcacgtggtctcgaccatgcccgtgcgtgagcttgtatccgcatcgcggacaagctggcccgaagatgtggcaacgattgcggatgggctgcagtaccgtgatttcatcaccgtcggcctgctttacgatgcgtccgatcttcctcgggcattgggcgacaactggatctacattcaagagccgggtgtgaacgtagggcgtgtacaggtcttcaacaactggagcccgtacatggttcgcgacgcatcgaaagtatggatggggctcgagtttttctgccgtgagactgatccgctgtggaacatggatgatgctgacctgcaggcgctggcccagcgtgagatgctccagatcggtttggtgaccgccgagcgtgcgcaggatgcggtcgtgatccgagtacccaaagcctatccaggctattttggtgaggcctacgctcagttcgatcgattgcgatctgcgttggatcaggtgcagaacctgttcctggtggggcgcaatgggatgcaccgttacaacaatcaggatcactcgatgctgacagccaaagaggctgccgatcagatcctgtccggtaacgtggacaagagtcggctgtggtcaataaatgtggacgatgagtaccacgaagaggccaaggcctga

SEQ ID NO: 507625 - DNA, 978 bp, Stenotrophomonas maltophilia
atgtggaacgtccttgtttgtggaggggcgggttacatcggtagccacatgtcacagtggctggccgaacagggtcatgccgtaaccgtgttggacaacctgtccaccggtcaccggcaggcagtgaaatggggagagttgatccaggcagatctgcttgacgagtcttcgctggagcgtgcgttcagcgggcggcgttatgacgtggtgatgcatttcgctgcgagttcgttggttgcgtcttccgtcgccgatccattttccacctatcggaacaatgtagccggaactctgaatctgctggcgcagctgcggtaccgggatataggcaaggtggtcttttcatccacggccgctgtgttcgggcagtcatcggcttccctagttgacgaacagcagccgatgcagccgatcaatccctatggtgccagcaagttgatggttgagcggatgcttgcagacgcttgggaagcgtatggtttgtcgtcggtagttcttcgctacttcaatgctgccggcgctcttcctgaacacggcataggtgaagcgcatgcctgtgagactcatctgattccgaacgtgctcagggccgccgccggacaggcgcctccgctgaaggtatttggtgcggactaccccacacctgacggaacctgtgtacgggactacgtacatgtgcaggatctcgcgcgtgcccacggcttggcgatgaacctgatggagcggagtcctggaacccatgacttcaatctgggcagtgagcagggctactcagtcatggatatcgttgaggccgccgcgcaggtggtcgggcgcgcagtacctttcgaggtcgtcggccgtcgggccggggatccagcccggctggtggcctccagcgccaaggcgcaacgggagctgggatgggagcgaagttggcaggacctggtagccatcgtcaaaagcgcctgggattggcatcgggagcagccgttctga

SEQ ID NO: 507626 - DNA, 345 bp, Stenotrophomonas maltophilia
atgcctcaatccggaaccgaagcggcctctcctggcgtgctgcgtatcgagtgcatgccgctcgattgtggcggcgccgccattgtcgtggaactggaccgtacgcctgatcggacatggatgaagtcgctgaagcgagcgctgctggccgacgacgccctggacggtgcacaggccaagtttgatgggcgctttgtctatgtcgtgggcgtggacggcggcgcgcatcgtgctgaacatcgggtcatgcaggccgtgatggcggcagagggcgcgggcgcctcgaacgccaggcgccagcgccctgcagtcaacgtaggcgtatccagcgccttggcgaactga

SEQ ID NO: 507627 - DNA, 954 bp, Stenotrophomonas maltophilia
atgaacaccttcacccgtaccctggccgttgccgccctcgccctctcggtccaggccggcctgtccgcgcaggccgccgaaccggccacgccggcggcagtcaccagcgtcgcgcgcaccgccagctacatcaccaccgccgatggcgtgcagctgtactacaaggactggggcccgagggacggcccggtcgtgaccttcagccacggctggccgttgaactcagacagctgggaatcgcagatgatctttctggccgatcatggctaccgtgtcatcgcgcatgaccgtcgcggccacgggcgttccagccagccgtgggacggcaacgacatggatcactacgccgatgacctggccacggtgatcaatacgctggacctgcacgatgtcaccctggtgggcttctccaccggtggtggcgaagtggcgcgctacatcggccggcatggcaccgggcgagtgaagaaggcggtgctgatcagctcggtaccgccgttcatgctgaagaccgccgacaacccgaacggcctgccgatcgaagtgttcgatggcatccgcaaggcacagatggataaccgcgcgcagctctacaaggacatcccgtcgggcccgttctacggcttcaaccgcccgggcgcgaaggtgtcgcaggggctgatcgatgcgtggtgggcgcagggcatgcagggcggccacaagaacacctacgattcgatcgccgcgttctcggccaccgatttccgcgcggacctgaagaggttcgatgtgcccacgctggtgatccacggtgacgacgaccagatcgtgccgatcgatatctcaggccgccaatcggcaaagctcatcaagggcgccaggttgatcgtctacccgggtgcgccgcatggcctgaccgacacccacaaggacaaggtcaaccaggatctgctgacgttcctgcaggaaaagtga

SEQ ID NO: 507628 - DNA, 1035 bp, Stenotrophomonas maltophilia
atgaatcgcttcaaagtaaggcttgactacttcagtgggttcccggtgctgctgaatcttgatgcccccgagatgctcaagaaggcgaaacttgacggtcgcacctgtgatgtttacttggaccgtcgtggtcgcaagattgaggtatctggcctcacgcgtgactaccacctgtacgtcttaggctcaagaacggcgagccacttctcacacgagccagttgagtggtcaacggacacgcttctggctaagggcaagctcgtctttcgaaccgcgccaaaagagactctggtgccatttacgctcgtgctggatgggtcttccccgtacaagattccttcgaatattcggccgcatgacattatctctattgaggcggtccctccgatgcccgaagccatgctcctagggctgaaatttgttcactcggacggctcatttttcacctacttcctaaccccagacctactccatttcattcgctttgacacaccaacagaactgaccgatttcaaggtggagtacgtcggcatcgcatgtgggaagaacggaagtagcgacgtgttcaagcgtgccactgcccacgagaaggtggtcgaaatttcaggggctttccagcgcatttacggaaatcgtgacctgttcatttttgcgtataacccagctttcgccctcatcactgaaatgcatggaggcgtcgtcttgacgacagatgctgtcctcaagagcgtcatttctggaggcgagaacagtctatttgaggctatcgaggcgtcgctaattgcggcgtttcaaccttactacaacacagaatttaagagcttccctgtgaatcgaccgaaatggttgcggggtggattcggtgatcttgacggtattgttctcggtgtcgacaagatcagtgtcacgctagcaacggatagctcctttaatgtcgaaggctcttggtcctttggtcgcttccgttccgatgcgcgttcgccgcaccgtctgcatcacattgaaatctcagtcagcaagtcaaccgatgcgtaa

SEQ ID NO: 507629 - DNA, 675 bp, Stenotrophomonas maltophilia
gtgattgccagctacgtgtatgcggagatgtcaatccaacatgcggcgtcgaaatctaagagtctgctgaggactctgaatcgcacgcctaccttttggcgtacttgttacgcatcatttcagtcctctgcgtatctggccttgggacgtgtattcgatattaggtcgccatacaacattgacgccctaattgcctcaatggagcacgacatgagtgttttctctcgagaggcactggccgcacgaaaggcctcggctggtttttccaatcccgccaggctgcatcagtacgtggctaatgcgcatgtcctagattcgagtgacattcggcgcctccgacgcgccgtagcccgacgtcgcattgtctacaatcgagcaatcatgccagttcggcaccaatacttggcgcaccgacaggcgcatggtcacgcaagtgttcaaagcctttatgcaaggggcaaggtaaaggaaatgtggcagttgtcgtgctttctttaccacctgcaccaggcgctatggaatctctacacaaatggccgtaaacccgagcttcgcgttcgcgtacgcctttccccaagagctatcttcgaccgccctggcaactattctggtccacacgaaaggatcgtccgcgaggtgcgcattctcatgaggctcctcgaaagcgttgcataa

SEQ ID NO: 507630 - DNA, 1308 bp, Stenotrophomonas maltophilia
atggaacttaagcgaaacggattcacggcgggaagcaactccgagtggatggatgagcttcctcagggagaggagcttgtggccctcacaaagcgagcacgtaggcacattgagccttggctctcggccgttttccaagctgagcatctgaatttgctgctgggtgctggcttttccatggcgatttcgcacgaagcgaaggccgctagcgccggaatgggatacgaggacctcggcaccaagtacgatgagaagatccgggcgcacgcagcgaagtctgccacagagatggggcgtggcaatccgaacgtcgaagatcagatcaggtcggccctggtgctgatagaagcactgacgttgatgcagagcgaaggaaattccgcttcgctcaaggttgcgctggacaaccgcttgaaatcgttcctccaggcaatcctggctatggagcaagcgatctcagttgcggacgacgaggactggaaggcagcggcttctgtcttgcagtccttcatcttgagcttcgccagccgttcatcatcccgcgagcgcctccacattttcacgaccaactacgatcgcctaatcgaatacggctgcgatctcgcaggcttgcgcactatcgatcgcttcgtcggagcgctggagccggtgttccgatcttcgcgtctggatgtggactatcactacaatccgcctggcatccgcggcgagccacgtttcatggagggcgtggtcaggctcagcaagctgcacggttctatcgactggcacctggacgagcgaacccgtcgcgttgtgcggcgcggcatcatgttcggtgctagcgatgatcatccggccatcccggaaagcccggtcgacacggtgatgatctaccccaatgcgtcgaaggacgtcgagacgtccgcctatccatacgcagaactattccgggactttgcagcttcgctgtgtcgaccgaatgcggcgctggtcctgtacggttacggctttggtgacagccacatcaaccgtgtcctcgcggacatgttgtcgttgccttcgacccatatcgtaatcctcgcttacgctgtcgacgatcggctcagaagcttcctggcgcaagtggcccgccctacacaaatcaccttattggtcggtgagcatttctcgagtatccgccagctagttgagcattacctacccaaacctgcgatcgatcaagtgagctcgcgcgtagctgatctgctgaagaaccgggcgcccattcgagcgcatgaggcggaagctgtaccgcctcgggcagaaggcgaaggggaagaggaatga

SEQ ID NO: 507631 - DNA, 1623 bp, Stenotrophomonas maltophilia
atggcagcagacgctgccatcatggtggatccggacaagcttttcggtcgccacctggcagtgctgggcaacaccggtagcggcaagtcctgctcggtcgccggactgatcagatggtcgctagaggccgcgagcaaagcgaaatctgacgccggcggcgaagggcgtccgaacgcgcggttcattgtattggatcccaatggcgagtacatgaaggcgtttcaggacatggagggcgtccgggttttccgccctggcgactcggatacgcctctacagatccccgcttggctctggaacagccacgagtgggctgcggtttcgcatgctcagccgggtactcagcggcctctgctcaatcaggcgttgcgtaatctgcgagcgggacgagcggcccgtgagggcggtgaaatcaaggcagctcgccagctcaatctgtacctgacgaagatcaacgtctttctgactgacgggtcgggaaccacttactccggcttccccggaaatatgcgggctggggagacgctggtggcgatggccgccgcaatgcaggaactggccgagaacgtgatcccagcgggtgatgcacaggaggcggtgagagaaatagcccaggcggcgcaagtgctggctgatcggcatagcaaccccaaccgaaataacccgaacagcccctattaccgggacttttcaactgccgactttcagccctttgtcgacatgttcgaggccgctcggaagcattttcctccacctcaggatgaaaccgaaggcagtgaagatgcgcctgtcccgtttgatgtggcgcaattcgctaattacatcgaagacatggcggcaaccggtgcctccaatgcgaatgtcagcaatttcatctcgttcctaacgttacgcatacgcgggatgatggcgacgccctcacttcgccccgtgatcctgccacgcgaggatctgaccttggcgacgtggttggataatcacatcggatctgatgacgcgtctaacggcaacatcgccgtcattgatctttcgatggtgccgtccgaagctacccacatcttgatagccgtctttgcccgcctcgtcttcgaggcaagccaacgctatcgaaaggatagggcagagggagaagcgctgccgacggtgctagtgttggaggaggctcacaccttcatcaagcgagggcgggacgacgatgatggtctgccgtcggctaccaggctgtgtcgtgaagcattcgagcgcattgcgcgcgagggacgaaagtttgggctggggatggtcttgtcgtcgcagcgtccctacgagctatctccaaccgtgctcgctcagtgcaacacgtttctgctgcaccgcattgttaacgacagcgaccaagatctagtgcgccgcctggttcccgatagcatcggcgggatgctccgggagttgccaagtcttccgtctaggcaagccattctcctgggttgggccacgccgttacctgttctcgtcgaaatgacggagctggacaagaagcagcgaccgcactcggacgatccggatttctgggacgtctggacgggcaagaaagagcgagaaattggctggtcttcggttgctgacgactggacaggggtgtaa

SEQ ID NO: 507632 - DNA, 519 bp, Stenotrophomonas maltophilia
atggacagcactccggacaataccatcacagcctcctggaatggcttcgtcgtccggcagatccttccgtgcgatctcgacctcatctgtgcccaccgtgaagcgatgttccgtgagagcggccggagcgaagaggtcctgcagcagatggccgccccgttccgtagatggctggagccgcgcctgatgtcgggcgactacttcggccatgtcctttccgacaatggacaccccatcgcaggcatcggcctgatgctgatcgactggccgccccaccccgcccatccagagcaggactcgcgcggctacgtactgaatgtctacgtggaccccggctaccggcgtcgcggcatcgcccgccagctgatgaagctggccgaccacgcgttcgccgggcgaggggtggcctacgcggtgctgcacgctactgcccaagggaagcccctgtatgccgatctcggatgggctgcgaccagcgaaatggcccgcgacctgcgcagcgggggcgacgtgccctga

SEQ ID NO: 507633 - DNA, 2325 bp, Stenotrophomonas maltophilia
atgaggcgccgcgctcgtctccgtctgcgcacttcgtgcaccttgctgctggccctgatcctgctgcccgcagcttccgccgaggatgcgcaactgcaggaatggtccgccggccgcgaagtgcgggttgccaccgcgccatcactgcgcccgctacctgcagcgctggaggattcacgcacgccccctaccctcgcccatggttatgccgaccttgtcgctcagcattccggcctgcgcttccgcgatctcacctacaccaacacgagcgcggcggtcgctgccgtctgccggcacgaggctgacctggtgctggtcatgggcaatccttcgcatcgcccgcttccttgtcccgacctgatggcatcgggcgctttccatggcggcaggacggtgctggcctcgcgtaaaggcgagcgcccaccccgtgacgtcaccggggtgagggcgcaggtgctggccgtcgttgacggtggcccctatgccgactggctggcgacccaccatcctcagatccacctgctgcaccttcacgaccgccatgcggcgctggccgccgtggagagcggtatcgccgatgcggccatcggcctggaagcaacgctgcagtcgatgatccggcagcacttcgcgggcaacctgcaactgcacccgttcgacagcgatttttccaccgatctgcacctgtttgtccgccgcgaggaccagcagctgctggcgcgcatcgatcaggcgctgcgcgccatcacgctcgaagagcacgcacggctgctggagttgtgggcacagcagatgctgcccgcatccatcgagagcacacttgaccagatgcgcctcccgctcctgcgatggctgctgtgtctggccacggcactcatcggcctgcccgtgctctggcaggcgctacgttggcgaatcggccgcacggaacgccgcctggggcgcgcggcggggatgatcagccatgaggtgcgcaattccgcgcagacgattctggcttcgatcgacctgctgagccagtcccacctgcccaaggggcagcgcgaactgctcgcggcagcgcttgctgccggccagtcgctgcgcaggctgctcgatcgctcactggcgttctcgcgccttgccagcggcagcttcaggccgcatcccgtgccctgtgacgtcggtcagctctgtgcccgtgcactggaagccatccggccggaggcactacggagaggcctgtcactccagctcgatcgcacgcctgatccagcgccggtggtcgcgctggatgccgatggactacgccagattgtcgacaacctgctgggcaatgcattgaaattcacggatgtcggcggtatcgaagtgcgcctgcaactatcgcccgccctgtctccccgggagctgttgctggatgtgatcgacagcggcatcggcattgcgcccgctcaactggcgcttctgttccggccattccagcagagcgaggatggccagagacgtggcggcaccgggctgggcctgacgatcgcgcgcgaactggccgttgccatgggcggcaacctgaccgcacacagcgtgcatgggcgcggcagccgcttcaccctgcgattaccggtccgcgccgtccacggcgatccgccacccatcgagccgctgcagcagacaccactggccggcatcgacctgctcctggtcgaagatcatgcactcagccggcacatcgtcgcagagcagctgcgccggctgggcgcggatgtacgcgcggttgccgatgccgacaccgcattggccgagcacgcgctacgaccgcgcgccacggtcatgctggacatcgggcttcgcgactcggatggctacgctctggcgcagcagctgcgcgcgcaggcagagtcccccctgcgagtgattgccttgtccgcccgcatggggcgccgccatgcggcgcgctgccgaagagccggattcgacgccatcctggtcaagccattgcaggttgcgagcttgctgcaggcgctgggccttccgcccccggcgcaccgtactgcgcccgatgacgcccctggcgtcgagccggattacgctgcggacattgcctatgagctggccaggatcgaacaggccgtgcacgacgtcgatgctgcgacactacgccaccatgcgcaccgcctgcagggcacgctgcagatgtgccgggcaatggatcaggccggcatggcggccgctctgtgggagatggggcatgaggccgcgcccgactgggtccaggcgcggcggctgctgcagggattgcagcagtggcacggctcccgcagggcggaagccgcaccatcggcctga

SEQ ID NO: 507634 - DNA, 633 bp, Stenotrophomonas maltophilia
gtgggtccgggcaggacacgctgcaagtacatccctgtaagctcggccgcggcatccatgccgcggacggtcccgcccggacccacccgcaggctctcgacggtttcctgcgtgcgcggccgatgtagagccgagcccacgctcggctcaggccgacaggagcggtcatgcgtgcgctcgcggctgttgagtccgccttgtagcgagccgagcaccgcaggggaatcaggggcgaagaggcgccgctgtttgagcgcagcgagttcggcgccgtcccctgattcaccgaggagcacagggcaccggcgcgcagcgccggctcgcggatggcggagcgcttctttggttactttcttttcgcgaaaagaaagtgacaagcccaatcatcgagggagagcaacggccccagccaaacacccggcgccgccgaatccgctgttagcagcgtcactgcaggtcgcgaagattcagtttccgcagcgtcgggttcttccacgccgtgatcccggccacgctcagcaccgcgaacccacccagcaccacggccggcaccaggccgagcagcttggccatcgtgcctgcatagaacgcgcccagctcgttggacgaactgatgaagatgccgttgattga

SEQ ID NO: 507635 - DNA, 561 bp, Stenotrophomonas maltophilia
atgatggacacatggatcccgcaccggatgcgggcgtgggcgattgccggtcttctgctggcggcggctccggcgtgggctgcgccgcccgcccgtggcgacgtgccgccgcaggcactgggcaacgaccgcaagggcaatccggtcaatctggccgagcaacgcggcaaggtcgtgatcgtgaccttctgggcctcctggtgcggcccctgccgcaaggaacttccgatcctggcccatctgcaacaggtggtcggcgaggacgcgttgaaggtctacgcggtcaactggggcgaaccccgactggaagtcagccgtctgatccgtcagcgcgactggccgaagctggagtacctgcatgatcccagcggcgcgctggccgagcaattcggcatcgtcgcagtaccccacatgttcatcgtcggccgcgacggcaccatcgcccatgcccaccgcggctacagcgaggccagcctgccgcagatcatgcaacaggtgatcgatgcactgcccgaagaggtgcgcaaccgcgaggcaggggcggcgccgctggggcactga

SEQ ID NO: 507636 - DNA, 843 bp, Stenotrophomonas maltophilia
ttgccgagaacccacaagaacgtcgttatgggaaaactgcccgcccccgtactgaaagcgctgcgtgactattaccaatcggacgacccgaaaccagacgacgtggtccgcctgctgtcgcttcatgaccttttttcgcccaagttccgggtcgaacacgacactgcaataagggatttactgaatgtcttcagcgggacccgtaaagatcatgttgtggacaacttcatcttgggcatagctgaaaattcgccgtcgctcagagcaggtctatcggcctactccttcgtgatcaacttccccactcacaccttctcaagcgatgacggcgtcgtctgcaagatctgcggagagttcagggaagttactgtcgacccaaccttcataaacgccatccgctttcaggccggctgcatggtagggaattcaccaactcacctgacgcaattcttgattgaacactccaggacaccaaggcgtactcccagtagcctgaccaccttgtcaagaattctccaggaaatcagaaacgctagtgcagacgacacgcccaacacactacaacgcagcatccgcagaattccaggggtgcaaatgagcgtctatgaggcgcgtggcttgcttactgccttgggtcatgcgggaattcttcaatccgggggacatcaaggcctggctcaggcattcgtcaatgcggaaactgcacctcgaaagcaccattcgtcggattggggttaccccatttcgttctggacaggcgctgatgggttcaatgacgatgccttgcactattggttttcgagctatcccgagctgctggatggtctgatccagccgcgttaa

SEQ ID NO: 507637 - DNA, 336 bp, Stenotrophomonas maltophilia
atgcgcctgcatcgatccgtcgcggctgtgttcctgctggtcatggccggctgcagcacaacgtcatcctatgaaggtgcggatttctccgcctcctcgcagtgccgcatgcagtgccaggccgactatcgcagctgcatggcgcggggcagcaccggcaacagtgccttcagctgcgagcagcaggcggtgcctgcgccggacaagcgctgcaaggacgttgccaaccccgaactgcgccgtgcctgcgaactgaaggcgcatgactgcacgatgcgcgcgccgatgatgtcctgtggcgaacgccgggattcctgcatgagcagctgcggctga

SEQ ID NO: 507638 - DNA, 258 bp, Stenotrophomonas maltophilia
atgagggccgtgttgctgatgggcctggtcctgttgtcaggcccggtgctggccacaccgcccgcgccgccatcggcgtggctggagcgccagcaggcagccggtgccgacgaggcgaatgctgcgggggcgacggcttcgaaggtgccggaggccaaggcgcactgccgggtcacgaaggaatggaaggttggcgagacggtggtgcagcacagggtctgtgacgatccgccgaagaagccagctgaaaaggtgtag

SEQ ID NO: 507639 - DNA, 669 bp, Stenotrophomonas maltophilia
atgactcatgaccgcattcgttccgcactattccctccgccgcgtggcaccaacgcatcccgcgcatcacgtgcggccaacaccggcagcaaacaagtggtgcgcgccccgctccagttgaaggcggtggttctggccggtgtgctgatggtcttcggtacggcagcggcatgcgagcagtactcggcgtaccccgacgttgtgcttgattctttctatgcatctgctccgacacaacctcggatgttcatggaccaggagcgcgggcgctcggcaatgaggaagtgctcattccccggagggccgattccgatcttcgtgcgtctggacgtgccggggcttacctatgtgggggagctgcagtatgaaggcaggacgtatgcgtcctacgccacctctgccgattcggccctgttggccttcgacgtgtactggaatgctctcgaccgcacgccgctgcgtctgggtgaggagatggaaatcatgtacgaaacgcgcgccggcgatggcctgcaatacaccatcaactacacagcgcttgtgttctcgcgcggcggacggatgcagtcctccagcatccgcaccggagtcatttcgctgcgctcgccgatgtacccaagcctggacagcagtgcctactactatcttgcaccaaccttcagtccgtga

SEQ ID NO: 507640 - DNA, 1089 bp, Stenotrophomonas maltophilia
atgggccaccgtcgccgaggcgccaacttgaggcttgaccccattcgttccgcattcttctttccgctgcgcggaaccaatctgtcccgcgcagccgaatttgccaaggccggcaacaagcacgtgtcgcgcggccaactccggccgaggtcggctgcccttgccggtgtactggttttctccggaacggcagcggcgtgcgagcactacaccgcgtttccagacgttgtccttgataccgtctttacgaatgccccggaggacccacagaggttcatgatccaggaaagaggccggtcatcactgaggcggtgctcgttcccgggcggcccaattcctgtcttcgtgcgcttggacgttccgggacttacctacgtgggtgacctgcagtatcagggtagaacctacgcatcgtatgccacttctgaagactcggctctactggcgttcgatgtgtactggaatgagactgaccgcaagcctcttcgcctgggcgaagagcttgaaatggagtacgagaccaccgctggagacggtgtacagtacgtgatctcatacaccgcgctggtgttctcgcgcggaggacggatgcgcacttccagtattcgcacaggtagtatctcgctgcgatctcccgcgcatcctggtctggattccagtgcgccctactacctggcaccccagttcccggccgtgacgtgtccgttgcgggatgtctcggaaacgcttcaggatgtccagtgggctgagttgtccacgccgggcagcactgccaaggagaagccggtggcggtccgcctgaactgcggcacggatgcaccgcgcgcgcagatcacattgaccgatgctggcgacccgaaaaattcggggagccagctgacacccacggccgattcgaatgcgaagggcgtgcgggtgcaactgctacaagcgggaggcgaagtgaactttggacgaatctggaatttcgagccgggtgttggcgggacgcatgacatcgcattcacggctcgctacatccgcaccgatgagccgttgatgccgggtcttgtcaagggtgaggcggtgctcaacgtgagctattggtaa

SEQ ID NO: 507641 - DNA, 981 bp, Stenotrophomonas maltophilia
atgaacgttgcattcaagcgaaagccaatggcaaagaacacgcgattgcgtgcagcggcactggtgattggcctttcactgctgacggtgtccgcgatggtccaggcgtgcacaggtttcagcaacactccaaggcatcgggaatacacccatgacacctacccggagcagcgtggccgatggttcagagggagcaatggccccacaacattcaataactgcacggccgacttcgatctgaatctgcgcctggacgcaccggggctgacctatgtcggcaccctcgactatctgggcatgacctttccggcttacgagttcgggccggaatctcccttggtgatcttcacctttgagcaggttgttggctgggagcgcgttccgcttgaagtgggacgcgaacagacctatcccatccaggtacagacgccgatgaatgcgaacgtcgatttccggcccgagttcttctccagaggtgggcggatgcgtacgtatacgtttgacgtgtccttgacctggacttccccgcagcatccggcaattgatggtgcctacaacagctcctacaccctgcactttcctgtggcgacgtgtccgttgcaggacagcgacgagacgctggacgacgtgcagactgcagaattgtccactcctggtgggacagccaaggaaaagcgggtggcgattcgcatgaactgcggtgtcgatccgccgcgcgcccggatgacgttgagtgacgccggcgatgcgggcaacaccgggagccagctgacgcccacagccgattccgatgctgaaggcgtgcgcgtgcagctgctgcgcaatggcaccgaagtgcagttcggccagacctgggacttcgagcctggcgtcggcggcgtgcacgatcacgccttcaccgcgcgctacatccgcaccagcgaggcactggtgcctggtctgatcaagggagaggcggtgctcaacgtcgactactggtaa

SEQ ID NO: 507642 - DNA, 510 bp, Stenotrophomonas maltophilia
atgaacctgatcaaccgcctcaccttgtccactgtgctgctggccgccgcgccgctggccctggccgacagcgccaccctgaccatcaccggccgcgtgctgcccggcacctgcacgctggccgacgcgcagatttccttggacgatgtcaaagccagtgacctgacccccgggcaggacagccagatcaaggccggcgcgctggagttcaccggctgcgtaggcgtcagcaaggcggtgctgtcgttcgccggcaccgcggccgatggcgatgcagagcgctggaagaacaccgctgccaccgacgcggccgacggtgtgtcgatttcgctgctgtcgggcaccaccggcaacacctatctgaaggacggtgacaccggcatcgatgtgccggtgaccggcgccaccgcgcgctatgacctgcgggcggcgtaccacgcgccgaccggttcttcgctgagtgccggtgaagtttccactgagatcgtggttactgctgactacgagtga

SEQ ID NO: 507643 - DNA, 2541 bp, Stenotrophomonas maltophilia
atgcaaaagcgagccttcccttgccgcaatcattgccgcctgatcagccgtccgctgggcgtggccattgccgttgcaatggccatggcagtgaccagccacgcccatgccggcgacggtgagccgctgcagttcagcgcagggttcctgattggcggcaaggccatcgacatgcagcgctatgcgcagggcaatccgatggagccaggtgactatccgctggacgtggtggtgaacgggcagttcctggagaaccgcgacatccgctttgtcgaggcaccggcgccggtgggtgccacgccctgcctgccgatggcgctgctgggccgcttgaatctgaaggacagctacctggccgatctgcaggaagatgcagagggctgcattgcattgcctgcgctggtggaaggcgccaccgtggaattcgatgcaggcaacctgcagttgcttgtgaacgtgccgcaggccgcacaggcgcgcaatgcacgcggctacgtggcaccggaccagcgcgaccatggcgttaccgctgcgttcttcgactacaacgtcaaccacaaccgtgcccaaggccaggatgcgacctatctgggcttgaacacgggcctgaacctgggggcctggcgcctgcgccaccgttcgtccttcagccagagcagccatggcacccgccacgatgtgatcagcagttacctgcaacgcgatcttccggcctggaacagccagctgttgctgggccagggcaataccgggggcgagttgtttgaatcgctgtcgttcaccggcgcccgcgtggccagcgatgaacgcatgctgcccgattccctgcgcgggttcgcgccggtggtgcagggcattgccgagggcaatgcgctggtgaccatccgtcagaacggcaacatcatccacgaggtgagcgttgccccggggccgttctccatcgaggacctgtaccccaccaacttcggcggtgatctggaggtcaccgttaccgaagccgatggccgcacccagcgcttcaccgtgaacttctctgcggtgccgcaggcgctgcgcccgggcgccagccgcttcagtgccaccgccggtgagctgcgcgacgcgcgtggcgagcgcgaaacgctgcggttcgccgaaggcacctacgcgcgtggcatcagcaatcatttcactgcgctgggcggtgtgcagatcgccgaggatttccaggcggcgctgttcggtggcgccgtcaacacgccgatcggtgcattcggtgccgacgtgacccactcgcgtgcgcgtatgggtaacggtgaacaggttaccggcaacagcttccggctgaactaccagcgctacgtggccgccaccggcaccaacttcggcctggctgcgcaccgctacagcacgcgcggctacatgaccctgaacgacttcgcgctgtcacgcagtgacgactggggccatgccggccgcgcgcgccagcgcttccaggtgaacttctcgcagcgcctgggcgagcgcagcagcctttcgctcagtggcggccatgtgcgctactggggcgattccccgcagcagaacgacctgcagctgcgcttccagagcagcctcggccgcgccacctacagcctgtctgccatgcgctaccgcctgggtgacggccgccaggatacgcgctacaccgccagcctcagcattccgctgggcaccgcgccgcgcgccccgcgcctgagcacgcagctggcccattctgcccgtggcgaacagggccagctgggcctgagcggcaccctgggcgaatcgcagcagctcagctacagcgtgggcgccagtgacggcaccggtggccagcgcagcaccagcgcgtatgccacctacaacggtggccacggcaccctgaccgccggctacagccgctcgggcgactacagcgccatgaatgccagcgcggcgggcagcgtggtgctgcaccgggatggcatcaacttcggcgcccccctgggtgatggctttgcgctggtgcaggccgacggcgcgcaaggtgcacgcatcggctatggcgatgatgtccgcatcggccgcaacggctacgcgctgctgccgcatgtcagcccctaccgctggaaccagatcgaactggatccgtcgggcctgccgatggacgtggagctgctgcagacctcgcagcgggtggcacccacggcgggcagcattgtgcgcgtggcgttcaatgccaagcgcgaacgcacgctgttcatcgatgccaccgatgcgctgggccagccgctgcccttcgccgcccgcgttgaggatgaaagcggtcgcgcttacggcgccgttggtcagggcggggtgatccagctgcgtggcgcccccgagcagggcgggttgattgtcgaccccgagggcccgaaccgatgccgcctgcagtacaccacccccgacgcgcccgacgcctatgggctgtcgtggagccaagcggtgtgcacgccgctgccgccgcccagccccggcctgcaggccgcgctggatgccgtaaccgagtcaacacgctga

SEQ ID NO: 507644 - DNA, 519 bp, Stenotrophomonas maltophilia
atgtcgaacacgttgaacatgattgttgccggtgcgctcgcactggctgtttcccccgccgccttcgctgaaaagctggagatcaccggcgaactgatgaccagcacctgcgcggtggatgccgtgggcggcaccatcacggtgccgatgggcaaggttgatgtggcttcggtcaatgcgtccgagcgcgctggcatgaagaacttcagcatccagctggactgcaccggctccggcgcgacgcaggatgtgggcgtgcgcttcggcggcaccccggacggcagcaccggcaacctggccctgaaccccgacccgaacgcggcctccaacgtgggcgtcgccctgtacgacgtggccggcaatcaccagaagctgggcgaggacccgctgcagtgggtgaccattccggccgccggcaagggccagctggattacagcgcgtggtacgcctcgccggggcagaacgctaccgccggtgttgccaatgcgtccggcgacttcgtcgtgctctacaagtaa

SEQ ID NO: 507645 - DNA, 723 bp, Stenotrophomonas maltophilia
atgaagttccgtgcaatgacgtggatgaccgcgctgctggctggcgcattggcgctgccggcatcggcagcggtaacgctgcagggcacgcgtatcgtgcatgacgcagccaagggccgcgacgtgaccgtaaaggccaccaataccggtgagcaggcggcgatggtgcaggtctggattgacgatggcgacagccatgcacgtcctgagaacgtgcgcacgccgttccggctgaccccggccgaaccgcgcctgctgcaggcgcaccagggccaggcctatcgcatcacctacgcgccgcgtccgtcggaagcaccgctgccgactgatcgcgaatcggtgttctatttcaatctgctggacattccgcccaagcccagcgatgccagcggcaagaacctgctgcagttcgcggtgcgcacgcggataaagctgttccatcgccctgccggcctgcccggcaacgcgcgcgatgcggcagcgcagctgcaatggcgcgccgagggcaacgcgctgcaggtgcgcaatcccacgccctaccacgtaacgctcagcacgctgaccctgtctgacgggcgcacggtggaggtggacatggtggcacccggcgcacaggtacgcctgccgctgccggccggctcggcgatgccgaccacggccagcttcacctggctggatgactacggtacgccgcgcgaggccgaggcacgtatcgagcggtaa

SEQ ID NO: 507646 - DNA, 510 bp, Stenotrophomonas maltophilia
atgtcccgtttccttcttcaggtgatcgcggtgccgatgctgtgcctgatcgcgtcggccgtaggtgcccaaaccacactcaccatcagcggtcgcgtgctgccgggcacctgcacgctggcagcgcccaccatcgcactggatccggtgaaggccgatgagatgacgccaggtgccgccaacagcgtgaaggccggtgcactgaacttcacgggctgcgtgggcgtcagccgtgcgcgcctgtccttcgatggcacggccgccgacggtgatccggagcgctggaagaacaccgcagccaccacgccagcaacgggtgtgacggtcgcgctgctggctggcgcgagcggcaacacgtacctgaagaagggcgacgccgatattccggtggctgtctctggtgcgacggcctcttatccgctgcgcgcgggttacttcattcccaacaccagtggtatcaacgccggcaatatctccaccgagatcgtggtgactgctgcctacgattga

SEQ ID NO: 507647 - DNA, 2517 bp, Stenotrophomonas maltophilia
atgatggccgttggccatgcccgtgccgccacgcgttcgctctgcactgccatcggtgcggtgttgtcgacggggctggcgttcgatgccgccgctgcgccggttgagttcagcgaaggcttcctgatcggcggcgaagccatcgacatggcgcgatacgccaacggcaatccgttgccggctggcgattacgcggtggacgtgcatgtgaacggccagttcctgcgcagccaggacatccgcttcgtcatccaggacgacccgcagattgcggtgccatgcctgtcaccggcgctggtacgcgggctgccgttgaagcctgcgttcctggaggcactgcccgccgaagacagcacctgcgtgaatctgccagcgctggtggagggcgccaacagcacctttgacagtggcgagctgaagttgtccctcagcattccgcaggcggcacaggccatcgccgcgcgtggcttcgtggcaccggaactgcgcgacgacggcatcaccgctgccttcatcgattacagcgccaaccactaccgcagccaaggcagcgacagcagttaccttgggttgcgggcaggcgtgaacctaggcgcatggcggcttcgccaccgcgtatcgttcacccatggcagacagggcacccggcacgaggtcatcagcagtcatctgcaacgcgacattccacgctggaacagccagctgctgctgggccagggcaacaccggtggcgagctgttcgaaagcgtgccgtttaccggcgtgcgcgtagccagcgacgagcgcatgctgcccgattcgctgcgtggctatgcgccggtggtgcagggcattgccgaaggcaatgcggtggtcaccatccgccagaacggcagcatcatccacgaaagcaatgtggcgcccggtccattcaccatcgaggatctttatcccaccaacttcggcggtgacctggacgtcagcgtcaccgaagccgatggccgcgtgcagcgcttcagtgtcaatttctccgccgtgccgcaggcgttgcgtgccgggtcgtcgcgctttgcggtcaccgcgggcgagctgcgcgacaccggcaacacgctgcaggcgctgcgcttcaccgagggcacctacgcgcgcggcctgaacaaccggcttaccgtgctgggtggcgcgcagctgggtgaggactatcgcgccctgctcgccggtgctgcggtcaacacggccatcggtgcattcggtgccgatgtcacccattcgcgcgcccgcctgcgcggcaacgacaccgccaccggcaacagcttccgcgtgaattaccaacgttacgtggcgcgcaccggtaccaacttcggcctggccgcgtatcgctacagtacgcgcggcttcctcagcctcaacgatgtggcacgcgcgcagagcgacgactggggttacggccagcgcgcccgccagcgctaccaggtgaacttctcgcagaaggtcggccagcgcagcaacctgtatctcagcggcggccatgtgtcttactgggacagcgcccgacgccgcaacgatttccaggtgggcttccagagcacgctggggcgggtcaactacggtgtgtccgcgctgcgcttccgcgtgggcgatggccgccaggacacgcgctatgcgttcaccctcagcgtgccgctgggccgtagcgccaacgcaccgcgtgccagcacccagctcagccaggccgatagtggcaggcagtcgcagctgggcatcaccggcagcctgggtgagtcacgtgcgctgagctacagcctgtccagcgcacaaggcaatggacagaacagccatagtgcttatgccgcgtggcaaggcagccgtggcaatctcaatgccggctacagccgcagcggtgactaccgtagcctgtcgctgggtgcgtcgggcagcgtggtgctgcatggcggcgggttgaacctgggcactcccgtgggcgagggcttcgcgctggtgcaggcgccgggggcgcagggcgcacgcatcggcagcagcactgacctacgtgtggcgcgcaatggctacgcactgctgccgcacatcagcccctatcgctggaacaccatcgacctggacccctccggcctgccgatcgaggtggagctgctgcagacctcacagcgtgtagcgccgaccgccggtggcatcgtgcgcgtgccgttccaggtgcgccgcgagcgcacgctgttcatcgacgccaccgacgcgctgggccagccgctgccgtttgcggcgatggtgcagagcgaagacggcgcgccggtcggcgcggtggggcagggcggggtgatccagctgcgcggtgcgcaggacagtggcagtttgatcgtcgaccccgatggcaagcgacgctgccgcatcgactaccgcatgcccgaggcgccggatgcctacgggctgtcgtggaaccaggccgtgtgcgtaccgcagctgttgccgccggagagcctgcaggtgggcacgtcggaagcggctgagagcatcgccccgtga

SEQ ID NO: 507648 - DNA, 1032 bp, Stenotrophomonas maltophilia
gtgcggtttccattgcagttccgcgctcttctgtctgtctgcacgcatgtgccgcgtggtgtggtgcgcgcgcgggtgggtgcggtggtcatcgcttccctgtgcattctggaggccggggccagctgcgcgcggcttagtccgggagatcaagatctgagctacacccaaaggggctacaacctggatcgtccggatgaaagactgggaacaagcgcggcgggagcagtcgccctggggttcgagtgcgctgccgggcaaacagccttcgtcgtggatgcgccactgaccggtctcacctacgagcgcgatgtcacctacggtggcgtcacctacaaggcctatagcttcagttcgcgctcaccactcatcggctttggctacagtgtgagagagggggctccctcgaattatggtggtcccgccttggctgtaggagcgatcaatcgacaccccggcataccgattgcaactgctggaccggttaccgtcgcggtttatgtgattgtgttcttccgtgggggagccatggagccggtgccgatgagctacctgggcaccatcacatcttggcccgagggtgatccgagccagaggatgcagcaccacctgtcggtggagatctccatgccccccgtcacctgcaccctcgccaacgcttcccacgccctcgacgacgttctcgccaacgaactcgccgccagcggcagcaacgcgaaggaatccagcttcgacgtcgcgatgaactgcccgatggacaacatcgacgtgcagctgtcgttggccgatgtcaatgatcctggcagcagcaacggccagctcgcacctgcccccggcaccaccgccggcggcgtgcaggtgcagctgctacgcggtggccagccagtgcagttcggccaggcgtggtcgcatggctggtccagcaagggccagcaggccatcccgttcagtgcgcgctatctgcgtacagccgatccgctggtgcccggcgacgtcaaaggcgaggcggtgctgaccgccgactaccgatga

SEQ ID NO: 507649 - DNA, 723 bp, Stenotrophomonas maltophilia
atgaaactccgcgccaggacgtggatatgcgcgctgctggccgtgtcggcggcgctgccggcatcggccgcggtgacgctgcagggcacgcgcatcgtgcacgatgccagcaagggccgcgacgtgacagtcagggcgagcaacgtgggcgagttgcccgcgatgacccaggtctggatcgatgacggcgacagtcagtcgcgcccggagaacgtacgcacgccgttccggctgacaccggccgagccacggctgctgcagccgaagcagggccaggcatatcgcgtcacctacgcaccgcgcccgtcggaagcaccgctgccaaccgatcgcgaatcggtgttctatttcaatctgctggacattccgcccaagcccagcgatgccagtagcaagaacctgctgcagttcgcggtgcgtacgcgggtgaagctgttccatcgcccggccgggctgccgggcagtgcacgcgatgcagcggccacgctgcagtggtctgccgatggtgatggcctgcgggttcgcaatccgagcgcgtaccacgtgtcgttgagttcattgacgctggccgatggccgcagcgtggacgtggacatgatcgcgccaggggcacaggtgcgctatgcgctgccggaaggtgcagcgatgcccgcaacggtggcgttcaaatggctggatgattacggcacgccccgtgaggccgaggcgcgcgttgatcggtaa

SEQ ID NO: 507650 - DNA, 2994 bp, Stenotrophomonas maltophilia
atggcgtcacccccgggctccgtgcttgccaccctgcaaggcctgcagcgccggctgctgttcggcggcggtgccatcttgaccctgcttctcctggccgccggctgcgcggcgctgtggctgcggctggaaacggtgcacctcaacgagcgcgaggcgctgcagcgcggccagcagacggtggatcgctacattggcgagcgcaggcgggcctacgtggccagcttgaacaccaacgccatgctgtgggctacccagcaaaccgcactggtggccggtggcctgcctgttgcggcccgcttttcagcacaggatggccaggccggcgtggtggcacccggcgccctgtccgtcccctggctggcgctgtccccgcgcgagggccgtcttccgccacaggcggaggcggcgtacctgggcatggtgcagacctattcggcgtacatggccgccaccgtagcggcgcaggattcgcccacttccttgatctccttcgccttcgaaccggaagggcgcctgtttgcgatcgccgggctgcatgatgaagcgcagctgctgcagcacatgaaggtgcctacccgtgaacaggcactggccgcgctggcacagaccgccgatgccggctggcagtcagcgggtgcggactccgagcttcaactggacagtggccggctgcgcgcctacttcggccgcaatccgttcaccggcgaggatgcactggtcacccagatgcgcctgcgcagcaatggcacccccttcatcaaccggctgacgtttgaaccgcttcaaggcctgcgcgagcggttggaggaggccagcccgggaatgtgggtggtgctggaccggcagggaaacgatgttctgcgcagtgctgcggacgctgcgatttccgggcctgcgctgcgcgccgcgccatcgccccggcctacgctattggcactgcctgccggccgtgccttcgtgatgtccgcacccttgcagggcatcgactggacgctgctgcggctctaccgctggaccgacatctggacggcgcagcagacctatctgctcggcggtgggctggccctggccgccctgctggccgcactgtggacgctgttgctgctggtggaccggcgcgtgctgcggccggcgctggaagaagccgcacgggtgcatgaaagcgaagcgttgagccgcacgctgatcgaaacgtcgccggtcggcctgtgcctgctcgaccagcagagcgggcaggtgatcctgcacaaccaggcactggagcagctgatcggcgacaccaccggcaacctgttggacgcactggtcggccgcctggtgcaacgcgttgacggccaggtacacgggcagctgttcgaggcgccgtccgcggacgagcacggtccatcccgctacctgcaatccatcgtggccgccgcgcgctaccagcggcgggcgatctgggtctgcgcggtgaccgatgtgaccgcacagacggaaacccagcagcgtctgctggatgcacggcgtcatgccgaacaggcccagcacgatgccgaggctgcggaccaggccaagacggccttcgtggcgatgatcagccatgaaatccgcacccctttgagcggcgtgctcggccatcttgaactgcttgcccgccagaccatgccggcggcggcgcatacgcatgtcacgcgcgcgcgcagcgcggccgatgtgctgcaggggctggtgaacgacaccctggacctttcccgtatcgaagccgggctgatgacgctggagccggcgcctttcgatccgcgtgcgctgctgcagcagaccgcgacactgttcgagccacaggccaccgcgaaaggcctgcgcctggagctgcacaccggcgatgcgctggggccagcctacgtggccgacgcaggccgcgtggcgcaggtgatcaacaacctggtgggcaatgcggtgaagttcacggcatcgggaatggtggcggtcagcgttgatgcctcgctgcggcccgatggcagcgagtggctgcacgtggaagtgcgcgataccggcccgggcatcgatgcggaggcgcaggccgtgttgttcaagccgttcgtgcaggtcggtgccggttcggcacggcagcacggcggcagcggcctggggctggccttgtgccaacgcttcgccgaactgctcggcggcacgctcggcgtgcgcagcaccccgggtgccggcagcgttttccacctggacattccggcacgccggaccaccgccgtggcaggcacgccgccacggccggcgcctgtcgagcgcgcgcatccctcgcgcggccacgcgttgttggtggatgacagcgtgatcagccgcgacgtgacgctggggcaactgcatgcgctgggttggcaggtcaccctcgcggccgacggcgaggaggcgtggcaacgctggcgcgagggccggttcgacatcgtgctgaccgatctgaacatgccacgcctggacggattcgggctggcccggaaactgcgtgcggatgactcctccatccccatcgtcgcgctcaccgccaatgcgatgcccgaggacgcgcagcgcgtgcgcgaggccggcatgtccacgctgctgctgaagccgctcgacctggcgtcgctggaggccgcgctgcatggattcgacctcgatcgctcggcacaggcacccttacctccggtggtgagcgaggcggttcagcggcagatgcgcgaggcgttcctgcagaccgcgcatcgcgactacgcggcgctgacccaggcgctggacagtgccgacgcaccggccatgatcgaccagctgcacagcttcgccggcgcgctggtatttctgggagaagcccaggcagcgcgcagctgccaacaggccgaacaggccctgcgcagcaccggcgcgacagatgcggcgtcgaaggcgatcgtcattgaggctatcgcgttgatcgcggcgagcatcgaacgtcaggttgccgcgcagcagcaggcatga

SEQ ID NO: 507651 - DNA, 921 bp, Stenotrophomonas maltophilia
atgagcaagcggctaatcggattcgtcacgctggcagcggtgctggcagtggcagccgttgcaatgtacggctaccggcagcagccagctgccgatgccacggcagaggaatccgggaacagtggcagccttgatgaaaggcccgaccagggaaggcagcttccggcgtcaggtgcggcggccgcgcagaggctggagcgggacaacaagatcccgccgggctcgtacaaggcggtgggccccaaagcctacgagatcgtaagaggcaatgagttccggcctcccggtgacgcgctcgcccacgtcaagcaactgatgctgcgctccgaatccggagatgccacggcaacctacgaaatctatcgaaccatcgagcagtgccagaccttcatctcggatcgcgctgacaagctggcggattcagccaccacggtcgggtccggcaactggttcctggagcgatcggaacgaatcctcaaagagtgcgagtcgctggctctggatcaggacatctatcacgccgattggctttcgaaggccgccgccatgggctcgcaggaagcgatgcgcgcttactcgcgatcgccggagaaagtcatcggttcgctcgatgacgcaatccgtgatcccgcggcgctcgaggcgtggaaggacaccgccaccggatatctgcgcgaactggaatcacaagggaacgtcaatgtcatcagcgacatggcgatggcctacacgtatggcggcatcgttcctgcggatcccgttgccgccctggcgtacacccgcgtcctcaaccggctggacccacgttttgccaccaccactgacattgccaaccatgagaaaaacctgagcagccaagagaaagagaaagcccgcatttcatcgaacgaaatcttcaagaactgttgcatcccacgataa

SEQ ID NO: 507652 - DNA, 132 bp, Stenotrophomonas maltophilia
atgtttcagctgctcgacggagcgggccagtcgcgccagcagttgcaggtcacgccgaagggggaggccacgctgtcattcctggacgagcacggggacgccgtgcgtgtgatctcggccgagcagctctga

SEQ ID NO: 507653 - DNA, 2472 bp, Stenotrophomonas maltophilia
atggccagtaacgttcaaacgacaacgatcacgatcggcggcgaggtgtccaagtcactgaaggacgccttctcctttgccaacgacggtatcaagcgcctcggcaccgaggtgaccctgctggaccgcaggctcgcgcgcatgagtacgaccagcaaggagtacgcccgcatgcgtacccaggtcgatgctctgcgtgcctcgcaggtggcgctggagagcatcgaagcaaagcgcgacgcgaacctggagaagcgcgggaagctcggctcggcatttggcgaggcacgcggcacgcttggcacggccgtcaccgcgctggccaagccggtcgagaacgcctccggcttcgcccgccagaaccagcagatcggcgtggcagccaacctcagccgcgcccaggtcagcgcactggggcaggccatcctggaacagtcgcgtgcaaccaaccagggcgccgacgcgctgcagcgctcgatcaggctgatggtcgacgccggcatggatgcgcagtcggcccaggccagcctcggtgctgtcggacggaccaccaccgtcaccggtgccagcatcgatgatgtggcccaggctgcggccgccctgcagcagtcgttcgatatcgatccctcgcgcatgcagaacgcgctggatgtgctggtggtcaacagccggcagggcggcctgggcctgaaggacatggccgcagtgctgcctaccctgggttcgtcgttcgaagcgatgaagctgcagggcacctcggcggccgccaccctcggcgcggccctgcaggccacgctggactcggccggcggcgccgacaaggccgccagcaacatgaagagcttcatgtccgaggtgctctcgccggacattcaggagaaggccaagaagagcctgaacctggatctgcgcaagatcatcggcgatgcacagaccagcggcggcaatcccttcgacgctgcgatgcagggaatcatccaggcgaccgcgggcgaccagaagaagatcggcaccctgttcagcgatgcacaggcgaagaacttcgtccagccgatgatcgagaactgggatacctacatccgtgtccgcgacaaggccttgaatggatcggcgggtaccaccgatgcggcctatgccgatgcgatgcagaccgatccgcagaagatcgaaggtgccaagatcgccgtggacaacctgtccaaggcctttggtgcggcactgctgcccgcggtgggcgaggccgcggtcaagctgaccgagctgttgaacggggttacctcgttcgtgcaggaaaacccgaagctgatcgccaacaccacgcagatcgtggtcggcatgctgggcatgcgcacggcggtgctcggcgctcgctacgcctggaccttcctgcagggcccgatcctgggcgtgcagaaggccttccagctgttccggggtggcagcctgctggcacagatggggcgcttcgggccgatggccatgcgcctggcatcgggcttccgcatcgtcgccactgccgtggccgccatcggtggtggtccgatcacgatcgccatcgcggcaatcaccgcaggcgccatcctggtgcgcaagtactgggagccgatcaaggcattcctgggcggcgtctgggagggcctgagcggtgcaggcaccgcagcgatgggtgaactgatgcgtgcggttgaaccgctgcgccccgcctgggaagtcatgagcgggttgatcggccaggcctgggactggctgtcgaagatgcttgcacctgcacagtacaccggcaacgaactgtcgcgcgttgcccagatcggcagcttcctcggtaccgttctgatggaaggcctgagaatgaacatccagctcatcagcggcctggtgcagtacgtcgcctggatgggcaacgcgtacacgaccgtcgccagtgggatcggaatcggaatgagcaagatgtggacggcgatcaagtccggtgccgaatccctgttcgactggctcatcccgaagctggatttcctcatgccctacgtcgagaagctgatggggttcgtcgaagggggcattggcaaggtcagtgcgctggtcggcaaaggcctggacttcggcaaggaggtgcttgccggtggtgcggaagcgatcggcaacggcatggtggggtacaccaacatgcgggccggcggccgaggtggcctggatgacgccgtgggcctggtcggcgacgtcgccacgttggacgcgccgggggcgcgcaagcgttggggcggcatcagcgaggccgctcgcggtcgcaccgcacccgacatgccatcgcccactacgcgcggcgtcaccaccgtgcagcagcaacagaccaacaacatcaccatccaccagcaaccgggtgaatccagcgaatcggtggcgcgtcgcactgccgacgaactgcagcgtcgcaacgcggttgctgcccgtggtggcctggcagacaggaactaa

SEQ ID NO: 507654 - DNA, 555 bp, Stenotrophomonas maltophilia
atggcgaccaactcctcctcttccattctcgacgcactgcaccccgccatcgaagccgcgatccgcgcccgcttcccggacttcgcaaccgtcgagttctatcgcgaacccggtgctgaaggcctggccacacccgcctgcctgctggcaatgacccgctgcgatcgcagcaaggacaaggacgatggcagcgggcagatgcaggcattgctgcgcttcgaggcacgcgtcgtcgtcgctgccgccgctatcgacgcggcactgcagctgcgcaaggccgccgtcgcgctcgccggctggctgcaccagctcggccggttccccggcgcggccagcggcgcgatcgatgtgatcgccgcactgcccgaagacacggcggcggcgcagccaggccttcgcacctggctggtggagtggtcattgccggtcgctttgggcagcaacgcctgggaggagaccggaggcgcagttccccaggccttctacagcttcgtaccggagatcggtcgtgatcacgaagcacgctaccagcccattgaaggagcagcaccatga

SEQ ID NO: 507655 - DNA, 306 bp, Stenotrophomonas maltophilia
atgctgagttcgtgcgcatctggcgcgaagccaacgccggtcgcgccctgtcgcgttgatctcagcatcgccccggcgcagctgcgtgcgccggacgagctgccggacctgcaggcggccaacgacgatgcgctgctacgcaatcacgttgccgtcgcgcggcagtaccacgcactggccgaccagctgcgtgccctgctgtgcagcctcggcagccagcaggggatcaccctcaacggtacagcgccaatggcgcctgcagagtgcacagccaccggcacggccaccgcgcgacagcagcgctga

SEQ ID NO: 507656 - DNA, 378 bp, Stenotrophomonas maltophilia
gtgacgcccgtcgccctgcgtttccgcatgggcctgctggtcttcgccggtacccacgcaggctgtgcctggctggggtggacgctgcgcgaccgcagcgcggaccttgccatcgccaccgtccagaccgcacagcaggcatcgcgcgctgaggcggcgcaggccgcacatcagcgggacctcggcaacgcccgcgcaggtgcgcaggccgaatcgcagcgcctggccgcgcaggccgaacgcacccggcaattccaaaccctgcaacaggacatcgagacccatgccaagactcctggccgtgaccgcggcgatgctgatgctgagttcgtgcgcatctggcgcgaagccaacgccggtcgcgccctgtcgcgttga

SEQ ID NO: 507657 - DNA, 639 bp, Stenotrophomonas maltophilia
atgattcccgcgtccctcgacagcggccatcgcatgatcgccgacacgctggctgcgttccgtgccgggcctgccctggccagcactgcgctttgcgcacgcccacacgcgggtccgccgctctacatcggcatcgccggcgccaagcgtgcgggcaaggacaccctcgccagcgggctggcgtcggcactggcactgccctgcgacagcttcgccgcaccgctgcgccaattcgtcgcctccctcctcgggctctccctgcgtgaactggacagccgcaaggaggacaccatcgactggctggccgaacttactcctcgtcacctgatgcagaccgcgggtaccgaatggggccgcgaccgcgtccatcccgagctgtgggtacgctcgctgttcgcgcgcctgcctgcgggaggcctggtgcccgacgtccgcttcagcaatgaagcccgcgcgatccgtcgccgcggtggtgtcgtgatccgcgtcagccgcccgggccatggaggccatgacacccacgccagcgagcagccactgcccgatgaactggtcgacatcgaggtaagcaacgacggcagccgggccgatctggtacgcaggacgctggaccagctgctgtcgcgcggcgtgatctga

SEQ ID NO: 507658 - DNA, 276 bp, Stenotrophomonas maltophilia
atgccacgcacccatgatggccgcgaagtcggcagcgacagcgccgagtggcgcctcgactgcgaggcacggcgcctgctgcaactggcgggctaccgctgcatcgacgctcaagggcggtgcagaacgatcagcccgcgccggcatcgccagcagtacctggcacgcgtacaggccacccggggtcctgtggagcgcgagcgattggcgtcactggcggtacggcaatggatcgccaatccaccctcccagcccggcgaggacacaagtagatga

SEQ ID NO: 507659 - DNA, 2337 bp, Stenotrophomonas maltophilia
atgtacacaccgcacccaacgcaggacgtcgtcccggcgttcctgcaggccatgcatgcacacggcatcgtgccggacgcacgcggacgcgatgcactcaacgccgacggcacgctggtgcgcttccacgtggagggtgaccgtcgtggcacccgcaatggctgggcggtcctgttcggcgacaacgtgcccgccggcgagttcggcagctggcgtaccggtacccgtcacgcctggtgcgcgcaatcaccggccacgctgagtcccaccgagcagcgcgcgatccggcagcgccaggaatcggcccggaccgaacgggagcggcaacaacgcgagcgcgaggatgccgcagccaaggccgccaacgtactgtggcagcgggccatgcccgccgacgacagccacccctatcttgcccggaagggcgtgcacgctcatggcctgcgcgtggcagcgtggccggtacgcaacagcgacgggctggtgttccgccacatcgagaatgcgctgttggtgccggtggtgaacactgccggacgcatcgtctccctgcaggcgatccttccccgtaccgacccggcactggggcgcgacaaggacttcctggccggtggccgcaagcagggctgcttccatgtcatcggcaagccattgcccgggcatcccatcgccattgccgagggctatgccaccgcggcatcgatccatcaggccaccggctggtgcgtcgtggtcgcgtgggatgcgggcaacctgacggccgtggcccgtgcctggcgcaacgccgtacccgatgcctcgttcgtgctctgcgcggataacgaccaatggacgcggcaaccactggagaaccctggtgtcagccaggccacgcaggctgcggtagacatcggtgctcgggtggtctggccggaattcgccatcgtgcacggcgacgatgatcgccccaccgacttcaacgacctgcatcggcgtgaaggcctggaagcactgcgcgcgcagctgcttgccgacccaccgtgcgcgccgggcgaagtccccgccgagagcggcacgcgctccccggccgccgcgagctaccaggttcccggcaacctctccgccttcgataccttcactccgttccccgacagcagcgcacgcggccgcccgttgccgaccgcgcgcaatctcgccgagctgtgccgccgcaccggcgttacggtgcgttacaacgtcatccgcaaggacctggagatcctggtgccggacctccagtccacgatcgacaatgccaaggaggttgccgccggcgaagtgatggactgcatgcaccgtgccggcatggccaccgccagcttcgagaccaacctgtgccaggtggccgaagccaatccctacaatcccgttgccagctggatcacttcgcagccctgggatggccactcccgcctccaggcgttcttcgacaccgtgcaggaagcccagcccacgcgcatggccgatggccgcatcctgaaggaggtgctgatgcggcgctggctgatctccggcgtggcggccgcctttgaaccggatggcgtggtcgcgcgtggtgtactgaccttcgtctccaggcagaatctgggcaagacgcgctgggcacggcagctggcaccggccgaactgcagctgatcgccgatggcgtggtactcgaccccaccaacaaggacagcatcaagcaggtcatctccaagtggatcgtggagctgggtgaggtcgacgccaccttccgccgcactgatatcgccgcgctgaaatcattcatctcgcgcagccacgatgaaatccgccggccttacgcacgcaccgaatcgcgctatgcgcggcgcaccatcctgttcgccagtgtcaacgacgagcgcttcctgcgtgacgcgaccggcaacagccgctggtggaccgtgcatgccgtggcgttgggtgaaccggcgcggatcgacatgcagcaggtgtgggccgaagcccatgcgctgtaccgcaatggcgagagctggcacctgtccggcgaagagctggatgcgctcaatgccaccaacagcgagcacgaacccatctcgcctatcgccgagctgatcgatcgccacttcgactggtccctccccgccgagcattggagcacgcactaccgtgccaccgagatcgtcatcgcggtgggcatcgacagaccgaaccggcgcgaggtcaacgaggccgccgcctacgtggtgaagcggcatggcgtgcgcacccgcgtggtgggcaaggaacgggcaaaggtgtggctgatgccaccgcgcagccgcagcctgtccgaacacatcgcaggaccgttctga

SEQ ID NO: 507660 - DNA, 333 bp, Stenotrophomonas maltophilia
atgcagcgcctgttcgtgatgtttcccgaccgtggcccgggcctcggcctgctgtggctgcggctgtgcgttgcggccgctctttgcgggcccgatatgccaagcggctggtggtcggccttgtacctgctggccgtagcgatgctcgcacttggtgtgctgacaccactggcggcagtgatggcggccgcgggtctgtccacgctgcccgggccttggccactggcgctgctgcctctggccctgctggtgctggggccgggcgcctattcgctggacgcacggctgttcggtcgccgcgtgatcggccgccggcctcccccattcgggtag

SEQ ID NO: 507661 - DNA, 387 bp, Stenotrophomonas maltophilia
atgttgaatgcgtgttggagtccgctgttgtgcctgctgctggccgcgggcgcgcacgctcagaccaacgtctacaaatgcgtggacgggccgcatccggtctaccagcagacgccgtgccaggggcatgcggaatggcgctgggaggtgccggcggagccggcctcaacgggtgcaaccgtggccaaggcggcgagcccagcctcaagccgtccgcgtgtggtacggcaggcgcgtgcgcgggctgcactgatatcgatcagcgcggatcctgccgcctgtgagcgcgcgcggcagcaacgcgcaaaggtgctggccaatggcaagcgcatggacttcgtgcagcgccggcaactggacgatgccgtgcatgaggcgtgccgctga

SEQ ID NO: 507662 - DNA, 342 bp, Stenotrophomonas maltophilia
atggcagacgatgatgtggttgagagcattctttcatcgatcgagctgcgaaacgttattgaagcgaagtcttcaatgaccttgatggaatttgcatcatttctcgagacgcggggcttgagaggtgctcacgctcatatcaatcatgcaactgcattggcgctattggggaagacggatctagcgctgaagttgctgaaggaactagtcccggcgttggatgatcatgatctgaaactttgcgattctctaatagtggccctgaatcttggagttgaggcggtcaaatcgatgctggacgtggtgaaggagaagaatgttaagaagctgggcggcgcctga

SEQ ID NO: 507663 - DNA, 912 bp, Stenotrophomonas maltophilia
atgccaaggctccacaccaccgaatcgcttcaggccggctccgacgccttgtttgcgatcttccagtcctcgcgcatgcacggcggcgacatcacccgccacgtcgtgcagcccggtggggctcgcatcattgccgaggggcgcggctgcttccatttcatcgaacagggcacggcacgcctgcatgcggatgccacggtggtgccactgcagaccggcgagctgctgttgatgccgcatggcaggacacatcgcatcgactgtgccggcgacgccccgcaacctgcccatctgaccacggcgtcctttggatttgatggcccaggcagccagctgctgcttgatgccctgcccggctggctgcatgttcccggggttgaccggatgccgaacggatttcccgccagctcagccgattgggtggcggtaaccctgggcgcaatccaggttgaagcggcccggcccacgctgggtagtgggctgatgctgtcacgcctgctcgacctgttgtttgtctggacgctgcgctactggctgggaacctccagccctcacaactgccagcgtctgcacgcactggccgacccattgatcgggcgggcactggcgttgatgcaggcacaccccgcacaggcatggacggtcgagtctctggcggcaagcctgaatcagtcccgctcgaacttcgcgcagcggttcagcctggccaccggcatgtcaccgatgcgttatctcgctggatcgcgattgcagctggccgcggagctgctgcgcagcggaaaccggcgggtttcgcagatcgccggagacgtcgggtatctctccgaaccagcattcagccgtgcgttccgccgtgctttcggcatgagcccgaatgcctggcgccaacagatggcagcgtcgcgcgaatga

SEQ ID NO: 507664 - DNA, 1905 bp, Stenotrophomonas maltophilia
atgcttgccagttacatctacctggagggcatcttcgccttgggcggatgccttgttgccttggctggaggtgtctcccaacgcgatcccgcccaacaggtcattgtcggcatgacaggccttgtggcctgctcgcttctactgtggatggcttccttgcttggcgtgggaaccatgcaagcactggccgtgctcaccgcgctggtactgggcggggcgttgatcctgcggcgtggaccgtggctgggaggaatgctggtttctggcgttcgacgtggagctgggcgtacaccagcagtcacggccttgattgcgactttgacgctggtgctttttgcgaaggcgtctgtttcctcggattttgattccaactggtatggcctgtcagccgaccgcgcattgatcgcaagtggcaacatattccgtagcgaaggtcttgtagcaccagtccactactatccaaaactgattgagctgctccaggtccccttggcggccatcggcagcattcctgcaatcatcggcttgagtataggctgctggctggccaccctcggggttgcgtcacagatcctgcgtgagctgcgcgtaatgcgtgtcttgcgtccttacattgtcgcgctgcttgcaacgctacctgcgttcgccaacatttcaatcacggccaagggagacgccttggcggccttgctgcttgccgtctcgctgttggctgtgcttcgactcggcaacaaaggcggtgccggttggctttggattgcggcggcttcgtccctgttggcgagtcaggccaggctgtccaacattccgtacacgctggccatcggcctgctggcgattcccgctttcatccgttggcggagccagcgctttcaccggaggcagccgcctgctgcgattgccggaggggcgttgcttggcgcgatagtgctggtggggttgatcaccgcgcgaacatggtggctggcgggggtgcctattgttgccccgaatgccgcgcttgatctctttgccgcctggggcatgccgctgcagtcacccgtgggtcgtctcccgaccagtgatctgcttgtttatctgcctcccggaaaggccctgttggcgtacctgttcgatccgcggcagtatccgctgctgcagatattgtggacgggcaatgcatggcttggcctgccattggtggcgatgatcctcggctggcggcgatcggtcgcctggcggcgcgctgttcccgtgcttctgctggggctgctgttcttcccgatgctcctgggaaatcgctacatcgaagcgtcgggtgcggatggaaactacttcatcacccccttgctgagcctgttgatgtttgctggcttccttcttcagcaatcactgtggaaatggcagtcctgccctggcgtgagccaagtcgtgcgtgccttggttttctcgatcgcggtggcatctgcgttgatgtgtcttgtgacgggcgcatgggggcctggtacccgcgccttcgatacacgtcttgatcgccccatgctggatacggcttcgcggcgtgcggcagcctggcgcgacatcggcctggaaaggatggcccagcggctttcccaggaggcgccgcgcacgcgtgctgtgggggatgtgggcggggagggcttctggttgccagtccggtacgagcccatcgacatcattgcgctgacacgccccggcctggttgataccccggagcacacgctggaatttctggagcacattgctgctgaatacctcatcgtccgctcacccggtgcggcaggtggccaggagcgggataggattctgcgcactgcggttgacactcttgctgcggacagccgggcaacacgtgtcatgaccgaagggccttacgaactctggagggtaagcccgaagcgctga

SEQ ID NO: 507665 - DNA, 777 bp, Stenotrophomonas maltophilia
gtgaaatcgatcaggaccgctttgctcgttatctcgttgtccagtccgttccacttggcttacgcccagtccccagtgcaaggcggcggcgcctcggtgccggcaaacctctacaagggatcagcagacagcattcttccaaacagcttcagctacgccgtaacgggctccggcaaagagaagaaagcgtttctcagcaatgatcccagtctcttcgggaacatcggcacagtacattttgcggcaggcgattccgttcttacggcgaccgagttgtccgactacaccaacgcctacaacgtacccacaaccaaccaaaaatatggagcgctcatccagattcccacggcgctcgtaccagtcgtgatccccttcaacaagcccggcgcgaagcttgacctgtccatcaacgatatctgtggtgtcttctcaagcaagatagcggactggtctcaactatcatcgggtttgtcgtcaggtcagagtggcccgatcactgtggtttaccgctcggagagcagcggtagcactgaagttctcacgcgttttctgtctgcggcatgcaagtcggttgatttgttcgggactagtctcaaacagcaaagcaactggagtggatcggcgccgggcttctcgatccagacgagcttcgccggcttgttctcaaacaacacggcgccctcaaactttctccctgccgtggcaacgggagacacctcgctgcttgataccgtcaattctggtaatggccgcattggatacactggcccagactga

SEQ ID NO: 507666 - DNA, 189 bp, Stenotrophomonas maltophilia
atggaagatgagcgccataaggctcaggtggtctcgatggaggccttcaaggcagcccggatgggaaagatcccaccggagctgctggatatgtatgacgagctgacgcgcgatcaggatgcgttggcgcagatctcgatcattctagtggcggcgctgcggagacgattgggcctgccggacctgtaa

SEQ ID NO: 507667 - DNA, 1989 bp, Stenotrophomonas maltophilia
atgactgcgacggcctccaatcctgacgattcgattgaccccacctactccggctctagcactgagcacagtgcaaaactgccgggtgaccgcgcttcgattacccggaccgcagacggcgctgtaaaggttgccggacgtagtatcgagaagactcaggcagaggtggctcttgcaggcgccacgttgaagaaggtgacagaggtaacgggtacggcaggcgagaaccgtatcgagcgcgaacgcatcacccagttcagccttgaggcgtcggttgcagttggcgcacgcgccgaagtcaaaggcaaagagcgtctggctggtatcgagcttgaagccggatcgcaggtgggtgcccgtgtgcgctatcgcgtctccctgcctgacaccaccgcatctgaaaccggaaaatccactcctgcaacggctgagcaagctgccagagtgaaccccttcaacccgaccacgctgccgattggtggccgggtgttgctggatagccagcaattccagcagagtgagttgaaagttgcgttccgccacatcgcaacggtgaaccagctcactgaagcggagggggtcggtgtcgcgatcagccgtttggacgaacaccatgtccgggtcgttacggggcccaacaaggcgatcgaatccctgcagggcgtgggcgtcgatctaggcattgcgcgcgtgatggccggtcgccaggatgcgcttggacagtccaaactgcagaccgccgactttgacctgcgcgacccggatgcgcgtgcggcctacatccgaatgctcgcaacaggccaggtggccgatcagacgccgggcgtgagcaacgtggctcagctggagcggttggactacagctcccagcagcggctgcaagtgggactggtcaatgacctggtgagtgccgatatcgcggggcgccgcaatactggcacggcgatccagagcacggctcccgacggcaaggtcacagtcacccagcaattgagctatgacgacaacgtgaagctgacgattgtgcgcgccttcatccgtgacggagaaacgctccgcgaggacgtggatgcgcgcaggtatcagttccttgtcgacacggatgtgccgccccccggctttatggacaaggtggttggtggccgaaacgaagccgttgaggagcgcaacatcgccaccgggttgaacctggctttaactggatcgaccgagggcccgggacagatccgtcccggtgaaaaagtctcggtcagcttcagcgaagcgcagatgcaggaattcatgcagcgaacccagaagatggtcgagcgccccctcggacatctcgatccattggcaggtatcgctcgcgctggctatggcgaccagccgcagcgcgatggtcttgagttcgcaatcgggatagcccgtagcctgcagggtaatgccgatcagttcggcaagcatctacagcgtgtggcgcaggacggtgacccgcgtgggcctgtccacccgatcaatgcgcaactcacgcgctcagacggcacgctgctcaatgcgccgattcaatcgcagcagcaggctccggcccccctttcaccggctggccgcaccgccaccctcgatccgcgccattcggaccacgaggcaaatgccatctacaagcagaatttccaagcggcagaaagactggcatgcacccagggcggattgccggatcaggcagttgagcgtttggcgatggccggaaccatcgcagcccagcgggctgggttgagtcaggtggatcaccttgtggtcggaaatcgtggccaagcttttgtcgtgcagggggcactcgactccccggcgcatctgcgggcgggtttcgactatcagacggcgttgaatacaccgatcgaggacagtttctccagattggaggtggcctctgaatcgcgtgcacagagcgatctgcgtactcaagagcacgagcatgagacgcgactgatggcggcgcgaggactatga

SEQ ID NO: 507668 - DNA, 498 bp, Stenotrophomonas maltophilia
atgcttatccggcaactcagcgctgaagacgccgagattctctggcaagcgcggttgcaggcgctttgcgagtcgcctgcggcgttcctgtccacgctggccgaggcgcagaatgactcggcggaggtgatgcgcgcccagcttgctgatcccggtacgcgctacttcggcgctttcatcgacggcatgcttgcgggcttcctgcgttatgtacgcccgatgcgaatggcgcgacggcatacggcagaagtgcacagtgtccacgtgggcaccgaccatcgtggccagggtgtcgcccgccagcttcttcttgcagcgttcgcggctgcgcgcgcggaaggcattgaatcgctctccctcactgtgctggcggacaatactgccgcgcgcgcgctgtatgaatcgctgggcttcagcgtaattggcacagagccgcgggcagtcaaacgcgcgggcagctacgcggatatcgtctcgtactggatctcgctgcactga

SEQ ID NO: 507669 - DNA, 414 bp, Stenotrophomonas maltophilia
atgcatctgtacagcaggcgtcgaaccaccgccggcttcaccctgatcgagctgatgatcaccgtggccgtggtcgccgttcttgctgccatcgcgttgccttcgtaccaggcctatgtgcgcaaggccaatcgtgcccaggccaaggccgatctggtcgagctggcgcagatgctggagcggcggcataccgtggagaacacctacgcgggcatgacgctgccgttctcgcaatcgccacgggacggtgccgccagatacacgctttcctacgtgggaacgccgaatggcacctcctttaccctccaggcggcaccgaccgagatccagaagaaggacgactgcggcacactgaccctggaccaggccggacgaaagacgccgaatgccagcaaggggcccggatgctggtga

SEQ ID NO: 507670 - DNA, 4680 bp, Stenotrophomonas maltophilia
atgaacagcgagcgccgtttccttcgacttcgttcctccacctggctgcgggccggtgtgggtgttgctgcgcttgccggccttgccgcgttgatcattccgctgcaggctgcgcttggtgactacgacatcgcgcaggagccgctgtacagcaagcagagccagccgccattgatgatgatggtgatgtcgcgtgacgagcagctgttcaacaaggcctacagcgattacagcgacctggacggggacggggtgctggacaccacctaccaggacaagttcgattactcaggctacttcgattacaacctctgttactcgtacaacagcggtgtcttcaaggccagtgcagaggcaaagggcgccaacaagcacagctgcagcggcgcgtggtcgggcaacttcctcaactgggtgacgatgagtcgcctggatgtgatgcgctacgtgctgtacggcggccagcgcttcaccgatacgaaggaaaagacggtgttggagcgggcgccgatccccagcgatctgcatgcgtgggtcaaggtctacagtggatcggatcttcgcgagttcgccaaccttgctggaagcgggacaaccttcagcttctgcagtgtgacccgttctgcaaccggggcgccgctgatgcgcgtggccgaaggtgcactgggcgagtgggcctcgacagccagcaaccagtgcgataccggacgagccagcaacgccgatggctacgcggacattccccgctcagccacggactacaccgtgcgcgtggaagtgtgtgatgccagctcaacggtgcgtgagagtttctgccggaaatacaacgatggcatcaccgaccgtttcaagccggccgggctgctgcagacctacggtgagagcgggcgactgcgctttgggctcgtgacgggaacctacgccaatccgcgggatggcggtgtcctgcggcggaacatcggcaagatcgcgggcaacgggacgaagttctgcggcgtgggtgatgaaatcgacctgtctacggggcagttctgctacctgaatctgacgggaaacgccaaggccgacgatgagggcgtgatcaacgcgatttcaagcttccgtctggacaactggaactggtccaacaactggaatgactgcaacacctacggcattctcaatcgccaggaccagaagggaaatggcaatctgaccgatccggggaccggaggccagaagtgcagtgcctggggcaatccattggcggaaatgtatgcggaggcgctgcgctacatcactgcgggttccaaggtctatagtgacagcggagatctcagtgggctgccaaccaatatcagctggaaggatccctaccgcctgcccgcagaaggtggcaactcttattgtgcgacctgcaatatcctggtgctatcgtcgggcctgccgtcctttgacagcgacaacgtcggttccgtgaccggccttgcgtctgcggtgtccgcgacggatgcagtcggcacggccgaaggaatcgccggcaagagctacatgatcggtcgcgtgggtgatacaccgcgcggtgcttcgcttgatacccacagtgatatctgccagggccagacaatcggtagcctcagcaaggcgcgcggcatctgcccggacattccctccatggaaggcagcttcctgatggcggggctggccaaggcggccgcggagaccgatctgcgtcccaacgtgcagaacaagccaagcacgtacaaggtcaccgccaccacctacgccgttgccatggcggaaaatctcccgcagttcgaaattgcggtgggcaacagcaagatcggactggccccgctctgccaggcgaacaacaccggcggcgcaacggcaacaagtgctggctggcgcagctgcttcctgggctcggtcggcattggcaccaagcaggccaacgacactggcgggaagctggtctatggccgtccctaccggacagatgcgaagtccggcagcttctcgctggtgtgggaagactcgctgtggggcaatgaccatgacaacgacgtcgttgccatgctgagctactgcgtgggcgccgcgtgcaacgataccggcaccttcaacaacatctgctggcgtgctgatgcgaaagtgagcaacagtgccgcgggcaatacgcgactgtgcgactacacaactgcaaacaaaggggtggattggatcggcacgactttggccggcaaggtcgaggaggatgaagtgctcatccggatcgagaacctgtcggcgtacgctggcaacgcaatgctgacgggctacacgatcacagggtcaaatgcctccagcaccgtgcaacgtctggcgctgcgtccgggcaatagcaatggctccgtgctgaccagcacaaacaacttcccgagcaactggcagaggccggtagtcatcaagtacaaggcctctaccactgctgcgggccagctgcagagcccgctgtggtatgccgccaagtacggtgtcccggccggtaagaagtgggacagcaagaagccaggggtgccggataactacttcctggcacgcaatccgaccaaactgaaggaggcgctggaggcgatcttcaacagcgcagcggaaggtgatgcgccggtcggtggtagcggcagtggcgcgcgcatttcgaccaactcgttcaccgtatcgtcccattacagcgtgccctctggcactgtggactggaccggtgatgtcattgccacccaggtcgacggccagggtgcggacggagccgtgctgtggaaggcatccagcaacatcggcagtgccacgcgccgcatctacatggcgacgtccccgaccaagaccgcgtccgatggcacggtgaccccggtcaatgcgaacgagttcctggccaccaatctgccgggcaatgatgagcgggcgaagctgtcggcattgggattcagtgactcgattcctgcatggttcgcgaatcagacctcgaccaccctggtcaactatctgcgcggcgcggcggtgagcgggctccgttcgcgtacttcgccgttgggtgacatcgtcaattccaccaccgagatcgtctccaaaacggatgacttcggctatgcaggctgggcgaggcagtcgacagtcaagtggaaggcgacgctgggcacgtcttatgacgtcttcctgaaagcgaagcgcgcgacatcggggccgccgacgatgatctatgttggcgccaatgacggcatggtgcatggtttcaacggttcgaatggagcatccggcggtaccgaagaactggccttcattccgtcagctgccatgcagcacattgccgagctggccaaccccaagtatgggcatcgctactacgtggatggcccactgacgtcgtccgacgtctactacggggatgcctggaacacggtgctggtgggcaccacgggtggtggtggttccagcaaggcgcccaatgcgacgagcgtaggcaatggctccgtgttcgcgctgaatgtcagcgatccgaccgcgttcggtgcatcgagtgtgttgtgggaagtctcggggaagacagagtcggatctcgggtttgtgctgggcaagccggctgtggtggcggtaaagggcgccgatgccaacgcttcgccacgcttcgttgcgatcttcggcaatggcgtcaactccaccagcggcaaggcagcgctgttcgtggttgatatccagaccggcaaggtgctcaagcggctttcgccggtaggtgccaagtacgcggcacgcaatggcctgatcaacatcgccacggtggcgttgaagaacaatgatggcatcaccgacacggtgtatggcggtgacatgcagggcaatatctggaagttcgatctttccagcaccgatccgaccgattggaacatcgccctgtctggaacgccgctgttcaccgctacgcgcaatagcagcccgcagccgatcatgagcggcatcgagatcagcacgggtccgggcggcggcatcagtctgttcttcggtaccggccagtatttcgccgccgatgacaatgcggtcagcagcacctcgccagtgcagtcgctgtatggcatctgggataaccttgccagtgcggttggcacgcgcgacaacctggtacagcaggtgatcactaccggcacatcggccagcggctatcaattgcgtgatgtcacccgcaatgcggtgaactacggttcggcccgcggctggtatgtggacctgcaggctggatcggcagtcgaaggcgaacgcttcgtcggcaacccccgtgtgcagaacggcatcgtgttcttcacgtcctatgtgccaggtaccgccatctgcggcagcggcggtggcgtgaactggctgtacggtctcaatctgctgaccggtggtggccagatgtccggcttgagcccaaccatcggcggagaagcgctgtgcaccggcaactgcggtggtgttgccctgaccaagaaaggtgacctcagccaagggccgccagtgaaggacaccaacatctttgtgcccaagcttacgccctgcaagcctggcgacacggggtgcacggtcgacaagatgctgcaggccagccagtgtacgttcgtgctgcgtgcggccggcgctgatccgctttacatgccacggccctgtgggcggcaatcgtggcggcagatccgttga

SEQ ID NO: 507671 - DNA, 492 bp, Stenotrophomonas maltophilia
atgcgtacccatcccgcccgccgccattctctgcattcaccgcgttcccagcgcggcgcggtgctgtacgtcgtgctgatcatgctggtgctgatggccctgctgggcatcgccggcatgcaggtcacaagcatgcaggaacggatggctgccaactatctgcgcagcaacgttgccttccagaacgctgaggccgacgcccggcagaccgagaaatccatcgagaaggcgctggctgacgggggcatcttcaaggccagccaggaggaatgcagtccctcctacgatccgcagacgtgggccgatggtctcagtgagaccaagtccacctatacgcgtcgcatcgacaagtgctttgcagcgtccagccggcgcaccggcggccgacagaacgaagaaaccgggaacatctaccaggtcacggcgcttgccagtgacgatccctccaatgcgtccgccagtgcggtcatcgatacgatcttcatcccatga

SEQ ID NO: 507672 - DNA, 1182 bp, Stenotrophomonas maltophilia
atgaccagaatgcgctcccgccaaacgatgagtggcctgtcgctgatcgagttgatgatcgccctgaccatcggcctgatcatcatgctgggcgtggtccaggtgttcgccgcttcacgcacggcctaccagctgtctgaagggctggcgcgggtccaggagaacagccgtttcgcgatggattccctgcaacgcgaactgcgcatggcgggacacttcggctgcgtgaacgatcaggcgcatgatccgcagggcaccttggcaaccaccttcgctgcgggaggccaccccgcgctggactttgcgcggtcgatccagggctacgaagcaacgaataccaagccgggcgacgcggtgacgttggcggcaacgccgtcaacggggggcgacaagtactccccggcgttgccgagtgagttcgccgcggccatcaagaaccgggtcgacggcagcgatatcgtcgctctgcgctatctggtgcccaccggtgtgccggtcacggcggtagccggtacggttgcccagccggttttcagctttgatcccaaacgtcttgccgtgcttgatagcggagttaccgacccggggctgttcggtgtggccgactgcatttccgccacggtcttccaggctcgtgcgatcgatgcaaaggccggcaccgtgacggtgggcaccgcacccaacaacgacgtggccatcgcccgcaactaccagcccggccaggcggtgctgtatcgcgccgagacgtcgatcctgtacgtgggctacgacgctacgaccaagcaatcgtcgctgtatcgccttcgattcaccgccaagcccggtgctgccttggtcgcgggaccagcagaggcgctggtcgagggcgtggagaacatgcaattgctgtatggccaggatcacggtctgagcacggtgtcgccgaccggctacattgatcgccagggtaccgcgaccgatgttcaggcctccatcgtgccggcctcgcgtggctggcagcgcgtgggcacggtgcaactggggctggtggtgtccagtccagacccggccgcatctgtccaggccagttcaagtacgccgctgaccgcgctcggcgtgacctacaccgcgccttctgacggccgcatgcgcgccgcctaccagagcacgatcgctctgcgcaatcgcctgtatggcaactga

SEQ ID NO: 507673 - DNA, 471 bp, Stenotrophomonas maltophilia
atgagaaagatcggcttccagccgcaccgtacggcgcagggcggtttcaccctgatcgaggtcatgatcgcgatcctggtgatgggtatcggcctgctgggcttcgcgctgctgcagacgatgaatgtgcggttcgtccagagcgcgaactaccgcacccaggccaccaacctggggtacgaactgcttgatcagatccgggctaaccggatcaacgcgctcagctatgccggtacctatgctgctaccaccggcaagggtgactgcgcgccgtccattggcaaggatatcggcaaggatgacttcacccgcgactggcgctgccgcctgggccgcgcactgggtgactcggcatccggaacggtaaccgtcaatgacggccgggtacgggtgtcggtcagttggggcgatgagcgttggaatcccgattcgaaggctgacaccacctttgctgcggagagcctgctgtga

SEQ ID NO: 507674 - DNA, 516 bp, Stenotrophomonas maltophilia
atgtctttgcgccggcaaaacggctttacgctggttgagttgatggtcacggttgccgtcctggcgatcctgagcaccatcgcgtatcccagcttccagagtacgatccgctcaaatcgtgtggccacgacgaccaacgaactgatcgcgtcgctggcacttgcccgttccgaggcaataaagaacacgcgtggcggggctgtatgcgcatccacagcgggcaaagaatgtgatggcagcagctgggccgacggctggatggtctgggaggatcgcaacgggaacgggtcgcttgattccggtgagaacgtgctgcgctacagcgaaggtcgcccaacgatgaagtccgcaaccgaaacgttgaccatcggcttcgatggccgtggccgcaatcgcgccaacgcggaagtggatgtgacactgcgccctgaaaagtgtggcgaccagcccctgcagcgaacgctgcgcatatcgcctacgggacaggtgaggctgttgaaggagagttgctcatga

SEQ ID NO: 507675 - DNA, 297 bp, Stenotrophomonas maltophilia
gtgaagcgtgccgccgcaggggcgctgacgctgctcctgctggcgggttgccagagtgatccggcgctgcgcagcacccggatcggcccggcccagtaccagctggtggttgatcgctgccatgtgatcgaccgggcgcagcttgagcaggatctgcaggccctggccacgcggacgtgcccgcgcggggcagggaggctgcagaacctgcagtctcatcccagccgacagggcagcctgttcggcgaatgcctgcggcgcggtgcgctgcaggcgaaggtccactgtcagccctga

SEQ ID NO: 507676 - DNA, 507 bp, Stenotrophomonas maltophilia
atggaccgcgtaccccagcttctggaccaggacgaatccatgcggctggaggtcagtacgctggccgaagggcagggcgtcccgttgtcgttcggtcacgcctatctggcggtactggtatgcgtctcggggcgcgcgcgctttgcactgaattttcgtgaagttgcggtgcagcgtcatgatgtgctggtgctggcagaggacacgctggcgctgctgcggcatcgctcgcgcggcttcctggcgatggtctgcctgatgcccaaagcgctggcatcggaggtggcctatgtgttgcccaatgcgctgttccagttcctgcacgaacagccgcactgccggccatcaccgttggatgtgccgttgctgcagggatggttgcagctgatgatggacgcgcagcacaacggtggacggcatcgccacgtgatgctgcgcaatctgctgcagagtttcttcctgaagatggccacgttgctgccgaagcagaagcgggcgcccgcgtag

SEQ ID NO: 507677 - DNA, 474 bp, Stenotrophomonas maltophilia
atgaatgtcatggaaccgaaccttcgccccgtccagccttcgaactacgccaccgtcgccagctggcccgaatccgccggggccacccagcgctgggcaggcccgggtgtgccgtttccactaccgccggagcggttcgcgcaggtgcttgagctcgaggtgcgcccgggctgggcgctgctggacgagcagggtgtttgtgttggattcggccagtactggatgaccgcaaccgacacggcgcacctgggtcgcatcattatttccccactggcacgcgggcgcggccttggccggctgctcgttcagtccttgagtgcacaggcgctgcgcgaaagcggtatccaacgcctcactctgcgcgtctatcgtgacaacacggccgccgtggccctgtaccgcgatctcggtttccagcaggttgaagcgtcctcaacgccggaacttctgttcatgcagcgcacgtcgggctga

SEQ ID NO: 507678 - DNA, 723 bp, Stenotrophomonas maltophilia
atggaccaagcactgggcgttctgcaggacgcccagcatcagtattctgtgggcatctacccgctgcacttataccgtcgccgcatgatgaccttctgggagagcctgtctgcactcggcgacagccgcgccttgtttccgcttgccactgtactcgccttgttcctgccaacctctaaccgccacctgctgtggcgctgggccgtggccatcactgtggtcgccgcgaccactctggccagcaagatcgccttcatgggctggggtttcgggttggagcatctggatttcaccggcatctccgggcatgccgccatgtccagcgtgctctatcccgtgaccttatggctgctggccagcggccgcagccgacacttgcgggcctgggccgtcgctggcgcggggcttgcagtcgcgatcggatactctcgactgcctttgcgggcccattccccctccgagatcatcataggactcagcctcggcctggctgcgtcggcttgggtgctgcgtcacggacagacgctgggcaacatcctggcggtgcatggccgcgccgcgttgctgaccattgccgccgccatgaccacgccgatattgctcgcagatttacacactcatgacctcgtgaaggccgctgcgaagacagtgtccggccgcacgcaggcattcgagcgccagaatctacgcggcaattcgtcgccagacagaagccatcattag

SEQ ID NO: 507679 - DNA, 927 bp, Stenotrophomonas maltophilia
atgcagcttgaaccggcgctgcagcagtttgtcgacgccgtcgcggcgcatccgctgccggaggagctgcgcgaactgcgggcgatcagcgagagcgcgctgccacagttgcagggtgcgccgcagccggttgcgcatgtgatcgaacacacggtgatcgcacgcgacgggcaggcgctggacgtccgcctctacacaccggaaggtttgcccgacggaccagcgccggccctgctgttcgcccacggcggcggctggttccagtgctcgttggcggtctatgacggtccctgccgtgcgctggccaatgccagtggctgcgtgattgtggccgtgggctaccggttggcgccggaacacccgttcccggtgccgctgcacgacgttgccgatgcctggtcgtggctgcaggacaacgccgagcgcctcgggctggacccgcagcgattggcgatcggtggcgacagcgccggtggcaatctggccgccgcctgctgcctgctgctgcgcgatctcggcctgccgcaaccgtgccaccagttgctgctgtacccggcgctggatgccggcatgggcagcgattcctaccgcgactacgccgcgggctactacctcagcgccgaactgatgcagcgctgctggcaggcctatctgggtagtctggatcagccgccgtcactggcctcgcccgcgcacgcaacagacctgcaggggctggcgccagcctccgtactcagctgcgaacacgacccgctgcgcgacgaagccgagcagtacgcgcatcgcctgcaggctgcgggtgtcgactgcacgctggaacggctgccggggatgatccatgcctgcatccacctgcagggcgtggctgtttccaccggcgtggcggtacagcgcgcgggcgccctgctacgccagtcgctggcctga

SEQ ID NO: 507680 - DNA, 1656 bp, Stenotrophomonas maltophilia
gtgaagatcctgattctgggtggatatggggtgttcgggggacgtctggtccgcttgctggcggacctgccgatgctggaactgctgatcggtggccgcaacctgccggcggcacaggccttctgcgccagctacatggggcaatcgacactgcgccccctgcaggtcgaccggcagcggttggctgcgactttgcaggccgagcgaccggacctggtggtggatgcctccggtcctttccaggactacggcgaacaccgctatggcgcgatcgaagcctgcatcgccgccggcatcgactatctggacttcgccgacgcggcggacttcgtattcggcgtttcgcagtacgacgcgcaggccagggccgccgacatctatgtgctgtccggcgtcagcagcttcccggtattgactgcggcggtgctgcgcgagatggcctcgcacatggacatcgtcagcgtggaaggtggcatcgcgccatcaccctatgccggcattggtctgaatgtgatgcgtgcggttgtcggctatgccggttcgccggtgaagctgcgccgcaacggtcgcgacgggcacggcatcggcctggccgagagtcggcgcttcaccgtcgcggtgccggggcggctgccgctgcgcaacctgcatttctcgctggtggatgtgcccgatctgcaggtgctgccacccgaacatccgaccatgaccgacatctggatgggagctggcccggtgccggaaatcctgcatcgcgtgttgaacctgctggccaaggcgcggctgcacctgaagctgccgtcgctggagccgtgctcgcggttgttctacaccgtgttgaacctgatgaagttcggcgaacatcgcggtggcatgatcgtacgcgcggtgggcacccgcgacggtgcgcgcgtcgaacagagctggcacctgctggccgaggccgatgacggtccgtacattccgtcgatggcgatcgaggcggtgatccgcaagcagctggccggtgatcggccggcgccgggtgcgcgtgcggccacgcatgcattggagttgagcgactacgaccgcctgtttgaagggcgcacgatccataccggtttccgccgggacatgctgggtgccagcctgtaccagcgcctgcttggcaacgcatacgcgcaactgccggccagcgtacaggcgttgcacgcaccgtctgcagccaagcgctggagcggcactgcatcggtcgaacgtggtcgtggactgctgtcgcaggtgctggggaaggtgttcggctttcccgcggcgggcgagagtgtgccggtcagtgtggaattcaccccggaggcgggtggtgagcgttggacgcggacctttgccggccgtcgtttctcttcgttgcagacgcaggggcaggggcgcaacgaagcgctgctggtcgagcgcttcggcgtgatctcggtagcgttggcgctgctggtcgacaacgggcggctgcaactggtgccacgacgctggtcgctgttgggcatgccgttgccgcaatggctgctgccgggagaaaacagtttcgagagtgatgaggacggatgctttgtcttcgacgtggagatcggcgcgccagtggtggggcggatcgtgcattaccgggggacgttggaggcggtgtga

SEQ ID NO: 507681 - DNA, 3030 bp, Stenotrophomonas maltophilia
atggcatttgcatccacgcatcgtgtgttgaagcgcagcgcgctttcggcagtgttgttttccatcgttggtgccgttgctgcacaaagcacgacgggcacgttgtacggcacagcagccggtggcgaaggcgctaccgttatcgcccagagcgatagcggtctgcggcgaacggcgcccattgatgcacaggggcgctacagcttcggcgcgttgccggtgggccgctacagcgtcagcgtgcagcgcgacggccgcgtcatccagcagcaggacaacgtccagctgcgcgtgggtagtggtaccgaagtgagcttcgccgcacatggcccggccacgacgctggacgcggtcaacgtcaccgcaatcaaccagccgaagatcgatgtgactcacacggtctccaagtcggtcatcacctctgaacaactggatgtgctgccgctgggcagaagtgccgaggccatcgctctgctggccccgggggtggtcgccggcagcggcgaattctccaacggttcgcgatcagtgctgtcgttcggcggcgcaagcgtcaccgagaacgcctactacctcaacggcttcaacgtcaccaatccgttgagcaacctcggcggcatcagcctgccctatggttccatcgatcagcaggagaccttcaccggcgggtacggcgccggctatggccgctccaccggcggtgtcatcaaccagttgggaaagcgcggcaccaaccggtggcggttcggggcgcaggtgacgtggacaccggcggagtttgccgagtcgccggcatcggtcaactaccctgacctggccctgccggatgggtatgcctacgagaacgagtccaagcccggcacgttgtaccgctaccgacggggagacaaggcgaccaccaccagctacagcggctatgtcagcggaccgctgatcgaggatcgcctgttcatccacctggcagccgagtccaatcggcgcgaaggtgtttcgaccggcagcgaggcatctgcgcagcaggcccgcaaccactatcgcgtggatacaccgaagttctacggcaagatcgactggaacatcaatgacagcaacatcctggagtacacccgtttccaggataccgatcgcaccggtggctactacaccgggttcgactacgacaccctgaccgaaggggatcgcacaggcacgttccccaatacgaccaaggccacgacagacgtcgatatcttcaagtacacggggtatctcaacgacgacctgagcttgagcgcagtgtgggggcgcacgcgcgtcggcaacctggaattcaatccactggattcgggtaacccctacatcagtggtgccgggaaccaggatccatccctcactggtggaactccggtccgcaatgaccaggctggcctgtacaccaaggcttccgatgcgggcagcaagacgcaggggctacgcatggacctccagtaccacctcggcaaccacgaactgaccgccggcgtcgacaacatgacctaccgggcgcacaacgaagggcagtccatgaccgggccgggtcatgcctggatctactcccgcggcaatccgggggcgtcgcccaaccctggcttcggcatcgcaccgccgggcggcaatggctatttcgtgcagaaatacatcttctccactacaaccagcatgtcggtaaagcagaaggcctactacctggaagaccgctggcagctgacgcccgagtggttgctgacgctgggcctgcgcaatgatcgtttcaccaactacaacagcgatggacgcgcgtatgtggaaagcggcgaccagtgggctccgcggttgggcgccagttgggatgtgttcggtgacgcgtcgttgaaggtcttcgccaaccttggccgctactacctggcattgcccaacagcgtagccatccgtggcgcgtctgcatcgacctatacccgtgagtacttcacctataccggcattgacgccgacggcaatcccacgggcctggcgcctttgggcgatggtccggtatcgaccaacaacgagtatggccaagccccggatccgcgttctgttgcgcccacagacctgcgttcccagtaccaggatgagctgatcctggggtttgagaagactctgggagccagctggaacagcggtgccaagttgaccttccgccggctgcagtcggccatcgacgatacctgtgattccgcgcgcttcgccgaccggctcgctggcatgggcctggatgccgatgcgtacgagcttcccggctgcgtaatcttcaatccggggcagaccaatacattccaggtgcgccatcgtgatgggtccggctatacgccgatcagcatgagtgcgtccgattggggctacgaaggcaagaaggccaagcgcgaatacgtcgcggtcgatctgttcatcgaacacccgatgtccgaacactggtacgcacgcctggactacacctggtcgcgcagcttcggcaacaccgaaggccaggtgaggtccgatatcggtcaggatgacgtttccaaaacccaggattgggatgcggtatcgctgatggagtatgccggtggctaccttgccaatgatcgtcggcaccagttgaaggcattcggtgcgtatcagatcaatggcgagtggaccgcctcggcgaccgtgcgcttgatgtccggcatgcccaagaactgcctgggctactacggaagcgaccagagcgatccggcccatggctatggctcggcataccactactgcaacggcgaaccgtcacgacccggcgatgcaggccgacagccgtggacggcgctgctggacatgggggtgatgtaccggccagcgtttgccgacaaccgccttggcctggggttgaacgtcttcaacgtactcaaccagcgccgtcagctgcagtcgacggcgacgtaccagacaggtccggatacggtttccaatctctacggtatgggaacccacttcacgccgccgcgtacggttcgcctgaccgcctcgtacgatttctga

SEQ ID NO: 507682 - DNA, 1035 bp, Stenotrophomonas maltophilia
atgaagacgatgaaagcggttgtgatgaccgggccgaatgcgccgtggcaggtccaggacgtgccgatgcccgtgatcgaaccgggccaggtgctggtcaaggtccacgcatcgggcatgtgctacacggacgtgtgggcaacccagggctatggcggcgacatctacccgcagacaccggggcatgaagtagtcggagaagtggtggaggtggccgccggcgtgcactcgcgccgggtgggcgatcgcgtgggcaccacgtgggtccagtcgtcctgtgggcgttgcccctactgccgcgagaaccgccccttgtccggacagacggcaatgaactgcgatgcaccccgcaccaccggcttcgccgcgcagggcggccatgcccagtacatcgcgatctccgccgaaggcacggtgctgctgcctgacggactctcctacgtggatgcggcgccgatgatgtgtgccggctacacgacctggagcgggctgcgcgatgcggcgccccagccacgggagaagatcgcggtactgggcatcggcggactgggccatgtcgccctgcagctgtccaaggcctgcggcttcgagaccatcgccatcacccattccgcagacaagcatgcgctcgcccagcagctgggcgccgacaaggtcgtggccaatggcaaggagctgaaggccatcggcggcgccgacgtgctgctggtgaccaccaatgaattcagctcggccgaagaagcgatgaccggcctgcgtgtcgacgggcgcgttgtgctgtgcggcctggacttcagtcagccgttctcgatctcgtccgaaggcgtgccgttccacatgatgcgccagcgcgtgatcggcgccacccatggtggccagcactacctcagcgaagtgctgcagcttgccgccgccggcaaggtgaagccgatggtcgagacctttgatctggatcaggcgaccgaggcgtacgaccgcctgtcgtcaggacggatgaggttccgtggcgtgctgttgccgtggggccacgcctga

SEQ ID NO: 507683 - DNA, 924 bp, Stenotrophomonas maltophilia
atggtgagccgaattcaacaaacgagcggaggggatctgaccgccttcaccgcgttcctggcggtggcggcgcatcggagcttccgcagcgcggcggcagagctgaacatcacgccgtcggcgatcagccatgcgatcaaggcgctcgagcagcggctgggtgcgcgcctgttcaatcgcaccacgcgcagcgtctcgctgaccgatgccggggagcgcctggcggaaaaactgcggccggccatggcctcgatcgaggaggccctgcagtccgtggacactgaagccggcacgccgcgtggcacggtccgcatcaacgccagtgagggcgccatacggctcgtgctgaagccggtgcttgcgcggttcctgcgccagtacccgcaggtccacctggacatcgtcagtgacggccggttgggcgatatcgtttcggaggggttcgatgcgggtatccgcctgaccgaagccgtgccccaggacatggtcgcgatagcggtgaccgccccgatgcgcttcgcggcggtggcctcgccggcgtatctgcaggcgcgtggccgtccactgcggccgctggatctgcatcagcacgactgcatccgtttccgctttgaaagtggggcgatctaccggtgggagttcgagcaccagggcactaccgagcgggtgaacgtctccgggccgatcacgttgacggaccagccgttgatggtcgacgcggccattgaagggatcggcatcgccttcgttcccgagcatctggcactggaaccgttggccgatggccgcctgctgcggttgcttgaggactggtgtcctgaatttcccggcctttcgctgtactacccgggccatcggcatgtgccgcccgggctgaaagcgctgatcggtctttttcaggaacagcacggcgggcgcgggtag

SEQ ID NO: 507684 - DNA, 2286 bp, Stenotrophomonas maltophilia
atgaggtacagtttttcaaatctatcttcagcggactttgaggatctggttcttgatctcattggcagagaggaaaatcttcgcttcgaagctttttgtgcgggggcggacggtggagtggatggtcgtcatgcgcaaagtggcggcagtgtgataattcaagcaaagcactatgagggctcccaatttagtaagttggtggctgcgataaggcgcgagcgtttggcaattgataggctccagccgacgcgctacatacttgctacatcatgcaggctcactccgttaggtaaaaataggatcgcctctattattggtcctagtttaaattctgagtcagatatatttggcccagatgacattaatgcactccttcgaaagcacgtcgatgtgcttaagtcacacataaagctgtggctttcaggtgctggcgttcttgatcgtgtagttcgagcagcagcccatacttttgcggccatgacaacaagtgaaattgagcgtaaggtcaggatctacgcctcaaaccccagcttcaatgagtcgcttgcagtgcttgaaaggtctaggcttctcataatttctggtccgccaggggtcggaaaaactactctcgcggagatgttgtgttacgcatttctgagtgaaggttgggaccttattccaatccggagcctcgacgatgggttttcttcaatattggatagcaagaagcaaatatttctatttgatgattttcttggaaaggttgcattggatcggaaggctcttgctcaaaaagactccgagctggctcggttcatggacagagttcgaagatctcccaatgcccggtttattctaacgacgagaggttatgttctggaggaggctcgccaggtatccgagtatcttggagatgaaaggcttgatatatctaaatatgtcctcgacgttgggatttatacaaggagaatcaaggccaggattctttacaatcatctgcttgtgtcgcgaactcctcttccgtacctgcaatccctaatcgatagcaataaattggcggcgatagttgatcacaaaaactataatcctcgaataattgaagtgatgacggatgaattgaggctaatcgatgtttcgcctggtgagtatccagctgccttcgttgatgctttgaataatccaagtaggatatgggaacgggcatttagaactcatattgatcaccgttgcaggaatcttttgatagctatgttctttcactccgagtatggggtgcatgctactagtctgcgtctatcttttgatgctctgaatgttgcgatgtgctctgcgtatggcgcaactcacgggccgaaggacttcgaggagtgcattcgaactcttgaggggagtttcatcaatattatcgatgttggtgggccgattgtttcctatttaaatccttctctaagggactatctgtcaggctatcttaaggatgctcatctcctgtcggctctggtgcctgctgctgtgtcagtagactggctaattaaaatctgggactttgtgtatcccgaggggctttctctcgaggagcaaacaaaagtcgcgattagtggcgtttgtgtgctcgaaatgattgaaactcgcccgctgtggcgtcgttgcgcaggcgatgctcgcacgcttgagtataatgatgctccaaactcgaaaagaattcgaatgcttatggagtggtgggagcttactcgtgatcagagatttgctgagagtattatgaggattgctcgagatccgcgtggcggatttgaggcatgggcagacggggacgtgttgattgcgttcttgtccaggcgcggtgatcaaagtgctgagcgaaaatttgtctatgagaaagagttgctcgagattcttgagcgtgctcttgttgatattgtcagatggagttcttgtgacatgctttcgaatctcgttgacgcagtggatgcatcaccaagcttgccggtgagcatttcaagggcgctagaggaggctgttgttgaagagtttcgcgacaactctattcggatacgggaggatgagagtgagtcatccctctcggacaggatttcggacttgaagaagtttgcttctcggtttggcgtttcagaggctattttgaatagcgcgatttcggacatcgaggagcgaattgcttttatcgaggacggcttcagtgctgctccatcgcctagttttccagcatcgagtaaggaggagcgagaggtttttagcgaccaatcgctgcgagacctgttcatcccgttgcttgatcagtag

SEQ ID NO: 507685 - DNA, 2538 bp, Stenotrophomonas maltophilia
atggaactgacaacacaacttcaacgcgttgtggatggagtgaggaacggaaagatcggcaatgaacttgaaggtgtcttcttccctgagggcaccccggtaccagccgagcgcgacctttgggactacaaagcacattttcaggcagataagctggcgtacgcggagctggccaaggacattacagcatttcacaattcgtacggcggctatattctgatcggggttaacgagactgcacgcgacgagagatttgaaatctgcggatatagtcgacctgaagatttcacaggagccctaaggggcgccctagattcatactgctcggcaccgatacagatatccgttggggacataaatacactaaataagtctgtagcatatgttttcatacctcgacgaacaccagactcccctccggttttcctccagcgaaatgggccggagtaccggccagggaaacctctgtttcttgagaaaacgacatacttcagacagggagatcgaagcctcccagctactatcagccagcaatgggagtttcttaatgggcagcgcaaccctgaagagctcatcgcaggaaggaatattgtttcttctgccacagtttccgccaggatcgtcccaaacaaccttcccgaccgcagcgttatttgcgctcacctcttcggaagagaggacattctttcagacttatgggcatgggttgccgatgagcttgagccagtccggctactagctggcgcagggggaaaaggaaagacttcaatcgcctatgaatttgcaagtcgcttctttaagaacgcccccctaccatacattcaagttttgtggctttccgccaaaaaaaggcaattccgtgcagaccgaaatgattttgtagaccttccatacagctggtacgaaaacccaagagaacttcttgaagcgctctgcataagtactgcagcagtaatctcgggagacgaatcaaatgaaacggagtacacgcttcaaaagctgctacgaaccagcttgaaagaaattccttcatttattgtcgtcgatgacattgactcgcttgcccctaatgagcagcggcgtgtatttgagattgttcaacagctttcggcaggatcaagctcgaagttcctattaaccactcgcgcaaactatgcattctccaatgagcagtgcatcgttgtcggtggattaaagggtgaagcatatatatccttcgtaaaggatcgggtgcgacgcttggggctcagcgatttaagcacgcgcgaacgcgagaaactggaagcccaaagtgatggatcaccactatggacagagtccatgcttcgcttgatgcgccagggctactcatttgaggatgcaatagccgagtggttcaaaaagcccggcgaggacgcacgcgcagcggcgttaaataaagaaattaccgcccttagctctccggccaagcgaatactatttgttgcgtcagttctcagagagtgctctcgtgccgaactactggacgtgaccaagcttggaatggtggaattcgatgacgctctgaatgaactacagactcttttcctagttgacgccccaaagataataaagaacgagccacgcttctctgtaccagagtcaacggcagctgctgttttcgataccgagacaacattggtagccgacccggcaagactaagaggatcagcaaaagagtacttgcagcgtgccgcttcatctgcagggaaggctgcgcgaagcaaggtcggtctcgcagtcaatcagacaatggcattactgaagtctggccaacttaccgaggctctcgccaccgtcgaccaagccctttgcaaggactccaataatcctgaccttctcctactgaaagggcgctgtttaaaggatcgcgacccggcgaaggctattgaagccttctcttcagcccatcggaacgggcagaagaagccattgctttttgatatgtggtacagcgcagctgaaagcatcggtcaacatgccgctgctctagacatagcaaatttggcaatagacctcgtgttcgactgcgcaaggtggcttccacttcgtgcccgagcttatgtacagattgcactactgcgaagccgcgatggtcagtcgtcctcttcagttgaattgcttctgaaggcggcatctgatcttcgggaggctatctctcttacgaaatacgcgacaaaagaggcggatgcgcatcgttctgatctccgtgcagtgcatgacgtcgcttggaagctgactgctgggcacgacattagcgccagccttcaggcgttcgatgttgcagtggcatgcttggagaatggagactatcgtcaagagtgtttcgagagactcgtctcctcaacgagcaaattgtctaccagcacgtctgcctcggactcgggtgcatcacgtggcgcgcgcacacgcgtgtccacggcccttcgcgcactacagaaaattcaaccatccaaactcgggactacgcgcgcaaaagcctggaaaagcgcgatacttacaattgaaggactggactag

SEQ ID NO: 507686 - DNA, 1176 bp, Stenotrophomonas maltophilia
atggaagtgctagatgctggtagtgattggtttgacgatgatcacgatggggagattgatggtcgcattgacgagtacgacatcagctcttcgccaaatgatttcaacgtctccacaattttcagctttattaaatctggtgctgtcaaaataccaggatttcagcgccattttgtgtgggatgttaaaagagcgtcaaagctcatcgagtccctgatcctcgggctccctgttccgcaggtgttcctctatgaggaggcgagaaatagctttcttgtaattgatgggcagcagcgtttgatgtccatctactacttcatgcttcaaagatttccgcggcaagataagcgcgctgagctcagagaaatattcgataggtactccggcgatattccagtacatgtaatcgatgatgatgagtattttgttccctttaaactgaatctccctgggcagttgccaggacagccgagcaagtttaatggcctgaactactcaacgctcggggattacagggtggcgttcgatctgagaaccgtgcgcaatatcatagtgaagcaggcgacggcatcaggcaacgattctgcggtgtttgaaatattcaatcggcttaactccggcggcgttaatctgactccgcaggagattcgagccagtatgtatcattcggatttttatgctgttcttcagcgaatgaattcaaagcccggctggcggaaaatcataggaagggatgatctggatcttcatatgaaggacgtggagatacttctgagggcttttgctttgctcgtagacggggatagttattccccttcgatgaccaaattcttgaatctcttctctaaaaaatccaagagcaatacctcgactcataacttgtatctggaaagaatatttgatgagttcttgagggctgtcagcaagctccctggtaaggttttctttactccggcgaataataggttcaatatttctctattcgaatcggtgttctatgcggcttgcaagccggtctttgatgcaaggggggtcgatattcctgaagtctcagagatgagtttgagtagattgaggtctgagcccggatttatcgccgcctcttcggagggaacaagtaaatctgacaatgtggcgcggcggctaaatctcgcaacgtccatcatcggaatctga

SEQ ID NO: 507687 - DNA, 918 bp, Stenotrophomonas maltophilia
atgagccgggctggtcaccgcacactgccgcctgcgccggcggatcatgcgctgccggccgtgcgtcaaccgcgcttctcgctggagaaggacgtaatcctggctgcgcagacacgcgtgcagctgcaggaatgcctggcccgcatccgccaccatcgcaccatctaccgcgaatggggattcgaagcggttgatccgctcggtcgcagcagcgtcatcaacttccatgggcccccgggcacgggcaagaccatggctgccgaagcgctggccggtaccctggggctgggcttccaccacatcggcattgccgagctggaaagccgctacatgggcgaaaccgcccgcaacatccaggccgctttcaggatggcccacgacagcgcctcgctgctgttcttcgacgaggccgatacgctgctcggcgcacgcctctccaacgtgacacagggcgtggacaacgaagtcaacgcgatgcgttccaccctgctgatcgagcttgagcgcttcgagggcattgtggtattcgccagcaacttcgcacgcaactacgacgaagccttccgcagtcgtatcagctatcacatccacttcgacctgcccgacaggcttgcccgccatgcgctctgggaccgcatgctggtgcccggcattccgctggctgacgaacgggcggctctgctggggcgggccgccgacgcttcgcacggtctttcagggcgcgacatccgcacctgcctgcgactggcgctgcccaaagcgctgctggacgcagacagccaacccgctctggcgaagctgggctggccgcacctgcaacaggccatcagtgacgtgcagcgcgcacagcagcaggtcgggcgcaatgcgtctttccctgccgccgcgcaggcggcccgcgatcttctcggcgtgtaa

SEQ ID NO: 507688 - DNA, 1284 bp, Stenotrophomonas maltophilia
atgggatggttcaccaacgcagttgcggcaaccgcacgcttcgtcagcacggcggcacagacggttgccagtgccgcacagaagacctgggaagtagtcaagaaaaccgcggtcaaggttgtaaccctggtagccaaagacggcgagaagaccgtcgccaaggccaaggatctgtggaagaccgcgcgcccctacgtgaaacaggcgacggcgttgttgcacaaggcaggtgcttcccatccgctgatcaagaatgttgctcttgccgttgatgcactgttggcactggagaagtccccggtgctgcactggattgacaaggcagtgagctggaccatcgagctcgccaagcgaatgaacgcggcgatggagcagggggtgcaggtggagcttgatgctgcggagcgcgtccaggccgagcagtaccagcagaaattccgcgatgttgccggtagcttcagcggcgagcaggcccacgcggtgtcggtggtggcgatggtcaatgatctggtgcttgcacaggacaaggtcaatgcactggtggagaccggcgaggtggtcgacgtcgaccacttcctgcgcctgcgcgctacgcagaagctgctgaaggaagcgaatgcacggtttgcgacggtggatgcggagagccgcattgatgcggacgacatgttcctggtgcgcgtggcatctgatctgctcaatgcagatccttctctgtcgagcgaggatgcgcaggcgctggacgacctgctgcagcgccgacatggccgcggcctgctgccgttcgccttcgaggaaatgctgcctgcatggcacatgcgtaaccaggcactggaggcgcagtgggaggaaatgaacgacacgctgcccgccaggcaggtgaagctccgccggctggaggcggaactctccatttcggcagatgggcgccttgatgaagccgaacaggcggaactggatattctccgtctttccgtaccgcttgagcagaaagcattcgacgacttggcggaggaaaagctggcgctgtcccaatacctgcatgcggctgaaggcttcctgcaggtactcgagcgccccgcagaggagcttgaggcggctggaatgggctacctgattgatgccgggcagcaggttggtgagctcatcatccaaggcgctgagcagggtaggcagtggaacgagttcacgcccaggcagcaggaactgatcatcgatttcgccaacatcttcgaagatgaatgcctggagcgcgtgcagcgcctggttgaggttgcggcctga

SEQ ID NO: 507689 - DNA, 1710 bp, Stenotrophomonas maltophilia
atgctggggcacgttgttgacttcatcaagccggatttcagcgagccgttccagctggccttcttcacgatcatccttggtgccgcagcggcgaccgttgtgggggtgtggcgcactgcacggcctgataactggaaggccaactgggaaggcgcggggcgcggcaataccggactggatgtagaccatggttcgttcaacgatgtgtgcgacgccgttgccaccaagccggagaagtatgcggagatcgtaccgggactgctcctgatctttggcctgttgggtacctttgtgggcctgggtattgccttggacagtgcctcttccatcctgcgcaatgccaacgcgcagaacgcgcttgatggcggcatgggcaacctgctggaaatgatggggggcttgggcaccaagttcaggacctccacctggggcatcctcggtttcctgctggtaaagctgatgttggcgggcatggggcgggagacccagcggcagcagtgggtgattgcccgcatgaagctggagatggacaaggcccggcttgccggcgagcaccttgaagagcaacgcagccaacgcatgcaggatgcgctgtccgaagtggccgtgcacatggatggttcgctggacgagcggctgcggcaggatcgcggcctgcgcctggcgcatcatgacggtacggccgaaatgatgcagcaggctgtgcaggcgctgggcctgcagttcatggcggcactggaccaggatcgcagcctgcggctgcaggctgaccgtgctgcggcagaacagctgacggtgctgcttggcgaggcgttcacgcagctgcagcaatgcatgcaggccgatcaggccgcgcaacggggtgtggccgagcaggctgcacaggcactggaagcgctgctcaccaagcaggagcaaggcaacgatattgcgctggatacccggcaagtgctgatggagttcactgcctcgcagaaggccttcagcgcttccatccagcacagcgccgataccatgtcggccgcagcttccaacatgaatgatgccgccgaggacgtgtctggcgtcatcgcagccttcgacgatggcgtacgcaacacgctgggaacaatcaaggaagagctgggaggaaccatcgaacgcatggatacctcgctgcgggacagcgtcagcgccatggccagcaatctggggacgatcgcgagtggcttgagcagctcgatcgatatgttcacgacggaatcaaagcagaccctgggacaggtttcgaagagcatcgaaacgtcttccgacaggcagcagaagggtctcgaatcgctcaagctcgtcaccgatgcggctcaggagagcatcgcgaagtcgacgaactacatcaaggccaacagcatcaagatcaagaccgggctcaaggcggtttcaactgcggcccgaagcgcggcggaagtgggggcgcagttgaaggtcgcgcatgccagcctggaactggtgggtgagactctgcacaaggttcaggcggcgatgcagcgcgatggtaatgaaggccaacagctacgcgaggtggtgctccaaggcaccaaggacctggtggatgcgcaccagggtaccgatgtcctgctgaggcgccaggccgacaatctggaagcgctcaatgtggaactccgtcgcctggtccaacccaaggtggaggatgaggcggagctggccggatga

SEQ ID NO: 507690 - DNA, 648 bp, Stenotrophomonas maltophilia
atgaaggacaagcccaacgaatgggtggccatctccgacctgatggccggcgtgctggcggtggtgatgctgatgctggccgtggtcgtcctgcagcgccagttcgccgaggcccagcaccagcgcgacctggctgcgctggatgccgccactggcaacccggtggctgagctgctgcagcaggtgcagggaaccctgggtacacagggggcagggcatttgatcagcgtagacgtggccagccgtcgcattaccctgcgtgacggtgtgttcgcgcaaggaagtgcctgtgtaacacctgccgccagtgcggccatgcaggcggtggaagcacaggtggaaaccttcctgcgcgaccaccccgcagggcggatcttcgtggaagggtataccgatgatgcaccggtaaagcgccctgtcactgacctcgcgcggttctgcaccgtctacgacgacaacttcacgctgtcggcggcgcgtgcccgcgaggcgcgcaagaccctgctggggacgctggatgccacctctgcacggcggatcgtggtggccggctatggcgactcgcgaccattggccgaggtgccgccgtccgacccgcgcaatcgcagggtggaagtgttcttcaccctggacggcagccgtagctga

SEQ ID NO: 507691 - DNA, 216 bp, Stenotrophomonas maltophilia
atgtggggccgcacgcagcactggacctacagctgcagccactgcagctggaaacgcacgactccaccttgcggggacgtgcgcatcaagggcttcaaccatttcacccactgccccaactgccagtcggcgccggtggtgtgccgccctgcctccgcgctggacagcctgtttgaggggctgcccgaagcctggctccgggccggcaagcgctga

SEQ ID NO: 507692 - DNA, 1068 bp, Stenotrophomonas maltophilia
atgacgcacgccatcgacaaggagaaccgcgtgtcacgcaacagtaccgataccctgcaacggcaatggcacatgctgcgcatgatcccgcgcgctccgcgccacatcactgcgggagagctgtgcgaggggctggcgcagcgtggtatcagggcaggcaagcgcaccatcgagcgcgacctgcagaatctgctggggacgttcccgctggaggtggacgaaaccgcgcgtcccttcctctggagctggcacaaggacgccaacttcgacttcatgccgcgcctgagcgtaccgcagggcatggccctgcttctggcgcagcaacacctgaaaacgttgcttcccgctgccacacagcgtgaactgcagcctctgttccagatggcacgcagggagttggcggcaggtgtctggaaggattggcatcagcgcaccgcagtgcagccctcgttgaagacccttctggcccctcaactggacgccgaagtgctggatgatgtgcatgaggcgttggcactgcgccgccaactatcagtgatctaccgctccaagggcgcgcgcgagggccgacgcgcgttgatccatccgctgggtctgatcattcgtggacaggtgcactacctggcctgcaccttcgatggctaccaggacatccgccagctggcgctgcaccgcctttcagaaactcaggtgcaggctgccgcctgcgtagtgccgcaggatttcgacttcgccgtgtacgccgatagggcggggcgctacgaagaccaaggcacagtgcggctgatggcccgtttcacgagcgctgctgcagagcacctgcgcgaaaccccgttgtctgcagaccaagtcttgcacgagctggctgatggagcgcaggtggacgtggtggcgacggtatcgctggaccagccgctgcgctggtggctgcgcggttttggcagccaggtggaggtgctggagccagcgtcgctgcgggcggagatgcaggctgatgtgcagctgctggctgctacatacgcgaacccggcgctgccagcggcacgttcgttcagcagcatcgcgtaa

SEQ ID NO: 507693 - DNA, 1317 bp, Stenotrophomonas maltophilia
atggcaggaagtgattgggggttgctcggaccggaccgggtacccagcaaccggcgcacccgcacgctcgggctgggcagggcggtgcgccgtttcaacgaactggccgttccgggcctgggcggactctggtatggacgtcaggcgctgtacaccgtcttggcaatggctgtggccaagcggctcaggacgtggaacatccgtcggtcgcatatcgaggtcgcaaatgccatcgaggcggtggcctgtaccatcggctatcgtcacaacggatggagcccggactggcggatgcgtggccgcaacaagctttcccacgatgtgggggccccctcgttcaagcaggcatgccggtccagctattacgtatcgcagccgatgcgcatgtccaccgcgcaggcactgccgtcgctcggcttggcgtcggcccccagcgttcggttcaacgcgtttgagtgcagcgaagaggcggatgtattcctcggctccagcattggccaccttttggtgggcaagaacagcctggtcgaccacctgtgctactgggtcatgggcagcccactcagttggaagagccacggcgtcgttgcggcgctgaatcccttggaaggattggatgaggatgcccggcactggttgcggcatgcgctcctgaagggggcgaccctcacggagcaacaatgccagcggcggaaggccgcatgggactggatggcttgcctgcacgccgagccgggcagcgtcgcgtcgttggacgacgtgcagggaccggcccagctggacgccgcgcactggcacgacctgcgtgcgggtacgaagcttgtcgacgtccgcaatgccgcagtggcggtgctggacagtgtcgaagtcgaactggacgcgcggcagcgccgttccctgcagttggatgggacactgccactcccggtgcatcaggcattgcaggcattggtcgtgcacgcgcagagcttcctcgcgctcaaccactacgacgaggatgccaaccgattctgtagcgagtgcgtgggcaatgaggccgacgtgctgcgcgcgctgttgcgacgtgatgatcaggtgctctgcctggttgacgactgcgcgcgccccggaccggcctatagcggccgtccacctgtggtggagaaaggtgagcaaggcgcggatgaggaggttgccgagacggggcgcaatggcctgccgcttccggcgggcatctcctatcgcgtggagaacctgtacctgctgtacctggatcttgccggcgaactgggcgtggcgatcacgacccggaacactgcgccggaggtgacagcatga

SEQ ID NO: 507694 - DNA, 2040 bp, Stenotrophomonas maltophilia
atgagtggtaacgctgcaccccgtccttccttgttgaagcatttcgaggctcctgccgaccatgctggcgagttcggctggatctgcggcttctctgccgacgccagtttcctcaacgaggctgcgcatcgcttcaccgggcagagcaagtcgcaacgcgaggccggtggagaagtacgcctggcgctcatgctggacccatgccagcccgcactgctgccgacggccgtacccgggctggcacatctgccgctgagaaacgagagccggagccccattccattccgtctcctgcacgcgaaggtggccttgctgggattccgccaccagagcgaacctgaaaagtggtgtgtgcggctggtggtatccaccggtaactggacgcgccagaccgtggaagacagcctggacctttcctgccaggtcgaggtggacagtgcgacgttgggtgatgccttggcccaggaatgcgtggacatcatcgccgcccgcgattggctgcaatggctgatcggcctgcacgatacccgtctgttggaagcaccggcacctatgggggctggtgcagccgcagccaaccttgccgcctggcttgctgtctgcaccaggtaccagccggccctacgtgagcgcaggccccgcttcgtgcataaccgctcgcgcagcctgattgagggtgtgctcaatgcggttgagaggcacgacaagccaaaggccactcgattggcgatggggtcgggattcttcgaatcgacagggctgcctggcaaaagcggcgcgctgccctgtgccagcgtgccactgcagatcgtaaagaagctcaaggcacgagggctgctggataaacgcgcagcgctggaactgcacgtaaacccttccgcctgccaggccatcgcgcattcgattgccgagctcgcgcagcatcccgagcatcccatccatgtgcatgccgcaaaggtggccgacgtcatcggagatgcctacagcggtcgagcgctgcacgccaagttcatggtggcggcgcgggcggagcgcaacggttccaactgggcccatgtatgggtgtacctgggctctggcaatctgacgccggccggcatgatgctaccgatgtcgccggacggcggcaacgctgaagccgggatactgttgttcgaaacgaaggccagttggggcgcacggttgcgtgcgaagctggcattggatctgcaggacgcgctgcccatcgccggtgacctgctggtgccaggcgcaccaggggtgtcggccggagaggcatggcatccaccggccagcgagtactacgccgcaccggtggccttcctccaatggagggcggcagacgggcttctgctgctgccgcatcaggatgacgatctggatacgccattcgaggtcctggacgacgcatgtgttccctgcaggcgcgtggatggaggctttgcatggccaggtggggtgccgcgcatggtgcgtgtgcgctgggccgggagtggtgtcgtccgtgaggcggtggttcccgtggtggatgcagatgggcgtgtcgccgcaacccctctgagcgatctggagctggatcatgcggaaagccagctgctggccttcccgggcatgcctgatcctgaaggagacgaagaagaggagggtttgggagatccacttccgcgtgatccgatgacgaacggcaggtccccccgccctgtgtccgatgctgcggtgggcgatgacaccgccatccgccagatgatggggttgctggagcgcattgccgaccgccagatacgagtgccagtgactgactggccgcgttggtgccagcggctgcagcagaccctgtgccagacccggcatagtcccgcagtggcgaagttcgtcgccctggggctggatccactctcgccgttgcatgcagaacctttccgccccgcctttgctgaagatatgcacagcgaacatgggcaacgttatgaggctgccctgcaggtgatctcggacacatggggagccacggggttggcgtcgctggagggcctggaatga

SEQ ID NO: 507695 - DNA, 2646 bp, Stenotrophomonas maltophilia
atgaagcagatgatcagctgggatgaggttgccgcgcaggccgaagtgctgctcggcgatggcaggtcggatgtgggaaggcggttggcgcttattgaaggtcagcgggaatccctgcgtgccctgtgcacacgccttcggaacaacggcgcgatccttgccgacgaggttggtatgggcaagacacgcatcgcagtagcactggctcattgcgtgattgctgcgggcggacgggtggtcgtcgttgcgccgcctggcctggacgagcaatggcgacgcgaattctcgctggtgggcccgcaacctccggccctgctgcgcagctactggcagttcctgcaggcctgggacgggtctggcaccgagcggccctggctgcaggagaagctggtactggtatcgcacagtttcaatcgatgggcaccggggaagctggctcactatcgctggagtctgctgccggcaaccctcgcgcgctatcgcaaggaagtacttggcaagcggtggccgaacggctacggggaatttgagcaggaactgatggattgcgtgtcccgtgcagcaggggcgatcatcgaaaatctgtcgatggccggctctgcgtctccctcggggacgttgctgcatgacatccacgaagagctgccagcatggagcgaagctgccaacggtgaaaaccactccgctcgaagcgtgctgcgtcgtgccgtggatcaggtgacggggttggggcttggagccttcgaccttgtgatcattgatgaggcgcacaagagccggaacgagcagagcctgctttctacgctactggacgatgttctactgcgcagcggttctgcacgctgccttgcgatgagcgcaacgccggttgagctggacgcatcgcagtgggagcagagcctgcaccgtatcggtgttgccaagccgcccgtggatgtcatcaaaaagtacgtggccagtgtggttgatctgcgccgttcaccactgaatgcggagtacgagcaagcctacctggcagcagcggcggcttaccgcgatgcactggatccctatctgctgcgccgggacaagcgcgaggaccctacggttcagcggttctcaaagcacgcaacgccggcggggcaggactatcgcgaagtccgtccaatcaaggtgaggatggatccggccacgacatccgagccctggatgcgtgcggtgtgtgcagctgaggcgctgtcgttcacctcaacgcgagtgctggacaaccgcgccaagcggcaccgtctgactgtgggcaatggccacggcatcagtgggttgatcgacgcggtaaaggaggaagcctctctgcagccggagatcagttcttcggcgttggatgatgagacggcgctggatgatgtagtggcatccagcaagcgaatggctcgtacccagtggtggcacagggccatgcaacgtgccgtgcgcgaagccgcgccggggagtggggcgccctatacccaccccgcattgcttgcagcggtggacgccatcgagagcgttgccgtgaatgagaaggtgctcgtgttcggccactaccgtgcgccgatgaacgcccttcaacacctgctcaacgcacgggcgatgctgcgtgctctggacgaaggaaaggtgtggccgcagagtggcctccatagtcacgaggaccgtgtggcattgcaggtggcgcatcggcagcttttccaccgcgaggccgacctggaggcggtcgaacagaagctgcagtctggctaccgtgagctcgagaacagccggcagcgcttccgtacaggcttgctgcgcaaactgaaggaaggcttcacttcgctggatccgctgcttggggcgcgctttaccgtgccgttgcagatgctcgaggatgagcaccaacccggcagcgatgcctcatccgcagtcggcgcaatggcggtggtggcgcgtgctttggccgatcatctggagggtgaggccgaagacccgacatcagtgcagctggccactgcgttcgttgagcttatgcaggcggctgccaacctggatccgttgaccgatgatgctgacggcagcgttgacgatgcatgccgcggcgagaacacgtggagcgaaacacttgagcggttcagggaggattactcgtatcggcaaggcgggttcgcgcgccaactgaatggcgacactgcaccgggcacccgccgtttgctgcagctggcgttcaatcgcgccaatgcgaatcccaaggtgttgatcgcccagtcgcaggtggggcgtgaggggctcaacctgcatctggcgtgccgcaccgtggtattgctgcatctggaatggaacccggccgtggtggagcagcagatcggacgggtggatcggatgggcagcctgtggcagcagttgctggaaagagcgattgaacgtcccgagggtaccgattcgatgccgcgcatccaggtgcgtccggtggtgtttgaaggcacctatgacgagcggcagtggagagtgctccagtatcgctggcagacgctgcgatcacagttgcatggcgagattctgccggagtgcgaccctgaagatgtactcggtgcacagttgcgcgaacgtgttgcagcggccgcgccatgcttctctccaacccggcgacgcaggtag

SEQ ID NO: 507696 - DNA, 3825 bp, Stenotrophomonas maltophilia
atgagcaaattcatcttcgatgattttgtgaagaccacactcggcggcgcaacccaggccgggagtggagaagccctgactgcgcagcagatttccgatgtcatcacctatctgaaatcaccgggatcgggtccaaccaccagcgtcagcttcgaacagtatgtaaccggcaatatgcaggcccaccctccgcgacttccggatgggatggattacctcgcgttctcgggcaaggacaccacaaaaatctccaactacaccaatgcagaggtgtactcaaaggatatcaacggaaagtcgggaataattggcgataccccatggggaaagttcgtcgatcagctagccaagaatccagctcacatccccgatctccagtcgatggaagctggcctcagaagcgtgatggagtcaaaggggatcgttcccttcgacaagaactatgtgggtgcgctccaagacataatgtggaacgccggcagcccaaagttcttcgagaacgccattgctacgggcaagccactgatcgctttcgtggatggggcgcctcccgatcgcggtttcagtaggttcgaactagccaccgccctcgaccaccccaccgtccgcatcaacggctatcccataagtgccttcgggcctgagccgctggccttcgcaagccagtccgccgccgagtaccaggcgcttgagcgcagcctcgcgcagcatgccactaccaacagcgcgcaccccgtcgacgtcgcgcaggtgcgcctgcatctcaagcccatcgacggctatgacgctgtcagcaagacactcttcgaacgaccgctgcacgactacagcgcgttgaacctgagcgagatgtcgaccacgcgcgcgaactggctcgccgcgcatgccaacctgggcacagggccgcgcctgtccgctgatcttcccgaaccaccatcgcacgcgcccctgcagccaggagctccacgcggccctccccgtgcggcgacggttgccgaagcagtggccgacgttgcaccgcatggcatgcacgccggaatcaaccccgccatcaaggttgccggcgttgcaggcgtcgccctgcttgcgcacgacttcgccacctctgggcacaagtggatcgaactcaactcgcagggcaacgccgcaggcgcagattccaccgctgcacacttcgtgggccgcaacgtcggtggcgcagtgggtggctttcttggtggcgctggtgtcggcctcgcttcgggctcatggacggggcccggcgccattgcaacgggtatcggtggcggcgtcctgggtgcgtacctcggcgaacgctgggccgagcagaaagacattgaacgcgtctactcccaggttgacccgatggggcgcacctggacgcgcgaccccgctgatcccgatgggcgctggctgcgagccggcgaacagcagcaggtccagagcactgacctgggcagcggcgtcgaagtccgcccggtgcagacggcacagggtgacgacgtcaccttccgcaccagctatgttgccaccggcacactagagcgccagttgaactggcaggcggctcgggcctcctatgagctgggtctgtcgaacccaccaccaccgctggatccctaccgactgagcgcacatggctcggccgagcccgcgcgaggtgccttcgaaaccgatcgcgcctttgtacgcgatgccagctcggggcaatgggaacttgaaatcaaggaaatggtggatggtcgagtgcccaacagccgccacctgccagtctcggcggagcaggcacaggcgctggatgaacagtcgcgcacggtcatcgcacagaacgcgtcaaacaccaaagccgcgatggctgcgcgctatatggttgctcacgagcaagggcgttggagcgacttcggcgacgcgaacaatccatccattccccgcgccattcaggacgcgcaagccagcgccgacacgttgaaggcgagtgatggcaatgcctatacacggcaggcggacggccaatgggtcagcaaaggtgtgatctttgacagcgccgccaaccggaacctgagcgacgagctggagatcacctggcaaagccagaatgacggtatcgccgggctgcacgacatcgccaggcagctcaaggacaccgcacaggttgcacacgaaggtattcgcggccaggtggatgcgctctacgcgcgccatggcatcgagcgcaccgagcagcagcttgcagctacagccgtcgcggtcgagcagacgctgaacctgcaaggcagaacaggcgacgtggttctggaactgatgccagacccccgtacccacgcgcccagcgcagaaagtgccatcgccacgttcggtgacgccggcggaaaccggatgacgctcaccggcaccaccaccactgaagatattgcacgcgctcaatcacagcttcggtctgaggcctcattggctgcccaaggcgctgcgcctgcagatcaggcgacgacacccgacgtgcccgagctacgcattgctgcgttgactgcaaaggagcaggacgcacaccggcaagcgctgcaggaggccaatcgtcaaggcagtgcggcggtggatgcgcagcaggcagcgtctgcggccgtgctggaggcacgaggggggcatgtcgacccggttgagatactgaaggtcgacagtaacctgcagccaggtgcggcaaccaacgccgccgttgagtccgctcgccaacctgctccgtcgcccgctcctgtcatcgcggcgccctcggcggtgattgttgagccagaacgcacgcgtccctcgcgtgagagtgagcagccagtagagaatcacactgaacgacaagccgattcggcgcagcgcgcggaggatgccgcccggcagaacgttcggaaggaggagccggcaccgactgcaccaggagtgggccctcaaagtgcctcgcagcatgaaccgactgcagagcgggcctatgagcaggggaatgcctcggtggtaagtactgcggacagtgcaggctcaacccagccagttcacatgcaggagcgcagggctgagggtcccgcgcatcagggcggtgctgagccgcagaagcttgcggatgcactgccggtgcagcctgccgtcgctacagctcaagacaaagcagagcagccgctgccgcaaccttctgagagcgagcaggccccaaggaccgcccaggaagtcccgttggatctcccagttccgccactaccggcccaggacgagccggagccggaacctgcaggccccagaacggctgacgttggcggagacgctacccgtcaggcagcgccccccccttccccttcagatgaggagcgcgacctccctgggcatgtagcgccgccgtcggccgctctgacggaaagcaatccaatgcagcccggtcatcccgatcacccgctctatcagcagatccgcgagggcgtagcggagctggatgcccagcacggccgaagcttcgatgccacgagcgagaggatgacggcaagcctgctggttctagccaaggacaatgatctatcccacgttgatcatgtgctcgtaagcaacgccacggcaacgcatcccgccggccacaccctcttcgtggtgcagggcgaggcgaacgaccccgcccatctgcgcgcttccatgccaacggcagaggccgcgcagacggcggtggaggagtcactgctgcagttcgattcggtcagcagggaggcgcagcagcgcgcattggccaatcagcaggagcagcaactgcaggatgagcgagcacagctggacatccaggtgcgcgcggcaagcgcggggtga

SEQ ID NO: 507697 - DNA, 927 bp, Stenotrophomonas maltophilia
atggagcaggcaacacgctacaccgcaaccctttatctggccgcccccggcaccccactgaagagcggaggtgcctcgccgcgcggccacatgtacctgcaggtggcggcgggcgacgaggcccacagctacggcttcgcaccgccgcgccaggcgccgggcgatacccgcaccggcgtgcagtacgcgcaggtgcgccacgacgatgccgacgaacatctggacccgtactacagccgcaccttggaaatctctgaggagcattacggctgcctgcgtgatttcgccgaggagccggcggagttcgaattcgacgtggatcgcccggccaccatcaaccgctgcagcgatttcgtctgggcggcgctgcactacgccggcctgcatccgctgccggcaccgctggacggcggcagcaacctgggcgagttcgcggtgctgttcaacctgccggaaatccagtgcattgccgcgccgttcccgggcagcgatctgaatgccgagacccaccatgcgatgccggagcgcgaggccgagcatcatcgccagggcgaccgtgccatcgatgaaccgccaccgacgccgattgaagtggccggcacgctgctggacccttcgcatccagatcatcgcctgttctcgcagctgattcagaaggtggccgagctggacgccgcgcatggccgcccgttcgatgcggccagccagcgcatcagcgccagcctgctggtgctggccaagcagaacaatctctcgcgcgtggaccacgtgctgctcagccggccaacaaagagcagccatgcggcagagagcatcttcatcgtgcagggcgatcgtaatgacccggggcaccgccgcgccagcatcgccaccgaagtggcggccaagaccgatgtggccgattcgctgcggttgaaggagcagtaa

SEQ ID NO: 507698 - DNA, 435 bp, Stenotrophomonas maltophilia
atgatccggcggctgctggtgctggtgttcatcgggcttctggccgacaccgcagcggccagcgtgcaggaccatcgctgcctcaccgggggccgcaacgacggcatccacctgctgtggcgctggctggacgatggcagcgccgacgtgcagtacgccgggcagcgaggccgcctgcaactgcaacaggtgtcgcaggaaacgacggtgctggccgaagaccgcccgtaccagttcgacagcgtctgggaagaacgcatcggtggccgcctcaatgggcgctactacctgagcacccagggcgcgcacgtctacggtttcagctacgagcgcgcccgcgacgggcgacgtatcgagttcaacgaggacgtcgaggcgtggcacgaggatggctgccattggccgggaggcgtagcggcgcgcgtggtcgattga

SEQ ID NO: 507699 - DNA, 831 bp, Stenotrophomonas maltophilia
atgttcaactctaatcaagcgatgagcatggcgccgatcacggcgctgcgctccatcttccactatcgaacgctgatcctggagatggtgaagcgggaagtgatcgggcgctatcgtggatcggtcatggggctcttgtggtcgttctttacccctgtgctcatgctggttgtgtacacctttgtcttcagcgttgtgtttcgtgcgcgttgggctggggggtctggctccaaaactgagttcgcggtggttctgttcgtgggcatgatgatcttcgggctgttctctgaatgcatcaatcgggcgccgtcgctcatcctgtccaatgcgaactacgtgaaaaaggtgatcttccccctggagattctcccggtggtgtcgttgggtgcggcgctgttccactttgccatcagcatggtggtctgggtgctgttctacctgatcctgtttggtatcccatcgatccaggcgctttggctgccgatcgtgatggtgccgctgctgatcctgtgcgttggtgtgtcatggtttcttgcgtcgctgggggtctatctgcgtgacgtcggccaggtgatcgtggtcgtcacgaccgcgctcatgttcatgtcgcccgtgttcttcccggcagtcgcaatgccggaggagttccggccctatctgtacatcagcccgatcacttacttcattgaacagtcccgcgagctcctcatctggcacggcggcatgcattggggcatgtggctgaagatgctgggtgtttccattgtggtcgcagtactgggctttgcatggttccagaagaccagaaagggttttgccgatgtcatctga

SEQ ID NO: 507700 - DNA, 1320 bp, Stenotrophomonas maltophilia
atgtcatctgaaaacgccattgaggttgagagcctcagcaagtgctaccagatttacgacaagccccgcgaccggttgatgcagatgctgctgggaaatgacgagcggcgtttctatcgagagttctgggcccttcgtgatgtgtcgttcaagattcccaaggggcaggtgtacggcatccttggcaagaacggcgcgggcaaatcgacgctgctgcagatcatctgcggtaccttggcggcgacgtccggcgaggctagggtcgctggtcgcgtctcggctctgctggagctcggctcggggttcaatcccgagttcacgggtatcgaaaacatctacatgaacgcccagctgctgggcctgactcgcaaggaagttgacggtaagctggacaagatcatcagctttgccgacatcggcgatcatgtcagccagccggtcaagacttattcgagcggcatgttcgcgcgactggcgttttctgtagccatccatgtcgatccagacatcctcattgttgatgagacgctcagcgttggtgacgcgtggttccagcacaagagcatggcgcgaatgcgcaagctcatggaaagcggttgcaccgtgctcttcgtcagtcactccatcgacgcagtgcgggcactttgtgattacgccatctggatcgatggtggcaccctcaagatgcagggaaatgtcaccgaggtgaccaatgcctacatgaatgatgtgttcgtcgagcacaaccgactcatcttggaagcgagccagggggggatccatgacgagcctggcagcgtagcaatggccacccctactacgtctgggccggccgaccaggcgggggatgacatgatcgacgccgaggaggtcacagcccgcactgtgctcaacgttcaggcagtccagctcctgaatacggacggacaaccaacagaccagattgaacagcgcgaccagcttacattggccatcgatgtcaagttctacaaggcattgaagaacgtcagcatcggattcctcatcaaggaccagttcggccaggaattgacgggcgagagtatcttcaacagcttccgtaagggagtagaggtatatgcggggcagctgttgcaggtcagattcagaggggcgaatttgctgagaggagggcaatcctactccattgccattcgcatcaatcaggtcagccattgggaccgaagcgataacgtcgtcatatatgccgacgaactggccgcggtctttgatgtgcggacagacaaagatgaacccatgtggttcaagttcagaatgccattcaaggtggaatgcaagtga

SEQ ID NO: 507701 - DNA, 2007 bp, Stenotrophomonas maltophilia
gtggagctcattgcggtatttgaccgcacggatgatgctacccgggacgcgtttaatgcgcagcctatgggagggtttgatcgcatcgagacgttggaagtggatgtaggctcacttggcctagctcgaaatgcgggaatcgagcgtgcgaccggcgaatacatctggacctccgattccgatgacatcgtgtcatccaactcgatcgttgccctgctgcagaccgcccggagacaccccaaccccaaggtggtcgtcttcatcgaatacctctgcgcattcggtgaccgctaccacaatgttcgctacttcgattcaaggtacctcactgcgggggattttgcgtttcagcatccctacatttctcgaatctttgtgccaagggctgcctttgacagacttcgttacggcgacttgcgcgtcgcatcgggattcgcctacgaagattgggatttcaactgcaatctgcgtgcagatggctacgatatggttgtcgcgccggagacagtcatcttctaccgccagcgcaatggcagtctgctgagacaggctgacgctgcttcctcgcgcctgattcctcacggcccattgtttgatcgcaggactttcttgggcgacatgcagcgttcgcgcgcgggggactgggccaggctctgccgagagcgccagaaaatattcttggcggacaacacgcagttgttcacctcatcgccgaagatgatgggatacctgaatgacgccgtcgaactggagccggaaatcgagccgtacagggtcgagacagcgggcagctacagccccatgccttggaacccggcgcattggggaatgcagctggagagcctttatcgaatgattggagatgggcccttcactgacatcgtgctgttgccttggctgcggccaggagggggggagaagtacattctgcagattttggacgagatttcagcgcaggagcccgattcgcgtttcctggttgtagcgggcgaatccgtacctcggcatgagtgggtggcacgcctcccttccggaagcgtgttcatcgacatttgcaatgccttcccctcgcttgatgcgggcgaccgcgatgcattgctcatccgcgcattgttggcggtttcctccgttcgcgcccgtctacatgtgaaatcgtcgggttttgcccaccgccttctggattccttcgccccggtcatgagcgccagcttccgcattgtgtactaccggttctgcgacggaacgtatagttggggccggaaggtgcggcgcgggccttggggaatcgaggtgatgagaaagcaccttcgaggattctggaaagtcgtgacagactgtcaggcaaccctgtccgaagatcagcgtttccttgggccgcttcccagttacgaggtggtctatgcggaatgcgacacgccgcgagcggttgagtcgcagcgtatccccaccaagcgcctcctttgggcttcacgggtagacccgcagaagcggccggagcggttggctcaaattgcgagtgccctgagcgatgcaggtatcgaggtggaaattgatgcgtatggttcggcagatccgggcgtggacgcaaagatgattttcaacggtggcaagaatgttcgctatcgaggggggttctcagtcgtgtcggatttgcctctcgaaaagtacgatgcattcatctatacaagtgactttgatggtcttccgaacatcctgctcgaaatgctgggcgctggattgcctgtgatcgcaccggatgttggtgggattcgtgaggctgtcatcaatggcgtcactggcaaattggtgagcggagctgatgaggaatcgcttgtcgtcgcatacgtcgatgctgtgaaggatatatatggcgattggagtgccacgcttcatgcggggcttcgggcgcgtgaactggttctgacccagcatgggccagctcaattctctgaaagagtagccgaggtccttgaactcgctcgtttgaactccagcaaggcttcttga

SEQ ID NO: 507702 - DNA, 1947 bp, Stenotrophomonas maltophilia
atgtcaataatgtacttctacgctgacgcagagagtattgatgttctgcgttctggtcgctccaaggcgctgatgcttggcagcgactttggctacggcaatttcggtgatgtgctccagcacgttggagctctgtctcgcctgcgggaaacctcggctttggagctggtttcgatcttcgcgttggaggcgatctccaggtttgtcgcggtcgacgcactcaggaagatctacagagtcaatgcgttgatgtttgtcgcctctcaacctctccgggctgacgatttgacccgcttgggccttcagcaggtgcttgtcgtcaacaatgttgcaatgcttcatctctacggtgggggcttcctcaatgaaatgtggggggacttctccctggatattgccgaaagcctgcttcagaagcttcccagtgccatctacgttatttccgggcagcaggtggccgctggctattcaggtcgagtcgtcgagcacatcgccaaatacaagcccgctttggtcggtgtgcgtgatcgtgactcgctgcgcaacgttcaggagcatggcgctactgccgagttctccttcgacgatgcggttgagcaacttctgtcgctgtccagactgtttcagatacgtcgaggtgctggcgcattcctacatctgaactcctccggatacaccggcaatgacactgcgctgctggaaatgacccgacacctttcgcttgtgacgcagcgagtgggctcgtcggagcaggcggttctcttccaagcattccaggacggccgtgaagaagtggttgattcgcttgagaccgtcaagcggcttgagcgggctttcccgttcgcaagtgtgcagacggcattgctggtcgaggcaattctggctcctcccgggaaatggtcgccgcgtgtacttcagggtgaatttggctactcctgctcttaccacgtcaccatgtggttgcagctcaatggtattccctgctggttgcgtggcagcaatagctactatgaccagaagcgccgttcattgggagtggagggtgacttcgaatcgttcttggaaactctgccatgcgtcgaccatggagagaatctcgacgcgcgtgttcaatggcatgccaaactagatgccgtggttgacgctgcgggtcgcgctcagaatagcgtaacgtgggatccagcttccggtgaagggagagtattccatttcaaaggagaaccccgccttgaaacgcggcttggcgatagttggaggacggtcagtcagctgctggaagagagaggaacattgtctgagagtcggacgtcgctggctactgagaagcaggccatgtttgagcggctcgaagaggtggaaaccagattcgaccaagtaagcctaacgcttcggaaagtggagcgggagcgcgatgagctgtccctgcaattgcagagcaccaatgaacgctgcgagtccttggatctgcaattgcatgaggccaatgttgccgcagcagaggccactgatcggcttaaactactgtttgacgacgctctgtcggcgggagcgcgtgtcggctctctgggtgccgtccgggattactggcaggagcgacggttcgaaatcgaggatcggttgttggcctgcaatgagcggctgaccgaggtgggcttcgacgccgggcgataccgaaagcaggctgaatccgagcatgatgcacgcgtctatcatatggagcgggcccaagcggccaccaacttgctaaaggaaatgatggcaagccgctcgtggcgctggacgtcgccgcttcgggtagtcaatcgattcgctagaacgcggcgatttgatgcggcgggcaacgtgggtctgttcgaaatcctacgtcttgcagggatgcgaatgccggttccccagagcatgaaatctcgcttagggagttggctgaggagcttgcgccggcgttga

SEQ ID NO: 507703 - DNA, 1455 bp, Stenotrophomonas maltophilia
atgatttcacgatcctttgcccgtcgggcctatcacctgctggaccggcagctactctcacggctacccgatcacatccagcgcaagctgatctcgcaactcctgagcctgggcaagcgtatccatccatcggcgaaatggccagtctcggcagaccacgtactggatcgcaggagcctacgcgaacccgtggcagcgcttcggacgctgccccagtgggcagttgaagacatggagaatctctcactgcaggtagatccactgctatcgcccggcgaattcctaggctcgcacccgcaggcgcgctacgcacccacccattggacacaggcgggcaaggcctatcagcgaatcctggatctgattggaagccgacgtttcgacaccattctattcgtaccatggctgaagcgtggcggggcggatctggctgcgctgtaccatgccagactctgcagtggtgagctggggcatcgaacattggtccttgccactgaagatggagactccccttgggcagatcgcctgccgagagcttcactgtacattgatgcggggaaagaatttcgcggactaagcactgcaatgcaagagcgggaaatcgttcttgcacgattgattcttcagctggcaccatcccggatccatatcatcaactcccattccgcatggagaatgctggagcgatttggactagctattcgccaaagaacccgtatcttcgtttcactctactgcgacgagttggcagagagcggccgcgcacagggccttgcacagcagcacctcccgaccacttcacaatggctggacgcagtcatcactgacaacagcgcctcgcctgaaagctggtgtcagcagcttggtattcgccgtgacctttttcgggttgtgcacttccccgctccgtcgatggacaatgcgccaagcttcacgctgcagccaggcaagcgcgtcctgtgggcaagccgtcttgagcggcagaagcgacctgatcttctggttgacatcgctaccatgctcaaggatgtccactgggacgttcatggaaccgcactatcggcggacgatccgcatctggctgcgctcacccgactggacaacgtaaccctgcacggtccatttgaccgctttcaagatatcgttttgccgcagcatcgggcttacgtctatacgactgcctgggacggccttcccaacgttctgctggaggccgcagccgcaggcctcccgatcgtagcgcccgatgttggcggcatcagagatcttgtacccgcgcaatcgctgctgggcactcgcgctactgcactggattacgtgaaggacattgagcagttgtcggataaccaagtccgccagcaacgtctttgcatgcaaaacctgcaggtcgcaacattcacttgggaggcgttcgcgcgggatatgtgcagaatcgagggttacgcgaacgcctga

SEQ ID NO: 507704 - DNA, 723 bp, Stenotrophomonas maltophilia
atgaaacctgaggtctcggcagtcatcacattccacagggaaggtctgctggcgcacaagtccttgctgtcattgcttcgttgcaagcttgccgcagcggagcacggcatttcggtggaagtcgtcgccacccttgaccacgccgacgctgaaacggcacgcgtgatcacctggcatcaccatgccggcttgatcgataaagtactagagctggagtgcggtgatctgggggtttcgcggaacaaggcaattgaatctgtagctggccactgggttctgatatgtgatggtgatgactatctttccgcggactttgtcatccgctgcttggaaaccgcagcaggaaatgagaactccattattcaccccgagttgattgttactttcgatgctgagcagggcatttggtggcaaacaggaagtgacgcctacggctttgactccgactgcatgctggtaaccaacccttggaatgcatgcagcttcgctgccaggagtatttatctccagaccccatataccctctcccgcccaggcgaatcaggattcggcttcgaagactggcattggaactgccagacactctcgctaggccacccccacctgatcgcggaacggaccgtgcattatgtacgcaagaagaaggtcggctcattgaaccaagcgcacgccagcaaccgcgcgttgatcgcccccacccagttgttcgccccccgtccatga

SEQ ID NO: 507705 - DNA, 1011 bp, Stenotrophomonas maltophilia
atgaatatccttgtaactggcggccttggttttattggctcccatacttgcgtcgatctactagcgcgcgggaatgaggtaaccatcctcgacaacctggacaatagccagaaaggaacgctggaggcgatcaaaacgatcacaggaaaaccacctgtattcatcgagggcgatgtacgcgacggatccactcttcgtactgtcctgcaggatcaccagatcgacgcggtaatccatttcgccgcgctcaagtcagtcggcgaatcttggaagcgcccgcttgattatttcgacaacaacatctcgggaacaattactctcctgcaggcgatggagggcactggtgtacgaaactttgtcttcagctcttctgcaacggtttatggtgacccggacttctgcccgataccagaatcagcagcgacccgaacgaccaatccgtacggccgaaccaaactcatctgcgaacagttgctagctgataaggcggcttctgatccgaaattccgggtagccacgcttcgttacttcaatcccgtaggcgcacatccatccggtctcataggcgaagctccgactggaacgcccaataacctgatgccgtatgtttcccaggttgccttcgggcagcgcgagtaccttcaagtattcggcgacgactacgaaacacatgacggcaccggcgtgcgtgattacatccatgtcatggatctggcggcagcccatgtgcgcgcgctggactacatcacggaaatgaatcagagtcttacagtcaatcttggtacaggcaagggatacagcgtcttggacgtcgttgccgcgtttgaacgcgcaagcggccgaagcgtaccgttccgtgtcgtggcgcggcggcctggagatgcagccagttgctttgccgacccatccctcgcccacggtcttttgggctggaccgcggagcggagcttggaccagatgtgtgttgatgcatggcgctggcaggttcacaacgaccggggtccagcctga

SEQ ID NO: 507706 - DNA, 1488 bp, Stenotrophomonas maltophilia
gtgatccatcctccttctcttcccagcagcgcaagcggcctgcttctccaaagaagcttctggctgctctttctcaccgcccttgtgggcaacctgctaagcaaaggcgcgacactacttccgggaatggcgcccgacgactacgcctttgccttccaaggtgatgctgcgggaaacctggagaacttcgtctctcagggaagggtggtgctgtccctgcttacccaaagcgtggacgtaactgggctttcgcttaccagcatctcattcttcacgtcattgcttgcattcagctcgatctcactggcaattgcagcggccgtttcgctaacccgtgtgagtgagcgcaacaattttgtccattacgtcgcagccgttttcgcagcaacccatccttacctgacctcgtacttcctgttccgcatgagtgcgatcacacatgcgttcgtctatttgtccctgttctttgccctgctcattctgacaacccagttgaagacaggcataaaattcgcgctgagtttgcttgtcttggtcgtatgtagccacgccaaccaagcgattctaatcctgtatgccatcgcggccggggcatgggccgtcaccatgatgtgcgaggtcaagcagcggaaaggcgaatggccccaggctctgtacggcgtcgtatttgttctagccacgctgctcctaagcaccaccgtttatcttataaccagcagcatcctacgaagcatcctgggcgtaggcgcatcggaaacctatacaccccatcttcaaggcggagtcgccaacacactccactccggactaagtttggcttacgggatactgcttcgaggcgagccgatcatggccttgtggctcaagattcttttgggcattgggttgctgtcgatgttcttgttctgcttagtccgcgactggttcagagcactctcggcagcgctttttctaggggccggcctgctggccacagtaagcccgcttgctctttcctggggggggcatgttccccgcaccttttcgccggcgggcctctgttttgccctcttcatcagtatggtttgggcaggaattcgccttccgtttggcaggttgatattggcttcattgattccacttgtgttcgccttctgcgccatcgggtcaaccctgttctatcagcagttacttgtaacacaatgggatcaacggaccgctaccgcaatctacacgcgcgcattggagtttgacggcattccgcgcctacagattgcggcaggatggcccgcccacaccagaacccaatcgatgacaggcgaaggcatcaatgaatccgccttcctctatgattggtcactgcccggactgtttgccgtgtcgacgggggaaaaattggatatccgtggaacaaaaaaagagatgtgcaacgggatcgccgcatggccgtcgcgagcatcggtgtcaaagcaagcagacggcagtatcctcgtctgcatgattcaatag

SEQ ID NO: 507707 - DNA, 1134 bp, Stenotrophomonas maltophilia
atgattccgttcaatcgcccgttcatgactggcaaggaactcccgatgatcagccaggcgcatgccaatggccacctttcgggagacggtccgtttacgaagaagtgccaccagtggttgcgagaacgcacaggcgctgcgagtgccctgctcacccactcgtgcactgcagcactggaaatggccgctcttctgctggaccttgaacccggcgatgaagtgatcatgccctcattcaccttcgtgtcgacggctaatgccttcgcactgcgtggtgcggtgccggtattcgtcgacatacggagcgacactctcaacatcgacgaagccctgatcgaagcggccatcacttcacgcacgcgagcaatctgtgtggtccactacgccggtgtcgcctgtgaaatggataccatcgtccaaatcgctcaacgacacggcgtagctgttgtggaagatgcggcccaaggaatcatgtccagttacaaggggcgcgcattgggaacaattggcgagctcggggcgtttagtttccacgagaccaagaatgtcatttccggcgaaggcggcgctctactgtgccgtgacaccgagttcggcgagcgtgcggaaatcatccgtgagaagggaacaaaccggagtcgcttcttccgcggtcaagtcgacaaatacacttgggtcgacgttggctcctcctatcttcccggggagatcatcgcagcattcttgaatgcccaactgaatgaagcagaggacattacgtctcgacgcctcgcgatatgggaccgctatcatgcatgggcagcgccacatgaggcagcgggtgcgctacgccgcccgatagttccggaagaatgtgttcacaacgcacacatgtactacttacttcttcccagtctggaagcacgtacgaaattcattttcagcatgaaggaaagcggagtgcagacggtatttcactacatacccctgcattcttcgcctgcgggagagcagctcggccgcacgtctggcaatcttgatgttacggacgacatcagcaacagactggtccgtcttccgctgtggctgggtcttgaggagcaactcgaccttgtaactgaggcggcggagcaagcaatgcaggtcactcagtga

SEQ ID NO: 507708 - DNA, 171 bp, Stenotrophomonas maltophilia
atgctggcggtttcgcgactggaacttagtcgtgcctatccattcatggcactaaacttcctgatcgtctgcgtcgccgctatccccctgtttggcgaagttttcaccgtgtataaagcggtcgggctggcaaccgttattgtcggcctgatcttcatcagccaaggctga

SEQ ID NO: 507709 - DNA, 756 bp, Stenotrophomonas maltophilia
atgcctgaacagtccttgctcaattactcgcccttggactcgaatcgattcgcgatccacgtcgagcgcgcgaacctcgggatcgatacgcctgcggcgcccatggtcgaggccattatggcctccccggccgacctcatcattgcccgctttccagcgggcagcaacgaggtccccaatgcgctcatccagcatggcgaagtactgctccacgctgacacccttgtctactatgaagtgcggctgccagcttccgcaggaaacgcggctcccaacgttcgccgcgcgcagttggacgaccttgaggcaatccgcggcatcgcctccgcaggcttccagaactaccgggcccactatgcggccaatccgctattgcccgctgcacagattctggacggatacatcgagtgggcccagagccgtgccgacccgtccaacacaaccagcgatacctggctggtgttcgacggcgacgttgccgctggcttcgctacctgcgatgtccaggacggtggcgtggagatcgtactcaatgcagtccaccccgctttcgagcgacgaggtcactacggcacgctgctgcgtcacctgctgcaccactatgcaggagcgggcttagcgcgcctgagtatctccacccagatatggaactacaccgtgcagagacaatgggcgcgtgccggtctgttgctggcgagagcttacgatacgtttcatatcgaccgccgcctggctgcaaagcggagcaagccgtga

SEQ ID NO: 507710 - DNA, 672 bp, Stenotrophomonas maltophilia
atgattgtgatggactgtgacctgcaggatatacctgaggagattcccacgcttctggccgagcttaaggaagatgtcgagatcgtcctcggacaacgcatcgaacgtcaggacacctggttcaagcaggcaggctcgcgcaccttctaccgtactttgggctggttgaccgataccaattacgatccgagcaccgccaacttcggcgcctacagccgcaaagtcatcgacgcgatgaatgcgatgccggaaacggacagattccttcctctgcttgccagatggacgggctttcggacggtccgtacccccgtggtacacggggagcgcaccgtgggcaagagcagttacacgctaagcaagctgctgcagatggcgacccggatcgccctttcattctcggacaaaccgctgagattggtaatgtcggcttcgttcgcactcgccggagtgggcctctgcgttgcggcgttcgccgtgtaccgctatctgatgggcgatattcgagttgcgggattcaccagtatccttgcttcggtctggctggtgggaagcttcctcatggcaagcattggggtggtcggcctttacgtcggtcgcatgcacaacgaaaccaagagacgcccgcagtacctgatctggtatgactcctggagcaacgacaatgcctga

SEQ ID NO: 507711 - DNA, 1044 bp, Stenotrophomonas maltophilia
atgtaccgcccgctgagcgcactgattgtaggcctgctgctgccgcttgccagtcatgccgcaaacacgccggtcacacccggtatcgagttcgtgcaccacgactggttcctggcctgcgacaacaccggcacctgccgtgccgcgggttatggaccggaaaacgcagacagcctgctgggcctgatgttggaacgtgccggcggtcccggtacaacagtgaaggcgcggctgcgggtgggcgaggatggcgaaagcgcaatgcctgaaggagcgatgcgcctgctggtgaacgaccgtgatctgggcccggtgcaggacaccggcgccgacgaggccgtgacgctgcgtcccgcgcaggttgaagcactgctcgccgccctgcccggccgggcccgcatcgaggtcatcgacaacaacggcacccgctggccgatttccgaccgtggggctgccgccgtactgctgaaaatggacgaggcacaagggcggatcggaacacccggcgccctggtgcggcgtggcacccgttccgaggcaagcgtgccggctgcacgggccagaccggtgatcgtgcgcgccacgctggcggccgctcgacccggcgaccgtgcactgggtaccagcgaagcgctgcgcgacgccctgattgccacgatcggcgacagcgacgactgtccgcacctggtcgagtacacgggaactccggaaatggtgatcgagcgcctggacggcagccatgtgctggtccaagcgctgtgccagatgggtgcgtacaactacagcaatggtttctggatcgcgcgcgatcagccaccgtatgcggcggaggtggtcacactggaagccgagggcttctcgcgtgaagaccgcacgctgtatgcgcgctacaagggtcggggcatcggcgactgcgtttccggctcggactgggcatgggacggtcgcagattccaacccagcagcgcgttcagtacgggcctgtgtcgcggcatcccgggcgggcactggaacctgccgaccctggtcagcgaggttcgttga

SEQ ID NO: 507712 - DNA, 1071 bp, Stenotrophomonas maltophilia
atgcgcaccctttctctgctgcaggcgcccctgttcctgctgggtttgctgatgatgccttcggctgcttcggccacggatgcggtgggcggatcgttcgccgatggcgactggttcatggcctgcgacaacacgcgcacttgtcgtctcgccggtgtcggcgcactggcgccgctgaggctggccgcgctgatcgagcgcaatggcggccccggagccgcggtggagatccggctgacactcgcccgcgacagcgttgacgatcccgaagcgcaggcacagtcccctaccggcgaactgcaattgcggttggatggaacgcccgccggcagcatcggcgtactggagtcggcgacggagcatgcaacgctgacaccggcccaggtgcaggcgttcggtgcagccctcatcgagcattcacccatcagcgtcaccgacagcaagggccaggcatggtcgctctccgcatccggcgcagccgcgctgatgctgaagatggatcagttccagcagcgcctggagacgcctggcgcgctggtgagacgagggcatagaccggagtcgcgcgtgccacccgccctcccgaagccacagcttgccacgccatccatggcggtcgagccgcatgaggaagacgtacacctggaggaccgcgaggacctgcgccgcctgcttcagcccagcagcaaggtcgactgggcatgcgccccgaatgtgcagcagaccgcgccgcattccatcgccatccagcgattggacgatcatcacctgctcgcctctgttgtctgccacacccaggcgctcaacgtgccggcgggcacgtgggtgatcaacgaccaggcgccgttcaatcccgtattcattacccagggcgcactctttgcgcgctcgcccgaggcggtctttctcgaggaaaccgtggagaccgaccaggatcgctgcgaaaccgggcgctactggtcgtgggatgggcagcggatgcagctggccatggagtacgtcggcggcacctgcagtggctctggcgcctccacctggcagctgccgacctacgtttcggagttccgctag

SEQ ID NO: 507713 - DNA, 387 bp, Stenotrophomonas maltophilia
atgagcctgctccgccagggaagcgcctacctcatcatcggcgtgctgcaactgctgctcgactgggcggtgttcgtgctggtcacggccgccggcctgcccgtggtgcagggcaacctggccgggcgcgtggccggcatgctgctggggttctggttgaacgggcgaatcaccttcgccactgccgacggcgagcaacggctgggctggcgacgcttcgcacgcttcctgccgctgtggttgctgctcaccaccgccagcacgctgctggtctcgagcgccgaccatgcattgggcctgcagtacgcctggttggccaagccactggtggagggcggcctggccgtgatctccttcctgctgctgcggcacgtggtgtaccgctga

SEQ ID NO: 507714 - DNA, 954 bp, Stenotrophomonas maltophilia
atgagtccactgatattgcagaaacccgactccgtgtctgtcttcgacaccaaacgtgtctgcgccgtgatcgttacctacaggcccaatcccgtcttgctgcgcaatgtggttgacagcgtgctgcagcaggtagggcatctggtagtgttcgacaatggcagcagtgctgttgacgttgctgaaatgctgggagatcaagaggggataagcgtttttgcttcaccaatcaatgttggtcttggcagtgccttgaatcgagcctatgagcgtgcgcaggcgctggaattcgactatgtgctgctgatggaccaagacagcatactggcaccgggaatggtcgttctgctgggaaacgcactggttgaattggcccgggatgagagtgtggcggctgtcggtccgcagttccgggattcgcgcaatggcatgcttgctccgttcgtgcgctttggattcccgttcaatttcaagctgcgcggtgggccaggtcagcgcatctcttgtgatttcctcattacatccggttcgctgataccaatgaaggccttgcgggagattggcgcaatggacgaatccttgttcattgacaatctggacatggactggtgcttccgcgccaagcgcagtggccatgccctgtatggcatttgcgatgcgcagatgacccacagcatcggcgaggaactgctgccttcacgtgcaaaacccgatggtgtgatcgtgcacaagcccttccggctttactacatcatgcgcaatcgggtcctgctctatgggcgtgcctatacgccctggatttggattgcccaggatatgccgcggttgctgctgaagctgatgggaaacagcttattcctagcccctcgctgggttcggttaaggttcatgctgaaagggttgtgggatggagttcgaggcaagtcgggggcgctacccccggcaggtcgctga

SEQ ID NO: 507715 - DNA, 984 bp, Stenotrophomonas maltophilia
atgtccagcgtcacaaccaccgtctctgttgctttatgtacctggcagggggagcgctacattgccgcccagctgcgcaccgtcggtgcgcagaccgtgctgcctacgcaagtagtgatagtcgacgacgcctcaactgacggtacatggggtgttctcgaacaggaggtggcgaccctgcatgcgaggggtatcgaagtggtgctccgacggcagcagcagaacgtcggatacgtccgcaatttcgaaagcgcattattacagtgcagcggcgacatcgtctttctgtgcgatcaggatgacctctggcgcgaggacaagatcgagaccttcctaaggatcttcgatgcgcgtccaggtttgcggctcctgcacagcaacgcgcagttggtcgacgccgaaggtgtccctctgcgggcgactttgtttcaggccttggccattgatcgccaggacatcaagcgtgagcatcgcggtgaaggctttgaggtcctcctcggccgaaacattgtaaccggcgcggtcacagcgctgcgccgcgatctgatcgcggaggcactgccagtggctgatggctggatccacgacgaatggttggcgatggtggcagcagccagcggtggactggattgtattgagaccatcaccaccgattaccggcagcacgacaggaaccaggtgggggcgcacaggcggggggtgcttgagcgtgcattgggaagtgccgtggtacgtcgcaactatttgatggcggcattgcagcgcctctactcattgcagtcgcgcacgcagcggggacggccgccgcttgatgctgtgcagaccgagattctcgagcagcgcctgaagcatgcacaggcacgtgccggacttgctgtgtcgttgttcgcacgtttgctgcaggtcttcagggaagtggccagtggccgctaccatcgcttttcaaatggcttgcggtccgcagccagtgatctgatgccatga

SEQ ID NO: 507716 - DNA, 183 bp, Stenotrophomonas maltophilia
atggcacacgcggagcgtgccgccattggcgtgctgaccgtggcggaaatgctgcacgccgcggaacgctgccggtcgatggccacgcccgaccgccatctggatgaggggctaatcgatgggttgttcttcgcctgccgcgggctggcggaacgggtgtgccgggatatccggccggcgtag

SEQ ID NO: 507717 - DNA, 462 bp, Stenotrophomonas maltophilia
atgggccttcaaaccatgcagtctagaattgagacccgcctcaatgacttgatagagatatcacgagacgggaaggcgttctatgaggaggcctcggatcgaatagagagctcggagctttccgatctccttatgggcattgcaggcgtgaaaggcgagctggtcgaagagatcagtagaattgtctccagaagtggtggtcgtcctgcagagcgaggcacattggtgggtgcaatgcatcagtattatgggaagatgctcgcggcgtttggcgagacccagtaccaatacttgaaagagttggagaagtctgaagagcgtcttgttcagacgttcaacgaagttctcaatgatccggagctatcacaggacgtgaagagggaggttgcgcggatgattcccaaggtcagtgaatgccattccgtcatgttgaatcggctgcaatcgatgcatcgacactaa

SEQ ID NO: 507718 - DNA, 201 bp, Stenotrophomonas maltophilia
atggccgagctgatgcgcacctcggtcgggcgctttgtggtctcgatcaacgaccatcctgagatccgcgaagtgttcgccggcttcgacctggtgccgctgcagctggactacaccagcggcggcgggcagggaagaggaaagaagttcggagagctgatcatcaagagctgggacgacagccaagccaccttgctgtag

SEQ ID NO: 507719 - DNA, 258 bp, Stenotrophomonas maltophilia
gtgatcgagctggtgaacgcgttgctgcgcgatttctacggccaggaggtggcgcggtacctgtcctgtgacgatatcaaggcgctgtgccgcacgccgcggcgcaagggccaagctgagttcctgcgcaacaacgggatccggcactatctggacgcccacgggtggccagtggtgctgtggtccgcgatcgagggcaagccggagccgaagacgccgccggcgacggaatggaaaccgaacaaggcagcagcgtaa

SEQ ID NO: 507720 - DNA, 1029 bp, Stenotrophomonas maltophilia
atgggaaggaaacccaagaagccgggggctatcccccggttccgcccccggaagcagaaatccggcgtggtgcactactactacgaccacggtggcaagccgcgcaaggaaactgcgctgggcagcgattatggcctggccatccagaagtgggccgagcttgagcgtgcggcgacgatccccgccgatgcaaagctgacgttccggcaggccgccgagcgctaccgcgtcgaggtgattccgacgaagtctgagggaacgcggcggaacaacaaccgcgagctcgattcgctgatccagttcttcgacgacccaccgggtccgctcgacgcgatccgtccgacgcacgttttcaactgcctgcagtggcgccgcagcgcgcctgtggctgcgaaccgtgaaaagtcgctgctctcccacctatggaaccggtgccggcagaagggctacacggacctaccaaacccatgcgccggcgtgaaccgattccgagaggacggccgcgacgtgtacgtggaggacgacattctgcagcgcgtgtacgacgccgccgaccaggtgctgaaagatgcgatggaccttgcctacctcaccggtcagcggccgaccgacatgcgcgagctggaccgccgcaacatcaaggacgggacgctggtgctgcgacagggcaagaccaagacgccggtgcgcatcgcgatcaccggcgagctgaaggtgctgatcgatcgcctgctgtcgctgaagcgcccggatgacgcaccgatcagcacgcgcctgctgctgggcgaggactggcttccgatcgggaaacatgccctgcgctatcgattcgacaaagcacgcgagcgcgccggcatcccgaagaaggtattccagttccgcgacctgcgcgcgaaggcaggcacggacaaggccgattcggccggcgacattcgccaggcgcagcagcagctgggccacaagtcagtgaccacgacagagatccatgtgcggaagcgccgcggtgcgctgaccagcccgacgaagtga

SEQ ID NO: 507721 - DNA, 1113 bp, Stenotrophomonas maltophilia
atgctcatcagtgccctgcccttcaccgccgtctctgccagccaggaccatgccaacgaccagacccgccgcctgatccgccagatcatgatgcagcagcgcatccccgggctgcaggtcgcggtggtcaaggacgggcagatcgtgctgtccgaggcctacggcctggccaacgtggagaacggcgtgctcgcctcgcgtgacacccgcttcccgctcaattcagccaccaaggctttcaccggagtcgccatcgcacagctggcggagcaggggcgactggaactggatgcacccgcctcgcgctacctgcacgatcttccagcggcatggaaggatgtacgcgtgcgccagctgctcgaccatacctcgggcctgccggacatcctcgatgcgaatggcctgctgggcggtgggtccgaagcgcaggcatgggcggcggtcaccgtgcgccctgtcgaagcgccacccgggcagcgctttgcctacaaccagaccaactacgtgctgctggcgcggatcatcgcgcagcaatcgggcatgtcctacgagcgcttcctcaccacgggccagttcagcggcgcacgcatggcgcgcacgaccttcggcgacagctacgacctgattccggatgtggcgacgatgtacagcctggcgccgcgcgcgaccgatgccgccgacgctccgccgcgcctgtcgcactggttctacgacatcccgccgagcctatgggccggcggcggcatcctcaccaccgccgacgacaccgcacgctggctggtcgcgctgaccgaaggccgcctgctgcaggaccactcacggcggcggatgtggtcggtcgagcctctggccgatggccgcgccggtccgtgggccggcggctggccggtgctgcaggcagcgcccgacctgcaggtggccggcatcggcggcgcgcgctcggccttcgtggtctaccccgcgcgaggcgtggcggtggtggtgctgaccaacctggtcggtgccaatccgcagcgcttcattccacgcatcgccgatttctacacgcctgccgcaacggctgcgggcctcatccccgcggcccgcccatcaccggcaggatcaccccgctga

SEQ ID NO: 507722 - DNA, 1230 bp, Stenotrophomonas maltophilia
ttgaacgcgcagccctcgccacggcacctctatgccgccggccactttgcccgcaccctggcctggtcattcgtggatctggtgctgggctactacctgcacgcccggctggggctgtcggcggcccacaccggccagctgctggccatttcactggcctacagcagcctgctcgatctgctgctggccgccgtgttcacccgcctgcgcaaccagcagcgcctcgccctgcgcctgcagctcatcggcgggctcggcacggcggccagcgcctgcctgctgttcagcccgggcaacgcaaccgagcccgccttcctgccattgctggtcgcatcgttgctgttccgtacctgctatgcagtctacgacgtggcccagaacgcgttgacgtcgttgctgccccgtgacgaggacgaggccatgcgctatgtctccatccgcgccgtggtagtgccgatctccaagctgtgcattgcctcggcgctgttcgtcgtggtcggtacgcctgcgtcccagggcagtggcaacgcgttgctgatctgcacggtcatcggcgtgctgatcgcggccgctgcgcttcctttggcctgcgtcgcaacgcccccacggcccaacgcaaccaggacgcccgctgctgttgccctgcccctgccagcgctgctgccggttctgctggccgcggcggcggagacgacgctggtcggcctggcagggcgtctgttccccttcgccgaacatggggcagcgctgacctttgcgatggtggcgggcatggtggttgccccctggctctgcctgcgcctgcgtacaacgctgcacagcgagaccgggatgctcgcgttgatgtcggtgctggccgtcggagccgtcggcgtgtacctggccctcccctccacgcccatagcgattgcatgtgccgcgacccacgggacggcggtggccagcgtcggcctggtactgtggcgacgcaccgcgctgatcgcccgtcgccacgccatccatggcggacgcgacgatgacctcagctgctttgcactgctcaccggaaccatgaagctatccatcgcggcctcttcgttgctgctgggcgaagtgctgcccggtatacaggcgggcgatctggacacctcggtcgccctggtctcgctggtcgccatcggcagcctgctttcgctggccgcattggcctggcccatccctccagcacgcagcgagggcctgcgcccgtga

SEQ ID NO: 507723 - DNA, 1158 bp, Stenotrophomonas maltophilia
gtgagcctggccccgacatcgcggctgcgccgcaagccgctgatcgcgctggaggccgaccataagcgcatcatctggctgttgcgcacgatgggcgcggttccccgcatcaccatcgcccaccagctgggcatgcacaacggcgcgttgacccgcctggcgcgtgagctgctgatgctggaagtgatcgaggagcaggaacagctgtccgatggccagcgcggccgtccgtcggtgccactggcgctgtccggccggggcggctatgccgccggcgccacggtgcatcccggttggctggagatcgcactggtggatttcgccggccagctcatcgcccgtgatgccatcgcattcgacagcgcagatccccacgatttcgtccattgcgtggaccagcgcctgcgcagcctcaccagcagcaccggactgatgcgcgcgcggttcctgggcctcggcgtggccgttccggggcccgtggtcgaaaccggtccggcacgccggcacgcggtggactggctgcatggctggcgcgatatcgacaacgaccagttcttcgaagactacttcggcttcccggtgtgggtggagaacgatgcaaccctggcggcgttggcggagtactacgacagcgggctgatccgcgactgcgcttcggcgctgctgctgtatgtcggccacggcgtgggtggcggcgtgatccaccggcgtgatgtgatgcgcggtgagttcggcaatgcaggcgacatcggccgcctgttccgcatggacgcaccgcgcccctcgggcatcgacctgctggccacgttgcgcgacgccggcgccgggattccttcgttgttcgagttggaagcctgcctggaaagccatgccggcatcatcagtgcctgggccgaacgcgcgggaaaccagctgggcgcggcggccaataccggcgtggcgtggctcgatccgggcgccgtgatcctgtccggttcgctgccccgccaggtactggaagcgttggggcaacacctgcagcagccggcacgctggagcagcgcgctggacagcctgcgcctgccgcaggtgcatgtgtcacggctgggaggatctgcggtatcggtgggcgtggcgctgctgccgatccaccagctgggcgccgatgccatcgtttaa

SEQ ID NO: 507724 - DNA, 2496 bp, Stenotrophomonas maltophilia
atgaacatcagccccctggtcctgggaatctccctggccttgatatccctgcacggcaacgcttctgcgcaggacgccccggtccagaaccagggcagcgtcgacgccgcaacgctggatgcggtggtcgtcaccggtgcggcgcgcacccagcgtcgtttcgatgcgtccttcgcagtcaattcgctcagccgcgaagacgtgcagaaactcgcaccgaaaagctatgccgacctgctcgggtccgtgcccggcatccatgtcgaagccaccggaggcgaggtgcagaacatcacccggctgcgcggcattcccaccgatcgtggcttcatcgccttccagcaggacggcctgccgctctaccaggagctggatggccacttcttcaattccggcgacggcatgaaccggttcgacgtgatgaaccagcgggtggagatcgtgcgtggtggtccggcgccgatctatgcgagcagtggcggcgccatcgtcaacaacatcctggccgagggctcggaacagacccacggcaaggcccagctgaccgtcggtgacaccgggctgtaccgtggcgagatgtaccagtccggcgccctcggcaaggacaccttctatgcggtcggtggattcctgcgccagcacgatggctaccgcgacaacggcttcccgaacgacaagggcgggcagatcaggggcaacatcaagcactacttcgatgacaccagctggttcaaggtcagcggtaccttcgtcgatgaccacaatacgttctacctgccgatcccggtcgccgatccgcgcaatcccagcgtcccgctggacccgtacatcgactacttcgacggtacgctgaactcgccgtcgctgcgcagtgtcaaactgaagtacctcgatggcggcggcgtcctgcagggcatgaaccgcgacctggccgatggccggcacatgcgcttcggcaacatcggcttccagtacgagaataccgccagcgattggacgatctcgctgaaaaccggttacaccaagggccgcaacaccttcgacgcactgtactcgaccaccaacccggtcgacgcacgcactttcgccaacggctatctgggcgcggcccgtagcgccttcggcgccggggtcgcgcggatgggctacgctctggccggcagcaacggggcgagcgcctacgacccctatgccgactccggcctggtgatctcggcccagtaccgggccgcagattcggatttctactccggccaggccgacttcagtgcgacgcggttgtttgaaacggcctggggcagccacgatctgaacatcggcgcatatacggccttcttcggcaccacggccttcagtctgtaccaggatatgctgatggagatgcgcggcaagccacgcctgctggatctggtggcctacggcaacgatggcgcccccttgggatacgtcaccgacaagggcgcgctgcgttacaccactaccctcaatcgcggcaaagtggatgcccgcatgttcgcggtgtatgccaatgacacgtgggcactgacggaccgcttcaagctcgacgcaggcatccgccatgaacgctaccgctatgaaggctatgcagagcagaccgcccaggtcgacctcggcgaccgcaccacactggccgacaacaccacgcgccggttcaccggcgtcgtccagaaccatcgcctggatccgtccgcgaccaactggaccgtcggtgcgaacttcgatttcacctcttcggtgggtgcttacgcccgcgtctcgcacatggagatcgttcccaactcgtcagtggcacgctcgatcgatcccaccatcgtgcagacccagctggaccagtacgagctgggcctgaaggccggattcgcccggtcctacctgtacctgactgcgttctacacgaagttcgacccgctcaacgcctcgttcgtggcgttcaacccgacgaccggccgcaatgaccagtcggtgccgttcatcggtaccgccgtctccaagggcatcgaactggatgggctgttccggccgctcgactggttcagcattgccggttcgatcacggtcagcgatccgcagtacgacagcctgcagaacgattccggcgccgatccggccgccgtcaacggcaagcagatcgttcgcgagcccaagctctacggcaacctccgcccgaccttcagcttccagcacggccaggaccagttcgagacctggctgcgctatgacgtggtcggcaaatcctatgttgatctgttcaaccagacggcgctgcctgcctaccagaccctggggctgggcgtttcatggaaacgcggcaactggggcgcacagctggtgggcgacaacctgaccaatgaaaagggactcaccgagggcaacacccgcaccgatgccctggccggacagggttcggccgaggcaatctatggacggccgctgttcggccgcaacgtccgcctgatggtgagcaggagctggtga

SEQ ID NO: 507725 - DNA, 1107 bp, Stenotrophomonas maltophilia
atgcatcgacgatttgccttgtcccttgccctgcttgccgcggcggcgctgccgcttgcggcggcggccgacgaccgcgacagcgccgcgctggccgcacgactgttccccaccctcatgcagttgaagcccgatacactgcccggtgatgcgcgcgccctcctggccgaacgcatgcagcagctggccgactgccggaccgccacctgcacgctcgcgtccgcacgctggacgcccacgcaggccggcctgttgatcgccgcggctcccgcgcacgccaaagccatcgaacgggaactggcaggcctcaacaacattctctccgtctacggccagggccagccaccccgctacgacgccatcgacggcccggtcggcgcggcgggcagcacgcgactggccggcgacgtcgccattgccgtgcaaatgagcgaggtggacgccagcgcggcctacaccgccttcgatcgcagcatcgcggtggcggtaggcctgctcgatgccaatgaccgcctcgatgcgatccgcttcgagccgatcagcgcgggaatgaacgccgcgccgtttgcgcgtgcgcggcagctcgattggaatgcgcatccgtacaccgcgatcatcgtgctgggccagggaccggacgaattgaccaccccgctcagcgccggcagcaagctgcgcctgaaggcggccgcgcagcgctacgcggcaggtgacgcacccttcctcatcgtctcgggtggtgcggtacatccacgcggcacccgcagcgtcgaagcggtgcagatgcgcgaagcgctgatggcacgcttcggcattcccgcagatgcaatcatcatcgagccgtatgcccgccacaccaccaccaatctgcgcaatgcggcccggttgctggcggccctgcaggcaccgccgcggcaaccggcattggtggtcagcagtccatcgcatatcgattcggtcgccagcagcgccttcagcgagcgcaaccgccatgaactgggttacgttccgggcaaggtcggttcacgcgtttcgccctacgcgatcccgttcgtgccggctcccgaatcgcggcgcatcgatccgatggatccgctggatccctga

SEQ ID NO: 507726 - DNA, 936 bp, Stenotrophomonas maltophilia
atgctcaacctcacccttgccgaccttgatcgcctgggccgcagcagcggcttccgctatcgcctgccggcgtcggccgccgatctgtcgggtgaacagtgcgtggtgcaaggcagggtggagcagcgtcgcctgcgcccgggcatgaccctggcgctgtcggacgtgatcgcccatcagccgttcgaggcaacttcggaatcgccgccggccttctcggcgatcgtgatgctggagggacgcgcaggggcgcggctggcggggcaggcagtgatcggcatgaacccgggtgccggcacgatggtgctggccgaggcagcaccgatgaccgcgattcatcccgccgggcagcggatgcgcagcctgaatgtctcgttggacgcacctgccgggattgacgacccgatgatcagcgaactgctatccaccgcgcatcgcaccggtcacccgcggttacgtggttggctggttcccgggcatctcgagcacgccgctgaccagctgctgtcgggcagctggcacggcgcgatgcatgcactgctgtgcgagagtatcggcctacagatgctggccctggcgctggggtcgcctgcgagggaggcatcgccggacctgcgtgtttcagcacgtgaccgccgcatgctgcagcgggtgatcgattgcctgcaggcggcaccggccgccgaacacagcctggaggatctggcgggcctggcctgcatgagcccaagcagcctgcgcctgaagttccagcaggtgtatcagtgctcggtgttcggctggctgcgcgagcatcgcctgcaactggcctgcgcgcagctgcggcagggctgcagcgtacagcaggccgcgcatttcgtcggttaccggcatgccacgaatttcgcgaccgcgttccgtgcgcgctacggcatcgcgcccagccagctgcgctga

SEQ ID NO: 507727 - DNA, 474 bp, Stenotrophomonas maltophilia
atgggcgccgatggcgagctggttggcctggcgggcgtgctcggcgttctgacgcacagtggaggtcagttcctccatcgaggcagcggtctcttccaggttggcggcctgctgctcggtacggcgcgacaggtcgctgttaccggaggcgatttcgccggcggccaaggtgatgctggaggcgctggcctggatctggccgacgatctgggtcagctgtgtgaccgtggcgttggcatcgtcgcgcatgcgggcgaacacgccgttgaactggccttccatgcgcgcggtcaggtcgccggtggcgatcgactgcagcagctgcgagagctggccgaggttgccgtcagccacctgcatcatggtgttgaggtgctcgatcatcagcttgaagtcgtgctggaagcgctgtgcgtcgccgcgctggctgaagtcaccggcggcggccgccgcagccaggcgctggatctgtga

SEQ ID NO: 507728 - DNA, 444 bp, Stenotrophomonas maltophilia
atgattcgcacgctgggtctttctttactgttgtccctttcctgcctgcctgcggcgttggccgcacctccggtgcagcttgatttcccggtgctggcgctgggcgaaaccgcgccggtacgcctgcaactggctccgcatgcgggcgggctggctgcctactcgatccacatgaacagcaggtacagcgcagtagtcagtggctacgaggtgaccagtgtgcagtgcccgccgggcttccagtccaacctgtatggcgaaggccgcggcgcggtctgctatcgcaccgaggacgtgccgcatgctggaggcgtgatggtggtgcaggtcgtcaacgtcgacgcacccgctggacacaccgcctgggaagaggggctgggcttcctggatgcccatggtccgctccagaatgccccgtggcatctctttggtgtgcgaccttga

SEQ ID NO: 507729 - DNA, 486 bp, Stenotrophomonas maltophilia
atgcccaccctcctcagatgttttttgctgtttttctttgccgtgggcctgctgatccttctggccgccgcctggctgttcgtggacgtccagcgtttcgcgagcaaggccgtttccgtaaccggaacggtggtggccgtccaggcagaggatgcccggtcggaaatggaggggatgcccgcacgtgacatcaccctgcatcgcccggtggtgaggttccagaccgcacaggggcagatgattcagttcaccgcgtcctttgctaccggggcaccactgtacgtggtcggcgaacaggtacaggtgctatatcccggcggcatgccttccaaggctcgtatccagcacccgggattgcgctggggcgcaccgctgctgttggcgctgatgggcatggggttctgcctgatcgccgcatgcgtccatcgcctgtgcgtgcgctactggccgatcctgttcggccagcgtgacggggcatgtggctag

SEQ ID NO: 507730 - DNA, 576 bp, Stenotrophomonas maltophilia
atgctgggtatccaccgctggctgcgcgccggcctggtcttcacgctggcgggcgcactcggcgcctgcagcagccgcgtaccggatgcgccggagccactggatctggtcaagccaatcatcgttgccgagcctggccaggcggtgcggttcgagttcgagacgaatgcccgcaacttcaagccgggtcgcacgtacgcgctggagctggagttgcagcgccaagggacacgaaggccggacgagcctgacgtgggcacatcgagggtcccgttcgaggtgaccctgcagcaatggggcactgatgcctggaaggatgttcccacctacgacagctatcaggccggggtgctcaatgcaggtgaacagcttccggaatggcatgcatccagcgaatggcggtatacgtcgccgcacatgggcagtgacggccaatacacgctgagtctggttgctctgccactggagcctgatacccgctatcgcgtacaggttcgcactgcgcaggcctcgccggaactgcagcactactcggctcagttgcgggtacacgcagcccggccgccaggcaagtaa

SEQ ID NO: 507731 - DNA, 366 bp, Stenotrophomonas maltophilia
atgggtacgctgcaggtctggatgaatggtgtagaggtcgcactatgggatgacgtccggaatgggtcatcccggttgtcgtacgtcagccaatgggtcagctcgccccagtcccgaccgttgtcgctctcgctccccctactcccagagggcgagagccatcggggcaacgtcgtcaacgactacttcgataaccttctccccgacaacgtcaccatacgcaaccggatccgcgaccggttcgccacgcgcagcagcgatacgttcgatcttcttgaagccattggtcgggattgtgtgggcgcagtgcaattgctgccgcctgcgcatccacccggggacgtccagcagattccagcggtttga

SEQ ID NO: 507732 - DNA, 759 bp, Stenotrophomonas maltophilia; identical to SEQ ID NO: 507568

SEQ ID NO: 507733 - DNA, 915 bp, Stenotrophomonas maltophilia
atgaacgggatcgggattgatgtcagcaagcgccaactggatgtcggcacgacggacggagagaccctgcaggtctgcaataaccgctccggcttttctgaattggatgtttggctgaagaagcgtccggtcagccagatcgtgctggaagccaccggcggctacgaacgaccggtgctggattttctgcacgcagtgggccatccggtggtccgcgccaatgccctgcgggcccgcaggctggctcaggggatggggcagatggccaagaccgaccggttggatgcctatgcattggcgcagatggcggccttggtgaaacttccggcctaccaaccgctggagccttggcagcagaaaatgcgggaattcgtgcgggcacgtcgacaggcgatgcacgcgctgaccatcgcgcggcagcagctggaaatggtcggtgatcgtgaattgcgccggctactgcaggccaacatcacccgcttgcagacgctggttgaacgtctgggaaagcaaattgccgagcaggttacccagcagcctcaactggctgtcctgaagtcgatgaagggcgttggccctggcctgcaggcggtattggcaagctatcttcccgagttgggaaagatcagcggcaaggccatcgccagcctcgtcggtgtggctccgatgtcccacgacagcggaaccatgcgagggaaacgcagcatccatggcggcagagccgagatccgccaggtgctctacatggccagcatatcggccatgcggcatgaacctcaactgcgcgatttctaccagtcgctgcgagcccgaggcaaagaaggaaaagtagccatcgtggcggtgatgcggaagatgctggtgatcctcaacgcccgggtgcgcgacgctgaaaacgggttggtcccagcctaa

SEQ ID NO: 507734 - DNA, 411 bp, Stenotrophomonas maltophilia
atgacagccccactcaccatcggccagttggcccgccagaccggcaccaaggcagagaccatccgctattacgaaaagattggcctgctgcagccgccgctgcgttcgcagggcaactaccgctgctacgacgcacaggaccaacggcggctggcattcgtgcgccgtgcgcgcgagctggggttcgccatcgagcagatccgcgagctgatcgccttcggcgaacaacgcgagcaccaatgcagttcggtggatgacgtggtgaaggcgcacattgccgacatcgcgcgcaggattgccgacctgcagacgctgcagggcgaactgcagcggatgatcggcaactgccccggcgggcgcgtggccgattgccgggtgctggaagccctgcagcctgcgccggctacctga

SEQ ID NO: 507735 - DNA, 630 bp, Stenotrophomonas maltophilia
atggaccagtgctgcggccacaaacgccaagagctggcatcgatagcgctgcacagcgcccagcggcgggtgctggtggcggtgctggcaatcaacctggcgatgttcttcatcgagttcggcgcgggccttgccgcgcgatccagcgccctgcaggccgacgcggtcgacatgctgggggatgccatcgtctatggcctgagcctgtgggcggtaaaccggggcgcgcgctgggaggcgggcgcggcgctggccaagggtctgctgatcctggccttcttcgtgttcatcgtgttcgaagtggccggcaagctggtcaatggggtgccaccgtccagcacgctgatgctggtgttcggtggcattgccctggtggcgaacctcacctgcctggcgctgctatggcgattccgcaggttgaacatcaacatgaagagcacgttcgagtgctcgcgcaatgacgtggccgcgaacctgggcgtgctggtggcggcgggtggcgtggccatgaccgggcgcggctggccggatattgtcgttggcgcagtgatcgccctgttgttcctgaggtcggcagtgggcgtgatcgctgaagcgtggccggcatggcgggcagcacgccgacagtga

SEQ ID NO: 507736 - DNA, 4761 bp, Stenotrophomonas maltophilia
atgttggaacgactgaagaccctatcgcgtgccgtgctggcgattgttgccgtcggcttcgtcgcccctgctgtggcacaggcgcaggaaagcaagatcacctggcgtatttcgcagcccggcggcgatgcgacccaatacaagacccagcaggcggcggtggccgccatcaagaatctgccggcgcccagcccgttcccgccggagttccagttcggctggcaatctgtcgacaagatcaagtcgaaagtcgtggacttgaacggaaacacgtcgatcacctactggatggggaagacgcagccctccgacccggactggtcctacatcgggcgtgacatattcccgacggaagaggcgatggtggccgattttcttgcggaccaacaagccagcaatcccgtgtgccccggggcggcggtcactccgtctggcgattggtttgcggcttcgcccgatcaggaaggtgtcatcgagtcacgctactacgatctgacttcaatggctggcaacaatacggctgaatcgccctgcaccccgtataccgggacggttgcggtcgcgcgtacccggcgcttgaactgcccgattccgctcacgcagtggtccaacaagcacagcgcatgcgtcagcgaagagttcgttgcgaccatcacttcgaagtcgcagaagtgcgacaaggacggcggcaacggtagctgccccatgtcccgcaacgatacagcggcgaacatgagtccgattcccgacaaggacccggcctccaacggcggtacctgcgacggcaatgtcggcaacccatgtgatgttaaaactggcgagaagtacgagatcgcgccggacttcgacctgggctggatcgcgctgacgcgcttctatcactccggcatttccacgtcctccggtggcttcggttatggctggacccattcgctgggcgcccacctggcactggatggcgctgacagcgttggcatcattgaaagcaccggtttccagcgtgtattcaagaagatcggccaggcctatgaggcggacgacgacagtggtgatcgtctcgtccagaacggtaactggacgctgtattcggcgggctccatctcgaccttcggcgcggacgggcgtctggtcgccaagcgcttcgcggatggcacgtcgctgacctatatctacgatgacagcgatcgccttgcggccgtcacccacagcagtggccgcacgctggagttcgtttaccagtccaacgactacgaggcgctgatcagttcggtgctggtcgaaggcattgcgctcgccacctttacctacacgccgcagaaccaggtcgccacggtgacctatgcgggaggtggtgtgcgcacgtatcactacgagaaccaggacttcccccagcacctgaccggcatcaccgccgaggacggtcgccgctacagcacctttacctatgattccatcggccgtgtgatctccagtcagcacgccggcggtgccgatggcgtggcgctggcctacagccccaacggcggtgcggtggttaccgacgcgcttgggcggcagaccgactacaccctgacacccggcggcgacaccgcgccgtcgcgcaaggtgaccggcctgaccgattcgcagggaaccgtcagccgaacctactacgaccagagtgccgacttccgccggcgcctggatacctacaccgatcgtcgcggcatccagaccaagcacacctatgcgcaaggcaccgatgcggtgagcggccgtgccgtcagcatccataccgtgaccgaagcggtcggccagcccgagcagcgggtagtgaccaccgcgcgcgacgtcgaaaccaatgcggtactgaccacccggatcggtagccgcgaagtgcgtacggccttcaatgcccgacgccagccgacggccaacacggtgaccgacactgcttccggtcagacgcgcatcaccagctacacctactgcgaagccgctgatgtggcagcggcaggcagctgcccggtggaggggctgctgaaaagcgtggatggcccgcgcacggatgtggccgatgccgttacctacgcctactacccggcagatgatgcggggtgcgcgaccaacgctacctgtggctaccggaagggcgacctgcgcagcgtgaccaatgcgctgggccagacggtcgagaccctggcctacgatgcgttcgggcggccgttgtcggtcaaggacgccaacggcgtggtcaccgattacacctaccatgcccgcggctggccgacctcgatcaccgtacgcggtgccagcacggccgagaatcgggtcacccagctgagctattggccgacgggccaggtgcagaagatcaccgagccggatggcagcagcgtttcctacgtctacgatgctgcgctgcgcttgaccgacatcgaggacaacgcaggcaacacgattcactacacactggacaacgccggcaatcgtctcaaggaagacacgctggataccggcggcaccctgcgccgtaccctggcacggacgttcaacacgctcggccagctgaccgcgctgaaggacgcaggcaatcacgccaccggctttgtctacgatgccaatggcaacccgcagacggtgaccgatgcgctgcagcgcgtgaccagccagcagtatgacccgctcaaccgactggcccagaccctgcaggacgtcggcggcgtggcggcggagatccgcagccagtacaacgcgctggatcaggtcacccaggtcaccgacccgaagggcctgcacaccacatacgcctacaacgggttcggcgatctgaccggccaggtcagcccggacagcggcgccagcagcttcaccgtggatgcggcaggcaaccgcaagaccactaccgatgcacgcggcgtcaccgccacctatcactacgatgcactcaaccgcctggtcggtgtcgcctatccggatcccaatctggacgtgggctacagctacgacgtgacgcctgctgcgtgtaccgccgacgagcgctttgccaaggggcgcctggggcaggtgttgcacgccaatggcagcgcccagtactgccacgaccgcttcggccaggtcacccgcaaggtgcagaccgtcaacggcgtcgccagcacgctgcgctacgcctacagcaagtcgggtcgcctgactgcgttgacctaccccgatggcagtgtggccgactacgtgcgcgatacccaggggcgcatcagccagatcggactgacccggcccggccaggcacgccagatcgtggtgagcaacgtgacctatgcggccttcggcccggccaccggctggacctatggcaatggccgccacttgcagcgttcgctggacctggactatcgcccgcaagcggtgcacgacccggccgcgggcggcctgtcgctgggctacggctatgacccggtcggctcgatcaccgagctgaagaacggcacgggctcgacgatgctggccaagtacgcctacgacgcgctgggtcgcctgacccagacccaggacggcacgaccggcacgccgatcgaaacctatgcctatgacgccaccggcaatcgcaccgcgctgaccacctcggcaggcactgccagctacagctatcccgcaaccagccatcgcctgactgcggtggatggcgaaacgcgcagccatgacgcagcgggcaacaccaccagcatcggcagcaagaccttcacctacagcgatgccaaccgcatgaacgcggtgaagcagggcaatgccgtgctggagagctacggctacaaccatcgcggcgagcgcgtgctgcgcaccccggctagtggcgctgcgcagatcaccctgtatgacgaggcggggcaatggctgggcaattactcggtcacgggccaggcgcagcagcaggccatctggctggacaactatccggtggcgctgatcaatgtgccgggcaccggcgtgccggagttagcctacgtccagccggatcatctgggcacaccgcgcgtggtgatcgacccggtgcgcgatgttgcgatctgggagtggagcaacaagagcgaagtgttcggtaatcagattccgagtgccgacccggatggtgatggtgtggtgttcgagctggcgctgcgcttcccgggccagcaggcgacggatgcgagtgggttgttctacaactaccagcgcgagtatgacccagcggtcgggcggtattcgcagagtgatccgattgggcttggtggaggtgttagcacctattcctatgcaatgggcaatacaatttcgcacgttgatccactgggtttgaaagactcccagcctggagtgactgtgacagaaactggcgcatatacggtcgattggcgctattacgtgaataggacattggaagctcttggctttccgggggcatttgtcgcgggagccaacgacttcggcgggcagtatgccaatcaatggtcagccacacacgtggttggtggttctcataacggatgggttggccaggataagtacttccactgcatggcgaactgcgaggctgcacagaagggtatgggcggatccgctgctgctcagtgcataagcaatgggcgcgagtggttcgatcaaaccatcaagggcgactctgccgctgactccgctgcggatcagctggcaaatcgcctcggacgatcatctggacaaatgagccgtacggggagttgctcgcagatgtgcgggagctatcgtccgggtggaagcttcccctactga

SEQ ID NO: 507737 - DNA, 201 bp, Stenotrophomonas maltophilia
atgactcgcgcgtcggacatctccggcctgctcactagcctgcagtcttcgggcaaagcaagaatcccgctggttaggcggaaaaccagccacgattcatttgtgtccatgtcgtgcgattcgcgtatgttgaccgcgtcctcaggcaaccatgaaggcaaccacttcgattcgccgattgcttgtcttgagacggcttga

SEQ ID NO: 507738 - DNA, 813 bp, Stenotrophomonas maltophilia
atgccccgactcaagcagatgagccttccgatgccagcagcaatcctcgccctcctgcttctgagcggctgccaccttacccggaatcaagcactttcacccaagccggaggctggcacggtcaaggtgaccgtcaaggtccccgaggagcttgtggccagagacatgcaggtgatctaccgctcgacgaaatgcaccacgacgtatcggtccacgctggactgggaaaaacgtacacgagacaactatgcgggacttgagcttcagcctgtgcgccgcccaggaacggatgtttatgaggccacagtggcagtcaatggcggcggagcatgtcgatggcgactaagcaacgtaactctcggagttcgttacgaagacgcttccaagtttggcgatgacgtgaaactcgggggcggaggcgacttcattgtaacgtttgatgaggccaactctgcatatggagggcccaacgccaggcccagcaccagcattgatggctttgtttcgctgaagaaggactactatccttggctatcagagcacttcatcggcacccataggaaatggatcagtctgacaacgaacgcagaacagcccatcattatccgcgtattcgatgtgcacaccgtccactttgagccgatccttcattccaagtatctcgttcgctcctttggaactaaggagaagcaaataggcgtcggcccaacttactactaccccgacggcggtagtgggtcatcgcgttacctcagcagacccgacttcgagaggcttcaggaaatccgcatggcaggtgagtcaagtcattga

SEQ ID NO: 507739 - DNA, 474 bp, Stenotrophomonas maltophilia
atgcgctatcagttgacgatcgtaagtgacggaggcggcatctggcgacagctgccggaaccagagccgccgggccagatggtcagcttctggtttccctccggtcccgacaccgactcgctgcgcaggcgcgtgatcgccaccaccgcccatgagttccagcatatcgccaccgcattggcaggacagcctcggcgcggcgggcagcgcgaaccagacgcctatctggcaggcgcatgtgcccagctgatgatcgaaggcgccgttgcacgtgcggatctgcctggcggacacgatccgcgagctgatccgtttctgccatcggcagccaggcgctccgcgcatgcaggcagtacgaccgggggagcgctgctgcggttcttcggtgacgcggacaccttgcacatcaatgagggaggccgccacctgatgcggcattgccacgagacgatcggctttcccctgcagcagtga

SEQ ID NO: 507740 - DNA, 1395 bp, Stenotrophomonas maltophilia
atgttacgtgcccatgctttggatctggatttcaacggccgcgccctgctggccgacgtcaacctgcacctgccctcaggtgcccgcatcgccctgatcggcgacaacggcagcggcaagagctgcctgttgcagatgttggccggtactctggtgcccagtggcgggaccatcatccggcgcgatggcgcacgcatcgcctacgtgccgcagcacgtactggatgactcctctcgcagcggcggcgagcagatgcgccatgcgctcgcccgcgcgctcgatgccgtccccgacgtactgctgctcgatgaacccagcaatcacctggaccgcagtgctcgccgctcgctgatcgcgcgcctgcgccagttccacggcgcgctattggtggccacccacgatgaagccctgatcgatgcgctctgtaatgagctctggcacatacgtggcgggcgcgtgagccacttcggcggtcgctaccgcgactatcaggcggacctgcagcagcgacgcgaggccagcgaccggcagctgcgccagctggatcaggagcgcggccaggcccatgaggcgttgatgcgcgaacagcagcgcgccgcgagctcgcgggaacgcggcgagcgcaaggtcgaacagcgcaagtggggcggcgtccgttcagccaccaagctcggccgtggcaataccaccgccggcagcaagcaactgcagatccgtgagcagcaggaagacatcgaggctcgtcgcaatgacctgcagcgcgagaccatcatcgagcctgccttcgccttgccggccggctggcgacgtgagggagtggtggtgcagctgaccgacgccagcgtggcgcatgccacggaaacggtgctgggtggactgcatctgcgcctggatgtcggcgatcgcctggcgatcaccggtgacaacggcagcggcaagtccacgctggcacgcgcgctgtgcggcgacccaagcatccgccgtgatggcgactggttgctgccgccagctgatcagatcgccctgctcgaccagcactatcgggacctgccgatgcaggccacgcctctccaggcgctgtctgcccagatgccggactggagccagacccagtgccggctgcacctggccgacttcctgttccgcggcgacgccacggcgcagacgcacgtgtccgcattgtccggtggcgaacgggcgcggctttcattggcattgatggcggccaaacccccgacgctgctggttctggacgaacccaccaacaacctggacatgacgctgcggatgcacttgctgcaggtgctgcgggtgttcccgggcactttggtggtggtgtcgcatgacgacgcatttctgcaggcgctggaaccgggacaggtgctggcgttgtag

SEQ ID NO: 507741 - DNA, 348 bp, Stenotrophomonas maltophilia
atggaaaagccgggcatctggtattggctatggatgatcacgcttctgctgggaggcctgttggcgttggcgacgctggtgttatggacctggctgcctggcgacgtacgcaatctggcgatggccctgatctgggtgctgtgggcactggcgaccgtctgcttctttctggggggcatcgccgatggctttacgatctggggcgtcaacatcgccaagaaggtatggcgtgctgaaacgccaggccgtttctggctcttccacatcaccacgacggtgctgtgcgtcagctgcctgggcctgctgatcgtgccgatgatgatcgcctggcaggggtcggcgtggtga

SEQ ID NO: 507742 - DNA, 1203 bp, Stenotrophomonas maltophilia
atgagagttcgattgtcaaaaagaaccttgcaatgcgcgctttctgcattaattgaactgggcgcaactttcacggcgaatgcggcggatgttctggtgacggcggagttctcaccctctgctctggagccaaccaaggcagtttttcggaatacatcaccacgaggagtgtactgttcgtggcgtccagagttctgcacggccgatggaacgtactccattgacgtgccgctacggtggagcaaggtctacgttcgcgatagcgatgttcgaaagcgcttctatctggcattgccgcggccgcggacggtagtgttgaagaatgctgagactggcaccgagaccgaggtgctcctgaccatttcgacggtgagcgggcacttgacgccaggcggtcccgcaaaccccgtattcactgcctatgtcaaaggcggatgccagtatgtccatacggcaggccacgggggcttcgttcagtttggttggactgtcaacagtccacaggcgccaatcccctgcgactcacagggtgacggaccttcaccattgccggttacgtatgcgatgtcatggtttggattggggctcattatcaccacgccttccccgctcaccctgaatgatggtgtctacgaggggggaacgacatacagcacgggcggcgagggtagcgacatcgattttggtgatgatgtgacaacagagcccatcacattgaacttccgcttcacggtgtcccatcagttccaagtaatgttcccgagtgagaacccacacgttcaactggttccggatcaaggttggtcacgatggattgaccaggggcgaccaccagcgcggctgcggcagcaactgcctttccacctcaccacgtcgatggagttcagtatgaagctgcgttgcgagcatgcggccaatgatcgctgcggcgtccgcaacccgcgcgatgatatggtggttccggtagatgtggacgtaaccattccgggtatgcacaacatgcgtgatggacgcccggcgcaggatacgccgctgctgccggatgatgcgcgggcgccgcgcttcacgccggatggctatttgatgcagcggcgatcgacgctgcgctttacagctggccgcgaagcggtgacggagatgctgaagtcgcctggctcgcattggcaaggcaacatgacggtcgtgtttgatgccaatccgtga

SEQ ID NO: 507743 - DNA, 153 bp, Stenotrophomonas maltophilia
atgaacgcatcggagttcccttatcagcacgccccggccaatgccgatgaagggcacgacatcgcaactgatcccaacagcctgatggccctgctgcatcgcatcgggttgggcgcggccgccgacggccagccctggcccgagcgccattag

SEQ ID NO: 507744 - DNA, 1704 bp, Stenotrophomonas maltophilia
atggacgaagccgaacgactgcttgaactcgaccgcctgcacctgctcgacacgccaccagagcctgttttcgatgcgatcgtcgccgccgcgcgtgccgctaccggcatgaccatggctctgatttcagttgttgccgacgagcgccagtggttcaaggccaacatcgggctggaaggtgtcagcgaaaccgcgcgcgagatttcattctgcacccatgccatacagcaggacacgctgttcgagattccggacgcgcgccaggacccgcgcttcgccagcaatccactggtcaccggcggcccgcgcatccgccactacgcggggatctcgctgggctcggcgcatggcgcgcgcataggaacgctgtgcctgctcgacccgatgccgggcgttctgtctccctcccagcgcgaattgatggtgcatctggcccgggtcaccacccaggtgctggagcagcgcagcacgctgatggcccaggtcggccaggccaaggccctgcatcgtgagctgaagcgcagcgaggacttcctggagcgcacgaaccgcgcggcccgggtgggtggctgggaaatggacctggtcagcaacgaggtccgctggacccgcgaaaccaagcagatccacggcgtgcgcagcaacttcgaaccgacgctcgaaactgcgctctcgttctatcgcgaggacagccgaaacatcatccgcacggcggtgcagcgttgcatcgatgaaggcacgtcgtgggaggtgcagctgccgatgaccaccgccgacggacgagccatctggacccgcgtggttggaggccggcagcaggtcgatggccggccgcggctggtcggggccatacaggacatcaccgaggagcgcgccgcgctggatgcactggaagccagcgaaacccgctaccggcggctgttccactacagccttggcctgatctgcacccacacgctggagggcgtgctgacctcggtgaacccagcggccgtgcagtcactgggcttcgatgagagctacatgatcgggcgcagcttgtgcgacctgatgccgccggagaagcgggccgcgttcaaggcgtatctggaacgcatcgctgtcaaccacaccgatgccggcgtcatcgagctgatcgccgccgatggtacccggcatttctgggcgtatcacaacgtgctcgacaacgaggccaccccaccctacgtgctcggccatgcgcaggacgtcaccgcactgcggatgcaggaacagcagttgcgcgagatgtccttcaaggatcccctcacccagagctacaaccgccgcttcctgccccgcctggacgaactgatcgaccagccttgggcctgcctgatgttcgatctggatcatttcaagcagatcaacgacacccagggccatgcacggggtgacacggtgctggtcgagttcgccgccttcctgcgcgctccactggggtcaatggaaagcgtagtgcgtatgggtggcgacgagttcatggtggtgctgactgcaccggaaccgggacggctggccgcgctggagcagtggtatgcgcagcatgccgggcagtcacccacgcccttctcgctgggcgcgacccaccatgcacccggcgagacggtggccgacaccctgcagcgcgccgacagccgcctgtatcgcgagcgtgcacgcgtgcgcacgcatccgcgtccctga

SEQ ID NO: 507745 - DNA, 2289 bp, Stenotrophomonas maltophilia
atgcgccacgccctgctgcaccgcccgctgctcaccctcgccattgccgccgcactgccggcgctggcccatgccgaagacagtcccagcgccgacgccgaggcatccgccgatgccgcgcgcaccgtggtcgcccttgaccaggtgatggtgactgcgcagaaacgcgccaccaacctgcaggagaccccgatctcggtgtcggtggtcgatgccgaagcgctgaaggaccgcagcgcgatttcgctgggcagcttgtccgatggctccatcccatcactgcgggtcacgccgttcgctacccgcagttctgcgctgaacatcggcatccgtggcatcggtgcctccggcgacgccaaccaaccggcccgcgatgccggcgtcggcatctacgtcgacggggtgttcatgggccgcgcgcagggcctgggcagcatgctctacgacgtggagcgcatcgaagtgctgaaggggccgcagggcacgctgttcggccgcaataccgaaggcggcgcggtgagcatcgtcaccaaggcgccgaccggcgagtttggcggcaacgtcagcgtcggcgtgtccaacttcagcggctacaacagtgcgctgcacctggatctgcccaaggtgggcgatgtcagcttcaagatcgacgccgtgcaggccaggcgtggcggcaccaccgacaacccgatgcgcggcgggcgcgacttcaacagttacgacaagcgcggcgcccgcctgagcgcgctgtggcagccgagcgatgacttctctttgttgtacgcgttcgatcgctcctatgatgccaccacgccatatcacacccaggtgctggtgccaggcgcctacctcagccccctgcagaaggccgacgccagccaggaccgccgcgacagcgccatcctgggcgggccacaggaagacaacatcgggcgtaccagcggccatctgttgaacctctcatggacgctgaacgacaacctggagctgaagtcgatcagctcatatcgtgaactcacccaggggcagttcgacatggggctggtcgatgcgatttcggcctatggtggcgcaggcacacccttcgggcgttacagcctggcccaggtctaccagcaccagtacagccaggaattccagctgatcggcaacacctcgcaggtgcagttcctgggcggtgcgttctattaccacgagaccgctggtgacaatgcgcagaccccgaacatgctggtgtgggggccgggtggcaacagctacacggtgaacccggcgaccaatccactggatctctcgcgggtacgcatcgaccgtgccagcaaggcgtggaccgacagcctgggcgtgttcggccaggccacgtggaccccggaagcactgcagcgcctgcatctgaccgccggtggccgctatacccgcgatgacaagaagggcagcctgtacatcgtcaatggtgcggcgaccaaccttgcgttcaaggatcgctggagccgtttcgacccgatggtcaatatcgcctacgacctcggcgagcacgcgatggtctatgccaagtacagcaccggcttcaaggccggcggtgccaactcgcgctcgaccaactacagcgcgttcgggccggaagaagtgacggcctacgaactcggcttcaagtcgcagttctgggacaaccgtgctcgcctgaacctcgccgtgttcgattcgaccatcgcgcacaagcagatggacttctcgctgccgttcgacccgaacagtggcgagacccgcaccaccatggtcaccaccaatgcattgagcgatggcaagtcgcgcggcgcggagctggagttcaacgtgatgccggtggacaacctcaccctcggcctcaactacgcctatacgaagatcgacgcgcagaccgcgacggacccgttcggtgcaggggtgcaggtaacggtccagccgctgctggcgccgaagaacgccggcagcctgtcggtcgactacctggtggcgttcgcgaacttctcggcactgaagttccatgtggacggcaactggtccgatggctactacaccagcgagtacgaccagatgctgaccgacagctcgttcgtggtgaacgcacgggtggcgctggtggatgtgccggtcaacagcactggcaccaccatgtcgttctcgttgtgggcacgcaacctgctcgatgagcagcacctgttctacaagatcaacagcgcggcgctgggccagagcggcatcttcaacgacccgcgtaccttcggcctggaaatggccgtcaacttctga

SEQ ID NO: 507746 - DNA, 1665 bp, Stenotrophomonas maltophilia
atgcgctacacacgtcgtgattttcttgccaccaccgccagcgcttcattggcgtcactggtggcgcccggggcctgggccagcggcgccgcaccggccggaaaggccgcgcaggcgcgctaccaccgctacaacgtcaccagccccgaaggccagcgcatgctggccagctacgcgcgtggcatcaaggccatgttggcactgccggcagacgatccacgcaactggttccgcaatgccttcgtgcatctgatggactgcccgcacggcaactggtggttctatgtctggcaccggggctatgtcggctacttcgaacagaccatccgtacgctcagcggtgatccgcagttcgccatgccctactgggactggaccgagctgccacggattcccccggcgatgttcgacggcgtattgacgcccactgacagcgcctatgcgccgtatacgcgcaacctggcggtcttcacccggttcatgcgcccggcgttgcagcgctactgggacacgctggatggaggccaacgcggccagctcaagttccgcggctacctcactgcagacgatgtctggaacgatgtaaccggctacagcgtcgcggaaaagaccggcatctcgggcaatgcggcctatgcgatcacctgcggcgcccgctacctctggcgcgagaatcccggcttcgatgcaaagaccgcttcggccgtgtctcccgacaccatccacgcggggctgtcgccggtcgagttctacaacgacgatgtcagccgcagcttcaccagctcgcgtacggcctcgcacgtggtgcagcctgacggcgccacgaaattctcggtactggaaggattcccgcacaacaaggtgcacaactgcatcggtggcgtcggcgcggtcgatcccggcccctacggcaacatgaccaacttcctgtcaccactcgatccgatcttctacctgcaccacgccaacatggaccgcctgtgggatgtgtggaaccagctgcagcagtcccgcggcaagccgatcatgcccatcaacgtcgaccagcggcgtcagttcatgaacgaaccgttccgcttcttcgtcgatgcacagggcaagcccgttggcgagcgtccggccagtgcattcttctccaccacggccttcgactacgactacgtctacgcgcgccgcaacgacatgctggaggcggtcacgctgccagcagctgccggcgcggtgcggctggtgcgcggcacacgctccgatggcgccgtccgcgtggctgtccccaatgaggcggtgcgcgcgcacctgaccacatcgggcccgcgccagttgattgccgaagtgaccctggagcgaccacgcggcttgaacaatacgcgcgagttcgacgtgctgatcaacgcaccggcgggcaccgcctccgtggtggccgacagtccgtactacgccggcaccgtatcgttcttcgggccgaccatggccgggatggatcacagccacccaaccacgttcgcggtgccgctgccgcagaaactgggggccctgcaggcactgaatgccgccgatgggggaacgatcacgctggagatccgcctggtcgcatcgtccggccaggcaccgcagacattcccggtactggatgccgccatcctggcagcaccgcagcagccgtga

SEQ ID NO: 507747 - DNA, 930 bp, Stenotrophomonas maltophilia
atgaccagctacagtgcggcgcgcctgcagggcatcagtgtgttcgtccaggccgtggacgccggcagcttcaccgcagccggtctgcgcatggggctgagcaaatcggccgttggcaagagtgtggccacgctggagcggcgactgggcacccggttgctggatcgcaccacgcgcaggctggcgctcactgtcgagggcgccgagttctaccaggtctgccggcgcatcctggccgaactggacgaagccgaatccaacgcagcgtcgcggcggcaggaggtttccggcctgttgcgggtcagcctgccggtagcgttcggccagcgctgggtgatgccggtactgatcggactggcgcaacgccattcgcggctgcagctcgatgtcagcttcaccgaccgcagggttgatctgctcgaggaaaacgtcgatctggccgtccgcctggggccgcttgacgacagcagctcgctctctgcccgggcgctcggccgccagcatgccgtgatatgcgctgcacccggatacctggcggcacgtggcgtcccggtgcgcgccgaggatcttgccggacacgactgcatcaccttcggccggcaggggcacgcgctgccctggacggtgccggacggctccggcgggcttgtccagcaccgcattgaagggcgccaccgcatcagtgacggcgatgcgctgcgtagcgcattgctggccgggctgggcattgcagaagcgaccacctggctggtgggggacgcgctgcgcagcggcgcactggtggccgtattccctgccacgggtagcgcgggcgcgcccctgcatgcgctctggcctaccacccgcgaccttgctcccaaggtgcgtgccgcagtggatgcgctggtcgaggcgttcgttccgtctccaccgtgggaaaatacccgctga

SEQ ID NO: 507748 - DNA, 1038 bp, Stenotrophomonas maltophilia
atgtctgtttcgaccatgaaggtctgggagctcgatgccccgggccctgctcacctgcgctgcgtacggcgccccattcccaggccaggccctggtgaggtactggtcaaggtcggtgccgtgtcgctcaactaccgcgatcgcctggtgatcgacggcggactgttgtccggtccgctgccacacccgtttgttcccgcttcggacatggccggcgtcattgtcgaaaccggaagcccagcgcgacgcttcagcgttggccagcgggtgatgggcaatttctggacgcagtggctcgatggcgcgcctccgcccgagatgctgcagcacggactgtccctgggcggtccgctgccgggcgtgctggcggagtatgtggtgctgccggaggacgtggcagtcgctacgcccccctcgttgtctgacctgcaggccagcacgttgccggtggcggcgctgacggcctggtttgcactggtcgaggccggccaactcgctcctggtcagaccgtgcttgtgcagggtaccggtggtgtttccttgttcgggctgcagttcgcccagcggctgggagcacgggtaatcgtgacttcacgcagtgacagcaagcttgcccttgcagaacggctgggtgcatgggcgtcgatcaacacgcggcagcatcctgcatggggcgcgcgagcgatggagctgagcggagggcagggcgtcgatcatgtgcttgagctgctcggaggcggcaacctcgcccagagcgtggaggcgctcgcagtgggcgggcacatcctgcagatcggcttcctcgaggatcccgacctgcacatgccggcggttcctctcatgctgcgccgcgcgaccctgaagggggtttcggttggccatcgccgggccttcgaggggatgaacggcttcatcgaacgcgagcgcctgcagcctgtcatcgacagcgtgcattcgttcgccggcctgcctgcggcactggcagcactgcagcaggggccgttcggcaaagtggtggtgcaggtggcagagcactga

SEQ ID NO: 507749 - DNA, 402 bp, Stenotrophomonas maltophilia
atggaagcgcgcctgcgggcagttgagagcgagcagggcactgcggccatgcggcccgccccgcctgatcgcagcaccgcctacggcgcagtgcttgccggcttctttggcccgacttgggcgaccggcgaatggggcatgcgcaaccggcgcggcgccgacgccagcggccgttacgatctggaccatcaggcctgggcgatctcggtcggctggttcctggccggtgcgatgctggcctattcgggcaaggccggtacatggggccgagtgaaggtggccgatccggtcatccgcggcggtgccggtgcgttggagttgaagggccgctatgaggacgtggaccatgtcgagctgctaaccggcggaacagggtatgcgtgggcgctgggcgcgaactag

SEQ ID NO: 507750 - DNA, 1152 bp, Stenotrophomonas maltophilia
atgaccgttcgaaacagacgttggtttcatgccttcgtcgtgtccgtcgtactccttggtgccggatgcacgggcgggaaggcgccatcgaaggaaccgggagcagagatcgacgaggtcgcgcagaccctgatcgagcagcccttgctgcactcggcttccatcggcgtggtgtaccggggcaggaccttcatccgccatcgcggcgatatggtggccggtacagccggcgcgccgaccgatgccacgctctatgagatcggctcactgagcaagacgctggccggcaccttgatggccaatgcggtgctggaaggcagggtgggcctggaggatgacgttcgcacgtacctgcagggcgactatcccaacctgcagtaccagggccaacccatccgcgtccgccacctgctgtcgcacaccagtggcctgccgaacatgctgccggagcgcgcgaacacggtactggaggactttaccgatcaccgcacgccgggcgagctcaatgcgctctacgcgcactacggcaagacggatttcctccgggacctgcacgccgtacagattccgcggatgccagggaaggagtacgcctactccagcgcagggaccgagctggcggcgcatgttctggaggtggcctacaagaccgactacgcgtcactgctgcgtggcttcttcagcgactccgcggcgatgaccggcctccggatcaggctggatgatgccgaagcgccgcggttggcggccggctatcacagcgacaatcccgtaccgaccacgccgatgccacagttgccatggggcgcttccggcaacgtcaaagcaaccgtcccggacatggtgaagtaccttcagttccaactggccaatgggccggtggtaaagcaatcgcatcgcgccctggccagattcgacgacgagttcagcatcggctacttctggaacatcgtcgccggcgatcgccagaagggcgtctactatgcccatcacggtggcgtaccgcgctcacagtgctacatctacatcatgcccgagcacgatctgggcatcttcgtgatcaccaaccagagtggcgaccagaccgcgcatgccatggaagcggcgatcgatgccctggtcgggaagattgctgcaggcaagaccccatag

SEQ ID NO: 507751 - DNA, 591 bp, Stenotrophomonas maltophilia
atgaggaaaactctcttgaacgctacccacagttcgtccgtgcgtgtgcccggcatactcatccgcgaaacggcagcgcttatcgtccgcaatggccggtcttcggtgaccgtcagtgagattctcgaatgctcgggcgtcagccgtggcgcgatgttccatcacttctactgcaagcaggatctcattgacgccacattctcgtgctggctgcagaacttcaatcatgatgtggaacggagaatgcgtgccaacgggctccgccccggcgcattcacccacgcctacgtggaatcggtggtcgagggctgcaggcggcacgacgttgcaatgctctcggccctgatcatccgcctggacctgacccaggtatccgcgtcgcagtggatcgagtggatgaagaagaagctggccaccgagccgtccgaggccgacgatcccgcgctgaagtctgcgcgtctcgccgccgatggtctgtggcttggctcactgtccagccctgccccagccaatgaaccgaagatcgacattcaaacgccgcagatcccggtgcagcgctgtggccacggtccgtcccatcgccttgtctaa

SEQ ID NO: 507752 - DNA, 2649 bp, Stenotrophomonas maltophilia
atgtccaacaccccctttggtgaatcgtcatgcgctgccgccgccagcggttgcgtcgaggtgcgtggtgcacgcgagcacaacctcaagaatgtcgacgtctccattccgcgcaatgcactggtggtgttctccggcgtatcgggttccggcaaatcatcgctggccttcggcaccgtcttcgctgaagcacagcggcgctacttcgagtcggtagcgccgtatgcacgccgcctgatcgaccaggcgggcgtgccggatgtagatgccatcgacgggctgccgccggcggtggccctgcagcaacagcgcggcgccagcaatgcacgttcatcggtgggcagcgtgactacgctgtccagcctggtgcgcatgatgtactcgcgtgccggtgcgtacccggccaaccagcccatgctgtacgccgaggacttctcgcccaacacgccacagggtgcctgcagcacctgccatggcctggggcatgtctacgaagtgaccgaagcgctgatggttccggacccctcgctgagcatccgcgagcgcgccatcgcctcctggccgccggcatggcatggccagaacctgcgcgacatcctggtcacgctgggctacgacatcgacgtgccgtggaagaagttgccgaagaaggatcgggactggatcctgttcaccgaggaagcgcccagcgtgccggtctatgccggtttcacgcccgcagagacccgtgccgcactcaagcgcaagcaggagcccagctacatgggcacctataccggcgcacgccgctacgtgctgcacacctttgccaacacccagagcgcgctgatgcgcaagcgcgtttcgcgctacatggaaggccggttgtgcccggcctgccatggaaaacgcctgaagccggaggcgctctcggtcacctttgccggcgtggatatcggtgagttcatgcggctgccgctggaccagctggcggcgctactggagcccatcgcacaaggtgatttcggcgcgcacagcaagggcgctcgcaccagcaggagcgcgacaccccgcgatcgcgcccggagggccgcgagtggccaggcgacccacgagggcgctccggacgtgcgcctgacctcggccttgtccgaagagaagcgcctggcagcacaacgattggcaggcggagtcatggcgcgtgtacgccagctgcgtgacctgggcctgggctatctctcgctggaccgtgcgacgccaaccctgtcagccggcgagctgcagcgcctacggctggccacgcagctcagctcgctgctgtttggcgtgctgtacgtgcttgatgaaccctcggccggcctgcatccggccgacagccaggcgctgtacgacgcactggaacggctgcgcgacggcggcaactcggtgttcgttgttgaacacgatctggagctgatgcgccgcgcgcagtggctggtggatgtggggccgcaggcaggggaacacggcgggcgcgtgctctacagtggcgagcccgatggcctgcgccacatccaggagtcgcgcacggccctgtatctgttcgatcaggtgcccgcacctgccagccggcagcgcaacgccagcagctggctggaattgaagggcatccaccgccacaacctgcagggtgtggacgcgcaggtaccgctggggctgctgacggcggtgaccggtatttccggctccggcaagtccagcctgatggcgcaggcgctgcccgagctgttactgctgcacctcgggcatgagcctgcggacgacaacgccgatagcgcgcccaccgacgggccaaccgtgatcgaaacgacccggggcacattggcgggcgatgtagacgccatccagcgggtggtgcaggtcgaccagaagcccatcggccgcacgccacgctccaacctggccacctataccgggctgttcgatcacgtgcgcaagctgttcgctgcgacacccgccgcgcgccgccgccgtttcgacgcgggccgcttctcgttcaacgtggccaagggccggtgcgagacctgcgagggcgaaggtttcgtcagcgtcgaactgctgttcatgcccagcgtctatgcgccgtgccccacctgccacggcgcccgttacaacgacgccacgctgaaagtgcagtggaatgaccgcaacatcgccgaggtcctgcagatgacggtggaccaggcgcatgcgttcttcagcgaggaagaggccattgcccggccgctgcagttgctgcaggagatcggcctcggctacctgcggctgggccagccagccacggagctttccggcggtgaggcgcaacgcatcaagctggccaccgagctgcagcgcagccagcgcgggcgcacgctgtacgtattggacgaacccactaccggcctgcatgcatcggatgcggacaggctgctggtgcagctgcagcggctggtggacgcgggcaataccgtggtgatgatcgagcacgatatgcgggcggttgcacaggcggactgggtgattgacgtaggccccggagctggcggggcagggggcaccatcgtcgcgaaaggaacgccgcaacaggtggctcgcgccaaaggcagcaggacggcgccgttccttgccagggagctggcgcttatgtag

SEQ ID NO: 507753 - DNA, 423 bp, Stenotrophomonas maltophilia
atgatcaatctgcgcacgaagctatccatgcgcgccctgacattgtccgccctcggtgcgttcgcattctccctgcacggccagccgataactggcaacccaacggcacacacctactcgcgaacgttcaatgtatctgaggccgaagcaaaatacaggtcgatgaaatcgatctctgcggcaggtctggaagccaggattcaggcatctgagccggatacgtttggtggcttgtacgttgagcatgagccagaattcaagatcgtagtgctgttcacgaagaagccgacagagaccttggcaaagtacacgcaggatcctgtatttaccggccgcacttccgctcaatcgctcgagatgctcttggcgacccaggcggaggcagaggcccagcttctcgcaaagaaggttgggttcgagtaa

SEQ ID NO: 507754 - DNA, 333 bp, Stenotrophomonas maltophilia
atggaagtgcagtatcagctgctagcgagtgcattgatgggagtatttgtcttcctgttctttcttgcgcgagattactggaagaggcccagctggctgttcggcaccttcgatcccaacatggggtttgcctctgaagtcgagctcatctcacaggccaacaagacaatgctcctgcttggggcgcttgcgttgatctgggccatcgtcggtccttcgccctaccgcaggaactgggagatcgaggtcatgggcctagtcctcggcatgctcgtctgctatgtgctgatcgtccgccttgcgtcttcccgcattcgatccaacccgcattga

SEQ ID NO: 507755 - DNA, 231 bp, Stenotrophomonas maltophilia
gtgctgtggctggagaggcgctcgcaacatctgctgttgcgggtctcactggacgcggagcagcgggcgcccgccgtcctgcagcttcgcgcgttgcttcaatggcagctggaacccgtggactacctggagcaggtactggctggcgtgccggaacctgttctgttggatcgggtgctgcagatattcgcgggcgaggtgcctgagggcgcgcgatgtggcatgccgtag

SEQ ID NO: 507756 - DNA, 714 bp, Stenotrophomonas maltophilia
atggagtttgagaagatccggtcagtggtcaggctcgcggaatacgcggtcgttgaccgaccaccgcttcgggtgaaggaagacgggctgcgcgcactttcagaggagctattagtcggcccatggttagtcatgagtggcttcggcatcatctggaaacgtctgctctggatcttcctccttacgcttatcttcttgattggactcttccttctcgagacggctttcgatcctgtcatggtcctcgccgcgctcgcgctgagcgttgtcagcgtctacttcggccttcctactcggacggtgcttgctggtgtcaacgcaaggtctattcgaaagcttgcaagcgctattcaggaatttgtgaaggatcaggtggagttagagtgtttgtcctccggggtgcaactcgtgaaaacgcaaacgaccgagcgaatggcgcgtttcaacgtgttcgttggcatcctttggggtgccttgttctggcttgtcacggcacgcatcctttccccggccgtttcaccggacacgttgaaatcgagcatcttccctgctattgctgccgcaatctcgttcatcgggctgtttgccgtcgcggccggccacgccgctgctgtacgggtggcctatcagacattagatttcgcgctattggatgtgaagggaaggctcgcacacagcgccctgactcatcaaactcacggttcgcaggattag

SEQ ID NO: 507757 - DNA, 642 bp, Stenotrophomonas maltophilia
atggccgcttcgcacaaagacgccaataagttccccctaatggctgtgcttacagtcaacgcggtcgcgttctgggggctggtgacgacccaacaggtggaccctgttgcttggataggttccattcaaggaaaccttaaaggtagcctgccaattgcacttgccctagtacttactgggattctcaattcgcaaatcagtcccttggccaaggcgcgcttggtgttcctagactgggagcatccgctacctggatcgcaagcattcaccaaatacatgcatcgcgacgctcgcatcgacgcgacctcgctcgatcagaaattcggaccgctacctactgatccccaagaacagaatcgccgctggtaccgcatctatcagacggttagagatcagccttctgtggtcgacgctagcaagggctacctcttcgctcgtgactacgcgacgttgattgctcttgccattcttctgtttggaacactctcgctaattctgatcaagtcgccgctggcctacatcggctacaccgccgcattaatcgttcagttcattcttgccgcaaattcagcgcgcaaccacgcagtacgactcgtcaccaatacacttgccattgcgtcacagggggtcatccgtgggtaa

SEQ ID NO: 507758 - DNA, 1089 bp, Stenotrophomonas maltophilia
gtgggtaacttctatgagattgattttctcgacgtggaaacaaagaagagtggagatgcaattgcgattcgctatgagctgaacggcgtccagacagtccacgtcgttgatactggctaccaagcgaccggaccaagtcttgtcgcacacattcgcaaatacttccagacggacacaattgatcaccttgtcatcactcattgcgatggcgaccatacgggcggcgctatccacgtacttgagaacttaaaggtgaaacgcatttggatgttgcgaccatggctgcacgccggcgaactaattgatcgttttgaagttgaaaccattaatggtctaaggagacgactccgccaaatctatggacaactggtagagatcgagaagaaagctcttgaacttggaattccgatcgaagaaccctttcaaggtgccttcattggtcagtttcaagtcctggccccgagtcgcgatcgcttcctgaatcttgttgtccaatccgaaaagacgccagagacggtagaggaagcatctgcatctgcatctgatcgtgcattctgggcggcgagagaggcattaagaaagatcgtgaactttgtgtctgcagcttggaacgcggaatcgttttccagccaagaaaccagcacagaaaacgaaatgagcgttgtccagtgggcctcattgtgtgaccacaggatactactcacaggtgatgccggcagggaaggtctagccgaggcgatcgattacgcaccccgcacgggactgtctctgccggggtttaagcgagcccaggttccccatcatgggtcgagacgcaacgtcagcacagaaattatggattcactattcggacagcggctgccggcaaaggttgaagagggcaaggaaacttggtctgcattttgcagctccgcgaagcttgatgaagcgcatccacgcaatgcaataaggcgcgccttcatccatcgcggcgcaaggttcattgcgacggaaagtcgcaacattaacacttcaggcgggtcggcccctaagagagagggctggacagcagtcaatggtgacccgtatccggacatacaggaggaatag

SEQ ID NO: 507759 - DNA, 672 bp, Stenotrophomonas maltophilia
atgcaaactaagatcaaggtgactctgagccaggcggcgatagcgggtctcttcttcctcggctttctgcttggagtggtgatcgccgccgcagctcttctcggtagccaaattccactgaaatgcttcgaagcagggaatgccgccgactggttcgccgctattggaacgtgggtcatcggttttggcgcgtgggtctatgcccgaaacacattcttgcgggccaaacaggttgatgctgataggacgcgtgcactgctccggaaggcagatcactcggccaagaatttgcagatgccacacgaggatctcgatcgaatgcagcgcgacccttctgacccctgttttcaaatggtcaggagcatgcttcttgtagctgacacttaccgagacgttgtggaaggcgtgagctggagcgaggcggagtactctttgctgacgggcgctgaggccggcgaggcgctcagtaatttggaggtttgccttaggctcttcaagacgacaattgccctgttcctcaatgccaactccagggatgacgctaccccggcaggtagtaacacagctcacctgagtacgctcattagctccgctgggcgtttgcacgctgctgcgactgtgtttaggaggcacgttgcagtgcttcgtaagcaggcgggtgaccttgcatga

SEQ ID NO: 507760 - DNA, 402 bp, Stenotrophomonas maltophilia
atgcccaagcgcggccagcggccgatccacctggccgccgttgccgaggaagcgggtcagcaccttggatgggatacccccaaactgctgagcaccgtacgcaaccaccaacgggacctgtcgggcttggtccatggcggcaaggaagtcctggcaatctacacccagcatgacgaatggggtgacctgaccgtggagtggggcgaactggcgcaccacttggacaacatcgccgtctttacgcagctggccttgagcgtggccatgttgctgtcgcctctgaaaccagaggcactggacaaggccgttcgcgccatccatgaccaggccatgacctacttcaatgctagccatgccggcacacaggctgcagtaaccatgcaggtcccgcgtacgcgctaa

SEQ ID NO: 507761 - DNA, 1062 bp, Stenotrophomonas maltophilia
atgttgcgcatgccacagaaaacaaggctggaaattctcggcgaaatggtcaccggctactcgctggcacggcatgaagcacagatgcttccaaagaatcatgcgcggtttgcttggtacgggcactttcgtagcctgagcccgacgtcgtggtcgaaccctgtgaacatcccgtacgttgccgcaaccagcctgctggatgcctattcgcagctaccccgacgaccggatcttgcattcaattcgctgtggtcagccaccaacaactcctacaacgatcttttcctcagcggtccgcaaagcgccggctcaggagcgttgacggacaagacgtccatcgacttctcgcttagtgaaatcgctgcccgactgaatcagatagtgccaatcccaccgtctccaaccgtgactgcgcaaggcatctcgatcggggatctgatcaagcgctacctgaaaaatgcgccggcgaggaacttcaactttgtggcgcagtacatcctccgcggcatcgcggttgaggagcacaacgccagtgcgtcacccagcacggctgtcaggttgatcctggttcctgcagcatattggtcgttcagaaaagacttcaagagcatccacgccaagctcaagagctcaatgggcgtgaaatatgccaagttgtgcgccattacagagtcgtcctgcgggacggaactggactttggaatcaaaccgcaagatggcaagaaggcaagggcgcttgtccaccaagccagccttctgctccgacaggaagctttaggggccaacgtgacaagcggcgccgtgacagggagcttcaacagtcagcagcactggctgtccttcctggtgcgcccgcttctctatgcgagtcgcaacaatgcggcacacggaaatgccgcttcgcgattgaacagcctctccgcctccggcgactcggtcaccgctgcgtcttggacgttcctattctgctatttgtacttcgcgcttattcttctttgtcaggccaagatcactctggccgaccttcaacccttgtacgagaacgctgacctcatcaactga

SEQ ID NO: 507762 - DNA, 207 bp, Stenotrophomonas maltophilia
atggcatcgtccgcggggctgttcatcgatcgtgtatccgttccggccttgctggcctgcccagcatcgtatctgcagggcgcgtcgcgagtgcaccacgttgcaatgattgatgatcgactgatgctccaggacgatcgacccgggcagaaggtgccgcgtcatcgcaccgattgcggcacccgcctcagcttgcgggtgtcgtaa

SEQ ID NO: 507763 - DNA, 750 bp, Stenotrophomonas maltophilia
atgatctgtaatgtttcgcgtggcgtgctgctggccgtgatcgccgtctccgcaggcgccgccaatgcggcatcgacttcgccggtgtcgctgatgagcgcgggcgagcaggcctcgctgatcgagagccggtattccgccggcgggggcgctccggtggttccggtgacgacccgctatttcgccagtgatgaagtgctcatcagctgggatgaccagcaggtgctgatgctgtgcagggaggcggtgtacctgcagattcctgccggcaaggcaggtgacgttgcgctggccgctgaacagcggcagatgattgcctatcaggcaatgatgtccggcctgggttcgcttgcgaccgtggccgaagcggcgggggattcggtggtggtggcagacgacggtagcgagacccgtcgcgcaggtgaaagcagctgggcctacggggtggaacgccatgacgtcactacccagcgcatggccgatggcgcgctgcggatccgggcgcgcaagaccgagaccgtgaacaaggccaagcctgcggagccggacgacatgttcagcaccgaagacgaccaggcggcgcgactgtcggagctggcgccggtcggcagctggaccgaggtggtggtccatggcggcccgcgccaggcgcaggtggatccggcgatgtcgttgaagggctggatctcgatgggggacgaccaggctgcgacggtgggtgaggcgcgcaagctgcacgactgcaagtaa

SEQ ID NO: 507764 - DNA, 465 bp, Stenotrophomonas maltophilia
atggcattcaattccgaagaagcgcgagaaaccttcgaacagtttctgatcatcatggacgatcagattgaatggctgatcgaacaagcacagctccgcggcgtcgaccttgacggcagcctggagagccttgatcgcctggagacgctgtacacgacgatggctgcaacgttgtcggaggacgaacaggatggcctgaggattgtgtttgcacgatatctgggcgatgtagtgtgggagcatcacggcggcaaatggaccctgccactggatgatccaaaagacatcaatttcaacatgccggttatcgtggggcactcgtcctgcccgtggctggaattcaatcccatccatacgatgcattgctacgccctacggccaaaggctggaatgctccgaagcatcgtcgcgcacagtgttgacccgcagattctggatctcagcgatctggtggaagaggattga

SEQ ID NO: 507765 - DNA, 1116 bp, Stenotrophomonas maltophilia
atggccagcgccgccctctgcctttcacttgccctgcaactcccggttgccccagacccgcttgccctggatcccgattccctgattgcgcttcatcaagctctacagtcattcggcgatttccagcagccgtactccgcgcctattgatgtgaacgatcctgatgcaggtgtgaccgacgcaaccgtcgaggtctccgccggctgcctgcagggtggcccacaggtcatcatcttggacgctgatatcgacgaggcgccagagcggtatctggtgctggacaaggcttggcatgaccttcctgcgggcacgttgctgcttgtctccggaagctcggtgaccgtcattccaacccacgaggacagcccggaacttgcacgggcggagacactgctcgccttcctggactacctgccaatcagcacggattggaatgcgctggccgtaccgaacaccgcgttgccagtgacggagttggattctgacgagtttcttcagggcttcattccgagctccaaggttgaagaagtttccgaagccaccctggcggcatgggaaggcgcgctacccaacctgctgctggctctgtggcgacgtgatggcctcgcacgctatcgcgacgacaggctcgccttggtcgccccccacctgtatgcggagattgctaccgcgttcctgcaaggcaatcccatggagggtgccgatactttccatgtctacgcggtgacggctttcggccagattctgctgtgtggggagaacacctccgcgcagatcagcatcgatccgcacagcggacacgtctcaacagaatcggatctaccagaccctgccgatgcggtggaacgcaactggaaactggcattcctgctggaggccctggatgggccctatcttgacgtcacagacgacgatgagcagcccctgcatgcccatgcacgtgaccgacttgggccattggctccgaatgagatatacagtttctcgcccgcggtttccgaaggcggttggaacgctgcgcacctggtgaagacggatcgtctcgccgagctggaagctcttgccgggatagcgactgggaagccgccgacccaatcggatgccgacaaagggtag

SEQ ID NO: 507766 - DNA, 456 bp, Stenotrophomonas maltophilia
atgctccgcttcattcgcgcaggcgacgtattctgcttcactcgaaacgacgggacctactttttcggccagatcatctcgaagattctctgcggccattccgcccagatctttgacatccaactcgaccaacctacgctcgatgcagggcaactggtgcgtgcctcccgcttgatgcagcccgttgtgctggacagctattcgctattcgacagaaagagtgatgtggacagcgactggcggattgtggggcgccatgaggtcatcgatgcccataatgctgaacagcacttcttcgtttacggtgccacaggaagctggaccaaggtcaatgcgggaaactcgattgagtgcccggcaagcgaaatggaggcaaagagtctctcgccgcttaccccgttgaataacttcaaagtatggttggccatcgatgccattcagcgcacggggagctga

SEQ ID NO: 507767 - DNA, 1209 bp, Stenotrophomonas maltophilia
atgagcagccgaatttccaccgggatgatgttcaaccagtccgtgtcgctgatgctcgccaagcagtcgaaaatcagccacctcgagcagcagatcgcgactggcagcaagatcacctccgccaaggacgacccggtcgctgcaggtacggccgttggcctggaccgtgtcgtggccgggctcgagcagctcggcaagaacgccaacagcgtgcagaaccgcctgggcctgcaggaaaacgccttggctcaggtcaatgagctcatgtcgcgcgccgtggagttgagtatccaggccaacagtccggtgcccaaggccagtgacctcaaggccatcgtcagcgagctgaagaccatccaggaaagcctgctgtcgctggccaattccagggatggcagcggacgctacctgttcggtggcagcaacgacgctgacgccccgttccagcgaagcggcggcaccgtgacctacagcggtgaccagaaccagcggcaggtggaggtggcaccgggccaactggtctccgacgccctgcccggcagcgagatcttcatgcgcatccccaccggcgatggccgtgtggatgccagcgcggccgccggcaacaccggcagtggcctgttgacctcagtcagccgtgacggcagcggcagctgggccggcggcacgctcaatgtccgcttcaccggcactgccgaaggtgcctatgaggtggttgatggcaccggcacggtggtcggcagcggaacccacaaacccggcgaggacattgtcgttggcggcgtgcgcatgcgcatcgagggcaagccagccgccggtgatcagttcaacgtcagcgacgcgggtagccgcgacatcttctccaccctggacaaactggtcgccgcactggaaaccgacccgtccaccgaaagccagcgcacggcgctgcagaacacgctgcagtccagcatccgcgacctcaacagggcctcggaaacgatgatcgacgcccgcgccaagggcggcgcccagctggccgccatcgataccgcggccagcgcccgcgaagccactgccgtcaccgtcaagagcacgctctcgacgatgcgcgacctcgattacgccgatgccatcggccaatacaagctggagaccgccgcccttcaagccgcccagacgatcttcagccagatgcaggcgatgtccctgttcaacaagatccgctag

SEQ ID NO: 507768 - DNA, 3822 bp, Stenotrophomonas maltophilia
atggcgacccgaaagatcaagatcctggccggctccgggctgttgctggcggtggctggcggcacctggcttgcgatgaacctgttcgccgcgcaggcgcagggcacattgtcgcagcacccgatgaacctgaaggtctccgcgccgccgtcattcatcatggcggtggatgattcgggttcgatgaccttccagacccagttcccagggcaggatggaacggcgtgctggaactatgcccggcagagcttcttcagatccaagggtgtactgaacaccgttgacgacatcatcagtggctacgatcgctatggaaatcccatctatggcgcgggtgagtgcgactacttctatgtactgccaggtgcccgaatcaacgacaacagcggcattcccgcgctggacgtattcgggttcgcgcgatcggccgcctacaatccggcgtactacgatccgaacatcaagtacgagccttggctgaacatcgtcaaggaagaggtcgtgtcctatcctcaggccaatacgacagccaccctcattgatccgcgtgacacgggtaattcgctgtcgcttgctgcgagctacctgggtaaatccagttgggatgtccaacggatgcagaagggcatggttgcgccgcaggggcaggcctatgcgaatgtgacccgatacgaggatcgctcggggaacgtaacgtatacattcggtagcgaaaacagcaatggcaatagcgctggccgaagctggacttcggcggattacgcatctctcaggtacgttccggcaacattcttcatgccctacagcagtgatgcggacccccgtccccagctgccggggacgaccaatgcatatgcgggcgtgaagcgcaccagaattgcgggtgcctgtggcccaggctgtgacatgtggaagtatgtcatcgcatccggtgatgccgccgcgctccagaatttcgccaactggtactcctactacggtaaccgaaaccgcgcgatgatcgctggcatgacgcatgcgttgaacgtcaacgacatgtatgtcggctacttcaagatcaacgacttcctgaagtacaacagctcgtcggatgatgcgaagcgtctcgcgatccaggacatgagcctgatctcgcaaaaggcgaaactgtacagcgacatgattgcgctgaccgccaatggcggtacgcccaaccgaaatgcggtcaatgcggccggcctgcagttcatgcgaaccgacgatgcggcccccatcaagctttcctgccagaaaaacgcggtgatgctgttcaccgatggctatagcaacaacggcaacgggttcccatcgagttcgattcccaccccagggaacattgacggtgccatgggtgccccgttcaaggacagcaactcggatacgatggctgatatcgcggcgtactattacgtcaatccgttgcgcaccgataccgcgatgcccaagggcaatgtgccggtgccggagcagtgcgcgaccagtaacgacaagtcgctggactgcaacaagaacctgcatatcaacttctacgggatcaccctgggtgcgcgtggcaacctgttcgatccggacaaacagcagaatccgtataccgattcggccatctacaacaactggccgccacgtcagaacaacaaccccagcaccgtggatgacatctggcacgccgcgaccaatacccgcggtgagtacatcaacgcgcgtactccggcagacatcaccacggccatgcgccgggtgctctcgtcggtcacctccgggccagcgccttcgggcagccagggcctgaccggcgcgcgtatcggtaccgggtcgctggcggtcacgccccagttcgaagtagccaacgaggaaaccgattggttcagccgcctgaaggcatccaagcttgcggtgaacgacaagacgcagcagaccgagtacacgcaggtgtgggaagcggcggagaaactgggggcgcagcgttcgcgcaccatcgttgccaccaagggcaatgctgcagttgacttcagcagcaccaacatcgcgttcaccgacctctgcaacaaggatgagaagcagtatccgggcattgcgcgctgttccgcgaccgaggctgaaaagctgggcggcgacatcgccacggccatggcttatctgcgcggcgacgcatcgcgcgaagtacgcaactcggggggcatctatcgcacccgtaccaccgtgctgggcgacatcgtcaattccagcccggtgatcagttcgccccgcgacgactatggctaccagcgcatcagcaccgcgatggcgacctcgtatgccacgtatctgacccgcaagcgcaacaatggccgctacatggtctatgttggtgccaatgacggcatgctgcatgccttcgacggtggcatgaacggcaatggcgtaagtgacggtgccggtggcagcgagaccttcgcctacatccctggaaccgcgctgggccacatggccaacctgctgtatccctacgtggcggccaacaagtccgaccagcgcttccgtcatcgctactacgtggatggaccgatcgcggtggcggatgcacagatcggtggcaactgggccacggcgctggtcggtacggcgggcgccggtgggcgctcggtgttcgcgctggatgtaaccacgccgtccagcttcggcaccggcaatcgcctgtgggaaatcagtgacgttgcgccggggctcgacagcaccgtaaaggcgaacatcggtcatgtccttggcaagccggtgatcgtgccggtgaaggaagggaccggagtggcgtggaaagcgatcttcggcaacggttacaacagcctcagccgcaaggccgtgctgttcgtggtcgacctgggatcgggcgcggtgcggatgatcactgctaccgaggccgcagcaaccgcacccgccggtgacaatggcctcggcaacatcgtggctgtcgaccgttggcgcgccgacagcgccggtgggaccgggcgtgtacgtggccgtgacggcctggcggacacgatctatgcggccgaccagcgcggcgcgctgtggaagttcgacctggaaagcacggcgacctcggtcaccacgccggtgttcaccacggcgcgccagaccaacaacaacaaccaggtgtatcgccagccgattaccggtggcatgaccgccgtgaccggacccggtggtggcgtgatgctggtgctgggtaccggcagcttctccttcgacaatgacccccaggatctcaccgcgcagtcgctgtacggtgtcaacgacaccagcaaggaccagccggaggccacgatcgtgcccgccaatctggtggcctatacggtgaccaccaccaacaagttgcgcacggtcacggccacgcccttctccggggcggcgcgcggatggagcattgcactgcccggcgcaggtgaacgctttgttggtaatcctgccgtggcgtcgggaacggtgttcatgccgacctacatgcccaccgcgggtggccgtggctgttcgaccgagggaagcaactggctgtttggcctcaatccgatctcgggtgttgcatcgctggagcaggcgcgggtcgggtccattaccggcacgccctacggagcgggcacggctggcgtgagtctcgacaccggcggcaccgcaccggtgaaggacgtcaatgtctcggtgatgccacgcctggcaaagggtgccgatcgaggcggacgtgcctgctggatggcggtcaacgtggcgggtgctccgacgatgtacgtgccttatccctgcggtcgccaatcctggcgccagatccagtaa

SEQ ID NO: 507769 - DNA, 1596 bp, Stenotrophomonas maltophilia
ttgcgtttgaagtggctgagaaatgggtttgagctgagtttccgtatccgcccggcaggccttgcgctggcggtactctacgctgtcgcgtgctggaccacctggcacctttccgtcgatcagttcttccttccggctggaatccgtgttgcggcgctcttgctgaccccgaagcgaatgtgggcctatctggtccttggcgagtatgcctacttcgcccacatgcgctatccgatgattgaagattacggaatggcctgggtcattttcggatccgcatgcctcataccagcagtggcgctgatcgttcatcttcatcacaagctgattgcttccaccaccgaaagctggttgctttcgatcgcggcatccgctgcgctggtggccactgctctcaagctcggtctgattcacatgctgtggccagctccaccgagcatgccgttctacacgaacgcgatgctctacgtgctcagcgactacattgcaatccttacggtcgcgcccttggcgctgctctggatacgccgacacagcggctatgactggacgacctggcgacgccgaccgaccatcgcagccctcacttcgctgggcatgctgggcgccctgctgctccaggtcagcacggaggatcactcggcacgagcaacgctgcagttgttgctggtgctgccagtcatcgcactgacttgcatgcacggttggcgaggggccgctgtgggtgttcctctgatgaacatcatcctcagccagaccatgccaaccacgggtctgcccgggtcattcgacgagaccactttcttcacccagcagatcattgccatcactagtacagcgcttatcgcgctgggaccgcgcatcacccatcattacaatcagcgcacacctgtagcgatgtcagcatcgcgggtcaatgcactctcgcgctcggcgcatcttgccaacgagcaggacctgcgcgaacgcgcgctgggcctgcgccagattgcagatgacatcgaagaggctctgggagagacagtgcaacaactcaaggccgatggccatgaagttcctgcgtctgatttgctccgcaccttctcgcaacgctcacgacgattccgtgaactgaccagtatggtctatcccacggagctcgagcatgcaggcctctatgtcgccttgcgtgccgggggactcagcgaaacctggaacgccagccatcgcatcgtccgtccgatacttggcggggatccatgccagctgagtatgggcctgcagcttgccgcgtatcgcacctttgccgaagccgtatcccttttcctgaaggacgaatccggccagatccagatcagcgctcgctgcggtcgctatagaggcgtgcacggtatcgtgctgagggtcgcgctgctggaccgacatcgtacactcgcctctcgaaccatggagagcgccattgatcgactctctgcacgcgtgcacgcctattccggacgcgtgcaatgccggggccaccgcatcaccatggtgttgctggacactgcaggcgaggccgagcgcggaacacttccatacaagcgaaacgacatttgcgagacgcctgcgcgccagtga

SEQ ID NO: 507770 - DNA, 249 bp, Stenotrophomonas maltophilia
gtgtcgtactaccaggtcaatgatctgaccggccaggtcaatatgatcgttgccaacatcgaatcgacgttctgggcattgccggccggcaagaccgtagctcgcgtgtcgttgccgtccaagcctttggcgataccgaagaatgctcgccgcagcgttgtcttccgcgggcctgatttttctctggtcgtctatggagaggggcgtggggcagtctggtccgtcgagcgcgaggtcagtagcaaatga

SEQ ID NO: 507771 - DNA, 1536 bp, Stenotrophomonas maltophilia
atggcactagccggcattccagtgcacccggccgggcttctcttggctgccgcgtacgctattgcctgcgtttccgcccgacagttttccctggaccagtttttccttcccgctggtatccgcgtggcagcgcttttgatcgttccacaacgccgatggccttatgtattgctgggagaattgggctacttcgcatatctgcgcatccctacgatcgacgaatacggtctggaatgggtcatcctggcgtccacgctgctgatgccgatggcgatgctggtagttcacctccatctgagaaaaaccatatccgaggcagccaccggattctggctgctgtccctttcaatctcggcagcggttgcggttaccggcctcaacctgagcctttctcgcctcctgtggccagttcctcccccggacaccctgctggatgctgccgaaagagtcgtatttggtcattttgccgcgatcattaccatggcccccctggcccttctttgggcccggcggcgctccggttctccatggcagaagaggttgctcgttccatccctcgtggccattgctctgatgctggccctggggctgtgcatgcagctgatttcgactgatgcccattcgacccgtacccaccttgtgctattggcggcactcccagccatcaccctgaccttcatgcatggatggcgtggcgctgccatcgcgattccactgttgaaccttccacttcatttcgccacccccagcaccggcctgccggcctcgtttgatctgggcacgttttccacccaacagaacatggcggtgatgagtgtcgcgctgcttgcgctcggttccagcatcagctatcaccatcagcgcgcccgatcccgcggtctggccgaggaaacgacgctgcgcctgacacgcagttctcaccagaccagcgaacgtgagctgcgtgaacgggccgcccatctgaagcgtctgggcgacggcatggacagctcgctcgttgaaatggtcagctggctcaaatcgcagggccatcatgccgtggcgaacagcctgcaacacgcgtcatccgtgcactcacgtctgttccgcgagcaggccagcatggtctaccccactggattggaacaggtcgggttgtacatcgcgctgcaagcaggcggcgcatgcgagatctggaacaacacgcatcgcgtcattccgcccaggctggcgggtaacccctgcctgctgactgtggatctgcaactggccatctaccgctccttgatcgaggcggtgtcactgctgctggagctggagactgggcaggtctgcgtgcgtgcccgaagtggccaggcgagcggacgtcgcggcatcgttgctatcgtgagcctgctcgaccgtggttgcacgctatcggcacgcaccaccgaccaggccgtcgagcgtctggccggacggatgcttgcctacggcggaacggtccactgccggggcaatcgcctgcgactggtcctgcatgaatcgatcacccacacctcgccagcggcggcctga

SEQ ID NO: 507772 - DNA, 207 bp, Stenotrophomonas maltophilia
atgctcgactgctcttcgcgagaagcagccgagcatggctcggctctaccgaagaacgaaaagcagtcgagcatggctcgactctacaaagagcgaacagcggtcaagcagccacgtcgttacaactggatccaggtggccttgatctcgctgtacttgtcgaaggcgtgcagcgatttgtcccggccgttgccggactgcttgtaa

SEQ ID NO: 507773 - DNA, 387 bp, Stenotrophomonas maltophilia
atgtcacaccttgatccctctcctctgccccagccggtctcgcttgcccggaaatttgcgctgtttaccgagcagtgggcacccaaggtcatcgccgagatgaatgactaccagttcaagatcgtacacatcgagggcgtattcgtctggcacgtgcacgccgacaccgatgaggcgttcctggtggtcgaaggagagctgcgcatcgaattccgcgacgggcacatcctgctgcgacgaggcgaactgtacgtcgtgcctaaaggggtggagcacagaacctgtgccgatcacgaagtgtggttgatgctggtcgagccgcgaggcgtgctcaatacgggcgattcgcgcggcgagcgcactgcgcagaacgatgtctggatatga

SEQ ID NO: 507774 - DNA, 825 bp, Stenotrophomonas maltophilia
atgactgagaaggcttcgccaggtgactgggtcaagcacggggagggtgacggtggcattgagcgcatcgaggcgttcttcgaaggccacggttacgcgcctcatcgacatgacacttatgccatcggattcacgctggctggggtgcagagtttccagtaccagcgctcacggcggcatggcgtgcctggatcggtgctcgtgctgcatcctgatgaactgcacgatggtgaggcgggcacggccgccggattccgctacaggatggcctatgtctcaccttggcaggtgcaacaggtgcttggtggtgcaccgcttcccttcgtgcagggtggggtatccagcgcccctcgcctgagggccgcgattctgcctctactggcgcacctacaggcctgcctggaccctttggaagaggctgacgcgctctatgatctatcgcacagccttgtcgcggtggccgggcgcccgcgtgccatgcgcaggcccgatgcggccggggtggggcgggcccgcgcttacctgatggacaggctcgggcagcaggtgaccttggatgcgctggagcaggtcagcgacatggatcgctggcagctgagtcgtgattttcgcgcgctgctgggtaccagcccctatcggttcctgacacttcggcggctcgacagggtgcgcagggccctgctggccgggcaatcaatcgcctcggctgcactcgatacgggcttcttcgatcagagccacatggcgcggcagttcctgcctgcctacggggtcacgcctgcgctgtggctcaagcggatgggcatgcggggccggcgccgttga

SEQ ID NO: 507775 - DNA, 561 bp, Stenotrophomonas maltophilia
atgtcttcatccacgttcgcgcccattgatgtcctcgcccgtgccctcaggcgggagcgcgagcatttgggggtgtctgtttctgagctggccaagcgggctggcgttgccaagtccacgctttcccagctggaggctggtattggcaatcccagccttgaaacgctgtgggcgctggcctcggcgctggaggttcaggtatcgcagctgatcgctccgccgcagcagccggtgcaggtgatacgtgctggagagggcgctcgtttggcctccgagcaggctgattacgtcgtgcatctgctggccgcgtgccccgcgggggcgcgccgcgatatctatcgggtcgtggtcgagcctgcatccatccgtgaatccgcaccgcatccgccgggaacggtggagcacgtggtgctatgcagtggccgcgcgcgcttggggccagtggggcagtgcgtcgaactgggggcgggcgactacatcagctatgcggccgatgtcgcgcatgtgctggaggcgatgtcggaaccggtcaccgcggtgatgttgatcgagcatcgctga

SEQ ID NO: 507776 - DNA, 912 bp, Stenotrophomonas maltophilia
atgcagtccatccgcgttggcgcgttgcagatggcggcagcgatggtgatatccggcagcgtgggttggttcgtggtggaaaccggactgcccgcgccgaccgtggtgttctggcgctgcctgctgggcggactggccatgctgctggcctgcgtcgtactgcgcctgccgctaggggatgcgcgcaagcggcgctgcctaccctggattcttgctggcggtgcagccctgaccctcaactggatctgcctgttctccgcctacccgtatgcgtcgatcggcgtggtgaccgtcacctatcacacccaaccgttcctgctggtggcccttggcgtgctggccttcggcgaacgcccacgccccgctcagtggggctggctgctgctggccttcggcggcgtggtgatgatcgttgttgccaccccctcaggcaccaccccttcggccaactacttcactggcattctgctggcgctggcggccgccctcctctacgccattgccgcagccatcggcaaacgactggtggacgtgcccacgcccgtggtcgtaacggtgcagctcctgatgggcagcctgttgctgctgcccttcgcgcgctggccgggcgacgctccgtcgcatggatgggcactgctgctgacgctgggcttcgtgcatactggcatgatgtcgacgctgttgtactcagccctgaagaaactaccgaccctgctggttggcgtcctgtccttcctctacccggtcatcgccattgccatcgatgcggcggcattcggccatgtgctggggccggcccaatggatgggcagcgcggcgatcctcggcgccgtcgccggcatgaacctgctgcgggcgggcggaatgcagggcggcacagcgagtgacgccgaacacgaccaaaagtgttga

SEQ ID NO: 507777 - DNA, 435 bp, Stenotrophomonas maltophilia
atggccatgagtctcgatgccgaactggaagaacgcctccttgcaaccgccaagcgtgggagaaccgcttggctggccggcgacattgcggaggcagagcatcgcttccttgaaagctgggacatgattccggagccgaaatctgcttatgactacggccagatttcatcgtatggaatagccatcttctatcgcgataccgctcagtttgaaaaggccagagagtgggcgatggtcgccagaggcatctatggagaaggcgaagcctcgagcgagtacatggatgaacttgcagccaccatccagttcgaatcgggaaatctggatgcggcctacgccttgttcgagccccagtaccggaagtacggccgtcgcgtcttcgagggccacaagaaagagttcatcgctttcatcaagaacaggaagaagacttga

SEQ ID NO: 507778 - DNA, 1803 bp, Stenotrophomonas maltophilia
atgagaatccaccacctcgcaatcgccctggcggcgttgctgccagcaggcaacagcctcgcgcagtccggtagcgcccacctgacacccagcaggatcaactaccaggagcaactacctgacaggtactcccatgtggatttcacagtaagcgccaaggactggatggagcgggcacggctgccttcacatcagtcccagccaggggaaatgtccttcttgatctccaacgccgctggcaaagaccagaacttcgaactcatcggaaagttctcgcatctgccaccggatgccaaccgcatgatcatccctgcctcgaaatgggtggacctggacaagcgcgaacagggatgggaagtcatcggcgacgtacgggagttgattcctcacaataccgagcgctggtgggtgcccgccatgggccgcaaattcatcaccaaagtctcgctgtacgacggccagtgggccggcgagatcgggttgcccagccagcccaatcttccctatgacacgattaccgtcaccaaccatgcgacgtggcctacccggatcatgggcaacaacacgctgttccccgatgcgcagatgaagctggggaccggtgatgtgcatcacttcgtgttcgacccgaaccatcgcaaatggaagcttgattacgcgacccttgttccggtcagcatcgccaggcatatggacaagcccgatgcgccccgaacggtagttgaggttacaccggaagattcgcacaggtcactgcgtctccctgacgtggccagcgatcgggatcgtcgcaccgtctccgtgcatccggcgctcgatcgttccattgcactgatcgcccggaacatcttcgatcacgccaccacctactggatgcttgcgcctggccagtcgatggagctggtctatatcgatgatggcggcgtgggcagcggccaatggcacccgctgcgctatccgatccagcacttcgatgctgatacgctgccgggtgggcgcctcgacaaggcccagacgatgctcacctggattacgagcaagggcaggaacgtgagcttgccccacgtttcagcctggatgacggagcatgcgcgtatcgaagtggtaaacaccgaccccaatgcaagcatcaaggtcacgggcaacagggtcgacactctcaagcgccgcgagcaggcgtctttccgcttgacgagggtcaacggccggctcgactgggtccgcgaaaccgacaccatcgacgtcactctggtgggccctccgggtccaggccggccggacgaagacatccttgtattgatgcgcgagaacctcaggaagaccaacgaggccttgcagaactccggcgcaacgttccgcctgcgtgaagcagtcgcaatgaattacagggtacctgccggaatgcccacccaggccattccggaatggctggcacagcagcccgacttcgagtacgtggtcggcctgctccgctcagatggcctgtactacggtggtttcgccgacggctgcagtggctcccatcattctgcagaggccatgcgcttcgtgatcgcgaccaatgtgctgtgctcaaccgacgtcctgcgcgaggaagttggcaaggccctgggcatgaagatcaacgccaagcaaccggtaccggtcatcggctcgggcaacgcactgcccatgtatccaaccagcacccgcatcctggaagacggcagccgtgccatcaaccacgggcagcgcgacgaggtgctgtacatgaatggtgtcgccgcagacgttgcccgatacagcgacagcctcaggccgtaa

SEQ ID NO: 507779 - DNA, 432 bp, Stenotrophomonas maltophilia
atggatctggatacgggcatatggagtggattggtgggcggcagtatcgccacgatgattgcacggcgagctgccggtcgacttcccagtcactaccgcggccgtagtctggtctacctgcgacgccgccatcgcgcttccatctggagtgcaaacgcgcttttcctgctcgggttgatcagcggcctgttgatctggccgttgggtcactacgccagtacggattcacttccattgctgctggcagccggcatgagttgcggtctgccgctgttggcgctgctgctgattccctggatgacccgccgtccgatccgtgaggcatgggtgatcttcggctattcgcagggtgggccggtgtggttgatctactcgatcctgctggcaggcgtcgcctgtggtgtggtcggagttttgcggctgccggactga

SEQ ID NO: 507780 - DNA, 873 bp, Stenotrophomonas maltophilia
atgacagatacctcgttcaagccggaccgtgactgccaacaacggatcgtctggcgacgcattgcgtcgttggcggcggcgctgtcggctttggctctcatggccggagtctgcagcctgcgcccgaggtggcagcaggcgatcggtccgccattggtcaacctgggaacggcgcagatgcaggcggaggcgatggcgctggcgatccggcagaggccgcctttcccccctccacccccgccagagccgcagccaacaccagttctgccatcgccgctgagcgaggtgcccaccgcaccgcagacgccgttcacgcgcgtcgatcgatggcgcccgcaggagcagccacagttgaccggcccggtgggggaggacatctacgtgatggagcagaccttgccctattgctggccgggcagcagtgcctccacctgccaggaggtggacgatctggtcctgccgctggacgattggtggccgcaggacatccatgcgctgcggttgcagctgcaggcggacctggttcccgccaatcaccgttccacgccagtgcctgcggccgcattggccggtgcgcagcggatggacagcgcgaggcttcgagcgctgcgggagcaggggtgcgggacaacggtgcatcggccgactcggacatacgaccacgtcgtctatctgacccggcccgttttcagcgtcgatgggcagtgggctatgatcgcggtcgcctgggattcgtgttccgacgatttcgtctaccgggagcttgtcgtactgcatcgggaacaaggacgctggatggccgaacccccggaacggggtctgggcggcgtatgggacggccgcgtactgcggccctggacgtacaaccactga

SEQ ID NO: 507781 - DNA, 414 bp, Stenotrophomonas maltophilia
atggccaagccccgcgaattcaaaaaactggtggcatacctgcagaagattcctgcgatgtccgagcccatccactggcagcgctgcgacgatggaacttggtctgttggtttttcacttgccttggagcacccgctggcgtggagcacggtgcaggagttggcgtatgtgctcaacacgctttctgtgtcggagcttctccccactcgtttcctgcccacggcgccaccgccctatctcaatggtcctgcatgctggtatctgagctggcgcatcgaatcgacgctacccggcatcaagcctgatgaggtgtttgagtggcttgaagggcggttgccacagccggtagacgacgaatcgaagtggataccatccatagttgaagactgcgaatcgcctgatgatgaagcgtga

SEQ ID NO: 507782 - DNA, 669 bp, Stenotrophomonas maltophilia
atggacaacgatcaggactttgcacttttcatcgagacgttcggcgaagccggtgagcacgcgtcggttccagagaccagtttcaccaagtggacgggcatcttgcctgaatcgctcttgagctattggcgtcgggatggatgggcgaactatggcaatggacggctgtggacggtgaatcccgaggactacgaaggcctgatgcacacgtggttggctggtactccatttcccctgatcgatacctaccatgtgtttgccagaagcgggtttggacggctctacctgtgcggcgaagcatcaggcgctggcgtgagcatcgatccgatccgcagtgaagtatttgctcttcagaactgtttgagacccaagtctctcgcacggcaggaggggggcatcaaggcgtttttcgcttgcgcggagctcgaagactttgatctgatggatggggccgaacagctgccttttgatcgggttgtgagtacttgcgggcacttgatggcggatgagatgtatggctttgagccagcactggtttgcggtggcgaagtcgcaattggcaacttgcgcaggctcaagcttcagccgcacctgcatattctgagggagttcgccgcgcctgcatttccacgctatgcgaaaaatgtgaagccactggcccggaagtga

SEQ ID NO: 507783 - DNA, 315 bp, Stenotrophomonas maltophilia
atgacccaggaacatatcagccacccggaagggttgccgaactgcgccgccggacaccgcgcgcgccacatccacgacaagcgctgcgcctccgccggcggcggccacctggtcgagtgcgcctgcaggtcgaccagcaagcatgccgaccccgacaaggccatcgcagcatggcgcagactgaatcgcccggcgcgcagcgcgcgtcccgcatcggtcgatatgccgatcgacaacgtactgcagttccagcttggcctgaccgaacgcacgccaaaggctcgccgcatcggaggtcatcatgggcgcggctga

SEQ ID NO: 507784 - DNA, 333 bp, Stenotrophomonas maltophilia
atggctcctggcgctgaccggtctctggccgaccttctggatgcactggccagccaggtacaccacggccagcacatccccggcgatgccgagcagcttctgcaggatccggccaccagccttctgtctgtcttcggcccgaagctggccgagcatcagcgcaatgcgcggcacctggtggtgctggaggcggcgaacgtggtcctgcgtaaagactcgtcgacttggctgcatggtggagaggccgggcagacgccgcacgagcggtcgctggccagcaacggcggtttggcggctgtgctgcaggagctggaagcccgtcggaagcgatag

SEQ ID NO: 507785 - DNA, 840 bp, Stenotrophomonas maltophilia
atggctgagccgatctgcattgagtcatcgtttcgctacacctgctctcgccgcagtaagtcgtgcgattcggtcgttgtcgatacccgattcaatgatggcatcgcggcacgcctgtccgaccacttccaagtcctcgaccatggcgttcacggcaaagcgaagcgcttcgaaatcgctcaagcgatcttctttgctcggaccgctaaatccatcgcggtaggtgtcagccaacgctctcgccattccagtgcaccttgccagagtgggcccaagggaatcaccaagataatgaaggcgatcagcaagctcccttgtgatttgaaattcaaccttctcaatctcgataatccgctcagccaaataccccgcaacgttgacgaatttgtctttagcttcgggagaagcaagcttcttgtaagtgccggaaagcaatcgcttgttgttgaaaacctctccattgatctggaccaagacaagggtacgctcacgtctgtctcttacagcctgtcgctcagactcggcccgagccagggataccgccagctggctggagcggtttgcctccacgccaacacgccatacggcaagcgcagaagtggcggtcacaaggacccctatccacgccacgctcaacgccaagacagcaaccgctgcagccgccagtgctccagacgcagcccaagcgtcccaccaaacgacgcagtcaccgactcctggctccatgcacggactgattccattccacaactgctcccagctagacattccctgatccccccgtggattcgtcggcattctgccatgtgcatgcagccggaggagatcgcccatggctga

SEQ ID NO: 507786 - DNA, 669 bp, Stenotrophomonas maltophilia
atgagcaacgacaacaagaccctggcggacgcgcagcccgatgggagggtgaggctgggggatgagcttctgccctgccccttctgcggtgcacccgctgaacgcatcgacttcggtatcgggtcggcggaaaacgagggtggctcgtgtatcgcgtgcaccgtctgccagcacagcggccccattgaatttggcttcaaggagaacttcgtttccaactggaaccgtcgcgccctctccgcccagccctccccgggtggtcagggggatgcgctgctggatcaagcacgcaagctattcgatgagctgggagcgattgccgacgacgacagatgcgtagcgatcttggctgctgccctcgccgcccgccagccggtgggggagccggtagccgtccgggtcaccccggaaatgcgcgcagcgttccgcaaggcgtaccgtgaaggtggcttctggcatgaccgcctggacactgcccttgacgcgatgatgcgtgccgcccggcccgcgcaggccgtggacctgggtgaacttcgcaggctgtcggatggctggctggcccgatccgacaggctgtcggtcactcagcagcgcaaggctggcgcgtattgggcttgcgccaaggaactgcgggattggctcgacagccaggcggtgggcaatggctga

SEQ ID NO: 507787 - DNA, 432 bp, Stenotrophomonas maltophilia
atggacaaccttactgcttccgagattatcgaccgcttgggtggcaccaccgaggtggcccgcatctgcaggatcaagccgccgtctgtcagcgagtggcgtgccagtgggatcccgccagcgcgccggcagttcctcgaactgttgcgacctgaggctttcgcgggatcccgcgtcgcggctgtacagcagctggtcgacagccgcatgagcaagcgcgcgctgcgcgccaagctcggaatggatagcgacaagcacctggccaccctgctgcagctgccggtggaagaggtagaggcgtggccggaagagggcgtcctgcccgcgctgccgcaaatccagcgtctgctcggtgccgaggcacaggccactgctgagcccgcgaacgaggatcccgacgcgaatcgcatcgccccggtcgacaccgcttga

SEQ ID NO: 507788 - DNA, 894 bp, Stenotrophomonas maltophilia
atgtcgaccatcatcatgtcgcagtgctggccgctgcagggcctgagcgtcacgcagaaggctgtcctgatctcgctggctgaccaagccaacgacgatggcgtgtgctggccagccgtcggcaccatcgccgcgcgctgctgcatgtcggcgcgcgctgtgcgtactgccatggatcatctggaggccgtaggcctgctggcgcgtgatcgccgattcaacagcagcacggtctattcggtcacgccggccaagttcaacactgccgctgcgccgtccaagggcacccgcaagagcgcaaagaacggtactgcgccgggcgcaggtgctgcgccccatgcagggggtgcgcccggtgcaggtgggggtgcgcccgctgcaggaggggatgcaccgggcgcaggtctggaggtgcgccccgtgccgcctaaccgtcatataaccctcattgaaccgtcagatgaaccgccaattgcgccgccggtggcgacgccgccgacgaaggcggagctggaggagcagatgcagctggcctgcaaggcgacgtggggcgcttaccgagccgcctaccgcaatcgccacggcgtggaccccgtccgcaacgccaaggtcaacaccaacgttcgggatctggtgaagcgccttggtcgtgaagaggcgccgctggtggctgggtggttcgtgagcgtcaacgagcagtacgccgtgaagcgcatgcacgacctgggtgtgctgctggccggtgctgaggcgtaccggacccagtgggccaccggtcgacaggtgaccgccaccatcgcccagcagcaggaccagacccaggccaacgcatcggctgtcgatgacgccaaggcgctgctgcgccgcatgaaggggagcgccaatgctcagtga

SEQ ID NO: 507789 - DNA, 204 bp, Stenotrophomonas maltophilia
atgaagaagacgaaggccatggcgccgaggatcaacccccagcgtgcgccacgcgagcgtcggatggatcacaacacggtttcccggccgaaacgggtgaagcccggaaccaccttccgcggccaggccgagacggtggaggagttcaaggcgcgcggcggaaaggtgcagtacctgacggccaactgggaccgcgcggcgtga

SEQ ID NO: 507790 - DNA, 540 bp, Stenotrophomonas maltophilia
atgaatcaatcgccggaagcccgatacaccgagcaacttacgcagcgccgtttaggtgcgctggagaagggccttgaaagcctgcaaaaccaccagcgcaccgtcgagtctgagaaggaggccgaggcgctcaacaaggtgatggacaaagagcgatcagccaatgaggcgtacaccaagctgatcgtagcggcgggctacgccggatttctgaccttctggggtaagtctgctcaggtgataccccgaccacaccacgcgtggatcggcactcttttcttactatccttgctctgctacatcggctacgaggtctatatgtcggtacgcaggggattcgcagttcaactggcgaatcaacgcctcaatgaaaaccccacgccagcgggggtggctcagttcaaggcttccctaacggacttcaatcgccgcgcacacaggacgtggctgttcgtcctcgtgccaaccgtggcactcggattcggctccggtctttggcttatcggctggtacgtctacagcacttgggcgggccattga

SEQ ID NO: 507791 - DNA, 192 bp, Stenotrophomonas maltophilia
ttgcgtgatcactacacctgccgctgctgcggccggatggtggcgggcaagggggaggctcatgttgaccatgtggacggcaacagtagctacaaccctgcagacggcagcaactggcagaccctctgtgtgccgtgccacagcacaaagacggcgcgcgaggacggcgggttcgggaacgtcagacgctga

SEQ ID NO: 507792 - DNA, 414 bp, Stenotrophomonas maltophilia
atggcaggcgtcaaaggcaagagcggcggcccgcgcaagaacgcaggcggcgcaaggcctggcgccggtcgaaagcctaagcaaccggttccggttcccgcgaagaaatcagcaaataacaaggcctcggcggtgaaggtctctctggaagcccagcccggcggtggcgctctcaagcgttccaagtcagtgccggttgagcaagaggacaaggacatgctgacccttctccaagacattgcactggggcgcgtggtcgcgactgcactgcaggtcaaagcggcctcggcggcgttgccctacacccacgccaagaagggcgagggtggcaagaaggaggagcggcagcagaaggcccaggcagtggccggtcgcttcgccccttccgctccgccccgccctcggatgaactga

SEQ ID NO: 507793 - DNA, 1698 bp, Stenotrophomonas maltophilia
atgggaatcgcttacacaacggcctgcctggactgggtggatcgcttgcgtgcgggaaagagcatcatcccgccgccgatatacccgagtcaggcggaagaggcactgcaggtcttcaagcagctgcggatcgtcgatgcaccaggtagcccgacctttggggaagcctgcgagccatgggtgttcgactttgtggcggccatctttggcgcctacgacgcggagaccggtcgacggctgattcgcgaggtgctgatgctgatcccgaagaagaacagcaagtccacgctggcggccggaatcatggtgactgccctgatcctgaactggcgtgtgtcagcggagatgatcatcctggccccgaccgtggaaatcgccaacaacgcgttcgcgccggcccgggacatgatcaaggtcgatgacgacctgtccgaactgttccacgtgcaggaccatgtacgcaccatcacccatcggacgatgggggccaccttgaaggtggtcgcggccgatagcgaaacagtcggtggcaagaaagccagctgggttctgatcgatgaggagtggctgttcggcaagcgccccaatgccgaggcgatgttccgcgaagcggtcggtggcctggcgtcgcgcccggaagggatcgtcatcaagctgacgacccagtccgatgagccgccggcgggtgtgttcaagcaggacctgcagcgcatgcgggacgtacgtgatggcaagatcgtggaccctcagtcgttgccggtgctctatgagcacccacctgagatggttgccgctggcgatcacctgaagctggagaacatgccactggtcaatcccaacttcggggtgtcggtggactcggagttcctgcgacgggaatacgagaaggccgaacaggcgggcgagcattctctacggggctttctggccaagcatgcgaatgtcgaagtcgggctcaatttgcgctcggatcgctgggccggggcggacttctgggaacagcaagcccgtccggagcttgtggcgacgctggatgatctgctgcagcgttgcgaggtgatcaccaccgggatcgatggtggtgggctggacgatctgctgggcttggcagcggtagggcgtgaacgggaaacacgcaagtggctggcctgggttcacgcttgggcgcacgagatcgtgctggagcggcgcaaggatatcgtcaccaagcttcgcgagttcgagcgggcaggtgatctcaccatcgtcaagctgccggggcaggacgtggatcaggtggccgatgccatctgccggatcaagcaggcgggcctgatgcctgaagagaacgggatcggggtggacccggcaggaatcggggccattgttgatgagctgaccaccgaggatcgaggcatcgatctcaagcagatcgtggccgtctcccaaggctggaaactcaatggcgccatcaagacgacagaacgtgcattggccggtggcgacctggtccacgccgggcaacctctgatggcgtggtcggtaggcaatgcgaaggtggttccagccggaaacgccatcacgatcaccaagcaggtcagcggtacagcaaagatcgatccgctgatggcgctcttcaacgcggtttcgttgatggcactcaatccaactgctcgcggcacctccgtttacgagagccgcggcattcgattcctataa

SEQ ID NO: 507794 - DNA, 1134 bp, Stenotrophomonas maltophilia
atgttcattgatgatcaaggtgtcggtcgtcgcgaggtcgcttacatcttctttgatgagatccagtatttaaaagactgggaggttcatctgaagtccctggtggattcctttccggagtacagattcgtcgcgactggttctgcggcggcagcgcttaggcttaaaagtcaggagtccggtgcgggaagattttctaattacgtgctgccgcccctaacatttgctgagtatctctccttcatcgggaaggagaatagcttgataaaggtggagaaggacgaggatagtaagaagtcgtcgtatcgcgcaacgaatatcgatgctctgaatgctgaatttgttaactatcttaattacggtggctatccagaggctgtaattgttgaagatatcagggataatcctgagcaatacatcaaaagcgatatcattgataaggttttgctgcgggatctgccgagcttgtatggcatcagtgacattcaggagttgaataagctatttaataccctggcctacaacactggcaatgaagtcaatctcgagggtttgtctaagtcgtccggcgttgcaaaaaatacaataaaacgctatctggagtacttggaagctgctttcttaattcggcgggtggatcgtattgattgcagtgctaggcagtttaagcgtgccactcatttcaaggtctatttgacgaatccatccatgcgggcagcgctattcgggcgtattgggccggatgaccaacattttggtcacatcgttgaaactgccatttattcgcagtggcagcacagtgacaagaccgacctctactatgcgcgctgggcatcaggtgagattgatattgtgtcaattgatcagtcctcccaaaagccactttgggcggtggaggttaaatggactgataagccgctccacagcgttggcgagctgaagaactgtgttgaattcctcgaaaaaaattcgaacattggtgatcaggatatgctggttacgagccgcacggagtatggattcgtgaagtttggtggatacgacttcagatttgtcccatctgcagcgtatgcctacaccctgggcgccaacctgcttagggcgcatcggtggcaagatcaacttgatttttga

SEQ ID NO: 507795 - DNA, 252 bp, Stenotrophomonas maltophilia
atgagtgaaatggatgcggtggacccggcttcggcagaacagtcacgagtagagagtgagacgctgccgcttgtcatccagacggtcggaggtttgtcggccgcggttggcgtcatcagcatcgtgttggcgcttactggcattgttccctggcttttgggatcaggcgtctccgcgcttcttgctgcgcctttcctctatggctttgcggacatcgtgctcagcttgagaaagctgtgctcaaagcgttga

SEQ ID NO: 507796 - DNA, 798 bp, Stenotrophomonas maltophilia
atgaacaacgtcaagcgtcgggccagcgcccgcaaggtactcaagccgatggccaaggtgctcggcgttgccttggccctctcagcgaccaatgcgggcgccatcggcccggtgcaggaaacgggtcctgcgctgtggcagcacatcctcaatcagatcaatacgtaccaggcccgtttccaggagaagtaccagttcgtcaaggagaacacccagtgggcacgggactgggcgcagacgatcaaggagtaccaggagacgatggtccagatccagggcatcgtgaattccttcgggttgccggattccgccccgctgacgccggtgccacccaattatctggttgccgagacctgcggaatcggcaccgacctgaagactctcgcgacccgggtcgttttcaatttcaagggcgattggaaagatcagcagcaacagatctgcgtgaacatccggatgatgcagaaccgcaagtacaacgatgcggtggacttcatgctcaagacgatgccgtcgttcttcgatagcctcgatgcaatcgagaagcagcgaaatgtcagcaatctgctcggcaacgtcaacgcaacgcagaacgacacgttgcgcaccgcgaacgacatggcagccaaggcaaagtccttcgaggcacagcagaaggcctacgatgcctacatcgaggtgatggaagccaatcagaaggtcgtcgcacaggcagcgctgaagggcgacccgatgaagaccattgccagtgatctggtcaagacggcggcgctgaaggcagcgctgtccatcgactga

SEQ ID NO: 507797 - DNA, 261 bp, Stenotrophomonas maltophilia
atgccgttgccgttgccgttgccgttgaccttgaccttgaccttccagtccgccttcaagcgagccgagcaccgcaggtccggcgagggcgaagaggtgcgggtgtctgagcgcagcgagttcccgcgccgtccctcgacggaccgaggagcgcagggcaccggcgtgcgcagcacgccggctcgcggccggcggagcgtttctttggttactttctttgcgcgcaaagaaagtgacacctctccgcaggcgcggaaatga

SEQ ID NO: 507798 - DNA, 348 bp, Stenotrophomonas maltophilia
atgtcgcccttcatcaacactgcctggccgcgctttttcatcgtggcactgcccatcgccctttttgcggttctgttgaacagcacggtcgatgcgacgccgaacggttggttgatccagatggcgctcctgctggtgccgttctccatcctggtgttccttgggcttggctggcagcgtctgcgcaaggcacacgccgaatatccaatcctgaagagcgaactgcaccgtatgctgtcggcgttgatcggcaacgtaaaagtggccgcgctgtggttcgggctgaccttggtcggaacgttcgccctgatgctgacgtgggtattgctgcggaagacgtgtggttga

SEQ ID NO: 507799 - DNA, 945 bp, Stenotrophomonas maltophilia
atgtcccacctcctggccaaggcggccgaacaacaggatctcgaccgcatcgacgcactgctggatgccggcgcggacatcgagtggcggcacaaaggcaccggacgcacgccgttgttgtcggcggtgatcgccggaaaggctgacgcggtggcgcggctgctggaccgcggtgccaacatcgagcatgcctgtgcggccgtgggctttaccgcactgggatgggcggccgagcgcgacgacgcagacatcggacgcctgctgatcgcgcgcggcgcctcgctgaacgtggcctcgccggaactgcatcgcacaccgctgatggtggcggcgcagggcggtcatctgccgatggtcgagctgttgctggctggcggtgctgatgtcgcacgcgtggatttcgaaggacgcaatgcgctgtcgctggccgaagcgcgcgggcatgcggctgtggtgcagtgcctgcaggcagcgggcgcacagatgccaccggtgttggaggaggcgtcgccgcttgcgtggcctgaaccggccgcagaaggggaaccggcagccgtggtgcgtggctatatgctggcctgccatgcgtgggaaacgcgtggttaccgtgatgccaaggccggtggagacctgctcggtagtccagcattccaacaggagcgcgcgaacatccttgcggcctggtgtaccgaccggaagcgggtgtattccacgggcatgtcggtgggcaatccgccggtgcacgtgccggaggatctgctggccgccgtcggtcagccgacggcctccaaggccgaagtgctggtacgtgaccatgcacagaaatcccgcgctctacgttacgaacggctgttcgtgctcaagcgcgtggcagggcaatggcggatcgacgtgctgaagaagcgcctgttccgcaccgaagcgtggtcgtcggcgattctctga

SEQ ID NO: 507800 - DNA, 1164 bp, Stenotrophomonas maltophilia
atgagattccgtcgttgccggacattgttcgtcgaaccggtcgaacgcccgtccttcaacctggacgaactgttggccggtggtaccggcgtgcagctgcagccggtcctgcaggtgcgcgcggcgcacctgccgtcggtgcaggtgatcgacgcggaaagctgtgcctggttgctggcctgcagtgcagaacagtggcagcggttgccagaagccaccgacgcgcgcggccgggtgctgtcactgctgcagaagggcctgttggtcagcgatgatccagcctatgcggacgtctgcgctgccgagaagcggctgcgcgacagccagtggtggccgttgtccgcgttgcactaccagcactcgcgctgggacggcgtggacagtgtcggcgacatgcaacgcagccagctggtgaccgcgcaggacctggtgcgcagcttcggcccgccgcctaccgaggcacccgcccgccgccctggcgcgcagccgttgccgcgttgcgacgacgatccgatgcaggcgcagctgcaggcgcgtaccacctgccgcaactacgacagcgctcgcccggtgccgttaccgatgctggccctgttgctgcagcaggtgctgatggcacaggcgcaggtggaaaccggacccggcgtgcgcttcctgaagaagaatgtgccgtccgccggcagtcttcacccgctggaggcgtatgtggtggcgcttaatgtggaaggactgccgccaggcctctatcactaccatgccaccgcccacgagctgggcccgatgccggcaccgcccggcgatctgggccgtttctgccaacgcttgctggccggtcaggactggttcgccaatgcgcaggtgcagctgatcctgacgtgtcgcttcgaacgaacgttctggaagtaccgtggccatgccaaggcctatcgcgcgatcaccctggatgccggccatgtatcgcaggcgatctacagcgcggcgaccgcgcaggggctgggcgccttcgtcactgcggcgatcaacgaggccgaggccgaacgggtgttgggtctgcagccgatgtccgagggcgtactggcggtttgtggtgttggctggcgcgccgccgagcgggtgacggcggagctggatccccttggccgcgcatggccggccgcgcattga

SEQ ID NO: 507801 - DNA, 285 bp, Stenotrophomonas maltophilia
atgtctgtttctcctctttccgccgacgttgtccaacagctgctggagcgtctgtccagtgatgatgccttccgggccgagtttgccagggacccgggcctggccctgctcgcacttggtgcggacgaagaaaccgtgcgtgcatgccgcgcgccgctctcctcgctgggcggcaaggcggaattcgcaggtgcggctacacgcatgagccagttgctggatgtgcgcgctgcgttcaccgtgccgttcctgttcgaagacggcctgcccggcctggatcaataa

SEQ ID NO: 507802 - DNA, 2511 bp, Stenotrophomonas maltophilia
atggacattccgcaggaacctacgccactgcagagccctctgttacgggcgctgctgttcactgacctgtgcgattcgctgcagctggtcgaaagcatcggcgacatcgccgcagccgaactgttccagcagcacgatcgcctggtactggggttgcagcagcgctggaacgggcagttgattgatcgttccgatgggctgttcatgctgttcgagcgcaccatcgatggtgttggattcgcactggcctaccagagtgccgtggattcgctcggccgtgagcgcggcatcgtactgcgggcgcgggccgggctgcatgtcggcgacgtgctgctgtggaacaacagcgccgaggcgatggcgcatggcgccaagccggtggaagtggaaggtctggccaagccgatggccgctcgcctgatgcagctggcctggccgggccaggtgctgctctcgtccacggccgaggagatggcgcgccgggccagcagtgagttgccttgggccgccgacgaactgcgttggaaggaccacgggcggtggcgtttcaaaggcatcagtgaacgccaggaagtcttcgaagtcggcctgcgcggcagcgcgccgctgcgtcggccacgttccggcgagaaggcatggcgcgatctcccgctgtggcagcgccccgcggcactggtgacggaagtggcgctggcgatggcgctgtgcgtgctgctgtggacactgctgcggccagcaccggccatcgccttcgccgaacgcgactgggtgatcgtggcggcggtgcacaacgccacggcttatccgcagctggacagcagcctggagcaggcgctgtacatcagcctggggcagtcgcgtttcgtcaacatcctcagcgagctgaaggttcgcgacaccctgcagctgatgcagcgtcctccgcaggcgaggctggaccgcaggctggccatcgaggttgcgttgcgcgatggggtgcgtgcggtactgatccccagtgtgctggagctcaacggcaaggtacgagtcagtgtggaggtggtcgatccccgcacgggccagaccgtctacacccgctacgccgatggacgtgggctggactcgatcctggcctcgaccgatcacgtggttgccgcgctgcgcaccgaccttggtgaagcgctgcgcgacgtcggcgctgaccagcgaccgctgcctaccgtggccacctccaaccttgatgcactgcatgcctatgccaagggggttgatgccaccgcagcggcacgctatgacgatgcgctgatgttcttcgagcaagcgacccggctggatcctgccttcgccttcgcctacgtcgggcagatgaacatccagcatgccaagggcaacctggagcaggccgcggcgctgtaccagaaggcagtcagccagcgcgcgcacctgaccgcgcgcgaccagctgtatctggatgcctgggcagcggatttcgagggtgccccgccggcacgcatcgcagacaagtggcggatgctgaccgagctgtatccggatgatccggccggctggatgaactacgccaagatcctctatacccagggtgactacgacggggcgctggccgccgcgcagccattgcttgcccgacagcattcgcgccgcgcgctggtgctggtgttcgttgcccgcacgcagatggcccggggcgaaattgcggccgccgcagcggcattgcgtggcgctcgcctgcaccccggctggaatggtgatgcaatggagcccctgctgtccgcgttgtccggtgatttcgacgtggccaatgccggtttcgcggcaatggcatcaccgggcccgggcgcgcgcatgctgcgggcagcagtgctggcgatgcaggatcgcaggaccgaggcggccagtgacatgcaacaggccgccgcccagtgcacggtgggtaccggactgtgtgacatcctggcattgcaggcgctggcctgggatgagccgcccgccggagcacagcagcaggcatacctgcatgttctggatcgcgcgctggctgcggtcgatcgcacacaaccggcgctggcgcgccgcaacgcgttcattgccctcgccgcggcctaccatgccgcgcgtgctggccagaatgcggtggtgatgcagcggcgcggggcgctgcaggccttgcctgagcgtgatgccgacccgcgcctgcgtgaactgtgggacctgctgcaggcgcgcctcgcgctgaaccaggggcaggtagcgcgcgcgcagtcgctgcttgccgggcaccccgacgcaagtctgttccagtggcgggtcctgcagatcgacctggccaacgccagcggcgactacgctgctgccctgcgccaggcacaatggctggagcgtcatcgaggcctggcgtttgctgaagatgtcggcgactacgcactgcttccactgaacgcgatggatgttcagcggttggcgtcatccggcaccacggccgtggcaagcaaggccagggcgcgcgtaccctga

SEQ ID NO: 507803 - DNA, 1050 bp, Stenotrophomonas maltophilia
atgaccggcaggggtgcggccgagaacgttgacgcaacgacaggtatcgctcaagtggcgatggccgaggtcgtgcatgcgttgctttcggaagctgaggtcgaattgttcgcgaaattcgcccgccgatgcaagttccatgccggacagtggattttccagcgcgggcaccgcggcgagcggatgtatgtgatcctcgagggtcagatcgaactggatttcggcgaagacctggtgatcaagacgttgggtcagcgtgagttcttcggagagctaggcctgttggtcggtgatcacctgcgcagtgccggagcgcgcgcgctgttcgattgcgaggtactggagctgggcccgactgatttccagcaactggtcgacatcgatcccgggctggtttcgcacttcctgcggcgcacgatcatgcgcgtgctgaccaatgagcaggccctgatcagccagttgcgtcgacgcaaccatgatctggaaaccgcactcgacaatctttacatcaccacccaccagctgacccatacccgtgagctggtgcgcaccgatgagctgaccggtctgcacaaccggcgtggattgacgctgtatctgcaggaatgccgtgcgcagcaggacgaccagccacaggcattgctgttgatcgattgtgaccgtttcaagcagatcaacgatcggcatgggcaccaggccggagaccgcgtgctgcagagcatgggcaacatcctgcgttcgatggccggggagcacgatcttgcatgccgcttgggcggcgatgagttctgcctgctgctgcgccgcggtaatcatgaccttgtgcagcatgcggcggagttcatcctggctgccgtacacggcctgatcgagcgcaatcacgctacgccacacgtgagcctggtcagtatcggtgcctgtctgctgcagccggaggcgggctggagcgaatggtatgcgtgtgccgatcgcgcgctgtaccgcgccaagcgcgcgggcgggaactgcctgcgctggggtcctgatccagatcccgaccacggacaatga

SEQ ID NO: 507804 - DNA, 5319 bp, Stenotrophomonas maltophilia
atgcagtctcgcctcatttctcatccgcgcgccgcaacggctgccaagggtctgtttctcggtttcattgccctgtgcgtgctggcaccggtcggcgtttccgcccagattgttcccacctggcgccaggagtacgacaagcggctgaagtacggggacattgtcgaaccgctgaagggcgagatcttcggcgagcaggtcaacctctatgacggttcgatcagcttcaaggccacggatgtttcgattccgggcaatggcagcctgacgatgaccttgggccgcagctatcgcgatggcgatcgcagtagtgagagcccattctcggattgggatctggatatcccgtccatgtccggcgtctatggcgatctgccggagaccgctgctgtcggctattgggcgcccgctgcgcgctgcagtacggtggcggcgcctccgtcactggaggtctggaaccgtcgccgcacccagaccgtaaatttctatcccaatactttctgggatggcgtgcgcctctccctgccaggtggtggcggtgagccggtcctgggaggcagcggtgatgcgcgtcagccgcagccacagtttggcgaaccgacgccttggaataccaagggcggctggacgttcagttgcctgaccgccctgaagagtggacagccgggacaaggcttccttggccatgctcccgacggcactaagtactacttcgactggatggtcgccaagccccacaacggtgcaacgctgcaaccctacggacctgaaagcaatgcactgctgaatcgaaagcttgtgttcctgtacccatcgcaggttgtggatcgcttcggcaactgggtgcgctacgagtggagcggcgaccggctgttgcgcatggttgccaacgatggccgcgagatcagcctggcctacaacgcgaaaggactgatcgcatccgcaaccgctgcagggcgcacctggatttacgggtacacggaggccgatatcctgcggacagtgacgctgccggacggaacccaatgggtctacaacctgccgccgctgtcagtcacccacaagtacgccgactacatcgggcagggcatctgggagtacatggactacccggccacatgctcgcgcgtcaacaagatcgtggctagcgagatcaccctgagtatccagcatccgtcgggtgcgttgggaacgttcctgttccgtccgttccgccatgggcgcaagaatgtgaagctggattgccagacctctggtgacaatcacctgtttgccgatggctggaactacacgccggtctaccgtgacgcaatgtcgctggtggccaagaccatcagcggtccggggatgcctactgcacagtggacctatcaatacaccaatctcaatggtgcctacgctcaggacctgggcggtccagtaatcccggtaggccaggcggagccgaagatcactaccgagacgttgcccgatggtgtcgttcgcgtctacgagttcggcaaggaagttgcctacaacgacggcctgttgctgtccacgacaacgcgtgcgggtggctcggtcgtgcgcgttgaccgcaacaattactatccggatgcccagctggatgcggcgcccttcccgaaagaggccggcaaggacttcaagtacggtgcgagcgatctcaaggcccattacaaccgccccgtccaatccactgtggtggaacaggatggcgtgcagttcacccgcaccgtgcaggcctttgatgcatttgcgcgcgaagtcaccgtcgtcgaagcgaattccgctggccagagtcgcaccaccagcaccagctactacgacaatcccacgctatgggtgaacggccaggcggcgcgcagtgtgctcaatggcatcgaacagtcccgcaccgaattcgatacggccaaagcactgccgctgcgcgcctacgcatttggccgcctggcgcagcaggtgacctatgcagccgacggcacggttgcctcggtggccgatggccgtggaaataccagccatctgtcgggatggaagcgtggtgttccgcagcagctccgcatgccggccacgcccgaagcgcccaatggtgcggtgcgcacggttgccgtggacgacaacggttggatcacctcgctgaccgacgaaaccggcgcaaccaccggcttcagctacgacagcatgggcaggctgcgcagccagcagttccctggcggcgacagcgttaactggaatggcgtaaccatggacctgcagcggctgggtggcgcgcagctgggggtgcccgccggtgcgtggaagcactcccgcacgcagggcggacggcgcacggatacctacctggatgcgatgttccgcccggtgctggtgaccgaaaacgccaacaatgtgctggacagtgccgtggtgacccgctacgacaccagcggcaagaccgtgtttgcctcgtatcccacgcggcagctctccgatatcaatgccaccctgactggcaccacgacgcagtacgacgcgttgggccgccccaccgtggtcagtcaatcgtccgagttgggggcactggttacccgcaccgagtacgtgggcaacctgtcggtgaaggtgaccaacccccgcggccagggcacgacgacccgtcaccttgcctacgaccagcccagctacgagatgccgctgacgctgcagcacccggaaggcgtggtgaccgagatccagcgcgacacgctgggcaagccgctggcgatcacccgccgcaatgcagacggcagccaatcgctcacccgccgctacgtctatgacggctaccagcagctgtgcaagaccatcgagccggaaaccggtgcgaccgtgcaggactacgatgcggcaggcaacgtgctgtggtcggcggccggcacgggtttgaccagcacgaccgactgcaaccgcagtgaagccctggccagcggccgcgcggtgaagcgtagttacgacgccgccaaccgcttgtcgaccctgatcttcccggatgggcgcggaaatcagaactggtcctacgcacctgatggtctgccggccgagatcagtacgcagaacgatccgacccggccgatggtcgtcaaccgctaccagtacaaccgccgccgcctgctcagcggcgaaaccctgcagcatccggatctgggaagcctgagcctggcctatggctacgatgccaacggcacgctggccagcaatacctatccgggtgggcgtttcgtcagctatgcgccggacgcactgggtcgggcgacgacggtcggcggctatgcgaaggaggccagttactttgccaacggcgcgttggcccgcttcgtatatggcaacggaatcgtgcacacgttgacccagaatgcccgcgggctgcccgaccgcagccgcgatgccactgcagcggccgcagtgctggatgacagctatgactacgatgctggtggcaacgtgatggccatttccgatggtctgcccggggcgcccggcaaccgggacatgacctatgacggcctggaccggttgcggacggtcactgcgccgggcttcggcaacgccttgtatgagtatgacgcgttggacaacctgcgccgtgccaaggtcggcagccgcgatcgtacgcactacttcgatccgaccaatcgactggtcaacgtgattgaaaccggaaccggcgcaactgtgaccggtcttggatatgacgtgcagggcaatctttcggtgcgcaatggtcaagctttcgcgtttgactacggcaaccggctgcgcgcggcgggaacagcagagagctacgagtacgacgcccacggtcgccgggtgaaggctggtgccagtggcaagggggcaatctactcgttctacgacaacggcggcgtgctgcgattccagcgcaacgaacgtaccggcaagcagaccgactatctctacctgtcaggcagcctggtttcccaggtgcatggtgaagccgcacccagcgttcccgcgctgagtgcgccgggctacatcacccagggcagcgtgaacctgacctggagcccggccggtggtgccaaccgctatgagttgcagcgtgcccttgcgggcacctggagcacggtcttcgatggcgcggcgcaatcattcaccagcaccggcctggtcacgggtacctatcagttccgggtgcgcggttgtcgtgcggtgtgcggcggatggagcaatgtcgcatcagtggccgtggcattggcgccatccaccgtgccgaccttgaacctgcctgccacggccttcaatggcagttacagcgtggcttggtctgcggcttccggtgccgagcgctatgagctggaggaaagcgccaatggtggcgcttgggtccaggtgcacaacgccattggccagtccaaggccttcagtggcaaggcagcgggaagctacaactaccgggttcgcgcatgtaacccggtggggtgcacgggatacagcgccacggctgcggtgacggtcgtatatccgcctgccactgcgcccggactctctgcgccggcacgcgctgcgccgggcagtatcggcattggctggaacggggtggctggtgccacgcgttacaccctgcaggagagtagcaatggtggcggatgggtcacgctgttcgacggcaacgcgggttcctatgccaccgctgcgcgcggtgtgggcaactatggctatcgggttgccgcctgcaatggcgcgggctgcggaccgtggtcggctacgtcgacggtagcggtgatcgggccgccgacgatcgagccggtgatcagtgcgccgggcctggtgaacgtgccgcagtacagcctgagctggtcggtgccggccaacagcgagagcttcgtgctggaggagagtgccaacggtggtggctggacggtggtgcataacggcggcgggaacagctttggtgccagccgtggcaaaggcagctacgcctatcgcgtgagggcgtgcaatttcgcggggtgcagtccgtactcgggagtcgtgactgtcgcggtggtgctgccgccgggggcgacgagtctctatctagcagagtggttgacgacccgcaggccgccctatcaggtccagtgctctgcaggatggagtctggtggcagacgcaaccgagtatcagcttgaaagcggtggcggtggcaagcgtctttacacgggccccaagacctacgtgcagtcgaatggcgggacctactgcgcgcatgagtatcgcgtgcgtgcctgtaatgcaggcggttgctccccatggtcggccgaacggccggtcacccaaggtgtactgagctgggactaa

SEQ ID NO: 507805 - DNA, 369 bp, Stenotrophomonas maltophilia
atgtggtactgtgctcatgcggtatttttctatcaatatgaagggcaggattcatttgtcgtgcacgagaatgtgtacttgattggtgcggaagacgaagaaaaggctatgtttaaggcgaagtcgatcgcccttgagtatgagcaaattggtgtggatagctatcttgaatgtgatgggaaaagggcagaatacaaattctcgggaattaggaagctgatttctgttcaggttgattccgatgttgcagattcttctgcaatttgctctggggtggagctcacttactctgtgatggaggttgggagtattctcgacgttgagagaattgctcgcggtgaattagttgctgttaactacattgagtga

SEQ ID NO: 507806 - DNA, 156 bp, Stenotrophomonas maltophilia
atgaaagcgcgctcgggcccgaactacgcgtggccgctgctgcagtacttcggcgtcgcggctacctgccatgcctcgctggcgttctacaacacgcacgtcgagatcgagcggctcatgaccgcgccgaccaaggtgcggaagttgccagggtga

SEQ ID NO: 507807 - DNA, 216 bp, Stenotrophomonas maltophilia
atgctctacaccaccaagtcgcgcgacaacattcgcaaggaaagtgacatctcccgcaaacaacgtcacgtcctgatccagctttacaacccagcgaccatcatgcgaatacaaataatgatcacgcatgaagttcccatcttcgagccagtaggagcgcaggccatccagacctcgctcaatttccacggggcttcccccgtcggagcactctga

SEQ ID NO: 507808 - DNA, 576 bp, Stenotrophomonas maltophilia
atgaggagaatgccgttctggcaaatcctgggcgcttcagtcctttgcctcactgcggcatccccggcaaacgcgcgggagcgtcacgtctgggcagcatccgagctggagaagatgcttatcgcattggtcctggagcaaccgcgccacggtagttggcgtggcgtcgaacgctcggatgtcgagcgaagattcggtgtacatctgtcatctctggatgtcaactcgagaacgattcagtcgaggctgctgacacgtgaagggtggtccgccgcaatcaaggtggagtacaggcgggaaggtcgcgcggtgaaattcgacgcattggcgtcccgccgattcaacgatcttgaacggccatgcacgttcaaggctgacgcaatgacgtcttcaatgctggctgcgggattccatggaggaaggaacgccgcgccgctcagcccggatacccgaacctactctcggggttccgtctctgtccatatcacgacgttcgacgcggccatcaatgccgcgctgcctgaacagtgtgtagataccctgaccatagccccgccggagcatgacaatgtctga

SEQ ID NO: 507809 - DNA, 975 bp, Stenotrophomonas maltophilia
atgagcgcccccagcccgatcaacccggccctgctgccccagctggcctggtttgcccacatcgcccaccaccgcagcttcaccaaagcggccgttgagatgggggtctcgcgcccggcgttgtcgcagagcctgaagaccctggagaaacagctgggggtacgcctgctgcaccggaccacccgtgacatgtcgctcaccgaggaaggccagcgcctgttcgacgcactgcggccatcgctgagcaccatcgaaaccgcagtacgcgacctgcgcgccagccatgacgctccgtccggcctgctgcgcatcaacaccgcgcgcctgactgccaagacgctgatcgaaccgcatctaccggagttcttcgcgcgctaccccgagctgcgcatagagctggtgatggacgacggcctgtccagcatcgttgccgacggctgtgacgccggcatccgccttggcgagcggttggccgaaggcatgatcgccgtgccggtcacgccgatgctggaaatggtggtggtcgcctcgccggcctacctggcccgccatggcacgcccaccacgcccgccgaactggccgcccacgagtgcctgggctaccggcagaccggcagcggcggggtctatgcctgggaattcagcacgccgggccagcccggtcatgactttgaagtggaaccgcgcggacgctatgtcaccaacgacgatgagggcatgatccgcgccgcgctgcagggattgggcgtgatgcagcatatcgatctgtcactgcagccgatgctggccgatgggcgcctggtccgcctgatgcgggcgtggtcggcaccgttccccggcttctacctgtacgtgccttcgcgcgagcagatgccaccacgcgtgcgcgccctgatggaattcctgatcgagaagcgcgaaggcgtcgccaaggcgctcggccgcacggtacaggccccggccacgggcagctag

SEQ ID NO: 507810 - DNA, 924 bp, Stenotrophomonas maltophilia
atggaaaccatcaacatccagaatccggacatggcctggccgatcgccgccgacctgcatttcccgccggacttcgaccgcaaccgggtctatcccgcgatcatcagcatgcatccgatcggcagctgcaaggagcagaccgccggcaacatctacggtgaggccctggctcgcgagggctacgtggtgatcgcctatgacgccagcttccagggcgccagcggtggcgagccgcgtcgggtcgaagacccgacccagcgcgtggaggatgtacgccgcgtggtcgaccatctggtcaccctgccgtacgtggatgccgaacgcatcggcgtactgggcatctgtggcggtggtggctacgcgatcaacgccaccatgaccgagcgccgcatcaaggcggtcaccagcatcaccggtgtcaactttggccggctcagtcgtgagggctttggcggattcgatccgatcggcacgctggaggccatcgctgcccagcgcaccgccgagatgcgcggcggcgaggcccgtgtggacctgttcctgccgccttcggtggaacaggggcgcgccgccggcatcacggatatcgatgtgctggaggccacggactattaccgcacgcgcgagccgcagcccaacggcgtggtcagtgcgctgttctcgcatcgcggtgcagcggtgggctgggatgccttccacctggccgaagtcctgctgacccaaccgttgctggtggtgatcggtgacaagccgggtggctttggtgcctaccgcgatggcctggagatccatggccgtgcggcgtcgaagcacaagcagttgaaggtggtggaaggctggtcgcattacgacctgtatgacaagccggagccggtgcgcgaggccctgtcagcggtcgttcccttcttcaagcagcacctgtga

SEQ ID NO: 507811 - DNA, 1395 bp, Stenotrophomonas maltophilia
atgcctggttcgacccgcgaccgccgttcgtttccaggggtgcagcttccggggcaggagggcggaagcccgaccgaagtcaccttgatcgcgcagctcggcatcggtgccggtgatgcgctggtgaccgacgccagccagcgccagcgccaccacccggccttcatcgatgcgctggacgagccttcggcgcgactgggcggcatgcatctgcagcagggcgacgcctcctcgctgtacagcttcaccgtcggtgccggtggtcacccgtttcatcgccatgcaggcccgcgcacgttcaccgccatcgccggaagcgcgggcgccgagctgcgcttcgccaccgcctccgacgcgcagctggcgcgcgatcccgctgccttcgcacgcacgctgcggcgcatccgcattccaccggactgcctgttcaccgtgcgcttcggcggcggcacgtggcaccagttcgcatcgaaccatcgcacacatccggcgctgttcgcgttgtcctgccacagcaatgagctggccggggcgatggatgagcacgcccgtgcacaggttcaacgcaatgcggccgatatccccagcctgaccgaggtactgcccgatacccactggccatcggccacggcactctcggcagcgccactgctgcagctgtcgctgcaggctgcgccccccagcctgcgtgcccggctgtgtgcgcgtacccgtgccctgctcggtccgctgcgccggattccactgcggccgctgcgcgggttcgtcgaacgcgccacaccggcctacccggtccagtcgcaggcaccacacagcgacgggctgctggccactgcgctgccgcacagccactaccaggaccagaccacgctgtgcctggacagcgcgcaggtcgcgcatcactccgcgtcggtactgctggccgatgtactggaaggcttcctgcgcaatccgcctaccggcgtgggccacctgatggcactgcgtaaccgcctcgtggcgccgttgcggctgcgtacgtcgccgctcggctgccctgtatcgtcactgctgtcgaccgaccgcagccggttgttcgccggtcgctacccggtgctggacgcgcacatcgatgacggggacacctgcgccgaagtgctgctcggtgccgatgatcgccacctgcgcttccgcagcagcgtgcgggtgcagcgctgtgccgatggccacgtcgagatcagcctcggctcgcgcgtgcagacccgcaatgcgttcggccgcctgtacatggcgctgatcgatgccgcgcaccggcactacgtcgcgccggcactgctgcgccgcgcggtcgaacatgcgctggcgccggaactggccgatctcgatgactgggcggagtactccgcgtacagatga

SEQ ID NO: 507812 - DNA, 261 bp, Stenotrophomonas maltophilia
ttgaagaaggtgctgtatatcgtcatcgcggtgctggtgctgccgcggctgtatgactttgtgtaccacggtgggcatgcttacgacctgctgggagcgacgggttttgcggtgctgttctttggcggggtgctggacgaacgcgcccgcatgaccagtccgccacccgcggcgctgcgtcgccgggccaatgtcgtcacggcatgcggtttcgtgttggtgctggggtcgttcctgctgcagtggaaggtattcggctga

SEQ ID NO: 507813 - DNA, 819 bp, Stenotrophomonas maltophilia
atgaagattccaaccattgtcatccactccgatccggaagacgttgtcgcaaccgtgctgagagatgtcgagggtgtgagtgtgatccatctggacgagctgactcaaagttggtgcgttcaggaggctgagatcattgaacccatagtggaaacgtcgattcctaacatgtggtccgcctacatcatcaacagagtcttcgatctctcttgcaccgagattggcaagcgtcttcgtgcattcggattgcatgagaactgggcacacacagctttgggttcggttctatcgcgagcgcacacactggcgtatggaattggtcctcgcggagtgagtagatcgcttctccccttgaatgtgcagtggaagcttctttccgagcgtattccacgcattagaacgccacgttttgcttttgggttcggtcatcgaatgcctgatatgtcgcatctggacaaattcgtacagaagtcagtctggtcctacttccgttgggacggtgattctgatgtcgcagaaggggagcagcagtggcatccattcttcgtcgaacagccgcaaggcatcccaatcatatgtagctaccacggagaggcgtttgcactgagtttccctagggggcgacccaaggcggatctcggggcctttcccgctctcatatgcgcatgccgggaacttttcgacagcaggatgggcgagattctggtgtaccaagagaacgaaatcctgaccttctgcgcctgcagcccatacatggctggaataggtgagctgggagaaagggagcaacttcttctacagggagttccttcgagttga

SEQ ID NO: 507814 - DNA, 1212 bp, Stenotrophomonas maltophilia
atgagaacttccatagaggaaatcaggagagcgattgaggatccgcgtagaacggttgacgtttgctcggtacttctggatgcatggtttgaagctgctccgcgtcgtttgggcgaagctctttcgaaattcagagcgaagaagctcgagaaccacaaatgtgtggagaaatttgaaagaacgttcaagaaactggatcctgcggcaagaagaagattgcttggatccccgtgggtttctggattcatggatgatccagatggagtctcgcatgaagatccagatggaaggcccgtctcgaccatcgaagcacttcatctcgccgcaagggcggagtgtcaaatttctccaaaccatgaagaagcgggagggttggaccatgggaaggaagtcgaaagcccactaggggagtgggtggtaaggcggcgtgatttcggatttgaaaaggttgagcgggcaaaagtggggggcgtgatcgctctggacgtggatagtggactggcacgccggaacgaacctgagagcggaacgttctgcaatccattcatgagtatttcaccagaagagcttggggtaatccaggagaagctggaagccgccatagagctcgtggataaagccactccacatctgggtctgctgattcgaatattcacaaggcgtgtgtttgtgaggaagtcgatccagttgggtgatcaggtttcaccactcaatcttggatccgagtatcggccgattcatgttggttgcatccgaattctcaatgttcacaggccagaaatgaccgtggatctttgcgcagaggcaattctgcatgagtccgtacactcgtatctctccgcctatgaagaggtgcacgggaagttcatgtcaggtgcaatcagggtgcgcccggtttcaccatggtcaggaaatttcattcccaaccattcgctggcacacgcggtttttgtttactacgccatccatcagcttctcgggagattggttggtgtcggcggcgagattggagaagaagccgggaggagaatgaagcgacgactgatgcacgtagcgggcggattcttcatcgaacggaagatctcgacgctattcgtactggagtcacccgcctcattgcagctgatggcggtcgtggatgaaattcaggaggagatcagggcccagtacggccgaaaagtgcaaagggagatgctggagagcgtggcatga

SEQ ID NO: 507815 - DNA, 312 bp, Stenotrophomonas maltophilia
atgtcgaagatctgcaaatccgtgcttctcccaccggcactcatcgcaatgcttggtctatccggaatcgcatctgctgcgcaggaaagtgcgaccaatgatctcacgcagatccagaacgtctctgtgctggacatcaacctcgtcagcggggcggagctgcaagaaggagtcagcgatagcgagatcgcgggtgtgcaatgtaccaactactcaagcggtggaacccactgcggtcactactcgtcgggtgacgcagaagagctccagttcgcgcatgtcgttcctgaagtacagaagttcaacgtctaa

SEQ ID NO: 507816 - DNA, 666 bp, Stenotrophomonas maltophilia
atgcccggagtttccgatgccagcgagcagtccattgatgtcgcggcaatcgacctgaacaccgagcacgaacacatcccattgctgggcgacaccctggccgccgtcgtcggcgagctcgagggcgatgccacacccggtgccagtattggcagggtgctcgaggcacttgcagagaggcttgagcgtacgacctgccgtgtacagacccctgtcaatgacagctcacggtcgtccggcgtgatctgcagcggacccgatgtagacagcctcttcccgtattacacagcattgcggcaggcgaagacacctgcagagcacgatagtcggggccgtcgctttctggaagcctatgccaccttgctcagggatgcaccggatgtcgccctcacgcgaccgagcgaagacgaggccgcagatggcttgttacatgtgctctttccgttcgcggcctgggacgagaagctgaacactccacgccatgacgtcgacttcccgtttgttcctgtgtgcaacctcgttgtcgctcgcgctgcgcgttgcccgggagccgaccagttgcgcaggcagatccgccaggcaggcgatgagagcgcgcagcgtcggttctgcatcgaagcgttttcaaggcgacagcttgagctgagcgatggatgcccggagtag

SEQ ID NO: 507817 - DNA, 318 bp, Stenotrophomonas maltophilia
atggaccctctcgacagctggttgcccatcacccgcgaagaactggaagccctgatcgcgcggcaattgcaggactgctcaccggggcatcgagccatcttcgagtctctgcgtgtgccattgcgcgcaatgccactgcacaggctgcgtaccatcgagtcggtgtgggtggtcgcacatctacctgacgggttgctgtactacgaggacgtcgaggaagggttcgaggtgggggcgcccggcgaggatggtgtactgccggaccggggttgttcccagcttgcgctgacccacgttctccatcgattggcgatctga

SEQ ID NO: 507818 - DNA, 633 bp, Stenotrophomonas maltophilia
atgacagctaagaagggcaacctctcgtggctaagtgcattcatcgcctttgatgtagcgattctctgtgcggtcctagcccctcaactccgacttattgccaccgagcctgaggttgtagcccgagcagccagttcgcttcttgcgcccccggccctgctgcttctgtcttcattgattccaggccacgtaaaggcctccctcgttttctggagaggcaagttcgcactgccagggcacagagcgttcagccaccacgcgcatagagatccacgtatcgacacggccaagctcaatgctcgcgtatcgccttatccgattgacgagttggagcagaactcgacctggtaccggatctaccgcgcgcatcgcgatgatgctgccgttctagatgccaatcgtcgcttccttctgttccgcgacctagctgttgtttcgatactcatggccatcttgctccccgttggcctgtgggcgatggggctaggcctcgcagtcactccaactcttgtcgtcttcctcgcacagtacgcgctgtctgcagtcgcagcctcgcaagcaggcgttcggcttgtcacaaccgtcttggcgatagaaagcaccgcagaacccaatccaaagcaaggaggctaa

SEQ ID NO: 507819 - DNA, 903 bp, Stenotrophomonas maltophilia
atgtccgttgtgaagagttactcagtcggcaatggcgacatgttctacattagtcacaatagcgataacttcaccattatcgactgcgaccttaacgctgagaacgctccagaaatactggacgaccttcgcatcgccagagcagagaagggaattcacagattcatctgtactcaccccgacgaagatcactttggtggaattgaacgcctcgatgacgcgttccctatacagaatttctacgtcgtaaagaatcaggcgatcaaggacaacgaaaccacttcattcacgcgctattgcgccctgcgcgatggccccaaagcctattacatcaagaaggactgcacgcgaaagtggatgaatatttccgacacggaacgaggatcgtccggaattagcgttttatggcccgatgtggaaaacgatcactttaaattagcactagcagattgtgacgccggctattcatacaacaacacatccgcagtcattcgctatgaaatcgagggtggcgccagcttcctctggctaggcgatcttcatactgacttcatggaaagtatcaccgacagcatcaacctgaccaagacaacgatcgtgttcgccgcacaccacggaaggcactcggggaaaatcccaaattcatggctacagaagcttgacccgcagatcattgttattggcgaagcaccatctcgccacttgaactactacaccggctacagaaagattacccaaaatagagcgggagatatcaccttcgactgcgttggcgaactcatccatatctacacttccaaccccgactacgaaggcgacgacctacctttgttggaccttggtcaggacggcccccccaactacctaggcactctggaggttgagtttgagtacacgctctag

SEQ ID NO: 507820 - DNA, 3768 bp, Stenotrophomonas maltophilia
atggcgtccggtaaaggttccgcttcgcacatcctgggatttgatccaactgaaatttacgggcaaagcgcagcgctcgcaactcttttgatcggcgtggatactgatccagcagtcggcaggacggttgcacttatactcatgtgtcgattgcaaaacggcaagcccgcatttgatcgcgttgctctgattgcaccgcctgtagcagcctgggggagaaccgatgaagaaatcatcgcactcgtcctacagggcgctagtgatttgcagggatcatttccatcggctgaggacgctggcctaatcaaagagcgtgtgatgatcaggcgctgcgaaaacgtggacgccgcttcggcgattgcccaggttgaatgctctagtgctgatttcattctggtaccgatggcggagatctacagggatgccagagcagtcggcggtgtgtcgtatggtcgggcaaccgcactgcttgcagaggatgtttgggttcctcaggtgaccgcatggcttcccgactgtattgagcacgcgcgaaacaatggaagcgtgatcatgttcagcatcccgggccggcctgtgattcgtgatgccaacaaggcagctattgatgccatctgcagtctggatgtagcaactttgggaagcgaagaggaggtgcggcgtttaaattttgtcgctgaaagaatgcagggttgggtgggcttggcacagttagggcgtgtcgaggaagtgctggcacagatagatgaatctgatctcaaagaggaagagaaacgagagctaaggattcagctgctctatcgcggcaaggaacgagagcgtgcggctagcgaaattcgggacctgctccgcagtggcatcgaggttgcggccgagaacgcattgcggttcgggtggatggcacaagaggggggcgatgtcgactcggcgaagacgctgatacgcctcgggatagacgaagtggtccaagaatcctatctcagccgcgctttgggatcgtgtgtttggttggacgatagtgagttggaggttcttgcttacgagcgccttcgtagcttgtatccggctagtgactatctcgaagagtaccggattgggttgttgcttcggtggagccgcgaggtttctggtgaccgcgtcggtagtgtcatcgccaacgtttcgctgacaggttacttcgatcatatcgctaccctgctgggcgaagtctctgccgacggagtcgaggcgctggtcgaggtgagcgaaccttggccgactgagcagcgcgatcttgcgaggctttgcggggccaaccgattgctcactctccacgaggcgagccaagccattgcgctggcgatgcgaacctctgtggagggtagatacgcgcggcggaccaattggatgctgattgcagcacttaggcgcgtgctgcttgagagaactgaggcacatgaggccgaattctacgatcagtcgtttcatagattgcgcgactacgtcgcgacatatccagatgatcctgagctacgggaaaacttccgtgggctgttcagcgttgaagctagcggcaatagagggctcgatctgctggtgaggcaaacggtggacatggcctccagagcagttactgtgatcgcgattcgatccgaggtggagcccgcgtctcctgagcaattccaagacttcatgactcgtgcttttcaatggatggatcgcgtgggcgtctttgacgcgagcagtgcgaagctccctagcgaagtcatcgccggcgatgccggtgctttgctggaggtgacgtctaacgcggtggactacttggtcgaagactgggagcctgaaaaatccgaaggtgtggagcgattggcgtacgtgggcgcgatgcttgctaaggaagtgccagacaccattagtgacattcatatgttccgactggtggccagccgactcgcgatggatggcaaggttcagcgtagtcgtgacttggctgagcagattcttgagcttcctggttcatccaaaaccagaattcgatcggcgtggggtgcctatgcagacttgtatcagcgttctcggcatcctgaggatgcactaattggcttgtcatcggcattcgccattgatgtacccgtcgaggcgtcgacactttggtgggagacctacacgctcttccgctgcctgcgtgacgtgggccgcttcggtttcgcccgaaagcttctggagccgctcaaacgcctgcaggaaattgtcgccgacaaccctgcaggccgtgcgcgaatgcgatcactagagttgggagtgcggctgatggataagtctgagctgaacctgggcgtgctggagcaagtggtcgcggaagcggcagagcactggctatcggtcagggattccagcgatgaacagatccctgcgcttgcgttgttggttcagtctatgggtctattagagagagccggcggcgtgatctcttcgcaggttcacgatatcaaaatagcggcaatggcgcaggtgacagctgaagatcgggcctacttggaggccatctcggctgctcacccaaccatcgaggatgctgtgcgcctgcacaatcggatcgaagtggcccgacatgcggacgatgcgccgggggaccttctagctgcggagcttgccgctaggcggattctttccgcgccagccttgtctgcggaacacgcagcgacagctatagagttgttggcggatcgagagctggattgcagtgctagcgaacgccttatggacatgaattggcctttgcgctacttgcatgagatccggcctgcgaccggtgcggcgataatgatgggcttggacatcgacaatgagttgacgatgctgacgtcaactgagcagggtgatgtggtgcagcgtgtcacccgcacggcaggctcgtttggcgaggaactctccacgtggagcgagaagtatccgcttaggtatggggagattcaacgtgaggagggtaataacgagttcttcgtttccatggggcttgtggagatgccgctgccggagttgcccagactcgtagtagtgggtgagccagcgctccttcaaatcccgctcaaccttatgacgaagcacgacagcttcttcggccaacaccatgcggttggatatgttccctcgctgacctggctgcactctgcgcgcaccaggccgcggataactcgtagccgacgtgtggcgtggatatctgacccgggtgaaacagtcgataacagtgccttggcggcagtgattcagcgtaccgacgaggcgttccaggggcatggatttgacgtggatacagggggcaagctgccccagagccttgccaacgcacagatcgcggtgatcgcggcacatggcagcgtgggggttgatggtcgatttctgcatcgcgtaagcgatgagagggagttggtgatctccccgcgtgtattgacacaagcactggcgggaaccgagctggttatcctcttcatttgcagcgggggacgagtagacaggcacccgcatgcaaataccgcaatcggcctccccaaactcctattacttgccggctcgcgagttgttatcgcctcgccatggccagtcacgcccattatttccggatattggctggaaacgttcatggctgagtgggaacaaggcaagacagtattggacgctacattcatcgcgaatgcacaggtcgacgcgaagttcgggtacgtaccgcagtactccatggcgatgaccgcctatggagatgtgatgctgacaaagctgcccgcgcaatag

SEQ ID NO: 507821 - DNA, 996 bp, Stenotrophomonas maltophilia
atgacaaacgtgccgagcaacgtaaatggaattgaggcgccgcttaagttgctgtcctcgcatgacattagcaatcccgggttcgagtcgatgaggcgaggcgagtttgttgataaaagcagcttgaatgatccatctgcccaaattgatcttcgtaacatcgatgtcttcggcacacagctgagttcattcacgttggggccatcaagcgacggcgaacggattcttaaggttgaattcaatcgtgctacgactgaagccgatgcatttaggtttctcctgcagctcgctgacgcatggtcggcatcgctggctcacggtcagcgagattcctggtacggcaacctctacgtgcacatcctatggtctcgggtgaaggtgctatcaccgccgagcggtacagtcgggatcagtacgttcctgaaaatgacctccaccgaccatattgtcgtggatcctttggctctgtctagactgcgttggtcgcctctcaccgacatctttgtcgaaggcatgaagtcttcgcagcccaagtcaaagttcctgttctggttcatagttttggaagagctggagcagcgacaagaattcgtgagattgttcgatccgatgttcacgcctgaggaaaaggcaaaactgcaagaagtagttcgctcgaacaagactgccttgcagcgacttaacggtcttctgaacactccgacggccacgatccagagtcgctcggagaagctagctcatatcattgatacgataggtagctcgaacattgcgggtcagtcggggaagattgagatcgatcagaaactctgttcgaagctgatcaatcagcgcaataaagttgcccataagggcgagagtatcgacgggtatctgctttacaatgttctgtttcctcttagtctcaatgcgctcaattacattctcgatcaagacgatcagaatacttctgtacagatgcaaccaaccggagttgccggctttgcaggtgcttag

SEQ ID NO: 507822 - DNA, 1305 bp, Stenotrophomonas maltophilia
atgtcaatgagcacggcaactgcaatcaacgtcgatgcggttacacaagtcatgaagggtgttctgcctaagttgagggtgctgcagaagcaagattcgccgaatcaagacgcaatagatgagctgatctctgagaaccagaagttgggtgatgctttttaccggtcggagtacacaagcaaacatataggttgggggtacgccctccaacttatctacgcagtgttgaacgctggatatctcaatgacgcccgagaattcgcaacgcagcttgacgtagcggtcagaagaacagcggcgcagcgcgactacattgctgtcatccctttgggtttttttaggccactgggattcaattcaaagaagccgagttttgctcgttcattcgagattggttcattcacgttggcggcagcggcagcctcgagtgcagcactaaacagccgtataaaagcctttggttctcacgcagtttcggaagaactgtttgaacatcaggcgtttcagtcctacaaatcactgagtagtcatccattgctgttcctgccagtccatggctcctccgactctctacgctatcagttgcatgccaaggctcaccggatgatcgggctgatcgagttgttcggtagggtattcggtgcggagaggccattgctcgggcaggaggccacatcgcaccatctgttcttgatccacaagcattcggggtcgctagatcgcgttatggcaatgcgcccattgactgtatctcttccgttggggaagaagcttctcaaggcaatgaagcgtcccgaagtgcccgtagccctcgagttgctttcctcgggtaaagagaaaaccttgaatgcacagcttaggaacgcgctggagttctttagtcgagccgttaacgagaaagacagcgtcgcgcgattcatattctttgtcatatcaatggaggcgatcttctctcgcgataagaacgcgcccatcaagatgacgctggccgacaacgcatcactactctgcttcaagggcaaagatcggcgccgcgtccatgcagatctttgcaagatctacgacatccggtcagaaattgtgcacaccggcgcatcaagcgttcaaagggcgatgctgataaaagccgaagtgctagctgctagggcactgtactgcagtctgctgctcgccattcatctcgatgatggtcaaggagaacttcagaagaaattcttcgacctacttaagggtataaagatcggtgttgagcctaatccaattaggctgccaacttggcagggttatggtctagatccagagtag

SEQ ID NO: 507823 - DNA, 1083 bp, Stenotrophomonas maltophilia
atgacgatccttccaattgatctggtgctctcgggcggcgggatacgggccatggccttccatctgggggtcataagggcgcttgccgaggccggccgcctcgagtctgtgtctcggatctctagcgtctcaggaggaagcctggttactgggctggtgctacaccgatccggtatgcagtggccaagctcggagagattccaagccgaaatctatcctgcgattcgtactgagcttacaacgcgcagtctgcagtgggacgcacttcgtgagctgcgcaggcctcagaacctccggttcctgctgagccggtcaaatcttctggcatctgcgctccgcagacgctgggccatccgggacaagctagccgatctgccggcctcgccagactggtcgatcaacgggaccaacgcggagaacgggaagcgtttcagattcaagcgtactgatctgggagactatctcaatggctatgcgcccactggcaacttccccctagccaacgcgatggcagtgtccgctgccttccctggaggatttggtcctctgcgacttcgtgccgaccgattcaagtggaggcgccgcttgagctgggatggtcctaaggatgaaaccgtagaaacacaaccaactgcgagtgtgatccacctctacgatggcggggtatacgacaacctcggccttgagccattctttgacgcaggaagaggcgttgccaaggccgcgaatggtcactacattttgctgtcagatgccggtcgacccttggacatgggcttcagcaagtactcgctgaatccgtttcgaatcaaacgtgtcgcagacatcatgtcagatcagtcccacgcattgagagtcagagccttccaccactactttgccaaggacgcggcgcggggagctatggtctacatcggcgatgctgctgatctggacgactctggccgaagagaggccaagtttgtagcaagctttccaaccagcctgttgaagctatcaacgagtgactttgatcggatttccgatcacggtaggagactcgccacagctccactcgccgccgctgtggcccagccaccctag

SEQ ID NO: 507824 - DNA, 2241 bp, Stenotrophomonas maltophilia
atgagctcgcagtacttcaagctcgcattgattcggcttgacgattgttcgaaggcatcatcacggacacacgcgatgatctctgcgatcaatgcgaatcgcgacatcaccctcatcgatgtgctgcgaattcctacggaagagccggtaggctgcgtctatctcctggtggatgttgagtgccacggtgtgccggcgcgcaacaagtacgggctcctcttcagggagaggatgctcatcgtggtgccacaggatgacagcattgcaacggccgcatgggctatgcggaaggactttccaagactcgctcaccagaacagcgtttcagcgcttgggccagcacagctgtgcctgtactacgagccggctaatgtggtggcgcggacttggaccgctccttcctttctcgctcgaatcctctggtggttggagaagaacgcaaagggagagctgcatctggcggatcagcccctcgacacgttgttcttcgagtccaagcacgaactggtcattccttgggacattgctgatctcgcttcaagcggcaagccgctgcttgtcagcggctatagacgggcggacaacggtactacgatgcgtattgccaaccatttcgagtccggccagggtgtagaaaccaagctagtcaaggttgatcttgctccgattgaaagcggtgcggttgagtgggatccgcacaccttgggtgagttgaacgatcttattgcccggagaggagccagcctcctggagcctctccgagcagccatgcagcacgactttcccgggagcggcctgacgcaaaaggacgaaccggcaagtgtacttgtgctcatctccatcccgctgaggcgagcctcaacgggcgttgtggaggcaagcagctatcgggccttcttccttcatggtggagcgctaaaggtcggggtagcgctgggcgctctctttgaacaggcgggtcgcttctacagttccatcggtatcctaggaggtgggcatagcgacggctgggaggacattgctctggatcctgtaacggttctttgggagaacagtgcagagcgggctcgcgcacagtcgggacatttggagcctggtccgaagggcgtagtgataggcgctggctccctaggaagcgccctcgtggaactctggatcagatctggatggggatcatggacggtgatcgataaggatcacattcgcccccacaacctgactcgccactcggcgatcaatttgcagatcggccagcccaaggttctagccgtgtctcggctcgtcgaggccataaccaggggagctgctgcgttgaccgcagtggaggccgatgtcatgtccggcgccaatcccgacgccgcccgtgccttggtcacctccgacctggtggtggatgcgactgctgatcttagctatcccagagcgagctctgcttctgaagggcgagcccggcacgtgagtgtcttcgtgaccccgaatggccgatcaggcgtcatgatgctggaagatctcgccaagaccacttgccttcgcacgatagaagcgcagtactaccgcgcggtcatccactctgactggggcaagacgcatcttgacggccaccgtggcctcttctggagcggagcatcgtgtcgtgatctttcggtggtcctcccatactccagcgttatgatccatgcctgtcagttcgcagagagcattccgatccatatcaggtcagacgctgctgcggccgttatctggcagcgagggtttgacgggagcacagatgccatctccttgctactgttcgagcggcgtgtacacaagacagacgggggcttggacgtctacatggacgaaggtttgcatgagcgcctccgtgagttgcgtcgccaagcgatccctagtgaaaccggaggcatccttctcgggtaccacgacttcactcagaatctactcgtgatcgtggacgcggtgcaggcaccgcaagatagcaggagtacgcctacctccttcgagcgcggaacggccggcttgcgggaagtggttgaggaagctcgaaaccgaactgccgggatcgtggggtatgtgggggagtggcacagtcaccctgatggctgccctgcggcgccaagccgcgatgacttgatccaacttgctcagttggccgtcgggatgaatgaagaggggctgccggtggttcaagtgattgttggcagtgatgaaatcggcgtcgttcaagctgaggtgcggccatga

SEQ ID NO: 507825 - DNA, 1161 bp, Stenotrophomonas maltophilia
atggcaacaaagcaccaagtgattttttacccggtagggaacggggatacgacccagatcattctggacaacgggaggcgcgtactcttcgattttcgacataaagagtgcgccgaagaggagtcgacacccgaaatcgacttgaaggcgacgctgaagaaagatcttcatgatgccggcagggacagcttcgacgttgttgcattcactcacgcagacaaagatcacattcagggcagcactgatttcttctggttggagcatgccaagcggtatcacggagagggtcgaatcaaaatcgatcagctttgggtgcccgcagcaatgcttctggaagaggctactcaggatgaacagtcggaggagttcgtcttgctgcgtcaggaggcgcggcaccgcctgcttcagggcaaaggcatccttgtcttctccaagccgcaggcgcttgccgactggttggagccgaagctgaaggatcgcgaagagggcccgtccgcgagggaccacctattcgttgatgcaggaactgtagttcctggcttcagcctggaagccgacagtgtggagttcttctgccactcgccctttattgagcactgcgatgatggagacatcattcgcaactccgccgcgttggtgttcaacgtcaggatgcaggctgacggtctcacctacgactatctggaggttggtgatgccgagtactgcgatctggagaagatcgtggatatcaccaagtaccacggcaacgatgaccgactcggatgggatctcttcaacatcccgcatcactgcagctacagggcgctcagtgacgataagggagatgaagagaccacgccttgcgagaaggtcgctgagttgctgatgatgggcaaggctgactcatacattgttagctgcagccttccggtgcctgacagcagggacgcgtacgagcgcgttcagccgccacatatccaagccaggaaggcctacgagaattacttgaagaaggtcaatgggcggtccttcctggtcaccatggaggagcctaacggctacaagcctcagcctattgtcttcaacgttgctgccggtggggttacttgggagaagtccgttgcatctctcggctcagcagcgatcattgcctcccgccctcctcgggcgggcgcatga

SEQ ID NO: 507826 - DNA, 822 bp, Stenotrophomonas maltophilia
atgacaggcgatgaaatcctgatcgcatccagcgctgcagctatgggtgaccatgtcctggagattgaatacctcatccgcggatttcgccgggtgctctacgtaccgccacctcagtggccaagctgtcgcttcgagcagggcgaaaatctcgacgtcacgctgcacatgacccataccgggctgacgcttggaacgaatttggacaccctcatcgcattcactgacgcccgcatgcggcagttggtactggcatgggagttgctcttggggcagcggctgcagctcaggcggggcaatgttgcccctcccaggtttccgttgatagatggggccgctacatcccaagcgggggctacgttctcggatcgatgtgaggccacggtcgtgcacgcaccggcaccgatgcagatgccgcaggttcccctcgccgcagagcgctgggtacgcacgctcgcggaggcaggcgatctcgagggctatgtagaggagcagctgcggcgccactacctgatcatcgaggagctttgggaggactatgcactgcggttcgacgatgttgacaaggtgaagcgcgaagaaattcgatgcgttaggaacttcgtctcccattccaaatgcacccgcgatccaacattgggcttcatcaccaccaatctacctagtgcggaggtgcagcaaagcagcccacgggcggtgcgcttcgaccggattagtcaagagcaccgagccttcgtagcaagatacgcggtcgactccgagcgaattgcaagaatgctagttcagcttaagatcgaggagctccgatccttgagcggctga

SEQ ID NO: 507827 - DNA, 666 bp, Stenotrophomonas maltophilia
atggcaaggaagacaaggtccaacagagagctaagctcttcgagcagcatggcgccaggtagctcagtccagccgagcgaacgtcaaacgagctcgccgcaaacaccgatgcgcagccctctggagtcaatgcgcgctcacccggttggggcgacggtcgtgctgaccactgctattctggttagcctgacggcactcgggtttcacattagccgcgaaggaaatgtcttaagcgtcaaggaggtggaacagggatacgtttcgcgggagactcatcgtgatgaactggctgtcctccaaaagcgaattgccagcctcgaggaagagatccagcggtcggctgacagaaacaaagacctctcccaacagcatcggatggaagtcgccacgctcaccagccaggtcagccgatcaaatcaacttgcacaatcctgtcggaggctacggcaggatctgaacgaagaacagtccgcgcagcaagctatcgaaaagatcattcgtagtggcggagattcgactctcgtcttccagcgagacaagtcagcgcaagagctcgtcaatgaggagcgggagctcgcagatctcaggcggcgctcggagcagatacagcagcggataattcgtctgcaggactccctctctcgctgcgtggagccaccctcttga

SEQ ID NO: 507828 - DNA, 1335 bp, Stenotrophomonas maltophilia
atggcattgcattctagtgaaggccgctcactcagcatggtagttgattgtggcggctccacagccaaacatcgcaagcttctagctgaggcgtttgctgcgcgcgcgcgcagccatgacttcttggccatcagccacctagatgacgaccacatcaacgggctggaggacctgaagaacgccggggtcagcttccgcaccgtctttcttccccacgtcgacatttccaactatctccagtggatgacactgaggcttagttcaagagtgcgcgccggcagcctccttgcggacttcgccagggttgccactcttctttatggaggaagttttggtcaagtcgtcatcgtagggggccctgatggcgatgaaggccctgaacgcgatcgtgtcttcaaggggaatacggatcgcgctgatgttctgagcaacgagacacatcaggcgatcgaaagagcgaaggtcggtcgctcgcgattctcgtgttcaacttcgttgacttttgatctcgattggctaatacgcttctattcgcgcgaatggaaatttccaaaggaagtttcttctatctggagcttacagatactccaagacctacaaaatgtgcttagtaaagccggtggaaatctaaactccgcagagtggactgacttttcgctcgtactgaagtcggagctgaaacggagagctgatccatcgctcgctgccgaactcatttctctggttccgcctacagatcaacgcgccccagcgttagcaaagctaggcaatgctgtggcaaccaccaatgtaagttgcaagaagctgctcagcgccttgtacggcatattctcctcgcttcatgactacaacgacgcatctctgtgtgtgtattctggccctgcggaacgcggcatcggcgcgcgacggcagtgctttgaccgtagagttcactctggcgtattggccaagggctttccgacgcgtgcgacaacgcgggcagtcggatggatccataccggtgacgcaaatctctcggacaaggatcgtctagacgactttcttgatcactaccttgccgagacaccgcttacctcgacactagttcttccgcaccatggctctcgccgaagcttcgataaacatctgaatcgcctgcgggagctcgcagcgggccttgccaatccaacagtttttctggcgccggctgagccgcatgggaagttccatcatccggatggagacgtcgtccacgcttgccaccatcttggtgatctggcaatcgtggataaggatgcaatttcgtgctactcagaatcagtcactacggggtggttatggtcccactattggtag

SEQ ID NO: 507829 - DNA, 420 bp, Stenotrophomonas maltophilia
atgcgcctgctgaccttcacctgtccactttgcggcgctgccgggcagcgattcccgctgctttccgcatcgagacggcaggcgaagacggcatgcaggggatgtggcgtgatgctgcgctcggatccccgcttgggcctgcacacgctctacctgctgcatacgcagatcatcgtgctgctggctgcattgcccatgatctgggcctgtgccttgggccgatggttctggttggctgtgatctgggccgtggtgctggcgttgtgctggttccccggcgtaatcaggcacgcacgaagtccgatcatgcgcgcctgccgcgatccggattacagctacgcgcgcaggccgggtgcttccactacgcgcgctgctgcaaacgctgggcagggtagcgacgtgccaggtgccagcccatga

SEQ ID NO: 507830 - DNA, 168 bp, Stenotrophomonas maltophilia
atggcacagcagaaccagaacccgaaccagaaacagaaacagcagggccagcagaaccagcaggatcagcagcagggccgtggccgcgaccagcagcagcaacagcagcaggaacagcagaagcgcaaccagaaccagcagcagggcggacacgacgaagaagaatga

SEQ ID NO: 507831 - DNA, 351 bp, Stenotrophomonas maltophilia
atggagttccgcactgattcactgtccgcccggatccgcgttgcgcgtatcagcaacgggctatctcaaaccgatctcgccaaagccctgaacgtaaaccgggcgacggtgggccactgggaacgcgaactaggcttcgtgccgtctatcgaccatctgcatgcgttgagcagggtcacgtgcgtgagcgtatcttggctgattacggggaacaccatcgccgatggtgggaagcctgaaggtatgcgcctgcagatggaagcccacatgttgacggcatcgcgcaaccttccgatctccctcctcgacaacattgttgagttgatgaggtctgccgaacgacatatctga

SEQ ID NO: 507832 - DNA, 1239 bp, Stenotrophomonas maltophilia
atggcccaggcccaaccgccagatgtagaaaacccgatctgcctgatggaaatcgcagatgcaacagaaagcatggagtcggtcgtcgagggcatcctctggtcaagactccgcaggatgagagcgcgacttcaggaagtgcttaccgaccagcagtacggggccatggctcgtgtcatgcaccagatgtaccagtcaatcggtgccgatcaccaagcccgcgtactgctcagttccgagttctgtgagcagtatctgtgcctggagtccgcacggaagggtaggctggaggcgggagccgacgagcaggagagggcggaggaacaggcccgcgcgcttggcgcgctgcacgacatcatcgctcgggagaagtcgatcgccgaactggcacagggacggacaggcaggtacctgagggaggcgcggcagtggcagctctacagtccggttggagactgcgttgcggagaaggatgccacgggcgtgtggacccttcggcagttgccgaagctgggtgactgtatcgcgttggatcttgagagcccaccggcgcggcatcatgagccacgctctggagtgctgagccaaccgtgcctgccgctgaccgatgcggagcgcgagcatgtctcgcgaaagctgtcagacgcactggcggcgatcgatagtgcagaacccatgtacggccttctcatccgcaacttcgtccggcggatcaccgtacgcaagtcggcagacgtcacctccgatgaagccggccgctacggctcggagcatgtgccgaggcagccgggttccattcgactgctgaacacgcataaccctgaacttctggttgaggcatgcatggagagcatcatgcatgaaagcacccacaactatctggccgcatgggagctggccaacggattcttcgttgccaatgactaccagcatcgtgtcgtatctccctggtccgggaatcccattcccaactcctcctacatccacgctgtcttcgtctactacgtgtgccaccgcttgctgaaacgtcatcttgaagtctcgccggacctgggtgaaaccgccaagcgccacgtccaacgcaggctggccgtctgcgctgccggcttcctgatcgagcaggatctcagtggtcggttgatgaccaaggacgccatcaatagtgaggttgggcagatgatcgatcgaatgcaggccgaaatgaagcggcagtatcgctatggggagtggcagcaatga

SEQ ID NO: 507833 - DNA, 846 bp, Stenotrophomonas maltophilia
atgagcagaacggtcgtcatccatgcggatcaccttgatcctgtcgccctgcgggccatggctacaggtgtccctgccatgcacattgatgaactgatcccggtaatggagggccaaccctggcccgaagtactccgcttgagcccaggtgcgcatctcgagcgtctgttccgcggagccaatgtggtgaatcgggtcttctcactggcaggaacgcagatcgaacagtttctggccgagcgcggagtggacgcccgctggttccatatccgcctgcagccgcttctggcgctgggggtgagcctctgtcacgacacgggcacgcgcggtgtgtcccggtgcctggctccattgaacgtgcagtggtttgaactcgaacgcgctcttccaggcgcgaacacgcctgacttcgcctacagttttggctacgaagaaccagacctgtcccgcatcgaagaccccatgcagaagtcggtatggtcactttttgactggcggcaggaacggcagcttgatgatgaagagcgccgcagacaccagttccacgtttccaggccgaagggcgtccccgtggttgcgtggttccttgggcgggactacagcggaatccactttccccgtgaaagcgttgaggtcgatggtggtgtgtgcgagcaactaacgcgagcggccgcacacgccttccgatccgaagcgggagagatgctcctgtacgtgacggatgaggcggtaaccttccatgcattctcgccttaccttcgttccgtcgcggccgatgcggctgtgcaggatgcgttggatgcgtggttgcttgccggcaacaccggaggtgtgaatgctgcttga

SEQ ID NO: 507834 - DNA, 774 bp, Stenotrophomonas maltophilia
atgctgcttgaaaagctgagctcgctgcgcgagtccatgggctgggtctacggaagcgaggatctgtgcgtactgctgtatagcttggtcaagcggatgcgcccacgcatcgtggttgaactgggtaccgggtttggcgtcactgcggcctggatggccggtgcgctgcgggagaacggtggcggtgtcattcacacctacgacaatggctcgcacttctccagcgagccaggcatcaggtttgtggagggcctgcaggggccgtttgccgatctgctgcgggaaaaggcgcaggactatcccgctttcctgaagcacgtattccattgggccggggtcgagaatcacgttgtctccaactggcaggaaatcggctttgccgatattgcccgggcccccgcctttgacggcggagttgacatggtcttctccgacttcaatcactcccaggacagcatccaggccttgctagcggcgtttctgccgcgcatggcggaaagcgcctcgatcttcatcgacagtgcctctacccagcggcttggttacctgaccctggaagccgttgtggacgccctgaatcagaacaagatacccagggcgttcatcaaggatcgcagcgagaagggcatcgaagcgatccttcggatcgtccagcgctcgcgcttccgcctgatgcatctgctggaagcccgcgacagggcgcagaacagcacagcgtggatctcgattgaaccggtggacgtgattccgactgcggccacattcctgcattag

SEQ ID NO: 507835 - DNA, 1308 bp, Stenotrophomonas maltophilia
atgttaggccattactttgcgctggcccgcaccaggcttctggaaaccaagggaatgagcgccgcgctgatcctggcgctggggttgggcattggcgcgagcatgacgatgttgaccgtcgtgcggacaatgacgtgggatccactgccggggcgaagcgagcatctctatcaccccttcatcgacgcactccccacctcctacgacgtcaggcctggcatggacccgcgggtggcccttacctgggtagatgcccagaacctgctgcggcaggccccggcctcccatcaggccgcgctggcatctgctcgtctattggtggatgcgcagcgcagcgtgcagattccattcttcacgcaagggcagtatgtcactgcggatgcgtttgccatgttcggcatcccagtggtgcagggcagggcctggacgcgtgaagatgatgctgcccacgcccgggttgtcgtgctgggtcaggatctggctgctcatctgggcggtgaaggcctggtgggtacgactgttcggctgggtggccaggcattcacggtggtgggtgttgccggtccgtggagcccgcgcccacggttctatacggaccttcagcaggacgtgttcaaggggcgcgaagacttcttcataccgttaggtgtcgcggcagagatgcagatgacggtgtccaacagcgtcttttcatggagtggtgacaaatcccccaatcgcctgcaggacgctcgcacgtcgtggatccagttctgggccgagttgcctgacgcggccagtgtcgagcagtacgagcgcttcctgggcaactacgcacgtgcacagcaccaggcgggaaggtttgacaggacaactgcaccgcggatggtgtccctgaaggacttcctggtcgagcatcgcatcatccccaacgaggtgaagctgcagttggcgctgtgcctggggttcctgatcgtttgcctgctgaacatgagtgccttgatcttcgcccgcttcatccgccggtcccatgaaatatcggtccgtcgggcgctgggtgcgcgtcggcaggacgtcatctatcagctctgcactgaagcactgatcatcggcggcttgggcggggcggtagggttgatcgttgcagaggccggcctctaccttgtgcggacgcagccggaagactacgcctcgctggccaacatggatctcagcatggccgctctcaccatgggcctggcgtgtgtctccagcgtgatcgctgcgttcttccctgcgctgcgcgctacctcgggccgtctggccatgcagatcaaggcgtcagaatga

SEQ ID NO: 507836 - DNA, 1248 bp, Stenotrophomonas maltophilia
atgagcattgcagaagttccccttgtcgtccgcgcgctcacccgcaaccgcgtcatcgcgtccattcttctggtgcaggtgctggttgccaccgcgtgcgtgacgaaccttgcgtttctgctgtccgagcggctgggaaccctcacctacaagacgggcctggaagaggcgaacctgggcgtcatcgagaccgagtacctggggcctgcagcagccaaccctgcagcctcgatcaggaccgacctggaggccatccggcaacagccaggcgtcgaacaggtagtcgcagcagagtcgcttcccctttcccagcgcagctggtcggtgggattcaccaacaaggtgcttgaagacaatgacatctccggtatcgtcgaggcagagccgactgtctacacggcatcttcgccagcagtccaggtgttgggcctgacccttgttgccggccgtgacctgtctgcgggagcgttcgtgccgatggaggccagcgccgactatgccgggctctacaaggcaagcgaggccgttgtctcgcaggcactggcagacaagctgtttccggaaggcggcgcagtcggcaagttcctgtatgccgatgcgcagcatcccatccaggtggtcggcatcgtcaagtcgctttcccggcctgttctgaagaccgatgcagacaatgacatgtcactcatcctgccgctgattccggacgggcctcgcgtgatgttcgccatccgtgccgcggatgggcggctggcggatgtgattgcgtccagtgaggcggccttgtcgcagcgcgacgcaaaccgcaccatcgcccgcagcacctcgttccgggaactgcgcgccgactacttccgccacgatcagaccatggcgataatgttcctgagctccgggttggcgctgttggtggtaacggctacgggcgtgtacggactggccagcttctgggttcgcaagcggtatcgtcagatcggtatccggcgcgcattgggtgcccggaaatccgacatcctccggtacttcctggtggagaacctgattctcaccgccaccgggtctgttgtcggcaccgtactggccatcggcctgaacatggccgtggcccggtactacgaggtggccaggatcgagacgccatttctcgccattggcgtactgaccgtgcttctgttgggccaggccgcagcatttgttccggcccgacgagcagccaaagaagccccggtggcgatcctgcgcagcgcctga

SEQ ID NO: 507837 - DNA, 342 bp, Stenotrophomonas maltophilia
atgcgatgcattcggatactaaccctcctctcgctcatcctgggtctgctggggtgcagggacgaggtggagagttcaacgtatcccatgggtcagagtggaaagacctgcactgccgacaagggctttgatcgccacccacctgaagtggttgtttccgagctttccagacgggcgttggatagtcgcaggttgactcataaaacagtctgcggctcggtcaccagttgggagatccttccctcgggggcttcgatcaatcagatacctccgccagatgtttatgtaagcgtccggctgagggaggacggctccgtttccgtcagtacggaccgcccatga

SEQ ID NO: 507838 - DNA, 1167 bp, Stenotrophomonas maltophilia
atgcctatcaagcaatatatgtttcatgtccatgcgcaccttcgggcgcagggcttcgcgtcgcttacccgcagccaggtccatgagctgctggcggccgccgccgggtttgctagtcacgccgcgttccatcaccaggccgggtggtgcgacgtggcctggcgcgatgctgacctcacagtggatgaagaccgggccatccagcggtgcctgcactttgggatgtcacccgaggaggccgaacgcacggcccaaggcctggtcaccttcctcggcgactccggctatgcgccggttcgcttcgaggagctgattgctgcgctcacgagcgatgaagacgagtgggccgaagccgacgagtctggcgatgcagattcggctaaggttgccgagtgggtgtcgatcaacctgatcagccgcatgcagcaaggggttgatgcgctgctcggcgagctccccttgctgctggaagggttggaggcggcggcagcgcgcggcgtagcggttgcgcacctggcgaccgcgtacattctcgagccgtacggggggctgcaagaggaggatgaccaccgcttcggtcgcgagctgcgccggcaaggccagtggtcgtccgagccggtgagcttcgcggagattgccacgggcggagatagctcgttcgttcaagtggtggccaaacatcggtaccacctccttgctgctgcacggggtgggaataggcgcgcgttgctgctcaccgcggagcgatacggtgaccctggtgcgcttgagcttgagccgtcggatgaaatggatccgtacgatatggtcgatctggccgatgcacacggtcaccctgagctggcccaccagtggctgaccatgctcgcacgcgagggcgaagtatccgccatgcgtgagctcatcgaatatcgaggcgagacgccgttccgcgcttgggtttggatgtatctctcgcgcatgctgggtcgggacctgagccaggatcgacatgaagcgatcaacgaggacggtacaccgtatgacgacgatgtcggcggacccgcgtatgtcgggggcgtcgacggaatcaaactgatgccactcgcggccgaggagaacaggcgtgccgaagaagagtctgatcagctgttcgcggcaatccgagagcgctacaacctgacctga

SEQ ID NO: 507839 - DNA, 378 bp, Stenotrophomonas maltophilia
atgaaacttccagtccgcttctgggtgcatcttttcagccatctggggttcgtcgggatcttggccgggctgttggccggctgggtagggacgttcttcgaggcccttgccggtcattccgatgccgcaaccgacgccgcccgggtgagcggcgttggaacgctgttcgggttctgcatgcttgccctgttgctgctgggagcgctgaccgtctctggcgagctgttcgggctgatcaggccgtacgaccgcaaggcgccatatcggcatgaggcgcaggcgatgcatcggaaggtgttgctgattgtcgtggcggtactgtcctgggcgggcctgactgcggcgttcgtcattgggtcgatgatgcgctccagctag

SEQ ID NO: 507840 - DNA, 702 bp, Stenotrophomonas maltophilia
atgaatgcagtgatgctgccggtcgtgatgctgccaggcctggatggcaccggcctgctgtcggcgcacttcgtagaggcgatgcaggcgcggggcatgcagatgcaggtactgccgatgcccgcgcaggggccacaggactacaccacgttggcgtcgactctgcgcccgcggcttcctgcatctccctttgtgctgttggccgaatcgttcgccgggccactggccatcgaactggcggtggccgggcagcctggattgcatgggttggtactgagtacgaccttcgcacggcggccggtaccgctgcctgcggcgagcgcacggatactggctccagcgtggcccttgccgccactcgcattgatggcccggttgttgctggggcaatggcggacgcgcgcgaacctgcatgagctgcgcctcgcaatcgcgcaggtgccggctgcaaccctgcgccagcgtgctgcggcgacgctgcaggtggacgttcgtgcactgctgccggaactcgtgttgccgacgctttgcctgcatgcccagcaggaccgcctgctgtggccgcccagcgtggccgagctgcaggccttgttgcccgatgcccgccatgtgtcgttgcaggggccacatctgctgctgcaggcgcgcgctgatgcagctgcagccgaagttgccgcgtggatgaggacgctgtcgccctga

SEQ ID NO: 507841 - DNA, 288 bp, Stenotrophomonas maltophilia
atgcgcaagtcacgctggctcagctggaccggcctagccgtatgcgcactctatctcgcgttgaccacttggctggtgctcgatgcccaggccaacagcgaccccaagagcgcctacatcctcatgcagctgccggtgatgctgcagaccgcagcactcaacgtcatcggcatgggtgggtggctatccggaaagacctggacgaccgtctacctgctggtgatgccccctaccctggtcgtgctgtatgcggtgggggccatgctcggcagtgttcttgaacaatga

SEQ ID NO: 507842 - DNA, 642 bp, Stenotrophomonas maltophilia
atgggcgggcgttttttagcatgggtcgcccgcgggcgcatgctgctccgcaatatggtactggcgtggcgaaggcgtgacggtttgctgaaatcagtgaaatcgttttcgtgcgcaggggagggtggggcggcagggctgcgccctgcacctgctgtagtgccggccgctggccggcaagagccaaagccaaagccagagccaaagcggctctggctttctgctggtgtggcggggcggtgtgggctggcaggacacgccgtaaacccccctccggggtccggcccagccgctggcggctgggcgttcgggcgcttgcgaagcagtgcttcgcaagcaaagcgccctcacccatgggggctcgatggcgccatccatggcgccaacggtcccgcgaacccaacccgcccggcccccgacagtttccgtgcgcgtccagcccacggaaaaagaaaaagagcaaagagcaaagagcaaagagcaaagagcaaaagcactcgctccgacccgcccaggccgagtcaatccagagccgatgaactcaggctttgcgctccagctgtagaaagcggcgccggccgcaggccggccaaacaccccgctgcgctgcggcgcgacctgcggacgaccgatctgggataa

SEQ ID NO: 507843 - DNA, 669 bp, Stenotrophomonas maltophilia
atgagctggtcgaggcgctggaccggctgcgctgacggcggttcggcggcgccgggtgcttggtcggcgccgtcgcttccctgcgatgagtgggcttgtcactttctttgctcgtgcaaagaaagtaaccaaagaaacacgccgccatccgcgagccggcgctgcgcgccggtgccctgcgctcctcggtccgccgaggggcggcgcggaactcgctgcgctcagacacccgcgcctcttcaccctcgccggacctgcggtgctcggctagctacaaggcggaccagacagccgcagcgtagacccatacccgcacgtagcctttgtagagtcgagcgacgctcgactcgcgcgcgcagcgcgggcttcgctttcttattctttcatcgcgtggctggcacgcacagaaaaatgacggggcacgggcgggggcggcttgcaggggtgtccgccgcatggatgcggcggccaagcctccatggatggattcacggcgtcccctgcaagccgcccccgcccgtgacctctcgatgctgcgggacgtaccagccgcgagggggctcagcccgttggccgcaaacccctcaccacttgaacagcaccaggctgatcgccagcgtgcccatgcctgccaccagcccgtacaccgtctcgtggcccttggcatag

SEQ ID NO: 507844 - DNA, 1332 bp, Stenotrophomonas maltophilia
gtgtcgaagcagaacgatttctccgtcgccaaggcggcgccgggcgcggccacgcgcatgctggccgcacgtgtgctggcacaggtgttcacccgtggccgttcgctgaaggccgaactggcctgggcgctgccgaagctggccgacagccgcgaccgcgcgctgctggaagccctgtgtttcgccgtcctgcgccgccgcagcacctatgacgcggcgctgcagtcgtggatgcagaagccgctgtcggcgcgtgatgccgatctgcgcacgctgctgatggtcgggttcgcccagctggacgtgctggagctgccggcgcacgcggcgctgtcggccaccgtcgatgccgcgcgtgcactgggccgtgagcgccaggcgggcctggtcaatgcgatcctgcgccgcgcgcagcgcgagggtttcccggagcagccagcgcgcgatgccttcccggaatggctggccgatgcggtggaacgcgattggccggcacaggccgacgcgatcttcagcgccagcctgcaaccggcgccactgtggctgcgcgccaaccgccagcagggcggtcgtgacaaggcactggccgcgctggccgaagccggcattgccgcagaagccagtccgctcagtgccgacgcgttgcgcctggcctctccggttgccgtgaatcagctgcccggcttcgccgagggcgcgatctcggtgcaggacctgtcggcgcagtgtgccgccgatgcgctggccccggtggccggtgcccgcgtgctggacgcttgtgcggcccccggcggcaagtcggcgcatctgctcgagcgcgaccccagcctgcgcctgctggcgctggatatcgacgcgcgccgcctggcccgtgcacgcgatacctacacccgtaccggcgtgggcgagcatgcgcagaccctggcggcagatgccagtgatccgggcgcctggtgggatggcgtgccgttcgacgcgatcctgcttgatgcgccgtgctcggcgaccggcgtgatccgccgccagccggatgtgatgttccaccgtcgcgccgaagacatcgatgcactggtcggcgtgcaggcgcgcctgctggaagcctgctggtcgatgctgcgcccgggcggcgttctgttgtatgccacctgttcgatcctgcgcgccgagaacatcgatcaggtgcgcgcgttcctgaagtggcatccggatgccgtggcgcagccgctgggcgatgcattcggcgtggattgcgaagggggggcgcgccagcggctgccgggtgaaaacgatgctgacggtttcttctacgcgcgtctgttaaaagcagcctga

SEQ ID NO: 507845 - DNA, 750 bp, Stenotrophomonas maltophilia
atgagcgacaaccagagcatcaacaccactacttccgagccggccattcgattcagtgaagggagcgaggttgcgccggtatcggagaacaggcagcggttgaacgagctggcacagcagttggccagtgcagtgcagcgcaagcgcgcactggtggccaaggtcgatacgctgcagcgcgccaagctggcagcacagggcgatgccgtcgctgctcgccagcaatggagtgcaaagctgcgtgatgccgatgggaaccttacccgcgatattcagaagctgcgcgccaacgagagctctgcgctctcgctggctgaggaatatgtggcgatggaggacgagattgcggccgagctgccgaagctggagctggaattggccgaggtggctgaccgttacctcagcacggcagagggtgtcaccagcgatgctgctggccaagcgtatgagcaattgcttgcgcaagccggcgatagcctagcggtggccttcgctctgttctcgaaggcagagaatgggggcgtgcactatcggcagtcggcgagtgccgatgaattggccagcaagttctttggtcgccttggctacgcggtgcgccatcgcctgaatgattcctcggtgaccgatctggtggcgcagcggctggcattgcccctgttggatttgagcgcggtggatatggggctggttcgtagcccggcacgccgttcacagttgcaggcacaaatcagtgccgggggcgcggtgtaa

SEQ ID NO: 507846 - DNA, 1053 bp, Stenotrophomonas maltophilia
atgatggcgatagatggagcaagaggggattacaccccactgcgtcagatgctgtacgaccacatcgatcaactcgatctggcgttggatcagctggcgttgaaggacaggaattttgaccgctttgcaatcatgctggtggataatgtggttgagctaacgttgcataggcatgcacaagagcagaaagcctatgtaaatatgtggaacgcaacgggaaagcctcccgtcaatcctagggttctcgcctctgcattggagcaaaagtttgacgcaaaagtgtcgctcgcattgcagaccggccttctaacgaagccgatgagtcagtctataaattggctgcactccttccgcaatagctcataccacgcagggttgagacatgagggtattcttcattcactagccaacttttacctgcgtacctgctgcgatcttctcgctcggtatagacccacgtcctggtcatccggtggcgaaaagatgtctcatcgcgtggcgaagtatcttggggagagcgaatcgtcatggtcgccatggaccaaggacaatgcattcgaccacgcttgggggaggttgaagatcgttgcctccggcatgagatgcaacttgatcgatgatctgtaccgagacatggagagcgtgatcgattcagttgatgggcagatagcgttctacgtcgataacgcaccaatgaccaaatgccacactagggacgctgcgatcattgaggctcaaatttggcctctggccttctctgataaaggcgtgcagtacgcgcagcagaacgggtgtaagggcccagttcgtatcgggccacgtttggctgaatggcttaggggcaattacaggcctcctgtcgcctcggatccagtccctaagtggagggatcggctgcagtcgcttcgacaggagcaagacgagcatcgtgccctggagaagtactgcaacttcctcaaacagacgctcagtattcggggggaggtgctccgacagaatgattcgttgtggcagcacatcgaagagataagcgaccgggctagagaaaggtaa

SEQ ID NO: 507847 - DNA, 1179 bp, Stenotrophomonas maltophilia
atgagaggcgagccagttgtgggcatccagcccagcgtgatgcgctgggctcgagagagcgccggaatgtcagtggatgatgtggcgaccaggctcaagcggcagctggccgaggtggagtcgtgggagtccggcgacggtgcgcccacttacccgcagcttgagcggcttgcctatgagctttacaaaaggccgttggccgtcttcttcctgccagagccgccgcaggaggtcagcccaaggcaacagtttcgtactctgccggccgaggagctggcgagtctgtcgcgggatacgtatctgcacctacgaaaggcgcgcgcctatcaggtaggtctggaagacctgtacagcgagaccaatcctgctccgaggaagatctggcatcacgtgtcgctgcagcgtaaccaggacgttgccgctcaggctatgaacattcgtcgcgaactcggaatagatagcccaacccaggcgcagtgggggggcgacgatcaagccttgaaggcttggcgatcggcgatagagaggatgggtgtattcgtcttcaaggacagctttaaacagaagaccatctctgggttctgcctgcgagatcacgagtttccactgatctatatcaacaacagcaccacgaagacccgtcaaatcttctcgctgctacatgagcttgcgcatattcttttcgacgtgagtggcatttcaaagttcgacacctcttacatcagggaattgccagtccgagagcaagagttggaagtgttctgcaacgcagtggctgctgaggtgctgatcccatttgacgagttctcgcgtgtaaccgctggcgttccttccaatgtagacgcattggacgatgcctacttttctggtgtagctcggcattttggtgtgagtcgtgaggccatcttgcgacgcttcttggatgcgggacgagcaacgcggaatttttacgagagcaaggccagggagtggacggatcagatggttgaacgtgacgggggcgggggcagctggtatgccagtaaaggagcgtatcttagcgatacgcttctgcaggaggtctttgctcggcgcctgcgaggacagctctcttctgagcgtgccgctgagtatcttggagtgaagcccgcgaacctgcctggtctggaagacctggttttgcataggacgcgcaactga

SEQ ID NO: 507848 - DNA, 468 bp, Stenotrophomonas maltophilia
atgtatgtcttcgatacaggctcttatagcaagctaaaacactactacccgcaggtttttgggtcgttgtggcgccaccttggggctctcgctcaaagtggctctatagtctccacccgcgaggtgcgacgggagttgggcaatgggtctcctgtgccatacgtcacggagtggcttgatgccaacgctcagatgtttacgacaccgagtgcgggggagcttcagttcgtcgctaggatcctcgctattcctcactttcagagcatcatcggtgagcagcagcgtctaaccggtactcctgttgccgatccttttgtaatcgcggctggcgccgtccgcagcttcacagtggtgacggaggagcacttcaagcccaactccgcgaaaattcccaacgtttgccagcatttcagtgttccctgcatcaacttggaacaatttatggctcaggagcggctcagcttctga

SEQ ID NO: 507849 - DNA, 246 bp, Stenotrophomonas maltophilia
atgcgggcccgtgaacaggggagtatgagcacacaagtgctgacattcgaggatctacgcaaactgtgtgcgcctaatggtccgtcgccacgattgtctacggtggagcgttgggcccaatcacaaggcattcggtacaagtacgatggccaaggtgggatatggacaaccatcgacgctctgaatgctgcattgggtctgcacgcagcaagagaagacgaacagtatctaatcgacctcatctga

SEQ ID NO: 507850 - DNA, 360 bp, Stenotrophomonas maltophilia
atgatcgaggcatgggaggcgctggtcactcgacgtaacgcgatctggaaccgcaagggtcgcaacgtccctgtgcccatcagggcggagcagcgcgtcctcttggtggaacagacaggcaaccccatcgcccggtcttcaatgtccagtgcctggcaacgcttcattcgcatggcaatgagcgagggagtgattgaggaagacgagcggttctcgatgcacggtctcaagcaccggggcattaccgacaccgagggcaaccgtggcgacaagcaggacgcggccgggcacaaatcaccgaccacgacgggccgctacgatcacgatatgccaatcgtgaaaccaccgcgcaagcgctga

SEQ ID NO: 507851 - DNA, 1815 bp, Stenotrophomonas maltophilia
atggcaactgtaaaaaagaaggtcgcagagaaaaagcttgtggccgaggatcaggcagcaccgcgggctcgaatgcacaagctagtaattaagaattttcgggcaataggcaggcaggctgttgaaatcgagctagacgacattgttgtcctggtaggtgcgaacaacaccgggaagagctccatccttcgcgcgtaccagcttgtgatggagtcgggcgcgaagggggacctgctggcagaggattttcctggaggctacgtcacgggtgcagagttgaaagacgaggacatgccgagtatcgagctagagaccgtcctcttcgctgatagtaagccgccagctgataaatggattgatgttcgacccaatggagatcgacatgtaagggagcgttggacttggagttgccctggtaagcctaagaaaaggggcttcaacgtcgagctcaatgcttgggatgctaaccatggcccttggggaaccgcatccgttgctcagtccaataggcccgagatgcatcggattgaagccttcgacgatcccaagaagcaagccgatagcatcatttcccttctggaggaggcgacgaagcagcgggtcaaggcgcttatcgaagaagagggcaaggaaggtgcttacgcaaagctccttgcaggagtcgcggaactccaaaaggcagtcgcaaccgaggccatggaggcgatcaacgaggtgcgtctagaactggtgagggcgatggccgatgtctttccaggctacagtattacgttggatgctcgtccagaggacgatctaagcaggagcatatccttcttcaaggccccgccagttctcagaatggggcccgcagatgggcaccaatcggatctggagcgacagggcagtggagccaggcgaacacttatgtggaacgcgctcaggatcatcgcggaccacaaagcgggagcgaaaggaacggaaaggccccatgtgctgctactggatgagccggagctgtgcctgcaccctgccgcagtgcgtgatgcttgcaacgtgctctactcgcttcccggcggaaaaacatggcaggtgatggtgactactcactcacccgctttcatcgatctctcgcgtaacaatacttccattgtaagagtagagcgatctcaggccggaaccgtctcaggcacaacaatcttccgtcctgatcgggccaggctaggcgatgaagacaaggagcggctgaagctcctgaatatgtatgacccctatgttgccgagttcttcttcggtggtcggacggtgatcgtggagggggatactgagtacgcggcatttcgggaggttatcgccgatgatccggcgaaattccacgatgtgcacatcgtgcgggcgcgcgggaagtacaccattgttgcgctctgtaagatcttgaatcagttcaagtgttcctattccgtgcttcacgatgctgatttgcagagagcaaagaataggaaaggccagctggtcgcaaacagtgcatgggtagccaacgggaaaattctcgaagaggtaaagaactctccgtccgatgttcgtcttgttgcctctctgcacacattcgaggtagcaatgtttggtgaactcgtatccggagagaagccttacgcatcctggctgagagttcgagaggatgcacttgcccggaaaagagtgtttgatctgctggagttccttgtcaggagctcggatgactgtccggccggcgttttggagtgggacgatgaagctgcgttatcggcggctgttgccgagttcgagcctgtagctgatgaggttgtagaaggctga

SEQ ID NO: 507852 - DNA, 483 bp, Stenotrophomonas maltophilia
atgccttccttcgacgtcgtgtccgaagtcgacacccacgagctgaccaacgccatcgaccaggccaaccgcgaactggccacccgcttcgacttcaagggcgtggacgccaagttcgaacgcgatggcgatgtcatcaaccagactgcgccgaccgagttccagctcaagcagatgaacgacatcctgcgcgcacgcctggccgcgcgcggcatcgacgtgctcaacctggagttcggcgacatcgaaaccaacctggcccaggcccggcagaagatcaccgtcaagcagggcatcgagcagaagatcgccaagaagatcgcggcggcactgaaggacgccaagctgaaggtggaaagccagatcaacggcgacaagctgcgcgtgcagggcaagaagcgcgacgatctgcaggacgccatcgccgtactcaaggccggcaagttcgagctgccgctgcagttcaacaacttccgcgactga

SEQ ID NO: 507853 - DNA, 885 bp, Stenotrophomonas maltophilia
gtgaacggctatgtgaccgaagtgctggtgaaggacttccagcacgtaagggagggcgagccgctgctgcgcatcgatgaccgcatctacacgcagcgtgtcgcccaggcgcaggcaacgctggacagcgcacgtgcggcactggccaactcggaccagtcgcaggcacagaaccgtgcgcagatcgcttcggcgcacgccacgctgtcggccggccaggccgagctgcagcgttcgcgcaatgaattgaaacgctacgaggaactggctgcgcagcaactggtgtcggtcaacgaccgcgacaagttccgcaccacccaggcctcggcacaggccagcgtgcagcagtcgcaggcgcagatccgcatcgccgaggaaacgctggtgtcgacccaggtggcgcgcaagagcctggaggcccaggtggaaagtgcacaggcacaactggaactggctcgcatcgacctggccaacacggtgatccacgcaccgcgcgacggccagatcagcgaagccagcgtgcgcgtgggccaatacgtcgccgccggttcgcagctgctgttcctggtgcctgacacgctatgggtggtggccaactacaaggaaggccagacctggggcatggcgatcggtcagccggccacgttctcggtggacgcgttccagggccaggtgctgcgcggccgcgtgcaggagatcgcacccgccacaggttcggagttcagcgtgctgcgcccggacaacgccagcggcaacttcaccaaggtggtgcaacggctgccggtgcggatatcgatcaatgaaggtcagacgctggccgcgcagctgcggcccggcatgtcggtgatcgtgcgggtggatacccggtccaagccgatggactag

SEQ ID NO: 507854 - DNA, 654 bp, Stenotrophomonas maltophilia
atgaaattcacgacactggccaggcgggcggccaaggacacgctggaagcggaagatctgatcgccttcgtgcaggagcacggcgccgaaggtggcgaggagattgagcggctgcggatactgcacggttggccggatgatggcctgctgggcgatggtagccgggtcgtaccgttcggcggctgggccaaggcctgcaccgcctggggacgccagggcgtggaaggcctgcgcgatatgctgggtgacccccagctggcagtgttcgcgctcggcacactggccgatgtgggtggccccgccgccattgccatcctgctggactttgccgaacgcgctgactggtcgcgtgcgggcacaccgcgtgatctgccctgccaggcgctttactgcctcaataccgcgctttcggggaagaccggcgttgaggttacacccggcatgcaggcgtcgatgctgcgtatcgccaagctcatctgggacgccagggtgcccaatgtgcatttcctggcgcaggcactgtatttcgtgcgccgtgccgacccggtaccagcgctcgcctgggtcgagcagttgcgggtggacgaccctgtgctggtcgacgcacagcgcagcgtcctgaagcgtctgaaagagcacgccgcccgggactga

SEQ ID NO: 507855 - DNA, 201 bp, Stenotrophomonas maltophilia
atggctgccgtagcgttgaggacgctgggcgcgaacggaatatccggtagtgccggccgctggccggcaggacgcgaaatgccggccagcggccggcactaccagggggcttacgaccagtcgtacgagaacagcaccgtgcggctttccggctcgtacagcatcacgatcgcatcggcaccggtggcgcaccagttgtag

SEQ ID NO: 507856 - DNA, 927 bp, Stenotrophomonas maltophilia
ttgcgcctcaccctgcttcccctgcttgccctcccgctgcctgcgctggcaggcgatgcccccgaacacgtgctgccgatgtggatgcagggcgggcatccggccgtggccgtctcgctggacgggcgtgcggagccgttgcgcttcgtggtcgacagtgcagccggtgcgaccctggtggatgaccgcgtggcccggcgctatggtctggaagacgccgatgcggcggtgtcgcatgcgcaaggcgccagtgcgaaggcggcccagctgcgacggatgcgcaccacgtcctggcggctgggcagctggcagctgcaggccagtggcgttcaggccgatctgtcctcgttggcgaaggatgatgaggcggtcattgatggcctggtcggcaatgacctgaccggacgctgggatacccgctgggacttcggccgcaatgagctcgcgctgtggaccccgggccggctcgcgctggatggaaacgggtgccaggccaacgcactgccggatcgcaaggctggattgcgccacttcggtttcatcacggtggcactgggtgatgccggtgtggaagccatcgccgtggtcgataccggcgcggcgcagaccgtgctcaatgccgaagccgcacgcgcattgggcgtgcgcaccgacggcagcgaccagcgcgtgcgtgttcgcgggaaaggcactgaaggcctgggtggcggaaggcaggccacctggctgtacaccctgcccagcatgaccagcgctggctggcgacatcccccgatggaagtacggatcagcgagctgccggtattcaaggccattggcctggaggcacggccggcgctgatcctcggtgccgatgcaatgcgcggcggccaggtggacatcggtgccggcgccgcacggatctgcctgcgtcggccggccaactga

SEQ ID NO: 507857 - DNA, 708 bp, Stenotrophomonas maltophilia
atgaacgctcccgcccgggtcatcgttgtcgatgacgacgccagcatccgtgatgccatcgccgactgcctgcagctgcatggctacgatgtgcgggtggcgggcggtgcggcggcgttggatgtgctgctgcaggccgagcgcccggacgtgatcatcctcgactggatgatgcccggcgaggatggcctgtcggtctgccgccggctgcaggcgcgggcgatcccgatcctgatgctgtcggcgatgggcagcgcgccggaccgggtgatcggtctggagatgggggcagacgactacctggccaaaccgtttgatccgcgtgagctgctggcacgggtgcgggcgctgttgcgccgccagcacaagctgcgtgagcaggtggccaacgagctgcgcttttctggatggcggttgcttcctgggcagcgccgcctgatcacgccggatggcgctgagctggccttgagccgtggtgaattttccctgctgctggtgctggccgagcgccccgggcgggtgctcggccgcgagcagttgctgcagctgatgcacggcgaacccagcgacagcgttgatcgtgccattgatctggcgatcagccgattgcgccgcaagctgggacacgcagtgcccggcgctgaaaccctggtgcagacactgcgcggggaaggctatcgcttcggtaccgaggtccaggtgctgtga

SEQ ID NO: 507858 - DNA, 546 bp, Stenotrophomonas maltophilia
atggacggcttcacatttgatgaggatgtgcgttcggattgggacaccgattgcctgattattgaaggcgatctgaacgtgggaggtacgttgcatctcaatgatctggacgagctcaggtgtgtagtcgtacttggaagcgtgaccactgaaaatttcatctgtggtggttgggttttcgtccgtgacaatttgacctgcaagcacatatacgcatcttcactcaatgatggcggcctctttgttgggggcaacgtgcaggttgatacccttcttgagacaggccagtacgtgcatgttgcggggaacttcgaagcgagctacctggcgacggtgcaaaatgagatcgaagtagatggtgaggtacgctgccctaactttgcactccgctcggatcgagatcgtttgcctctctgggtggatcctcgactgatcaagcagcatcacggagaggacgatgaggggcggccgtatcagtactggtacccggacggctatgacgagcgcatcttggcgggaggcagtccagtgaagggtgagggctga

SEQ ID NO: 507859 - DNA, 816 bp, Stenotrophomonas maltophilia
atgaaaatcagaaccaaggtcggtaggcgcaaagcggtcgttgtgctggtgacaggagcagccattgcactgatcacgaccgcgatctggacgagaagcaacacgccgagcgttctcgctgttgccccccaagagcagcagaccgtacgggttcgtatcaacggaaaagatgccgcgatcgagacgacgcaggccgcaagcgttgccgccgccgggactcagttgattgcaattcgccgaacgttgtcgccccagcaggcccttctgctggcgcaggacatagcgcgttgcacaaacgccgcaagcttggcggaaacagacattccgacgggactgactcccgaccagcagcgtgagttccgggaaaacgttctgggtgactcagactgctccgctcttgaatcagaacactccatctatgacctcgcctactacgcggcgtcagacggcgactccactgcgaaattgatgttctcgggactggcgtctcatcagttcgacgatgagcactccatgttcgatgaagagctcgtcaagcgattcaaggaagcgacagtgagattcctcaacgaagccgcggactcgggtgacagcaatgccctgatgcttcttgcggccacctttgaggatggcctgcatgtgcctcgcgatgcagcacgcgcacacgcctatgcgcgcgcattcagccaggccagtggcggcaaggggcttcgctatgccgagcggctctggagccaactctcaccggaccagcaacgggaatcgaaccgatggcatatcgagatatcgaatcgaagaaaaggagaaatgaaatga

SEQ ID NO: 507860 - DNA, 144 bp, Stenotrophomonas maltophilia
atgaaaggaaagtcgaaacgcaatcgctggctgatgatcgtggtcgcgtgcctgggaggcgcagcaatcgcagcgtcggttgggacattctactgcggcaaggcctgcaatgtagccggggatatggtggcggaggaagggtga

SEQ ID NO: 507861 - DNA, 273 bp, Stenotrophomonas maltophilia
gtggagatcggccagtttttccccgggacgaagatcggcattgccattccgtcgccgcgcttctactacttcgcgcaatcgcaggatcggtgcaccatgaacgccaactatttccacatgaccagcgacaaccggatcttcctttcgcggttgcaggtgactcaacagaccctgatcaccaacaccttcccggtgggcggcgtaacgatggggccgcagaacgccacgattttcatcgtggacctgaccgaggtgccgctggggttcggctag

SEQ ID NO: 507862 - DNA, 132 bp, Stenotrophomonas maltophilia
atgagtggatggctgctggccagcgagacgccggcgatggaggcctatcgggtcagccgcgcggtgaatacgccgcggaacaaccgcgaggatctcttggaggcagtcgcccagcgactgcctcctttctga

SEQ ID NO: 507863 - DNA, 894 bp, Stenotrophomonas maltophilia
atgaagagatcgggaaaattactttccatttcattagtcgctttgaccgcgtccatttccgctgcgatctattttttcatacttcactcaacgagtgatgcgggcaccgtagataaccctataaagaccactccggcatcgattgatgccgactatcacgatgtcaaaagtcaagcgcaactcaaaggttacgaggatcgcaaaaatagagtttatctggagggcaatgcatttctcttgaagatggacattccggagatggaggacgaggcgacagcttatgtagatgaccgattggcgcgatctatgcgaggagatgggcaggctagctacgaaatttttacgcgaatttcgagttgtcgtcgggcactggatcctggcgatagcgaggagtacaaggcgtatgcatcggtagggctgggggggcagttttctgagagagtcgagagggaaattgagttgtgcaaagggcttaactctcgagatgacattacctctgagaactggcttgctctcgctgcggagcagggctcaatcgaagcgcgtttgatgtatgcacgcaacccccgtgaggtggtaggggatctatcaaacgcactaaaaaatcccgaggaaattattaactaccgcaccaatgcggttagatatcttcaggaatctgtttcgactggaagcgtagactccatggaggcactggcaaacatatacgatcgtggaattcttgcggaaaaatcacccgagcagagtcttgcgtattggctggcctacgatagattgaatcgaaacgagctatcgacaacggcaattaatagaatttctgtagacctttcgccagatcagtcgcaggccgccagggagatggcgggtaaaatcttaaattcatgctgcaaataa

SEQ ID NO: 507864 - DNA, 567 bp, Stenotrophomonas maltophilia
gtggatacgcttgcggaggatgccctgactggcgcccactctgccggtgccaaggtgctcctgataccgcagcacaacgtgctactggccaccagaggtggagcccagttcttcctgaagatctacgagctggctctgcaggcgagcttccgggccgacttctccatcgagcagctttctgctgagatggggcctgtaatggaccaactgtcgttgaactatgagaaggcggccgcagaggctgacctgcctatcgaacagctggggaccgagattgtcctgggcggttggtcgcccagaaacggcagaatgatggccacggcctacgccaagagcgacagccggcaggctacgtcagtgcagccgatcggcggccagttcgcgtcaccaggcgatccactcaaaggcgtggcgccgagcatgctgcaggtcgacctgatggctgccgggcggctccaagcgaactacctcaacgagcagatgggccggcaggtcgccggcgggcgtctgctgatcgggttccttcagcaggggcaagcggtggtgaaagaccttgggagcttatag

SEQ ID NO: 507865 - DNA, 888 bp, Stenotrophomonas maltophilia
atggtctttggaagagtcctagtgcgtttcgttgtttctggcgtcctgatgatttcaggtttaggttttcatgcggcggcaaatgcgcaagataccttgaaatcctgtgacggctgcagtctggatcagatgaagaatacggcatggcttgataccaatgccgaggaggcacctttctgggggtacaagtactatgtcaatcgtcagaatggagtcatcgccaagtttgtaacgtccaaggaagatggacctccaggtgatacctgtcctccgggtggcggcgttgggtgccagagcgttgtaaaggtgttcccggatgttcccgagtcggcatttacggattatgcgttcaaggcacaacaggtctggggctcgcagatagtaatcgaacccggcccaggagttccgaataacgcatacgagttcgtgcaatatccgcagatgagagaagtggtgatggcgcaagcccacaccaagtctgcgtttctcaatcttgtaacccaagcagtgcgtggcctgatcgatcagcatctgttgagcttgccccccaaggtggtctcagtaacgctgatccttccggatggatcgagggtcatcgccatcatggatccgacgaccgaaaggctgtctcacgaacccaataccgtgcgcgacgctgccggaaatttcgtgccagagactcctggtaaggtggccggcgggattggccagacgacgtactatgacttcaccaataatccagctgatcgatttaagttcgtacagtgggtcagctcgttaggggcaaccgttaccggtccgactagtagtcagaaaatgtactgcactgaaagtgcggacaactcaggtgctggtgtaaatgtaattattacctgcactgcctactag

SEQ ID NO: 507866 - DNA, 429 bp, Stenotrophomonas maltophilia
gtgctgtggtggggcggtcgacagatcgccaacatcagacgcggcaaggatggcgctgtgcgcgtgcgtctggatgcccggaagatgtggcagatcaaggaagttccggccgccagcatcgcccaaggcaagcgctacgccgagcgctggtgcgcggccaggctgtaccccgacatgccgctgcgtcaggcggtcgcccggctgacagacagcaccccgatccagccacccccgccactgcccggactgccgccaatccgcgagcagcagcaacaggctcggcgcctggccgaggccggagcgaaggaggtcgagcggatcaaggaagcgctggagctgcgcaagccgccggtagagacgaagctccgtccgagggacgcacgcaaggcgtgggtgagggcagggctccgggagctacgtggttggtga

SEQ ID NO: 507867 - DNA, 597 bp, Stenotrophomonas maltophilia
atgtacatagctgatacggttcattttcatgacgactccgagcgtgactattacgccgtattgggtcgctatatcagcgcgtggggcaggttcgagaatgggatctatgacctgctggcagctgcgggaggcccatatcgagagatgctcaagaagttgggcgagcattctctgcccccggagttcaagccgggatttatgccattcagcactaagatcaagaacttgaaaaagtgcatagaggcttgccctgccctttggcatccacgggaccgtgtggcggacctattggagtgggcggagaatgaggcagccgctcgccatcacctgatccatggcgtcgatcagatctttctgaagcggtcgccgttcgcaacctacatgtacaagggtgagaattcagacccgctgtccagcaacgttgcgcatgggatggacttcaccattgagtccctggccgcgagatacgaccgggtaggcgatgcctgcatgaacctcgccgcactctatctggagattgcagaggcgattgcccagctagggaaagaaatcaacccacccagtgcgccatcacaacacaaccaaacggcggcttag

SEQ ID NO: 507868 - DNA, 777 bp, Stenotrophomonas maltophilia
gtgctggacaggttcgccgttgagcgcctgctctaccggctctccgcttctcgataccgcaaccagttcctgctgaagggtgccatgctgttcgcagtgtggttcgacgcgccgcactgccctacacgggatgccgatttcctgggatccggcagcgctgagcccgatcgcctgctacatatcgcactttcgctctgtggaatgcccggggacgacggcctgcgcttcgatccaggcagcatcgtcatcgaggccatacgtgaagaagccacgtacgaggggctgcgcatgcgcctgatcgcacatctgggccgcgcacgctgccatgtgcagtgggacgtcgggtttggcgacgcggtgatcaccccgccgccggaaatcacctatccggtgattctggagggattccctccagcctgcctgcgcgtctatccacgcgaaaccgtgtttgccgaaaagctcgaggctatagcggcactgggcatcgctaacagcaggatgaaggacttcttcgacttgctggcactgatccgcgaagacgccatggatcgcccgcaccttgttgcggccattggcgcgacgtttgatcgacgaaggaccccggcgccaacgcccctgccctacggactgactcagtcattcgccgcagatacccagaagcagacccagtggcgcgccttcctgcgcaggaatcgcctgatcgcgccggacctctcttcggtgattgccgagattgccaactatctggacaccctcgacacacccgtacagtcctga

SEQ ID NO: 507869 - DNA, 186 bp, Stenotrophomonas maltophilia
atgtacaagcctctctatccccatgtcatcaccactcttggcgaagccgctgcgcgcctgccacatgacctcgcgccgatcctggagcaggccctggccgcggtcaacgatgcgcggtcgctggcaacggtcacgtgtgagtcctgcctgcagcagcgtcgcggcaggcagccgcaggctgactga

SEQ ID NO: 507870 - DNA, 372 bp, Stenotrophomonas maltophilia
atggtcggcgatatcgccgcggcccatcggcagcgatacgcgcaggccgtcgccgcccagcttggcctcgcgcgcggccaggcgcagcaggaaatcggccagcttctcggccggctgcaggcgcgccagtgccagcgcggcgtcctgcgcggcatccagttcctggcaggcacgctgcagcagcttgcgctccaggtgcgggaaacggctgcgcagtgccttcatctgtggcagcgcgacgcggcagacgcggctgtcggcgatggcctcgatgtcgtagcgatggtggtcgctgccgctcaggcccaggtagtcgccgggcagcacgaagccgttgatctgacggcggccgtcggccagggtgcgcactag

SEQ ID NO: 507871 - DNA, 786 bp, Stenotrophomonas maltophilia
atgcccggcgtttttttgtgcctgctccgtcgcaccccatctacgcatggacgtggatctactgggctctccgacggtcgggcgagagcgcaagggggcattttgagaatagttgcatggattcccaagagtagctcgatagcattgagcctctctgcagacgtcgaatttccatgttcgagacaccacccacactcgaagaaatccggaacaaggttgatgattttttccgcgcctccccgttcagcacactgctgccgagagatgaggatccatcgagcacgagttgggttctggacatcatcttcctgcgttggctctcccgaaatagcgcgttccttgacgcatctgtcggatctgcggtggcggccgctctttcgccggaagatgccttggcatgcatcgaagctgcttttcaggacgaaatccccggcgcggcgttcgacccggaactgctggagtttaccgttcgctacttctgcaaacgcgcaccctattcctcggatttcttctccctttttctgcaaagcgaaatgccttcaccggacgccatgtgggacaagcaggagcaggtttacgcgattatcgattctcgtctgcagtcatggcgcaatggcgagcccatcgtccgggcactcatcgccaaaaccgatcaacaaggagacgccgaaccggctacgccgctggacgctgacgtctggatctcaacgctggcaacgctatcggatgctgcagtcacccacgaaggctgctgtgcatacgccgaccacttctacaggccactga

SEQ ID NO: 507872 - DNA, 492 bp, Stenotrophomonas maltophilia
atggagcttcgcccggaaccggtgcctttccgcatcagcacgctcgacctgacactggtgtatcgagagcagaacgcgagcgcacaggtgaacgtggaggcacagacgctggaggactatgcagcgcagccgggcatgcgttaccgctcactgcaggtggatttcgaacttgtccatgaagcgcgttgccggggcggaaattttcacgagatgcgccacggcgagatcttcgaggaaaccggaccagccgatgaaaccgcgcactggcggcaaaccggtctctgccctttccccggcttctaccgggtcatccacgatcctggcctggcggcactgctcgcgcactacgatccccgcaatgtccacgacctgcagcttttcatccttgccgcacatgacagctacgttgaagtcctggccaagggatatcgctacacgctggctggcagcgtcaatgagcacgacatcatcaccgtcgcgccatcggcctga

SEQ ID NO: 507873 - DNA, 1515 bp, Stenotrophomonas maltophilia
atgtctgttgatcgcatcgccaacgcgcgtcttcgtgaccgcgtggtctccgcagaggccgcagccgcgctgatccagcccggtgaaaccgtggccatgagcggctttaccggctccgggtatcccaaggccgttcccgtcgaactggcccgccgcatcgaagcggtgcatgcccagggccagcccttccagatcagcctgatgactggcgcctccaccgcgccggaactcgatggcgcgctggccaaggccgatggcatcgccatgcgcatgccgttccagagcgacccggatgcgcgcaaccgcatcaacgagggcaagctggattacatcgacatccacctcagccacgtggcccagcacgtgtggttcggtttctatggcgagatcgataccgccgtgatcgaagtctcggccatccgcgaagacggttcgctggtgccctccacctcggtcggcaacaacaagacctggctggacctggccaagaaggtgatcgtcgaggtcaacgaatggcagccggccggcgtcgacggcatgcatgacatctactacggcaccgcgctgccgccgcaccgcaagccgattccgctggtgaacgccaacgaccgcatcggcgacaccgcgctgcgctgcgacccggacaagatcgtggcggtggtgcgcaccaacggcccggaccgcaacagcccgttcagcccgatcgatgcgaccagcgagcagatcgcttcgcacctgatcgagttcctcaagcatgaagtgaagaagggccgtctgccgccgaacctgctgccgctgcagtcgggcgtgggcaatattccgaacgcggtgctggccggcctggccaagagcggcttccgcgacctggccgcgttcaccgaagtgatccaggacggcatgctcgacctgctgcgtgacggcgtgctgagctatgcctcgtgcaccggcttcgcgctgagcccgcaggccaacgagacgttcaaggagaacatcgatttctaccgcgagcgcatcatcatgcgcacgcaggagatctccaaccatccggaactggtgcgccgcctcggctgcatcggcatgaacggcatgatcgaggtggacatctacggcaacgtcaattcgacgcacgtgatgggcacgcggatcatgaacggcatcggcggttccggtgactttgcccgcaacggtttcctgtcggcgttcctgagcccgtccaccgcgaagaacggcaccatctcggcgatcgtgccgatggccagccacgtggaccacaccgaacacgacgtgtcggtgatcgtcaccgaacagggcctggccgacctgcgtggcctgaccccgcgcaagcgtgcgcaggtgctgatcgacaactgcgcgcacccggatttccgcccgcagctgcaggattacttcgaccgcgccagccgcgagagctacggcaagcacaccccgcacctgctgccggaagcgttgtcgtggcaccagcgctggctggataccgccacgatgaagggctga

SEQ ID NO: 507874 - DNA, 720 bp, Stenotrophomonas maltophilia
atgtccgctggaactagttgtacagatgttgactgggggtgcgagcactcaccaatggcgggggacgccgccctttccatcgtatcctgcagagtttctgtaaaggatatctccaagctttccgcgcgattggccgagactgtcgtcgacacatcgtggatggccgctctcgacaaaggtactcagcgtgcataccgaaagactgttgaggaaacttcggcaattctctgcgagatcttcaaagtcgtgccgggatctccggtagcggaagaatttggcgagctcatggtgtcgatggggtccgctcgagcccttaagtcgcttctcggccatacagaggtcccgttggcagagctgtggaagcctcagcggaagcagaacgagggcttcgacttccacacaatatgcggaaatggaaggctgaacttcggggaggcaaaatactctggaaacggatcacctcatggtttggcaatttcccaggtgtctgacttcattgaggctgaaaagcatcaccgggactatgtccatctatctagcatctgccccgagcccgcagagctcttggcaaatgacgagtttggagtggtagcagccttctcgattaacgggaagaaccacgtgactatcatgaacaatgctctggcgtcagccatagagctctccaaaaaattcggactcaagcaaatttttctggtgggggtttctaatgacgcctga

SEQ ID NO: 507875 - DNA, 2265 bp, Stenotrophomonas maltophilia
atgaatgatcccgctccaattcagacgctatctaaagttcttgaggatcttcataagaatgggccagactcccaggaaaagttggaggcaataagcctttatagggaatttcaccctcagtgcttcgaaagattcgagcaagatataatcgcctctatggggctgttctacaaacttggagcgcctgaaagcctttactcatttctcatttctagaatgggtgaggcaaatagagtggatggtgatcatatccttactcctgtgcaggcgagcctggtgtctgccattagggatcataatttggtctctatctcggcaccgacaagtgctggaaaatcttactcaattagagattttatctctaaaggggaaggtgacgccgttatagtcgttccatctcgggcgctaattgctgaatatgtagggtctcttcggcagtacttttctggagagaagggcgttatggtgatgcccttcgtcgattctgtatttaaggctagatctccaagaaaaatactggtgctaactccggagcgcgccagggaaatatttgacaattctctcgatctgaatattagggtcttcttctttgatgaggctcaggtttctgaagagggtatgaggggtgtggttttcgatcatcttgtcagacgggtgtctaaggactttcctaatgccaagatgatatttgctcatcctttcgtggccaatcctgatgcgcagtttaagaagcatggatttgacagcaaaagtgccttctcaagatcgtatgagcaaggggctgttggtaaaatattcatacagagacactcgaacggaaaggattactacttcagcccgtttgctgatcgcggcaatttgctttcctcgtgtattgaattccaaggggggttctcggaattcgcttttagttcaggaaaatcgatactcgcctacgtaagcaagcagtcgatttatgatggcaagtttatgggcgaatttgagagctacgtcggctccctgccttcgctctcaaacgaaaaggctctatcgataattgatgagatcagtcagattgtcggggcaaatcatattaatcatcgatcaaagatgattgagcttttgcgcaaaggagtggtcattcatcatggctccgttcctcttgaggttagattcatgctggaggattatattaggcttggatactgccggatttgcttcgcgactagcaccctcgctcagggcgtgaatatgcctttcgacgtcgtatggctgaatactatgtcgattcgcgctgaagatgaggctaagcgctccttagcatttaagaatcttattggtcgtgctggtcgattgtccgattctggaaattttgattttggttatgtttacaccaaaagtgccaggcttcttatggatcgtttgaaggatgagtacaggctgtccgatgagtcagtaatcgagtttattgacggagaagcggcgggtcatgacatggaagtggtggaggcaataagagattctgaattcgatgacgagctacatatcccgaatagtagggccgcgcgcctccagtcgagtccatccattgaagcaatgaattccgttcttggtctcctgtatgtggaaggaacgccggttaagcaggcacttcgaggagatgagaggcgaacggagcgagcacagttggaggcgggcctgaggctgatctacgaagcctacatgggtagagcgctatacgacggagagagtgctgttttcaaagaagcgatatttatactaattcaatccttctccggaaggacttttagagagatcgtcggcatgcgctacagttcgatctctcgccgcgatgagagggataaagtacacgcagacttttcccagcccgcgaccactctccccgactccgcactgaagagaaggttctcgctctatcctgaaaatacgccaaagagtcgcgttagctatgatgttgtaatgtttgatacatatgactatcttgacaaggttatatcattcagcttgtttgacgtattcgctgctgcagcgcgcatctactacagccaaacaaaggatgagcgcgcacagaagtttattgagctacttagattcggaactaacgatcaggtcactgtgcttttgatgcggtatggttttcttcctgatcagatagaagagctcatcccccatgtcctccgaataagcgatgaggagattgtgttcaagaggagtgtttcggatgtcaaccaaaagctcagacctgtggttgattggtatctataa

SEQ ID NO: 507876 - DNA, 2220 bp, Stenotrophomonas maltophilia
atgagtgctgaagtgatcctggaccgtcagcagaagttgatcacgtggcttgcagcacacgccgacattctcaatggcgccgtcggggcttcgtcgcagtgggagatcgacacgatcgatagcctgaaggaagcgttgttgcgactggacgacgaaaatcgcctgatggacattggcattgtcggccgggtcaaggccggcaaatcgacgctgctcaacgcgctggttttcaacggggagtcagtactgccgcaggcggcgacgccgatgaccgcagcactgaccacgctgacctacggcgagcggttcaaggcgaccgcgcgcttctactcccaggcggatcttgccaacatcgagcaggctgctgctgtgtacagcgacctgcttgagaagtcgctgatcgaagagctgcgacgcacggaagggcgtgcgggcctggaccctgagcgccgaagggagctggccgagcggggtgcccgacgggcactggccacccagcagccgtccttgcaggcctcgcacgaacagtgggcgaagatcacggcgtccggcctttcgctggcccgcctgaaggaggacaagccgctggaggccgacgacgtagagggcctggcggcgttgctggcggactacgttgccgcggaaggtcactacatgcctgtaaccaagagcgtcgacatcgagatgccggtggaggcgctgcgcgggctgcgcatcatcgatacgccggggctgaatgacccggtcgcatcgcgcgaggcacgcacccatgatctcttgaagtgctgcgatgtggtgtttgtcgtcagcccggcagcgcagttcatgagtcaggaagatctggacgtgatggcgcggatcaccgctgccgagggcatccgcgaactggtgctggttgccagccaggtggacaacacgctgcatggttcggaaatgcaggcacagctgcatgcttcgctgaccggtctgcggcgggagcttgcgggccatgcgggcaaggtgctggataagctgaagctctccaaccccgaggttggcgatgtattccagagcctggtggacaagggtgaggatgcgatcatccacagttccggcatgtgccattcgatgtccgtcgagttcgacagcgtggcggattggcaaggtggccgcctgacggcatggcagaacctcaaggaaacctacccggactacttcagggatgacaatccagggctgtcacgcaccaatctcgatcagttggccaacatggccggtctgcatgaggtggtggaacagacccgtctagcgaaagcgcgcgtgctggccgctcggcgccaggacctgctggatgccaaggagcggaagcaggtcgaactgctgcgtgagctgcgcaagaagctggcgttgcgcgcaggtgacattggcgatgtgggcctgactgatctgaagaagaacaaacgggcgcttgagcgcaaacggatcgatctcacgcgcgcgctcgacgaaaaactgatgcgggtgagtagagactttgtcgagcatctcgaagcttccatggaacgcgtcatcgattccgcattcgacgctgccgattccggcgtgaagcgcacggttggaaccgagacccggaaagttcgagtcgagtctcacggtgcactcaactggctcgccaagaagctatgggacggcggctatcgtgaatacgacgagaccgaggcaaccatcctgccagcatcggtaaaggcttcggtgtcggctttcgcaagtaagctgcggaccgatctcaacaaggaagcgaggcatgagcaggtcaagtttgacagagctctgttttcggagttggtgagcacggcccgtaatgaactgggcgatgaattggacattgaagctgtctactcagcactcaagagcatcgtcaatagcgtggattttcctaaagttttgatccgagcacctgtgctgggcacgccggcagcgaccgtgaagttgagaggcgagcaggcgggccagtatctcgcggaagcaatgcatgcaatacacactttgcagaacgcggctcaggatgcggtcagcggctatgtggagggcgtctggtcgaaaattcccaagtctgttgctggcgagttcattggatatatccagtcgcagttcgatgcgctgcagaagttgatggaggaagctgaaaagacgcgggcgacactgaccatgatggatgcggagttggaggcaatgcagtga

SEQ ID NO: 507877 - DNA, 576 bp, Stenotrophomonas maltophilia
atgctgggtacccatcgctggctgcgtgccggcctgttcttcatgctggcgggcgcactcggcggctgcagcagccgcgtaccggacgcgccggagccgctggatctggtcaaatcgatcgacgttgccgaacccggccaggaggtgcggttcgaattcgagacgaatgcccgcaacttctatccgggtcgcacgtatgcgctggagctggaagttgagcatcaggggccggaggacacccgcgagccgagtatcgccacgatgcagatcccctttgaggtgtccctgcagcgcttgaccgcaggtgcttggcaggacgttgcgacctacgacagctaccaggcaatggctcgcaacgcgggggcagcacttccagaatggcatgcatccagcgaatggcggtatacgtcgccgcacatgggcagtgacggccagtacacgctgagcttggttgctctgccactggaaattgactcccgctaccgcgtggacgtgcgtacggtgcagaggacagaggcactgcaggattactcggcccgtttgcgggtccatgccgcccgtcccgctggaaagtaa

SEQ ID NO: 507878 - DNA, 759 bp, Stenotrophomonas maltophilia
atgaacctgcacatcgacaacggcgaaggacggatcaccgcgcgcctgaccccctgggacgagcgcgccctgggcttcgtcaccgcagaggtgaccgtactggacgtcgccaccttggcacatgcagcgccattgctggtcgaactcgagcgttggtgcgccacccactcggtgcgctacctgttcggccgcatcgatgccacacaaccggtggccaaggcggtcctgctccagcacggattcgccttcgttgagacctcattgaccgtttcgcgcagcggcttcgccaacctgccccaggttccgcgcggcatgctgccgacgctgcgtcccgcgaccgctggcgatgtggccgagctgcggcagattgccgccaccgacttcgcgcacggccgcttcctggaagatcccgccatcgatcctcagcgggccgcggtacgcaccgccaactggatcgaagacatggtcaccgggggcctggcctacgtggccgaatcgcgcggccgcgtcatcggcttccatgccgaacgtgttgctgcagaccgcagcaactgcgaactgctgttgaccggcgcttcaggcccttacgccatgctggccctcccgttgtggatcaccgcgctcgagtcgttgggcgcgcgtggcatcccgcactgtacgaccctcgtttccgccgcgaatacgggcatcatcaatctgtatgcccggcttggcttccacttcaacagcaccctgtttgggttcaggaaattcctatga

SEQ ID NO: 507879 - DNA, 1401 bp, Stenotrophomonas maltophilia
atgccgttctggaaccttgaacaacacgggtcgcggatcgcgctgatcgatggcgggcagacgctggacttcgcgtcgctggcccgcctttccgaccagcacgccgcgcggctgcccgaaagacgcggcatgggtttgctgtgcatgcccagccataccgaggccgtggcgctttacctgggcgctctgcgcagcgggcgtcaggttccgttgctgctgcaacccgacaccgatccggagctgctggcggcgctggtggcgcattaccagcctgactgggtcgccgccgcggttccggcgccggatggctaccagaccgtgcaccagggccaggcgctggccttgcatctgcgcggcgctggcctggccaacgaggtaccgcacgccgatctggcgctgctgctgagcacctccggcagtaccggctcgtcaaaactggtgcgattgtccgctacgggcctggacaccaatgccaatgccattgtccagtacctgggcctgcgtgccgatgatcgtgcgatcactacgctgccgcttgcttactcgttcggcatgtcgatcctcaacagccaccttgccgctggcggctcagtggtgctgagcgatgacagcctgatgacccgcgagttctgggacagcgcccgtcgccatggcatcacctcgttgtccggcgttccggccaccttcgagatactgcggcgcatgggcctggcccgcctgcagctgcccagcctgcgcatgctgacccaggccggtggtcgcctgcgcgatgagctggtcgcccatttcgccgaatccagccaggcccatggcctggagttcttcgtgatgtacggccagacagaggcctctccgcgcatcagctatgttccggctgcacgcatcatcaacaaggtcggcagcatcggcgtgccggttcctggaggccgcatggaagtggatgccgcgagcggcgaactggtctattccggcccgaacgtgatgatgggctatgccaccacgcgtgccgacctggccaagggtgacgagctgaagggagtgctgcacaccggcgacctggcccgcgtcgacgaggacggtttccattacatcaccgggcgcgccaagcgcttcctgaagatctccggcaaccgggtcaacctcgacgaagtcgaggccatgctgtcggcagtgctgagacagcagatcgtatgctcgggcagcgatgacgatctggtggccttcagccacggtgcccaggtcgccgagcaggcgcaggtacgccagctggtgcaggaacgctacaagctgttcggtggccacgtccgtaccctccacctggatgcgctgcccctgatggccagcggcaaggtggattaccagagtctccggcagatggccggacaaggagctgcaaggtga

SEQ ID NO: 507880 - DNA, 627 bp, Stenotrophomonas maltophilia
atgtcgcagaagaccgatgggttgcacgcagtgctatcacacccagcggtctacgacctgctgcagaacctgttgggggcccgccgctcccgcgcccggctgatccgcgatcacatacggccgcgtgccggtgaccggattctggacatcggctgcggcacgggtgagcttttcagccagatgcccgacggcctgcattacgtcggcttcgatctctccgaagcctacatccaggcagcccgccagcgctttgatggacgtgcacgcttcgagtgcatggacgtggccgactaccagctggccggtggcgagcagcagcaggccgatctggtactggccatcggcattctccaccacctcgacgacgaccgcgcccgcgcactgatgcgtacagcgcgcgctgcgctcaagcccggtggccgcttcatctcccttgacggtacctatgtcgaaggccaatcagccatcgcgcacgcgttgatcgcgcgtgaccgcgggcagagcatccgcacccccgacgcctatcgggccttggccgaagccgaattttcgacggtatcgggccgggtcaggggcgatatgctctacgtaccctatacccactacatcatggaatgcgtgcgctga

SEQ ID NO: 507881 - DNA, 237 bp, Stenotrophomonas maltophilia
atgagcctgctggcctggatcgggatattcgccgcctggagcctgttcgccacctgggtgctgcgctggggtggcgcggcctggatggaaggctggaagtcgctggccttcgtcgacagctggggcagcctgtgggacgaagcgcagatcaagctgtacttcctctgcctgtggatcgtctacggcctgtggttcctggccggcctgttcgtgccggagtggcgcggcctgccgtga

SEQ ID NO: 507882 - DNA, 342 bp, Stenotrophomonas maltophilia
atgaaagcggtgagtgcggtgctgggtgtcacgacggtgatgacgctgcttttttccctggcgggcgaatcgagagcaggcggcgtgatcgagtgcaacaactgcccctctcccagcgatgcggccttggcctcgggagagggattgacggttgtggtggatttcgagagagccgagttgactgctttcgacgttgaacgtgccgctgggaccggaaggtggcgagcacatccaaccccggttccagcgcagattgaaatggcctttctgcggatcctggatgcgacgctgtcagcaggggaagcgccgctcatgcagcaatcaccgcatgagcggcagtga

SEQ ID NO: 507883 - DNA, 435 bp, Stenotrophomonas maltophilia
atgcgcacccgcacgaaactcggtctatcgctcgtggccctgttctcttcgctgccgctgatggtcgctacaggcaatggctacttcatcctgcttctgctgatcggcctgcccgcagcgatcctgttctggttcgatctgggccgtgaactgcgcgccatccccactcctacccgctccgagcgcgcgctgggattggcaatgggcattccacaggtgctgttcggactgttgtgcgcggggatcggcctgatcctggtggcctggatcctgtacaacctgctggtccaaacgctgccacagttccgcattccctcactgcctggtttcgcggtcgggccgatgatgatcatggccgggctgggatgggcacgcaccgcgttccgccgtgccagccttgaacaggatgacccggaacaggacattccggattga

SEQ ID NO: 507884 - DNA, 789 bp, Stenotrophomonas maltophilia
atggacgacctgacctataccttgcgccagctctgcctgcgcaaccgcgacggcagccacgccacccaggctgaccggcaacggtcgctgagtctggccgcacgccaactgcgcgaagcaggtttccgccagatgcgggccatctcgctcaaaggcaagcatgtcgaagccctgttgcagcgttggcaagccgaaggcctgtcggcaggcacgatcaagaaccgcatggcgcacctgcgctggtgggcagagaaggtcggcaaggcaggcatcctgccaacgaacaacaccaggctgggcatccctgaccgtcgctatgtgaccaacgaaagcaaggccaaggaattgggcgacggactggacagaatctccgatccacacgttcgcatgagcctgcgcctgcaagcggcctttggcctgcggcgggaagagtccatcaagttccagccccgctatgccgaccgtggggatcacatcgccatcaaggggtcatgggccaagggtgggcgcgaccggacagtgccgatcacgacgccggaacaacgtgcggtgctggacgatgctcaccgcctagctggttcgggctcgctgatcccgacgcacaagacctacatccagcaacggcatgcctacgacggccagtgcaaggcagcgggcctgagcaacatgcacggactgcggcatcggtacgcgcagatgcgatatgaggcacaaacggggtggaaggcacctgcggcgggggggggcgccgactgcggcgctgacacacaaacaactcgcccaagataa

SEQ ID NO: 507885 - DNA, 3099 bp, Stenotrophomonas maltophilia
atgtttgattacaaggccatcgctgagtccaagaacttcatcgtcctcgaccagtacacccgggagtggaaggtctctgagcactaccaaagcgaaagcgatctggagcgcgagctgatccaagatttggtcaatcagggctacgagttcgctcagttcatcaggacccctgtcgatctgctggccaacgtacgcgtgcaactgcaggcgctcaatgccgtgcagttcaccgacggtgaatggctgcggttcgtcgaatcttggctggacaagcccagtgatggcattgtcgagaaaacccgcaagattcacgacgactacatccacgattttgtctttgacgacgggcgcatccagaacatctacctgctggacaagaaaaacatcacccgcaacaaggtacaggtgatcaagcagtttgagcaggcaggcacgcacgccaaccgctatgacgtgaccatcctggtcaatggcctgccactggtgcaggtggaactgaaaaagcgcggcgtggcgatccgggaagccttcaaccaagtgcaccgctacagcaaggagagcttcaacagcgagcactccctgttcaagtatctgcaactgttcgtgatctcgaacggcaccgacagccgctacttcgccaacaccacgcagcgcaacaagaacagcttcgacttcaccatgaactgggcgaaggcggacaacagcttgatccgcgacctgaaggacttcacggccactttcttccagaagcacacgctgctcaatgtgctgctgcattattcggtgtttgacgtcagcaacacgctgctggtgatgcggccttaccagatcgccgccacggaacgcattctgtggaagatcaagagcagccatcaggccaaaaactggagcaacacagaaagcggcggcttcatctggcacaccaccggcagcggcaagaccctgaccagtttcaaggccgcgcgcctggccaccgagctggacttcatcgataaggtgttcttcgtggtagaccgcaaggatctggactaccagaccatgaaggaataccaacgcttctcgccggacagcgtgaacggctcggatagcacggcaggcttgaagcgcaacttggagaaggacgacaacaagatcgtcgtcaccaccatccagaagctcaacaacctgatgaagagcgaggcagacctgcccatctacggcaagcaagtggtgttcatcttcgacgagtgccaccgcagccagtttggcgaagcacagaagaacttgaagaaaaagttcaagaagttctgccagttcggcttcaccggcacacccatcttcccggagaacgctttgggtgccgagaccacagcgagcgtgtttggccgtgagctgcactcgtacgtgatcaccgatgccattcgcgacgagaaggtgttgaagttcaaggtggactacaacgacgttcgtccgcagttcaaggccatcgagaccgagcaggacgagaagaagctgagtgcagccgaaaacaagcaggccctgctgcacccggatcgcatccgcgagatcacccagtacatcctgaacaacttccggcaaaagacccatcgccagcatgcgggcaacaagggcttcaacgccatgtttgccgtcagcagcgtggatgctgccaagctgtactacgagtgcttccgcgagttgcagaagaccagcgagaagccgctgaaggtggccaccatcttctcgttcgccgccaacgaagagcaggacgcgattggcgacatccaggacgagaactttgatgtctcggccatgaacagcagtgcaaaggagttcctgagcgcggccatcgccgactacaacgcgctgttcaagaccaacttcagcgtggatagcaacggcttccagaactactaccgcgatctggccaaacaggtgaaggccaaggaaatcgacctgctcatcgtggtgggcatgttcctgactggttttgatgcgcccatgctcaatacactgtttgtcgacaagaacctgcgcttccacggactgatgcaggcctactcgcgtaccaaccgcatctttgacgctaccaagaccttcggcaacatcgtcacgttccgcgatctggagcaagcgaccatcgacgccatcaccctgttcggtgacaagaacaccaagaacgtggtgctggagaagagctacaaggagtacatggaaggcttcaccgatgcggctaccggcgaggcacggaggggcttcaaggatgtggtgcaggagctggaagagcgtttccccgaccctgcggccattgagaaggaggccgacaagaaggcgtttgccaagctgttcggcgagtacctgcgcgtggagaacgtgctgcagaactatgacgaatttgccagcttgaaggagttgcaaagcgtcgatctggccgacgctgccgcagttgaggcgttcaaggccaagcactacctgagtgacgaagatctgaccgcgctgcaagccgtcacgctcccgcccgagcggaagattcaggactatcgctcgacctacaacgacgtgcgcgactggctacgccgagagaaggcgggggccgagaaagagaagtccaccattgactgggatgacgtggtctttgaggtggacctattgaggtcacaggaaatcaacctggactacatcctggaactgatcttcgagcacaacaagaagaccaagagcaagactgaactggtggatgaggtgcggcgtgtgattcgcgccagcctgggcaaccgcgcgaaagaaagtctagtggtggacttcatcaaccagaccgatttggaccagatcggtgacaaggccagcgtgatcgatgcgttcttcaagttcgcccaggctgagcagcagcgtgaggcgcaggagttgatcacttcggaaagcctctacgccgaggctgcgaagcgctacatcatcacctcactcaagcgtgagttcgccagcgaaaacggcaccgaactcaacgcggttctgcccaagatgagcccattgaacccgcaatttctgaccaagaagcagactgtcttccagaagatcgcggcctttgttgagaagttcaagggtgtaggtggatcaatctga

SEQ ID NO: 507886 - DNA, 1317 bp, Stenotrophomonas maltophilia
atgggaaagacactcgcgcagattgcgcaacagctacaagatgccaacaaaaaggtgcaactaatctatgcattcaacggatcaggcaaaactcggctatcccgggcgttcaaggatttaattgcgccaaagaactccgaggatcacaacggaggagaagtagacccgccgcggaacaagatactttattacaacgcgttcactgaagacttattttactgggataacgacttagacagcgacattgaacccaagcttaaggttcaaccgaatacttttacggactggctaataacgatactccaagatttgggtgaagacggcaacattgcatcaaactttcaacggtatacgagcagcaataccaatccggtattcaatcaaagatatacaaagaagattagaaattttgacgaacaagagattgacttggtcgtgccagccttttcggaaatttctttccaggtgcctatcaataagcctgttgtcgccgctcaagccgattcggaagcaagtgttgtcgatgccccaattcagggccaatacgaaataataaaagtctccaaaggcgaagaaagtaattttatttggagtgttttgtatacgcttttggagcaggttgtattgatacgtaatgaggggaatgtagcaaataggatcaccgataaattcaacagcttgaagtatgtttttatcgatgacccggtaagttcattggatgacggtcatctcatagaacttgctgttgatttggctggactaattaaaaaaagcgcctatgttgatggccatggattgaggtttgtgataacaacgcacagccctcttttttacaacgttttgcacaatgagcttaacaacgatttaaaaaaacgcaatcaggatggcagttcatcctggatttataagcgtgggcaatctgagaaatacaggctggagaagaaggccgatggaaattttgatttaatcacgtctaatgaccaccctttctcttatcacttgttcttgctggcggaattgcgatccgccataaaggacggacagataaagaagtatcacttcaatttcttgagaaacattctcgaaaagacggcgacatttctgggttatctacgatgggaagatttgcttcagacgacttcagatggtgtgccggacccatttgcaaacagaatcctgaatctgtctagtcattctgcacacgcaggtgaagaagtggctgagatagaagaatctgataaggaaaggcttgctcagctggtttcatttttaggcgacacctaccgtttcaaaaagcaggaggccgaaaatgtttga

SEQ ID NO: 507887 - DNA, 1200 bp, Stenotrophomonas maltophilia
atgagcgacgtgaacttcttggtcaagattttggacgaagctgatgttcagtggcggccactgggagaaatctcgtctttctacggggggcttactggaaaaagcaagaaagactttgagggaggatgtgccaagtatgtaacgtacaaaaacatcttcgcaaattcaagcattgatttttcctgccttgaaaatgtgaaggtgtcagaatcagaaaagcagaacagcattaagattggtgacgttttgttcactggatcttccgaaattgcggaagaagccggtatgtcctcggtggtcgtcgaggatttcgaaggtccgatctatctaaacagtttttcttttggggtcaggttcaaccaagacgtccctctgagtccgggctttgtgaagcatctttttagaagtagcttcatgcggatggaaattgcaaaaaccgcaagcggcgtcactcgcttcaatatttccaaagagaggtttaggaagatacaagtacccatcccctgccccgacaatccaaaaaaatcgcttgaaatccaagccgaaatcgtccgcatcctggacgccttcaccgagctgaccgccgagctgaccgctgagctgactgcccgcaggaaacaatacaaatactatcgtgatcagttgttgagttttgacgatagtgacgttgagtggaagaccctggaagacgttacaagaagtattgcatcaggacgaaataaggatcgagccacagatggtcctatcccagtctatggatcgacaggtttgatcgggttcactagcgaagcagcatacttgggcaaagtacttctggttgcgcgcgtcggtgcgaatgccgggcgagttaatgcagtgtccggaacctttgacgtatccgacaacacgctcatagttcgccccaaagatgaatggaatattcgtttcgcatttcatcaactaacgcaaatgaatctaaatcagtacgcagtgggtggtggacagcctctagtgacgggcggccttttaaaaggattaaaaatcccatttccttcaatgttcgagcaacagcgtattgcgggcatccttgataagttccacgccctaaccacatccctaactgaaggcttgccccacgagatcgagctgcgccaaaagcaatacgagtactaccgtgatctgctgatgagctttccaaagccggaagaggtgaaggcataa

SEQ ID NO: 507888 - DNA, 1560 bp, Stenotrophomonas maltophilia
atgacaagcaacgaacaacgcaccgcactacagcgcaagatctgggatatcgccaatgacgtccgcggtgccgtcgatgggtgggacttcaagcaatacgtgctgggcaccctgttctatcgcttcatcagcgagaacttcatcgactacatcaccggcggtgacccttctgtcaattacgccgccatggcagacagtgatccgaacatcgcggccgccaaagatgacgccatcaagaccaagggctacttcatctaccccagccagctcttcgtcaacatggcggccaacgccaacaccaacgagagcctgaataccgatctggccaacatcttttccgccattgaggcctccgccaacggctacccctccgaacgcgatatcaaaggcctgtttgcggatttcgacaccaccagcaaccgcctgggcaacaccgtcaaggacaagaacgatcgtctgtccaaagtgctcaaacgcgtggcggagctggacttcggcggtttcgatgccagccacatcgatctgttcggggacgcctacgaattcctgatttcgaactacgcggcgaacgcgggcaagtcgggcggcgagtttttcacgccgcagcatgtgtccaagctgatcgcccagctggccatgcacaagcaaaccagcgtcaacaagatttatgaccccgcctgcggctctggctcgctgctgctgcaagccaagaagcacttcgaccaacacctgatcgaagacgggttctttgggcaagaaatcaaccacaccacgtacaacctggcgcggatgaacatgttcttgcacaacgtgaactacgacaagttcaacatccagttgggcaacacgttggaggagccgcatttcgctgacgaccggccatttgacgccatcgtctccaacccgccgtattcggtgaagtggatcggcagcgacgaccccacgctgatcaacgacgaacgctttgccccggccggcgtactcgcgccaaagtccaaggccgactttgcctttgtattgcacgcgctcagctacctctccagcaaaggccgcgctgcgattgtctgtttccccggcatcttctaccggggtggggctgagcagaaaatccgccagtatctggtggataacaactacgcggaaaccgtgatctcgctcgcgcccaacctgttttacggcacaaccattgcggtgaacattctggtgctggcgaaaaataagaaagacaccactactcagttcatcgacgccagcgggctattcaagaaagaaaccaataacaacgtcctgctggattcgcatatcgagcaaatcatggcggtgttcgacagcaaggaaaatgtcgatcacttttccaaatcggtgcccttggagcaggtggcggccaatgactacgacctctcggtcagtagctacgtggaacccgaagacacacgtgaagtggtggacattgctcagctcaacgccgagctgaaatccactgtcgccaggattgaccagcttcggagggatattgatgccatcgtcgctgagattgaaggcgaggagctggaggcatga

SEQ ID NO: 507889 - DNA, 1638 bp, Stenotrophomonas maltophilia
atgagccaggaagggcaactgctcgaccggaagtcgctgcgcgcggtgttgggcaagacagccgactggggcgaactggtcaaggactgcgtggctttcgccaatgcgacgggcggccacctcctgatcggtatcgaggacgaccaggatcagccgcctgcaggccagcaagtaccgatagacctgccggacacattgcggcgcaagctggccgaacgcacggtcaatgtggtggcgctccccgacatcgtgaccgccgccaatggcggccaatatatcgacctgactgtcccgcgcgctgctgctgtcgcctcgaccaccgacggccgttacttcctgcgcgtcgcagaccagagcaagccggttaccggtgacgaggtgatgcgtttggcaaccgagcgcagcgcgctgccctgggaaacccagaccaccctgtacatcccccgcgcggagcgcgacaccgcccagttcaaccgcctgctgaacgccctgcgcgcatccgaccgcgtcaaagcatctgtcaaggaaaaggatgatgaggaactgcttgatcactaccagcttgcacaaggccagtacctgacccacctcggcatcctgtgcatcggcaagcagcagcaccgggcgcaactggcaaccgcaccagtcatccagttcatcaagtacgacgaacatgagcagaaggtcaacaaactgccttgggacgaccacacgttgaacccgatggagctgatcgaggccgtctggcagggggtgccggatttccgggagcgttatgaactgcccgatggcctgtaccgccagaacgtgcctgcattcgatgagatcgtggtgcgcgaattgctggtcaatgccctcgtacatcgcccctacacccagcgaggcgacatcttcctgaacctgcaccctgaccggcttgaagtcgtcaatcctggcctgcttcccttgggcgtcactccacaaaatatcctgcacacgacggtacgccgcaacgaacaccttgcgcgcctgttccacgacctcaagctgatggagcgggaaggcagtggcttcgacaagatgttcgaggtgctgctgtcgcaaggtcggcccgcgccggaactgtccgaacggcatgatcgcgtgcaggtgacggtgcaccgtcgcatcatcaagcccgaagtcatcgacttcattgcgaaggccgaccagacctatcagttgacccagcgcgaacgcatcgctctggggttgctggcgcaacatgatgccctgacagcccgggaactggcccaggcgctggagcttccatcggtcgaatcgctgtccgcgtggctcaaacgtccgctggaatggcagctggtgcgtagtgtcggccgaacccaggccacgcgctacttcattgatccggaactgttgcgcagcctggacttctccacgtccaccacgctcaagcgcatcgagccgcaccgcttggcagcacttgtacttgaagatttgcagcgctatccaaggtctgcgatcagtgacatacataaacgcgttggcggggagattcatcccaagcaagtcaagcgcgcgctggaagagctgatcgggcgcggggaagtccgctttgagggtgacaaccgctggcggcggtactgggccgtggcatga

SEQ ID NO: 507890 - DNA, 258 bp, Stenotrophomonas maltophilia
atgccaagcatctggtttccatccctggcatcgctggctgctgtgctttccgatgacaaccgccgtctgctgcgcctcattcacgacaggcaacccaagtcccttacggaactggccgaactcagcgggcgcaaggtgccgaacctgtcgcgcacgctgcgaatgatggcggactatgggctggtttccctgcaacgcaatgtccgggacgttcagccaaccgcgttggcgaccgaattcctggtggtactggattga

SEQ ID NO: 507891 - DNA, 1206 bp, Stenotrophomonas maltophilia
atgtctctcacagacaccgcactcaaggcgctcaaaccccgggacgcctcatacatcgtcagcgacgatcgcgggctgtacgtcgaagtgctgccgagtggcagcatcgtctggcgttatcgctatcggctgagtggcaaacgcgagaagctcactctgggcaagtacccggccctcaccctgaagaatgcgcgcctgaaacgggacgaggcggcgcatctggtggcgctgggccagtctccggcgcagaaaaagcagcaggagaaggtaaccggcgcagaagacgccaccgtggccgaattcgccgaacgcttcttcaaggacatccagtcacgcgaccacaagaacgtgaccatgccccgccgctaccaagaaaaggacatcctgccgcatatcggcagcaagccgatccgggacatcaccgccgaggatgtgcgcagcgtcatctggcgcaagaaggagcaaggcttcgatgccgccgccggccaggtgcgcggcctgctcaagcgcatgttcgactacgcactgacctgcggcctgatccaggccaatccggtcatggccctgccaatgcggcacgtctaccgcgccgccgcccgcgaccgggcgctgacgccagacgaaatccgtcagttcctgcgagccatgcagacctccaacatccgccgccagttcaagatcgctttccagttgatcctgatgacgctggtgcgcaagtccgagctgatgctggcgcagtggaaggacgtgcatctggacgaaggcgaatggcacatcccggtcgagaattccaagaccggcaagccgcacatcgtctacctgtccacccaggcgcagacgctgttcaaggagctcaagccgctcgccagcagcagcgtctgggtgttgccgggccgtggctccctggtcaagcccttcgccagcaatgcgctgaaccaggcgctgaaggtgtcgttgcaggggcaggagatccccgccttcaccatccatgacctgcggcgcaccgcatcgacattgctgcacgaacagggttggccttcggatgtggtggaaaaggcgctgaaccacaccatcggcggcgtgcggggcgtctacaaccgggcggagtacgccgagcagcggcgggagatgttgcaggcgtgggcggattacatcgacgggttggtgccgtcgggaaatctggtgatcggtgctggttcggcttga

SEQ ID NO: 507892 - DNA, 285 bp, Stenotrophomonas maltophilia
ttggtttcggttgcccaggtcaaggaatggcgggaggccggtgctcgccagcaggctgcgctggagctggcgggcgcggtgccgctggttctggctgtggccaccgacgttgcgtggcgccaggcaacgggtttggacaaaaaacggctggccggcgtgcttgcagcaacctggtacgtgcaggcctcgggcttgctcgattacctgcgggagcaatgccccgaggtgcctgaggtggacgcgataccgcatgaaatcgatgcgctgcggaaaatcgcacgctag

SEQ ID NO: 507893 - DNA, 990 bp, Stenotrophomonas maltophilia
atggatcacctgcagttcgccgccctcgcccgcgctcgcgccgcgcttgacgttatgggtgccggagagagcgccagcgccaaggcaacggccttcactgatattgcgttctcgatgctgctgcacaccaaggcatcgctgcccaacatgctgcgcaaccacccgtcgcagcttgtgcagaaggcagccgctcacgccttcagcgacgacgtgtggtccaacgccgatgctgctgctctggctgctgcctatatcggttccatcgctgaaggttcgctgctggaccagattgtccgatatggcaaccagcttcctctcaagctcccccacgtgctggttgccagcggtttcagtggcgacgtgatcgccgagggcgacccgaaggtggtcaagagcctgaacctggaagtggccgacaccagcaccaagaaggcggctgccatccttgtgctgtccaaggagctggttcgcgctgctggtggccgcgcgctgtttgagggcgagctgcgcaaggcggtcacccgagctatcaacgcctcggtgctcggccagctcaccgacagcgaaactgtcagcatcccggccgccggcgatgcgctggccaaccttcgcgccgggctggccgcagctgggccgtccgaaggctacgtcgtggccgcgccagccactgacgtgctggacctctccctgcggctggagaatcgcgggggcatgggtgttcgtggcggtacgttcgtgcctggcgtcgaggtggtggcgatggacgatcttgaaggcatgcgcgtaatcccagcctcccaggtctcggtgctggatggcggcctacaggtgcgcagtggtgaacaagccaccgtgaccatggtcgacgcgcccaccagcccggcggagattgtcagcctctggcagaccaaccaggtgggcctgctggcggagcgcaatttcttcatcgctcacgctgcaccgatggtgatcgtcggcgggagcaactga

SEQ ID NO: 507894 - DNA, 339 bp, Stenotrophomonas maltophilia
atgaccggccttgcgaagattggcaccgcctaccaggaggcgctcaaggccctggcggagcaggttgcgcggacctaccgcgaggcctgcagtgaattcgtcgtgtctgccgggttgatccagggcaacaccctcgccgcaatcacggtgaccttcgacagcaacggcgccgaatgctgggtgccgatggagctggccggcgagccgtggacggacgaacgccgttcccgcatcgaggccgatacgcgcgcggtgcttgctggccgcctgctggccgaacacgaggcagccgccctggtggcagagcgcatgcagggggtgctggatggatatcgttga

SEQ ID NO: 507895 - DNA, 1437 bp, Stenotrophomonas maltophilia
atggatatcgttgaaaaggcacgcgcgctggtggcgcgcgcgaaggctgcagtaggcagcgtgatggcggttcccgagcagggcaacgcctggcagcgcgtcaatgagccgttcaccggtgcatggcagcgcaaccagccgctggtcactgagcgcgacatggagacgtacagcacgatctacgcgtgcatgtcgcggatctccaccgatatcggcaagctcccgttcgctctcaggcgccgcgacagcaacggcctgtggcgcaacgacacccaccaatcagtgagcccgctgctgcgccgcccgaaccacttccagacgccagcgcagttccgcgaggcgtggattctgtccaagctgcaggcgggcaacacctacgtgctcaaggggcgcgacgagcgcggagccgtatcgcagctgtgggttctggacccgcaccgcgtggagccatgcatttccgactcgggcgacgttttctaccgcgtcaagtacggccgcagcgagaacctgttgccggagcgctacagcggtgacgagctgacaatcccggacacggaaatcatccacgaccgtgaaatgcccctgtttcaccagctggtgggcgtggcgcccctagctgccgcttccctggcggtacgcaagaacgtgcagatccagcgcaacgccgccgacttcttcgccaacgctgcgcgccccggcggtctgctgacggcgccggcgggcatgtcggacgaggacgcggcggcggtgaaggaatactggaactcgaacttcagcggtgccaactcaggcaaggtgggcgtgatcggtgccgacatgaagtttctatcgttcgccttcaacgccgtcgactcgcagatggtcgagcagctgcgctattcggacgagcagatgtgccacgccttcggcatcccgccgttcaaggtgggcatcggcacgattccggccggcctcaaggtcgatgacctgaaccagatgtactacgccgacgccctgcaggcccgcattgaggccatggaggactgtctggacgcagggctgcggctcggtgatgacgtgggcgtggagctggacctggaaccactgctgcgcatggacccgggcaagcaggccgatgtgcacgccaagctgaccggcggcggcatcgaggcgccaaacgaggcgcgccgcaagttcggcttggcaccgctgaccggcggcgacagcgtgtatctgcagcagcagaactacagccttgaggcgctcgctcgccgcgacgcctctgccgacccgttcggcaccggcccgagcgatgaacgcgcgctgcgctcgctgccgccgccgctgaccgccaagcggaaggtccgctacaaccacgacgacggcaccttcgacgtggagctgtcgaacggccaatggctgcgccgcgtccgccgcgaccagctcgccgccgcctaa

SEQ ID NO: 507896 - DNA, 2493 bp, Stenotrophomonas maltophilia
atggcacgaagtctcggaaccctcaccatcgacgtgatcgccaacgtgggcggcttcgtcgcgggcatggacaaaacagagcgggcctccgacaaatggcgtcgcagcgtggagaaagccgcgtaccaggtgggctttgccatcggcacagccgcgaccgcggctgtgaccgccctggccgggatcaccgttgccaccatccgacaagccgaccagctcaccaggctggcccaagtggctggctccaacaccaccgagtttcagcgcttcgccgccggcgctcgctcgctggggatcgagcaggacaagctgggcgatatcttcaaggacgtgaacgacaaggtgggcgacttcctgctcaccggcggcggcgagctggccgacttcttcaagaacatcgctcccaaggtcggggtaaccgccgagcagttccgcaccctgtcgggtccgcaggcgctgcagctgtacgtcagcagcctagagaaggccgggctcacacagaaccagatgaccacctcgatggaggccatcgccaacgacgccacgatgctgctgccgctgatgcgcgacggcggccggctgatgaacgaatggggcaaccgcgcccaggacttcggggccatcctggacgacgatgccatcacggccctgcgcggcatgcgcaccgacacggccacggcaaacctcgcccttgagggcatgaagaacacgctggtgtcggagctggccccggctctgtccgacttcaccaagcagctgaagagcgaggaatctcgcaaggcactgcaggacaccgcccagggcatcggcgcgatcgctgcgcaggccgcctacgcatcctccgagatcctcggtttggcgggcatgtacacgaactggcttcgtggcaagggcttcctgccggtcaacgagcgcagcgacgtggaggacctgaaagcacgtcagaaggcgttgcagcagtcgctgggcagctggacgggcgtgtttggcgatgacgccaagggcaaggttcagaaggaggtgcagcagatcgcaaagtggatccaggaggcacagaaccgtgggcccaaggtcacggtgctggagaacggcgagatgctgcccgagtgggcgctcaagcccaaacccaacaagcccaagcccactggcaataaaaccgacgtggacgacctggcccgggcctatgcagcggcctcgctggagtttgaacgcagcatcgccatgttcgaccagagcgcggacggttcggccaaggccaccgagctgcagcggctcaacttcgacttgctcaagggttcgctcaagggcctggccccggagctggccgagaacctgcgcagccaggcggcggtgctggacagcctgcacgcccagcgcgaagccgcccaggaggccgccaaggcgacggaatacctctacggcctgcaggaggagctggcaacggcgcgcgctgcgctcaacgtggacgtgctgggtgccggcatgggccagcaggagcgcgaacgcgcccgcgcgctgctggggatcgaggaggactaccagcgcaagcgggcggacctgcagcggcagtaccaggccggggagatcacccaggcgctgtacaccaccgagactgaaggcctcagcgaggccctgcgcgaacgcctggagctgcagcgcgactattaccggcaggtagacgccctgcgcgacgacagcatggccggtatgcgggatgcgtgggccgactatgcgaccgacgccaccgactacaacaaaatggcctacgaggcgaccaagggctttctcgacaccaccaccagcgaagtgggcaacaccatcgcggagctggtcaagggcaacgaaagcctgttcgactcggtgaagaacctggccgtgtccatgggcgagacggtcatcaacaccctgtcgaacatggccgcgcagtggctggtttaccaggtggtacagcggacggtcggagagtccacttcgaagcagtccacggccacgctggcaggcaacgcggtggccaccgcagcccaggccgcaatcgccgcctacgcgtcgacggcagccattccgatcaccggccccatcatggccccggcggcggcggcggccgctctgtcggcgaccgcgccctacgtggctacggtggtggcgtcctcgggcctggccggcatggcgcacgacggtatcgatgcggtcccggaaaccggcacctggctgctgcagaagggcgagcgggtcaccacggcggcgaccagcgccaagctggatgccaccctggatcgtgtgggccgcgacgtggatggcggtggcagtcgccagctgcagcagaacatcacgatcaacggtgacccaagcacccgcgaccttgagcgatacaaggcagcgatgcgagagggagcggacttggcgtatgccagggtgcagaacgacattgcaactggaaccggcatcggcaagacgctgcgggcgagcaacaacgtgggccggcgactcaggtga

SEQ ID NO: 507897 - DNA, 225 bp, Stenotrophomonas maltophilia
atgttctgggccgacgatgagcgcttgcacgcgcagggtgtgcaagcgattacccgtcgagtgcttcttggcaggacgcagtcgcgcaacgtgatgcttcagttgctcgacggagctggccagccacgcctgcagctgcaggtcacgccgaaaggggaggccacgctgtcattcctggatgggcatgcggacatcgcgcgcgtgacctcggcggagcagcattga

SEQ ID NO: 507898 - DNA, 1719 bp, Stenotrophomonas maltophilia
atggccgccatgcagatcccacgtaccctggctgttcttgctctgctgcttgcggcggtggccgcatggctggtcgtgtcgacgccacccgccggcgtggtattcgtgcagggggcgcagatggcacctgcggacgccggggcatccagccccctgcctgcgcggccgccgcaggacctggcctggcgtccgctggatcagcagctgctggcgcagtggcgcggcccgtactggctgcgctggcaggtgccggcgccaaccggcaccgacgatcatgaccgcacgttgcggctgtcgctgcgcgctgccagccagctgtactggaacggcacgccctggatcagcaatggcgtcgtgggccgcaccgctgaagaagaacaaccaggacgcatcgaccttgtccacgtgcttccccccgcttctggcaatgccaccgatgagctggtcgtgcttgcatccagccagcgacaacatttcaccctgcatggcgccgacgcgatggcactgatcgcgcccgcagctgtgctgtatggccagatcatcctgccatggctggttgcggccttcgccatcggcgcactggcggcagccagcctgtatttcctggcggtactgcgtggccagacccgcacgcccggcgctcgccttctgctggcactgggcgtggtgggactggcgttgcctgcagtggaagcgtggcgctccctgctggggtatgactacccgtggcatgtcccgcgcctgattgcactgctggcattgcacgtagccgcggccatgctcctgccagcctatctggcgcggcgattccaggtggcggttccgcgtgccgggtgcttcgtctatctgtccgtgatcgcggtgctcgccatcgtcctgcctggctttgacacccgctcggcggcagtgctcttgttgagcctgctcgcttcggcatcgctgctgctgcgtgcgcgcggcgacacagaggatagatggccgatcctggcattgctgctagccggtctgctggcgttgctggtcgcgcgcggcgccttccttgatgggccgtacttcctgctgctggcggtgctgatggtgttcctgctgctgcgtcatgcggcacagctgcaggcactggaccggcacaatgcgttgctgcgtgaagagcgcgcacggctttcattgcagctgttgcagcgaggcatccagccacattggctcatgaacaccctcacaagtctgcaggaactgatcgagcaggcaccttcgcgtgccagccgcctggtggagtcgttggccgatcagttcgatcggctgcgtgacagcagcagccggcagagcattccgttgcaggacgagctggccctgtgccgcagccacctggacatcgttggccaggcactgggccagcccctggtgctggacgtggatggcgaggatgcgccgctgttgctgccgcccggcatcctgcatgcacaggtggaaaacgcgctgacgcatgccggtgcgctggcatgcgcgcagcacccgttccgtctgcgcgtgcagcgcggcggtggacgttgggtgctggaactgcacagcgcgcacggctcatcctcgcatcgcggtcgcggcacgggcacgcgctacatcgaagccagtctggcggccgccagccccggcggatggagcttcgtgcaaggcatcgacggcaaccaatggtgcggacggatcgaactgacatgcgcatcctga

SEQ ID NO: 507899 - DNA, 504 bp, Stenotrophomonas maltophilia
atggctaggcgaaagaaggacaaccgctgggatgacatcgatggagggatggccttcaccatcccttacacgatgctcaggcacccaaattacacgcggctcagtccctacgcgcacaagctggtccaggaccttgcacggcagtacaccggcttcaacaacggatacctctgcgcggcctgggcgctgatgcaggaggcgcactggaactctgagaacacggtgaggaaggccgctgcagagcttgagcactatcggattatcgagcgcacaaagcagggtgggcgaaatgcagccacgctctatgcgttcacctggcgccgtatcgattggaagaaggataagccgctcgacgtatcagcaaccgccaagccatccgatagctggaaacaggaacgccctgactacgtccgcagtacaggcagacgcaaggaagcgagggctgccaaaacgcaattagtacagcgccccgtgctgcaacgtgaaggagttgaggcggcatga

SEQ ID NO: 507900 - DNA, 309 bp, Stenotrophomonas maltophilia
atggtgaccaatcagagatacgacgttgtcatcaccctgcaggagcttcatcaccccgcctatgtggcgctgggcactgtcgctcgcgcgctgctcaccgagctgcgcagcctcgagcagccgtttcagatcccagtcgtctcgatcagcgtgcgtgatgcgatgaggcgcctcaacgtgagccagaggccggtagagcgggccttcgacgctcttgaacgccttggttggattgaagagagcaagagcggcccaggccgccggcgtgtcgtgttgctcaagagcccggccgtggactcacatggctag

SEQ ID NO: 507901 - DNA, 258 bp, Stenotrophomonas maltophilia
atgagatttccccggaagaagcccagcacggccccggccaacccactcgacgacttggcgcgcgcccgcgcaaggctggcgtctttcagccccgaagcgctggttgcggcagcggtcgaccccgagcaccggaagcagctgcaggcgacccgtggcgtgatggccgcggcgctggccgagcaccaggcggcggtggccgcgttcgccgacatggtcgagcggctggaccgcgcgctgcagtctgcggtggaggcctga

SEQ ID NO: 507902 - DNA, 204 bp, Stenotrophomonas maltophilia
atgaagcgccgcgccttctacgagcgtcagggcggcgctgccagccctaccgagttcgccttccagttcgtggcttggatgcagtccaggcgcacgccggcgacgcccagcgacctgttggaccggttcggcatgtgccgcgccaccgcctatcgatacctgcgcaagtaccacaacgcctttggccaggagagcctgcaatga

SEQ ID NO: 507903 - DNA, 489 bp, Stenotrophomonas maltophilia
atgagtaggtgccccgaaatagaaacggcccagctggttcgcacccagctgagccgcagaagccacgtccgaaccctcacgaggaacgacttgaccatgggaactactgtacagcaaaccgcgcccgacgccatcgggcaaacccccgaccccaattcagaaaagtcctacgggcctttccgctaccagcactggtcggacgcccattgggaggaacggggcctgcgcccggccatcgaaatgaagctggccagggtagaccgcgcgctgcaatcgataggcagcctgcacgaactgctggtgctgcacttccacgccggcgcggccttcgatgacgaacccgatgcggccggcctgcgcctgtcgagcactcagcaggagggcctgcactgcgccattcggatgctgcaggaggaagccatctgcaccatgggcgacctacgcgacgacaccaacgggtgctggggcaagaagggaggccgggcatga

SEQ ID NO: 507904 - DNA, 195 bp, Stenotrophomonas maltophilia
atgaacgaccgccacgaacgtctgagctacacgaccgaagaagcctgtgctgtcactggcctcaaccgcaacgccctctatcgagcgatggcagctggccagctcaacaccttcaaggtcgggaagcggcgaatggtctccgctcgcgcgctgcgcgagtacatcgaagcccgcgagaaagaagccgccgcctga

SEQ ID NO: 507905 - DNA, 417 bp, Stenotrophomonas maltophilia
atgaatacacccgatgctcaattcaaattgcggctgcctgtcagccttaaagaacgcctggacgaatcagcggagatctctggccggtcgctttcggcggaaattgttcatcgcctggaggccagctacgagcacagggcggccgttgatggtctgcttaaaagcaacttgctgaacttccagcttgcgacagagctgctgaagtacaaccctcgcatggtcactgcggtgagccacctcatggcaaagctcttcgaggatcacaccgttcgcgacaaggtgcttgcgatggccgacgaaggcgagcaaatcgccgtgatggcccgcgatactgcgctcaacaagcttcccggcatcctcgaagatgtgaaagcgaagatgcagtcgatcgttgatgaaggtgacaaggagaagtga

SEQ ID NO: 507906 - DNA, 426 bp, Stenotrophomonas maltophilia
atgaagaaccagaagggcttcacccttatcgaactgatgatcgtcgtcgcgatcatcgccatcttggccgccatcgcgctgccggcttaccaggactacacctcgaagtcgaaggtcaccgctgcactggccgacttggcctcgcacaagacccagttcgagatggtcatcagtgacggcggcaccccgaccgtgacgaattcgggcttccagtccgccagcactggcgcgtgctccgcgatcgaggttgatgagggcggcatgacctgcaccattcgtgatccgggccgcatcggtggcacctccaccatcgcgctgaactacgctgaggcctctggttcgggtgctacggccaccgctggcggtttcagctgcgtcaccacggacgtgctggaaaagttccgtccgaagggctgcactcagtaa

SEQ ID NO: 507907 - DNA, 636 bp, Stenotrophomonas maltophilia
ttgtgcggggcgttcgcgtttctggtgatggacaaaaaagcaccaggctgcgaaacgcttgcggtgcgacgtttgccggcacttgtccacagcaaactcccatcgctttccacgccccatgtggaaaaccgtgggggcggatccctttccacgggaaagggctccgaccccgatcagtgcagtcggaccgtggacagaatttcaccacgcttcgaaacgcctgcgctgcaatgctcgcgcccacttgtccacaccaagttcccatcgctctccacgtccggtgtggaaaacaatcgaagggcatggacaaaaaatcaccacgtccggaaacgcccgcactgcaagcctcgcggccacttgtccacaccaagttcccatcgctttccacgcgcggtgtggaaaacccgcgtggcccgctctggtagtcgcccaccttggtgggcgcgtggcagatcagtgcccaccaaggtgggcatctaccagagccaggttcccaaacaacaaggcccgccaatggcgggccctgtcgtccacgttctgcaatgcggcgtgccttacagcgcgctgccaccgaacttgtgggtgtactgcaggttgatggtgcggccgacgctgtcgaaccaggacacgtcgtag

SEQ ID NO: 507908 - DNA, 249 bp, Stenotrophomonas maltophilia
atggcggcgagcgagtacgagcttacgaattttgaccctgtaaacccgacctatatgttcctgtacacagtgatcaaggaagagtcgcccgacggtttcgatgttgtcgggtgtcgtgaacggccttcttccatcgtcgtaagcaaccgcattaaagagcaattgatgaagagcggcttgtcgggattggccttctgccgctcgctggatctaaccccgcgagacagaactatttacgagttctgctag

SEQ ID NO: 507909 - DNA, 4638 bp, Stenotrophomonas maltophilia
atgggatacagggcaactgcgaagggcggccatgcttcagcctttggtgcagactccttggctgatggaatcggatctgtcgcggtggggcacgatgcgcgcgcacttacactgaactcgattgccgttggtagtggagcgaagaccaactcgggagctggcatctccaagattgcaattggtggaaatgcatccgctggcacgaatggatggaccggcgcaatcgcgctcggtgggcagacctgggcaagttatgacagcgtcgccattggctatgaggcgaaggcatatgctgcaaacgcaactgcgcttgggcggggctcggttgcgaccgaggaggcgacggtctccgttggaagtgcgtccatcaagcgtcgcatcgttaatgtcgctgacgcccgcgttaacgatgccagcacggatgcggtagcgggcaagcagcttcacgctaccaacaagaagctggaaacggccgaaagtgcgattggcaccgtcaaatccgatgtagccgccgtacgcaccctggcgcagaacgccagcaacaggattgatgccacaaaccttgctgtgggaaaaggttccattgcggaggctggcagctacggcccaagtacggccattggcagcaatgcggtggcctacaacggacgcggcgtagcggtgggccacggcgcccgtaccggcgtggatgcggcaggcaacaagctctccgggtcgaacgcaggtgtctcactcggtgcagatgcctggagtggcaacggtgccgtggcggtgggattcaacgccaatgcatcaggtggttttgcggtggtggtaggcactggtgcccaggcgcagtccgagtacagcatggccttcggctattcgagcaaggccaaggctgcccacgcgatggcgttgggggcctccagcgaggccgatgcacagtacgccgccgcactcggctacggtgccagagcgcttagcgccagctccgtggcgatgggagatcgggcgttggccaatcacagaaacgctgtcgccctgggggcagggtcggttacctataccgctgactcggtttctgtaggcagtgattcgttgctgcggaaaatccagaggattgccgatggcaccgtcgccgaaggcagtaccgatgcggtgacaggcaaccagctgaactacaccaacgagcgggttgcctcggtacacagcttggccagcaccgcgcagtcgaaagctgaagctgcaacggtgagcgccaccaaggcgctgatggaaaccgaagcgctgggcggcctggtggcacagacgtctgcttcaggcagtgtgcgactgggtggaggcaacagtggtacggctctggatgtccgcaacagcgcaaacgccagccgcaggatcaccggcgtggcagacgccacgctgagtacgacgagcactgacgctgtgtcaggcaagcagctgaatgcgaccaacagcaatgtcacggccgcacgatccgttgctgataccgcgaagaccaatgcagacactgcgctgaccaaggccaatactctctccgggcttctgagccagaactctgcgtcgggcaatgtccgcctgggcgcagccaacagcggcaccgttctggacgtgcggaacagcgccaatgcgagtcgtaagatcaccggtgttgccgatgcagcgttgtccaccaccagcaccgatgcggtgacgggcaggcagctcaatgcgaccaacagcaacgtcagtattgcgctgagtgatgcaagcgcggccaagaccagcgcaaacaccgctctgacccaggtaggaacgctcaacgggctgctcagccaggccagtgccagcagtaatgtccgtatcggtgagaagaacagcggcaccgttttggatgtgcgcaacagcgcgaacgcgaaccggaagctgactggtgtggctgatggagtggtcagcgccagcagctatgaggccgtcaacggcaggcagctcaacgccaccaatgacaaggtggcgacggtggagggcattgccaagactgcgggcacggaagctgcggccgcaaagggggatgcgtccaaggcgctggccgagacagcggtgctgggcgggctggtagcacaagcttctccggctggcagtgtgcgtctgggtgagaggaacagcggcagcctactggatgtgcataacagcctcggtttgagtcgacggattacgggtgtcgcgaacggcgtgttgagtctagggagcaacgatgccgtgaatggtgggcagttgtatacgaccaacaccgcagtgcaggcagccacggtcgctgttgaagaagccggtcgtaggattggggagattgagggaaaatcgaaattcatggcggttggcgcgccgatagatgatgtgaaggcgcaggctggtcgcttggggattgcacttggagattccgcggaggcgtcacttgttggcgagggtggtgttgctatcggaagttatgcgaaggcgcgggcaacaaactcggtagcgatcgggcgcgcgtccggagttgctgaggatgcggagaacggttttgcattagggtcacgctcgcgagttgaggaagcgaatgggctggcggttggcgcaggcagctacgtgcagaagggagctacgaactccgttgcgcttggcaatggttcaatcgctgaggaggcttccacggtttctgtcggtggtgggctgctaaagcgccgacttgtcaatgttgaaagaggcaccgccgaccacaatgccaccaccgtttctcagctcagggattctctcgccaccctcggcggcggagcaggcatggacggtaacgggaacatcattgccccggcctacacggtacagggcggaacgcagagcaccgtcgaggatgcgctgatggcactggacggcgccgtcatcaccgccggccgtcgcgcggacaaggtggaaggtcagttcagctcgatcttccaggattcaccttcggcccgtgccgacggcatgagccagatcgcgctgaatggcgtgaatggcatggtgctgaccaatcttgccgacggccgggtggccccaggaagccgtgatgccgtaacgggcaaccagctgtacgccgcagagcagaagatctcgcagaatcggaatgatctggaggcgatgcgcaaggagcgggagatggggcagcaggcgatgcgagagatggatgcaaacggcccgatcgacttcggtggtgcgcgtttgactggcgtggccgaggggaagctttcggctgatagctcggacgtagtgcgcggcagtcagctctataagaccaatagccgtgtgtcggccttggaaggcatcggtcaatacctcagcgtgggcacggctcctgaatatggtcaggctcaggctggtccggctggtctcgccattggaaacttggcaaagacgggcattgagggtggcacggcgattggaacattcgccaaagcaatgggaagaaactcaattgccctcggacgagcatctactgtctacgaaggctcagattccagctttgccatcgggactggagctgaggttggtagggctggcgagccgggtgcaatcggagccattgcgttcggcgttggatcaagggtcgaacccggagcccacggttctatcgcgttcggaaccagctctcatgcgaccgaggcaggagttgcatcgtttggtaatgttggaacgaagcgccgcctcgtaaacatcgccaacggcaccgctaaccacaacgccgccaccgtcggccagctgcgcggtgcgctctccaccctcggcggcgaggtggatgccaacggcaacatcgtcggcccgagcttcaatgtccagggccaggcgcggtccacgttgaatggtgcactggaggcgctggatggtgcggtcgtcaccaacacctcgcgcgtggacaaggtcgaaacccagctccgctccgtgttccaggacaccccctcggtccgcgccgatggtgtcaaccagctcaccctcgccggtgccaacggcgtggtcatttccaacgtggcaaacggcctgatcgcggccggcagccgtgacgcggtcaacggtggccagctgcattcgatgcagcagcagctcaacggccgcatggatgggctggagcagcgcatcgacgacgccccggctccgcgtgcactggcgtcgtcctcggtgccgaagccgcaggccgaggaaactcctgtgcttccggaaggcaaggactcccagcaggtcgcctcggtaggcgagggcgacaagccagcgccgcagccgaaggccaacaaggacgactcgccgaagccgcaggtcgacaccgccgagctggagaagatgctggcccgcgccaacgagtacaccgacggtgcgatcagcaacttcgagcgtcgcctggacaagatggacaagcgcttcaaccgcatggcggcgatgagcagtgcacagagcgcgatggcgatgaacaccgccggcctggctacctacaaccgcctcggtgcgggcgtgggttacagcgagggtgagtcggcgatggcggtgggctaccagcgcgtgctcaacgagaagggctcggccaccttcagcctcaatggggcgttcaccaacagcggtgagcgcagcatgggcgtcggtgtgggcatcggctggtaa

SEQ ID NO: 507910 - DNA, 507 bp, Stenotrophomonas maltophilia
atgcacgccattctcaagaaggccgcgctcgctgcagcgctggccacggcttcgctgtccgcgcacgccgtggaaaccaagatctccgtctatgccgacgtcgacccgaccctggccctgcttcgtgatgacggcaccccgctgccagacactgtgcagatgacccacgatcctctgcgagggctgctgccgtcgacgcagcaggtgcgcatccactcgaacgatgacaaggcagacattgacgttcgtctgcgccacgatccgttgctgatcaatggcagcacccgcgtgccgctggacgtcagcctgaactctgatgcgctgagcacctcgggcaccgagttcaaggcggctgacctgttcaacggtgccagctcgacgccgggtgcttccatcgccatgccgcttaccatcgcccaggccggtgccggcgggccgcttacggtcaaaggtcgctatgaaggtgtggtctacatcgtcatgaaccagaaggccaccacgccgtaa

SEQ ID NO: 507911 - DNA, 138 bp, Stenotrophomonas maltophilia
atgctcgactcgcacgcacagcacgcacagcacgaacagcgcgaacagcgcgaacagcgcgaacagcgcgaacagcagtcgagcatggctcgactctacaaaggcgatgcaatgagattttttgcatttaccgaatga

SEQ ID NO: 507912 - DNA, 768 bp, Stenotrophomonas maltophilia
atggccaacacttttcatcgcgtggggcaggggcctcactccgtcctggtcctgcatggctggttcggcgacgcacacgcgttcgaaccgatcgagccatggctgtcacgcgaccacttcagctacatcttcatggactgccgtggctacggcggcatgcgcgatgtggcggggcagtacagcatcgacgaaatcgcccgtgacgcgctctcgctcgccgatgcacttcagctggaaacgttcagcgtagcggggcattccatgggaggcatggcgatcgagcgcatcgccgtgctcgcgccccagcgggtgcgctccatgctggccatcgcacccgtcccctgtggtggcattgcctatgacgcatccacgcgaggacttctggagagcgctgccggcagcgtggccagccgaagggccatcatcgatcgcagtaccggcgggcggctccccgcagcctggctggattggaaggcccgttattcaatgcagcactccgcgcccgatgcgtttgctgcataccttcctgcgtgggcagatacggacttcagcaatgagatcgtcggtgaccatcggttgaaggtggtggtgggtgggaatgatcccaccttcaaccgttcactgatggggcgcacctatctgcaccgctaccggcaggccacgctggaggttctggaggatgcaggacactacccgatgaatgagacacccttggcactggtggcggccatggagtcgttcctgagagcagaggctcatccggcatga

SEQ ID NO: 507913 - DNA, 774 bp, Stenotrophomonas maltophilia
atgcgcaattcgctgctcgatccctatgaagacctgccgcgcgatgtcgtggtcacctcgaacgattacgcagcatcgtccacctttccccgccatgcccatcgacgtgggcagttcgcgttcgccgcgcgcggcaccatcagcgtgacgacaccgcaggggcgctggctggtgccgccacagcgcgcctgctgggttcccgccgggctggcccacgagatgacgatgcgcgggccggtgacgatgctcaacgccttcctttccatcgaggccgctgctgcggtgacgatgccggcgcagtgccacgtgtatgccgtttcgccgttgctgcggcagctgctggaaggcgccgtggacctgcccgcgctgtacgacgaggacgggcgtgcgggcaagctgatgcagttgctggtcgcggagatcgcgtcgatgccgatgctttccctgcatgcgccgttgcctgccgatgcacgcctcgcgcgcgtctgccgggcgctgttcgatgcgccctcgctcgccatcgggcttgatgaggtggctgcggatgcaggcatgagccggcgcaccttcacgcggacgttccgcgcaggtaccggggtgagtttcgccgagtggcggcagcaggtatgcctgctggcagccatcgaacggctgggccaggggcaggcggtgacacgcgtggcattggacctggggtatgcgagccccagcgcgttttctgccgcgttccggcgtgagctggggtgttcgccgagccggtattccgaggtgtag

SEQ ID NO: 507914 - DNA, 672 bp, Stenotrophomonas maltophilia
atgatcgaactgttggacctgcaacagaccctgcatgccttcgctgcctgcaacgatgacgatgaggtgtggaacgccttcggctgggtgatggccagcaacgaggacctgctggctgcgcggttgtggttgccgtcatccagtgatgaagcgctggatgacgacggcgagcgatcggccgcttcggcagcgatggggctgttcccgtatctggagccggccacgtttgccgacgtgctggatgtgcagaagcggcaacgcccgctgtcgtcgctgcaggactacgcgcaggcactggcgtactacgccgagtacgacgcgttccagcaggtcgagggtatcgacgaggctctgggcgaagcgggtgctgaggaacaagtggaggcgcgcgaggcaggggtgggcgcaggcatcttcgcttccttcgatctgacgctgaaggcgtgctcggaggggcagatcaaagccgcagcgcagcgcgtggcgcgcctgctggagattccggtgggcgaggcgttggcgcgctgccgtgcgttgccgctggtgctgggtgaggcgctggatcgtcgccgcgcgcaggcgatcaaggatgatctcgaagcgatcggtgcgaccgtgcaggtgcacgggttcaagccgttcccgtggatggatgcgcccgtattgcggtag

SEQ ID NO: 507915 - DNA, 330 bp, Stenotrophomonas maltophilia
gtgagtcgaatttctgcttggcagtaccgcgctgttgcggtactggtgctgtgtgtgggtgcgggaacggtctcggcggtccagccgtatcaggagaatcgcaagctcatcgagtccgcgcagaatctgaccgcgctgaaggacgatctctttggtgagagtgtcagcctctacaacggcaagaccgcatttgccgtgaccgatgtcagccttcccggcaacaacgcactgcctgtgcagatgcggcgtcgcttcagcgtcgagatggatctggtgggggctggaagcttcaacgccaacatcgagggaaccggcggaaaggtgagatga

SEQ ID NO: 507916 - DNA, 948 bp, Stenotrophomonas maltophilia
atgcaggtctattcctgcgccgaactgatgagcgccgcccacgcgctgggcggccgggtcgactttgaatcgggcctccccgatgcgctgccggtgctggccggctggcagcaggtgcagtcgatggacagcggcctggtgctctacctcagccgcagccaggacatggtcggcggccgcagccagaactgcctgcctgcgggcctcaccgccagcttcctgctgcaggggcaggccgaagtggtcatcgccaaccagcgcctgcagatggacagccgccggaccgggagcccggcgatgctggtccaccttcgtgaggaggaagcgttccagcgccattggcaggcgggtcgcgaggaaaccaaggtcagcctgcacctcggccaggactggttgtcgcgccagctcgatggcattgcatcggccggactcacccgcctgcgactgagccacgcacgcaaccaggcgtggcaaccgcctgcgccactgctgcggcgggccgcagcgttgttcggggcggaaacggcggagccgcctctgctggccagcctgcaacgcgagagctttgcgctggaagtcgcggccagcgtggttcgatccgtgatcgccgaacgcgaggcgcctgcccccagcgcacatctgcggcgttgcgtggaccagttgcaacagtggctgcagagcggcgaggccgatggcctgaccatcaaccagatggcgcgcaggctgggtacgaacgccgttgacctgcaaagcaccttccagcagctgcacggcagcagcatcgccgcctggctgcgtgcactgcgcctgcagcgggcgcacgatgccctgctgcaacgacgggtgtcagtggacgtggcggccagcgtggccgggtacgcccataccagcagcttcagtgccgcgttcaagcggcagttcggaaggtctccttcccggatccgctag

SEQ ID NO: 507917 - DNA, 387 bp, Stenotrophomonas maltophilia
atgggtctggtgatcaacgaggcggtggtgctgcgtgccgtcttccatggcgcggtggatgcgcaccagatccggtactggctggaccgtgtgcaggcgctgatcgatgcccaccgtcccttctacttcgttgccagcaccgcgcccggtgccaccttctgcgacgattaccgtgccctgcaggcggtctggtacaagcagtacaaggccgccttccggcagtactgccggggcctggtgcgcatcgccagcgatgccgccgagcagcagcggctggacactccggcgctgcatgcggcctgggccgtgccgtacttcgtcaccgccgatgccggcgcgggcatgcgctggattggcgagcacctggagcaggccgatgcgcactga

SEQ ID NO: 507918 - DNA, 1221 bp, Stenotrophomonas maltophilia
atgcgcactgagcgcaccgctgcttcgccattcggcctgggtgtgatcgtcgcgctgtacatggcacatgccttgcccctgtatttctacaacgtggcggtaccggccatcctgcgcagccagggcgtggatctgcgctggatcggcatgttgtcgctgctgtacctgccgtgggcgctgaagttcctgtgggcgccgctggtcgaccgctggcacctgcccgccctcggccgccgccgcagctggctgtggctgacgcaactgttgctgctggccgggatcctggtgctggcgttcaccggcctggatcatggcctggtcgtgttcgtgctggtcggcatgtggatctcgaccattgccgccacccaggacatcgccatcgacggctataccgtggaggcgctggcgccggccgagcaccggctgggcagcatggcgcagagcgtgggcgtggccctgggcagcatgatcggtggcgccggtgtgctgtggctgtttgaaacccgcggctggagcgtggccctgctgagcctggcggcaatgagcgcactgaccctgctggcagttcagcagatcaatgaaacgccggccaggcccgacgcgccgcggccgagcatcctgcgtgcgctgcgtcgccccgaactgcgctgggcgctgctgctgatcgtgctgtaccggctggtggaagcgccggccatggcgatgatcaacccgctgctggtcgaccagcagttcagcctgaccgagatcggattgctgatctcggtgggcggtgccggtaccggcatgctggctgcggtgggcaccgcctggctgctcaagcagcgccgggccgagcagttgctgatgcacgctggctggtggcgcaccgtgttctatgtactgctggcgttgatgctttacagcggtgcgatggcgacgtcacggtggggcctgggcgcgctggtgatcgcgctgctggcgctgcgctatgtggcgatgaccagcctgtatgccctgttcatgcgggtcagttcgcgtgcccaggccggcactgacttcaccctgctggtgtgcttcgagctgctggtcaatttcatcggcggtgcattgtccggcttcctcgccaagggcctgggctaccccatctactacatcgcgctggcggcagtttcggcgctcgggttgctgctgtgccggccgctgatgcgccgcttcgcagcacccacgaactccccctga

SEQ ID NO: 507919 - DNA, 2256 bp, Stenotrophomonas maltophilia
atgcggcataccgcagcaacctttccgctggcgatgctggcgttggccatcagtggccagctggcggcgcagaatacgtccgctacggctggcacccggcaactggatgcggtgagtgtcaccgccgtgcgaggcgcacgcagcgtggccgagatcgccggcaccgtgtatgccatcgagcgcgagcagattgcccagcagatcaccgccgggcgcagcaccgccgacatcctcggccagctggtgccatcgctggcgccggccagcgggaccaccagcaactacggcatgaccatgcgcggtcgcagtgtgcaggtgatgatcgatggtgtgccgttgaccggcgcacgcgatgggtcgcgtcagctcaacagcatttcgccaaccatgatcgagcgcatcgaggtgatctccggcgccaccgcgctgtatggcgccggtgccagtggcggcatcatcaacatcatcactctgcagcccggtgagcagccggtgcagctggccagccagttcggcctgcgcagcccctcgcatctgtccagtgacacgctggcctggaacgccgcgcagaccatgaccgtgcgcggcgatcagttcagtggcgcgttcggcgtcgcctatggccggcagggcgcatcgctggatgcgcatggccgccgtgtcggcccggagatcgcgcagaccgatcggcaggacaccgagacccgcgaactcaatgcgcgcttcgactggaccccgacggacagccagcagttgagcgtgggcgtgcgctggttcgacgatcagcaggacagtgatcatggccccgactatggcccgcgcctggctgcgctgttcaacccagcattcacgcccagccaccaggcgctgcccggcctgctgctggaggcgcagccgcgtacccggcaccagggagtgaatgcgcagtaccgcaaccgcgatgtactgggcgggcaggaactgagcgtggaagcctattaccgcaacgagcagggacgctggttcccgtcggtgtcgacgctggtgcacccggcactgcgcggtggcttcgcctatgtggcgatgcagtccaataccgatatcgatgtgtggggcctgcgcacggcgctgcacaagggtttcgacgtggcgggccgcagcctgcagctgtcgtacggcgtggaccacgagcgcgagcaggacagccagcgcgggcagatgtatgacatcaaccgcttcatcgccagcaacggtctcgattaccagcccaccgcgcagtacgcgatggggccggacgtgcgcgtggataccactggcctgttcctgcaggccgaccattcgctgagtgagcgcttcagcgtgcaggccggcgtgcgccaccagatcctgcgcaaccgcgtagaagactcgcttccctacaccgaagcgatcaccgccgatgccgttgccgggtatcagccgcacctgctgcggggcggccgcgtgcgccactcgcagaccctgttcaatgccggcgtggtgtaccggctggatgcatcgcaacagctgttcgccaacgtctcgcagggcttcagcctgccggacacccagcgcatgctgcgcgatgtaccggcaagcttcgtcatcgacagccgcaacgtcggcccgatcaaggtcgacagctatgagctgggctggcgccgcagcgatgcatcgctgcagagcgcggtgaccgcgttctacaaccgctcggacaagaccgtgcagttcaaccgcgactacagcgtgtcggtggccgacaccgatgagcgcgtgtggggcgtggaggccaacctgcgctacacaccgacggcgcagctggagctgggcgcaagccttgccagcacccggggccagtaccgcgatgctgccggacgttggcgtgagctcaatgcgttccgcgtttcacccttgaaggcgggtgtgcatgggcagtggcgcttcgccaatgacagcctgctgcgcttgcagggacaagtggtgggcgggaccgatcgtgcctggcgcgatgcaccactcgcagcgatcagtcccagcatccgcgctaccccggcggcgaaggtccacggctatgcggtgttcgacctgatcggcgagctgccgctggcaggcggccgcttcagtgtcggcatctacaacctggccgatcgtgactaccgcacggtctatggccagcaggccgaggcgacctacgggaagatgtccagcctgccggcggcagggcggaccttctcgatcgggtatcgggtggagtactga

SEQ ID NO: 507920 - DNA, 1209 bp, Stenotrophomonas maltophilia
atgcaccgtcgccacgacttggacaccctgcgcatcgccgccttcgccctgctgatcctctaccacgccgccatggcctacgtggccggctgggactttcacctcaagagcacctacacctccgaatggctgcagtggccgatgatcgcgctgaatcgatggcgcatgccgctgctgttcgccatcagcggtatcgcgctgggcctgtccctgcccgaccggggccggttgcagcacaccctccgccgtagctggcgcctgctgctgcccctggtcttcggtatcgtcgcggtggtgtccctgcaggcctactgcgaggccttggacaagggtgacgtggcaccggggctgggccatttcctatggcgctactggcagttccggccgtggccgggcgcgcacttcagtggtgccgcctacggcttcacctggaatcatctctggtacctggcctaccttctgccctacacggtgctggcggtcgtgctggccagcctgctccgaccattgcgcagggcgctgccgcgctggcaacccggtgatcgcctgctgggcaccctgctgctggcgctgccggtagcctggctggcatggtccctgctggtactgatgccgcgttggccacccacccatgccctgctggacgacgtgtatgtgcatgccgagtcgctgccgctgttcctcggcggcttcctggcggcgcgctggcagcgcggctgggatctgctggtgcgcgggcgccgcgtgaccctggccctggcggtgctggggctctgcctggagctgggcatccgcgcactggcccgcctgccccatgtgggcgatctggatgcatgggtgctggcactgccgtgggcccagaccgaacgcgtcggccgcgcgttgtatacgtggtgcatgctgctgaccctgttcggctgggcgcgcgtgttgctggtccgtccctggcacggtctgaactactgccgcgaagccgtgttcagttggtacatcctgcatcagactgtgctgatcgttctgctgtacgcgctgcgcccgctgcagctgggcccgtggctggaacctgtactactggtggctggcacgataagcggctgcctgctgatccacgaactgctgatccgacgctcgcgttggctgcggccgctgttcggcctccgtgccgatccgccagcgtcgccgattgcacgcgccgcaacggcgcgctga

SEQ ID NO: 507921 - DNA, 459 bp, Stenotrophomonas maltophilia
atgtccgcagagaccacccgcttcatccacgtgatctatatcgcctccacgccgcagaaggtgttcgaggccatcacccgccccgagatcgccagccgctactggggccatgaaaacgtgtcggactggaagcccggttcgcgctggcagcatgtgcgtgccaacgaaacgcgctcggtcgaactggtgggcgaagtggtggaaagcaccccaccctcgcggctggtcatcacctgggccgccgcctcgcaggcggagaacccggacgcctacagccgcgtcaccttcgacatcgtgccctaccaggacatggtgcggctgaccgtcacccacgaggaactggaacccggcagcggcatggataccggcatccgccagggctggccgatcgtgctgtcgagcctgaagtcgctgctggaaaccggcaaggggctggatgtgtttgcgaagccgcagtag

SEQ ID NO: 507922 - DNA, 750 bp, Stenotrophomonas maltophilia
atggagtcggtgtatctgctggtcgcgctgggcgcgatcgtcgccggattcgtgcagggcctgtccggcttcgccttcggcatggtggcgatgtcgttctgggcgtggggactggagccgcggctggcggcgacgctttcggtgtttggtgcgctggtcgggcagctggtcgcagtgttcaccgtgcgccgcggtttcaacctgcgcctgctgctgccgttcgtgctgggtgggctggccggcattccgctgggcgtgacggtgctgccacggctggacatggactggttcaaggcgctgctgggtggcttcctggcgctgtggtgcccggtgatgctgatggcgcgctcgttgcctccggtccgcgtcggcggccgtatcggtgatgcgattgctggcatggccggtggcgtgctcagtggcatcggcggctttgccgggccggtgccgacgttgtggagcaccctgcgaggcttcggcaaggacgagcagcgcgcggtcatccagaacttcaacctggcgatgctggcggtgaccatggccacctatgtcggcagcggcctggtgagccggcagatgttgctgtacttcgccatcgtggcaccggccatgctggtgccgaccctgctgggcgcgcgggtctacatcggcatcagcgaggcacgcttccggcaggtcgtgctgggcctgctgaccgcgtcaggcatcgcgttgctggcgtcgtcgctgccggtactgctggcgcgctga

SEQ ID NO: 507923 - DNA, 603 bp, Stenotrophomonas maltophilia
atgggaagatcgtccgccagcgtgggcagctaccagatggtgaaactggcagaccttgatgccccccgagaagtgaagcggcagcttcgcgatgacatcgaacgatccaacggtgtcgtgcgggttgcagcagggagcatcccaacgcaggccgaaatgctggctgccgtgccgcggactcaccgctcaactccagaactacgccagcgcctgccgcagccacccagcaggctggaaagcagcctgctgggcgcagccgagatgattggcatggagcccagtggtgcgttggagggtggaaagtcctcgggcttgagccgtttctaccggctggagggtgtcggcatcgtggagttcagcgagaacaacttcctcgctgcgggcatgcagatcgaggtcatcgcggaggcgcagaacaccgtggtggacggcaagcccgctcacctcgggaaggttgtggatagtgtcggccgtactcgggttgagcttgcctggacgggagacagcaagacttacagtctgaccgtcacgggcgagccgggcagcgacgtggagcgcaacgcccgagtgctgcacgacatcgccgcggccatcgtgaattag

SEQ ID NO: 507924 - DNA, 510 bp, Stenotrophomonas maltophilia
atgagcggcattgctgccgccactgcggcactgcacgatctctacctgcccgcagggctgcagttgaccggaccgatcgtggcggaagcggaaagcgcagagtacggtgcctgccgctttacccttgagggtcacagcatcgtgttccgcgtcgcgaagatcacccccaccaagaccggccagttcgtaaccctgtggaagcgccccgcccccggttctgatatcgctccattggatgcagccgatgctgtgcacttcgtggtgatcgcggtcttcgacggaacacagcgcgggcagttcatcttcagtcgtgacctgctgatcgagcgcggcgtgatgtcgcgcgatggcgagggcggaaagcgcgccctccgtgtctatccgccgtggagcacgccgaccgcaaaggacgcgatccggacccggcagtggcagcttcgttgcttcctgcccaccggcgccgatgtctccgcctccgccggtgatcgattacgctcactgttgggttga

SEQ ID NO: 507925 - DNA, 897 bp, Stenotrophomonas maltophilia
atgaatgtgcaacgctccccttcgcgtgcggtggcctggatggtcgctgcggtcgcctgtttctcgctgatggatgctggcatgaagcagctgtcggccagctatccgaccctggaagtgaccttcctgcgtggtgcggcttcgttgccgttcgtgctggtctgggtgctggtcagcgccggcccgcgctcgctgatcccgcgccgctggggcctgcacctgctgcgtggtgggctgggcatggcgatgatcggctgcttcgtgttcgccctgcgtgacctgccgctgtccaccgcctacaccatctatttcgttgccccactgctgatcgccgcgctgtcggtgccgttgctgggtgagcgggttggcccgcggcgctgggtggccatcggcatcggcctggtcggcgtgctggtggtgctgcggccgggcgtggacggcttcatttcggtgccggggctgatggtgctggccgcggccaccgcgtatgccgtggcggcgatcacggtcagcctgctcacccgcaccgatacctcgcagtcgatggtggtctggttcctggtgatcatggccatcggtgccggcctgctggcccttcccggctgggtgccgctgcagctggcgcatgcgccgctgatcgccggcatgggtctggctggggcgctgggccagattgccctgaccaaggcgttccagctgggcgaggcgtcgatgatcgcgccgttggagtacagcggcctggtgtgggtgatcggctgggacctggccttctggggccagctgccggacagctatacctgggtgggcgcggcgatcatcgtcgcctcggggctgtacctgctgcaccgtgagcgggtgaaccggcaggaaccgccgaagccgctggatcatccctga

SEQ ID NO: 507926 - DNA, 1749 bp, Stenotrophomonas maltophilia
atgcgccgctcattcctgctgcctcccagtcctacccatcgccgcaccgtcaccacccaggccttgggcattctgctggcctctgtacttctgaccattgcgccatcagcaggggcaacgccggcggctgcaatgctacagcccaccgagccgccgccacgtttcgacaggactacacgccacggcctctgtcatgagggccgctgcgtggtgctggatggcacgggccggcaactggccgagcattggggaatgcaatacctccgccccttcaaaaatggggtggcggtcttcgaaaggggggagaacaggggcgtcatgaattcagaagggcgtatcgtccttgaagcgcattacgactcggttgaggtacatggcaacggggtgatcgaggccaaggtgctgctgcggagcccgcccaaggcgtatacgcgaatcgacttcttcaatgcacgaggccgattggtgcgtcggtttgagcagaaaggcgagatcgatctcctgcgctcggcgtcctgggctggaaacccggctgtagaactctgcaacagtgagaagcagcgctgtacgacccgcttccttgacgcaaagggcaggtccggtcccgttttcagtgtcttcggtagttttggtcccttgggtcatgagggggacgtggccatcgcttcgcgcgatggtgtcaactttggcctggttgatcgatcgctggcaggcatagggcgtcaggactacgaccagatgacgttcaacaggtcgggtttcgcgctcgccacccaaggcgggaatgacacggtgttggatccccatggggtgcaagtggcgcccatgggtcgataccggttcaagtttggtcggggtgagtacctgctttctgcggtagccgaagacggtgcgtgcctgcatttcacgcgaactgggcagctgttcccggcgcctacaggcctttgtatggagacagacgagcgcgctgaaggtgtgggctacgtaatcttcggttcggaggatgacgaatacgtagtaggcctggatggattgccgcgctccgcgcaacacaatgcggacctgcatccgttgaatcgcaggatggtccagtatcgaaagcccggcgaagcgggggtgcgtttcatgatgctggaagatgccagcatctcgtcctcccagtaccgccaacttgcgccttttcaagccgaggcaggactggatgaccaactgctgctggcggaagccgatgaaggctggggtttaatagatgccgctggcgcttggctgattcctcctcgctaccgccggatacaaccattgggtccgaatctggtcgcggcatttgaacggccgggatatgaccccgggtatcacatactcgatctgcgcggtaatgcgctggctgatttcacgccgcatactccctcaccggcgctcttggcggatggaacgagggtctacgccctctcactgcgtggtcgctgggggcttctggatgagtcgggacgatggaggcttgcgccacgctacggctacgtgagtgtttcgaatggcttggttttcgtgcgtgagcgaaacagcgccggtgatgttacggttaactttcttgacccagacacaggaacgacgctgttcgaacagggatttctatcggttcattctcgtacggatggtctgtttgagacattgaagacagaccagaccttggagctgatcaagcttgacgggaccgttctggggcgtctgcatccccgtcccaaccgatag

SEQ ID NO: 507927 - DNA, 273 bp, Stenotrophomonas maltophilia
atgcccgcctccgccgccctgctggaaatccccttgcgcctgctggatgaccgctatgggccaggcaatgtcgatgaagccgaagacatgctgattgggatcgtgcaggcggagatgggcgagcaggcaacctgttcgttcgacttcgacacgcggcacgccaacccgtggttccaccagctgctgctggaaccccgggtcgccggaaagccggccacccaggagcagctgcaagcgatggccgtacggctggtggccctcggtttgcactga

SEQ ID NO: 507928 - DNA, 543 bp, Stenotrophomonas maltophilia
atgaccatccatcaccttccgagcttccgttaccatccggacccggtagcgacgggcaacgtggcgccctccactaccacctgcagggtctgtcagcaggcgcgtggatatgtgtatctgcacgatgccatccacgcagggcgcgcagattactcggaacagatctgcccttggtgcattgccgatggccgcgccgcgtcggcgttgcatgtggcgtttgcctgccgcctggatatcgacgaaagcgtccctgaagccgcgctggaagagctgtccctgcgcatgccgggctacgccagtttccagggggaaacgtggctggcacattgcggcgatgtctgccgattcctgggcgacgccaccctggagcaggtgactcaggcctcggcagcgagcatcgcggcgtggtgcgcaaccaacgacgccgacgaggcggtctggtgggctctggccagcgactacgcgcccggtgcagatatcggcttctatacgttcgagtgcctgcactgtggcctcgttcagttccatattgactcggcctga

SEQ ID NO: 507929 - DNA, 543 bp, Stenotrophomonas maltophilia
atgccaacgcccgccctgcccacgctccccgccaccctgcccgcacggctgcgtccactgcacgtggatgatgctgccgcctgggccggctatctctcgctgccgggcgtgaccgagcacaccagctggggcgacgtttccgaaagagcactgcgctgccagatcgccggttacctgcccacggcaacggaccagcgctgggcgctggtgggcgccgacagccagctgatcggcaccgttggcctgaacggaatcgacctgtcgcatggccgcggcgaacttgcctatgatctcgatccgcgctggcagggtcagggactggccacgcacgcagcacgcgcggtgctcgaatggggccatgccgcactcgctctggtccgaatccaggcgactgtcctggacagcaacgcccgctcgatcgccgtgctggaacgcctcggcatgcagcgcgaaggcctgctgcgcgcttaccggcgggttcgaggacagccccgtgacttctggatgtacgcccgcgtcgaaggctccgcgtcaccatgctga

SEQ ID NO: 507930 - DNA, 2094 bp, Stenotrophomonas maltophilia
atggtgatggagctggcgttacggcacgatccggatctcgctccagaggacacactcgcctacgcttactctgcgttcggcaccatctacttcgtgcatacgcagtacggtccgggccagatcgatctcttgagcggctcagtcctctgcaggcgattgacggaggacagattctcgccaggtgatatcggcggagatgcaacttccgtcttccggctccctgaagagaggttggacttggtcgacaaagacggccatccaatgttcgatgcagcagtgctggcgcaaggccccttgggtgtaggacattgctacggattcttccctgcactcggattgggaggcgtcgcgcaactggactcactgcaggtggttgaggcacccgtgcacttctcgatactggcccagcttgtcgagttccagctcttccgtgaagcgtcgcatggcgaactcgtcgccgtcatgcgacaaccgcccgtaccgacacccgaggaaatcgttgctcacctttctccggaatgcccctttcaggtcgtccgatacgccgacataagggctgaggtaccgcaggactcaacatacgcaccagagcactacgtctggggtgatcccgatgagttggttctcctagttgacggcgatctcaagctggacacactggatctcgacgacccgctggccccgtggcgggaagaggatcttggtgcgtacatccgtttcattctggttcgcggcaatgcagagatcacacgccatgttcacagccttgaaaccgacggcgcatgcggactgcttgtctcgggcgacctgacgacaaccaatgccatcgtcggcggacaggaaatccgcataggcggcaacctacgggtccgcgagctgttctggggcgactacaaccatggggaactgcacgtcgttgggaacaccgaggcagcggctctcattcaaaccgactactccatgcaattcgatggctcggttcactgcgtgcgtcggatggacgacgaagccatcactgacgacggaattgagcagatcatcgaacccgactgtctgtcacgcgaatccgaggatccggacagcttctggtcattggacgcgggagccatgctggaaaggctcactgctggaaagagcgtcatccgtgcggagggcctgtcagcgccggacccgctgctatgcacagtgaatctgtttggcgacggcactatcagtccagacaacttcctgcggatctgcgccgaagacatgcttccgatgaatatctgcggctatgatttccatcgtgacggcctctcacttcaagtacgagcggacatcgaggatgctggcgccccctcttacatcatgcagatggaagacccatcaaggaatatcgccgcacgcttcgtcatggagcgggttgagacatctgtcggaataattgatcgcctcaagggacgaaggcccgagactggctggggtctctggaattacatctgcagtgatgtcaatagcgaccagagcgaatgggcgcgagtggaagcgcatgagatcccgcccgcccacgtttcactcgtcctaaaagcctggcaatttctgcaggaaggggcgtccagccgccattggaccgcggagatcattccagcgagcgagatcaaggatcttcttgcgctggagatctgccagccctacgacaactatgacgatgatgaccgttgcggattctggatcggtcactgtcatgcggcatttcgccaacaggagcagggaccagatccagtggatcctacacttcgcctgtctcgcgaactgaatcagcctgacggcacgagcgtgatcgagagctattacttcgacgttgaaacctgcatggatggcagtgagcgcgtccgaatccgctacaaggccgaccaggatctggaggactctccggctcagctggatcccgttggaggggctgaactggcaggcgcactgcgtatctacaagcgtggcgcgagggaaatgcgcagtgcgaatgctgacctgctgagcggagaagccccgtacttcgcgcgagatgatgcgttcgcgatgaacttctggaggcggcagggttacctgacccagtag

SEQ ID NO: 507931 - DNA, 282 bp, Stenotrophomonas maltophilia; identical to SEQ ID NO: 502614

SEQ ID NO: 507932 - DNA, 849 bp, Stenotrophomonas maltophilia
atgcgcggagaggtagagccggccgctggccggctggcgggaccccgaggctgccggccagcggccggcactaccgattgcctatcagctgttggctggcccatgcacggaggggtagagccggccgctggccggctggcgggaccccggggttgccggccagcggccggcactaccgcctgcgcatcagctgttgggtggcccacgcacggaggggtagagccggccgctggccggctggcgggaccccgaggctgccggccagcggccggcactaccgattgcctatcagctgttggctggcccatgcacggaggggtagagccggccgctggccggctggcgggaccccggggttgccggccagcggccggcactaccgcctgcgcatcagctgttgggtggcccacgcacggaggggtagagccggccgctggccggctggcgggaccccgaggctgccggccagcggccggcactaccgactgcgtatcagctgttgggtggcccatgcacggaggggtagagccggccgctggccggctgaagggaccccggggctgccggccagcggccggcagtaccgcctgcgtatcagctgttggctggctcatgcgcggagaggtagagccggccgctggccggctgacgggaccccggggctgccggccagcggccggcactaccgactgcgtatcagctgttgggtgcggccgctggccggcgttatcgcttgtgcagcgtgcgccggttcgcgatgtgcgcgcatgccagcagcgcaccacccatggccgtcgctacgccgtgccagagcagcgattccttcagcggcaggtacagcgaggctga

SEQ ID NO: 507933 - DNA, 948 bp, Stenotrophomonas maltophilia
atgcgcaccctgtaccccgccatcgaaccctaccgcgcgttcaccctgaaggtgagcgatctgcacaccctgcatatcgaggagtgcggcacgccggacgggattccggtggtgtacctgcacggcgggccgggtgctggcatctcgccgacccatcgccgcttcttcgacccggcgcgctaccgcatcgtgttgatcgaccagcgcggcagcggccgttccacgccgttcggcgagctgcgcgacaacaccacgcaggacctggtcggtgacatcgaggcggtgcgtgagcacctgggcatcgaacgctggctggtctacggcggctcctggggttcgaccctgtcgctgacctatgcgcaggcacatcccgagcgcgccaccggcctgatcgtgcgtggcgtgttcctcggccgcgaaatggagaaccgctggttcgccgaggccgatgggggtgcgcgctggatcttcccggagcgctgggaccgctatgaggcctacatcccagaagccgagcgtggtgacatgatcgcagcctactggtcgcggctggacagcgcggacgagacgacccgcatcgaagccgcgcaggcctggctgggctgggaagacaacgccgccaccctgcagcacgacgtggatgcgcaatccaccgatgatccgttggatacgctggccaaggcccgtattgaagcgcactacttccgcaacggcatcttcctggaacctgaccagctgctgcgcgatatcgatcgcatccgccacctgcccggcgtaatcgtgcaggggcgctacgacatcatctgcccgccgcgcagcgcgtgggacctggccaaggcctggccggaagcgcggctggagatggtgacctccggccacagcgccaacgagccggccacggtcgatgcgctggtgcgggccacggatgcgtttgccgaccggttctga

SEQ ID NO: 507934 - DNA, 282 bp, Stenotrophomonas maltophilia; identical to SEQ ID NO: 364321

SEQ ID NO: 507935 - DNA, 2049 bp, Stenotrophomonas maltophilia
atgagcttgcgccagtcgctgttcccgttgctgcgcgccgtgttccgggccatgccactgtcccaggcgcagcgtgaccggatacgtacccgcctgctggcgcggcatggcgactgggttccgcccccaccaaagggtcaacaggattccgctggcccgcgtgcaagcgcacagctgcgctggcgtaccgacgagcccgcgatcggccatcgcacatggcagcagcaggcgttacccacctcgatgccggcaaccctggtcgcgttctacctgccgcagttccacacgttcccggagaacgatgcctggtggggaaagggatttaccgagtggcgcaatgtgacccgcgccctgccgcagttcgagggccacatccagccgcgtctgcctgcagacttgggtttctacgacctgcgcaacccgcaggtgatgcgtgaacaggcgcgcctcgccgctgagtacggcatcggcgcgttctgcttctactactactggttcagcggccgtaccctgatggaggacccgctgcgtcagtggctggccgacgacagcatcgatctgccgttctgcctgtgctgggccaacgaaaactgggcacggcgctgggatggccgcgatgaggacatcctgatcggccagcagcacagcgcagaggacgatctggccttcatcgcccatgtcgcgccttacctgcgcgaccggcgcgcgttgaaggtggaggggcggccgatgctgctcgtctatcgcccgcacctgctgcccgacgcccatgcgaccgccgggcgctggcgtagctggtgccgcgacaacggtgtcggtgagatccacctggcctacgtacagggctttgaacggccggatccccgcgacatcggcttcgatgccgccgtggaattcccgccgaacatgagcaacccgcgttccctgtcggcacagcaatggctgctcaatccggcgttcaacggggatgtccgcgactggcgcgaactggccgcagagatcgcagcccggccgctaccggactatccgctctatcccggggtgaatccgggctgggacaacgaggcacggcgctccggccgcggccgcgtgtatctgcacgcgtcaccgcgtggctaccgcgattggctgcgcaccacgatccatgaacgcctgtccgcagtaccgcatgcgcagcgaatggtcttcatcaatgcctggaacgagtgggccgaaggcgccgtcctggaaccggacgcgcgcctcgggcatgcctggctgcacgccacgcgcgatgcgttgatatcggctccggcactgcgtcagcgaccggcagtgcacgttcacgcctggtatctggaaaccctgccggaggtactgtccgcgttgcgcgaggccgccctggactggaccatcgtggtgaccaccccggagcaacagctggaccaggtccggcgcgccctgctggatcacgggttgcaaggtgacgtcattgccgtggaaaaccatggccgcgacattcttcccttcctgcaagtcgccgagcggctgatgcaggcggatcatgatgttgtgctgaagctgcacaccaagcgctcgacccatcgcaacaatggggaccagtggcgacaggaactgctgcagcgcctgatacaggatggacgtgccgcgcgcatccacgccgtgttccaggccgaccccggcctgggcatggtggtggcggaaggacatctgctgcccgttgccgatttcgtaggtggtaacggtcctgcgctgacacgactgcagacgcggctcgggctgaggaaacccatagacgccagccaatttggtgcgggcagcatgggctggtggcggcttcaggcacttcgcccgctgctggacgcgcacctgtatcgcagcgacttcgattccgaacagggccaggtcgacgggacgctggcgcatgccattgaacgcgcgttcggcgcctgctgcgaacacgccggactgcgcatcgcaacggcggcagcgtgccttggtgaggccgacaacaacgacggcgaatatgcctacgcgcggcgcagttga

SEQ ID NO: 507936 - DNA, 888 bp, Stenotrophomonas maltophilia
gtgtacctggtggccttgtggtacctggatcgcgacaagaatgtgctttcacgactgagcgacctggccgctcctctcatgttgtgcgcaactgcgcagctggtcagctacggggtccgataccagcgctggcgcatgctgctgcacgtgcagggccactccaagttcgcatggtggccaggcctggcggcctatctggcgggattcgccttcaccgcttcacccggcaaggccggtgagctgctccggatacgctatttttctcgatggggcgtaccgccgcagaccacgcttgcaacgttcatccatgagcgcgcattggatctgctggtcatcaccctgctggcgaccggcgctgccggcctggtgcccctgtttggcgtcctgaccgcagtggtgctgaccgtcattctggggttgtggctggctgcggggtgcaccgcactccagcagcttgcacggggtgtggtcctgcgactgcccagccggaagctacgccagctatgcatgttcctgctcggcggaatccatgcactgcgtcccctgcttcgccccggcctgaccctgaaagctgcggcccatggcgccgcagcatggctgctgactgccgctgctttcgcctggctgtgccacgcgctgggcatctcgctcgcctggcagcacgctgtagccatctaccccctggcgatgctggtaggcgccctgtctttcatccccggtggcgtgggcactaccgaagcggcgatcgtcgtgatgctcacccataccggtgccaacctggatgtggcactgacggcggcgatcggtatccggctcgccagcctctggctggcgatcctggtgggaatgaccgccatggctggcctggaagcgcggcgaccgggttga

SEQ ID NO: 507937 - DNA, 408 bp, Stenotrophomonas maltophilia
gtgatcacacgtcagttcctgatgttccttgttgccggtggtgttgccgccgccgtcaactttggctcgcgcatcatgctcagcgaatggctgcactacgtgcctgccatcgtgatcgcctactgcctgggcatggtcacagcgtttgtgctcaacagggtgctggtgttccagcaagccgccaatgcactgaagcaccagatcacctggttcgtgatagtcaacctggccgcagtgctccagaccattgcgatcagcctgctcctggccagatggcttttacctgccatcggcgtggatttccacaacgagaccattgctcacggcatcggcgttgcgattccggtggtgaccagctacttcggccacaaatacctttctttttcatcctcctccggcaagcgctaa

SEQ ID NO: 507938 - DNA, 1662 bp, Stenotrophomonas maltophilia
atggggaaatgcttgaacagtccatccagctccagaaatgcgacgctcctcctgtgcgcgctcaccctggcggcggtattcgtcgcactcagcttcaggtcgacccaagcggtcggcatcgatctgttccatcccggactctggggcgaggatggcagcatcttcgtcaatgaagcgcgtgatgccggattgggcttcctgttcaagccttatgccgggtacatgcacctgataccgcgagccatctcgtaccccgcctcattcctgccgctggagtatgtgccgctcgctttccaccttgcatggattgctgcgttcttcacgacgatctacatcctgcaatcgcggctgtcttccattggtgtacccgccgcgctctgtgtctgggcattggtgctggtaacgctgcaaccgcaggccggcgaggtgttcttcaccctgaccaacatccagtggttcacggggctggcgttgatcacgtatctggccttcccgatcacatcgcgcgtgagcatcggacagctggcattgctgaccattgcaggcctcaccgggccgttcagcgtactcgcacttccggtcctcgcgctgcgggcagttctgttccgggacctgctcaccaatcgccgggtctacgttgcggtcgcgacctgtgccgccattcaaatcggcttcatcgtgttttctccgcgaccgattgcgtccaacccgtccagcttcgatccggcgcacctcctcgccgccatggtcaagttcgtcagcttcggcggcgtatatccactggcgaccctgtttgcgttcgtgttctgggcgagcctgccctggcgacgcatcatcaatgcaacggtgtcccgtgtcaggaaccgttctgcaatggatacccatgcggtggcgcagttcaccgccttgatcctgatcctgactgcgttcgggctgatactggtcggtttcctgcgcgatgatcccgccaccatggggccggtgatcctgcccacgggtgctgcaggagggagtcgctactatctcattccctacagcctgttgatcctggctgcggcagtatcgaaccatcgggattacccgcgcgcgatcgtcgcactggcggccttctcgatcatctgtgccgccaaccttgtaaggcctgatcgcatcgaccaccaatggcatgcttacgcccaactcgcacgggtgatgcccggttcgatcattcccatcgctccccgtaccgagagcattcccggctggtcggtagacgcaagccaggcctatcagcagggcgccaagccaaagggcgaggccatcatcccgctgacggccatggaggtcagcaatggcgagatagccagtaccgacggaaagctggtcatcagatcaacgtccgacagtcttctactcacactgtctgcccgcccctgccccagcagcaccagcattgcgttggaagtcaagggtcgacgcgaggctggcggatggatccagatcctttgggccgcaggtgaggggttcagcgatcgggatggcgtactgcggttctaccctgcaggagacttcacgggcatgttcgccttcgaccgtacgctggaccaggataaggtcaggattcgcccggtattcgcccctggaaaggccgagatccatcaggtcagaatgatctgcctctga

SEQ ID NO: 507939 - DNA, 1128 bp, Stenotrophomonas maltophilia
atgacgcgtcgcaagaaggtaatgatggttttcggcacccgcccggaggccatcaaaatggctccgctggtcgccgccctgaagaagcgtccggatctggacaccattgttgccgtgactgcgcagcaccgccagatgcttgaccaggtcctggaactgtttgagatcaccccggatgaggatctcaacgtcatgcggcctggccagacgctgcccgatctgacctcgcgtatcctgcaggacatggggagcgtgatcgcaaagcacgccccagacatcgtgatggtacacggcgatacgacgacgaccttcgctacgtccctggccgctttctaccagcggactgccattggccacgtcgaggccgggctgcgcaccggcaacctctattcgccttggcccgaggaggccaaccgcaagctgaccggcgtgctggccaatctgcatttctcgcccactcagacatctgccgacaacctgctggcagaacgggtgcccgccgcgagcatccacatcaccggcaataccgtgatcgacgcgctgttgacggttgtggacaagatccggggcacggccagcttggagtcggagctggccgcccgcttcccgttcctggattcgtccaagcgcctgattctggtcacaggccatcggcgcgagaacttcggcgatggctttgagcagatctgccacgccctgaagaacgttgcctcgcggggcgacacccaggtggtgtatccggtacacctcaatcccaacgtccaggagcccgtcaaccgcattcttcgggatgcgccttcggtacacctgattgaaccgcaggagtacctgccgttcgtctacctgatgagtcgcgcgcatatcatcgtcacggactcgggcggcatccaggaagaagccccttcgcttggcaaacccgtcctggtcatgcgcgacactacggagcgtccggaagccgtggccgccggtaccgtgcgcctggttggcaccgacagcacccgtattacggccgaggtctcgcgactgctcgatgacccggacgcttacgaaacgatgagcaaggcccataacccctatggtgacggcaaggcttcggaacgaatcgcggcaatcatcgccaacagctga

SEQ ID NO: 507940 - DNA, 627 bp, Stenotrophomonas maltophilia
atgaagaaagtaactattgccgctgcttcgctgttgctggtttccgtggtcgctggctgctccaagccgtccccggaaggcgctgcggcggctccggaatcgcagggcgctgacgctgcaggtgcagccgccactgcacccgccccggtcagcgaagcggacaagaactaccaggaagcccttgccctgatcgcatccaatgccccgggcagcgctgagaatgccgccaacctgctgctgaaggcatcagcagacggcaacgccgcggcaaagttcgaactggccaagctgtatcaggcaggcaagggcgtcgcgcagaactcgggtgaggccgtcaacctgctgctggcatcggccggcgccggaaacgctgacgccgcgtacaagctggcgacgatgtacggtgcgggcgaaggcatcgagaagaacgaaggcgaggcgctgaacctctatctcaaggcgggtcaggccggcaatggcgatgcagccctgaagctgggcgagatctaccaggaaggcaagggcgtgcctgccaacgcaggtgaggcgcgttcgtggtaccagaaggcggcagatgcgggtaacgcgcaggccgccgagaagctgaaggccctggaggccaagtaa

SEQ ID NO: 507941 - DNA, 3570 bp, Stenotrophomonas maltophilia
atggtgacgtacaacgctgcggacgctgcgattgttacgttgcggagtgtttcaagggcgaagaatgatgcaacctacaagttgatcattgtcgacaatgcctcatccgacgaagagcgtcagaggatccaggcgtacgtcacgtcaactccggagttcgccagcggacagtggacctacattcagaacgagcagaatctggggttcagtggcggcaacaacgtcgggatcaaggcgctgctcgaagactcgacgatcagccagatctgtctgctgaacagcgatgtcatcgtcaccaatggctggatggaccgccagctggcgcatgggtatccggtggtaagcgcggttaccaatcgggccgacagcgaacaatgcgttccagatctcaatgcgctggacctgcagcaggttgccgcatctgcaaaggccttcgacaaggcgtaccagcaggtagccgaccaggcggagcagcgttacagggagttccgtggttgcgtacaggaatgtgacgtcacgttcttctgcgttttcattgaacgtggagcgcttgaggatgttggcctgctcgatgagacattcttccccggtggattcgaggacgacgactactgcctgcgcctgagcgggaagggctacgccattgcacttgcccgcgacgtgtacatccatcattttggatctgcatcattcggcaagcttgattacagctatttcgcaggccgagcgaaggagaatctgcgttatctggaatcgaagcatggggtttcatggcgacgccgacctgagaagccgctggcctctttcctggcggacttcaagcatgtggtacgcgaagccaatgacgccagcgcggatcaggtgcatctgctgcagctgcaccttggcacggtcgataggctggttgcccaccatgccgtcgagttcgtcaatctgaagggtgaattcctccattccgccaagcgttccacgcgggtgcggacggcgattgagcgcgcggatgcgttcgctcctcttgccgttgagtggaatggcttcaatgctgacgtgaagcaatggctgtcatcacccggccatgcggccgttgaccccgccgaacttgtcacccgtggcgagcgtttgctggaacatatctggtctgtggtggatgcgaacttcagcatcaatgcctcgctgcgtgggggcgcgggtggtggcgcacaagctgccgcggccagtaccgaatgggtgaagcaggagtgggcccagcgctccggagttggcaagctgctctggggggtcaggaaagggctgcagacgctgctgaacttccggggcaccgtgttcttcgggggctacttctatcccgagcgggagaaggacggctacttccagcggattcagatggtggaccggctggtgtcggaccagtggcggttgtatgtcgagaccgcggacctggtgggccgtacgtcggtaatcgatcgtccgcaacccagggtcatcgttattcgtccgatcggcagccgcctgaagaaggcggtgctctgggcaaccgtgctggcattcgtgctccgttcccgcaagatctatttccatagcgtgctgcggatgagcggcctgggcgtttccaggctgctgcggctgccgttcgttaaatcggtggtcgatatccatggcgtggttccggaagagttccggatgcatcacgactatttcaatgcggtcaagtacgagcgtctggaagagtacgcgtttgcccacgccggtcgggttgtggtcgtttccggtgtgatgcagaagtacctgcagggaaagtaccggaatcacccgtctccggaattcgtgcatttcccgatgttccccagcttcgtgcccttcctcggcgagaagaacaacgcgaagccgattgcggtctatgccggcggtctgcacaaatggcagcagccggagaagaccctgcgcagcatgattgctgtacaggagcactgcacgagctacttcctttctcccgatccggaaaccgcaagtgagatcgctgcggatatcgacccggacaacaaggtcgtgttcgactcgatgagtcacgacgcactgatgcgcttctatcgcaagtgcgactttggcttcatccttcgtgaggattcagtcgtcaacaacgtcgcgtgcccgaccaagattgttgaatatcttgccaacggcatcgtgcccatcatcgactcggaccagatcggtgacttctccgatctgggcatgctgtcgattccggttgacgagttcaacgccggccgcgttcccgaccgcgccaggatctccgagatggctcagttcaatttcggcgtctaccagcggatcaagtcggcgcgggatcgtggagcactggagctggcggattatctgctgggcgattccggtaggccgatgggccaggatgtgccggagcattccgaggtggacgtgctggtgcaggtgggcaactttgaagccggcggcctggaaaacgttgtggttgaactcaacgagttcctccgtggctgcggaatgcgcttgaccctgctggtgctgggaacgcaggggccggctgctgagcgcgcccgccgacttggccagcaactggttgccattgagtactcggcgtcggcctatcgcgaggtgctgcagaggctcaagccgaaagtgctgctctcgcactactcgatcgaggggatcgacgtttgccgtgagctggatgtgcctgtcgtccaggtcatccacaacatctacatgtggctggcgggcgaagagctgcggcgcttccaggaggcggctgcgctcactacccggttcgttgcagtgtcggagacggtcaaggaatactcggtacgccgtattggtgtcgaggcagatcgctgcagcgtgatcaacaacggcatcgatgtcgaccgcttcacctccatcgaccgcatggcggtccgcaaccggctgcgtcgccagcacaacatcggagtcaatgacttcatcttccttgatatggcggcagtcaatcatcagaagaaccacattgatgttgtccgggctttcagtcacgccgtgcacggctgtgacaatgcgaagctggttgtagtgggcccggtctacgaaaagggcctgcatgctgagctgcaggcgctggtgaagcaggccggactcggatcaagggtgttgctcattgagccgaccagtgcgccatgggagctgtatgcgatggcagatgcatttgttggtgccagcttcttcgaaggtgggccgttgacgttcctcgaagccttggccagtgatctgcctgtaatcttcccgagggtgggagttgccagtgagtacgacggcctgcccggtgtgcatctggtcgacccggctgttgatatcctggattatcagggctcaatagatggactggtttcccgcgctggcttcgtgtccgatctgacggaaaaaatgatcgaggtgtggtgtaatcctgtccgtccaggctttgatcgcaagcagcttgcatcgctgcagaaggattctgcctacatgaagtatgcgcgcctgctgtcggcgctgaaagaacatcccgtcgctctccaataa

SEQ ID NO: 507942 - DNA, 2265 bp, Stenotrophomonas maltophilia
atggtgaccgagcgtacctttgacatcggcaggttctccagtgacgtgcgcgatgcgtttggatttggctactacctctgcatcggtagggatgcaaaggaaatcgccgcagccctgcgcgggaacctgctggatgcgatcgatgagcctgccgaagggaaggtgccacatgctgtagttctcgatcttcggggggcagtggatgaggtacttgcgaaccttccagagctttatgccgatcgcgttcgctacattctggtcattcacgatatccaggagcaggctgaggccgcactgagagaacgggaggcgctggaacgacgggtgatcactgtcggttaccgtaaagcggcggcctactacgatgtcaatccatatgcatcgctcaatgtcgcccagggttgcttcgtggcgcccttcgagcgtgtacccgatgatgcgttgaagagcttcaatctcgaggttctggacgaagagcgcctgctgcacaccgatatgcttcgcgagacgggccggcgcagtgatgcgcactgtgtccggtatcgatacgccgccgagtacatccggcccggtgatcgcgtgctcgacgtcgcctgtggcctgggttatggctcccgcatgttgttcgaaaccactctggccggttcggttcttggtgtggatctgagcgatttcggtatcgagtatgctcgtgcccattatgcgcttccaggcaaggtccagtatgcggttggagatgcggaatcgctgaccggcatcgctgatgcgagcattgatttcattgcagcgttcgaaaccatcgaacacgtccctcatcctgatcgctatctccgcgagctgaagcgtgtgttggcacccggcggcagagtcatgctctgcgctcccaacgattggaccgatgagacggggcgtgacccgaatcccttccatctgcatgtctatacctgggacaagctgagggctgaagtttcttcgacgttccttctggagaaggccttcatccaggtagctggcggtgcgatgaaatgccatttctcgccccggtcgtggcgagaggtggatgtcaacgagccggagtatgaagaggccgaatgggtggtgttcctcgggatgaaggatcctaccgagccgggtggggcggttttcaaggaaaccgcatgcgagataccgagttcgtcgcgcttcaatgtgtctgcgttcgcgcgtgactatctcaacccgtggctggtcaaggcgatggtggctattggccagcgttcgaccaatccgaacctgcttgcccgtttccgtcgcaaggtgttcgccagcgctccgccccagtccgttgattctggtgccgcgctgtgcgggttggtctatgagcagattgaaagtggcaagcgtgatgagcgcgaggcgctgaagcgggcggttgaccgctatcttgaaggcaagttgaccaatcctcaccagcgtcgctggagagtatcgatcgcctatgcatggggcttctcggaatttctccagagcaatatggccgaggctgagcactatctcaccgtctgctcggaaatcgaccccgttccctatagccccatcctcggcaacaaaacgctggatgcgctgttcctgcgcgcggtgatccatgccgggcgcaatgaattcgatcaggtccgtggtctgctgtaccgatccatcagtctggttcggcgcctttcaacaggcggcccgaagaacagttggctggctgcatggctgaacgtcatcggtgccgaacacgcgccgctgcctttcgggctcgccgaaatggccttgctgttcgacaagagtgcgcgtgccgcctacatgctggctgtggtgggaacggctgccgaacgtcctggcgcgttcgcgcgggagtcccgcggattcctcgaacgtcagattgatcacctcaaggctgaattgagagcggtccattccggcaacagtgccaagacgctcgaggccatggatctgaacgcgggcatgcagaggctccaggcccatgccgatgccctcgcttcgcaggtgatcgagcgcaaccagcgtaatgacgagctggctgccgagttaatgcgccagaatgcccgcgccgaagaactggctggtgaagtaatcagggagcacagccgggtcgaggagcttgctggaaagatcgttgagctcgattcgcactcgcagaatctggcccgggagatgcagtcggaaattgcatcccgcgacaggattatcgcgatgcttgagacgcagttgcggaagcgatga

SEQ ID NO: 507943 - DNA, 1434 bp, Stenotrophomonas maltophilia
atgtcctctgataccaatatttccattcgagtcgaggatctgggcaagtgctaccagatctatcccaatcccgccacgcgaatgaagcaggcgctcgccaaccgcgtccatggcgcactgggaaggacgccacccaagtatttctccgagttctgggctctcagggacatcggttttgaagtgccgcggggtgaggcctttggcgtcattggccgcaacggcagcggcaagagcacacttctgcagctgatcaccggcgttctgacgcctacgcagggctcggtgcagacgcgtggacgtattgcggcgctgctcgagctggggtcgggattcaatcccgaattctccggtcgagagaatgtctatctcaacggcatgctgttgggtctgtcgcgcgcggagatcgatgcgcgcttcgacggaattgctgctttcgccgatatcggtgagcatctcgagcggccgatcaaaacctactccagtggcatgctggtacgccttgccttcgcagtgcaggtgcagatcgatccggatattctcatcatcgatgaggctctggcggtaggtgatgcgctgttccagaagcgctgctttgcccgtatcaaccggctggccgatgatggggtgaccatcctgttcgtgtcccatgaccaggaaacagtgcggacggttacccggcgctcgttgcttctgcaccaggggcgcgccattgcgatgggcacgtcttcggagacgctgcgtgcgtaccggcgcctgatcaacaacgaagagtccaagtacttcgcctcgttggcggagcggcatatcgtggttgaaggtatcgacccatcggctgacggcaacgaggtggcgctgccggcaagcgtcatgccgtccgaggatgtgcctgtggcacctgactcggcgaccgaagatgtcaccgcaacggaggttccggagatcgatgaaacgtcgaccggaaccgggcacgcactggtgcagcgggtggtcacccttgatgaagcgggtgagccgtgtgccgtgttctatccgggcgagaaggtcaggatccagattcagttcaaggcgcaggtcgatctcaagaacctgaacgtatcgctacggatccgcaatcgcgaaggcctgaagatctactcgtggggaaccctcaaccaggacatgcaggtcgcggccggggtgagtcaggcgcctgtgttctgggagcggaaattcgacaagggcgaagaagcctcggccttgttcgacttcgtgtgcccgctgggtccaggcttctatgagatccaggcgatcatttcgcatgaaggacagccggattactccgatcagaccatccttcactggaaggatgaagcggcatttttccaggtgttcctggaccagaaggcctaccattttggcggaagtttcgacctgaggatgagtgctacatggtga

SEQ ID NO: 507944 - DNA, 825 bp, Stenotrophomonas maltophilia
atggcacaacaatttagtgggtctctgctgaagctcggccggaccctggttgacaatcgcgatctgattgtcggcctgtcacggcgcgagatcgaaatccgctatagaggcgcgaccatgggcgtcctttgggcgctgttcaatcccatgatcatgctgggcgtgtacaccttcttcttcactgaagtacttcgttcgaagtggcagggtatcgcgcagcagtcgagcatcgatttctccctggtgctgttcccgggcctgctggtgttcacgttcttttccgaatgtgtggccaaggcgccaaccctgatcctcaccaatcagagctacgtcaagaagatcgtgttccctctggagctgctgccgatcatcaatctgatcagtgccctgttccacgcattgatcggctttgtgatctgggttgtgttctatctcgtcatcaagggcggattgcacgcgactgtacctctggtggttctgccgctgattccgcttggcattctcaccctcgggatctgctggagccttgcagccctcggcacctacgttcgcgatatcacccacatcgtaacggggcttctggctgcattgatgttccttgcccccattttctatcccatcaccgccctgcccgaaaagtaccgcggggccatcatgctcaaccccatcagtgttgccgttgagcaggtgcgtgcactgctttaccacggcgtgatgatcgactggaaacagtggttcatctacctgggtgtgtccgttgtggtggcatctttcggactttgggtcttccagcgttcacgagccgggtttgccgatgtcctctga

SEQ ID NO: 507945 - DNA, 282 bp, Stenotrophomonas maltophilia; identical to SEQ ID NO: 502614

SEQ ID NO: 507946 - DNA, 1545 bp, Stenotrophomonas maltophilia
atggcacaagtcatcaacaccaacaccatgtcgctgaacgcccagcgcaacctgggcaccagcggcgccaacctggccaccaccattcagcgcctgtcctcgggcatgcgcatcaacagcgccaaggacgatgccgccggcctggcaatctccgagcgcttcagcacccagatccgcggcgccaaccaggctgcccgcaacgccaacgatggcatctccctggcccagaccgccgaaggcgcgctgggtgagatcggcaacaacctgcagcgcgtccgcgagctggccgtgcagtcgcgcagcgccaccaactccgactccgaccgtcaggccctgaacgccgaagtgcagctgctgaagcaggaaatccagcgcgtcgccgaacagaccaacttcaacggcaccaacctgctggacggcaccttcaccaaccaggccttccagatcggcgccaaccagggccagacgatcaacatctcgcaggtcgcgaacgccaacatcagcaagctgggtaactggaccagcgcctcgcacgacgcttcggtaaccggcgggctcccgaatggcggtgctgtgacagccatcaagtccacttccgccgtctccggcgcgttcactgcagttgatacctcgggtaccgctgcattcaagctgagcgttggtggcgtcgatatcattgaccgcgccgcaggcaccgctgttagcgcaactgacatccagaccgccatcaacgacaagagcgatgagctgaaggcagccggtatctcggtgtccggtacggtcgccggcaacaacattcagttcagcaaggccgatggctcgaacttcaccatcacccagaccggcggccaggcaggcagcggcttcggtggcgccggctttgcggcagctgtgaccaatggtactcaggcagtagcggcaagctacaacaagaccagcttcaccatcgcgggcaccgtcaacggtgctgtgggccagccggtgacgatcgaactggatggcgcaaagaatgcaggtgaccgcgccacccagatggtcaatgccgtcaacgccaagacccacgaaactggtgttactgccgcgttggtggagggcaaggtccagctgaccggcaaggaaggcaacttcaccatcggcgtggtagccggcggagacgatgccgctgcggtcaaggagcagaccggcctgaccgccgctgcaaccaacaactacgctgcaggtggcgccaagaccggcttcgctgatctggacatctcctcgaaggacggtgccgacaacgccatcctggcgatggacgcagccctgaactcgatcaactccgcccgcgccgacctgggtgcgatccagaaccgcttcacctcggtggtcgcgaacctgaacacctcgtcggagaacatgtcggctgcccgcagccgcatccgcgacgtggactacgcttcggaaaccgccgagctgacccgcaaccagatcctgcagcaggccggtaccgccatgctggcccaggccaaccagtccagccagaacgtgctgagcctgctgcgctga

SEQ ID NO: 507947 - DNA, 693 bp, Stenotrophomonas maltophilia
atggggttgggcggcagggcctgcggccctgcacccgccgacgcggtagtgccggccgctggccggcagcaacagcaacagcaacagccgaagcaacagcaacagccgaagcaacagcaacagccgaagcaacagcaacagccgaagcaacagcaacagccgaagcaacagcaacagccgaagcaacagcaacagccgaagcaacagcaacagcgggctacccgtgggatggcggggcggtgtcggagtgcggggacgctgcaagtacgtccctgtaagcttggcagccgcatccatgcggctgacaccccgcactccgacaccgccccacctctgacagatttctgcgatctggtagatccacgccgtgcgtggatgaatttctgtcagatatcgaaatcaatctggggtcggatccgttttcctgcggaaaacggatccgaccccatgccattccgacagctcgcaagaatctgtcgaaggcggggtgggtccggttgcgggggcgtgagccgcatggatgcggcgaccgagcttacagggacgtacttgcagcgtcccccgcaaccggacccaccccgccatcccttaggaagcccgccgttgctgttgcttcggctgttgctgttgctgccggccagcggccggcactaccgcaggtgcagggccgcaggccctgccgacccaccctaa

SEQ ID NO: 507948 - DNA, 357 bp, Stenotrophomonas maltophilia
atgagcaggaacctgatggaagcgcgccgcagtgagcttttggccgatgccgccgcccaggcggctgacgtcgccagggagctggggctcgaccaggaccgcgccgaccaggtaggggcagcggttgctgaccggctggccgagaactggtccggccaggtgctttcgttccccaagaatcacgccttcaagctgagccagcgagagcgtgagatactggccgcccaccgcgacggggcctcctacgcggagctggccaggaagtacgacatgactgaacgcggcatccgtaagctgatccgacgcgccgagctgcgcgatcgcgacctccgccagatggggcttttcgccccctga

SEQ ID NO: 507949 - DNA, 468 bp, Stenotrophomonas maltophilia
atggcccgcagccgtccgccaaccgaccgccgcaagcgcaccttggcggccattcatgccgccgccaaggcgctcggcctcgccgaggacgtctaccgcgacctggtgcagcgcgtgtccggccagagcggccagccgcagcgtagcgctggcagctgcgaccagcgccagctggacgcgatcgccaatgagctgcgccgcttgggcggcatgccggcgcgcgcggctcgtgccgcagagcgctgggccgggcgtcccaagggcgatctggctcctcagctggccaaggttgaggcactcctcgccgatgccggccggccttgggtctacgcccacagcctggcattgcgcatgtgcaaggtcactcgcatcgagtggtgcaacaaggagcagctgcagaaggtgattgccgctctccagtacgatgcgaaccgtcgcgcacatgctgtaccgaaggacgtcccatga

SEQ ID NO: 507950 - DNA, 903 bp, Stenotrophomonas maltophilia
atgttcattcggaacgtcacgatgttccagttctcgcccgtgatcgactggtcgcaggtggagaagctgctaccactgtcccagctgcaaccggtgggggcactggagctgtcgtcgcgcgggttcatttctccgtatggtcgtgagagcggtgcggcgttgtcgcaccgctccggcgcgttcctctggctggcgatcggcaccgagaccaagatcattccggccgcgagcgtcaatgaaatgctggagacccggctgcaggcgctggaagcgcagggccggcggccaggtggccgcgagcggcgccgcatgaaggacgacctgctgcatgagctgctgccccgcgccctggtcaagtcggcccgcgtggacatgttcgtggatacccagcggggcattgcgttcgtagacaccagcagcagcacggtcgcgagcgacgccgtgtcagaagtgaggggcctgcttgggagcttcccggccagtaggctccgcgctgcgatcgctccccgttccattctgacaggctgggtcgctggcgagcagctcccggccggcctgtccttgggcgaggaatgtgagctgcgcgacccagttgagggcggtgccatgatccgctgccagcaccaggaactgcgctgcgacgaggtggaaaagcaccttgaggcaggcaagcaggtctatcggctggctttgatcatggaggacaccctgtccttcgtgatcagtgacgatctggtcattcggaagctcaagttcctcgacggcgccttggagtcattggcggaaatggcagaggacgagcaacggcaggagctggacgcccgctttgccctgcaggccggccagctcagcaggctcttcgacgtcctgcagctcacgttccaactggaagaggagggctga

SEQ ID NO: 507951 - DNA, 387 bp, Stenotrophomonas maltophilia
atgtccgcgcaaaccacgcgttgccaaggcatccgccgctacaaggttgagcaggattggggcgatgccgaggtcacccttgatgtcgaccatcgcgtcctgaccatcgagctggccacgcagctgaacaagttctggactggagccgaagagcgtctggaagcggccgatggtgacgtcgtcatggcggtggtcaagatggcagccgctgagttcctgggctgggttcttgacgtgaatcagagcctcaacgtcgtcggcatgcagaaggagttcgacgagctggaaggctggtgcggggcgaacggtgccattcgccttgccgacttcgacggccggccggacctggattcggagcttctgcgcgtcacggagctggaggtctga

SEQ ID NO: 507952 - DNA, 459 bp, Stenotrophomonas maltophilia
gtgatcgcctactgctgggccaccggcctgatcgagttcggcgaacacctgccgaaacacgcaatcctcgttgccagcggcgaagccgcgcagctgcgcaaggtcgtcagcgcccgtgcccgccacggtcaaggcgagagccagggttgcctgctggtgcccggcgtccccgaagcggtcgaccaggccgcgaagggtgacgcgctcggccactggctcgcatggtgcgcccaggtgccgaagggcctgcgctggggcgggatggccgcagctccggcacgccgcgatccgctgaccaggaagacccaggtcatcgcagtggttcgggacggcggccggatcgtcgccggcgcccggccgggtatccgtcgactgctcgattcgctgggcgaggaagttcccgcctggcagaccgcccttactgccgcccaggcccaactgttgaaggagaagaactga

SEQ ID NO: 507953 - DNA, 192 bp, Stenotrophomonas maltophilia
atgaacggtgaacagcgacttgccacgtgctgccccagctgcggcgtcgccgcgctgttcgcaagcctcgccacggtcgaaaacgatcctgagcagctggtgctgtatgtgatctgccaggagcaggatggcggctgtggcatcgagtactcctttatcgagcgcctgcagacgccgggggtggtcgcgtga

SEQ ID NO: 507954 - DNA, 300 bp, Stenotrophomonas maltophilia
atgtctaaccatgcccttcacgatgcctgctacctggcggtgctggccagcgacattgccgatgccaccgtgcgttccgaggtcgagctgtttgcctacgagcagcgcgacgagaacggccatccgatgttcgacacgcgccagggcgccaattccccggcggacctgcagcgtgtcaacaacgcgatcgcctacatcgagcgtcgcggatccgccgcgttcccctgggatatgaagcggcgaatcgacgcgccgaccctggtccagttcttcgacaaggagcattccgatgaacggtga

SEQ ID NO: 507955 - DNA, 624 bp, Stenotrophomonas maltophilia
atgaccaccagcaccattcccgaaggctatcgcgaggatcgcaagggccgcctcgttcaggagaatcagatcgcggcgatcgatcttgcacgtgaccagctggtcgctgaactgatcagcggcgccaagaagctgcatcagcagatggccgagttccggggcactgcgttcggcgatatcgccgcgttcgtgcagctgagcgccgagcagtacggtgccagcattggcggcgacaagggcaacgtgaccctgatgagctatgacggccgctacaagatcgtccgtgcggtccaggattcgatccagttcgatgagcgcctccaggcggccaaggcactgatcgatgagtgcctcaacgactggaccgagggctcgcgcgccgagctgcgcaccttggtgaacaacgccttccgtgtagacaacgacggcagtatcaagaccggtgaagtgctgtccctgcgccgactcaagttcgacgatccacgctggacgcaggcgatggcggcgatcagcgatgcagtgaccgtggtgggcagcaagacctatgtgcgcttctacgagcgcgatgctcaggggcagtaccagcccatcagcctggacatcgcggcggtgaagcatgtctaa

SEQ ID NO: 507956 - DNA, 255 bp, Stenotrophomonas maltophilia
atggctcgcactggccgccagcgatacgaccacctgcgggccatgcggtttgccctgtgggccaaggcgcaggaccagcgctccctgacaccgctgcgcatcgcgcgtctgctcggcgtttcccttgacgccgctcgccgatggcgagccgattggttcacagctgtcagccccgtccatgtcgagggcatccccgagcagcttcgccccatgtacctgcataccgattccgccgtccaaggaggcacccaatga

SEQ ID NO: 507957 - DNA, 483 bp, Stenotrophomonas maltophilia
gtgactgcgccgagcatccgcctgcaggcagccttcgcctccgtgctgggcaccaacattctcgattctcgcacgctgatcgacggcgtcatggcccacggttttgagtaccgcggctacgtgcagcacgccctgaccaaagctgtccagtgcggcatggtcgagcatgtcggcggccgactggcccggcgctatcgcctgaaccaggactggaagatcgacccgaaacagttggcagccgcccaggctcagcacgcaaagatggccagcagcgcgccgaagcgctgcgatggcgagcgtcgcacacagggcgctaagcagtacgtcggcccggcgatcaacgaaggaccgctgctgccttcggtcggcacgccatgcttgtcgcaggaggagcgcgagggcgagctgccgccgtacctgggtgggcgcatcgtcgattccctgcattcgcactttgaccgaatcctcggtggggtggagtga

SEQ ID NO: 507958 - DNA, 309 bp, Stenotrophomonas maltophilia
atgaacgttgatcgtagctctgacatgcttttcgctgccgccaacactgcgcgcgaactggaaaacgccggcatcgacgtgctgacccactacagcaacgggcgccgcccggtgctgatcatcacccagccgccggccgagattgaaggccacctcaagcgctggagccccaatggcagtggcggccgcgatcgcgtgctggcggcggagtaccagggcctgcaactggaatggaccgagcgtccgccggtggtcgtcaccatccgctccaggcgcgacaccttcgaaagccgcgaggtggtgctgtga

SEQ ID NO: 507959 - DNA, 390 bp, Stenotrophomonas maltophilia
atgcagctggccctgctaccgcaagagctgtcccccgaggcggtgctggcggagctgcagggccgccgtggtgccgccaacggcatcactgcccgcgacctggtgcatgccgtcacgcagcgcttcaacaccgccgacgagcggcggctgcgccagatcatcgagaagctgcgtcgcgatgggcatcccatctgcgcccacccagcgaacggctaccacctggccgccagcgcggaagaactggaccggtgctgcgagtacctcaccggtcgcgccatgacctccctgcagcaggtgtgcgccatgaagcgcgtagccctgccggatctgtacggacaactcgggctgaccaagcccatcaccgacgaggacaccaacgatgaacgttga

SEQ ID NO: 507960 - DNA, 312 bp, Stenotrophomonas maltophilia
atggccgccccaagcatccgccactgtcagggtgctgcgcgcaaccgcgccgagcattcggccaacagtaagcgccggcggcgcattccacctgcaaactacggctgcctgatcggaaacgaagtaggtgagccaaccatcaatgttggcggtatcgccaccttcgatggggggctgcagtacaccctcgcagtcactacaggtggcgaccctgtggtcacgtcagagaaaaccggacggcgctggacgatcagctggcccaacctggttcggctcgcggttgccgacggtattgaccgggagggcacctga

SEQ ID NO: 507961 - DNA, 243 bp, Stenotrophomonas maltophilia
atggcgatcgcttccaccgccgaaggcacgcagtacctgcgcgggtttgctgtccaggtgctgcgggatgcggagctgccgcatcgccaggtgacggtcatgcaccgcgacatcttccgccgcgcaggcattgagtggctggacggccagagcatggacacctgtctggccggcctgtcccagcagcagctgcgcgcccttatcgatcagctccgcgatgacgaccaggacgaggaggaatga

SEQ ID NO: 507962 - DNA, 1176 bp, Stenotrophomonas maltophilia
gtgacgctgcgcctgaaatcgatcctcgcccgcgccggcatcaagcaggggacgctggcaaaggcagtgtccctcagccgcccggccctgaatgccttgatcaaccacggcgtgctgccgaccggctgcgaccagccccgagtccgctccgccatctctgtgttcctgctggaaagcggcgccccggccgtcgactggcacctgaaagaggagccggcgtgcgctaacacgccggcccgggtttccccaccgcaagaccccgataccgctaccgaaatcaacgacgaggaagaccctatgctactgcgataccaggcactgaccccacaggcccgtaggcacttcggcctgccgggcaaccctttcgccgaccccgccagccacgacgaggtcttcctgtccccggatatccggtacgtgcgcgagagcatgtatcagatcgcccgcaatggcggtttcgctgccgtgatcggcgagagtggtgcaggcaagtcgaccctgcgcgaagacatggtcgatcgcatccagcgcgaggagcaggctgtcatcgtgatccagccctatgtgctggccagcgagggcagcgacagtgtcggcaagacccttcgcagccaccacatcgccgaggcgatcatggcagcggtgtcgccgctggccaagccaaagagcagcccggaggcccgcttccgccagctgcacgaaagcctgcgcgatagcgcccgcgctggccacagccacgtgctggtgatcgaagaggcgcacagcctgccgttgcccacgctcaagcacctcaagcgcttccgtgaattgaaggacggcctgcgcccgctgctgtcggtgatcctgatcggccagcccgagctgggcgacaagctttccgaacacaacccggaagtgcgggaggtcgtgcagcgcattgaaatcatgcacctgcccgcgctcgacggtgagctggagaactacctcgcgcaccgcttccgccagctgagcgtgccgctggaaaagatcatggatcgctctgcgatcgaggcgctgcgggtgaaactggtgccgccacggggcaccgggacgctgctgtatccgctggcggtccagaacaccctggcagcagccatgaaccgtgcggccaacctgggcgtgccgaccgtcaccgccgacgtggtccggggggtctga

SEQ ID NO: 507963 - DNA, 1806 bp, Stenotrophomonas maltophilia
atgtccgccgaagccctcatccatgcggcggccggcaaactgctggcggcgccgcacggtagcaagagccgcatcgcggccgagctggccgagcagatgggttgctcggttcagaccgcctaccgtcgcctgcagcaggtgacgggcggcatcaagccccgcaagaagcgatcggatgctggtgaactcgcgctcacccgcgacgaggccgccgccatcgccgccctggtcgaagagacccggcgtctcaccggcaccggcaccctcccggtcgaggacgccgtggagattctgcgcgcaaacgaccgcatcgaagcgctgcgcgtcgacaaggcgaccggcgagctggtgccgttgagcgtttcctcaatctgtcgcgccattcgcgcctacgggttccatcgtgaccagctagcagcaccgactccggctgcacggctggcatcgccgcatccgaatcacctctggcagatcgacgcctcggtgagccgccagttctacctggcagcgaatggcaccgaggtgatggacaagcgccgcttctatcgcggcaagccggagaacttcaccaagatcgccgagaaccgcttgtggcgctatgcgatcaccgaccacgcgagcggtgcgatcgaggtgttctacgtgctgggtgccgagagcagcgccaatctgctgtcggccctgatccacgcgatgacgcggcgagagatgggcacgatgcacggtatcccgaagctgctgatgatggaccccggcagtgcgatggttgcggcgacgacgcgcagcttcctgtcggcctgcggcatcgaagtgatcatcaacgaggtcggcaatgcccgtgcgaagggccaggtggagaacgcgaactacctgatcgagacccacttcgaagcaatgctcaaggccaggtcgccggtcaccagcctggaggagatgaacaccttggcccagcagtgggcgcgggcgtacaacgcaacccgcatccacacccgcactggcatgaccaggcgcgatggatggctgcgcatcaccccggaccagctgcgcattgccccggatgtccaggtactgcggcagctggctaccagcacgccgaaggcatgcacggtgcgtgactgcatcatccgcttccgtggcaagcagtacgacgtgcgtggcattccgggcctcatcaacggccagcgcgtggacgtggtggtcaacgcgctggagccggacaacagcgtgcgtgtgctgatgccgggcgaacaggacagtgcgccaattcacttcgttgcaccgcgcctgcagcacgacgactggggcttcctcgataccgctgcccaggttggcactgagtatcgggccgcgcccgagacgccggcggacgcggcgcgaaaggaactggatcgcctggcgatggaggtcaagagcgacgccgaggcgatcgccgcgcgcaaggcccgccgcgtgccgttcggcggcaaggtcgacccgatgaagcacattcgcgaggcgaatgtcgctcccagcctgccgcgatcgggaaccctggccgagctggacgcgccccaggtgctggcagctcagcgcatcgagcccgaggtcgtccgggccgagttgcccccgctcaaccacgttgaggccgccatgcgcctcaagccgctggtcgagcggtcgggcaatacctggtcaccggaaatgtatgcacgcaccagccagcgctggcccgatggtctgccggtgcatgaggtcgaggcctgggcgatcgccctggtcgaaccagagcgtggcggcctccgcgtcatcaacggaggtgccgcgtga

SEQ ID NO: 507964 - DNA, 918 bp, Stenotrophomonas maltophilia
atgaccaagaaagacaccgcaggccgcaaggcagtcgcacaggccgaggcagtggggccggagttcattggcaagaccgacgccaatgacgcggctcagatggagcagatgcgtgagcgtcagcttgcgctggttgaacagttcggcgagggccttgcatggcacccggaccactacgaagcggcgatccgccgcgagctgcatcgcgggtgcgaggcgttcctgcgcgctggcagctacctgctggtggctcgcgagtgcagcgtccacggcgagtgggcgggaatgctgcagcgcctgggcatggaaccgcgtcaggcacagcggatgatggaagcggcccggcgcgtggccgcattgccgaatgcgtcgacgtcgacgcaattggtcaccgcgatcaagagcgagagcaagctcatcgagctgctttcgctgccggaggaacagttcaaggagctggcggagaccggtgagaccggcgaactggaactcgatgacgtcggcaacatgtccgtgcgcgaactgcgcgacgcggtccgtaacgctcgcgccgatatcgaggcaaaagaccagcgaatcagcaagttgtccgatgacctgaacagggaacatgagaagacgaccaaggcacaacgccgctggaagactgccgaatccgatcagcagctgatcatcctcaagcaggccgtcaccgaagccgagcaggccgtcctcgctgccttgggcaatggcaaggccggcttgatggcagcagtccgcgcatgcgccacacacgcctccgagaccgaccaggacaccgatgcggcggttttcctcagcgacaccatcggccgtctgctcaatgcggtacgcaccgtgcgtgacgacgaggagctgccgctctccctgccgctggtacatgacggctcggaggcctga

SEQ ID NO: 507965 - DNA, 309 bp, Stenotrophomonas maltophilia
atgaacgtcccggcacagcaacccgtgcggcgggcattgcgcctgatcttcgccctgcaggggcacgccttcgatgggctgcgcctcaagcagttggccgattcgatcaaggcaacgccttcgacggtcctgcgtgacctggaggtgctggccgacgaaggcatcgcagagcgcatcgccggccgcgatgagtactggcgcctttccccccgactgatccagctcgctcgcgctcatgaacaggaactggcgcgtgtgcgccaacgcctggaagagaccgagcagcgctattcccgcaaccccaactga

SEQ ID NO: 507966 - DNA, 213 bp, Stenotrophomonas maltophilia
atgcgttccactgaccccggccttgatcttcacaaacgtgtgcgcgccggcttcgtactgcagggcaagaccctgaccgagtggtgccgtgccaacggcaccactgtgaccaacgcacgtgccgcattgctcggcacctggaacggcccgaagggccgcgcgatgcgcagccggatcgtgaaggcggcctgcatcgatcgggtgcaggcatga

SEQ ID NO: 507967 - DNA, 432 bp, Stenotrophomonas maltophilia
atggaagacgggggattcaggcaggtcgacctggctgaaaggcttggtatatctatcgatcgcgtaaaaaacctgacctcggggcgggtcaagaagctgtcgtcagacgaaatgcgcgggctggtggaaaaactacacgttcgcgccgagttcctcgccacaggcagcgggccggtgttcgcccagccagcagacgtcgagatgggccggcgaatgaagctgctttcggatgcgtcacagaaggcatcgaccttggaccttccagagagctaccaggcgctcgtccgcgacatcctggtcggtgcggcgctgggccaatcggacctgctgcagtccacgatcgatggcttcgttcacgacgtccgttgcgctacggatgagtccagtgttgccgtcaaatcccgcaagacgacaaggagaaagtcaccatga

SEQ ID NO: 507968 - DNA, 384 bp, Stenotrophomonas maltophilia
atgaagaagctctatttcgctctcatcgccctgctgctactgaccgctgcaaaggcgaccgttgggcaggagttcaacgctgccaacctcgctcagttggaagtaggcaaaaccacgctcgccgaagctgtcgcgctgcttggtgcggagccacagagttcgaccgtgggcaagagcggagcaatcgcgtacctgtggcagcacgtccagtcgaagtccagtgtttggaccgggcgttctgacacccagctcaagcacgtgatgctggtgttcaacacggatggaaccttccagcgcatcctgcagctgcgcggcgtcgacttggatcccgacgcgcggaagagattgatggaacagcctgcggcgctgcacgcggcgaactga

SEQ ID NO: 507969 - DNA, 732 bp, Stenotrophomonas maltophilia
atgacgaccaagaccacgcgcggcatccgcaacaacaatccgggcaacatcgaacgcaaccctgccaacaaatggcaggggcgcatgtcccgcgaacagatgaccgaggagcagcgcaaggaaacgcgcttcgaagtgttctccgcaccggcctggggtatccgcgcgatggccctgctgctgatcaactaccaggacaagcacggctgcagcaacgtgcggcagctgatcgatcgctgggcgccgccgagcgagaacaacaccgacgcctacgttagcgccgtggcgggagccgtcggtgtcgccccgacccagttcatcaatacccacgaataccgtcgcatgcacccgatggtcgaggccatcattcgccacgagaacggccagcagccttacagctcggacgtgatcgaggaaggtctgcgcttggccggcgtcgtcaaccccggcgcgaagccgctggttgccgtgcctgcgtcggtcaccacggcagccgctactgcggccgctgcgggcggcacgatggccgccgtggaagcagcacagcagctgcagccggtcatccagggtgtgctgccagcgatccagcaagtcaatgctgtggcgcaggccaccagcggcatgcccagctggctgcgcctggggatcgccttcggcgtgatggcactggccggcgccagcatcttcacctggtggcgcctgcgccgtgcccgcaaggcggtgagtgcgtga

SEQ ID NO: 507970 - DNA, 483 bp, Stenotrophomonas maltophilia
gtgaacccgcacctgaccgccaagcacgtcgtgggcgctgcaacgggtccggtcgtggtgcggttcgccctggctgtggtggttgtcgccttcttcttcgggctctggctgggccaccggtggggctcgggaagccaggccgatcgggtcgacgcattgtccgatcaggtcatcgcgctcagcgcggagcgcgacaccgcgcgcaacgtcgccgccggcaacgccgatgcagttgccacattgcgggccgccctcaagcgggaggcagatacgaagctggagcagcagcgcgctgctatcgccgaactggatgcccgtggagaccgcatcgctcaactcgaacgcctggcggcacagcgccagcaggccctgaccaagaaggtggattccgatgaagactgcaacgtgcttcgcaccactcctgtgtgcgctgctcttgctcgcgggctgtggggagaccaagcaaccgctgacccgcactga

SEQ ID NO: 507971 - DNA, 315 bp, Stenotrophomonas maltophilia
atgaagatcgagctggaactttggcaggccctgtctttggtgatcatgctcctcggaacgctggtgggactggtcaagtggggcataggccagatcaaggcgagcattgatcagcgaatggccgggtttgaaaaggcggcagagggttggcgcaagcaggaactggaactggtgggtctgcgggcggagctggcggaaaagtacgtgcgtagggacgaccacatccgaagccagacggtaatcgaggcgaagctcgacgcaatcaactcagagatcaagacgattcagatccaaggagcaagacgtgagcattaa

SEQ ID NO: 507972 - DNA, 315 bp, Stenotrophomonas maltophilia
gtgagcattaatttggacatggataaggttcgccgggaaaacctgcgctgggtgatgctgctcgggttgcacaacgccgcgccctacggcgcatatgaggcggtgctgctcagcattgcgcaggcgctgtacccggacgccacccagctggaggtgcgtcgtgccctggactatttggaagaccgtcgcatgatcgagttggacaagcgcccggacgggcgctggcatgccgacatgacccgcctcggcaccgatatcgcggagtacaacgcgaagtgcgagccgggcattgcccgccccgaacggtattggtga

SEQ ID NO: 507973 - DNA, 558 bp, Stenotrophomonas maltophilia
atgcccccggccagcaagattgatcagcttccccaggatgtccgcgcggagctggatacccgcctgattgcctctggcttcggtggctatgtcggcttggccgactggctcacggagaagggcttcagcatcggcaagagcgccgtcggcgcctatgggcagaagctggagcggcggctggctgcagtcaaggccagcaccgaggcggcgcgcctgatcagccaggccgcgcctgatgatgccgacgagcgcagcaacgcgattatcagcatcgttcagaccgagatcttcgacgcgctgttggcgctgcaggagctggaagagggtgacgaagatgggatggatcctggtaagcgcatcgcgctcctgggaaaggcggccaagaacatcgccaccctcagccgtgccagtgtgaaccgccacaagtgggcaactgaggtgcgggagaaggcgcttcaggaggcttcgcagcgagtggaggacgcggcacgtgcgcgaggccttggcgctgacgacgtagccttctggcggaacaccgtactgcagggagtcggctaa

SEQ ID NO: 507974 - DNA, 1731 bp, Stenotrophomonas maltophilia
gtgtccgagctgacgccactgccggataccgagcgcgttctggattgggatgaccttccggaaagcgtccgcaccatttcgtccaacttcgatccgcgtgaggccggcgtgctgatggcccaccagtccgaatggatccggatgcaggaagggctggatattgcggtatgcgagaaggggcgtcgcaccggcatcacctttgcgcaggcgctgaccgacacgatcaccgccgcttcttccaaggaagccggcggtgacaacgtgtggtacatggccgacacgaaagagaaaggtctggagttcattggctacgttgccaagttcgcaccgatcattgcgcgcgggcaggcatcacgtgttgaacagcacattttccaggaccaggcgcctgacggcacaagccgccagatccaagcgttccgcgtccgctttgccagcgggttccgtgtcaccgccctgtcctcgcgtcccgaaaacatccacggcctgcagggcgtggtcgacctggacgaagcagcgctccacaaggacgtcgccaaggtactggagtcggcaactgcactgctcatctggggcggccgcatccgggtatggtcaacccacaggggtaagaagaacccgttcaaccagctcgtgcaggacatccgcgcgggccgctatggcgcaaaggcgaaggtcattcggatcagcttcgacgatgccgtggccaacggcctttacgagcgggcctgcgccatgcgcggcaagatcgccacgccggatgggaagcgcgagtggtacaacgcgatccgttccgcctacgggccgcgcaaggctgcgatgcgcgaggagctggacgtcatcccccgcgacggcgagggttcggccattccttcggtgtggctggaccgcgcaatggcggagacccggccggtactgcggatcgtcttcgatgacgacttcccgaagcgccccgagaaggagcgcgaggtgtggtgcgcgtcttggattgccacgcagctgatgccggcgctgagggccgccaccaagggattcacaggccgctgggcggttggcatggacttcgcccgccatcgccacttttcggtgattatgcccgcgcgaatcgagcaggatctgcgccgcgtagtgccgttcctgatcgagctggccaatgctcccacccgccagcaggagcagatcctgtgggcgctgctggacttcctgaagacggaagctacagggcgctggacgttcgcaggggatgccaccggccccggccagacgctgatggagtacaccggcgatcgatacggtagggccgagctggacaaggaagccgggcgctacaagggcggccccatccatgaggtgacgctgtcgcggccttggtacggcgaatggatgcccaagtacatctcgctatttgaggatggcttcatcagccttcccagggacgcctcgctggaggatgaccaccgagcggtcgagtacgtcgacggcattccgatggtgccgaaactggagcgcaaggatctgcaggatccggagctggtgcgccacggcgacggcgctatcgctggtgccctgacacagttcgcggcgctcaaccacgtgacgcgagttccaattgagtttcagtccaccggtgcgcgtgggagcttcgcagcctcggccgatggccccctgcgcattagcgatgatggcttcggcactgtggctggtggcaatgactttggaggttatgtatga

SEQ ID NO: 507975 - DNA, 1524 bp, Stenotrophomonas maltophilia
atgaaccaggcgcgccctgagatcggccgagagatcgcaaccaccgcggatggaatcgacatcactcgtggatacaccggtccgctgctgcgtccctacgacagcgtgcttcgctcgcgcggcaccagcgacctcctgatctacgagcaggtgttctccgatcccgaggtgaagtccacctttggtcagcgccagctggcagttacccagtgcgagtaccaggtcgacgcaggcggagatcggcctatcgaccaggaagccgccgacttcctgaagacgcaactggacaagatcggctgggacaacgtgacgacgaagatgctgaccggcgtcttctatggctacgcagtggcagagctgatctacgagcgcgtgggcgaccgcattggcttcaaggcgatcaaagtgcgcaatcgccgccgattccgattcggcaaggagggcgatctgcgcatgttgaccatgaacaacatgctggagggcgtgccggcccaggcgccgtacttctggagcttctgcgcaggtgctgaccacgacgatgaaccctacggcctgggtcttgcgcattggctctactggccggtgctgttcaaacggaacggcatgaagttctggctgatcttcctggagaagttcggcatgcctactgccgtgggcaagtatgggtcggacgcaactgattccgagaaggcaaagctgctccaggcgacccgcgccatcaccaccgattccggtgtgatcttgccggatggcatggtgttggagctgttggccgctgggcgcagcggcaccgccgactacaaggctctgcaggacgcgatggacgcggccattcaaaaggtcgtcctgggtcagacagccagcacccaaggcaccgccggacggctggggaatgacgacctgcaggccgacgtgcgttctgacatcatcaaggccgatgccgacctagtgtgcgagtccttcaacactggtcccgcccgctggatcacggagtggaatttccccggtgctgcaatccctcgcgtgtaccgcgtcacggaggaggctgaggatctggaaagccgagcgaagcgcgaagagacggtatcgcgccttggcttcaagcccaccctcaagcacgtccaggacacctatggtggtgaatgggtcgaggtcggggctcccgccgcagtgccgcctctcgattccagcgcgatcgccggaccggcattcgcggacccttctgcgtccatcctctcactgctgcaacgccatcatcccgccgctttcgcagatgcggtcggcagggcggccgatagcatggctgcccagctcgatcgtgtgacgcggcctgcaggtgagcaatgggtggccaccctccgcgagcttacggaggaggcgacatctctggaggatctgtacgaacaggtgctggcacgggcgccggacatgagcctggaggagtttgcgacggctacagcccagggcctcgccgccgcgcacctgcgcggccgcgatgacgtccagcagtcgatcgggagctga

SEQ ID NO: 507976 - DNA, 1275 bp, Stenotrophomonas maltophilia
atggctggtgttggctacggcacagttcctttcgcccagcagatcgcgttcttccggcgcaagcgaaacatcgtcacggaaagctggctggacgtatgggagtcggagcacgaccagggcttcatggttgcgggcgccaatcgcgacgagctggtggccgactttgccgcagccatccgcaaggccatcgacgagggtggcacgctggagcagttccgccgcgaattcgacagcatcgtggccacgcatggctgggactacaacggtggacgcaactggcgcagccgcgtcatctacgagaccaacctccggcagagctataacgcgggccgttggcatcagctgcaggccctgaagaagtccaggccctggtggcgctaccggcatagcgacgcagtcgaaaccccgaggcccttgcatcaagcttgggatgggatggtcctgcactgcgacgatccctggtggcagtggtacttccccgccaatggctggggctgccagtgctatgtcgaggcgctcaacgaccgcgatctggcgcggttgggcaaggacgggccggacaaggctcctgctatcgagtttgagcagcgcctggtcgggcagcgcagccctggcggtccgttcttggttgaaacgccggtaggtgtggatcctggtttcggctatgcccctgggcgcagcttggatggttggccgaaccgcagaggcggaccgcagacaccgcctgcgctgggcagcggcatcgaagaagccctgcagggtgcgctgcgcaggaacgtgcgcctgcctgcaaacccggcagcacgcactgctgcccaggtgctggagcgcccccgtgcgctgggcgcgatacaggccggcctgaccgagtggcgtgcagcagctgcagctggccgcacacacgcaggccagtacctcgtcggtgccctgcaggcgagtgcggtcgatgcgctgcagggcaaggcggccgagctgggatcagcggcgatcgcggtcgagacggccgacgtgctggacaaggtgccgcaggcgcacttccctcagctggccagcgcgatgcgatcgccgtttgcgctcctatacgacgcggcggccagcattgtgcgcttcgtacttcagggcgatcggcggcagcgcttggtggtcgacgtccgactccaggcgaacgcggccatgcccaacctgatccaggatgccagtatggttccgtcggcgacccttcaacgcctgattgacgggggcggctggcagctgattcaaggcgagatcccctga

SEQ ID NO: 507977 - DNA, 576 bp, Stenotrophomonas maltophilia
atggctgcgcgcgttgagattaccaaggacactgccggcccagcgttgcgcaacgctgccaaagggctgcgcaacgacgcgctgcaaccgatgctggaggatatcggcgagtacttgctgcgctctacgcgcgaccgagccgcacgccaggtttcgccggacggcgccccttgggcaccgctctcgccgagctaccggcggtacaaggaacgcaagcgtcccggcgttccgatgctccgcttcgacttccacatggtcggtgaccagctcgcgcaccaagtggtgggtgacacgctgctggtaggcaccaacgcaccttacggcgctatccaccagttcggcggcgcaatcaacaggcctgcccgctctacccaggtgtacttccgtcagggccgggatggcgaagtcggaacgcagttcgtgaagcggcgccagtccaacttcgctcagtgggtgaccttgcctgcgtacacgatcggtattcccgcgcgcccttggcttggtctgtccaccgaggatgagcaagaggtcgtcctcatcgccgcagatcacgtggcaggattgttttcggagtga

SEQ ID NO: 507978 - DNA, 1143 bp, Stenotrophomonas maltophilia
atgaaccagcccgccgccgcactgcaaatcttcaaggcaggaacccacgtcgccgaagacgggaagtcctataccttcagcgaagacgacgttcagcagattgcacagacgtacagtgtcgatctgcacgaagcgccgatcgtcgttggtcatcccaaggcagacctgccggcgtacggctggggtaaaaccctggagtgccgcgatggcgtgctgttcgcccagccgcaccaggtcgaccctgacttcgccagcatggtcaacaaggggcgcttcaagaagatcagcgcatcgatcttcctgcccaacacgccgggcaatccgacaccaggcaagttctaccttcggcacatcggcttcctgggcgcccagccgccagcggtgaagggcctcaaatccgcgtcctttgctgacggcgaggaggcggtctgcttctcgcagccgctcgcgcgcctgggctggacgctgggctccttgctgcagtcgctgcgcgactacctcatcgaccgtgatgggctggaagccgccgacaagctcatcccgcaatggcagatccgcgaggtcactgaaagcacccgtgatccggacgatcgcgctggcctttcgccgacgtcttttgcggcacccactgatgaaacaaccacggagactcccatgtcacagcagaccccggaacagatcgcccagcgcgagcaggaaatccagacgcagactgccgccctggatacgcgcgagaaggcgctcgccgcccgtgaagaagccgcacgtcgcgaagacgcggccagcttcgccgagaccctggtcaccgaaggcaaactgctgccgcgccagaaggcaggcgtcgtcgaactgttgctggcgatgccagccggcggccaggcgctgaacttcgccgaaggtgacaaccaggtctccaagccggcggaccaggtgctgcgtgagctgctcacggcgatgccgaaggcgatcgacttctccgagaagtcgggcgaccagggcgtcgaatcgccggccaacttctcggcgccgctcggctccaccgtgtcgccggaccgagcggtgctgttcaacaaggccaaggcccaccagcagcagcaccccggcacttcgtgggccgatgcggttgcagcggttggcggctaa

SEQ ID NO: 507979 - DNA, 342 bp, Stenotrophomonas maltophilia
atgtcgcagaacatcgccctgctcacgttgtccgtgaaggccaccgcagcgctcattgccaaccgcttcgtttcgcccgccggtggtgtggctgctgccggtggcaacagctatggcgtcacccgctccaatgccgccatcggcgagctggcgccggtggacgtcctcggtaccacccaggtggtggccggcggttccatcgctgccggcgcatccatccaggtcggtgccgatggcaaagcgctgaccgccgacaccggcaaggtcgtcgcccgtgcggcgcccggttccagcgctaccgccgatggcgacgtgctggaagtgatcctcatcccgaattga

SEQ ID NO: 507980 - DNA, 945 bp, Stenotrophomonas maltophilia
atgtccgcacagatgacccccggccaggttcgcgtcgttgacccgatcctctccgaacacgcccgtggctaccgccaggcgcagctcgtcgcatccgtcctgttccccttcgccgacgttgctgcctacggcggccgggtcatcgagttcggcaaggagtccttcaaggtctacaactccaagcgcgcaccgggcgcggccaccaagcgcgtccgcttcggctatgaaggcaagccgtacagcatcatccccagctcgctggaagcggtggtgccgcgcgaacacatgcgcgacgccaacgcagtgccgggcatcaatctggcgacccgtgccgtcaatgtcgtgctgcgctcgcagctgctggagtacgaagtcgaatgtgccggcatcgccaccaatgccagcaactacgacaacgaccacaagctgacccttaccggcaccgacgtctggtcgaacgatgcctccgacccggccagtggcgtcgagaccggtaaggaagctgtccgcgccagcatcggtctctatcccaacacgatgctcctgtcggccaccgccttcagcaagctcaagcggcatcccaagatcatcgcgcgttcggccgacagcggtatccgcaaagtcaccctggatctgctccgtcaggtattcgagatcgagaacatcgtggtgggcgcgggcgtcgtcgctggtgcgaacgacgagttcggcgacgtgtggggtacttctgtggtgctggcctatgtcagccccggttccgacgtgaatgccaatgccgaggagccgagctacggctatggctaccgcattgaaggcatgccgctggtcgaggagccgtactacgacaagaacgccaagagctggatctatggcgtcagcaacgatgcgtcgccggtccttgccggaatggccgctggctacctgatccagggcgccggcctgtag

SEQ ID NO: 507981 - DNA, 483 bp, Stenotrophomonas maltophilia
gtggccaagccccgcactgcgccgtccagcgcacccaaaaccgtccaggacagcaagccggccgccgcgccggccgtcacggaagagaagcccgcagagaccaccacgacgccgctggacactccagccgatgccgacgtcgacgctgccgcgtcgtcgggcttgggcacagacccggcgctggaaccggccgtgaacgaccaggttcctgatgctgacggcggcgcttccgcatctgcgccgccggccaccaatgagggcagtggcgcggccaatgccgctgccggccgcgacgccgacgtgaattcgcacgacgacgatgcgccggcgcgcgtctgtttcgaggtgctgactccgttcaagttccggggcagcgtcctgaagccgcccgcctggatcgaaatgtccgaggacgacgcggcgatctaccaggccgccggcgtgctcggcaccgaaccggccgaaccgttcgaccacgtctga

SEQ ID NO: 507982 - DNA, 531 bp, Stenotrophomonas maltophilia
atgtcttactgcacgctgcccctgctgtcggccgccaagctcgccagggagttggccgaggtggccaccccggagcggttccgcatcgtcgatgaggcgctgatggacgccacgctccttggcgatgatcgcagtggctacgatcctgcggacattgcgatcgccgacaaggcagcggcgcacgtgcagcgcgccctggacgacgccgacggcgtgatcaatggctacctggtcgtgcgcaagccagtgccctacacggtgccgctcaatccggttccgacgatcgttcccacctgggcgcgctggatcgcccgctacctgctgcacaaggatcgggtcaacaccgaggaccgcaccgaccctgttgtccgcgactacaaggaggccctgcgctttctggagctgaccagggacggcaagttctcactgggcgtcgacgatccactcccgccgcccagcagcggctcacccgagtggtgtgcgccggaacggcagttcacccacaccacgctggaggactacggcaagtga

SEQ ID NO: 507983 - DNA, 480 bp, Stenotrophomonas maltophilia
gtgagcgccgcgcccttcgacgtcgagctggtccgcgagcgcctggtggcggccaagctgctggagaaccaaacgctgcggtctatcaaaggcgcggccgactaccacgccgtgcagtcactccaggacttcccggcgccgtgcgcctacctggtgctggcccgagaaaaggcggtctcgcaacagcagggcgtcgcccctccgggccagcaggtacccagcagccagattgcctatgccagctttgccgtcgtggtcgcggcgcggaactaccgcgatcagcgcggggagcaggtcagccaggatctgcaggcggtgcttgccgccattcgcggagcgttgatcggctgggttccgaacctgccgggcgcacgcgcctgccagttcgtccagggcgacatgcaggactacaacgccagcgtcgcgctgtgggcagacatctatcaaacgcagcacatcatcaaaggagcagcgcggtga

SEQ ID NO: 507984 - DNA, 162 bp, Stenotrophomonas maltophilia
gtgaacgaagcacccgtccagaagctggtcgaggtcaccctcgacaagccccacacccacgccggcgttcagtacgacgccaaggccaagatcaaggtgtccgaagctgatcgcgagtggttgatcgcgaaccgcgtcgtcaccgattcgaaggagaagtga

SEQ ID NO: 507985 - DNA, 765 bp, Stenotrophomonas maltophilia
atgtccggtaccggttcccttttctcgctgcagggctacatccgcagcgccgacgttcagcccgatggcaagatcggcaagctgcgctggctcggcaacgttcccgaagccaccctggagctgtcgaccaacagcaccgacaagaccgactcgttctctggcaagcgtctgcagctcggccgcctggacaccggcacgaccgccgcgctgaacctgacgctggactactggtcgtctgccaacctcgctctcggcttccaggcgacggtggcggatatcgccgcagccacggtcaccggtgaggtattcccgactggcttggtcgtcggtgaccaggtccgcctggatcatccgttcgcctccaacctggtcatcaccgacagcgcgaccaccccggtcacggtgccggccgcgaactacgagctggtcggccacagcaagggtgtggtcgagatcaagaccctcggtagcttccagcagcccttcaaggcggcctatggctatgaaggcgtcgagaacaccgtgctgttctccgcaccaggcaaggtgcagttcctgcagttcgacggcatcaacaccgagaccggcgatgctgtggtcatcgaactgtggcgctcgcgtttcgcgccggtgcagtcgctgggcctgatcaaccaggagtacggcaacctggcactgtcggccgcgatcctgttcgatccggccagggccagcgatccggtgctgggcggcttcggtcgactgctgcagaagaaggctgcctga

SEQ ID NO: 507986 - DNA, 519 bp, Stenotrophomonas maltophilia
atggccaggaaggtcgaggccccgggtaagaagggagcgcccaagacgggcgctcccgacgacttggccatcctgcacccggagagcatggcagtgatcggtgggcgcgagatcactgtccgtgagtacggcttcgtcgaggccgcacgtctggaccgccacatccgtccgctggtcgaagggctgcaccgcgtcttcggcgatgcgtccgtcatcccgagcatggaagcggtggccgaggttctggccagcaacatcgatgacgtgctggtgctgatcgccgcagcgaccgaccaggacaaggactggatcagcagtctcggctaccgcgatggcgatcagctgcagctgctgtggtggcaggtgaacggccattttttcatcgaacgcctgatgcgaaaggcagcggccgagcggctggcaaggtcattggctgggcccagctctactcaaccctcatccgggcggggtacggacgaaccccggccgacatcgggcgatacacccagcggcagctga

SEQ ID NO: 507987 - DNA, 123 bp, Stenotrophomonas maltophilia
atgctcttcctccgggaagaggacaggcgcagccgcagggaacgccgcgccaggctgcacgacatcaatgccgcattcgccggcggtgccgtagccaaggatctatccaagcaactggagtaa

SEQ ID NO: 507988 - DNA, 3558 bp, Stenotrophomonas maltophilia
gtgaaccgcaacgccggcaacatggaactggccctcaagatccgagcggacctcggccaggccggcagcgcggtccaggccctcgacaaggatctggagaagatcggcggctcggcgcagaaggcggccgatggtctggccaaggtcggcaatgccaagggcgtcgccgaaaccggcaaggcggcggagaccgccgccgccggcctgcagcgccagggtgagacggccgagcaggcggccaagcgcatccaggacatggtgcaggcatcgctggactacaagcgggcactggacgcccaggtgcagtcgagccagtccaacagcgaagcggcctcccggcatgccgccgccactgccgcgcaggcccaggcctcccgcgaggcggttcaggccgcctatgcctctcaggccaccaccacccagcagatccagtccatctcggagctgcagcagcgcgtcgagcgcggtgcccgctcgttcgaagacctggccgaaaccgagcagctgctcgatcgggtgatgcggtccaacctgatctcggtggaggagcagtccgagatcttcggcaagctggacaagcaggagaagcagctgctggccagcaaggagcaggctgcttccgcccgcgccaaggaagagcgtcagatgcagcagctgctgcgcgtgtacgacccggcccacgctgcgctggtccggctcgatgccgatgaagccaagctcaagcgatcggtcgatgccggcaccatctcgcgcgaggcctacaaccgggcgatggtgggtatcgccagccagcgtgcccattggcagcagctcagtgatggcgtcgatcttgccgaccggcgcatgcgcaatctcagcctgtcggcccgcgaggtccgtaccagcctggccggcgtcggcgccaacctgctgcagggcaatgtctctggcgccggcagcatgctgctcaacctgggcagtcgcagcgcggccggctttggcgcccttggcgtggccgttggcggtgccgtggccacgctgggcctgttcgctgccgccgcatacaagggctatcaggagaaccgcgccctggaactgtccctgatcgccaccggcaatgcggcagggactacggccggacacctggctgaactgcgcaaccaggtgggcggcaccacaggcgagtacggcaaggcgcagcaggcattgaacggtctggccggctccggccggatcgccagtgattcgcttgccgaggcggccgaagcagcggtgaacctgtccaagctcaccggcgacagcatcgagaacacgaccgccaagatcatcaccttggccaaggcgccgtcagcaacgctggcagagctgaacgagcagtacaacttcctgacgctggaggtgtacgaccacgttcgcgccctggaggatcaggggcgccaaaccgacgccgcacgtctggccatcagcgccttcgcggaagtccacaagcagcgtgtagaggaggcccgccagtcggccggcttcctggaacaggcatgggaaggcgtcaagggcgcggtgctgcgcacctggcaggcaatgaaggacgtcggccgcactgacgtcgaggcacgcctcagctcgctgcgcgaggatctggccttcttccaggccttgcgcaacagcccgatcccgggtgacgccacccgaggcgcggcgggcgaacagcagaccaaggctcgcatcgccgcgctggagtccgagaaggttgccctggaacagcgggcggcggccgacaaggccaaccaggaggtgcagagcaaggccgtggccgcatcgaaggccatccaggaccagctcgacagcggcgcaccgaaggccgagaagctggcgaaggccgtcgacgagctgggtaagaagttccgcgcattgcgtgacggcgctgcagctggcaacacggacccggcgctgctgcgcgacgtcgtcttcggcgccgatggcagcatcaagggcggcgcctatgacaaggcactcaagcagctgcaggagcagtacaaggaccgcagccgcacgcgcaagccgggcaagaccgagggcgagaaggccgaaaccgctgcccagcgcgagctggacaacctggccaagcaggtgtccatgctgggcgacctgcaggaaggcgaaaacaaggccggcgaagccgcgcgtatccgttacgagatcgaggaaggtgcttacaagaacgccagcgagggtctgaagtcccagctggtcgaccaggcgcagcttctcgacagtgaacgccagcgcgtggacatggccaagaagatggtcgacgtgcgcctgcagctcgcgcagttgcaaggcactggcaccgatgccgaggcggccaagacagtgaaggagctgggccgcctgcagcagcagctggacaacgtaggcaagagcgccgaagcggccgacgtggccaagctgatgaagctcaccgaggccagtgcccagctcaagggcctgcaggagacctacaaccgcacgatgggccaggttgcgctggagcagcagcggatccaggtcgagctgcaggcgggcctcatcaccgaggccgacgcgcagcagcgcatcgtcaatctgtaccaggccaagctggtcaccctgcgggaactcgttccgaaaatgcgggaagccgccacggcgctgggcaatcccgaggcgctggcagcagtcgagcagatcgagctgaagcttcgggagatggcgcagaccaccgacctgctgcagcagaacgtacgcaccactttccagagcgccttcaaggaggcgttcatgtcgctggccagcagcagcgcctccctgggtgacatggtgcggagcttcttcgtgacggtatccacgggcctggctgaattcgtcgccgaccagtggtcgcaggcattggccagcaagatcacgtcgatggtgttcgacaagggcgtagacgtgggcgctgatgcagcggctgctgccgcaacccaggcttcagcgacggctctatcgagcgcagctgcaggcgtgaccgccggcgccaccgccgtggccaccagcgcaaccgcgctcagcacctcgggggccggcttgatcagcggtgcggctgcggttaccgccgcagccgttcagatgcagtcggctgcggccgcgatggccgccgcaaacgccatcggcgccgcctccagctttgccgtcggcggctacaccggtcctggcggcaagtaccagcccgccggcatcgttcacgccggcgagttcgtccatcgccaagaggtggtccgccagcctggggcgctggcattcctgtcggccttcaaccaggtcggcatggccgccattgaccgctggcgcggctatgccgagggcggtgcagtcacaccgatgatcgcaagcacccccatcttcaccgcctcgtcgcctacgccgatggccgctgccacgcagctgggcttgcgcgtcataaaccaggtgtcgccggacctgctcgaccagtacctggacgaccccggcagcgacaccaccgtcgtcaacaagatcagccgcaatgcagcggcgatccgtcaagtattgggactctga

SEQ ID NO: 507989 - DNA, 978 bp, Stenotrophomonas maltophilia
atggcctggaagaacggaactgccgccaacctcaacgacctgctgctgcagctgcgtgattttctgacttccgaccctgcattggtcgcggcgaaccagcaatgggtcgcgatcgggggcaagatttcagggcctattgccgccaatgatttcgtctcgttcaaaggcaggggccttgctgggactgacgaaatctacctgtccctccagtcctacaccgacgtatccaacagctactacaccttggggctgcgagggcataccgcctacaaccccgcgctgccatccatcgacccggttggtgccaacagcaactatgtcggcatgccgttggtgaactccgcgatcgtctactggttcatcgccaatggccggtgcttcaaggttgttaccagggtgaatggacggtacgacgcgctctacgcgggcttcatcctgtccgagcaccttccggaggattggtcgtacccactgttcattggcgcgtccagctatacccggctgaatcttgcatccgatgacagcaacattcacagcaacttctggaacccatccggtgccgacacttcgaacacctcactcgcacaggcgtatctcttctctccaatgcaggcctgggttccgctaagaaatacatacggcaccagctactccagcaacgtggttggccggctgacagtgccttgggcacctatctgcaacagcaatcatcgccgccttctggacggcactgcctggctccagcggggccagttgctggctgttggctatcaatctggaagcccggatattggctccgcgttcgaccaggtgccagagggcggacagttctatggaggcttcgacggcgtgttctataccccgtcactgggcgccgtcgctgagcagcgtgtcactgcgagcagcgtcgagcacctgcttgttccaaacgtctatcgcacgggcgatgggcaatttgccgctttcgccctggagtaa

SEQ ID NO: 507990 - DNA, 981 bp, Stenotrophomonas maltophilia
atggcctacattgaacacgccaatgtggcgaacctgcagaccctgatagatctggttgctcagttctgcgccgccaatggatggaccgtagaacgcaataagctgagcggagccaacagaacgctcactcttcgcatgcctggtgtctccgactacgttcacctctacaacaccgaccagatcagtctgaagagccgtgtgtcagtcggcttctcggtcgctgcggttccaggatcacagccgaatgtttcgccgtcggatggcaatagcaacgtgcaggcggggccgtatcctcggctgaagctcttctccaatggaactgccgtgcatgttgcaatctcgactgcgacggcgggcgagtatcgccaccatgccttcggcgttctacagaaggcgggcgactatgtgggcggcacctacgccgatggaacctattggggatccttgaccggcagctacagcggatacctcacatcaaacgggagcaccagagcgctgttcggccacaacacgtcggcgtcaggttgcggacacctgcgtgctgactcggtggaagatggtcgcagcaacagcttccaccgcatctccaactactacagcgatgccttggcagctgaagggtccgcttgcactggtgtcggctcgctcggtcagtcaacgaccgcccagagcagctacgacatcatgtggctggggcgagccttgggtggtgccgacgaaaacattttctcaggccgtagcgtcttccaaccgatcaccatgtccattcggcgtgcgggtgcatctccatatctgtcgccggtgggtgtggtgattggcacgcgcgcctgctccatcgccaagctggagccggaacaggaagtcaccattggcaatgagacatgggtcgtgttcccttggctgcgcaaacttgccatgagcaataacaccaatgcgcccccagcaaccggcaactacggttgggcggtccggaagtcctga

SEQ ID NO: 507991 - DNA, 1704 bp, Stenotrophomonas maltophilia
atggcactcatccttcccgaggtcagcagcgtgacagggttctggcagagccagaacctggacattccccgcactccgctcccattgatgccaacgagggcgtcactgtcacggccagacctgcgctcgggtccggcggtggcgggcactatcgtcattcccgaccagccggtggctggatcgtcggtgagaacctcgcacgatgattggttctacaggctgcatgtgctgcccctgcgcattgacctcggcaaccttgtgaccaaccaggtacgttcggttcgtctgtggaacgcgtacttccagccccagaatctgtcagcggtttctctcgacggcggcgaaggtatcgacctaactggccccggagcgccgccgctggtgttcgctccgctgcaggttcggcagtggagcctcacggtgtcgaccgaaggcccgccggtcatcaccgccacactcacattcacgttcagcggcctgggcgatcggacgatcaccatcaccggcaatcgcatgtcggcatggatgcttccgccggattgggagcgccccgtcacggaaaccctggcctgggcgacagacgttcagcagtcggtcgatggcagcgaggcgcgcttccccctgcgcgctgcaccgaggcgcagctgggagttcagcgtcgtcgctgaccggagggagcgccaggtgctggagcatgcgctgttcgactggtcagcccgcacctgggctttgccgatctggagcgacgtgtcgtggctgaaggcccgcctggtgctgggagtgcagtccatcccggtgccggcagcggcgcagcgggattaccgcgtcggcggcttggcgatgctgtggaaggacgtcaccacctatgaactagtggaggttgcgggcatctccgccgacgcgctgcagttggctcgcccaaccgcgaatgcctggcagccgggcacgcgcgtgctgccctgcaggacggctcgcatcgcagaaaccccaagcctggagcgcgtcaccgaccgagtgatgcgctcaaccgtgcgtctggctgcggtggagacctgcgattggtcggctgtggcgccgtctgcttcctatcggggtcggcccgtgctggagcagcggccggatctcgaccaggcacaaacggccgagttcggtcggcagttggtggtgatcgatggggatatcgggccggtcgcgatcgacgacatcagcggcaaggcatggcctctgcagtcccacgcgtggcagacctggggtcgatcggagcaggccagcctgcgtagcttgctgtactggctgcaggggcgcgcctcagcgctgtgggtgccctcctgggctgacgacctggagcttgtcgagccatcgctgtctacctccagcggcattgtcgttgcctgggcaggtgtcgcccgattcgggcgcgcacaggctggccgccggtaccttcgcatcgagctgttcagtggccaggtgctgtaccggcagctcgctcaagcgaccgagctggatccgcagcgggagtttctgcagttggacatcccgcacggggtcgcattgcagcccaacgctatccgactgatcagctggatggtgctggcccgcctcagctccgacacggttgagctgtcgcacgaaaccgatggcgagggcgtggcgcgatgccaggtctccttcgccggcatcggcgcggaggagagcgaaccttga

SEQ ID NO: 507992 - DNA, 783 bp, Stenotrophomonas maltophilia
ttgagcctgttctcacgccacgtcgagctgtacgagttcggccgcggatcgcagcggtggcgctatacctccagcgatcggcttgaaacttacgacgcccaggcattcgccccggtagcgatcaagcgcggccgaatcggtcagtcagctcaggaagcccgatccaatctggagctgacggtgccgctgtcgctgacgttggcatcggtactgcgcccgtatccacccaccgagcggatcatcgtgaagtggcggcggatccggaagagcgacggcgccatccgagggacatggaatggtgtgctgagcgatgtcacggagcgccagaacgacttggtgctgacctgtcaaagcaacgccggcgccgctgcaaccaatggtctgcgccgatgctggcagggacagtgccccttcgccttgttcgactccgactgcggcctgaatccggagttgttccgcgttgacggtgttctctcggccgctacttctcaaacagtgtcgtccaatgccttcgcggccaagcctgatggctggttcgtgggtggcttcgtcaagtgggtgaaaggcgccgctaccgagcatcgtttcgttgttggccatgtcggcccgacgctgacgctgctgaccgcagcgccgctcgctgccggggagctggtttcggcctatccgggctgcggccactcgctggccatctgccacgagaagttcaacaacgccctgagatacggcggccagcacaccattccaccgaagaaccccttcggtcctgatcccatcttctag

SEQ ID NO: 507993 - DNA, 336 bp, Stenotrophomonas maltophilia
atgtatgcgatcaccaagcacagctatcgagcagtcgatacctccacacagcttgcgccgggagagacgctggttcatcagctgccagccgatcttttgatgagcgtccagggattggagcgccgctctgatcgggacaggctgcttcgcgagagtgactggacccaggcgactgatagcccgctcaccccggaagcggtgttggcatgggcggtctaccgtcaggagcttcgtgatatgccggagaaggcgggcttcccgaactgtgcgtggccggtgccaccggccctgcctgaaggcgcggccgggcaggaacgagcccctctccagacctga

SEQ ID NO: 507994 - DNA, 618 bp, Stenotrophomonas maltophilia
atgtccgggttacgcttgccttgggcgtttttggtcgagcttggcgcggcgatgatcgtggcatcgacgatcgtcccgccgcgcagactcaatcccgccggcccagtttgctgccaaccaccgaacccaaacccatcccaccgcagtacccttcaaccccgggctccaccagtaatgggtggtacggctactgggggcaggtcacttcgatttcacaaaggcgcgtcacgcgttttccttgggtactggtcgaaccccgggcgatgtgcgcgccgggtcggtcaagcgcgttgcggccgccgtgggcgagggcgccgccgtggtctcccagatccatcaatacccggcatcgcgccagcccgtcctgcccctcccccccgaggaaagccatgcgcccgcgctgcacgcatgaagaccagattgtcgatgtcacgccaagcgcgctgggctacgagtaatgctcggccatccgatcatcgaaggctacgagccgcccgaaggctggggctagtgctatgtcgacgaagtggaagtcgaactgccggaccagaccccgcagctgatcccgcgctacttctcagcttcgtgccgtccttgacccggcgggtcatcggttga

SEQ ID NO: 507995 - DNA, 162 bp, Stenotrophomonas maltophilia
atgccgatgcggagaacgcgactcgatcaaggcaattccaaggaaatcaacagcgacatcttcgaggacgtcctggctgatttgggaatggcattagaagcgttcggcgccgcgctgcagttggctggcaagcgactccaagcgaatgagtttccgttgtag

SEQ ID NO: 507996 - DNA, 240 bp, Stenotrophomonas maltophilia
gtgtactgcttgctgttgcccataaacacctcggtcattgccatcaattatggcgtccgagtgtctacgaaaggctggccggtccagatctatcgcacaacgtatccaacactcaatgccgcccggtccgatgtgttcgaatacatcgagcgccgccacaaccccaggatgcgacggcgacgggtcaagcaggaccagaagttttcagccctttccaaacagtccgtgatttcggggtag

SEQ ID NO: 507997 - DNA, 963 bp, Stenotrophomonas maltophilia
atgttccagacccactggcacctgtggctgcagcagactttcgacagcggctggatgctggcgctgatgcagttcatcagcctgctcggctacgaaatggcctatacggcgctgatcctgctctgggcgtttggcgcgcgactccgcgccgggttgtgcgtgatgctggctgtactgctgatggcctgcgccactcacgcgatcaagcagggtgccgccctgccccgcccatcggacgtggatgcgcgcgtgctggacaaaggggtgccctcgcacccgttcgtgttcgatggcggagggcacgcgttatggtccctgccagatgcccgggcaacggcgatgctgcgcgcgcagcccgatgccgactatggcttcaatagtggccatgtcggagtagccaccgctgcctgcgtcggtctgctgctggccttcggcatccgccgccgttggctacgctgggcattggcgttcggctggccactgctgatggcattgtcacggatgtacctgggccggcacttcctggccgacgtgctggctggatggttgatcggcgtcggcgtggcgctgctggcgtggcagttgatgccggggatgcgttcaagccagcgctggcaactgcctgtgttgctggcgttgggcgcgctgctggcatgggcggcagccacctcgcgcttcgttccggtcggtgaagccggacgactgctcgcgctgggcctgctggtagcgtggctgcaatggcgaggctggccggtggatccgcagagcgtcacacaacgggtgctgcgcgtgctgggggtggtggtgatctacacgctggcgcggccattgatcgatcttcttgccgcggccgttccactgcccgatgcaccggcaaccgagctagtgtggcaggtcattggcacgctgttgatcctaggcggtggtgtggcgctggcgaggtggattccgcgtgggacctga

SEQ ID NO: 507998 - DNA, 1155 bp, Stenotrophomonas maltophilia
atggatcaatccgacctcaagctgctggtagcctttgttgactcagaagaagctgcgcttgctgagaagcgccaaggcgacatttacccggcttatcactaccaactcggcgtacttgcaccgaaagcaggtcgccacctgtctggggacatgctgcaacgcttctacttccactggctgcgagtgggggactggaaggtcgccggacttcccgaaaaggatctaccggcactgagtgccgcctaccgtgaactcacgcggcttcctgttggctattactcgcgcctgccaaggctcggccttgagcatcttttctgcttcggcttcgacgagaacggcgagctcccaagtggctctcctggcagcgcgggagagctcaagcagcgcgtgcgcctggtcgagcattgcagaaagtaccagtcgtaccacgcccaacgtgacaaagtggagaaatttctgccctatcgcagcttggcaccacagatcctcgaagccattcaacacgttcaacacgatgccgaacagctcgacagcatcctgtactggggcatgattctggtcacgttgctggatactcgaacccgcctcggcgcgctgcgaattcagcttgatcgcgatcacgcagggagcgcagcccgtgaacgatttctctcgcttctccactacacagcgatggcagcccagccgcatggtcctgaagacccggcgttcaacaccctctgcgaacagctgtcgacactgcacaacgagcgcgtcatggcaggcgccgccattcagctggtccagaggcaggcatggacggtggagaacatccgagactggaacgcgcgtatcacgctgtatcaggatggtgagtacagctcccagaacggccatccacgtgtcagcctgactctcagcagctggcccgatagttcgtggtcgatcagtttgtccgcaggtgatggaacgtacgaggcatatggggaccggcccatcagcaatgacctcgaactgccgccaattacaggcgtcaatcttgcacagttcccacaatggatcaggcaggtcaatgcacaactgggcatcaatctggcaccaggcaaaggcatggtcgccagcgcgcacaagaaccgcgtgctggcaaaacagctggatagctggatgcgcggttag

SEQ ID NO: 507999 - DNA, 1035 bp, Stenotrophomonas maltophilia
gtgccgcccactgcactgccgaccgtgccgacggtgccgttcagtgcgccacccactgcgcttcctactgagccaaccgcgccattgagggcaccgcccactgcgccaccgacagcaccgaccgtgttgtttagcgtgccacccactgcactgccgaccgtgccgacggtgccgttgagtgcgccacctaccgcgctgccgaccgtgccgacggtgccgttgagtgcaccactcgctgcgctccctaccgagccaaccgtgccgttgagggcaccgcccactgcgccaccgaccgcgccgaccgtgttgttgagcgtgccacccactgcactgccgaccgtcccgacggtgccgttgagtgcgccacccactgcgcttcccactgagccaaccgtgccgttgagggcaccgccgactgcgccgccgaccgcaccgaccgtattgttgagcgtgccgcccactgcactgccaaccgtgccgacggtgccgttcagtgcgccacccacggtgcttcctactgagccaaccgtgccattgagggcaccgcccactgcactgccgaccgtgccgacggtgctgttgagtgcgccgcccactgcgcttcctactgagccaaccgtgccgttgagggcaccgcccactgcgccaccgacagcgccgaccgtgttgttgagcgtgccacccactgcactgccgacctggccgaccgtgccgctcagcgcgccacccaccgtgctcccgaccgcaccggcagcgccctgcagcgtgccacccacggcgcccacggcgccgcccaccagattgccaaccccgagcgtgctgtgctgcgcggccacggccgtctgcccagccagcttcaggttgcggtcggcgacgacttcctggccgtccggcgcctgcacgcgcaccttgccggcggcgccggtgtcgaacgcggcgctgatggcacgatcgtgggtttcacccggcaactcttccttggccggcaagcggacggccgccgtcgctctggcctggccttgcccgtcgatgtga

SEQ ID NO: 508000 - DNA, 192 bp, Stenotrophomonas maltophilia
atgatcgacgtgccggcgctggtcgtgcatggcgatgacgaccagatcgtgccgttcgatgcctcagccaagctgtcctcgcagatcgtcagggatgccgagctgaaggtgtatgccggtgcaccgcacggcctgaccattacccacgccgagcagttcaacgctgacccgctggcgttcgcacgcaagtga

SEQ ID NO: 508001 - DNA, 633 bp, Stenotrophomonas maltophilia; identical to SEQ ID NO: 505795

SEQ ID NO: 508002 - DNA, 1728 bp, Stenotrophomonas maltophilia
atgaaccttcatcccgtccatcccctgtcgcttcgcccgcttgcacgcggcctgctgctggcactttcggcagtgtccaccggcaagaccatgactattcatttccaaccacgccctctgacgcggcgcacgcttgtccagggcctattgcctatcctcattaccctttccatgtcacccgtggcggcgttggccggcacggttgcgccgggcacctcgcacaccgtcaatgaaggtgatgccgctgagaagtggagtgtggaaccaggtgccactctcactctggcacggggggcaataagtggatctgtgaccgcaagaggcgcgacactgatcgccgatggtgcaagcatcaccgatggacttggcctctggctccaggattcctcccaagccacgctggcaaacagcagcatcatcgcgtcagggatgcgcgaaccgcatgcgggcatcattcggtcaggcagtagcctttcgatgcagaacatgacggttgagtcggactacacaggcttcagccagtacgattctgacacgcacgtggatatgaccaacagtactattactgtggcaacccgagcgttcagcaacgagggcggcacgctcgaactacgcaacgtggatgtgatcgcccacggagggggggccagtccggtcggcgtgcaaggaatcctgcagatcggcggcaacctctccgccgaggatctacgcgtgacgtctgccggcgtcggcgtcgagatccgtgcgggtgatgcacaaatgcgtcgatcgacgatcaacagcgatgggataggactttacataggctccggacctggaaatgcccccggcggcgtcatccagctgtccgacagtacgatctccgccggcggtctggcggcatgggtgcacaatggtgcgacgctggagatatccaactcgacccttgttggaggcacgtcctccaacagcagcgccctgcagatcaacgacgccgccgcagcggttcgtggatcatcactgtccggcgctgacgaaggcgtcgctgttctcgctgcatcatcggacagcaccctgcagttacaaggttcgtccgtcagcgcgggaacagggccgggcctctacgcgggcggcaatcgtggaacaacagcattcatcgacctgtccgatggctcactcgtcaccggtgcggttgcgctgaacgcgcgtggcggcggtaccgttgcgctgacagcttccgagtcccatctcatcggcaacctcgttgctgagcagaggacgagcgtttccgcgctgcttgagaacaacagtgcattggttggagcagccagcaatatcgacgatatcaggatcaacgattcccgctggagaatgaccggagacagcgcggtgggacgcctgtcaatgcgcggctcgaccattctcgaactgggcgatggcagcaccttcaacaccttgaccgtcgatgagttcaacgccgatggcacattggtggtcttcaacacggcattgggcgacgacacgtcggcgaccgacaagttggtgattaacggcgatgccaacggccaagccaacgtgcgtgtgctcaatgccggcggcgccggtgccaagaccgaccgcggcatcgagctgatcgacatcggcggcgcgtccaacgcgcagttcgatctggtcggccgtgccgtgggtggccagtacgagtacttcctggtgaaggacgccaacggcaactggtacctgcgttcgtaa

SEQ ID NO: 508003 - DNA, 750 bp, Stenotrophomonas maltophilia
atgagcaacatccagaccatcaccaccaccacctccgaactggctacccaacccggcgaaggtgccgaggtagcgccggtatcggagaataggctgcggctgaacgagctggcccagcagttggccagcgcagtgcagcgcaagcgcgccctggtcggcaaggtcgatcagatgcagcgcgccaaactggcagcacagagcgatgccgccgctgctcgccagcaatggagtgcaaagctgcgtgatgccgatggcaatctcactcgcgatattcagaagctgcgcgccaacgagcgttcggcgctctcgctcgctgaggaatatgaggcaatggaaggcgaaatcgcggacgaactgcggcgcctggagctggaattggcggaggtggcgaaccgttgcctcagcacggcgagtggtgtcatcagtgaagctgccagccaggcctatgagcaattgctggtgcaagctggcgatagcctggcggtggctttcaagctgttctcgcaggcggagaatgcgggcgtgaaccatcggcagacagccaacgccgacgaactggccagcgcgtttttcggtcgcctctgcaacgcggtgcgccatcgtttggacgatgccacagtgactgagcaggttgcggaacgcttggcattgccgccgatggatatgagtgaggtaaacatgcagctggcgggtagtgttgcctctcgtgcaaagctgcgggcgcagctcaatgcagagggcgcggcgtga

SEQ ID NO: 508004 - DNA, 204 bp, Stenotrophomonas maltophilia
atgaaagacaccctcatcctgaccatctccaaccagaaattcagcctcagcccggaagaggccaagttcctggccgagcatctgcgcacggctgtggcgcagccgaacctcgcgctgaacttctcccaaggccggactaagcaaggaggccgcatcgcactgtcgcgtggtgtcgcgggtagccgctcggtcactgactgctga

SEQ ID NO: 508005 - DNA, 3027 bp, Stenotrophomonas maltophilia
atgtcccgtgccgtcccgcgcgcagtgcgtatgcgccgcctcactgtttccgtactgcaggccatggctgttccgtcggtcatgttgttgaccgccagcgccgcctgggccggctgtgacagcgtcgcccccgtcgccggccagacggtcacctgcgatgccaacgcgccgaacccgcagaccgtgcccgtcaccgccaatggcgccgccggcatcaccgtcactgtcgccaacacggcacaactgcagcaaagcggtggcagcagcgcgatttcgcttgtcggggccggtgggcacctgttgtccaacctgggcacgatcagttcggtgggcggtgtggcggtccagctcggtggcggcagccgcatcgaaaatgcaggcagcatcaataccggcaacaacaccgcgctgcagttcgtcggcgcgggcgacagcgtgctggtcaaccgcggaacgatcagcgggcgcaccggcgtgcagttcggtgccggcaatgatcgcctggacatgcaggccggcagcatcagcggcggcgtcctgcagggcgatggcaacgacgtgctggtgctgggcaacggtacgatcgacagcgtcgaccagggcagtggcgatgaccagatgaccgtcaccggtggcaccgtcaccggggtggtggcgcagggcagtggccgagatgatttcgtcatgagtggcggcacgatcggcgcgctgcagcagggcgacaacatcgataccttccgcatgagcggtggccgcatcatcggtgcgttcgaggatggcgaccaggcctggatgaccgcaggccgcatcggccgcgtcaacatgaagctggacaagaacctgtgggaccagtccggcggtaccgtggatggcaacgtggtgaccggcttcgacaccgacaccatcatcatttctggcacggcctatatcggcggcaacatcagcgtcagcggcggcaatgacagcgtgaccatcaccgacggcaccgtgcgtggccaggtgctgctcagtaccggcgatgacaccttcaactggaatggcggcggcatcgtctacggtgcgatcgacatggggccggacaacgacgtggccaatctcagcaacctcaaccagggcaacctcggtgcggtgccgctgttcgatggcggcagcggcatcgaccagctcaacctcagcaacgtcaagacggcgggcgtgggccgtttccagaactgggagacggtgcgcctggccaacagcaccgagctgaccttcgatggcgatctggtgctgggcgacagcagtaccggcaccggcacgctcacggtggatgacacgagcaccgtctatgcaggcagtggcggccatgccatccgtccgttcaagagtggtgcactggtggagatggtcaatgccgggcgcatcgacctgaccggcaccggcgcaggcgacgtgttcaccgtgcgcggcaactatcgcggcgacggcggtggcctgtacctgcgcaccgtgctgggcgcagacaattccaccagcgaccgcctggtgatcgatggcggttccgccaccggcaccaccggcatcggcgtgctgaatgcgggcggcagcggtgccgccacgctggccgatggcatcctggtggtgcaggccttgaatggtggccgcaccgcgccgggcgcgttctcgctgtttgcgccggtcgcggccggtgcctacgagtacttcctgttcaagggcggtgtcagcgccggcaccagcgagaactggtacctgcgatcgacactggtgaccgggccaacgccggcacccaacggtgatggcagcgccgtgccaccgccgctgacgccgccggtcggaccgccgccggcgatcaccccggcaccgccgccgccatcggaaggcgccaccgatcctgacctgaccgccggcgagaccgcgccgccaccgccgccaccggaaccggcaccggtggcgccgcccagcgacccggcggtgccggacgtgccggtggccggcggtgcgctgcccggtaccggcactccgccaacgccgggtgcacgccctgccgaaggcgcggtggtaccgctgtaccgcgtggagaccgccgcctacgccgtggtgccaccgctgctgcgcgagacctcgctggccagtctcggcacgttccacgagcggcagggcgagcagcgcctgctgtacaaccagggcgcattccgcaccgcctggggccggttggtggggcagagcagcgagatccactggaagggggatgcgcagccgggcttcgatggcgacgtgatgggcctgcaggccggcctcgacgtgtgggctgcggcatctgacaaccaccgcaaccagatcggcgtattcgttggccgcacccgcgcgcagggcaagaccacgggtctggcactgggctgggagaacgtgcaggtgggccagaaccgcctggacgacaagcacgtgggcctgtactggaccttcaccgacaacagtggcggctacatcgatgctgtggcgatgcagagccgctacgacggccgcgtgcgttcctcgcgtgggctcggcttcggcatcaagggcgatggcaccagcgtgtcggtggaggcgggcaagccgctgctgcacgtcgggcagtccgcatggtggttggaaccgcaggtgcaagtgatctggcagcgcacttcgctggatgaccgtcgcgatgaagtatcgagcgtgcgcttcgacaacgacaacgcctggaccggccgcatcggcctgcgcctggccggcgattaccagctggccgacaacggctggcagccgtatttcaagctcaactactggcatggtggttccggtgaagaccgtatccgcttcgacgacgacgtgatcgtcaattcgcagcgctcacgcgcgctggaagccggcgtgggtgtggtcggtcgcttcaaccgcaccatcagtgcgtacgccgtggccgactacacgcgcgagctgggcggcgaccgcaacgagaagcgccgcatcatcgaaggcaacatcggcctgcgcgcggattggtga

SEQ ID NO: 508006 - DNA, 507 bp, Stenotrophomonas maltophilia
atgaaacctcgaatcaccattgcccctacgcccgacaccgtcgtggcgcaaatttccaacctgcccaagctgggcatgccggagatcaagtcgctctggcggcgcctgttcggaggtgacaccccgacgcacaaccggcaatttctcgaacgccggatcgcctacaaactgcagatcattgaatgccgcaagaccgaccgcaaccttcttgagcgcaatcagcgtcgtatcgacaacctgctggagatcggcaagcagaaatcacagacccggtcggccgattacgcgctgaccccgggcacggtgctctgccgccattaccagggcgttgaccacgaagtggtagtccaggccgacgggacttttttgtacggttgccagccctacaccagcctgtcgcaactggcgcgtgagatcactggcacccggtggtcggggccggtgttctttggcctgaagaccaacgtccgacccaagaagtcggccagtaagggaggtcgccgatga

SEQ ID NO: 508007 - DNA, 216 bp, Stenotrophomonas maltophilia
atgctgcagatcaacaccctcccacccgaacgaatgacggcggagcagcgctgtgccgagctcgctggcctcttggccgccggaatttgccgcttgcgccagcccgatttcgccaagtccgcaaatacgccacaagagacgccgtttgtacttggctttccggtcgaacagagcgttcattcagacatcgacaacaacccatcgatggagccctga

SEQ ID NO: 508008 - DNA, 282 bp, Stenotrophomonas maltophilia; identical to SEQ ID NO: 364321

SEQ ID NO: 508009 - DNA, 639 bp, Stenotrophomonas maltophilia
atgaagagtcgcggtcgcgagatcccggaccagcacgtcccgacttcagtgttcggggtcgaagcagccgccggcctgagtgaacctttggacggcgtcctccccctctgcctcgtactcgatggcgaatggcatgggcggacgatgcttcttctgcggattcatgcttcgaaacactgcatagccctcaagcacagccaatatctggggtcgcgtcagcaagacaacatcttgggagttccatcgcgaatacaccaggaggaaatcggctgcccgcaggacgacatgcccctctccatagtggacgcatgcgctgccctcgtcaccctttgtgagcgcagcaaaggcactgcgggtccgcagttcgctgccgcaaccgagatggccgaagtctccatccagccatgctgcgatttcaccgaccccccgtccctgcccatggcggacgaccggcgcgtcaccgatcttctcttctccggaaggaacgtggcaatcgccagtccagtaggggaaaagaactgcacggatagtcattcgaaacccattccctggtgccgcaacggaaacccctgtcccacttccggtctacccgacctgatcaaagatcacgtcagtcacgcctgcccgctcaaggcgtga

SEQ ID NO: 508010 - DNA, 264 bp, Stenotrophomonas maltophilia
atgaacaacgacgctgcatcccgtgagatcaccgccgccgttgtgcgcggcaaggaacagcccttcgtcatcgagcaggccacgctgcgtggcgtgcaggatgacgaagtacgggtgaaagtggtggccgccggcctgtgccacaccgacctgatcgtgcgcgaccagtactacccggtgccattgccggctgtgctcggccacgaaggtgccggcatcgtcgaagcggtcgggccccaatgtcaaggcgctgcaggtgggtga

SEQ ID NO: 508011 - DNA, 138 bp, Stenotrophomonas maltophilia
atgccggccagcggccggcactaccgcgatgaaatcctgtcgcggggtggcagccgtccggcagcggagaacttcaaggccttccgtggtcgtgccccgcagatcgacgcgctgctgcgccactcgggcatggcgtag

SEQ ID NO: 508012 - DNA, 282 bp, Stenotrophomonas maltophilia; identical to SEQ ID NO: 502614

SEQ ID NO: 508013 - DNA, 945 bp, Stenotrophomonas maltophilia
atgaacctgcataaacatgcccgtttgagccctcgcggtcgagccctgcttgtggaccgcatccttgttcaaggcctacgcgccgaagaggcggcccatgccgccggcgtcagcgtgcgcaccgcctacaaatggctcaagcgtttcagccaggaagggccggatggcctgctcgatcgctcctcccgtcctcatcactgtccgcatgcaacaccgcaggcggtagtggatcgggtgtttgaacagcgacgtgcgcgccagacctatcgccagatcgccgaacagttgccggtggcgccgagcacgattgcccgcctgctgcggcgcgctggtttgcaccggctggccgagttggagcccgcaccgccgaccaaccgctacgaatacgcccggcccggccagttgctgcatttggatatcaagaaactggggcgcttccgccagcccggccatcgcgttaccggcaatcgtcagatcaactctcgcggcggcggttgggagtatgtccatctggccatcgacgaccactcgcgcgtggcctttgcctccatcgagccggatgagcgcgcccgcagtgccggccgggccctgttgctggccgtgcgttactaccgtgggctgggcgtgcgcttcgagcgcgtgctgaccgacaacggcgcctgttacagatcacgccgtttccgccgtctcgtgcgccggctcggcatgcaccacctgcgcacccggccctacacgccgcgcaccaacggcaaagccgagcgcctggtgcagaccagtctgcgcgagtgggcctacgcacgcgcctatgacagctccgaacagcgcgcccatgcgctcgggccgtggctgcatcactacaactggcaccggcgccatgccagcctcggctacaaaccacctatttcccgaattccactgaacaacgtgttgggtttacacagctag

SEQ ID NO: 508014 - DNA, 321 bp, Stenotrophomonas maltophilia
atgatcgcagcccttcaggccggtgagacggttaccttcaactatgttcccacgggggaagtctggaagaagcgggtatcgggccggttcctcgaggtgtccacccgccccatcactctcagccgggactgcttgcaggtcgagggccgcagcgtgcccatctcgaccctgcgtgacgtcgacgtcagcacatggacggagaaggtcaccctcaaggatgcaatggggaccaccatgttctccgcgatgggcgtgggcatcctcagcttcgacctctttctcgagacagtcggctggctggtgcaggacgcgcaacgctaa

SEQ ID NO: 508015 - DNA, 282 bp, Stenotrophomonas maltophilia; identical to SEQ ID NO: 364321

SEQ ID NO: 508016 - DNA, 249 bp, Stenotrophomonas maltophilia
atgcagccgctcatcctctcgctcgacccctcgctcttgaaccagttctccaacgtgaccccgcaggccctcgcggacgccctggccgacgttctgccccacgcgttgggcgtgcttgccgccgacaccagcacgtcggtcatcgtgcccaaccgcgacatgcgcggcctccaccccgcccgggtgctcaccctgcagctggcaacgctggacagcttcctggacgtggccgacgccgccaacggctaa

SEQ ID NO: 508017 - DNA, 1344 bp, Stenotrophomonas maltophilia
atgagctacacgcgcgcagaatgcgagaccgttctcctcaagaggcactggtctctccacgtcaaaccgcgaaaccgcgagttgacgcaaaagggtaagaggctggacgcagacgtgcgcgcgtcggttcggagctgggaggacggcaccacctggagccaggtctaccaaggcatccaggaagacgtggagcgagggaagcaggccgaccccatgacccttgccgaagcggccgggctcttcaatatgcccagcaggcagctgatggggatcatcaaagacggcttgcttcaagaggagctgttgcggggaatccccaagcggtggagctcttcggacgtggcagcactgctgggggtaagccaagacgagtgcgaggggctcaaggcgagcgcccaagccgagccgctgttgttcaccccctccgaaggaacgctgtcgtctaaggaaaaggcctgcctggagcgcctggagaaagcggccagtggaaaggaccttgttaaggaggagaagaagcaaaccaaaaccaatgacaagcctaaaaaaaagctcaagaccgaaaagccgaagctgaaaccggaagaggcgaagcgacagcttgagatccttaagcaagcccggggcacgttgaaccagcgccttgctaaagaccaggcgaggcgccggggagagggcagcaaagagcgggtgttgccttgcgacttgatttcctgggccgaccaaaatccggttttgaaagactggagggcctttcgcggggaggctgaccccgttggaagatcgaacgttgtccatgggcaaccgaagaccctcaagccatcgaaaatcattggctacatccaggtgctggaaaaaggtgccatccgggtcttctttgagggaaagagcggcccctcgaagatcatcgacatcgatctcaccaacaaccagcgaatccggaaggcgatgatcaaagaggggtatgcgcaagtagacccttttggaaacgtcttgaagttggaatcgcgcgagcaaactctccccgaagcgttgagcttggactggctggacaacctcaggcgagaacagctgctgagggattacatcagcgcactgggattctggggggatgagctttcccgcgctgcgaaccaagtggcgacggccatcgagggttggaagcaagagcagcagggggagcgcgtcacagcgaagcgagttgcggtgctggatcagaaaatccaggacgcgcaggaggaggagaaggtggctcgggaatggagcgcccgtgcgcgcagagcgagctttgaagtgagtctgccgcgagcggcggtgacgacgaagcccgccccgttccggttctaa

SEQ ID NO: 508018 - DNA, 1212 bp, Stenotrophomonas maltophilia
atgtccagctatctcttcacctccgagtcggtctccgaaggccatccggacaaggttgccgaccagatctccgatgcggtgctggacgcgatcctgacccaggaccagcgcgcccgcgtggcctgcgagaccatggtcaagaccggcgttgccatcgtggccggtgaaatcaccaccagcgcctggatcgacctggaagcgctgacccgcaaggtcatcacggacatcggctatgacagctccgacgtcggcttcgacggcgccacctgcggcgtgctgaacctgatcggcaagcagtcgccgcacatcgcacagggcgtggaccgcaagaagccggaagaaatgggcgcgggcgaccagggcctgatgttcggctatgccaccaacgagaccgacagctacatgccggccgcgatccacctgtcgcaccgcctggtcgagcagcaggccaagatccgcaagaagaagaactcgccgctgtcgtggctgcgcccggacgccaagagccaggtcaccctgcgctatgagaacggtgtggtctcggccatcgacgccgtggtcctgtcgacccagcacgccccgggcatcaagcagaaggacctcatcgaggccgtccgcgaagagatcatcaagccggtgctgccggccaagtggctgcacaagggcaccaagttccacatcaacccgaccggcaagttcgagatcggcggcccggtgggcgactgcggcctgaccggccgcaagatcatcgtcgacacctacggcggctgggcccgtcacggtggtggcgcgttctccggcaaggacccgtccaaggtcgaccgttcggcggcctacgcggcccgctacgtcgccaagaacgtggtcgccgccggcctggccgaccgttgcgaagtgcaggtctcctacgccatcggcgtggccgagccgacctcgatctcggtcaccactttcggcaccggcaagatcagcgacgacaagatcgagaagctgatccgcaagcacttcgacctgcgcccgtacggcatcatcaagatgctggacctgattcacccgatgtaccagcagaccgcggcctatggccacttcggccgcaagccgaaggagttcagctacctcaacggcgaaggcgagaccgtcaacgccacggccttctcctgggagaagaccgaccgcgccgccgccctgcgcgccgatgcgaagctgaagtaa

SEQ ID NO: 508019 - DNA, 507 bp, Stenotrophomonas maltophilia
atgtcgaccgaactgaaaacccaccagctgtccatgaccgtgctgatgtcgccggagatggccaatttctccggcaaggtccacggcggcgccatcctgcgcctgctcgaccaggtcgcctacgcctgtgccagccgttacgccggcagctacgtggtcaccctgtcggtggaccaggtgatgttccgccagccgatcgcggtgggcgagctggtgaccttcctcgcctcggtgaaccataccggcacctcgtcgatggagatcggcatcaaggtggtggccgaggacatcctcaagcgcagcgtgcgccacgccaacagctgcttcttcaccatggtggccgtggatgaggaaggccggccgacaccggtgccgcccctgcagccggtcacgtcggacgagaagcgccgccaggcagccgcactgatccgccgccagctgcgccaggaaatggagcagcgccatctggaactgctggcgtcgaacccgccgtcgccggaagaatga

SEQ ID NO: 508020 - DNA, 2712 bp, Stenotrophomonas maltophilia
atgaacgagtaccgcagcagcatcgagtttgcttctcccgatcttccgcttcgcgatgatgtgcgccggcttggcgcactggtcggcgacctgctggtcgaacaggtatcggccgcgtttctcgatgatgtcgaggacgtgcgcacccgcgccatcgcccgccgcgagaaccaggcgcccctgtcggagctggccgaagggctggccgggcgcacgccgcagcaggccgagaccatggtgcgggcgttcagcacctacttccaggtggtcaacatcgccgagcgcgtgcatcgcatccgccgccgccgcgattaccagcgcgcgggcaccaccgcgccgcagcccgatggcctgcaggatgcgctgcagcacctgaaggcgcagggcgtgacgctggacgaactggcgcagtggctgccgcgcatcgacatcgagccggtgttcaccgcgcacccgaccgaagccgtgcgccgcgcgctgctggagaaagagcagctgatggtggccagcctggtcgacaacctcgacggccagcgcacgccgggcgaggcggccgccgatgccgcgcgcttccgcatggcgctgaccgcttcgtggcagaccaccgactcctcgccggtgcggcccaccgtcgacgacgagcgcgagcacgtcggcttctacctggtgcaggtgctgtaccgggtgattccggtgctgtacgaatcgctgcagcaggcgctgcgtgatacctacggcgaggaactgccgctgccgcgcctgctgcgcttcggtacctgggtgggcggcgacatggacggcaaccccaacgtggacgcgcacaccatccgcaatacgctggatgcgcagcggcaggcagtgctggggcgctaccagaaggaactgctgcagctggccagcctgctcagccagtccaccgagcgggtgggggtgagcgaggcgctgcaggcgcgcgtggcgcagtaccagcagctgctgccgcaggtacagtcgcggccgcgccacgcggacatgccgtaccgcctgctcaacgaccgcatgcgcgcacgcctgcaggccacgctggatgacggggaaggcgcttacgccggcccggacgaactgatcgacgacctgcagctgatcctcgacagcctgcgcgcgaaccgcggtgaacatgccggtggcttcgctgtgcaacgcctgctgtggcgggtgaagaccttcggcttccatctggcacggctggacgtacgccaggaatcgagcgtgcacgcgcgcgcgctggccaccgtgctgggcggcgacgcagcatgggacggtctggatgcattgggtcgcgcgcgcctgctggcgccgcatgccagtggtgacgcgccgttgccgaagggcgacgacgagggcaaccggcgactggacgccgtgttcgccgcactggccgatgcgcgtgcgcgccacggtggtgacgcgctgggcagctacatcatctcgatggcacacgaccgcagcgacgtgctggcggtgctggcgctggcgcgccgtggcgggctggtggaaggcaatggatcagtcccgctggacatcgcaccgctgttcgagacggtggacgacctcaagcgcggcacgacgaccctgcgtgacctgctggccgatccggtgtaccgcgctcacctgcgtgcgcgcgaggacgtgcagatggtgatgctcggctattcggacagcagcaaggacggtggcatcgccgcctcgcgctggggcctgcaacgtgcgcaggtggaactgctggaggtggcagccgaggcgggcatccgcctgaccttcttccatggccgtggtggctcgatcagccgcggtggcggcaagaccacgcatgcggtggatgcctcgccgcgcggcagcatcgatggccgcctgcgggtgaccgagcagggcgaggtgatccatcgcaaatacggtatccgtgcactggccctgcgctcgctggaacaggccaccggtgcggttctgcgcgccagcctgcggccgcgcgcctccgaaccccgcgaagatgagtggcggccggtgatggacgcggtggcgtctgccagcagcgaggtatatcgcgccttcgtcggccaggccggtttcatggattacttccgcaccgccacgccgatcgacgtgatcgagcggatgacgctgggctcgcggccgtcgcgccggctcggccaggacgcagcactgggcaacctgcgtgcgattccgtgggtgttcgcctggagccaggcacgcgcggtgattcccggctggtatggcgtgggcagtggcctgcaggcggcggttgatgccggccacgaacagaccctgcgcgacatggcgcgggactggccgtttttccgtacgttcctggacgacatcgcgatggtgctgtccaagggggatatcaccattgccgagcagttctcgcggttgtcgggtgatctgcacgggcgtttcttcccgcaggtgcagcgcgaactggaactcacccggcactggctgctggcgctgatggaccaaaagacgctgctggaccacgatgcgcggctggcgctgtcgatccgcctgcgcaatccctacgtcgatccgatcagcgtgctgcaggtggaccttttgcagcgctggcgggccagcgggcgcgaggatgacgagttgctgcgcgcgctggtggcgtgcgtgaacggtgtttcgcagggtgtgcagaacacgggttga

SEQ ID NO: 508021 - DNA, 2517 bp, Stenotrophomonas maltophilia
atgagcatgcacgcgcgccgtacgcggcgctggaccggcctggtcctgtcgatgggactgctggcggtggtcccgctggcatgggcggccgccccgcagtcggctgcggcaccggcccagggcgtgaccggctatgaattgccgtcggccgcgctgcaggcagtggtcgatgcgccgcgcgcgccgtcgctgttcctgtcgccacggcgcgacgtggccgcgatgatgcagatgccgtcgctgccgtcgatccaggtggtggcgcaaccggagttgaagctggccggcctgcgcatcaacccgcgcacgttctccgatagccgcttcagcttcggcgagaagctgtggctgatgaacgtggccgatggcaaggaacggccgatcagcggcctgccggccacgctgtcgatcgccagcctgatgtggtcgccggaccagaagtggctcgctttcaaccaggtcgacgccgccagcggtgccaatgaactgtggctggtggacgtggccgccggcagcgcccgccgcctggttgcgggcttgaacaccgtcatcggcagtggctaccagtggttgccggacagtcgggggctggtggtgttcacccgcccggccaacctcggtgcggccccggccaccgacggcatcccgaccggccccgccgtgcagcagacccgccagggcgatggcgtggtgtcgatccggacctaccaggacctgctgaagaacgaagccgacgcgcgccagttcgactactacgccaccacccagccggtggaagtcagcctggacggcaccacccgcgcgatcggcgcggccggcatcttcatgggcttctcggtgtcgcccgatggccgcttcgtgctgcgccagccggtgcagcgcccgtattcctacgtggtgccggtgagcagcttcccgcgccgcatcgaagtgatcgaccgcgccagcggcacgctggtgcacaccgtggcggtgcggccgctggtggaaggcctgccgaccggcaacgatgccgaagtgaccggcgtgcgcgacatcagctggcggggggatgccgatgccaccctggtctgggccgaagcgcaggatgggggcgacccgaacagggacgccaaggtgcgcgacgcggtgctgatgcaggccgcgccgttcgacaagccgccggtgacgctggcccagctgggcagccgcctggccggcatcagctggggccgcggtgacctggccgtgctgaccgaatcgtggtggaagacccgcaggaccaagacctggctgatcgctccggacactgccagcgccgaaccgcgcctgctgtgggatcgcgatgcgcaggaccgctacgccgatccgggccggccgctgctggccagcgacgagcgcggccgttcgctgctgcagaccagccctgatggcagcagcctgtacctggccggtgccggcgcgtcgccggaaggcgaccgtccgttcgtggatcgcttcgacctcgccacgggcaaggcgacgcgcctgttccactcgcaggcgccgagctattcgctgccggtggcactgctggacaaccagggcagctcgttgctgctgagccgtgagagcccggacgagccggccaatttcttcgtgcagtcgctggccgatgtcagcgccgcgccgcgcgcactgacccactttgcccatccgctgccgcagctgaagggcgtgcagaaggaacagatccgctacaagcgcaaggacggcgtcgacctgaccgcgaccctgttgctgccgccgggctacgaccccaggcgcgatggtccgcgcccgctgctgatgtgggcctatccgggcgagttcaagagcgcggccgcggccagccaggtcaccgattcgccgtaccgcttcaatgcgatcagttactggggcccgcaggcgttcctggccaagggctacgtggtactggccagcccgtcgatgccgatcatcggcgagggcgacaaggagccgaacgacacctatatcgaacagctggttgccaacgcgcaggccgcggtggatgaggtggtgcgccgtggcgtgaccgatcgcgaccacatcgccatcggcggccattcgtatggtgcattcatgaccgccaacctgctggcacacacccgcctgttcaaggccggcatcgcacgcagcggcgcctacaaccgcacgctcacgccgttcggcttccaggccgaggaacgcaactactggcaggcacaggacgtctaccagaagatggcgccgttcaactacgccgacaggatcaaggatccgatcctgttcatccacggcgtggacgacaacaactccggcacgttcccgatccagagcgagcgcatgttcgccgcggtgaagggcctggggggcaccgcgcggctggtgatgctgcccaacgaatcgcacgcctaccgcgcacgcgaatcgatcatgaccatgctggccgagagcgagcgctggctggagcagaccatcggcccggccgcgcagggcacggcgaagaagaagcgctga

SEQ ID NO: 508022 - DNA, 1446 bp, Stenotrophomonas maltophilia
atgaacgctgttgccaagaccttctccaccgaaggtgattacaagatccgcgacatcacgctggccgactggggccgcaaggagctggacatcgccgagcacgagatgccgggcctgatgtcgatccgccgcaagtaccaggccgagctgccgctgaagggcgtgcgcgtgaccggctcgctgcacatgaccatccagaccgcggtgctgatcgagacgctaaaggacatcggcgccgacgtgcgctgggcctcgtgcaacatcttctcgacccaggaccacgcggccgccgccattgccgccaccggcaccccggtgttcgcgtggaagggcgagaccctggaagagtactgggactgcaccctggacgcgctgaccttcaccctggccgacggcaccctgaccggcccggagcttgtggtggacgacggcggtgacgtgaccctgctgatccacaagggctacgagctggaaaacggcagcgactgggtcaacaccgcctcgtcctcgcacgaagaacaggtcatcaagaacctgctcaagcgcgtggccaaggagcgcccgggttactggggccgcgtggtcaaggactggaagggcgtctccgaagagaccaccaccggcgtgcaccgcctgtaccagctggcccaggccggcaccctgctgatcccggcgatcaacgtcaacgactcggtcaccaagagcaagttcgacaacctgtacggctgccgcgagtcgctggccgatggcctgaagcgcgcgatggacgtgatgctggccggcaaggtggccgtggtctgcggctacggcgacgtcggcaagggctgcgccgcctcgctgcgtgcctacggcgcacgcgtgatcgtcaccgagatcgacccgatctgcgccctgcaggcggcgatggaaggctacgaagtcaacaccatcgaatcgaccctgggccgtgccgacctgtacgtcaccaccaccggcaaccgcgacatcatccgcatcgagcacctgagcgcgatgaaggaccaggccatcgtctgcaacatcggccacttcgacaacgagatccaggtcgacgcactggtgtcctacccgggcatcaagcacgtcaacatcaagccgcaggtggacaagtacatcttcccgaacggtaatgcgatcttcctgctggccgaaggccgcctggtgaacctgggctgcgccaccggccacccgagcttcgtgatgtccaacagcttcgccaaccagaccctggcacagatcgacctgtgggcgaacaaggacagctacgagaagaaggtctacctgctgccgaagaagctggacgaggaagtggcccgcctgcacctggaaaagatcggcgtgaagctgaccaccctgacccaggaccaggccgactacatcggcgtgccggtggaaggcccgttcaagccggaccactaccgctactga

SEQ ID NO: 508023 - DNA, 474 bp, Stenotrophomonas maltophilia
atgaccccggccatcaacctgctcaagcgcgagaagatcgcccacaccgtgcgcaactacgtgcacgacgcccacgccgaatcgtatggcggcgaagctgtcgacaagctcggcctcgacccggcccaggtgttcaagaccctgctggccagtaccgaggcccacgaactgctggtggcgatcgtgccggtggccggccagctcgacctgaaggcgctggccgaagcggccggctgcaagaagtgcgagatggccgccgccgacgccgcgcagcgcgcgaccggctacctggtcggcggcatcagcccactggggcagaagaagcgcctgcgcacgttcctggatgccagcgcgcaggcgttgcccacgctgcacgtcagcgccggccgccgaggcctggaagtggaactggcgccggccgacctgctgcgcctgaccgctggccacttcgccgccatcggcaaggcacgctga

SEQ ID NO: 508024 - DNA, 486 bp, Stenotrophomonas maltophilia
atgcgctggccgtggactgctcgcccgataccgcggctggacgatgcgcaggccgatgtgctgctgcaggacctgctgtcgcgcgacgccgagcgcatcaccgacgccgcccgcgtcgtcgcacgactgttcagtgcaccgtcgctggacgcattggccgcgcatgtggacctgatcgaacggagctgccagggcatcgctttcggcggcatgctgatcagcaaccaggcgcatctggaggcggccctgaaacggctgcgttactggcaggcgcacgcaggctgcctgtgcgcgctcaatcccggctacccgttcttcgatccgcgccgcctgatcgaacaagggcagatgcagctgcttgcgttgcagggggccgaggagggttggggcgattgccacatcgttgcctgcacgcactgcggccagcattggcaggccatcgaccgcgagtaccactacccgtggtgggagtggaaagctgcctga

SEQ ID NO: 508025 - DNA, 558 bp, Stenotrophomonas maltophilia
atgtccatcgtcctcaccgatttcgcccgtccccgcctgttcccgcgcgtaccgcgaggcaacacgatccaggactgcactgccgaacagttcgaggcgcacctcaacgcgcacgcgccgctgaaggtgctggacggctatgcgccgttctgcaaactgttcgtctacgagaactggaccagcacgcgctgcctgaccgtgccgatcaccgaggccaaccgcgctctgctgcgcagtggttacgaggcacgcaatcgcgacgaactgccggtgctggtgcgctggttcgagggcgtggagccgccgcgtgcgaactacctggtggtgatcctgtacagcgccgggcagctggccaaggaaggctcgccgatcgaggccgagtggggcatcgtcggctgcatctataccgccgaaccggaagaggtgcctatggcgccgatcacgatgatgcgcaatgcgctgggcgtggaagagggcggttccggcgtaccactggaccgcgaggcctaccggcgctcggtcgcgttctgggagaacaacgccaactggcggccctga

SEQ ID NO: 508026 - DNA, 732 bp, Stenotrophomonas maltophilia
atgagtggcatgctgcgcgtgttgatcgtggatgatgcgcggctggcgcggcaggaactgcgtacgctgttgtcggcgctgccgtgggttcagtgcgtcggcgaggccgacgacgtgcccgccgcacgcgaggcgatcgccacgctggcgccggacctggtgctgctggacgtgcagatgccttccggcagcggcttcgacgtgctggagggcctggagacagtgccggcggtggtcttcgtcaccgcctatgacacctacgcggtgcgcgcgttccaggccaacgcgctggactatctggtgaagccggtggaggcaccgcgcctgttggaagcactggagcgcgcgcgcgagcgcaacgcaggggcgagcggggcgccggcactgcgcagcacgctggctgcgcaggaccaggtgttcgtgcgcgagggcgaacgctgctggttcgtggcggtgtccgagatccgcaggctggtggtggacggcaactacacgcggctgtggttccgcgaccagaacgcgttgctgacccgcagcctgagcgcgctggaggctcgcctgccgcaggagctgttcttccgtgccaaccgcaacacgctggtcaatctgcgccgtatccgcggcgtagcgcccagcatcggcgatggctatgacctgacgctggaggatggcagcgaggtggaggtgtcgcggcggcaggcgcgggagctgcgcgagcggatggcgctgtag

SEQ ID NO: 508027 - DNA, 1047 bp, Stenotrophomonas maltophilia; identical to SEQ ID NO: 501998

SEQ ID NO: 508028 - DNA, 927 bp, Stenotrophomonas maltophilia
atgaagatcttgctggcactctggtacgcgatgaacgccctggcccgattggcgatgatcggcatggcgatggccgtgctgggctccggttccgcacatgccgccaccggcgcgagcgctggcaaggtgcaggtcgaggtggtcggcaagggccgcccgctgctgatgatccccggtctcaacagcagcgccgaggtctggcgcgggacctgccgggccctcaaggaggtgcagtgccacctggtgcagctgccggggtttgccggcgccgcgccggcagacccgcggccggcagatttccttccggccatgcgcgaccagctgctggcctatgtgcatgaccagaagctggaccatccggcggtgatcggccacagcctggggggcctgttgggcctgcagatggcgcaggccgagccgaagacggtcagtgcgctgatggtggtcgatgccttgccgttcctgcccgcggcacgcgacccgcaggccacggcggccagcgcacgggtcatggccgaccggctgcgcagcggcatgctcgccgccgacgccgcgcaatggcaggcacagctgaaggccggcctgccgggcctgacccgtgatacgcagcgccaggccgaactgggtcgttggggcgacgccagtgatcgccagaccacggccgatgccatgcatgcggtcatgaccaccgaccttcgcgacagcattgcgtcgatcaccgcaccgacactggtgctcggcagctgggctggctaccagccgatgggcggcaccgaggaaagcacccgtgccgtcttccaggcccagtacgcgaagctgcagggcgtgcagatcgcgatgagcgcgcagggtttccatttcctgatgtgggatgatccgcgctggctgcacgggcaggtgcaggccttcctcgaccgccacccctga

SEQ ID NO: 508029 - DNA, 828 bp, Stenotrophomonas maltophilia
atgactgccatcagcttcgagttctatccgcccaagaccgacgaacagcgcagccagctggaccgcgccgcggccaggctgaaggactacagccccgagtacgtgtcctgtaccttcggtgccggtggctcgaccctcagctacacctccgagaccgtgcgccacctcaaccagcaccacggcttcgaggcggcaccgcatctgtcctgtgtcggcggcacccgccaggaaatccgcgaactgctcaagctgtaccgcgccatcggctgccatcgcctggtcgcgctgcgtggcgacctgccctccggcatgggcttccccggcgacatgcgctatgccgccgagctgatcgagttcatccgcgccgaacacggcgatgccttccgcatcgaggtcggtgcctacccggagacccacccacaggcctccgatgcactggccgacctgaagcacttcaaggccaagatcgatgccggcgccgacgcggcgatcacccagtatttctacaacccggatgcgtacttccatttcgtcgatgccgtgcgccggctcggcgttcaggtgccgatcacgcccggcatcatgccgatcgccaacctcagccagctgcgccgcttttccgaacagtgcggtgcggaaattccgcgctggatcagccgcaagatgcaggcctatggcgatgacgccgaatcggtgcgcgcgttcggtaccgaagtggtggccaggctgtgccaacgcctggtcgagggcggcgcgccgggcctgcacttctacaccttgaacctggccaagccgaccacgtcggtgttgcagctgctgcacggctga

SEQ ID NO: 508030 - DNA, 585 bp, Stenotrophomonas maltophilia
atgaaccggctttccgtcctgctgttgctgctgtcgttgtgctcggcatcgagcgttgtccatgcgcagtccacgcgcttgaaccgctgcaccgatgcgcagggccagagcgtgtataccgaccggccctgcgacagcgtcggcgcccgatcacgattgccaccgcccgcgcccgccggcaacaccccgccgcgcgacaccctgggtgcgcgctgcccgcggcggctcagcgaactggtggaggcgctgcgtaccggcatcgtcagcaacgatgtgaaccggctgtcctcactgtacctgtggggcgcggtttccgacgcgggcgcacagcgcatcctcggccagttggaatcgttggcgcggcggccgctggtggacgtggtgccggtgtatccgtcacaggggctggtggcctcgcaggaggacggtcagagcgctgcggcgcaggaatccgaccccgagccgccggcggcgcgccatccgatcggcctgcgcctggaacagacgctgcccggcagcgtgtcgcgcgcttcgaccgtgctggggttgcggcggcaatacgggtgtttctggatcacgttgtga

SEQ ID NO: 508031 - DNA, 954 bp, Stenotrophomonas maltophilia
atggtttcccccacccgatcgatccacgttgtcgctgccgtcatcaccgacgcccgcggccgcgtgctgctcaaccgccgtaccgagaaccgcgacatggccggcctgtgggaattccccggcggcaagcgcgaatccggcgagacctccgaacaggcgctggtgcgtgaactgcgggaggagctgggcatcgaggccgatgtcgggccgtggctgatggacgtgccgcagcgctaccccgacaagcacctgaccctggaagtgcgccatgtgcgcagctggaagggcaccccgcgcggccgcgagggccaggcgatcacctgggtggcgcaggacaagctgggccgctactcgatgccgccggccgaccttccggtggtggccgccttgcgccaaccggaccgctacctgatcaccccggcaccggccgatgatgccagcggcgtgcagcactggcatgactgcctgcagcgcgcggtcgcggcgggccagcagcgcatccagctgcgcctgccaccggaccatccgcaacggcaggcgatgatcgaacaggccgtgcgtgcgcatcgtcgcggcgtgcagttcctgctcaaccgcgatatcgcgctggcacgctcactgggcgtgggggtgcacctgggcagcgagcagctgcgggacctgcaggaacggcccttgccggaggggcagctggtcgccgcgtcctgccatgacctggaccagctgcaggcggcgcagcggctgggctgcgacttcgcagtgctgggcccggtgcaggccacggccagccaccccggggcagtgccgctgggctgggaggccttcgccgcactgcgtgcgcaggtgtcgctgccgatctacgccctgggcggcatggccgcgggacacatcaccgaagcccgccgccatggtgggcaggggatcgccgccatccgcgggctgtggccaacgtaa

SEQ ID NO: 508032 - DNA, 2733 bp, Stenotrophomonas maltophilia
atgatcaacagcctgcttacccgcgtatttggcagtcgtaacgaacgacagctgcgccagctcaaccgcatcgtcgccaagatcaatgcgctggagccggagatcgagaagctgtccgacgagcagcttcaggccaagacgccggagttcaagcagcgcatcgctggcggtgaagccctggacaaggtgctgccggaagcgttcgcggtctgccgcgaagccggccgccgcgtgctgggcatgcgccattacgacgtgcagctgatcggcggcatggtgcttcacctgggcaagatcgcagaaatgcgcaccggtgaaggcaagaccttggtggcgaccctgccggtgtacctcaatgcactggaaggcaagggcgtgcacgtggtcaccgtgaacgactacctggcccgtcgcgacgccgcgcagatgggcaagctgtacaactggctgggcctgagcgtgggcgtggtgtacccgggcatgccacacagcgacaagcgcgaagcctacgcggccgacatcacctacggcaccaacaacgaattcggtttcgactacctgcgcgacaacatggcgctgtccaaggccgatcgctaccagcgtggcctgcactacgccatcgtcgacgaagtcgactccatcctgatcgacgaggcgcgtaccccgctgatcatctccggcccggccgatgattccccggagctgtacatccgcgtcaaccgcgtcgtgccgcacctggtcaagcaggaagcggaagacggcgagggcgatttctgggtcgacgagaagggcaagcaggtgcacctgtccgaagcgggcatggagcacgccgagcagctgctggtggaagccggcatcctcgacggcgagaccgaaggcctgtacgcggcgcagaacctgaccgtggtccaccacctcaatgccgccctgcgcgcgcacgcgatctaccagcgtgacgtggactacatcgtgcgcgacggcgaagtggtcatcgtcgatgaattcaccggccgcaccctggccggccgccgctggtccgacggcctgcaccaggcggtggaagcgaaggaaggcgtgccggtccagcgcgagaaccagacgctggcgagcatcaccttccagaacctgttccgcatgtacaagaagctgtccggcatgaccggtacggccgataccgaagcattcgagttccagagcatctacggcctggaagtggtggtgatcccgaccaaccgcccgaccatccgcaaggacagcccggaccaggtgttcctcaaccgcaagggcaagttcaatgcggtgctggccgacatcgaagagtgcgccaagcgcggccagccggtgctggtgggtaccacctcgatcgaaacctcggaaatgctgtccgagcacctgagcaaggcgggcgtgaagcacgaggtgctcaatgccaagcagcacgaccgcgaagcgaccatcgtcgccaacgccggccgtccgggcgcagtgaccatcgccaccaacatggccggccgcggtaccgacatcgtgctgggcggttcgctggaagccgagatccacgccctgggcgaggatgcgaccgacgaacagaaggcggcggtcaaggccgaatggcagaagcgccacgaggcagtgaaggcggccggcggcctgcacatcgtcggtaccgagcgccacgaatcgcgtcgtatcgacaaccagctgcgcggccgttcgggccgccagggtgacccgggttcgtcccgcttctacctgtcgctggaagacaacctgatgcgcatcttcgcttccgactgggtgcagaaggccatgcgcatgatgggcatgaaggaagacgacgtcatcgaggaccgcctggtcagccgccagatcgaaaaggcgcagcgcaaggtcgaggcccacaacttcgacatccgcaagaatctgctggacttcgacgacgtcaacaacgaccagcgcaaggtgatctacgcccagcgcgacgaactgctggacgccgagtcggtgaaggccaacgtcgacggcatccgcgacgacgtgatcttcgacaccgtggcgcgcttcgtgccgccgaactcgatcgacgagcagtgggacctgcgtggcctggaagcgaccctggagtcggacttcggcctgcagatgtcgctgaccgacctggtcaaggcgcacgaggaactggacgccgaggccattgccgccaaggtccaggagcgcgtcaaccagcacttcgccgagaaggaagccggcctgggcgaagagaccatgcgcgcgctggagaagcacgtgatgctgaccgtgctggaccagagctggaaggagcacctggcacgcatggattacctgcgccagggcatctatctgcgaggttacgcgcagaagcagccgaagcaggaatacaagaaggaagccttcgagctgttctcggacatgctggagaacgtcaagcgcgaagtggtgaccctgctggcccgcgtgcgcatccgcagcgacgaggaagtgcaggcgctggaagcggccgagcgccagcaggcgcaggcacgcctgagccagtcgcagttccagcaccaggatgccggcggttacagcgccgacgaggaagccgcgcaggtggaagccgcccagcagggcgtggccacgctgcagcgcgacgagccgaagatcggccgcaatgatccgtgcccgtgcggcagtggcaagaagtacaagcactgccacggccagctgagctga

SEQ ID NO: 508033 - DNA, 957 bp, Stenotrophomonas maltophilia
atggcattcaaaaagatcgtaatcaaaacgcgtgaaggacaggccaaggcgtcgccgatcacgcgtttgcggttctatttcgaggaccgcccccgcgccctgctgggcagcgtgctcggggtaggctgcattatcggccttgccggcggcattggcgccagtgcgctgaatgattcgcgcctgcaggccaaggtcgagcgccaggatgcggagctggccaaggtcaagcgcgatgcgcagacccaggtcaacgcgctggccgcccgcctcggcgagctgcaggcgcaggccacccgcctgaacgccctgggcgaacggctgacccagatgggcaagctggaagatggcgagttcgacttcaacgagacccccggcctcggtgatggcgacgccggcggcccgaccagcgacatcccggtcaaggacgtcaacgccgacttacaggtgctggagcagcgcttcgctgcttcaggccgccagttgtcggtgatggaatcgctgatgttcgaccaccagctgcagcagaacgccgtgccctcgcgcatgccgatccgcaacagctacgtgacctccggtttcggcacccgcgccgacccgttcggccgcggcgccgccacccacaagggcatggacttccacgccaaggtcggtgatccggtgatggccgtggccgagggcgtggtcagcttcgccggtgtgaagggcggctacggcaatgtcgtcgatgtcgaccacggtaacggctacgtcacccgctacgcgcacaattcgcgcctggtggtgaaggccggtgacctggtccgtgccggccaggaagtggccaaggccggttccaccggccgttcgaccggtgcccacgtgcacttcgaggtgtgggagaacggcaacgtggtcaacccgcgcaagttcctcggcgacggcggcaacacgccggtcggccgcatcagccgcggctga

SEQ ID NO: 508034 - DNA, 450 bp, Stenotrophomonas maltophilia
atgtctgagccgaaatccagcgttcgccccgcgtcagtgccgaaaccggcgctggatgcggtaatggcggacaaaagcgggaacccgctgcgtcgggccttgtggctcgacgcgctggaccggcagttgcgcccccagttgccgccacctctgcgcagccgctgccggctggccaatgtggacggggaacacctcgtttttctcgtcgaatcgccggtctggcatgccaagttgcggcttgccgaagcccagttgctcgacgcggcccgttccatcgggctgaaggccaccagggtgaccatcaagactgcgtccaccactccctcacgctccccagcgatcgacaaccggaatggcccccacgcagtttcagccgccacgcacaaagggctacgcgacgccttggcttgcctgcaggacgttccctcgaagccgaagaagcggtcctga

SEQ ID NO: 508035 - DNA, 912 bp, Stenotrophomonas maltophilia
atgatccagcaacgcaccctcaagaacacgatccgcgccaccggcgttggcctgcacagtggtgacaaggtctacatgaccctgcgcccggcaccggtcaaccatggcatcgtgttccgccgcgtggacctggacccggtggtggaggtgccggccaaggccgaactggtcaccgaagtgaccctgtgcaccggcctgacctgcaacgacgccaagatccagaccgtcgaacacctgatgtcggcgctggccggcctgggtgtggacaacatcatcgtcgaactgtcctcggccgagctgccgatcatggacggttcggccggcccgttcgtgttcctgctgcagtcggcaggcatcgtcgaacaggatgcgcccaagcgcttcatccgcgtgctcaagaccgtggaagtgaccgagggcgacaaggtggcccgcttcaccccgtacgagggctacaagctaggcttcaccatccagttcgatcacccgatgatcccggccaagcagtcgcgtcaggaaatcgagttctcgacgctggcctacaccaaggaaatctcccgggcgcgcaccttcggtttcatgcgcgacctggaatacatgcgcgagcgcaacctgggcctgggcggttcgatggacaacgccatcgtgctggacgagttccgcgtgctcaacgaagacggcctgcgctatgcggacgaattcgtgcgccacaagattcttgacgcaatcggcgacctctacctggccggtggccaggtgctgggcgcctatgagggcttcaagtccggccatgcgctcaacaacaagctggtgcgggccctgatggccgacgccagcgcctgggaatgggtcaccttcgactcgccggccaccccggatccggttgaatacgccaccccggcctacgcctga

SEQ ID NO: 508036 - DNA, 1242 bp, Stenotrophomonas maltophilia
atggcgcattttgaactgatcgaaaagatggcacccaatgcggtgatcaaggtggttggcgtgggcggcggcggcggcaacgccgtggcgcacatggtcaactcggcggtggatggcgtggaattcatcaccgccaacaccgactcgcaggccatcaagaattgcggtgccaagctgcagctgcagctgggtaccaacgtgaccaagggcctgggcgcaggcgcgaacccggaagtcggccgccaggccgcgctggaagaccgtgagcgcatcatggacgcgctgcagggcgcggacatggtgttcatcaccgccggcatgggtggcggcaccggcaccggcgctgcgccggtggtggcacagctggccaaggaaatgggcatcctgaccgtggccgtggtcaccaagccgttcccgttcgaaggccgtcgccgcatgcaggtggcgctgaagggcatcgaggaactgagccagcactgcgactcgctgatcaccatcccgaacgagaagctgatcaccgtgctgggtcgcaacgcgaccatgatccaggccttccgtgccgccaacgacgtgctgcagggcgccgtgcagggcatcgccgacctgatcgtgcgtccgggcctgatcaacgtcgacttcgccgacgtgcgcaccgtcatgtccgaaatgggcctggcgatgatgggtaccggcaccgcccgtggcgatgaccgtgcccaggccgctgccgaagccgcgatccagaacccgctgctggacgatgtgaacctggccggtgccaacggcatcctggtcaacatcaccgccggcgccgacttcaccatggccgagttcgacgagatcggccgcaccatcgatggcttcgcttcggaagacgccaccgtggtggtcggcaccgtgctcgatccggacatgcaggacgaagtgcgcgtgaccgtggtcgccaccggcctgaaccgcgtttcggccagcaagacccagcgtccgggcgagcgcgcaccgatcaagctggtccgcaatgccacgaccggccagccggagttcggcgacttcgacaacggcggcgacgccgtgtccaaggccgtcggcgggatgggcatgggcatgggcctgcgtcgtgccagcagcgacaccgcggcggcgtccgcaccgtcggccccggccgcatcggccccggcggcggcggaactgccgaacgattacctggacatcccggccttcctgcgccgccaggcggactaa

SEQ ID NO: 508037 - DNA, 1236 bp, Stenotrophomonas maltophilia
atgaatcgcaagggtgacaaatcgctgatcgttggcctggacatcggcacctccaaggtggtggcgctggtgggcgagtattcgccgggcaacccgatcgaagtgatcggcatcggctcgcacgaatcgcgcgggctgaagcgtggcgtggtggtggacatcgaatcgaccgtgcagtcgatccagcgtgcggtggaagaagccgagctgatggccggttgcgagatccgttcggtgtacgcctcgatctccggcaaccacgtgcagtgcaagaactcgccgggcatcgtgccgatccgcgatggcgaagtgacctggggcgacctggatcgcgtgctcgatgcggccaaggcggtggcgatcccggccgaccagaagatcctgcacgcgatcccgcgcgagtacgtgctggacgattcgcaggaaggcatccgcaatccggtgggcatgaccggcgtacgcctggaggtgcatgcgcacctggtggtgtgcgcgcagtcggccgcggccaacatcagcaagtgcgtgcagcgctgcggcctgcaggtggatgacctggtgctgtcctcgctggcctccagcgtggcggtgctgaccgccgacgagcgcgagctgggcgtggtgctggtcgacatgggcgccggcaccaccgacatcgccgtgttcgtgcagggcgcgatctgccacacggcctcgctgccgatcgccggcgaccacgtgaccaacgacatcgcgcacatgctgcgcacgccgaccccggaagccgagcagatcaaggtgcgctatgcctgcgcgctggcccagctggccacggccgaggagagcatccaggtaccgtcggtgggcgaccgcccgccgcgccgcatgccgcgccattcgctggcgcaggcggtgcagggccgctacgaggaaatcttcgagatggtgcaggccgaactgcgccgctccggcttcgaggaactggtgcgcgccggcatggtgctgaccggtggtgcttcgaagatggaaggcgtggtcgaactggccgaggaaatgctgcagatgccggtgcgcgtgggcatcccgcagcacgtcaccggcctgggcgaagtggtcggcaacccggtgcacgccaccggcgtgggcctgctgctgatgggcagccagatcgagcacccgcggcggccgtcgctgccgaccgggcgcgctggaagcatgttcaagaaactcaagacctggttccgcggcgagttctga

SEQ ID NO: 508038 - DNA, 750 bp, Stenotrophomonas maltophilia
atgaacgcgctgctgcgcatcttcgtctggctgttggcgctgtcggtggttgcactgccggtggtggccgtggtcaatggctgggtcggcgccgagcgctggccgctggcgaagctgcgtgtgcatggcgagttcaagcgggtaccggccgagcagctgcagcaggtgctgctgccctatgcgcgcgccgggttcttcgcggtcaagctgcaggatgcgcaggacgccctggaaaagctgccctgggtggagagtgcccaggtacgcaagcagtggccggacgtgctggaagtgaccctggtcgagcacaagccgttcgcacgctggggcaccgaccgcctggtgtccgagcagggcaagctgttccccacgccgaagaagctgtccgacctggcgttgcccgaactggatggcccggacagccagaccggagaagtgatgaagctgtacagcgacgcacgtgcattgttcgcaccggccggcgtcgatgtgcgccgggtgacgatggatgcgcgcggcagctggtcgctggtgctgagcaacggcaccgaagtggtggtcggccgtgacgacgcgcgctcgcgcatgcagcgcttcgtcaaggtgctgccgcagctcaaccgtcaggacgcgccgatcgagcgcgccgatctccgttacaccaatggtttcacgctgagctggggtaccccggccacgccggcgaaaacgccggcgaccccggccagaagcacgcaggaaaggacatga

SEQ ID NO: 508039 - DNA, 963 bp, Stenotrophomonas maltophilia
gtgagtacgctgaccttcccgccgctgcgcgtgaccgacccggccgtgttcggccgcgtcgccgtgctgctcggcggcagctccagtgaacgcgaggtgtcgctggactcgggccgcaacgtgctcgaagccctgcagtcgcgcggcgtcgatgcgttcgccgtggatggcatcccagcgctggccagcgcgctcgctgccggtggcatcgaccgcgtcttcaacatcctgcacggccacaacggtggcggtgaggacggcatcgtgcagggcctgatggacgccttcggcgtgccgtataccggctcggacgtgctgggctcggcgctgagcatggacaagatccgcaccaaacaggtgtggctgtcgctgggcctgccgaccccgcagtaccgcaaggtcgacgcctcgaacgtgcatgcgctggccgccgagctgggcctgccggtggtggtgaagccggccaacgaaggctccagcgtgggcatcagccgggtcaccgacgaggcgggcctggatgaggccgtggccttggccgcgcgctacgacggccagctgctgatggaacagatggtggtcggcgacgaactgaccgtggccattctcggcgacgtcgcgctgccgtcgatccgcatcgtgcccaagggccagtggtacgactacaacgccaagtacatcgccgaggacacccagtacctgtgcccgggcctggaaggcgatgccgaggacgagatccgccgcatcgcgctggccgcgttccgtgccgccggctgccgtggctggggccgcgtggacgtgatgcgcgaccgtgccagcggccgtttcttcctgctggaagtgaacaccgcgccgggcatgaccagccattcgctggtacccaaggcggcgcgccaggccggcatcggtttcgaggaactggtgtggcgcgtgctggaacagaccctggaggccgcgcacgcatga

SEQ ID NO: 508040 - DNA, 1437 bp, Stenotrophomonas maltophilia
atgatccgtcgcctgcacgacaccaacgacctggtgcgcgcgttcccgcgcgtgcacttcgtcggcatcggtggcaccggcatgagtggcatcgccgaagtgatgctgacgctgggctacgaagtgtccggctcggacaacgcggacaacgtggcgacccgccgcctggccagcctgggtgcgcgcatcatgcgcggccactcggccgccaatgtgctgggcaccgactgcgtggtggtctccagcgccatccgcgaggacaacccggagctgatggaagcgcgcagccagcgcattccgatcatgccgcgcgcagcgatgctggccgagctgatgcgcttccgccgcggcatcgccgtggccggtacccatggcaagaccaccaccaccagcctcactgctgcggtgctgagcgagggtggcctggacccgacgttcgtgatcggtggccagctgctggccgccggtgccaacgccaagctgggtggcgggcagtggctggtggccgaggccgacgaaagcgatggcagcttcctgcgcctgaacccgttgatgtcgatcatcaccaacattgatgcggatcatctggagaactacggcaacgatttcgcccgcgtgcaggcggcgttcgccgagttcctgcagcgcctgccgttctacggcctggcggtgctgtgcatcgatgatccggaagtggcgggactggctgccaagaccccgcgccacgtgatgagctacggcatgagtccgcaggctgacgtgcgcgccgagaacgtggtgcaggaaggctcgcgcatgcgcttcacgctgcgcctgccgcagggcaccagccaggaagtggtgctggcgctgccgggcaggcacaacgtgctcaacgcgctggccgccgcggcggtgggctggcagctcggcgttgccccggacgcgatcgcgcgcgcgctggaaggcttcgccggtgtcggccgccgcttcaacgacctgggcgaagtgaccaccgccagcggtgcgaaggtgcgcatcatcgacgactacggccatcacccgagcgagctggaggcggtattcgccgccgcccgcggaggctggaccgacaagcgcctggtggtggccttccagccgcaccgctacagccgtacccgtgaccagttcgacaagttcgccgcggtgctgtcgagcgttgatgcgctggtgctgagcgaggtctacccggccggtgaggaacccattgccggtgccgactcgcatgcgctggcccgcgccatccgcgcgcgcggccgcagcgagccagtggtggtgggcaaggccgccgagctggccagcgtgctgccggatgtactgcaggacggtgacctgctgctgatgatgggggccggcgacatcggtgccgtggctacccacatcgcggtggaaggcttcaagggggagggccaggcgtga

SEQ ID NO: 508041 - DNA, 1089 bp, Stenotrophomonas maltophilia
atgagcgcggccaccgatagcgtgcgtccggtgatgatcctcgccggtggcaccggcggccacatcttccccggcctggccgtggcccgcgtgctgcgcgggcgtggcgtgccggtgacctggatgggtgccgaaggcgcgatggaaacgcgcctggtgccgcagcacgacattgccatcgatacgctggccatcaccggcctgcgcggcaagggcaagctggccctgctggcggcaccgtggcggctgatgcgtgcactgcgcgcggccgggctgatcatccgcaagcgccagccgcgcgcggtggtcgcctttggtggctttgcctccggtcccggcggcatggccacgcgcctgcatggcctgccgctgatcgtgcatgagcagaaccgtgcgccgggcctgaccaaccgcatcctgtcgcgctatgcgcgccgcctgctgaccggtttcccgggcaccttcgcccagcgcgaggaattcgtcggcaacccggtgcgtgcggaaatcgccgccattgcgccgccggagcagcgcttcgccgaccgccacggcccgctgcgcgtgctggtggtcgggggcagccagggcgcgcgtgcgctcaacaccggcgtgccgcaggcgatcgccgcgctgggcgccgacgtgccggtgcaggtgcgccaccagagcggcgagaagatgcatgccgaagcggtcgaggcgtatgccaaggccggcgtgcaggctgagatcaccccgttcatcgcggacatggccgaggccttcgcctgggctgacctggtcgtctgccgcgccggcgcgtcgaccctggccgagctgtgcgcggtcggtgtcggcagcgtgctggtgccattccccgctgccgtcgacgatcaccagacccgcaacgcggagtacctggtcgagcgcggcgcggcggtgttgctgaagcaggacggaacgctggccgacggcatcgccgcactgctgcgcgatctgtccgaaaatcccgcccgccgcatgcagatggcgcaagccgcgcgtgccctggccaaggtcgatgccgccgagcgcatcgccgatatcattctcgaggaagctgtatga

SEQ ID NO: 508042 - DNA, 1326 bp, Stenotrophomonas maltophilia
atgaacgacctgtcccgccaggcaacacgccttgaagccatcgaaggcagctacgacaagtggctgctgggcgcgatcatcgcgctcaccggtgtcggcgtggtgatggtggcctccagctcgatcgcgctgatgagcagcccgttctattacctcaaccgccacctgatcttcctggcggtgggtatcgtgctggcggtcatcgccgcccgcaccgagctgaagtcgatcgagcagtacaaccagatgctgctgctgggctgcttcgtgctgctgctggcggtgttcgcgccgggcctgggcagcacggtcaacggcgcacgccgctggatcaacctgggcatttccaagttccagacggtcgaggcggtgaaggtgctgtacatcgtctggctgtccagctacctggtgcgcttccgcgacgaggtcaatgcgacctggccggcgatgctcaagccgctgggcgtggccggcgcgctggtggtgctgctgctgctgcagccggacttcggttcctcgaccctgctgctggcgatcaccgccggcatgctggtgctgggcggggtcaacatgccgcgcatgtcgatgccggtgatcatcggcctggtcggcatgagcgcgctggcgatcatcgagccgtaccgcatgcgccgcatcacttccttcctggacccgtgggccgaccagcagggcgacggctaccagctgtccaacgcgctgatggcggtgggccgtggcgaatggaccggcgtcggcctgggcaattccgtgcagaagctgtactacctgccggaagcgcacaccgacttcatcttctcggtcaccgccgaggaattcggcttcctgggcacctgcgtgatcgtggcgctgtatgcgctgctggtcggccgcaccttctggctgggcatgcgctgcgtggaaatgaagcgccacttctccggctacatcgccttcggcatcggcctgtggatcagcatgcagaccttcgtctcgatcggcgtgaacctgggcatcctgccgaccaagggcctgaccctgccgctgatctcctccggcggttcctcggtgctgatgacctgcgtggcgatgggcctgctgctgcgcgtgtcgtatgaactcaagcgcgccgagcgccgccaggccgtgcgcatcggtggcgccgaagacgccgcggccgagccagtggacgcgccggccgcaccgatggccaccggcgtgccgctgagcgccgccccggtggcccccgcgcctgctgcagcgaacgccgcgcgcggcaccagtcgcctgcagtcgcgcatcgaaccgaccttcgggaggctgtcatga

SEQ ID NO: 508043 - DNA, 1086 bp, Stenotrophomonas maltophilia
atgttgtatgaactggctcgatggttgcagcagttggagagcctgttcgggctgttcaactaccagacgttccgcgccatccttgccgcgctgacggccctgttcctgtcgctgtggctcggcccggcgatgatccgcaagcttgcccagttcaagggcggccagccgatccgcaaggacggtccgcagacccatttctccaaggccggcacgccgaccatgggcggttcgctgatcctgctcaccgtcaccctgtcggtactgatgtgggccgacctgcgcaaccgctacgtgtggctggtgctggcggtgatgctgtgctttggcgccatcggctggtatgacgactggatcaagatcgtccgccgtgacccgaacggcctgaagtcgcgctggaagtacctgctgcagtcgatcttcggcctggccgcgggcctgttcctgttctatacggccgacgtgccggcggcgctgacgttctacatcccgatgttcaagtcggtcgcgctgccgctggccggcatcggcttcgtggccatcgcctacttctggatcgtcggtttctccaacgcggtgaacctgaccgacggcctggacggcctggcgatcatgcccaccgtgctcgtggcctgcgcactgggcgtgttcgcctacgcctcgggcaacgtggtgttcgccaactacctgcagatcccgcagattccgggcgcaggcgagctggtcatcatctgcgcggcgatcgccggcgcgggcctgggcttcctgtggttcaacacctatccggccatggtgttcatgggcgacatcggtgcgctggcgctgggtgcggtgctgggcacgatcgcggtgatcacccgccaggagctggtgctggtgatcatgggcggcgtgttcgtcatcgagacgctgtcggtgatgatccaggtcgcatcgttcaagctgaccggcaagcgcgtgttccgcatggcgccgatccaccaccatttcgaactgaagggctggccggagccgcgcgtgatcgtgcgcttctggatcatctccgtcgtgctcgtgctgatcggcctggccacgttgaaggtgcgctga

SEQ ID NO: 508044 - DNA, 1395 bp, Stenotrophomonas maltophilia
atgaagcgcaccctgctttcgctgatcgcacactgggccggcggcgagatccacggcgacgacgtggccatcgatgcggtcagcaatgacacccgcaacctgggccccggcagcctgtatgtcgcgctgcgcggtgagcgtttcgacggccatgacttcgcagccgacgcgcaggcgcgcggtgccagtgcgctgctggtcgagcgcctgctgccgatcgaactgccgcaggtgctggtggccgacagcgaactggcactggccaggatcgccaccggcatgcagcgtgaccgtggcaccgaggtgttcgcgatcaccggcagcaacggcaagaccagcgtgaagagcctgctgctgtcgatcctgcagcaggtggcccagcacgcgcacaaggtggtctacgccaatccgggcaaccgcaacaacgagatcggcctgccgctggcggtgatcgatgcaccggaagatgccgactatgccgtctacgagatgggtgccggcaagccgggcgacatcgcctacctgaccgacatcgcccgcccgcgctacgcgctggtcaacaacatcgccccggcgcacctggagcggatgggcagcctgctcggcgtggcggtgaccaagggcgcgatctacgccgcgctgcccgccgacggcgtggcggtgatcaatgccgacgatgcgtacggccgctggttcgaacagcattttgtcggcaccccggcgcgctgccgcgtgctgcgctttggcctggagcattcggcagacgtgaccgcgcgcgatatccgcgccggtgcgcagggcagccagttcaccctggtcgcgccggccggcgaagcccgcgtggtgctgggcctgccgggccgccacaacgtcagcaatgcactggccgctgccagcctggcgctggccgccggcatcgacctggcacgcatcgcggcaggcctggccgaggcgcagccggtgccgggccgccagatcgcccatcagctgcgcaatggcgcggtgctggtggacgacagctacaacgccaaccccggttcgctggcagcggccatcgatgccctggccgccgcgccggaagagggctggctggtgctgggcgacatgcgcgagctgggcccggatgccgaagcgctgcatgcgcaggcgggcctccgtgcacgcgccgccgggctcaagcgcctgtatgcgctgggtccactcagcgctgccgccgctgccgccttcggcgacggtggccgtcatttcgccacccatgacgcgctgtcgcaggcgctgaaggacgagctgcacgccggcgtgcgctgcctggtcaaggggtcccgtggcagcgccatggacacgattgtcaaagcgctgctggcgcaaggagaggaatccccgcatgttgtatga

SEQ ID NO: 508045 - DNA, 1509 bp, Stenotrophomonas maltophilia
atgagtccttcgatgttgctttcgcagttgcttccggacgtggccctggcgggtcatgatcccgttctgaccggcctggtgctggacagccgtgccgtgcgccccggtaacgccttcgtcgccatcgccggtttcggcgcgcacggcctgggcttcgtcgagcaggcgcgcgctgccggcgccagtgccatcctgttcgaaccgccggcaccggccgatctgccggcaccggccgatgcgatcgccgtgccgggcctgcgcgcgcgcatgggcgcgatggccgaccagttccatggcgcaccgtcgcgggcaatggcgatggtcggcgtgaccggcaccaacggcaagacctccaccgtgcagctgctggcccaggcctggcatctgctcggaacgcccagtggcagtatcggcacgctgggcgccggactttatggtgccgtcgagccgaccggcttcaccacaccgctggtgctgcagatgcatgcgttgctggcccagctgcgcgacgccggtgcgcgcgcggtggcgatggaagtcagctcgcatgcgctcgaccagggccgcgtggacgccgtgcactacgacgtggcggtgttcaccaacctcacccgcgaccatctggattaccacggcgacatggccagctacggcgcggccaaggcgcggctgttccatcgcccgggcctgaaggcggcggtgatcaacctggacgatgccttcggccgccagctgttcgcgggcctgccggccagcgtgcagccgatcgggctgagctcccgtggtgccgaggacgccagcgtgcgcgccgaggcgctgcagcttgacggtcgtggcatcgccttcgaactggtcatcgacggccagcgcgctgcggtgcagtcgccgctgctgggccgcttcaacgtcgacaacctgctggccgtggccggtaccctgcacgcgcagggccagccgctgccgcgtatcgccgaggtgctgtcggcgctgcagccgatccgtggccgcatgaaccggcttggcggcgagaacggcctgccgaccgtggtggtcgactacgcacataccccggacgcgctggagcaggcgctggacagcctgcagggccacctgcacggcgcgctgttctgcgtgttcggctgcggtggcgagcgcgataccggcaagcgcccgcagatggcggcgatcgccgagcgcctggccaaccaggtcatcgtcaccgacgacaacccgcgtggcgaagacggcgacgtgatcgtggccgacatcctggccggcttccagaatgccgatgccgtgaccgtgcagcgcagccgcgcgcgcgcgatcggcctggcggtgaagcgcgccggtgccggcgacatcatcctgatcgccggcaagggccacgagccgtaccaggaagtgaatggcgtgcgccatgacttcgacgacaccgaagtggccgcggccgcactggcgaccaaggccggtgttctagaggcacaggccggggagggcgccgcatga

SEQ ID NO: 508046 - DNA, 1845 bp, Stenotrophomonas maltophilia
atgagcaagaccggccgcaaccgcccgcgcaacgccttcaacctgcgccagcgcctgcgctgggtcgcgctggcgctcggcctgtgctcggtgtcgctggtcggccgcgcggcctacgtgcagatcatcaacagcgacttctaccagcgccagggcgaggcccgctacctgcgcgagctgccgatcaagacctcgcgcggcatgatcaccgaccgcaacggggaaccgctggcggtgtccaccccggtcgcctcgatctgggtcaacccgcaggacctgctgcgttcgcccgagcgcatcccggagctggcccaggcggtcggcatgtcggtggatgagctgagcagccgcctgtcgcagaagtcggacaaggaattcatgtacctgcgccgccggatcaatccggacgaggcagagaaggtggtcgcgctgaagatcccgggcgtggccgcgcagcgcgagttccgccgcttctacccgcagggtgaggcgatggcgcacgtgctgggcttcaccaatatcgacgaccgcggccaggaaggcctggaactggcgttcgacgaatggctgcgcggcaagcccggtgcgaagcgggtgatccgtaaccgcaagggcgagaccgtcgaaagcgatctgctgcgcgccgccgagccgggcaaggacctgaccctcagcatcgaccgtcgcatccagtacctggccttcaaggaactgcgcaacgcgctggtggccaacaaggcggccggcggttcgatggtgatcatggacgtgaccaccggcgagatcctggccatggtcaacctgccgacctacaacccgaactcgctgaccggcgcgatccccgatacgcgccgcaaccgcgcggtgaccgacctggtcgagccgggttcgacgatgaagccgttgaccatcgccaccgcgctgcaggccggggcggtgaccaaggacaccatcatcgataccaacccgggttacatgcaggtcgcccgcttcaccatccgcgacgtgccgcgcaacaacggcgtgttgaacgtgaccggtgtgatcacccgcagttccaatattggtgcggccaaggttgcggcgaagatgccggaccaggtgttctatgatggcgtgcgccgcttcggctatggctcggtgccgcacagcggcttcccgggtgaatccggtggcgtggtgcgccgcccggccaactgggacggcgccaccaagaccaccatgtcctacggctacggcctgaacgtgacgccgctgcagatcgccaccgcctattcggcgttggccaacggcggcaagctcatcgcgccgaccttcgtgaaaggccaccgcaacgaagcgcatcagatcatcgatgagagcgtcgccaggcaagtggtggcgatgatggaaacggtggtcacccagggcggtgccaagcaggcggccgtgctgggctaccgcgtggccggcaagaccggtaccgcgcgcaagaccggcccgggtggttacgagcgtggccattacaacgcgctgttcgccggcgtggtgccggccaccaacccgcgctttgccaccgtcatcgtcatcaacgacccgcaggccggcaagttctacggcggcctggtctcggcgccggtctaccacaacgtgatggaaggcaccctgcgcctgatggacgtgccgctggacgacctgcagtcgtggctggccgcacagcagtccggcaaggtcggccattcggcttcgatcctgcctgcgccgccggccgagaccgcgctgccggtcgatgccgccgctgaattcgacgctgcgctgccgagcgcgcaagcccagacgccgcccgctacgggaggcacgcaatga

SEQ ID NO: 508047 - DNA, 264 bp, Stenotrophomonas maltophilia
atgagccggctgctgctgatcatcctgctggcctgcaccgtcgcctcggcgatcggcgtggtgttcgtgcgccaccgccaccggcagaccttcatcgagctgtcgcgtgccgagcgcaagcgcgatgacatcaatcttgagttcggccgcctgcagctggaacaggccaccctggccgaagccaaccgcgtggaccgcattgcccgcgagaagctcggcatgaagttccccgaggcggctgacatcgtggtggtgcgcccatga

SEQ ID NO: 508048 - DNA, 969 bp, Stenotrophomonas maltophilia
atgcgcccagaagcgcaggccggtcaccttccggtgtcgcagtcgccggcggtgcacctgccggtcctgtacacccaggtccttgaaggcctgagggtgatcgaaaacggacgttatctggatggcacgttcggtcgtggcggtcatgcacgtggcgtgctcacccagctcggtcccgaggggcgcctgctggtcatggacaaggatccggaagccatcgccgttgccgagcgcgatttcgcgccggacccgcgcgtgtccatcttccgtggcagcttcgcccagctgctgcagtgggatgcgacggccgaaggcctggacggcgtgctgttcgacctgggtgtgtcgtcgccgcagctggacgtggccgaacgtggcttcagcttcggcaaggacggcccgctggacatgcgcatggacccggacagcggtgaaagcgccgcgcagtggatcaaccgcgtggaagagcgcgagatcgctgatgtgctgtggacctacggcgaagagcggcagagccggcgcatcgcccgcgccatcgtggcccgccgcgagaagcagccgttctcccgcaccgccgaactggccgagctgatcgcctcggtgatgccgcgtgggaaggacaagatccacccggccacgcgcagcttccaggccatccgcatccacatcaaccgcgagctggccgatctggaagccgggctcgatgcggcggtggaacggctcaagcccggtggccgcctggcggtgatcagcttccactcgctggaagaccgcatcgtcaagcagtacatgaaccgcctggccaaggcgccgccggccaaccgccggctgcccgaggcggttgcgttcgtgccgacgctggacctgatcggcggcgccatcaaggccaccgacgaagagctggccgccaacccgcgtgcccgcagcgccgtgctgcgcgtggcacagaagcgggaggccgatgcatga

SEQ ID NO: 508049 - DNA, 447 bp, Stenotrophomonas maltophilia
gtgttccagggcgagacggccatcacagttgacgacaaggggcgcatggcggttcccaccgcttaccgtaacctcgtcgcgcgcgccagcaacaaccgtctcgtgctgacctacaacccgttcgaagccggctgcctgtggctgtacgcagagtcggaatgggagcgggtccgcgacgatgtgatgtccaagcccaacacccagcgcgtcgtgcgcctgttgcagcagaagctggtcggctcggccgcccatctggaactggacggcaacggtcgcatcagcatccccgccagccaccgcggtgcggtgggcattgagaagaaggcggtattgctcggcatgggcgacaagttcgaattgtggagcgagcaggcgcatcgggccctgatccagcagacgttgtctgacgaggatctgggtgatgggttgctcgacctgaagttgtga

SEQ ID NO: 508050 - DNA, 789 bp, Stenotrophomonas maltophilia
atgtgcctgctcgctcttggctggatgcaccacccgcgctggcggctggtgatggccggcaaccgtgatgagttccacgcccgtccgacggcggcgctggccccctggcaggatgagacgtcggtcatcggcggtcgcgacctgcgttccggcggaggctgggccggggttggcgcctcgggccggatggcggtggtcaccaacgtccgcgacccgctggccgcccagaccggtccttcacgcggggcactggtggccgacttcctgcgcggccgcgacccggcggccgtgcatatcgaccgcctggcgaccgtggccggcgcctacgccccgttcaatctcctgctggccgatagcgacagcctggagtacctgggcaaccaccccgccgaacggcagaccctcggtccgggcgtacacggcatgtccaacggcgcgctggacgccccctggccgaagacccggcggctgatggcggcccttgaagcctggctgcaggaagacggggccagatccctttcgcagcgcgaaagggatctgaccccagacctgactccactctgggccgccctggccgacgaacaccgccccgccgacagtgacctgccggacaccggcatcggtctggagcgcgagcgctggctgagcccgcccttcatccgcggcgacgactacggcacccgcgccagcaccgtgctgctgatcgacgtcgacggccacggcgagatccacgagcgccgcttcggcccgcagggtgtccccagcggacagagccacgtcactttctga

SEQ ID NO: 508051 - DNA, 480 bp, Stenotrophomonas maltophilia
gtgttcgaccgcaccgcggaaggccgagtaatcaagtgcctgaccatcgttgacgacgccacccacgaggccgtggccatcgaggtggaacgggccatttccgggcagggcgttgccagggtgctggacagattggccgttcagcgcggtttgccacaagtgatcaggacggacaacggcagggagttttgcggcaaagcgatggtggcgtgggctcacgagaaaggaattgtcctgcgcctgatcgagccgggcaagccgaaccaaaacgcttacgttgagtccttcaacgggcggctacgcgacgaatgtctgaacgagcactggttcccgacgttgctccatgccagaaccagtatcgaaagctggcggcgcgactacaacgaggaaaggcctaaacgagcacttggcgggctgacgcccgcccagtacgccgcgcagttggctggcaagatggataacatcagcaccggactctaa

SEQ ID NO: 508052 - DNA, 849 bp, Stenotrophomonas maltophilia
gtggtgaccgcaccggcacgcaggttgctggtgcggagcatggtcgagaaagggctgagcgagcggcgcgcgttggtggttgcacgcatgagcgccagcgggctgcgttacgagcccaggccggaccacaacgttgaactgcgcgagcagatcgctgcactggcacacaggcatcgacgttacggcgtgggcatgatccatctgaaattgcgacagaaggggcacgtcgtgaattacaagcgcgtggagcgcctgtatcaggaagcgggtctgcaggtgcgtcgcaggaagcgcaagaaggtacctgtcggtgagcgtcagcctttgctgcgcccgtccgccgccaatcaggtgtggtcgatggatttcgtgttcgaccgcaccgcggaaggccgagcaatcaagtgcctgaccatcgtggacgacgccacccacgaggccgtggccatcgaggtggaacgggctatttccgggcagggcgttgccagggtgctggacagattggccgttcaacgcggtctgccgcaggtaatcaggacagacaacggcaaggagttctgcggaaaagcgatggtggcgtgggctcacgagaagggaattgccctgcgcctgatcgagccgggcaagccgaaccaaaacgcttacgttgagtccttcaacgggcggctacgcgacgaatgtctgaacgagcactggttcccgacgttgctccatgccagaaccagtatcgaaagctggcggcgtgactacaacgaggaaaggcctaaacgagcacttggcgggctgacgcccgcccagtacgccgcgcagttggatggcaagagggataagatcagcaccggactctaa

SEQ ID NO: 508053 - DNA, 264 bp, Stenotrophomonas maltophilia
gtgaaaaagcgcttttccgaagaacagatcatcggcttcctgcgcgatgccgaggcgggcatgccaatcaaggacctatgccgccagcatggcttcagtgaggcctcgtactacctgtggcgtagcaagttcggtgggatgagcgtgcccgacgccaagcggctcaaggacctggaagcggagaacacacgcctgaagaagctgctggccgagcaggtgttcgagaaccacgtcatcaaggatgcgttgcgaaaaaagtggtga

SEQ ID NO: 508054 - DNA, 1143 bp, Stenotrophomonas maltophilia
atgaaccaaccagcgaaagcgaaaaccgatttgagggacgagagccggcagtttgccctgctggtgaactccgtcaccgactacgccctatacatgctcgaccccagcggggtgatccagacctggaacccgggtgggcaacgaatcaagggctaccaggctgccgacgtggtcggcaccaacttttcccgcttctacctgcccgaggaggcccaagccggcctaccagagcgaaacctgcggaccgcggccttagaagggcgctacgtcgccgagggctggcgattgcggcaggacgggacccgctttcgtgccagcgtcgtgatcgatcccatctgggaagacggggaactggtggggtttgccaaaatcacccgcgacatcacccagcgccacgaagcgcaggagcagctgctccaagcccagcgcgatctcctgcaggcgcagaagatggaggccatcggcaagttcacgctcggcttggcccacgatttcaacaacctgttgaccatcgtggccaactgtttagacctcatcagcctgcgggtgaaaaacggaggcgtggccaagctcatcgataccgcgcagcgggccgccgagcgcggggcccttctgactcggcagttgctgaccttcggcaagggacaaaccttggtgccagaggcagtcgacttggccgccttgatggccgaatgcgaagcgatgctgcgccgctccgccggcgacgcgatcgcattgaccgtcgaagtttcccggggccttccgaccctgtcgctggacaaggcacagctggaggccgcaatccttaacctggtgtgcaacagccgcgacgccatgccgaagggcggaacgatcctcatcacggcgtctgcgcggcaaacccgtgatcctacgttgcccaacaccagtgaaagaccttacatctgcctgagcatccgagacgacggttcagggattgaggcagaccagcaggccagggtatttgaaccgtttttcaccaccaaacccattggaaggggcagcgggctgggcttgagccaagtgtttggcttcacggcccagtccggcgggttcaccgagctccagagcgagcttgggaagggaacccgcgttagcctttgcttccccgcaccagagcattga

SEQ ID NO: 508055 - DNA, 498 bp, Stenotrophomonas maltophilia
atgaaccgctatccgtcataccaaccgttgcatccgcccaccggcccggctgccatgatcttgcccagtgtgatcctgggtccgctcgggctgctcgccttgggcggtgggcaggaggccatgcagtccagcgtggtgctgggctcgctctactgcgccggggggctggcgatctttgcgtttctcgccttctgcctggccctccacattcgtgctcagcggctttgggactggcacgtccgcacggggcggatgccgtatttccggagatacggcttcctgaaaggggcgctgctcggaggcgggttgggcctggtgacggtggtggcggccgccgtcctggggttcaaatatgcggagcatccggtgtatgggcaggtggccacgatggcgttctatggtgcgtggctgtatggcgtgttcttgatcggggtgctggccgtggtgtttgggtggggcaagcgagcgtgggatagaacggtcctgccgtctgcctga

SEQ ID NO: 508056 - DNA, 261 bp, Stenotrophomonas maltophilia
atgctgaagggtgaagcgaagatcgatgtcccggtttacagcgatgacgagagagatattgagcagggcatggaccctatcatgcacggaatcctcatcactccctcagatctcaagcccgtgccaggcaagcctggtgtctatgttgccgagcataagaacccagacgtcacggtgacagtaacggtccaggcggatggcagcacgaccattgaaacggaccccgaatccgacattttcgaaaacacgttgcatgtctga

SEQ ID NO: 508057 - DNA, 246 bp, Stenotrophomonas maltophilia
atgttctccaccatctgcgcgatgacgtcgtactccatccacgccggcaccatgatcgccagcggctgctgcgggcgctgcagcaggtcgtcctgggtcagcggccggtatgcgtcgcggcgcttgatggtcaatgcccgccagctctcgcgcacccagtaccagacgtcgatgaacaggtcatcgaggctggagatcaggatcagcacggccaccgccgccgccgtggtttccagggcggcgtag

SEQ ID NO: 508058 - DNA, 567 bp, Stenotrophomonas maltophilia
atgacggaacaactagtcgttcaccggtacgaacaacccgatgacaaggggctgagctggcctcgcatcgtcggcatcgcgtttgtaattgccctgcatctggccgccttcatgatgctcctcattcccgccgtggctcccaaggccgtcgcggagaaggagcgcaacgtcatggtgaccatcgtcgacgcgccgccgcaggcgccggtcgtggacgtgccggagccgcgcccgaacgatatcgtcaccccgccgtcgcccccgtcgccgccggctccgccgacctcgatcgaggccagcgtggacatctcgtcgaaggccatgaatccgccgcgctacccgccggccgccttccgcgcgggtatccagggcgaagtgatcctgatcattgatgtcgatgccaacggcaacgtcaccaatgtcacggtggaaaagtccagccgtaaccgcgacctggaccgtgctgcgatggaagcagctcgcaagtggcgcttcaacgccgctgaatctggcggtaagaaggcggcaggtcgcgttcgcgtcccggtcaactttgcgctgaactga

SEQ ID NO: 508059 - DNA, 807 bp, Stenotrophomonas maltophilia
atgaacgctactttcaaccaaattctcatcgtggattccctcccggaaggccaactcaacaccgcagcccgcctgttcgcggatgcccaagactgggcgcaggtgatcggcggcgttcctcacatcgccagcgttcgtgttccttccagcggggcttttctcgatctgctggcccagcttgctcagcaagcatccagggagccctacgtgccgttgcttcacatcgagtgccacggtggagagggtgggctggagttcgctgacgggtcttggttgacgtggaacgacatgaagccggcgttcgtaaacctcaacgtggccacgcgcttgaacctcatcacggtggtggccgcatgccatgggggcgccatcgccagttttgttcgtgctgagcatcgggcgcctttctgggcattcctggctcccaaacggcagatatcggcaggagatctggaaacagcgctgtcttcgttctatcaagccctgctgatgacccggtcctcggagcgggccatgagtgcccttcgggcaacgcaagctggcgacgagttctggcagttgagcgcgcagaccatctaccgcttgattgtcgaaggctacgcggaatgccacctcacgcaagaggctgttcagcagcaggcggaacgtctgcgagcccgcgctgccgcgcatggcgcggtttggtcacaagctcagattgaggccatgatccgcgacccgggaatctttgaaagatttcgccgagagttcttcatggtagacctgtatcccgaccacgcggagcgcttccccgcagtggcggattag

SEQ ID NO: 508060 - DNA, 150 bp, Stenotrophomonas maltophilia; identical to SEQ ID NO: 505935

SEQ ID NO: 508061 - DNA, 282 bp, Stenotrophomonas maltophilia; identical to SEQ ID NO: 502614

SEQ ID NO: 508062 - DNA, 291 bp, Stenotrophomonas maltophilia
atgctggcccacggcttcccgatgatcgtgctgtggggcgagcagctggtgcagctctacaacgatggctatgccgagatcctcgccgacaagcatccgggcgggcttggccagcccacgcgcgagtgctggcccgaggtctggcacatcaacggcccgatctaccagcgggtgtggcagggcgagaccatcacctatgaggacaagctctatccgctggcgcggcggggacggctggaggatgtctggttcaccatcacctacagccccatccgcggtgaggaagggtga

SEQ ID NO: 508063 - DNA, 480 bp, Stenotrophomonas maltophilia
gtgttcgaccgcaccgcggaaggccgagtaatcaagtgcctgaccatcgtggacgacgccacccacgaggccgtggccatcgaggtggaacgggctatttccgggcagggcgttgccaaggtgctggacagattggccgttcaacccggtctgccgcaggtgatcaggacagacaacggcaaggagttctgcggaaaagcgatggtggcgtgggctcacgagaagagaattgccctgcgcctgatcgagccgggcaagccgaaccaaaacgcttacgttgagtccttcaacgggcggctacgcgatgaatgtctgaacgagcactggttcccgacgttgctccatgccagaaccagtatcgaaagctggcggcgcgactacaacgaggaaaggcctaaacgagcacttggcgggctgacgcccacccaatacgccgcgcagttggctggcaagagggataagatcagcaccggactctaa

SEQ ID NO: 508064 - DNA, 183 bp, Stenotrophomonas maltophilia
atgaagtttccgggtatcgacgaaaagacattcgccatctgtgtgtgctgcctggccgtggtcgcggcatcttcagaccgctggatttggccacttctgtgcgttggtgcggtggtggttgccatcgccagattcgcggatgcaaggcgcaagcggattcagagagaacacacatcgaattga

SEQ ID NO: 508065 - DNA, 282 bp, Stenotrophomonas maltophilia; identical to SEQ ID NO: 502614

SEQ ID NO: 508066 - DNA, 282 bp, Stenotrophomonas maltophilia; identical to SEQ ID NO: 502614

SEQ ID NO: 508067 - DNA, 282 bp, Stenotrophomonas maltophilia; identical to SEQ ID NO: 502614

SEQ ID NO: 508068 - DNA, 282 bp, Stenotrophomonas maltophilia; identical to SEQ ID NO: 502614

SEQ ID NO: 508069 - DNA, 387 bp, Stenotrophomonas maltophilia; identical to SEQ ID NO: 501407

SEQ ID NO: 508070 - DNA, 2619 bp, Stenotrophomonas maltophilia
atggcgaacaagaatggggccgctgcgcccccgacgctggagagttggctggacttgcgaccaagttggttgcgaatggccgcagacggattggtccgagaccggcgcctcccgaatgatcaggaaatcgacgccctggcagaccattgtctgcaagaggcagccaaaatcctggcaacaaagcatcccccactcgcgcccggcctcattttgggaagccccaccgctggatcattgcgcattgattccgtattcgagatccgcggcgtgaacgcgatcggaccggatgcggtgctggatctgtcaaaaaaggggatgacggttgtttatggtgccaatggctctggcaaatccggttacgctcgcctgctgaaacacatctgcggcgcacgcgccaagggggtcatccatggcaatgtgttcgacggcgcaacgcaacccgcttgtgctcaggtcgccgtgaccacattcagtgaagtcgatggatccgctactcccagcacccttgcctggaacgcagcgtcaggaccacactccaagctaaacgcagtgccagtgtttgactcagcaaccgctatggagcttggcgacaaccccagcgaagccacctacctgccccgttcgatgcgtttcgtcagcgccctgatctccatcgctgaccgtgttggaaaacgcctagaagcccgagcggcccagctccagactcaccttccaacaacacccgtagagcacgcccagtccgcggccagccgcttcctccagtcgctaaagccttcgctggaccatgaggcaatcgacaaagcctgcgcctttcctgatccattgctcaaagagcgattggcgttggagacggcgctttcccaggccaaccctgccgtcgctcacgcaaaagccattgcggatctggatcgcctttccaagtttgccgagaacatgggagagcttgcatcagcattgagcgacgagaaagcgcttggcctgattgcggcacgaaaagtcgctgcggacaagcggcaggccgccactgcatacgccactgccttcatcgacggcatgccattgaaaggcgtcggcgatgcggtctgggagacgctctgggaggcagccaaagcttattcaacgggccacgcctatccagaacacccctatccacacgtaggagatggagcccgttgtgtgctctgccaacagcctctggacggagatgggaaggatcggctcaagagctttgatcagtatctcagtgcaactctccagaccgaagccaaggcggctgaggctgctcttaatgccctggcgctgcccgcgtcaatcgacgcagaaagccccgcgtggcaagcacaatgcggggccgtcggcctcgacagcgagcaagccgcaacactggcggagaacatcaacgccaggctcaaatcgatgggcagtgccatcgacttttcggcagttcctgaaatggattgggccccctggaccggcgcgctcgcctcttccactacaagcaccacggctcaacgcgatgcactggccgcgctcctggaccccgctggccgcgcccaaaaggaagctcggttgcgcgacctcaaagcgcaggaatggctgtctggtcagcttgagccggtaaaagcagaggtggagcgactcaagaagctggccgtcgtggcgaaagcccttcctatgacgaaaacgacccagctgacgaccaaaagcaatgagattgggaagctggaactggcccaagggtattgcgatcgattcaatgcggagcttgacggcttgggcggcggcagcctcccggtgcgcatgaaccacaagtcctcggggaaaggcgtctacagttttttcattgagttgaaggacgcagcgctgtcggtcaagaacagggacgttctcagcgaaggagagcagcgcatcgtggcattggccgcgttcctcgccgatgccacgggagccgaccgtggcctcccggtcatcttcgacgacccgatttcatccttggaccaactctatgaggaagctgttgctaggcgtttggttagcttggcagagcaacggcaggtgatcgtgttcacccaccggctgtccctgatggtcctgctgaggaacgcggcaaagcagcgcgctgacctggcactccccccggtagaggtcaccacagtagccatcggccgcgacggcgcgagcaccggcatgccgacaacgattgacgccttctcactcaagcccaagacagggtttgaacatatcaagaacagcatcgtcggaatcaagaagcaagaccccgacgtccgagcaatccttctcaaagcgtcttgcagcaacttccgcatcctggtggagcgatccgttgaggatgacctttgctcaggcgtcatcaatcgcttcaggcgcgaagtcagaacgctaaacgtgcttcagcgcttgcatgccatcacggcggatgattgcgcgttgatcaacaagatgatgaccaaatactcggcattcgagcactcccagtccatggagacgccgacgtggcttccagcgccggacgagcttctggcggacgtgcagacgatgctggactggatcaaggactttaacggacgagcggaaacggcggcgaaacccaaggagtag

SEQ ID NO: 508071 - DNA, 222 bp, Stenotrophomonas maltophilia
atgaagcccccagcaacgcgtcgccgccgctacttcgcctatcaacgccgctcgggtggtcagtgctacttcgacaagaacatgcacgcccacctccagcggtatccgcacaccatcggccattaccagctcacacggttcttgggcacttccgcgttgctgaccgctgaagaagcggccgcccaaggatggatggccaagccgcacgggagccctgcatga

SEQ ID NO: 508072 - DNA, 1782 bp, Stenotrophomonas maltophilia
atgtattacagcagtggcaattacgaagccttcgcccgcccgcgcaagccagacggggtcgacggcaaatccgcatggttcgtcggctccggcctggcctcgctggccggcgccgccttcctgatccgcgatggccagatgccgggcgagcgcatcaccatcctggaacgcatcgacgtgccgggcggcgcactggatggacttgagaagccggacaagggcttcgtgatccgcggcggccgcgagatggagaaccatttcgaatgcctgtgggatctgttccgcagcattccgtcgctggaagtcgagggggccagcgtgctcgacgagttctactggctgaacaaggacgaccccaatttctccctgcagcgcgccaccatcgaacagggcaagcctgcgcccgacatgggcaagttcacgctcagcaaggccgcgcagaaggacatgctcaaggtcttcatggccacgcgcgaggagatggagaacaagcgcatcaacgaggtgttcggtgaggacttcctcgccagcaacttctggatgtactggcgcaccatgttcgcgttcgaagagtggcattcggcgctggaaatgaagctctatctgcaccgcttcatccaccacatcggcggtctggcggatctttccgcgttgaagttcacccgcttcaaccagtacgaatcgctggtgctgccattggtgaagtggttgaaggaccagggcgtggtgttccagtactgcaccgaggtgacagatgtcgatttcgacatcgatgccaccaacggacgcaagcaggccacgcgcatccactggaaccgcgacggccagcccggtggcatggcactcggccccgatgacctgttgttcatgaccatcggctcgctggtggaaaacagcaacgagggcgaccacaagaccgcggcgctgctggacgaaggcccggcaccggcttgggatctgtggcggcgcatcgcggccaaggatccgtcgttcgggcggcccgacgtgttcggcacgcacattccggagaccaaatgggaatccgccaccatcaccacgctggacgcgcgcatcccgaagtacatcgagaagatcgccaagcgcgacccgttcagcggcaaggtggtgaccggcgggattgtcaccgccaaggattccagctggctgctgagctggacggtgaaccgccagccgcacttcaagaagcagcccaaggaccaggtcgtgatctggttctatggcctgttcgcggacgtgccgggggattacgtcaagaagccgatgcaggactgcaccggcgaggaaatcacccaggaatggctgtatcacatgggtgtgccggttgaggacatcgcggagcttgcagccacgggagccaacaccgtgccggtgatgatgccgtacatcaccgccttcttcatgccgcgtcaagccggtgatcgccctgacgtggtgccagcgggcgctgtgaacttcgcattcatcggccagttcgcggagtcgaagcaacgcgactgtatcttcaccaccgagtactcggtgcgcacgccgatggaagcggtctacacgctgttgggcattgaacgcggcgtgccggaagtgttcaattccacctacgacatccgcaccctgctggatgcactgcaccagctgcgcgatggcgaagaattggcgttgccgggcccgtcgttcctgcgcgaccgcgtgttggccaggctcgaccgcaccgagatcggtgcattgctccacgacgccggcctgctggccggggaggacgcatga

SEQ ID NO: 508073 - DNA, 888 bp, Stenotrophomonas maltophilia
atgaacatgacacaggacaccacaaagaccgtcgcctcgccctccggcctgcagcgggtgaccgtgctgggcactggcgtgctcggcgcgcagatcgccttccagtgcgcctttcacggcaagagcgtcacggcgtacgacattgacgcagcagcgctggagcgtgcccgcgacgccctgacgcgattggctcagacatatgccgccgacctgccggggacgacgcccgaggcgaccaccagggtcgcggcggccatcgcactgagcagcgaccttgcgcaggccgtgcgcgacgcggacctggtaattgaagcggtgccggagaagctggaactcaagcgctcagtctatgccgaactcgccaggctggcgcgcgaaggcaccatcttcgccaccaactcctccacgctgctgcccagtgcattcgcggatgcgacgggccggccggagaagttcctggcgttgcatttcgccaatcacatctggcgccagaacacagcggaagtgatgggtacgccgcagaccgatcctgaggtgttcgagcaggtggcgcgcttcgctgcggaaatcggcatggaaccgatccgactgcacaaggagcagccgggttacgtgctgaattcgctgctggtgccgttgctcaacgcggccgccgccttgttgttgaaaggtgtggcgagtccggaggacatcgacaagacctggcgaatcgggaccggcgccaagctggggccgttccagatctacgacattgtcggcctgcgcacggcgtacaacatcgcaagcgcaaatcccgcaacgcagggctgggccgaatatctcaaggtgaactacatcgacaagggtcgcctgggcgccggtgcggggggtggcttctacgatgattga

SEQ ID NO: 508074 - DNA, 513 bp, Stenotrophomonas maltophilia
gtgagccaagcccaacgccacgcacgtccgctcaaccgcagtgaatcgcaggcccgcacgcgcgcggcgctgctggatgccgccgaggcgctgatcgtggagcactcgatcccggcgctgtcgctgcgcgccgtctgcacgcgtgccggctatacgcagggggccttctactccaacttcgccgatcgcgaggagctgctgctggaggtgatggagcgcaacctcgaacagaaggccgccagcctggagcagatgctggcgacctgcggcgacgcaggtctcgacggcaccctggcgtgcatcctggattggctggacaccatccaccatcggggcgaatgggcgcgcatcgccatggagctggggtataggaagttcaaccgcccttcttggcgagtctggcgggtaggaagcggccgcgcaagcgccgctttgggcacagatcgggcacagatcgggggttcatgcgtgggttttcgacatcgcggggccacgcagcggctcagtgcgtag

SEQ ID NO: 508075 - DNA, 1413 bp, Stenotrophomonas maltophilia
gtgcaggcgcactacccggacttcatcgcgcgtcttgaggccgaagaccgcccgctgcccgagtatgtgcgcgaggagttcgagacctacctgcgctgcggcgtgctcgagcacggcttcctgcgcgtggtctgcgagcactgtcgtgccgagaggctggtggcgtattcctgcaagaagcgcgggctgtgcccgagctgcggcgcacggcgcatggccgagtcggcgcggcatctggtggacgaggtgttcggcccgcggccggtgcggcaatgggtgctgagtttcccgtacccgttgcgcttcctgttcgccagcaagcctgaggcgatcggcccggtgctgggcatcgtgcatcgtgtgatcgccggttggcttgccgatcaggccggcgtgccgcgggatacggcgcaatgcggcgtggtgaccctgatccagcgcttcggcagcgcgctgaatctcaacatccacttccacatgctgtggctcgacggcgtgtacgaggacaccaccgagcgtccgcagcgcaagccgcgcctgcaccgcacccgtgcgcccacatcggcgcaactgacggaactggccaacaccatcgcgcatcgcgtgtgccggcacctgacgcgcaaaggctggctggaaggcgaggacgaatccgtgtttctgtccgacagcgcggcgggcgacgacggcatggacgcgctgcggatgagttcgatcacctaccgcatcgccaccggtcgcgacgctggccgcaaggtcgtcaccctgaaaacgctacccggtgatgcgggttctctggacggcgacgccggcaaggtcggcggcttctcgctgcatgccggcgtggccgcggaagcacacgagagccacaagctcgaaaagctgtgccgctacatcacgcgcccggcgatcagcgagcagcggctatcgatctcgccacagggcagggtgcgttaccagctcaagacgccgtggcgcaatggcaccacgcatgtcgaatgggatgcggtggacttcatcgccaagctggcggcactggtcccgccgccacgcgcgcatctcacccgcttccacggcgtattcgccccgaacgcgaatctgcgcgcgcaggtgacgccatcggggcgcggcaagcggcctgcgagcgatgcagtgccggtggacgtcagcgcccacgacgagccgcgcagccccgagcagaagcgccgtgcgatgagctgggcgcaacggctcaagcgggtcttttccatcgacgtcaccacctgcgcccactgcggcggcgcggtgcggatcgtcgccagcatcgaagacccaaaggccattcgcgccatcctcgcccacttcgagaaacaccgcgcgctggagcaagcgcactaccggcccgcagcgcgcgccccgccgcccgccgcgtga

SEQ ID NO: 508076 - DNA, 237 bp, Stenotrophomonas maltophilia
gtgaccttccccgtgctgacgcagaacgcccgggccttcaccgtgaccggtgccagcatcgcgcccggcaccttggcatctacgccgaacgaacaagccatggtcggctacgacggagcgctctacctggaacgccccgagccggggatggccgtcgaggtgtcgggcgtgtgcaaagccgtgttgccgtcgcccctaccgggggtggacgaggtggcctccgtagactgccgttga

SEQ ID NO: 508077 - DNA, 282 bp, Stenotrophomonas maltophilia; identical to SEQ ID NO: 502614

SEQ ID NO: 508078 - DNA, 1716 bp, Stenotrophomonas maltophilia
atgcaggaactcgaacagcgcctccagcaacgcttcccggactggttccatggccgtcgtggccaactggcgcggccgttgctgcgcagcgtcggtcgctggtcgcggctggaccagatcgaagccttcctgcagcgcagtgcgggattgcgcggcttcggcttcgtcgccgccggcctggaattcatcggtggccagtaccaggtggatccggccgcgctggccaggattccggccaccggccgcctgctgatcgtcgccaatcatccttccggagccctggatgcgctggcgctgctggacgcggtcggccgtatacgccgcgacgtgcggatcgtggccaatgacctgctgggggcgatcgcaccgctgcaggatctgctgctgccggtgcgcatcctcggcggcaaggcgcagcgcggcagcctgcacgcggtggagcaggcgttggccgccgagcagtgcgtgatcgtgttcccggccggcgaggtctcgcgcctgtcgctgcgcggcatccgcgatggccgctggcagcgcgggttcgtccgctttgtccgcgccgccggggcaccggtgctgccggtacgggtggaggcgcgcaactcggcgctgttctacggcgcctcgaccctgttcaagccggccggtaccgcgctgctggcacgtgaaatgttcacccgtcgtggccgcccgctgcggctgagcatcggcgagccgatgcagctgggcaagggcggtgacccgggcgcgcagctgctggccgtgcgccgtgcgctgtacgcgctgggccgcaacggcgcggccgaccctgccgctgcgttcaccggtcccgagccgttggcggcgccggtgccgccttcgcgggtcgccgccggcattgccgcagcgacccagctgggccagaccgccgatggcaagcagatcctgctggccacctgcaccgccgattccccgctgctgctggagctgggccgcctgcgcgagctgaccttccgccaggtcggcgagggcaccgggcgcagccgcgacctggacgactacgacccacggtacgagcacatcgtgatctgggacgcggccgcgcagcgcatcgccggtgcctaccgcatcatgcgcggtgcgcaggccctggcccggcacggcctgtccgggctctacagcgcgtccctgttccgctattccgacgatgcgatcacccacatcgccgagggcctggaactgggccgcagcttcgtggtgcccgactactggggcagccgcagcctggattacctgtggcagggcatcggcgcctacctgcagtgccggcccggcatccgctacctgttcggcgccgtgtcgatcagcgcggcgctgccgcgcgaggcacgcgagcagctggtggcgtactaccagcgctactacagcggtagcgccggcctggccgaatcgaaccgtccgttccagtacttcgccgcgccgccgagtttcggcgagctggatgcaggcgcagccttcgatgtgctcaaggccaacctggccgcgctcggcaccggcgtgccgacgctgtaccggcagtacaccgatctgtgcgaacccggcggcgcacgtttccttgcgttcggcgtcgacccggacttcagcgattcgatcgacggcctgatcgaagtggacctgtgcgcgatccggccaaacaagcgcaaacgctatctgcgcgacgcggggacgccggcatga

SEQ ID NO: 508079 - DNA, 885 bp, Stenotrophomonas maltophilia
gtgtttggatgcggatcgtccgcgtcaccctcggcttccagcagaacggcagtcaggggccgtcgcgcccctttcatgctggcggacatagcccaagccgtgatgcaatacattgatgcggcactaatacgatttcgaacgggccaaggaatgaagaccaatagcgcatctcgtatacacggcatcatgtctagctggaaaagcgtcaagccggatcttccggccctaagcggatggcagcaagttctaagcattgaaagcaagaacgggactcgcgagttcattcgtgcgtcagagcggattcacatcttggtagatgaagtggacctactgcgggataagctgcacatgcgcggcatttcagccagcgtctacggtcccgctcttatgaaacttgagaacgcgttatcgccccaacttcttgtcaggcagggcgtacatgttcaacaatacctaaccgatgacgtcttcacagctctcgcgttctgcagcgaaatcctacccgtcgaagaagacggcattagtactgaagatttcgcagatgttgtcagcgttatacatgatctggagctcctcctagccgagaactcaatgccctcggagttgaccgctctgctgcgaaggcatatacgcttggccgaaatggcccttgcaagctacccattgaggggtgcctcagcgatcagggacgcagtgaaggccgcgaccggcgatatttttctcagcgagtccgaagtgtccagcctcccggtcgaacagcgaaagacgctaagcggactctggcgcaggatgaattccctggcggacaaagccatcaaagtggacaacctcgttcagctcactgggcgtgttgcgacctttcttgagaaccttgcgaatgattga

SEQ ID NO: 508080 - DNA, 453 bp, Stenotrophomonas maltophilia
atgcgcaagcacaacaatatcgatcgttccacccgcctcttcgctgcgcagcgtgagggcagggaagcgctgcacgccgcgcagagcgcaatttctgaagcgatcatgggcggtgagcagctggtcgcggataaggcttgcgaaatccatcgcgcctccacctacagcgagatgactgcattcgaggccactactgagtttgcgaacatgctgcagcgctacatcggggctactgaccgtcgcttcgacctgcgcgtctgcgacgcctcgatgttccgtgcgatttggaaggctcgccagatggttgacatgaccggtatcaactaccgcgactacgttcagcgtgctgtgacctacctgcgccactgcggcaagaaacgcatcactcctgcaatgcttgtctctgctgaagtgcagctgcacgtgatggagctcgacgccgtcagtcgctga

SEQ ID NO: 508081 - DNA, 282 bp, Stenotrophomonas maltophilia; identical to SEQ ID NO: 502614

SEQ ID NO: 508082 - DNA, 282 bp, Stenotrophomonas maltophilia; identical to SEQ ID NO: 502614

SEQ ID NO: 508083 - DNA, 282 bp, Stenotrophomonas maltophilia; identical to SEQ ID NO: 364321

SEQ ID NO: 508084 - DNA, 768 bp, Stenotrophomonas maltophilia
atgggtgatgggtcgggaggcgccggcactgccctcgattacaggccccagctcctgcagcgtggccccggttatgccgtgctgctcgcgcgtgcgtgccgtggccagcgcaatggcctgctcccacgccggggtcagcgcaacgcctgcagcgtagtagctgtgacgcagctcgttctggttcacttccgccgccgacggcagcggccgcgattccaatgcggcaatggtctggttgaactgatcgagcgacggctgctggatggtgcgggtcagctccagctccagcgccatgttcccctgcgcgatctggccagcgtggtgccattgcccttcttcatcgcgctggtagagctggttgtccgagccctggatggcgtcgggcctggcacgcgcctgctccactgcttccggcaccagcggcacgaagtcgctggcgcgggtagcggcgtaggtctccaggtagctggcggcaatggcggccttgccattggcgatgttgttctcgatgcgctgcaccgcctcacgattcaactcgttggcgcgttcggggctggcggtctgcgtctcgtacacaccccgatcgctgccgccggacacgccaatcttgacctgtcgcgtccactgttcggtctgcgcatcgcggtgccagttgggattgtccagacggccctcgccgtccttcgccgggatgctgaaaggatcctgcggcggcggcgccttgcccagcgccagctctaccgcttttacatgggcatatgcgcctag

SEQ ID NO: 508085 - DNA, 468 bp, Stenotrophomonas maltophilia
atgacacgaaccttgtccgctccgagctatgcactcctgcaggccagcgtggagtgttggaagtgcggcgaggcaacgccggtcacgtcggtgtgggtgccgtccttcgtggactacgcagacgtagatgagccgggggacgagccggaagcaggcgatgcggccactttgcatggtatccaggacttggacgatcaagtcgctgcgcacgtgcgcgaggcggcaccttggctcaagccagggcgctcggaaaccgccgatgccacctactgggtcaaccattgccaagcctgttgcgcattacaaggcgacttcttcgtgatgggcgtcaacggcccgttcttccctcagttccgcgccgaagccgaccgccttgagctcatccctgggcgtggacccttgagcgccaatgcgacggctgcacaatccgaatggatggattggatcgccgagcgcctgcctgtctga

SEQ ID NO: 508086 - DNA, 504 bp, Stenotrophomonas maltophilia
ttggccttgaccacccttcagtcgatcaacgcggagatcaagcaactcgaagcccaaaagcgtttggtggagaaacgcgacggtgaagtgcccaaggccatcgcggtgcttcagaagtatgcgaaggttctcagtcccgtccagcgtcgccaggttgccaagctcattggcgaggccatcgaggtcaagccggcgcgttccccgaaactttctgcggggccgttgaagggccgaaagctcggcaaagtcgcccccaagtatcgactcccgacgggagagacctgggcaggccgagggctggcacccaaggcgttcacggcatgggccaagtcggccgaaggaaaagcgtgggcgcaggccaaccctggggccaagttcccgcctgcctcaggcaaagtgaagaaggctgcggccaagggggctgcgaaggtgggcaaggtcgccaagaaggcaaagccgattcggaagcctgccaagaaggccaaggcgaagccggcagagtaa

SEQ ID NO: 508087 - DNA, 1155 bp, Stenotrophomonas maltophilia
atggcaaggatggggcggcccggcatgtctcgagcccagaagcgagatctatggcgacgatggaagggcggccagtcgctcagcgacattgcccgcttctttgacaagaatccgggttcgattttcggggttctggccgcgcaaggcgggatcgcgccgagggaacgtcgccgatccgcccggtcgctgagcttaatggaccgcgaagagatatctcgatgcctagcttctggccagtcgtttcgccagattgcgctcagcctagggcggcctacctcgacgattagccgggaagtggcacggcatggtggccgtgaccgatatcgggccgcacatgccgatgaggccgcttgggaggcagcccggaggccacagtcttgccggttggccgataaccctcgtctgcgctggttggtggcttgcaagctgggccagcagtggtcgccggaacagatcgccggctggcttaagctgaggttcccgctcaaccaggcactgcaggtgtcgcacgaaacgatctaccggagcttgttcatccaggcgcgcggcctgctcaagaaggaactcctggcgcacctgcgcacgcgtcgccgtatgcgccactcaaagctggccaccgcgatgcctcgcggcgggatcatcgacgcggtatcgattcgggagcgtccggcggaagtcgaagatcgcgccgtgccagggcattgggagggtgatctgatcacgggcagcaacaattcccacatcgcgacgcttgtggaacggcactcgcgcttcgtgatgctggtgaaagtgaagggtaaggacaccagcagcgtcgtctcggcgctgagccggcaagtgaaaacactgccaaccgcgctgcgaaaatcgctgacgtgggatcgaggcggtgagatggccagccacaagaacttcaccgtggcgaccgacacgcaggtctacttctgcgatccgcaaagcccttggcagcgcggttcgaacgaaaacaccaatggccttctgcggcagtacttccccgacggcacggatctatcccgccattcgcaggcattcttgaacaagatcgccagacgtctcaacgaaagacctcgtaagaccttgggcttccagacgccagccgctaagctgagccaagccgttgcgtcgacgggttga

SEQ ID NO: 508088 - DNA, 657 bp, Stenotrophomonas maltophilia
atgttgaagcgtttgttggtggttccattgtttatgctgtgcgccgctcctgcgtgggcgggaaatgtgtcgttgtttcccacgagcatcgtggcgccggctggggaaaaatcgggcgcgttgaccttggaaaaccatgggaaaacccccgagcgtttccaagtaacggtgctggactggtcccaagacgccagcgggcaggacgtgaccagccccgccaccgcggtgctcgcggcaccgtccattgtcgaaatcccgcctggggcccgccgggccgtgcggttggtgcgcacccaaggcatcggcacgccgggctactaccgcgtgctgctgcgccagttgccccagccgtccacggcgggccaggtggagttgttgatccaccagaacctgccggtggggtttgaagacgccaaggccggtcctccggtgctcgctgcccgctttactgccaaaggtgttctgctgaccaacaccgggcccaccgccgcacgcgtgaccgccgtcggtcctcaaggcatgccggcgtggcgcgaaggggcgctggggtgggtgctcccgggtcagagcaagctggttgagctcaagcccgacttgaaagccgcctcggtcaccgtcacggtcaacgggacccccgtcgccgtccccgcaaactaa

SEQ ID NO: 508089 - DNA, 294 bp, Stenotrophomonas maltophilia; identical to SEQ ID NO: 502612

SEQ ID NO: 508090 - DNA, 339 bp, Stenotrophomonas maltophilia
gtgcgccccagctccgggtttgtcttcagcctggacgaaggcaaaacctcgatcgcatcggacacgctcacccaggcctggggacgcgcccgcgaaaaggcgggagtgaccgacgccaccctgcacgacctgcgccacacccgtattaccgagctggccaacttgctgcctatgcatcaggttatgcagctctctgggcacaagaccacccagatgctgacccgctactacaaccccgatatgcaagacctgggcgagctttttgaggtcacgaaagcagcggctgcaaaagcccagcgggactacctaaaaaagacagggaagaaaaacggcagttga

SEQ ID NO: 508091 - DNA, 294 bp, Stenotrophomonas maltophilia; identical to SEQ ID NO: 502612

SEQ ID NO: 508092 - DNA, 543 bp, Stenotrophomonas maltophilia
gtgggcctggtgaccaatgtgctcaaccgggacttcacgccagaggccccgaacaaggtctgggtcacggacatcacctacatccgcacttacgaaggttggctgttcctggcggcagtgatggacctgtattcgcgccagatcgtgggctgggcgacggcgccgacgatgaccagcgatctggtgctgcaggcgctggtggcggcggcttggcggcgcaagccgggcccaggcgtgctggtgcattcggatcagggctgtcagttcaccagcagcgattggcagtcgttcctgaaagcgcaccggatggtgccgagcatgagtcgtcgcgggaactgccacgacaatgccgttgcagagagtttcttcagcgtcttgaagaaggagcggatcaagcgacggatctacccgacacgcgccatggcagcatcggacgtgttcgactacatcgagatgttctacaacccgatccgccggcatggttccgctggcggcgtgtcaccggtagagtttgaaaggcgctacgcgcagagcggcaactga

SEQ ID NO: 508093 - DNA, 183 bp, Stenotrophomonas maltophilia
gtggcctacgggctgttcaaagaccctggtgccagccaagcgtggggcagtggggccgatgcgtgggagggcgtgggaaccggtgagcagcagatgatcggcatcggttatgccttctatgatttgaacaaggtgcccggcgggaccttctccgataccatcgccgtgaccctgacttattga

SEQ ID NO: 508094 - DNA, 192 bp, Stenotrophomonas maltophilia
atggttgatctcgacaccgcccgccggtttctcgccgctgagttcgagagcgccggcctgcctcacgtcgccggcggcatcctggcgggcaccagcccctttggccagggcacgtacatcgccgctgttgcggccgcgctggcaacgccctgcgcggcctgtggctgcgcgaaggaggccacccatgggtaa

SEQ ID NO: 508095 - DNA, 573 bp, Stenotrophomonas maltophilia
atgtccaacgaaccccgctttgcccacgccttcgatcccgccacccgcgcctatatggggcccgtgcgcctgcagccctcgcccgatggcatctggcacctacccgatagcaccgtggacgtggccccggcgcaggccacgggcccgtgccaggcgttgcgcctggctgatgacgggagccgctgggagctggtggccgacttccgcaaccgcatgctgtgggatacgggcactgcaatgcccgttcccaaccgcctgtccctcggcgaacctctcccgaagggtgtcacgctggcagagccgatccgtctcgacggcaccacgccgcactgcaacgcatgggacgccgttcgaggcgagtggacgctgcagcccgattacagcggccgcgcgatctggaacaaggccgatgggggtttcgcgccgcccctgcagcgcggccagccgctgcccgacactctgaccgatcacgctccacccatggagcgcagcggcccgatcacctatgacgacagcgagggcgcgtgggtagcggcggcaaccagcaacgagctggcagcacggccagggtga

SEQ ID NO: 508096 - DNA, 3219 bp, Stenotrophomonas maltophilia
atgcgcatgaagatcaccaacgccggccgcgccaagctggtcaacggcaccaacaccggcaccaacacggtgctgatttcccacatcggcctcactgctactgcgttcacgccgaccgctgccatgacgcagctgccgggcgagtttaagaggatgaccagcttcggcggcgatgcggttgcggccgatacgattcacgtcaccctgcaggacagcggaaccgacaagtaccagctgcgcggcttcggcctgtatctggccgacggcacactgtttgccgtctatggccaggccgaggccatcatggagaaggcgaacatttccacgctgctgctttcggccgacgtggtgttcgccgatatcgacacggcgcagatcaagttcggcagcacgcagttcctgaacccgccggctacggaatcggtcgcgggcgtagtcgagttggcagacggccccgagaccatcgcgggcgcggacgcggtgcgcgcagtgaccgctcgcggactgaaagccgccctggacgaccgcttcggcgccaacgcaccgacgccgttcgtcaagacggtactggcgctggccacggccgcggctatccgcgccagcctcgaactgaaaggcgccgcgctcaaggatatgggccacggcaagggactggacgccgacacgctcgacggcatgcacgctgccgacttcccgcaggtggggaaggtccagaccttcgatgcaatccctggcaactcgaaccagatccgatggatcaagctgggcacgctgccgtggcgcggcgccgccgcgagcatcctgatgctcgaaatcaccaacggcgccatcggcagtccgcgctatgtgtgggagcagatcgccgcctcgacgcgcacctacagcgagacgaccacggtactgacgcaggccctggtcgatgccatggttcaccagacgcgcaccggccttggcgatgcgctcgaccgcccatcccgattcggcctcaccctgaccacggatagcgccggcaaatccaccggcgtcgaactgtggatgcagcagcgcgagtacaaccaaggccatgccgtgcgcgtcgtgaacgcgacgggtgcaacgttcaacggcgttggcgcgtatgtaaccactgaaccggacggcatcatctatgcgaccgcgcagccgctggcctacgtcagcgatctgcgcaaagtgatcgacgcgaccgaaaaccgctggggacgccgccagacgttcgccctgggcgcttcgctggctgacgatcaaaccctcgacttggggaccgctggcggcgcgctccgcggtagtgccgttggcagcgtggtgctgtctgccgctgccggtagcgagggcggcttcgtctacctgcgccccaatggcaacaccagcacggccggccagctggtggtctacaagaacggcgtggcggagatggcgggcgcgcgcatcggagccgcctcgggtgacggcagcgtgctgcttgagctgtattcccagcgcccttggcagttcaagcagggcggggtcgatggcaccacgggtctcgaactccacgacgccaccggtggtaaggaattccgcctgaccaacacggcgaatcccaacaaaatcatcttcaacccgacaggcagctggatcaacgccgctgacttccggggcaagctgacgggcaacgcggacaccgctaccaaactggcagcgccgcgcgccatcaatgggaccaacttcgacgggtcgaacgggatcaccacggcaacgtggggtactgcgcgcaccatccagatcggtgatgcgtccaagtcagtgaatggcgggtcgaacgtagcgttcacactggccgagattggcgccggctccgcagccgacgtagccgcgcgcgtcgcctatctcaccccgaccaacaatgacgacagctggctggatacgtggaacgtcctgcgtatcaaccggcagagcagcgcctcgcctaccactatgccggcgcagtacaccattgcctggtccctgcccagctatgacaacgcccgtggcctcgcccttgccgccgactacggtggtggcaaccggttctggttgcgatcccgccgcgacaccgcgcctgccgaccagcgctggaaggcgtgggcggaattgtggaccgatgcgaactttaatcctggcgacaagctggatcgcgccggcggcaccgtcactggtgccctcgtcgtcaaccaaggcgtgacggtgcggtccacgattggccttgactacatcggggccaagtcccggctgatgatccgcgatttcgacgggagcggcggagtcaccatcgatgcggtaacactggccaacagcgcctatgcgccgctctacctgggtggcactgatctgcggttcaacggccagtctgtgtggcatggcgggaactttgcgcccagcaccaaggccaaccgcatccccggtcaggtcatcatgttcgccggcaagagtgcccccgcaggcacgttgctgtgcaacggcgctgccgtgtcccgaaccacctacgcggatctgttcgcagccattggcacgctctacggcgccggcgacggtgcgaccacgttcaacctgccggcgatgggtgatggcaccgtcgtaacccataccaacagcgccgatgccgttggcggtttcaccgagggcgaggtgatccgacacgcccacaccgccagttcgaccagcgccgggacgcacagccacaccatcagcgttggcgccggcggcgcacactcgcacggggcgagcgcaagcgctgtgggcgatcacgcgcacggcgcttggaccgactcgcagggccaccacgcgcacacgggcggcacctcggcggcaggcgagcacaaccacgtcgtgccattcggcgaaaagatgacctatccgtggggcacctacgggaatcaggatcaagcaggtgtgcgcgccagcggtattgactacgacaacagctggccctactccaatgcggccggctcgcacacccatgcgttcagcactgacggcgcgggtgcccactcccacaacgtcagcatgaacggcgccggcaaccacacccacaccatttccgttgcacaggtaggcgatcacggtcacagcgcgtcggcagcggatgctggcgcacacagccacgcggtgacggtgaacaacaccggcggcgaccgcaacctgccggccggtctgcgaatgctgtactgcatcacctactga

SEQ ID NO: 508097 - DNA, 1005 bp, Stenotrophomonas maltophilia
atggggagacaggcaagccgccgatggatcgaacgggcttggggcgcgtgtttgtttgctctggccccgcttgccttggccgctgatgacccttcgcccttgcatgcccagtttcaactgcctgacgatcgtgtcgactatgtcgccgccaagctggtagtggatagcatcattgatccgtccactgacactgtggcagtgcgtcggcaagtcgatcagtgggagcacgctgtacgcggcaatgtgcctggcaacccgacggcgcgacaggtcctcgacgctttgctcaagacgctttacatgccgggcgagtggaaccaggggaagccttttacctacgacctgtcggacccactgggtaagaatccgaagaacaagcagctagctacctacttggccacgcgcaagggcaactgcgtctcaatgcccattctctttgtcatcctgggccagcggctggggctgactgtcgcgcttgctacggcgcccaatcacctgctggtgaagttcgccgacgacgagcagcagatgtggttgaacgttgaagccactgcgggcggcttcaaatacgacagcagctaccagcatgaaacggggatcaccgaggcgtcattggacaatggactttacttgcgcccgctgctgccgcacgaagggataggcgccatcgccagcacactgatggagcactacggggcgaagaaggacgccgatgcgctcatggccgtggccgatctggcgctggccgccaatccgaaggacccggtagcgatgatatggaaggcgaatgcctactacatccagacccagcaacgcatccgctccaggtattcgaatgcggaagatctgccacctgagttgcacggggaatttcaccgtttgactcgcgagaatctggcatggcttgccaaggccgaatcacttggttggacgcagaaaacgccggagcaggaagccagctacctacaatccatccagcgcgaacgcgcgagaagaggactgtga

SEQ ID NO: 508098 - DNA, 753 bp, Stenotrophomonas maltophilia
atgcgcattgccattccagggctgttgaccgtggcgctgtgcgccatcgcttccagtgcgtcggcccggttcgtttcagccgatcccgtacaagccgatccaaatacgggcgccaactacaaccgctactggtatgggaacaacaatccctatagctttaccgacccggacgggcgcctgtcgcgtggtaccggctggacggacaggcaatggaatcagttcgaccgcgcccagcagagcgccgctggcagcttggagaaagcggcgggcaagatcaacggtgcactggccgaagggggcaaagcactccagcgtgcggagaagtctttccaacgcaacttcggtgctggctcagccactccagagaacatggcgaaagctgcctcagatatgagctcaatggctgcggcattgcgggataccagtgcgggcgccattccagccaatggcatgacgggtgcgcaaatcaatgcggcttatggggttggtgcagatacgttggggggcgtgccttccaccgggccgaaaatggtcatcgtcaacaccacgcacgccagtttcaatgatccgtcgaggttggcttggggcgcgggtcacgaagtcgggcatgccgtgctggggtacaaggaccagttcttcaatggtgacgtggcctacaagttcggatcccccctgcaacagaaaatcttcaagacgctgcccagccagcagcgccttatcaatcctgaccacatcatggaccacgctcgatga

SEQ ID NO: 508099 - DNA, 345 bp, Stenotrophomonas maltophilia
atgtcgcccttcatcaacaccgcctggcctcgcttcttcatgggcgcgctgcccatcgccgtttttgccgttctgttgagcagctcgatcgatgcgtcgccgaacggctggctgatgcaggcgatgctgctgacgccattctcgtctctggtgttcctcgggttgggttggcagcgtctgcgcaacgcacacgctgaatatccgatcctgaagagcgagccgcagcggatgctgacggcgttgatcggcaaactgaaggtggccgcgctgtggttcggcctgaccatcgtcggcatgttcgccctgatcctggcgtgggcgctgctgtacaggtccggcggctga

SEQ ID NO: 508100 - DNA, 1137 bp, Stenotrophomonas maltophilia
atgcttagcggcgtgacgttctctgtgaaggacaacatcgacgtagccggcctggtttcctcatacggctcaccagattggctaagtgaacaccccgctgcgttgcacaacgcagtctgtgtggacctagctctcgccgccggtgctcgatatgcgggcaaagttgtcgcagatgagttcacctacagcctggaggggcagaaccagttctttggaaccccgctaaaccctaaagctccggaccgaattccgggcggctcttcaagcggatcagccgcgtccgttgcgactggctcctgcgatttctcgctaggcaccgattcaggcggctcgatacgggttcctgcaagcttctgtggtgtatggggaatacggccatcccttcaccgagtgtccgaagcaggagttctccccttcatgccgagcgtcagtacagtcggggtcatcgccagcgggcttgatgtgctgatcaaggcaatgcaggcgatatcccctgcccacgttgaaccccaacaagcagttcaacgacttgtcgtgcttgaagacgcaatggacattgctgacgaagatgtgcgagctactggatatgccactctggagacactgtctcgcgcgtctggcgtcagccttgaggttcttcgcttcagtgacgtcaccaatgaagaccttccactcgaagcatgcaaccttcgcgcgctacgtaatatccaaacagccgaagttcaaagcacgctcggcacttggattgaccaccacaagccgcagatgggatacggcttttcacaggcctatgcgaatgtagtgagctttgatcggacgtctcttgcccaaagctgggagctcagggagttactgcaccgcaagataaacaccttcttcaggccgggtacgctcatctgcttcccgacaacaccctttgccgcaccactgaagaacagcctgacaactctggactcagtactggatttttacgatagaaccatggctattacagcattctcgggtgtcgccaggctacctgaggtctcagcgcctcttctgtccgtagatcatcttccggtgggactctcgttcgctgcaggaaacggacaagacgcattcctactcagcgcgttgaatcagctgacagcctcctag

SEQ ID NO: 508101 - DNA, 717 bp, Stenotrophomonas maltophilia
atggccggaagcatacggccgggcgtcgcagatcctgcgaacgcgctggtcgcgtggctgagcagttcggaaagagcccagcgcgatgaccccttgtggcagcgtagtgagggtcctgctggccgcaggcaccgcagacacgtgcgtcggccgtgcgcgccgctacctccagccgcgagcaatttcgttcaatacgacttgacgagccggagtcaaagttggacgaccgaagtctgcggaatgtgcttagtgagtatgaacattagtttgaggcaggtaacaaagagcaactgggtcgatatcatcaatttggagatctccaaagaccaagaacagtatgtggcgctcaattcagaagcactggccgcttcaaagttctttgagcactacgtcaatcgagcaatctatttggatgaatgcccggtcggattccttcagtactatccgaaccatgagaacggccatccaaatgaaattttcatcgatcagctcatgatcgatatcgggcggcaaggcgaagggatgggcaccatagcaattgcccttgctatcgaagagattgctcagcttgacgagtacaccagcatctcggtatgccatgtccccggccatgacgtaatgcaaagattcttcaaacgattcgggttcgaagtcgtcgagcaagatgaattcgaagaagtcgttatgcggctgcagctgacccctcgctcaagctga

SEQ ID NO: 508102 - DNA, 723 bp, Stenotrophomonas maltophilia
atgaattcatcagccccaaaaataggctttgatcggttcattcagcttgattgggcggctgcggcactgaatgttcgtgcaggcgtggctgggctagatgatctgaatgcactgctcgatgcagccgagcttggcgtggaagccaagaagaaaacacgcaccgtattgaatcggctgtggctggagccacgcgctgaactggttggcttcgcggatcgcggcgtggccatccacaagacgcagccagacatttccgtctcagctctgtgctggggcatgtccgtggcgacgtacccgttctttggcaaggtggccgagttggtgggccgcctgtccgccatccagggcgactgcgcgtccgccgaggtccatcggcgcatgagtgagacctatggggagcgcgaaggcacccggcgcatgaccaacatggtcatccagagccaggcgagctggggcgcagtggagcgggtcgagaaaggcaaacgcgtcattcgcttgccacagacgagcatcgacaacgatgcgctcactgcttggctgatcgaagcagctgtgcgctacgccggcaagcccgtttcagtgcccagtctgcagtcgctgcccgtgctgttcccgttcaacttgacgcggcccctggcctacgtggtgtcgaactgtccgaacctcgacctccggtcggaaggcccgagtaaccagttcgtcgccttgcgcagcactatttga

SEQ ID NO: 508103 - DNA, 2862 bp, Stenotrophomonas maltophilia
atgagtgatcttttccagaaccacgcggcaaagtccggcccggttgaatgcctcgggcaaacattcccgagtgatgaggctcgccgcgagcacttcctgaagctgctagccgagaagctcaaagatccagcgttccggaagattgaaggttttccgatcggctcggacgaagacatcctggcgctttctgatccaccgtactacacggcatgcccgaatcctttcatcgaggatttcgtccggcactacggcaagccctacgattcgtcagtttcgtacagcaaagaaccctttgctgcagatgtcagcgagggcaagaacgacccgatttataacgcacacagctatcacaccaaggttccgcataaagcaatcatgcggtacatccttcattacacgcagcccggagatctgatttacgacggattctgcggcacaggaatgactggggttgcggcacaaatgtgcggcgatcgttcggtcgtgcaatcaatggggtttcgagtggacccggacggcacgatttacgagcagagcaatgaagatggacgttcggtatggaagccattttcaaagattggagtccggcgagccattctgaacgatctggcaccggccgcgagcttcattgcctacaactacaacacgccggctgatgtcgttgcattcgaatcggaggcgcagaaatcgctgacttctgtcgagagagaatgcggatggatgtatcagactcttcatgccgctacaccggcacaaattgaagaggcgatacgtcttgtggactcggaagatcgaccggatctcagggatatcggctcaacaggtcgaatcaactacaccgtatggtctgacgtttttacctgccctgagtgcgccggtgatgttgttttctgggatgcagccgtagatgagaaagctggcgccgttcgtgatgaatttgattgcccacactgctcgtcaaagctgacgaagcgaggtatggagcgagcctgggtcagcaggattgacgacgcaaccaagcaacccattcgacaggcaaagcaagcgccagtgatggtcaattacagcgtcggtaaaaagcgcttcgaaaagcgtcccgacgctgtcgacaaggcgatcgtagcgaaaatagagaatcaaccgctggataactggtgcccgaccgatcgaatgatggagggcggcgagtcgaggagaaatgatccaagtggtatcacccacgttcaccatttctacaccaagcggaatttggcggtgctgtcgagtctgcgtgcgaacctaaagaagtcgacgatggaggggcagcttctatgtttggtaggcgatcagctgccacgtgcgagcaagatgcacaagatcgcggtgagtcgcctgaatacaaatttgtcgaagacagctggcatcttggctggaacgctctacgtaccgtccaaccaaattgagtattcggtattagagatgatctcgtaccggatcgcggacgtagcttcttacctcgggaaacgggacaagaccacgcgtcagctggtgttcacaggatcaaccgctacaacgttaattcccgataacagcctagattacatttttgtagatccgccatttggcgcaaatattagctattcagagctaaattttctttgggaggcctggctcaaggtattcacgaatattgctcccgaggctatcgagaaccgtgctcacggaaagtcgcttgatgattatcgatcgctcatgtctatctgcttcaaagaagctttccgaaagctgaagccagggaggtggatgacggttgaattttcgaatacgcaggcatccgtatggaacaccatccaaacgtcgctgcaagaagccggattcgtcgttgcgaacgtttcggcgctcgataaaaaacagggaagcttcaaggcggtaacaacgaccactgccgtcaaacaggatctggtcatttccgcctacaagccgaatggtggtttggaagagcgattctccaagactggtggaagcgaagattcagtctgggattttgttcgaacgcatttgaagtatctgccaacggttaaggtaaggaacagcactctcgagttcattgccgaacgagatccaagaattatttttgatcgcatggtggcttggttcatccgccacaacgttccggttccaatgtcgacccatgagtttcaagctggcctcacacagcgtttcgtggaacgtgacggcatgacctttctgccggatcaggtcgccgagtacgacaagaagcgtatgcaggtcgccatcgctccacagatggagatgttcgtttccgatgagcgcagcgcgattgattggttgaccgatttcttgaagcgtcggccgtctacctatcaagaaatccataccgatttcatcagccagctcggggcgggctggaagaagcacgagtcgaagccggaacttgccgctttacttgaggacaacttcattcagtacgacggcactggtgaggttccgagccagattcacagttatctgtcgaccaaccacaaggatcttcggggtttagagaaaaacagcccagcacttgtcgccaaggccaaggatcgctggtacgtgcccgacccgaacaaagcacaggatctggagaagaaacgcgagaaggcgctgctcaaggagtttgaccactatcgagcgttcacgggtcgccgtctgaaggagttccgcctggaagcgctgcgcgctgggttcagagcagcatggggcaataaggattaccagacgatcatcgacatcgcgaagaaggtgcccgacgaagcgctgcaagaggacgagaagctgctcaccctctatgacctcgcgctgacccgtaccgaagacgggatttga

SEQ ID NO: 508104 - DNA, 915 bp, Stenotrophomonas maltophilia
atgtcgaacgaacagcttgcagatctgacccagccacaacgcgaccggctcgcgttcgtggagctgcgcgtgctgttcatcggggagatacgtcgccaggacctagttacgcggtttgggatccagtccgccgctgcatccagagatctcgcgctgtacaaggacttggcgcccggcaacatcgactacgaccccaaaggcaagtcctacgtcctggggccggacttccggcccgtattcgacttccctcccgagcgggtgctgtcgtggctgacccagggttttggcgatggtgagccgatgcggctcaaggcgtgggtggcgagcgagagcccgtcccggcttacgcacccggacctgaatgttctggcgagcgtgacccgagcgattcaccaggagtgtccactcggcgttgagtaccactccatctccaatggccgcaccgtgcgggagatcgtcccgttcgcgctgatcgacaacggcctgcgctggcacgtccgcgccttcgaccggaacactcaggagtttcgggatttcgtgatcactcggatcagacgccccgtcgtgctcaaaggccagccagtggcaccccacgagatgagcgaacaagacattcagtggacccggatcgtcgagctggagttggtgccgcacccggatcaaccccggccggagatcaccgaaatggattacggcatgcgcgacggggtactgcggatgaagctgcgcgccgccacggccggatacatccttcgtcaatggagtgtggactgcacgcccgaccacagcttgcgtgggcacgagtatcggttgtggctgaaggaccacctggccatctacggcgtgcgcaacgccgtgctggcgccgggctaccgatccccagatcaacaacggcttgaagccgagtcggactga

SEQ ID NO: 508105 - DNA, 1209 bp, Stenotrophomonas maltophilia
atgcctgagtggcgaaagcagctgaaccgcgtcgcgcggcccgatttgagcgcgacggaagaatttgagacaccggcacctccggcctggtgcagcaagcgccagcaaaaacgcacgatccaggggcggtttctgggctgcttgcttggtggtgcagtcggcgatgcgctgggcgcaccggttgagttcatgaagcggaccgagattctccgtcgcttcggccccgagggcatcactcagtacgcaccggcttatggtggactgggtacgatcaccgacgacacgcagatgaccttgttcaccgccgagggattgatccgaggctgggtgcgcggctgcttcaaaggcatcacgacctactccggggtaacggcccacgcctatttgcgctggctgcaaactcaaggcgaacgccctacatgcgacatcgacttcggcacggatgagcctggttggttgtttcagcaacgccaactgcacagccgtcgcgcaccgggcaatacgtgcctatcggcgctgcgggcgatgaactccctcggggagccggcccgcaacgacagcaagggctgcggcggtgtcatgcgggttgcgccggtcgggctgttcgcctggcgcctgcgccagtacgaatcccctcaagacgccttccggctgggtaccgagttggctgcgctgacccacgggcacccgactggagccctgaccggtggtgtgctggcggttctgatcctggccctgaccgatggtgcgtcgctgcgcgaggcactggacgcatccaaactccttctgcgaaccgagcccggtcacgaggagacgctgcgggcaatagagatggccgaggagttagccgattccggtttaccaaatgaagaagccattacccggctgggccagggctggatcgctgaggaggccctggcgatctccatctattgcgcgctggtcgcccgcaatttcaaacatggcgtgatcctggcggtgaaccacgatggcgactctgactcgactggatcgatcgtgggcaacctgctcggcgccatgcacggcgtgaaggcaatccctgtcgagtggctggagccgttggagttacgcgatgtcatcaccgaattggcggaagatctctacgcgttcaaggactgggagatcggcgaatacaacgacaacgaagatctgaaccagcggatctggcgcaagtacccgggattctga

SEQ ID NO: 508106 - DNA, 498 bp, Stenotrophomonas maltophilia
atgacagacgaaccggtgctgggcctctacgtgcgcagcagcaccaaacactatgcccccgcggatgccgaggccgtcttggccgcggccaagcagatcgtcgacgccaagatgcaacggggcacttgcttccgcgaccccaagatcgccgctgagttcttcctggccaagttgggcggggcagaacgcgaagtgttcgctgcagtgatgctggattcccggcatcgcctgatccgttacacggagctgttctacggctccatagacggggccgaggtgcatccccgggaagtcgtgaaacaggccctgcgcctaaacgcagccgcggtcatcctggctcacaaccatccgtcaggtgacccggaaccgtctgccgcagaccgggtcgttacggcgaggctcaagcaagcgttggcgttggttgatgtacgagttattgaccacgtcatcgtgggtggacgtcagacggtgagcttggcagagagagggtggctgtag

SEQ ID NO: 508107 - DNA, 897 bp, Stenotrophomonas maltophilia
atgttgaagggacttgtgattaccccgcccgtggtcgggcggatttccatcgggcgcgtggtcgagcgcaacggcaagcgcctgccggagaaggatgatcagttcaccctgaccagccagatccagaaccgggacggctggatcctgcaccccctggacgaggtgctgcgccaggccgcagggggcaagctacgctcgattcccgtccggttgatgttcaacgacccgagcctgaacctccgggccgactactcgttgttcgatcgcgccacggggcgcccgttgtgcgtcggtaatggcgagacctgtcgtcggaccacccaggaggggatcgcctcgctgccgtgtccggggccgaccagctgcccttacgcgaccggcgactgcaaggcctacgcgcgtctcaacgtcctggtgggtgatgccgacgaggacgcgctggggagcttcgtgctgcggacgacttccttcaacacgatccggacattggcggcacggatgcagtactacagcgcggtctccggtgggctgttggcgtgcatgccgctggagctgaagctgcgtggcaagtcaacgacgatgagccaccgcgccccgatctactacgtggatctggtggtgcgctctggcatgacgctggaacaggcgattgctgaagcccgcgagctggacgcgcggcgacgcgccgccggggtcgaccagggcgcgttggacgaggcggcccgacgtggattcgccaatggggcgttcgaagagctggaggaggacgtgccggccctcgtggaggagttctatcccgatgccgagcagggcgagcctggtcgggcgcagccggccccgccgccagccctgcgcgcgcgcctgcaagagaaggtcgcccggcttgggaccggctga

SEQ ID NO: 508108 - DNA, 516 bp, Stenotrophomonas maltophilia
atggcaccgccgttggcggtgaacagccctgtgccgaaggaaccggcattattgaaattgaccaggccatcgttgagcgtggtcgtgcccgcacccgcccacgcaccctgcaggttccaggtaccgctgttgacggtgagcctctggaagttgatgtactggttccagcccagcgtggttaccgctccgccggtaccgctgcccgggccggtggcgctgttctgcagcaccaggctgttgttggacgccgagccaccgtcgacgatgccggccgcggccagattcaccgcaagcgcgccgacctgcccggccacgccgataccggcggtattgacgctggaaccagacacggcggtgaaggtgttgccggcgaccgaactgcccaggttcacactgccgttgatggttcccgcgttgaggaaggtattgccggcccccgccgtggccgaaccctggaaccctatgcggccggtaatggtgccggtgttgttgagagtggtctgcgcaccaccgtag

SEQ ID NO: 508109 - DNA, 252 bp, Stenotrophomonas maltophilia
atggtgggatcgaccgtgccctggttgttcacggtgatgccgttaccactcaaattcactgcacttccgccaacgatcggcggcacgctgagctcggcgccggtctggatattcagcgtcacgccgttgatgctgttggtcagcgaattggtattggagccggtggcgcaggtcaccgtcgtacctgcggtagtgcaggccgcaaacgccgatccactggccagcgtggccgccagtgccaccgccagctga

SEQ ID NO: 508110 - DNA, 363 bp, Stenotrophomonas maltophilia
atggaaactgaagctgcgatcattgagatgacaaagcttgtgaatgagttcgcgttgggctccgttgatgcccaagctttcattgagaagtactcgaatttctactactacgaagcgctggacggacatgaagcttcaagtgcactgcgccccgagagcatgatgaagctcgggcccgctatagagctgcatcgccgcgttcaagaagatgtggtgaacaagatctcgttcgatgcggggttttcaactgaagcgatgaggatggctgggcgactctccccggcggaggcgcgggagcacgcgctgaggatatgtgcagatgttgggattgaagttgttctgtcggcaatcaatgccgcatga

SEQ ID NO: 508111 - DNA, 879 bp, Stenotrophomonas maltophilia
atgtcatttgcactcaccaagcgcatcgttctcacagttgagcccagagagcgcccctaccagctcaggaacgctcaggttcgtggtttgatccttcgagtgccgccctcgggtcacaaagcatggatcgtgacctgggcgcacggtaagcgtcgtaccttgggtccggtagaacatctgacacttgatcaagcccgcgaccaagcccggcaagaggttgccgaatgcgttcagtccggattgccgacactcgcaaagtccaagcccaccagttgcacgcttgaaacactgctcaatgaccacttcgaaccttgggcgatagctgagctcaagggcggtcgtcagtacccggaccgcatcagatcggtgttctcgtggctattgcgccgtcagatcattgagattgacgcgcccaccatggagcgatggtggcgcgggcgcgtcattggccctgccgtcgtcaccaaggctaccgcagcgcgcgactttgcttgcctgcggtctgccttgtcgcgggccgttgagtggaagctgatcgagactaaccccctcatgggcatgcgtcagcgatcagcggctagccgcaaggtggtccggttcctgtcccctgatgaggagacgatgctccgggccgcgctggcagcgcgcgatctagctggggttgaggggagggcgaacgccaatgcggcccgacgcaagtaccggcaagcggttctgcctgatttgccgatggacgggtacgtcgatcacctgaccccggtggttcttacagccattacgcgattccgacaccgccgggtggcaaaattgaaggatcacccgatggtcgatttgttcaggcaaaggggtctgatggtcaacccactggggttcgaatag

SEQ ID NO: 508112 - DNA, 3240 bp, Stenotrophomonas maltophilia
gtgaggagaatgcgaattccgggagtacgtcgcgaaacctggttcgccttccttcttgcactggtggcgatgctgctgggggttggggacgcctacgcgcaggcttccttgcgcctgaccgcgcccggcgggacgaccttcaccgcaccttccggcttcgatctcaagctcgaggccagaagcggtggcaatggcaaaacaatggaggtcgtggagttctactggctcaagcgcaacggggttcgaatcgattttgatgaggcgttgcccacacggatctattcggaaggcgagttgcctgctggcgtgtatacctacacgcttgaggggcgcgccatgtatcacgacccggtcaatggcaatgagcgatacaagaccatcttcccgattccaacgctgaccatcaccgttgttgcaggaagtggaggtattagcgcctcatccggaacctgcaccattccatgggggcagagcagttgcccggtgacgatcagctggaactccaatgctcccgccgcgcgcgtgctggtgtctgcgctggacaacagcggtatgcaggtgatcgggcaagggcaatccggaacggtcaccggctgggtcacggcggccgggcagcggttccatctgatgaacggctcggcgacgttcgcgacgaccgaatcacgcggcgtgccgaccatcaatcagcctccggttgtgagcgtcgcttcgccggttgcaggcgccatgttcccggcaggcgcgggtgtccctatcaacgtgtcagcgagtgatggcgatgatgggatcagtcgggttgagctcaaggtggatggcgccaccatcgcgacgttccaatcgccgccctatgccagtcgcatagccagcctggcgccggggacgcacaccgtggtggttgtcgccactgatacgcgtggcgcttcgacgacgtcggtaccagtcagctttacggtgtctaccgtgccaggtgtgacgttgacgcgtcgttacgtctacgacgggcagcaacgactgtgcaaagtcatcgagcctgaaaccggctcgacggtgatggcgtacgacgcagcaggcaacctggcctggagcgcagccggcctggatctgcccagcgcgacaagttgtgatctggccgttgccgaagccagtggacgcgtggttcgtcgcagctacgacgcacggaatcgattggccacgctgcgcttcccggatcgcaatggcgatgtcgactacagctacaccgccgatggactggtacagcaggccatcgcctacaacgacgctggcagcacctcggctaccactcagtaccagtacaacaagcgacgtctgctggtgggtgagaccctgtcccagtccggtgcagtgccgcggagcctggggtatacctacaacgccaatgggcatctggcgggtcatgtctatcccgctggccgcccggtcgactacgctccgaatgccatgggtaagccaacgcgtgtcggcgactacgtcacgggcgttagctactatgccaatggtggaatcaaacagttcacgtatggaaatggtgtggtccacacggctacccagaacgcgcggcgccttcctgcgcgcattgtggacagcaacatcgttgccctggagacatcgtttgatccgaatggcaacgttgtcgccatcgcagacctgcagttgggcaccgactacagccgccagatgcagtatgatgatcgagaccgtcttgttgtggccggaagcccgatgttcggcggagcgggttggcaccgcttccgttatgacgccctggacaacatccgcagttggtcacttgatggggtcaaggccgaccagtactggtatgacgcgcacaaccggttgaccaacatccgcaacgacaacggggcgaccactgttggcctggcctatgacgtccagggcaatctggccaacaagaatggccagggctttcgctttgactatggcaatcgcctgagggaggcggtgggcaaggccagctatcgctatgacgcggacgggctgcgcgtgcttgccacgcggactgacggggcggcagaggagtctctctatcgtcgcggaggacagctcgtctatcagttcaaccgtggtagcggcctgcagaccgaaaccttgtatctggacagcaaggcagttgcgcagctggagacggtgtctggcgcaaccacggtcaagtacctgcacacggacgcgctgggcagcccggttgccagcaccgggagtgcgggacagctgcttgagcggacgcactacgaaccctacggcaggcccatcaatcgaacggtggatggggtcgggtacaccggtcacaagatggatggcgataccgggctgagttacatgcagcagcggtacatggacccgcagctgggggtgttcctgtcggttgatccggtgacggcgtatgagcagccggttgggcagttcaatcggtatcggtatgcgaacgggaatccgtacaagttcacggacccggatggaagagtcccggtaatgcccttcatctacggtgccgtcttgggcggccttgcagatatcgtggtccagaaggccatgaatccggataagcccattgataaagtggaggttggcattgccgccgccgttggctctgtttccgggggcgctggtggactagccgttgctgcggtcggttccggcacgatttcggttgggcgtgcagttgcaatacaggccgtggtcaatgcggttgcaggtggtgctggttccgccgcagagagcgcaatcaaaggccagcccatcacggcggagggcgtcgcttcaaatgcgattggcagtgccgttggaggattgggagcctccggtgttggcgttgccatgggtgatttcgctggcccagcttcacgaggaacactcaaaaggctgagtcaatcccgcggcccaggcggaccgaacatggcaagtgccactgcatcaactggaactgcaattccgaggcaatcagcattccagggcggggcttcccaagcgggcaaggcgtcgcgggagcaggggcaactatcgtacagaaagatctggagaagaagaaatgacttccatgataaaaggtttcctaggggctcagcttctcgctgcgttcttcggccttgcgtatttcgcggttcttacgtaccggcatcatccggatgctatgcatatcagtctgcggatttggggctacttcgcggcgttgtttctgatccttcaacttttctttgcgcttaa

SEQ ID NO: 508113 - DNA, 2883 bp, Stenotrophomonas maltophilia
atgcagaactccatggatcagcagtggacacgttggaagagtgcgggccgaaccggggtagccatggcgatgttgttgcccgttctgacgaacactgcaatggcccagagcacatccggaaacttcgtgtgggaagagttccctgatcggatagcgaaggcggagaaggtttccgcactgggtcctgatctgtttggcgacaaggtcaggttggccaacggcgagcttggattcgagattaccgatatcgacctcccaggcaataacgcgctggaggtcaagctcacccgtacctacgacgtggtaagccggaaaacctacttcccggaagcgatgctggcggactggcagatcaaagttccccacatcagcggcagctatgctccagactgggggactggagccgatgccggcgcaccagggcgctgttcgtcgagctggttgcctgctgaatcagcgcatttcagcacgcgggagttctggggcggtctctctgttgatattcccgggggtggtggggagctgttgcgtaccgctgccggcgtgacccagccgcaggatggttcggcttacccctggacaacgtcggggcagatatttttctcctgcctgccggtcatccagaatgcgggtggagaagggttcctggcgatcacgccagacggaacacgttactggttcgattggtttgcacagacctccgagccaacgctcaagaagtatcagtatttccatgacgatgggtcgttgcccaaaccagagccttggcgattcctgcagcgccgcaagaacattctgcttgcgaccagggtgcaggacagattcgggaacaccgtccagtacacctatgcaaatgcgtggaacgaggcgcccaggctgaccgcaatcaccgccagcgacggtcgccagctcacgctctcctatcagggcagcaacgtcagcagtgtcagcgacggtacgcgccagtggcagtatcagtacaacagcttgccatcgcgccgaggcctttccgccgtccttctccccgatgggagccggtgggcaatcaacttcgaagacttcacccgagcggcgctgcgatatgccgaggtgatgtcgcccgagcccggtgagatgttccggaactgcttcgagaacgaggttcccacgtcctatccttccgggaccattgcaggaacgatggtgcacccctccggtgctaccgggcggttcaccgttacatcgcttgagcatggccgtagccacgtacctctcaactgtcgtggcatcgactatacgcccggcttcggcaacaaccccaatgacgacgtcaatacctatgcgatctccggcttcagtttcacgctggccgagaagaccatcagcggcccggggctccctgtactgcgttggacgtatgactacacccccaacatcagcatctaccgatacccggggcagccggccgggaacctggtatgcccgtatgggagtgctgctacctgtgccgcgcccccgtgtaccagtgatgattgtgcgcaatccagtatcacgaccgtgagcgggccgggtggggagtgggtccgctatcgacatggcaatacctaccgttacaacgaaggcaagctgctttcggtggaagtaggtaccggtccatccgacattgcgcgtaccaccacctaccgttacgacctgctttccaccggccagaactatcccgcgcgatatggaaccagcgtgcagttctcgggcgaggggtgggccggcgaatatcatcgcccacagctggagacgcacatctcccagcagggggccgttttttcgactgttctgggcgatctggactacttcgcgcgtccgcacgggatcacgaagtcgagcacgcttggctttgcccggaccgaaggccatggctaccgtgacaacctctcaaggtgggtcctgggccagcgggaaagcatcacctgtctcgcaccggccacttgcgcgggtcaggcaatgtcccatgtggtatttgatggcaacactgacctgccaatccagttcagggagtttggagcgcttcgtcagacactgacctatcaccccaatggcagcgtcgccactgtcgccgatggccgcaacggtcagggcgtggatacccgcatgacgctggttgactggaaacgaggcattccccagtccgtccattacggtgacggcaccatggaactggcaacggtgaatgatcagggctggatcgtgcagtatgccgacgccaatggctacgcgcgaaactacgcctacgacgccctgggacgcttgaagcaaaccgacctgccgcagggcgacacggtggcatggaattcgacgtccaccgtgttcgaggcaatctcctatccggaatacggattgcccgcagggcactggcggtccaccacccaaacggggaatcatcgtcgacaggtcttccacgatgccttgtggcggcccgttgtaacgattgaagaggatatcgccaattcccaggcgacgcagcagtgggtggcgacgcgctatgacgagatggggcgtacgtcgttcacttcctatccgcggaacctccatcaggaaggcagtgcggactatgccgataccagcctgcaaggtgttcataccagctacgatctgctggggcgaccgctggcagtccagcaggactcggagctcggagtgttgagcacctacaacgagtatctgtccggcttccagacccgggtgacctcgcccaagggccagaagacactcctccgctacatggcgttggagcagcccgtcgccgatctgccggtctatgttgaagagccaggcggtgtgatcaccaccatcgagcgggatatctacggtaagcctgtggagatttcgcgcagcggaggtgctcagtga

SEQ ID NO: 508114 - DNA, 609 bp, Stenotrophomonas maltophilia
gtgaacaggagccgagcctgtaacgtcgcaagcccctcccaagaggctggattggatcagaaaatttgccaagcagaaagtcccgacctactcatccaatcactacgaaagagtattcacttgccgggaactgccaggaatccggagcattctctccaggcatggtcaagagaagcaacccgggcacatccagcgctacggctgagaaggtccggccattcccgaagtgcaaacgaatacctgaatcaacgatcagtccgtcgccttgccaacgaacaatctcggtccggacgacatcgagatcttccggcaactccagatcgctccattcgcacgtcgattcaactgcggcctcgggcaggacctcgacatttatcgtcccgaattcatcccatccctgcgcaaccgtactggaagatgttagttccagagtcatatccggatcgaaattcaagaccacttgcgaagccgatcgagctgcctgcatctgtggaatcctgcactcaagaaggcgacgccccaggatcaaagctggcagagcatccagctgcactcccttcaattgcagcggtagatagcgcatgccgccggagagctgttcaatcgtag

SEQ ID NO: 508115 - DNA, 1224 bp, Stenotrophomonas maltophilia
atgctcactgataccaagattcgtgcactaaagccaaaggccgccgcgtatcgggtagccgatacgaacggcttggtgatcgagattcgtcccgccggaagcaaggcttggcgctatcgctatcgcttccttggaaaggcaagcatcgtcaccttggatgagtacccagccatggggcttcaggcggcacgtgccgagcgcgataagttgagagcgatgctgcgcggcggcgccaaccctgcccaagtggccaggacagagaaggcaacgcaaggcgagaaggcgaccgctacgttcgccgcagttggcctcgagctgttggcgaagcgaaccaaagaagggcttgtaccaggttctgtcgtgcgtgagcgtcggctgattgagaaggacctggccatgctggccgacattccagtgtcggatgtaaccgccccgatactgctggctgcgctgcgaaagctggagcaaaggggggttgtcgagacggcacacagagcccggtctcacgcagggcggatcttccgatatgcaatcgccactggacgcgccgagcgcaaccccgcccaggacttggctggggccttggagcagccgcggacaaagcactttgccagcattacggatccctcagcgatcgccgatttgctgcgcgcgctgtggggctatcagggctcccgtgttactcaggctgccctgaagctcgcgccgatgaccttcgtgcgacctggggagctgcgcaaggcgaaatgggcggacatagatcttgacgccgcagagtggcggtatgtcacgagcaagacgaagacgccgcacgtcgtccccttgtccaagcaggcaatggccgtccttatggacctgcatccccatgcgtcgcatagcgagttcgtattccctggcatccgaagtgcactgaagccgatgagcgagaacacgctcaacgcggccctcagatacctcggattcgattcagacaccatggtgggtcacggcttccgcgccatggcgcggaccgtgcttgacgaagtgcttggctttagaccggactacatcgagcatcaacttgcacacgcagtcaaagatcccttggggcgtgcctacaaccgcgccacccacctgcctgagcgcaggaagatgatgcaggcgtgggctgactacttggatggtctgcggatgaatgagtccaagaccgcgacgaagagcgctcggcggcgaaaagccgcctga

SEQ ID NO: 508116 - DNA, 372 bp, Stenotrophomonas maltophilia
atggcaaccaggtactccaagcgacggcccgacggctcggtcgcctactacgactcagaagaagagatgtgggccgaccaacccgctctgccccctgagcccggcctatttgagttctccgccctctgggccgtcattggcttttttgcctcggtgttcatcatcgcgttgacggtgtacggactcggattgggtgaggggtggcccaaggctgttcgctttggggctgtggtgttgtccatttgcgtctccacctacctcataggcagagtgggccaatttctcttccaggtgttctgggcgctggtaggaatcggcttcgtcctgggtgttctttgggcaatcgtggccttgctatggcatttcgcctga

SEQ ID NO: 508117 - DNA, 489 bp, Stenotrophomonas maltophilia
atgagggggctcgcccaggactacgccaagcggcattcgatcgcgcgttggtatgacgatgcggataagttgatcaacgatccggaggtcaatgcggtctatgtggccactccgccctccacccgcatgcaatacgcgttgaagttcattgcggccggtaagccggtctacatcgagaagccgatggcgatggaccatgagcagtgcgcccggatcctgagggcgagcgaggaggcgggcgttccggttctcgttgcctactaccggcgcggtctgccacggtttgtctacgtccaggagcttctcaactccggcgcccttggatccatccggactgtgcgcaccacgctgtaccgtccgcacaatccgatcacccagtctccccagttgtggcggaccgatccgggcatctccggaggaggcctgttcgtggacctgggctcgcacaccctggactgctggacttcctgctgggaccactggagctga

SEQ ID NO: 508118 - DNA, 639 bp, Stenotrophomonas maltophilia
atgctggcacttgagttggttctgcagaggacaaggcggttccgcggggcgaagttggttccggaggaactacaacgacttgattccgtaggtaatttggcccgatctggactccacgttgctgtggccatacggcgcgacgcgacgagtagacctgcgagcgcgggatcgatcagccgccaatcaggaatgagaagtccaggtgtgcccgcggccggtttgccactggcctgctccggagtacgctcggcttgtcagcccctggttggccggacctggtggtcgctcggttcggtgcccctgcaatacgtagcaagaacgcgatccatcaatgcgttggttctggcagcagagcgtcccgttgaaggcgagcttccactgccaagcagctcggccaccaccgtggatatcagtggctgctggatggacagaggattggtgaactcaacgacctcgataccagcagcggtctccaccaccacaggtccctcgccgaaggtagaaaagcgcacgatgcctgcatcgccggtgatctcgatttcatcgacggcccggaacgcactgaagttccactggccaacgccctgtaccccagagtcagtctggaaacatatggacactgtgtcctcggtctcatag

SEQ ID NO: 508119 - DNA, 231 bp, Stenotrophomonas maltophilia
atggaaatcgacaccagcaccccgcgactcatccgccgtcaggagcttgagcaccgaacgggcttccggcgatccacgatctacgcagcactgaagccaggcaacaagcgcttcgatcccagctttcccagaccggtcaggctgagcgccggcgccgttgcctgggtggagagcgaggtggacgactggatcaggacgcgtatggccgagcgtcaagcccagcgggcgtag

SEQ ID NO: 508120 - DNA, 1044 bp, Stenotrophomonas maltophilia
atgtacaagaagcacgaaaacctgcttgaccagtggggtgaccgactggtggatcatcaggacgggatggtaattgtcgattcgtttgtggactacccccgggagatcgttcgggtggatatggccatgcgtgccttggtcaagtccaagcacaagctgttcaccctgaaggtggggctgggtaggaactttctggtggccgatcccatcgcccaggcggtgcagcagtgtgccaaggtcgactacagggacatccagaagttctacagcaagcacaagctgagcccgtacttcgagctgctggcttcggagtatgagagctctcggaccaatccgatcatcggcatccgcggtgatgtcgacgcggcaaatggttgggtcgacagcatccgtgagagagccaaggcaagcgacttcgccaagctgctcagtgcccaggagcgcagtgcccgcaagaacgcctgctcaatggttgactacatcaacgagctttttgagcgtcactcgcggctctgcgtggtgcgtgtggacttcgcctacaacatccactaccgccagagtcttgctccgggcgaacttcacccggccaggatcaagaaggatctggcagcgatggtgcgtcttctgcgcaagaagtatcccgccctggttggctatgcctggaagcttgagtacgggcagcagaagtcgtaccacattcatttcatggcgttcttcaacggtaatgaggtctggcaggacgtggccatcggcaaggcgctgggtgagctctggcaggatgaagtgaccggtggggacggcggctactggaactgcaatgcgcagaagtccttctacgagcgtcgcagagggattggcatcgggatggtggcctatgatgacgctgagaagcgtagtcgccttgtgtacgcggcgttgtacctggccaaggcggactactacgtcaaactcaacgaaccggcattgggacggatcttcggcaaagggcagttgggcccggtcggtgaagcgaagcttgggcgaccgcggcagtctgcggcatag

SEQ ID NO: 508121 - DNA, 843 bp, Stenotrophomonas maltophilia
atggtgatgcggcttgatcgacccaatgcggaccagaataccttcatcgataaagttgttctcgagcgccaagccggctgtaacgcaaagttcttcagcgggatccaaaacgattggaaagcgcgtgtacagaattacctcgctgccaatggcgacccctcggttattcagccttgggccgctgtacagcctcacgcgacgaaattccacactctctatctaagccccgccgttgattcggttcagaagcctgtattggatacgcttcgatcacgagagttgcagctctgcccgatctgcggtgaggaaggaacgcccaatacgctggaccatcacctgccgaagcagacttaccctgagctatccatcacagcatgcaatcttgttccaatgtgtgacatatgccagggaaataagctcacgtcaacggtaaacacggcaaacgagcgtctcttcttgcacccatacttcgacgaattcgtcgatcagcaggtgtattttctagacattgggaccccctacagctccccaacgaccatgacactaggcccgcaccctgctctggagcccgagcaagcttcgcttgtttctagacacctgggggaactcggaatcgcggagcgttacactcgctttttcaaggacgagtacatgcgcttactcaggctttcgggaaggatccgtgcaaaaggcctcgatttggacgagcagatcgagatgtttcgtgagaacgccttggacaagtcagtgaattcgtggcaccacgttttctactctggtgccatagccaatgcggctcttatgcactatctgaggcatggccaactccctatgtaccgctag

SEQ ID NO: 508122 - DNA, 1740 bp, Stenotrophomonas maltophilia
atgaaagttgtctatacgggactcgatagcaagaagcgcaaagccctggttgcatcgcatgaggacgtcattcttctgctctgggacaactgggatgactacacttacaagacaaccttcccgatcgaatgcaggatcggcggagagattgtgcagctcggaggaattcagctcctcgttgaggagcagaagacaacctattcatacctggacaagcttgttgcggagggctggaacggcgtcttccctatccccaacgggaaatatatctcggtaccggcaggtctcaccttctatgagcagattgaaggccaccttggcttagacactgcaattgaggtcgcccagctactgcgagatgcaagctacctcaccaaaattcttgaggacgaggacgccctgcgactaacgcaatcgggcggcttcctgaactcccttcagcgcgagcgtggcgcgattaaagctttcattgatggctggaagctattcgaccagcaaagcatcacaattggaaaccaggcattcaattttctcagcccatctagagagattgcctcaatcgaactgcgtttccactcgcaaagcccccttcctcacgacatcaacgtgttgattggtgccaatggagttggcaagtcacaacttctacggcagatagttgatgattggctgaggctgacgcccggatcccagaacaagactggcttctcagagcgccctaaccttaaccaggtcgtggtcgtctcatacagcccctttgaactcttccccgttgacacgagcgatgacaccgagcgaaaggatcacgaagtttatcgttacttcggatttcgagggcgaaagaagaccctgaccgagagcaagcgcggatcacctcagatcaccctatcgcgagagttccccaaggctaacgcagctcactctctactagcctgtctggcggacgaccagaagtatggagcaattaaagagcgatctagcaagcttgagacaatggagcgcgtgctcaggtctgccttcgagttcgaccacgctgcagtcgcagtagacagttcggccgatgccgatgaatttttcacaaatcaaatgtggttgacgcagccttatctcgaagtaaaaatcgatgatgaagacggaagctcatcgaccgagcgttatatccccattgcctcggatcgagttggcgcactcaaagtacagccattgagaaagcacctgcatgatcgcatgggcgtgatcttcctgaagaacggaaaagtcatgcacctaagctccgggcagagactgttctcctacatcatcatcaacattctcggcaccataagacgtaacagtcttctgcttattgacgagcctgagctgttccttcatccgacactggagattgcgttcattcgcatgttgaagtccatccttgcgagctacagctccaaggcactggtggccacacactccatcgtcactgtccgtgaaatcccacgcgactgcgtccacgtcttcgagcaaaccatgaacgggctggcaatcaagactccaccatttgagacatttggtggtgacgttcagcgcatctcttcctatgtttttggcgacaaggtcctatccaagccatatgaggagtgggtcgaggcacaactgaagaagtacgggactgcagagcagctgatccatgccctcggcgacaacatcaacgaagagctgatcattcagatccatgcaatggagcgcggacaatggtga

SEQ ID NO: 508123 - DNA, 405 bp, Stenotrophomonas maltophilia
atgcagaacgaactgcgggactacatcaaaagccagcccaatgaacttcgcgaactgctggacgctgcacgtgattccgggatgaaggtcttcgttgaggtcaacgaaaactttccgccaagcttcatcgacacggttccacttcttgccgcgatctgcaaaaagttctcagtggccactacagatcttgatctgctttgcagtgaattctgtcaggccgaccgaactgttcttcgcaagctgaacacctttagcccgtcaagccagccccatgaagtcacagccagttttctgctcatggtcgctatcgccagacggaatcgccaagatctgggggtcatggacctccagggttatggatggcatgtcgacgcagccaaggttgtgttgagtcacgacagctga

SEQ ID NO: 508124 - DNA, 1260 bp, Stenotrophomonas maltophilia
atggcggcccccgccctggcgcagtacccctacggaagcacgatcttcatcggagacagcctcagcgacgcgggctacttcaggcctctcctgcctgagttcgtccgccccgtcaccggccagttcaccaccaatcctggctgggtctggccgcaacagatcgccaactactacggcaccaatgccggcgccaacggcaacggccagaccggcgacaactacgccgctggcagtgcgcgcgtgggaattgatctggtcaacgagctgggctttgtgccatcgctcaggactcagactgccacctacctggcagccaatggcggccacgccgatcccaaggctccgcactcagtctggggcggcgccaacgacgtgtttgccatcacctcgcctgcgcagggcccggcagtgattggagcggccgtggccgatcaggtcgggatcctggcgccgctgaagggcgccggcgccgagtacgttgtcgtgcccaacctgcccgatttgggattgacccccatgttccgcagccagggggatgtaggcattgccaccggtaccacgctggcccaggcatacaacgaggcgttgtatagcgatctcaaggcagcgggccttcaggtcattccagtggacaccttccatcttctgcaggaagtggtggcaagcccagggacatacgggttcaccaacgttgtcgacaaggcatgtcctgtcggatcctcgctgacctgcaatccgacgcagtatgtgacttctgacgccgctaccagctacatgttcgcagacggcgtccatccctccgccgttgtccacgagatgctcggccagtacgccctgtcgatcctggaggcccctcgtctgcagcaggtgctgacccactcggcccaggcagtgggccgctcacgggcagaccaggtcagctggcatctcgatggccgccccgccgacggtctgagctggtggagcaacctgcgtggtgacatgcagcgctatgcgcatgccgatctgtatgacggcatggcaccggccggcctgttcggcgtggactgggcacgcgatagcgtggtggtcggtggttttgccatctacggccgcatggacgcggacttcggcaacagccaaggtgacttcacccagtccgataccagccctgttcgctggctggtatgggcagcgcacctggatcaatggccaggtcagctacagctggctgggctacgacgtaacccgcaaggtccacctgggtccggccaccagtga

SEQ ID NO: 508125 - DNA, 816 bp, Stenotrophomonas maltophilia
atgttcgaacaagggatataccgctccgacgatgaaacgcctgagctggacgaatgcctgcagcgcgctcgcgcagacatcgagatcgcctacaacatccgagccaagcgagccaacccgctgtgctcattcgtcgatgaatggaaccttctctgcgatgacatcattaaaggcaacgacactgccagcaggctggatcgcatcgccgatgacatgcggcttcacggggtacttcctgaggtccacatcctgatacgggtcccgatcgtcctgtggcttgaagcaaagcacgcctttgactgcggggacaaagagagatcgtgggctgcactggctcgctgcaactactacatcggcatgtgctattcccacgagacgcacaacgaacgctcatcccgaggtggaaagaactcttcacggtattcaccttatctgcgcagcatggttctagagcgcttgagagagatggaagacaaatcccgcgctacgaagcaggacatctgggaagagattgttccccatatggcctctttccgagcccccatttccgaggagctcaacaccgtctcggctacagccaagaagaaggctgagcctgtcgacaatgcgtccaatagtaatggctcgacgggcaagagcgtctatggaagaagtcagaatccgaggcaacagctcagccgctggaccaatggcgacgaggaaatccgcgccgagttcgtacgcgtggccgttgcagatctcaacacgcgagccaagcgatcacccaagtcaaaggcgcctactggcgacgaacctcaaagcaagctcaaggcctag

SEQ ID NO: 508126 - DNA, 636 bp, Stenotrophomonas maltophilia
atgaaccgcgcgatcgcgttgatgtgccgaattgccttgctgcccacagtccttggattgagcgcctgctcccattggattgggatgcccaccgtggcgccgcccgctgccacaaccaccgaattcgcagacgggcgattctggctgcaggaaaaggatctgagctaccggatcggggacacccaggagctgatcacggtaccggccgggttcgtgcatgacggagcgtccatcccgagaattcttcacatcgccatccccaaaacaggttggtatagccgggccgccatcattcacgactacctgtactggtcccagctatgcacccgggagcaggctgacaatctgatgctgatcgcgatgaaggagagcaatgtctccacgattgatcgcgtcgcaatccacatggcggtgaggaagggaggagaaagcgcttgggaggagaacgcccgattgaaatcgacgggcataccccgactgatccccagcgcttaccgggaccttcctctgaacatcacctggcctgtctatcagcagcgcctgtatgagatgggcgtccgtgatcctgccgcgacgcctgcagcaactccggcctattgcgcgatcggaagctcaactcacgtgccgggcggctaa

SEQ ID NO: 508127 - DNA, 150 bp, Stenotrophomonas maltophilia
atgcatctgatcgaagcattggcccgtgctggccgcaagctgtggaagggtctgggtcgcaggaagcccgggcgggagtgcgctcccgcgccgaccgacgtcgccgtgtgcgtcccgcaggcagaggcagtggaaagggggggggcgtag

SEQ ID NO: 508128 - DNA, 510 bp, Stenotrophomonas maltophilia
atgcgcccgcagttgcctgtcgatccgttagatcgcagtcaatgtgtcgccatggaggcggcagccgtgctgcgggatgatcgggccattgcacgcgcgctgcgcattctggcgcggcgcgcctgcaagccgggccaggcgatgggggacgtatccacatgcggtgcgttcttccggctccgcttgggcaatgagggcagggagcccttcgaggtggcattcctcgatgcccagcatctgctactggtggtggagcgactgttctccggcacgatcgatggggcgcacgtgtcgccgcggatcgtggtccagcgggctctggctctgaatgcggcagcgatcattctggctcacaaccatccaagtggcagttctgagccctcggctgcggacaatacgattacgacacagctgaagagcgtcccgcagttggtgggtgtcaggttgctggaccactttgtggtgacggcagctcaggcgctttcgatggccggtcgagggctgatgtaa

SEQ ID NO: 508129 - DNA, 1944 bp, Stenotrophomonas maltophilia
atggacgagaaccacgacctgttctttgaagcccgattcctggatacctacgctggatccatcatgacggatccggccacggcaatcgtagaactggttgcaaatggatgggacgcatacgccaccgaagtcgagatcctctggccagacgctgaagccgccaggcaatttatggtgcgcgataacggacatggcatgacgctggaggactttagacacatctggcgatacatggcgtatgaccgagtggcgaggtcaggcctaacgaccgctcccccctcaaacgtggatgggctgccgcgaccagtatttggacgcaatggcaagggccgtttcgccagcttttgcttttccagcgagtacctagtcacgtcgtggaaggatggcgaaaaattcacttgcagagtgaaacgctcgccaaccgcgccgcttgtaattgaactaatcgagcacaccgaaagcggcgttccagggcatggtactgagatccgaggctgcggtgaggtcgcgcagattgggctggatgaggcaggggcgcgagatatcatcggcagtcgatttcttgcggatccagggttcagggttctcttgaacgagaggctgatttcatttgctgatatctcaagtcaatccctctcaacaacgtccttaaccattcccggtctaggtgatgtgacgattcaccacatcgacacccggaaagccgataggacgacgaagcaacatggcatcgcgtggtgggtacagcgcagggcagttggagacttcggttggcgcggaagcgatgttgagcgggtcctagacggcagatcatcggaggcaaagcgcttcaccttcatcgtagaagctgacttcctgaaccaagccagtgcggtgaaggctgactggtccgggttcgaagatgacaactccgcttggaagtcagtccagccagtagtgcagcagcgcattcgagacatcatcgatgcgacaaaccaagccgctcgcgagagcaagagaactaacgtctttgaccgcgtgggcagtgcagtcaacaccttggctccgcttggaaaggaccgtgtgaccgcctttgtcaatgaagtggtggataactgtcccaacttcggtgaaatggaaatcgtgcaactgactaccatcttgaccaagttggagaagagcaaatctctgtatggtttgctggacgtgcttcattctcaaagcccggaagactacgacgccctgcatgagatgttaaccgagtggacagttggattagccaaaattgtgcttgacgaaattcagactcgcctacgcctgatcgatgagttgaagaagaagctggacgaacccggtgtagatgaagtccatgagctacagccgttgtttaccaagggtctatggatgttcggcccggagtttgaatcaatcgagttcacatccaaccaaggtatgaccaaggtcattcagaccctctttggagccaaagaaggacgcggaagccgcaaccgacccgacttcgtagtactagacgacagcagcgtaggcctctatgcgcgatcatcttacgacgaccagtcgaacgaagacggcatcgagcacttggtagttatcgacctaaagaccactggcttgccactaggatctaaggagaagggccaagtctggaagtacgtcaaggaactccgggagcgcgggcaccttcgtccgacgactaaagtggacggcttcatccttggagaccgtatcgagccaggcgaggctgagccacgtaatgaaggagagagcgtccgtatcgttccgatgctctacgacacgatcatccgacgagccgagaagcggttgatgaacctgcacgcgaaggttcggaccgctccgttcctcgaaggcagccaagtctccttggagcaatttttggaacaggtccccattcatcaacaccaactacttgactccgctcgatga

SEQ ID NO: 508130 - DNA, 225 bp, Stenotrophomonas maltophilia
atggctcgaggcgcgcacgaaactcagctagtcacgatcttcgccagcaatgtcaggcgattgaggaaggagcgtgggctgtcgcaggaggatctggccgaggccgccggtgtccacaggacttacatcggtatgatcgagcgcggcgagaagaacgtgacgatctacaacatcgagcgcatcgccctagcgcttgaggttcgtcccggcacgcttctggattga

SEQ ID NO: 508131 - DNA, 348 bp, Stenotrophomonas maltophilia
atgggaactgtcatctacaaccttgtaatggccttcctcctcatcccgttgaccattcgggcctatctaagcctgaagaatgggcgtcttcccctgcctcacttccagaacaacatcgtcgtcaaccgcatcaagctgcagaaggcgatcggaaccctctccccgatcatcttctgggtcttccacatcgcctgggtaatgtggaacctctcaatcgacgcatggcttggtgcggcgactgccgtcatctacatggtcgttagtgcaatgctctccggtcagatcaaggagaagcagatcggtgtcattcccgagaaggctggggctgcagacaacaaccagggttga

SEQ ID NO: 508132 - DNA, 846 bp, Stenotrophomonas maltophilia
atgcatatctacctggatcgcaagatccttgaaagaagcgatcttgctgattgctgtctcttcaccggtgttgttcccgcaaaggaaacgcaggagcacgtgataccaaagtggatgattgtcgcgcacgatcttcatcacaggaggcttgagatgtgctccccgagcgcgattgcgaagatgagggagttcagggtcaaggcagacgctgacagcaacgagctctttggtaccgtggagaaccggattagcctgggcacggccagccttgatgagatccacctgtggcataagaagatatcggcaggtatgacactcaggcactgggctctgtcgcgaaacacgagcaatcctatggcgccttctccgcttgacgaagctgccgcgccgatggtgctgatggactttcagtcagattttgatagctttcggcagggtgcttacgtgaggactggatccacgatcagtatggattcacctgttgccgatggttggcttgcccatgtgattggatccgttcggaaagagacagagcacaacttccagcaccgtccttttgccctggtgggtacgagcgtttgcaagtcgcttcatgtgtcaatgctgcacgaccttggccgtgattttgagaaggcggcagttgccgggcgatggcaggaaaagctctctgagtgcgatagtgtgctgaagcttcagggcgctctggctggggcacttaccacagtcgtcgacgaatggacgaaacagttgaacgggggcactttgctccagtccatgtaccagacgcttgcctaccaacttggcgtggagatcagtaaggaaggggcgtggcgggttcgtcaatag

SEQ ID NO: 508133 - DNA, 1272 bp, Stenotrophomonas maltophilia
gtggcgggttcgtcaataggtcttgctggagcgcgccaggcgaccgagctcatagcgtggcatgacctggcggtgacctcgcttatcatgatgagaagcacgctgcgcctcgcagcctgcagtgcctatggcggcaaagtccagctgatcgattacgacggtctgtacgttgattcgctcaaaggcgctaaggcgaccgagcttggacagctcaatttccagcaccctcagcggtcagccaaggactttggccccacactgcatcggttctcgtttctgacgctggacgtggcactccaggtactgatttccgctccatcgatgtgggcatctacacgctcagagcccagcgctgtggttttccggcgcaatgacttccttgatcctgctcagtcagcctccttccaaggggcagtggccattccgggcgtcaaggcgtatgtggagaacctggccaaggtggctgctgaggcattctcggccgttccgtcactaggcgatttcctgctgggcaagggagttcctgcgggcccgatcgtcatcagatccgtaccgcaagtgcttgagtaccaggggccttacgtggtcgctgatgcagccaactacgcgcaggttctacagatggtaggaactcgcgttgagctggtcggacgcgttcatcaggttacgcatcaacgcacaaagagtggtaagcccttcatcttcgtcaacttcgcagattggcgggggctggcggtcaagccttcaatctggtcagagggcatcgatgccataaggcccaatctacccgacaagtctttggtggggcgctggctatcggtttcgggattgatagatcctcccttcagtaaaggctcccgttccggtggctacacgcatctgtcgatcactatcagtacgcctgggcagatccagacgccagcagagaaggatgcaaagtcccgcctgcaggtggcagggaaggctgtcggtggcgcctcggtgacggcagccggtcgtaatgcggatattctcaaggaaatgggcgggagagccacccggccgaaggttgcggccgtaatgcagcccccacccgcacaaccccagagtcgcaatcagtccattctgggtagcatgcaacggcagtctccagctgcaggccccgcaccgccgcgtcagtcgcccatccctaccaaacctcagcttggagccacttcctccaattgggtatgctggccagttgtcctgatcgctgtattcttcctgctggcgctaagggcatgtgtagcgtag

SEQ ID NO: 508134 - DNA, 618 bp, Stenotrophomonas maltophilia
gtgattcgggacgacctcagcagcaaacttgttcacttggtccgtggcgagacgatcgaagactcatcacgtaagtttgagaacatcctgaccgaagggcgtcttaggggaggcactggatacatcaagggaaaatacacctgcgtgtgcttcaccgaaaccccaatcagcaagctcggctacgttcttgctaaccctgacgtagcggaaatgcgctaccgaccactcggaatcatggtcgataaagagtacgtcttcaggaagggcggccggcccgccatctatcagccagatgtcgactttcagaagctcccagaggagctccgatatcgacatgtcaggttcgagcttgatcgcgatccgccgcattcttccatcgatctgacttgggagcgagaatggagactgcatgcagacgagctcatccttcccccggaagctacaaccgtgatcgtgccaaagcgcgattggcgtgacattctggtcgagcgccacgcgaaggacgttcagcggcaagtacagggaattggcggcgatgccgccctggctgtggtgccctatccgtggcacatcatcgtcctggaggatctcggcataccgataccggacgggctatga

SEQ ID NO: 508135 - DNA, 2223 bp, Stenotrophomonas maltophilia
atggagaagcacaacggtatggccaatgagcacgataacttcggggatgatcttccgaagaaggacccttggagggaggaccgactcggggtcgcctcctttgcagaacgaatttccaaggtcatccagcagaatcgggcacccaacggctatgtgattggcctgcacggcgcgtggggaagcggaaagtcaaccgttcttaacttcgtcacagcctatctagcgaagttcaatgaggctgctgacgccgccgataagatcacggctatcgattttcgcccttggattgtctccggccatcaggatctgatcgctacgttctttaagctactcgcagagagtcttgggccacgggaaggttggtggaagcgccgatggaaatggatgatccgcatcttcggctttgggtccgacaagctaatcgacgcagcggccacactggcggtggccacagttccgccattcggaatcgcatctggcgctatcggcgcagtgaccaagcggtctctaaacagcatgatcgcccgcttcctgcaggagccatcgctacaggttgcgcaccagcagcttgtagaccaactgaagaaaagtggccgcaggtttctgatcatcgtcgacgacctcgatcggctcgagggaagcgagatcaaggaaatcatgcgaatggtcaagaccattggccatcttccaaacgtggtctacctgctggcctacgacaaggagattgtctggcgtgcagttggcgacgacctcagtcgtgacgctcccaggtttgccgagaagatcgtgcagcaggagttggaattgccgaagccatccaatgctgcactgttgtcgatcctctcggaacggacgaagttcattccgcaggcaccagaaggctccatgcgctggttctacatcgttcagtacggcatacagcgctgggtcaagtcgcctcgggatgtggagcgcctgggcaatgcggtgggatttgcgtggccagcctttcagggtgaaattgaccctcatgacctgctggccttggaaggccttaaattgttcgatacagcagccttcaactggattcgcgacaaccgcgacttcctcttccgcactggcgtccatcaattgtctcaagacgtggagaagaaggaagctgtcgcacgactcaaccagcggctacctgaatctagccgcagccaggtcttgcgcatcatcactgccctgtttccacaggttggaaaatcgattggagagcggtacagctatagcgatgaatcacatgtagaagttcgcaagcgtcgtggtgtcggcagcgaggccggatacgactgctacttcgccttgcatccatcgcgaaacgcgataccaaaggccgagatcgaccgagcaatggcgtgtactaatgaccctgacgcaatagaacgcgcgatccgcacctatcttgacaggaagaataaccaaggcgaaccgatggttggcgaattcctggatgagttgagattgcggttcatgggccgctctcctgccgaaccaacccaggccatactcgatgcactacttcgtgtaggcgatgaaatcgtcgtcctggattgggtcgaacgcgagtttgagttgccgccacgagtgagaatttggttcctgatccaagagcttcttgaactttggggaacacaagcagcggggcaacatctgcttgaagctttccgaaagtcgaacagtacttcgttccgcgccgacttgtacgtctcgtgcggccgagcgatcggcgtgttcgaatcagattcccgtcacattgcgctgattagcgaagaagactttgaggcgctcgggcagcagctgctgcctgccatactagcggaggcaaaggaggggacactggaacgcgcgccctactactttgacatcatcagggcgtggattcacctgggggactctggcgacgcgagaacgtggatatcagaggggttgatgcgtagtgccgagttcatggcaaaggctggccaaggactcctgacgcacaccctcggcaggcgagttcgtcactatcgaatgcagcaggcgcctgatccggccatctacgatctcgaacagatcctagcagctggtcggaagcacctcgcccattccacgctggacgaagacgcacgcaaagtgatatcagcactggtgattggagcggaagagttcctgtcgcaacctttagtccgagacccctcggctatcgaagccaagccctag

SEQ ID NO: 508136 - DNA, 213 bp, Stenotrophomonas maltophilia
atggatctccacggccatctcaatcagtaccatggaaagattgcatcgctgcactcccctctcaccaaggaatgtgaccttccacaatcttttctgatggagagccagggaaggtacgagatctactacaccccgctcgacttcgtgatttgcagcgcccagatcgtgccggtttgcgcgagaatgctctactcaggggtactgatgagctaa

SEQ ID NO: 508137 - DNA, 963 bp, Stenotrophomonas maltophilia
atggcaacagcaattctgacttcgccgacggacatccgtagggccatcaagcgagcaattacgaaagcgccagcctgcatcgcagttcccttctggggccgccatgctttggaggcgcttgggctaaacaaacgtgattcgaagggcgttcgtatcctatgcaacctctctgccggcggctgcaaccccgacgtgatccgggcgctgatcagccttggcttccaggtgcgcgcactcgagtctctacatgccaaggtctatctgggtccgaagtcggccgttctcggctctgccaacgcatcaatcgacggtcttggcctggataagaagaaccctggctggaatgaagcctgcacagtcatcgacgaccccgatgccgtcaaacagctcggagattggtttgagctgttatggaaagacgcagcggacctctccaagccacagactgcacaaatcctgctcgaacaagccgatcgagcgccaccagctcttcgggtggaccccgtcgacctgctgagcactctgaaggccaacccacaggcatttgtgcacaagagcctgttcatcactctcgactacgagccgtacagtaggcatgtcaacaagaaggtgaaagaactccagaaagagctggggagcggcatcgatgcttgggaaggctggacgggtatgccgccagctgcagaaatcctctccttctactacgaacagcacactggtgcaatttcattcgaagggatctatcagagtccgaaggatcccaaaggatccatggatcccgagacgaagggaatcttcgtgacagaaacacggcgagcactcggaacctacgcaatgggtgacctgaatgcatggatcgaggcggtcgagcactggcagcaagccgtcttcgtcgatggcggagcgaaggatgaagacctcgttctcccgcttggtgatttcgccacgaagtactttgtctag

SEQ ID NO: 508138 - DNA, 846 bp, Stenotrophomonas maltophilia
atgcgacagcgcattgcacggaaacgcgtcctggccacaacggtcgttctatcgatggttgcggtcgtagcgctgctggccagcgtgcgcccgcagtggcggcgggaagtcggcccgccgccgatcaatctgggaacggcacggatgcaggccgaagtgatggcagagctcatcgacctgcgaccgacaccgccaggaaagccgccggttccaccgactccaatgaagggagtctcctccccgatgctggccggtaacagtgggttcgtgaccgcagcggtgcggttggaagacgtcgcgccagcacccttcgagccgcccagctgggagcccgacattccattcgctgtgatggaatggactgcgccttcctgcggtgaaggatatcccgccccggtctgccaggttcgtcacagcgtcgtcgagtggcgcgatgatgacagtgcggcgtcctttcaactgcagcagcatctggagtcgatgctgcaggttgcgaaccgccgggcttcacgggtacccggtctcgcgttcgagcttgcacacgtgcgggcgcaacggatgacgtgggacgagcttcagcaacggcgcgcgcgcggtatcgagggatgcacgggtggcccgggcaatccggatctgggcgttgtctatctgcagcgtcctgtgttcagcctggatgggaactgggcaatggcatcggtcgcctcggatctgtgcagtggaggaacggcgatgcgtgtcctctaccttctgcatcgcaggaagggcggctgggagcgtgttcgagtggagcctgtccgccatatgagctttggacagggcctgtggcccgcgttgccggagtcgtga

SEQ ID NO: 508139 - DNA, 2211 bp, Stenotrophomonas maltophilia
atggaacgtccctcagacttctttatcttcaacttctccaaatccccgacgcagaaccattgcttcgtttactcccccgatccgtctaaattcataaaatcactcgatagcatagtgcttgcagtgtacagcggcccagacatacccgatgtaattgtgctcatcagcgctggaaaatctggctccaacattgcagacaagatcaagaacgattcagaccaagccgcattggacagaattggcggaaaggcttctctcttcttcgcatccatagacattgcgtctgggaagatcgactgccaaccaatatcacaaagcaaggacagatccccttccatcgagaaacttcttaaaggaatgagttgggccgaggagggattatcctccattttcggagaggaagaggttatcttggttgcgccaccgggatacacgtatcacaagccatccggtgaatcgtccacctttttcctgaagccagatctagcactcagctcctccccaatatcatcctttgtcgccctgtctattgccattaggttctttttcacaaagaagcaaaagatttcagatacaaagacaatatttgtcgacacaatggcaatatcttccgtcgcctatgcacttagggatatcctctcgacgagcggcggaccgccaggcataaccattagcagcttccattcgtacggaggcttcgatgaagtcaaaaggcccatgcgcgggacttcgatctgcttaatatcagcatcctcttccatgtcactgcatgacaagtggatatctgacaaaggtgtgagcgatgaggacgttgtaactctcatcaccttgagcatggcgaagcgagcagacagagcgctatacgcgcttccaggcaaaaacatcagccagacgaaggagcccgccaaggtcagcatccgaatctctggcgagagcttcctgcctgcacaggaaccgcataaaaaagttctgatcagagccgaaccattcctgaaagatttgccggtgaattctgcattcaatctggcgggatcaaacgtaatcgacatattcagaattgacaaatcccgccccggaaaacatcgggcaatttacatcgacggcgtcaaactcactcaagtagtcgaattcacgcaatggcttgatggcatcgtgaggcatttcgcaagagccacaacgaaaaaaatagtataccaaggagatgaatcctctagagcaatggcggaactaattagaaatacattcggagaattatcagactcaaccattgatctagttggcgagcgcgagattgatgcggatagcatttgtagaaaaagcgccattattgtctgcgccgccgttgtcgggaaaggatctagactccttcaaattagcagagcccttcgcgacatccacgaaggcccgcgcctatatacaattggataccaagtggcagagtcggccagtgaagtagctacgcttaaatcaaacattaggtatagcgagcctcatttctatgacttcgaatgctatggctcaattgcaactggaacacaactcctgagttcgttcgttcaagaggctagcgatatcaatctctggcccaaggcggaacctacgcctcttcctcgaatccaccagcgcatcgagaagattcgccaaggcaagccattgggtagcgacactcttctcccttcaggagcaaaccatcaagacagcatgtcaataaggaagggctttgcattctggccagacggatacaacccctcgagccttcaaccagaattgattttcactatcgcggccattctgcagagatctcgcgaagactcgaagcttagcgaacgagatcaattgtcatcaagaacgttcagacaggttcttctcgccccagagaacttttcgcgttacaacgatggaataattcagtccgcgataatcagatgctcgcacccctcggaactcgactacagctcagaccatgcagctagcgatttcatgaaacacctgataatcaggtcaattgagtcatccgactcagattctggagagtcctcactagagttcgttcttgcgctttactttggccgcataaaactagtttccactcacttcctcgagataaaatccttaatcctgtccagcaagcatcaacacgaccccgcaaaggcgatgcgctggattatggataccgagaatagaaaggggaatattgccgaggatttgtag

SEQ ID NO: 508140 - DNA, 1155 bp, Stenotrophomonas maltophilia
atgcccagcctacctaaaaactcccttgctccaaatatcgagaaatttctcagcgacgcgatcgccaacaatgccaatgaggtatccacaccaatatcgctgtacttgggtggaggactgggctgtgcaccgcaagcagcccaagcgattgccaggatatcaagaaattccgccacaggactcaccttcaaaacggccagagaatttcttagccttgaatccactgcggacagactaagctcgacacttcacggaatggcatgcctctattttgccgactcagtgcaatctggcgacatcacaattccacgccgccaagcactcaggagcctgattcctcgagtgaacgcaatgaataccgaagcatttgagaacaccacaagagggcaaggcgtgacgctctgctgcttctctggagcaaggcttgagtttctctctccactctacagcaaaacagagagcagagcggttcgcaccgaggcggaatttgaactaataatcaggagaatcacaaagaggcttggaagaaccgcggcaacctcaatggttgatggccaatacgtttatttatccaagctcattcatcaactattcctaaattcagatgaacatggatctttcgatcttggcgggcaaccattaccaacatcgataagaggaattaatatccgggtaaccgccctaggaagaatagaagaggtggttaatgaagcaaaaggagactctgcacttcaaacctatcttgcaggatcaatccttagcaacgaatttccctcaagcgataacccgaccctccttgaactaacagtatttgatacaggcgtagggatgggcctaaattggctagcaaaacgatccaacgctagcagctacagcgattttacgagggacgaggaagcagcagcagtagaaacatgcttcaagaaacatgccacaacgaaggcaaaccatgttagcggacagggtttgccaatagttcttcgctcactacgcaacttaggcgccttcatgaccctaagaaccggccgagtaagtctttaccaagacttcaataagaaggacatagatcaattcaatccaaccccgcgattcaaaaatgtagaattggaagagacaagcggaacctctttcacaatttggttcaggatcaaatag

SEQ ID NO: 508141 - DNA, 231 bp, Stenotrophomonas maltophilia
atgccgcagcaggctccgcagccgtatcagcagcctggtgcggcgcagggcggggcagccatgccgcaacagcttcccgggatggctgccggcgcgaacgcgccggtgatgctgcgcccgtggaatgagcgtaacgcgccagcagcggacacccagaatttctacaacgcaccggcgccccgtgcgccggtgcagcagattcccgcaggggatgcggccttcgtgttctga

SEQ ID NO: 508142 - DNA, 363 bp, Stenotrophomonas maltophilia
atgaagccacatccgcttgccagcagccgcatgagcgaactgcaatggagcgaggtcaaacgtcacctggccctcccgctgcgcgcacgcgtccaccgccgggatgatgcctatcggcaattcatcgaggccgtactttgggttgcgaggggaaatgccccctgggccagcatccccgaagaggccgggccgtggcgtccgatctatgtccgctatgtccgctgggcggagttggggtactgggccgacgtttgtgatggactcggggtgaacagccccctgggtgcggcgctgcgcgcccatgtagagcgcagccgggcccgcagtgaatggcggcagcagcggcgaggcgccgtttcctga

SEQ ID NO: 508143 - DNA, 1689 bp, Stenotrophomonas maltophilia
atgaacagaattttcagcaaagtctggagtaaggcgctgggcaggctggttgtagcgtccgagctggcgtcgcgccagggttcgggtaccagccgtggtgccacggtttccgcagggccgatcaaccgaagcctgctcggtgctgcggtggttgccgcaatgatggggctgccgaccgaggtgctggcaggtaatggtatccatatcaattcgggttccgatggcgaatgcgtgagcatcaacgagccgggatggagcccctttacacagacccagacgcagctgctgaacaacaacatcaatttcaaggacaccgatcccaaatgcggtgcctttccgaactcacccaacggagtactgttttatcgtccggcggcagtggatggcgtgggagcaacatcactcggcttgggtggggatctatgggtcaatggaaaagtcagcctgaacccgactggtcttgccaggatcgacgtcaaaagccttgcatttggtctcaatgctacggcgactaacgctaacgattgggcaattggtgaaggtgccaaagcggactccgctgagaagagggacgcggaaaccggcgctgccggcaacgccttggcaattggtaacaactcgttggccgagcacacggaagcactggctttgggacttagcacgagagcgcgagccccgctctcgactgcagtgggccgcagtgccagtatcggtgccggcggtcactccgcaacagcagttgggcgttttgctcaagcaaatgggcacagcactaccgcaattggtcgtgacacgatcgcacgggccgagcagtccacggcggtcgggtatggcgcgagaaccggcaacaatgccagccgagccgtggcgatcggtgcgagtgctcaggcgattggattggaatcgctggcgatgggtagcggcgcaatggtcagcgccgggatgaacaatgcagttgccattggcaaggattcacggggtaacgccgccgacacggtcgcgatcggcgtcggggcggtggccgaacacttcaacagcgttgcgctcggtacggctgcgcggactgctccgcatcgcgttgtttcgccgacggacctcaatggcacacgctacaacttcctgcccccgggccttgcagaagcgaatgtgaatggcgtcgtcagcgtgggcagcgaagccgtatcccgacagctcgtcaatgtcgctccgggcgtgctcgatgcgaccagctacgacgccgtcaatggctcgcagctgtttgccgcgtatcaggaaatcaataagttgggtcagaaggacgtagcgctggctgccaaggacgccgagctggaggatcgcctgaacaaactgcccaagggcatcgatggcgcaacggtggcagcggcaatcggtccaggtacacaagtggatggtaatggcaggctttctctgccgcagctggcgctcaagagcctcggtcgacaacccgatgacgtcaccgtcccggcggcgcagccgacgtcgctgctcggcgccattgacgcgttggatggggagatggtcaagataaacggcgcactaggcgtgctgttcgacaatgcactgctgtggcatgagaccgaaggtgcgtactctgcccaaaaaggcgctgcccccggagccaatcgaatcgccaatgtggtgcaggaaccggcacgcaggacgccgtga

SEQ ID NO: 508144 - DNA, 3141 bp, Stenotrophomonas maltophilia
gtgggtcagttgcgggaggtggagcgcaccgcgcaggacgccgggtcggcggcgtccactgcccagcgtgctgcggacgccgcgcaggccaccgccgacgaggccaaggcggcagccggttcggccagcacgcagctggcgggtatcggcccgcaggaaaccgtcgccggccggatcaaggatgcgggccagtccgtggccaatgccctgggcggcggcgccagcgccaacgccgacggcaccgtgtctgcgccgtcttatggtgtggctgccatcaatgccgatggcagcatcggcgaggtgacccagcacggtaacgttggcggcgcgctgaccgcattggatcagaacatcggcacggtcaatgagcgcgtggatggcctggcgcgtgacagcctccgctggaacgaagacctgggcgcctacgatgccgcccgtgatgggcaggcaagcagccagatcgccaatgtcgcggccggtgtaaaaacgaccgatgcagtgaatgtcggccagctcaacgtggtggatcaggctgccaaggtggcgcagtcggcggcccaggccgcgcagtttacggcagacggtgcgcagcgcacggccgacggcgcggcttcggcggccagccaggcacaggcaaccgccgattcggcggcgagtgctgctaacgcagcggctgccgatgctggcaatgcgcagcgtgcggcggacgcggcgcaggtcactgccaacgaggcgaaggcggcagccggtgcggccaatacgcagctggcgggtatcggcccgcaggaaaccgtcgccggccgcatcaaggatgcgggccagtccgtggccgatgccctgggcggcggcgccagcgccaacgccgacggcagcgtgtccgcgccgtcttatggcgtggctgccatcaatgccgatggcagcaccggcgaggtgacccagcacggcaacgttggcggcgctctgggcgcgctcgatcagaacatcggcacggtcaatgaccgcgtcgacggcctggcgcgtgacagccttcgctggaacgaagacctgggcgcctacgatgccgcccatgatgggcaggcaagcagccagatcgccaacgtcgcggccggcgtgaaaacgaccgatgcagtcaatgtcggccagctcaacacggtcgatcaggccgccaaggcggcgcagtcggcggcccaggccgcgcagtccacggccgatggcgcgacgtctgcggccaaccgggcacaggcaaccgccgattcggcggcgagtgctgccgcggcggcggctaccgatgccggcaacgcccagcgtgcggcggacgcggcgcaggtcactgccaacgaggcgaaggcggcagccggtgcggccaatacgcagctggcgggtatcggcccgcaggaaaccgtagccggccggatcaaggatgcgggccagtccgtggccgatgccctgggcggcggcgccagcgccaacgccgacggcagcgtgtccgcgccgtcttatggtgtggccgccatcaatgccgatggcagcaccggcgaggtgacccagcacggcaacgttggcggcgcgctgaccgcattggatcagaacatcggcacggtcaatgaccgcgtcgacggcctggcgcgtgacagcctccgctggaacgaagacctgggcgcctacgatgccgcccatgatgggcaggcaagcagccagatcgccaacgtcgcggccggcgtgaaaacgaccgatgcagtcaatgtcggccagctcaacacggtcgatcaggccgccaaggcggcgcagtcggcggcccaggccgcgcagtccacggccgatggcgcgacgtctgcggccaaccaggcacaggcaactgccgattcggcggtgactgctgctgctgcggcggctaccgatgccggcaatgcccagcgcgcggcggacgccgcgcaggtcaccgccaatgaagccagagcggtagccggtgcggccagcacacagctggcgggtatcggcccgcaggaaaccgtcgccggccggatcaaggacgcgggccagtccgtggccaatgccctgggcggcggtgtgaatgtgaatgccgacggcaccgtgtctgcgccatcctatggagtggctgccatcaatgccgatggcagcaccggcgaggtaacccagcacggtaacgttggcggagcgctgaacgcattggatcagaacatcggcacggtcaatgaccgcgtcgacggcctggcgcgtgacagcctccgctggaacgaaaacctgggcgcctacgatgccgcccatgacgggcaggcgagcagccagatcgccaacgttgcggccggcgtgaaaacgaccgatgcagtcaatgtcagccagctcaacgtggtcgatcaggccgcccaggcggcgcagtctgtagctgacgcggcttccagcgcagccgatggtgcgcagcgcacggccgatgacgctactgcccgggcggccacagcgcaggcgacggcggatcgggtcggaggtgtggcaagcgctgcgttgcaggcagccaactctgctggcgagggtgtcatccgcactgcggcggaggtggagcagacccggaatcagatcgtgcgcggggaaatcgggttggttaaaaaggatccgcagagcaagtcgctcacgatcggaaaagacacgggaggcaacgagctggatgtcagcggccacgaaggtggtcggcgggtgaccggcatcgctgtgggccggatcgatgatgccagcactgacgcggtcaccggcgcgcagctcaacgctttggacaagcgtgtgcagcgtgcagacgcgctgggtgagggcgtcgcagtggacaggccgagctctgagcagcctgcagcgcgggccgaggttggtagcggtgcggtcgcggtgggtgcagggacctccgcgagtggtaccggaagcgtggcggtggggcagggtgctgcaaccaccggcgcccaggcgaccgcgctgggcaaggacgcggtcgccagcgcgccgggcagtgtcgcgctgggcgccggctcgcgtgccgatcggccgaacgcgctttcggtgggggcggccggcgcggagcggcagatcacccatgttgcgcccgccacgcgtgatactgacgcagtcaatctggggtag

SEQ ID NO: 508145 - DNA, 147 bp, Stenotrophomonas maltophilia
atggccgggtcgacttatggtggtgagtctgcagtcgcgctcggcttttctgcagtctccgaggatggctcgttcatgctcagggcatcgggttcgaccaccacggaggaccatggcttcaccatcggtgtaggcttccagtggtga

SEQ ID NO: 508146 - DNA, 2925 bp, Stenotrophomonas maltophilia
atgagcacgccatggcccatgggtacgcaggcgctgcaggttggagatctgctgatcgatctccgctttcgccgcatcgtttccgccgagggcagcgttgagctgcagcaccggatctttgatctgttgttgctgttgatctccgagccggaccggttgttcacccggcaggagctgtttgatcggctctgggcggggctggtggtggatgatgccaacctgtcacagagcatctggttgctgcgcaaggcgctgggcgaatctcgccgggagtggatccgcacggtggccaagcgcggctatgtgttccagccaccgggccccgtgcagtggtttgattcgatgcccccggtcagcgatcctgcgcagatcgaggcagcatctgatccagaggccgccgtccacgcggcggaggccaacagcgttaccgaagcggttccggaagccgaccacgatgccgatgcggcgccggccaacgccgatggcgatgctggcccggtagcggccgaggccccttcagcaccagcgacccccgaagaacccggcgttgcaccacttgtgccgcgtcgccgcaggcatctatgggtgacggcagcggcggcgctgcttgtggttgttgccggcctggcactgtggaccttctggccacgtacggattccccggtgacggtggccttgatgccattgcagtccaatgccggcgctgatgtaccttgggcgtcggaactactggtccaatggagcagctggaaactgcagcagctccccgaggtgcagctgctgaatggcgaggatctggcgcagggcaaggccttgcccccccctcacgtggtgttgctcagtgcggtgcgcagcgccgatggcaagcatgttgtattgcgtgcccgcgttcagcggaagggccgcgaccagatgctggagagggaggttgccttggccgaagcgcctgcggcgattgatgcgttgtcacgggagctggtcactctattcgtgcctgggccggcagatcgttggccggcactggaagtggacagcaccagcgcccagcagtatgccgtggctgcagccgccttcgaccggggcgactggcgcggtgtgcagcaggcggcaaaggaggtcttggccggtgcaccacgtttcggcctcatgcaccttcagctggccatcgcccagtccaacctgggcgagaacctggaggcggtgcgacacatggagttggcgcgcacgctgctggcgccgttgcccggcaacgcggctcgttcgctggaagcgcgccagctggagatggatcccaggcgggcgcgcgacgcggaaacagccctgaaggacctgcttcagtcgtacccggcacatgcgccctatcagcgccggtatgtgcggctgttgatcgagaccggacagttccgcaaggccatctcccagctgggagccccgacggtggtggcggatacttccgtgacagcgcgttaccagcgcgccgtcgcctttgctgatgcctattacgggcttggcgagtttgagcgttcgcgcgaagccgccgcttccgcacaggccatcgccgaggcagcgggcgagggcatgcgtgcacaggcagccgaagcggcgctccagggagcacgggcaatcgccacgatggagccagccaagggggaatcggcctaccagcatgccgcgcagttgctgcaacaggcgggtataccgcgatatgcagagtacgccgaggtgctggcgatcgtgcatgcgggccaggcggcccatgacaatacgatggttgcgactgcactgaagcgcgccatgcgcagcggcgatctcggtctggcggcagatatccaggtgaccctggccaatctcagcactgatgctgaaagtcgcctgcgctggctgggtgaggccctgcagacagcgcagtcgctcggaaacctgaaccttcaaggccagctggagatcgagttggccctggaggatctccattcgctgcagttgacccaagccgagacgagagccaggcagatgcaggcgctgggcctggaagggattgccggtattcgcggcaacatcctggtctcgcgcgtcttcgagatgcaagggcgcctgcgtgacgctgaacaggctgggcgtttggcgctgcaggcttcgcccgccgtcgcagagggcgggaaccccgaccgttccaatgccgcgtgccagcttctgcggatcacgaccctgctgggttccggtggcgatccagaagcacgtgctggatgcggtgagacggatgacccgaattcacgctttattgccacgttggccaaagcctgggtggcactgctgtcgaacgattccgcctcggcgcggcagcattacgaagcagccagagtgatggtcttccgcgaaccgggcccgcagacggggtgggatccggcgctgccgatcaggcggatgcaggtggcggccctggcgctgcgagtgggtgatctggatacagcagcgcggctgatgggcgaggtgcaggccgctgacgcccaaggtgatctgacaccgctggaccaggcgttactggccgtgctcggtgccgagattgaagccgttcgtggacaatgggcggacagccgccgatgggccgaccgagcacgtgagctgcttccaggcagcgagcgcgagttgcggcaacgcctggacctgctgcagattgccgatgaccagcatcacggccggcgcgaccaggccttggctctggcaaagcggctccagacagatggccggcgtgaaggtgacgttcacctgcagcacctggtggccagcctggtgccttcactgggctcgggcgacatgcgtgaccgtgtttccctacgcggcgcgacgatggcctggctgtccagggcagagcggaaggacgatgttcgcccgaccgtacagccggttcgcgaggctgcggctcaatag

SEQ ID NO: 508147 - DNA, 846 bp, Stenotrophomonas maltophilia
atgtccaatcccgccgcatcctttcccggtccgcaaccaacccttgaagacctgctgcgggcaatcgacaacggccagctgcacctgctttaccagcccaagctggactgttcgaccggccagacggttggagccgaagcccttgtgcgctgggctcacccacggctgggactcattcccccggcccagttcatccagatggctgaacagggcggggtgatcgatcgtctggggcaatgggtgctgcgtgccgcatgccgccagctccgccattggcgcgagcgcggcaacctgcactggtccgtggcggtgaacgtatcgccactgcagctggagtgcgcgcgcttcgcccagcgtgtactgaattgcctggtctggtatggcgtgcccagcgaccagctggtgctggaggttacagagtcgaccgccatcaaggatgccgacatcgcccaaagccagctcgcggcactggcggcggccggcgtccagatctcgctggatgacttcggtaccggcttttccagccttgcgcgattgaggcagctgccattgcgggaattgaagatcgaccgtgcctttgtggctgcagtggatcgtaacgaggtcgatccgtcgatcattgccgcgatcatcggcattgccagtgccctgcagttgcgggtggtcgccgagggggtggagcgcgaggaacagttgcaggtcctgcggacgctgggctgtcaccagagccagggctacctgcacgcacctcccatcagcggcgaacttttccttgctcgctttggcaggtgcttcctccaggcgccgtcaacgcggccgcaggttggggaggtggcctttggatga

SEQ ID NO: 508148 - DNA, 360 bp, Stenotrophomonas maltophilia
ttggatgatcgcctctgttcgctgaccgacgcgcagacgttgcccctgtgccacctgctgctgcgccagttccgcgatgcccggccaggggtgcgcgcaacacagatccttttgccgccccacccctcgaacgccatccgggatgagttccagcaactgcgccggcgcggctggctcacggtcatggtactgcgggaccgcgagggtcaacgtttcggcgggtggggcgtatcgctcactccgatgggccggatggtgctggacgcgctggatcgccaggtgccgacggctacgactgtcgcgtcccgtggggtcgaacgggttgatggtgacccgatcagtgctggcttcaacgggtaa

SEQ ID NO: 508149 - DNA, 801 bp, Stenotrophomonas maltophilia
atgtcgcctactcgtaccgaagaaccatatggcctgatcacccgtggcgatctacgccgctgcatcgacgcagaggagctgcagctccactatcaacccgtagtcgatcttgtcggtggcgcggtgtgtggtgtcgaagccgtgctgtgttggcagcgccgccacttggactggcggcagcccgacgcctttctggcattggtgaccgcgtcggacctgatgaagcacctggactactgggtgctggaaaccgctgggcaacagatggcgcgatggcggtcacagggcctggaatggaatctgtcggtgcgcacctcgttgcagaagctgaaacggccctcctatcggcaggcccttcttcagatgctggacgagcagcgcctgccaccccgtcagctgacgctggtcttcaatgccgaggaactttcagacgacgcggacctgcggcaactggcctggttgtctgcgcggggcgtcgttttctccattggaactgttgatcctggctatatggaaccggcatggctgctgcccatgcccatccaggagatcaggcttgtcaggccctatcacgaccggggcggcccgcatcgtggagagcaggctctggcgtcgttactggcggcggccacaaggcggcatctgcgcgtggtggccacggatgtcggtacccgccaggagttccggcaaagccaggcacttggcatcgaccgcgggcagggcaacttcgtttgcccgcctatggctgcggatctgctgataacacaccttctacgcacgggcgcactcaacggtgcttga

SEQ ID NO: 508150 - DNA, 762 bp, Stenotrophomonas maltophilia
atgccagcttccacacgctcaatacgtccatccgcgctgactgccgcttgcctgtctctcgcagtggccaggcgtcagctggttctgtctctgcagccgcgggttgactgtcgcacccgcagcgtatgcggcgccgaggcctccctgtacctgcgtcacccgcgcctagggcgccttgcgctgcagcgccaccggccattggccgaacaagccgggctcgcggttgagctcgatcactggatgctcgatgccgcctgtcgccaactcgaacagtgccgcgcagagggtgcatctgcgtggacaatctcggttccgctttcgatgtccacgttgcaggccccgggcttccaagggcgggtctgctcggcactgggccacagcgggctgcctgcgtcgcgtctgatcctgtgcttgcccaagtctgcggcccttgccggttcggacgcccaccgtcaggcgttcagtctgcttggaatgggcgtgcagctttccatgggcgaaccggatgagactgacgccgcgctggcttggctgccgtctgcgctactgcacgaaatatcgattccccggtctctgatctgcgcgttggatcgatgtgtgatcgcccgtgcaaccgttgcttcgttaatcagtgaatggcagcgcgccggcttacgcgtctccgcgggaggcgtgatcagggaggagcaacacatgctcctggctacgctcggatgcgacacagcgcagggtgcactctacggccatctgccgtggcgatag

SEQ ID NO: 508151 - DNA, 2034 bp, Stenotrophomonas maltophilia
atggagcatcgttcgtttcgtacgtcactgcttggcttggcaatgctgtcgatcgttccagccgcccacgcggcgaagccggtgccgatcccgatcgcggattttgcgcggtatcccgccatccagtcggtgtcgatgagccccgacggaaagcgcctggtggcgctgatttcctcggccgatggcagccaggagccctcgctggccaactgggatatggataacctggacgcaggtccgatcagcataacgcccgccggcgaacggatgaagttcattgccgcttcggcgttgaaggcggaaaagacgttggtgattgcgcgacaggagtggacaggccgcctcgggaactgcggcgaaggcaatgccaccggcgccacaaagaccttcatcaccaaagcctacatcaccgacgccaagcagacgtccttcgacgaagcgttcgcgagcaatgtccgcaaggcaggcgtcagcgaagaaaggcagcgctgtgcggaaatctccggcagtgcaggactggttcacatgctgcctctcgaacctgatcatgtgctggtcatgcaggtcaatcagtcgacactgagcgcggactacttccgctacaacctgaaaacgggcgccaccgaactggtggtccggtccgatgatcaaacatcgccagggctgttccatccgcgcaccggcgagctgctgagccgcacgtcgatcaaaccctcgggaagcaacgagttcgactaccagattctgatcaaggaccgcgccagtggccagtttgttgtccatgacgcgttgaccaccaagctcagcgagcgctttgcgatgcacatcgacggcatcgatgaggcatcgggaaagctgtatgtactcaccgacagattctcagatcatgtccaggcatgggcgtatgaccccactacgaaggcgtttgacaaggagccgctggcggcccacccgaacttctccatcgccggactcatcctggacaggcgcagcgcaagcttcaactcgattctgggctttgtcgtggatgccgagcgcgcggaggccgtctacatcgagccgcgcctgaaggcgcttcatgaaggattgaagcaaacttatcccgggcagagcgtgacgctgcagagctacaacgatgacctgtcgaaggtgctgttccagactgacagcgctggtcatccggtggcccatcatgtgctggtggatggcagaaaggtcaccacgctaggcaatgagcacccatggatcgaccctaaccggatcggtacgcagcgctgggtgagctaccgcgcacgcgatggcctcgagattcccgccatcctcgatctgcctgtcggctggaaggaaggcgatccggcgttgccggccctcatccacccgcatggaggcccctggcacagggaccgcacaggctgggacccgaccggatgggttcccttcctgacctcgcggggctatgccgtattgcgcccgcagtaccgcggaagcgcggatctgggtcgcagcctgctgctggctggtgatcgccaatggggcgagcgaatgcaggatgacaaggacgacggcgcggcctggttggtatcgcagggtattgctgccagggacaggattgcgatcttcggctactcctatggcggcttcgcggcggccgcagcggtggtgcgcagcccttcgccttaccagtgcgcgatctccggcgcgccggtgaccgacctcgcacgcctgggtaatcgctggggcagtacgcgggagacgcgcgtgatgcaggggcagactgtcaagggcatggatcccatgcgcaacaccgaaagggcagagctacctgtgcttttgtatgtgggcgaccgcgatgtacgcacgcctgcgttccacgcgcgatccttccacaacgcggtgaaagaccgggtcgcctctcgcctggagatcattccggacatgccgcattcaatgccttggtatccccggcacatcgaggccagcctcggcctgatcgaaagctatctcaagaacgactgcggtccgggcgggctgtaa

SEQ ID NO: 508152 - DNA, 2904 bp, Stenotrophomonas maltophilia
atgcacgcactacatacgcgctgtacacgaactgcgcatctgcccctggccctggcggtcgttgctgcgctgcatggagggccagtgcgcgcccaggacagcggcgctgccccctcggcatcggccgaagacgcggcgaaggcagccgcgtcgcctgcagcagtcaatgccacgaaggcggccacgcagctggatgcagtcagcgtcaccggttcactgctgcgccgcgccgactacgaggcgacatcgccgatccagaccatcgatgtcaacaccagcgtcgagcagggaaatctcaccttggcaaatgtgctgcaacgctcagcgctcggcggctcttccacgcagctcaccaaccagttcggcggcttcgtggttgatggcggactgggcgtgcagaccatttcgttgcgcggattggggtccaagcgcaccttggtgctgttgaacggacagcgcccgggaccggcaggcgtgcgcggcgcagtgggcagcttcgacctcaacgtcattcccaatgcactgctgcgcagcgtagaaatcgtcaaggatggtgcgtcgtcgatatacggctccgatgccgtcgccggtgcagtaaacctgatcacccggcgcgacattacacgcccagagctggaggtgcgtaccgacgttccgctcggtggcggtggcgagcagtttggcgcatcgctgctggcgggctggaagatggatgcaggcagcatcgtggtggcgggcgacgtcaaccgacagaatacgatgaccgtcggcgaccgtcgattcctccggtgccaacgccctctgatgcgaggcacagatggccgctccatcgacctcgaggaccgctcgataacagctgggacgtcgctcgctggctgccagaaccagctgatcaacgccatcgtcgaacccgggaccagcaacaggtatgtgccatcatcggatggcacgaccgttggcccctttgcgggttaccgacccaaccggttccggcgtcacagcggcaccgagtcggcgtcgactgaggaggtctcgaacttcgagcgctacaaggaacggcagatcgtcaaccaggcccgcagagccacgggctacctgagtaccgatttcagcttcgggggcatcaactggcagagccagtggttggtgaaccgtcgcgaatccgaacacgggtactggcagcagttcttccctgtggtgcccgccgccggcacgcggttcaatctggcgatgccggttatgccgctgcgactgtccagcgaggctactgtcacctatctccacgccagcaaccggttcgatggccttgtaggcggtaccaatacctgggcatggcagttgaacacgaattactcccgctccagcggcgactatgcgtccgacaccatcgtagccgcccgcaccggcgaccgctccaggcagggcacgggtgtgccggcggcggactatttcaacccgggctttctgaatggcacgcgcagcgatgagctgaaatcgctgctggtcgcgcgggacaagggcagtacgcgctatacccaggctacggccagtgcgttgttcactggtgacctgttctcgttgccagccggcgctgtcggcgctgcgttcggcctcgagtaccgcacctatgcgattgatgaccagcccggcgagctgtcgcgcacggggggagggtggtccaccagttccgcgcaggcaacccgcggccgggatcgggtgctggagggcttcaccgagatcgaggttccgctgatcaagggcatgccctggattgaatcgctgactgccaacggctccggtcgcatcttccgttacaactcggtggggtcgtcggacaaggtctggaagctgggcctgaactggcaggtcaattcctggttgcgcatgcgcggcagcgtgggcacctcctaccgcgcgcctgggctgtacgagttgcatcttggtaaccagacagggttcatgccgcagactgccgtggacccctgcgtgcgctggggtgaaagcagccgcgatttcctgcgcgcaaactgtgcggcgcatggcattccggacaacttcaatggggccgctacgtcagcggtgatccactcgcagggcggggcagggtcgcttgttcccgaaaattcacggtcgcgcagcgcagggttggtgctgactcccgccttcggggacatgaacattgccattgactacttcgactatgacatccgcgacgaaattgctcagctcaccgcggccagcatcgtgcgaggttgctatgacagcgccgtgcacccgaaccgcttctgcagccagttcacccgtggcccacgcaccaacgacgctcaagcttttgccatcagcgacattcgcagcccctatctgaacatcaatcgccagcgcacccgcggctacgatcttgcaatcaacacgaaccatacgttcggcttcggcacgctcactcacgaaacgcgtgccacgtacacgctttcagatagcgtgcagctgtttgacagtgccagccaggacggacggcgcagcaatgagctggccggtgcgatcgggcgccccaaggtcagtgcgaccacccagctgcagttccagcgtggagactggtcagcccagtggctgatcagctatgtgggtgccaccgagcatccagagcttccggcgcgcttcaactacctggggtatgccaacgcgcagcgtgacatccgtgcagacgcacgcatttatcacaccgctgcgttgacctatcgccaatccgactgggcggtgaccgtgggcgtccgcaacctgttcaaccgtgaaccggacaccatctctggcgacgtgcaggcggtgtatggaaatgtgccggtagacgccacccagtacgacctgctcggtcgcagcgttttcgccagggcgacgtatcgcttctga

SEQ ID NO: 508153 - DNA, 2787 bp, Stenotrophomonas maltophilia
atggcacaggactccgccgctggcgtcactgaactggaccgggtcagcgtgatcggctcgcggatcaagagagcggacgtggagacctcacaaccggtgttctcgctgagtcgcgagcagatccatgcacagggccagacctcgataggcgacatcatccagaacatcagcgccaatggctcgtcgctgaacagcaattacaacaatggtggcgacgggcagacgctggtcaatctgcgcaaccttggctcgcagcgcacgctggtgctggtgaatgggcgacgttgggtgggcgggaccggcctgggcggtgcggtggacctcacctcgatcccgaccgctgctgtggaacgcattgacgtgctcaaggatggcgcttcggttctgtacggctccgacgccatcgccggcgtgatcaacatcattctgcgcagcgatttcgacggcgccgaggccaatgcctatgtcgggcagtatgacaagggcgacggccgccgccagtcctacgacctgctcattggcagcgtgggagaacgcttctctgtcatggccggcgctgcacacgtacaggaagacgtggtgtgggctggggacaggacgatctcggcagtgccgaacttcggctcatcgcccggttacggcggcagttcgggaacaccggccggacgcttcggcctgggagcaaccgggccctcgcagtgcgtggatggcagtgcaggcccgaccggcgcgaacggccaggccaccggctgctggttcacgaccccatcgggccctgcgtcatggcggccatacaaagcgtctgatgcctacaacttcgcgccggacaacctgctggtcaccccgcaggagcgcacttcgctgtttgcgtcagccagtgcggcactgaccgagaatgtgcgtttcaagacccagttcgcatacaacgagcgcaagtccgaacaggtactggccgcaatgccgatcaccctgggtcggtccgccccgggaaccaagtccgaagacatcgtcatcagcgccgatagcatctataacccgtatgggcaggatgtcacccgcatccagcgtcgggccgtggagaccggcggacgtatctatacgcaggatgtgtccacactgtcattcaatgcgagcctggaaggtcagttcagccttggccagcgcacctttgcctgggacgccggcatgtactacggcagaaacaagcgcgctgacatcaccacgggcctgttcaatgtgccagccctgcgccaggcactcggcccctcctatctggacgcggcggggcaggcgaggtgtggaacgcccactgcaccgatcgcagggtgcgtgcccatgaacctgcttggcgggccaggcacgatgacgccagagatgcaggggtactccgccttcgaggcgcacgatgtatatggatacgagcagaagaactacttcgccagcctcagtggtgacttgttcgcgctgcccggcggtacttcggcgttcgcgctcggcgttgagcggcgcagtgagagtgggttcgatgcgcccgatgcgctggtcaattcgggagacaccactggcaatgcgcgcaccgcgacccgcggcgcctattcggtaaaggaagccttcgtcgagctggatcttccgctgttgtccgaccttccgggcatccagcggcttgaggccaacgtggccacccgcacgtcacgctacgattcctttggcagcaccaccaattccaaggtcgggttgatctggaagcccgtgaccgacgtgatggtgcgcgccaactggagcgagggcttccgtgccccctccgttgccgagctctattccggtgtttcggacaccttcgaggatgtgaacgacccctgcgcctcactctcgcgtggcagcccgcagacaccaccggccagctgcgccggggtgcctgcctacaaccaggccaacacccagatacgcaccactgtgggtggcaatgtgaatctggggccggagacctcgatcaaccgcaccctgggggttgtgtacagcccgggttgggcgccgggcctggatctgtcattggactggtggaacatcaaaatcgagcagggcatcttcacccagtccgcccagacgatcttcaacgactgctactacggtggtcagcagccggcgtgcgcactgatcggccgggcgcccagtggcgaggtctccaataccttggccacggctcgcaacgtcggcgtgcttgaagccgagggcttcgacttcactgccagctaccgcttgcccgacaccgccctgggcagcttctcggtcatctgggattcgacctatttcagcaaggcgacagcagacgtcaacggtgatggagtggtgaccgaggatccggtgagcggcgagggtggcaacctggtgggtgagtacagcagccgcagcaacaactggcgcgtccgttccaacctcgcagtggcatgggccaagggcaatctgggtgccacggcgaatctgcgctactactcgtcccaggtggagagctgcttcaacgtgccgtcggccgagctgcgcaacctgtgctcagacccggcccgtaaaacgtcctatgggccgcgtccggagaatcgtattcccagcgtgacctacaccgatctgagtggctactggaatgcgccgtggaatgctcggatcacgctgggcgtgaacaacgcattcgaccgttctccgccacgttcgacggtggtggccgccaacagcttcgatccgcaatacgaagtgcctggccgcttctactacatgcgctacacgcagaagttctga

SEQ ID NO: 508154 - DNA, 420 bp, Stenotrophomonas maltophilia
atgcagcagagcgatgtgtgccgcaacgctctgctggatctgttcgcggatggcgtacagatcgcgctggaaggtttcggcaatagggtcaccagtctggcacggttgaaacgccttcctatcaatgagttgaagatcgatccggtatttgtcgctgacgttgacagaaataccgtggattctgaaattgtttcgtccatcgtcaccttgggcgcgatccttggattgcgggtggttgctgagggcgtcgaacgcctcgagcagtttcgcgcagtggaaatgctcgtgtgcgaccagacccaggggctgctacacgcgccagcgatcagcggcgatgagttcctgctgaggttcggcctgcaaaaacacgcgggcgccgcggtggcaccgtcaggaaccaaggaggtggcctttggatga

SEQ ID NO: 508155 - DNA, 708 bp, Stenotrophomonas maltophilia
atgcggctgcgcgggcgctatccgcagaggccgggtacccggctggacagtagggagcaagggcaaggtatgaaacgggaatcgaagccgaccattgctactagtctggcgtactacagaaggtccttatacttgggaatggttcttctagctgcaggctgcacttccatccccattggcggagtttccgagtcggacgaggcttccgccaagcgattgttctcggcttatcccgagatagctctcgggttctacgaagtgcctgggcgagatgttgaatcgatcgtaacgaacatggagttccgaggccccatcgacaagaatgactacagcaacgtctatggattgacgctttggaatgtgcactggaatggagccaagcgcgaggcagtcaactgctacggagaccaggcaaagatcagccttgtagtgtccgttcttctgccaaagaaaagcgacgcagatcggctgccgcccgatgtcgcagcgaaatggaagcgtttcacgcgagctctgtatgaacacgaagtcctgcatgtggagaacggcgtggccgcagcggctgcggtccggtcgtcacttcggacaggtagctgtgaagaatcgaacgcaaaggcaggcgaagtagttcgcagccacgccaaacgagatgtcgtcatcgataaagagacgagtcacggcgtagccgatggcgcgcactttccctga

SEQ ID NO: 508156 - DNA, 624 bp, Stenotrophomonas maltophilia
atgcatcgctccatctatctggtacgccacggagaaagtgtctccaatgcgggtggcatcaccatgccccatgccttgattccactaacagaagcggggcgcaagcaggcagaggcgctatcggctcggttgccagctcagccccccaggattcttgcctcgccctttatcagggcgctggacaccgccgagccttacgccaagcgaaggcaggtcaagatcgagcaggagccgttgctgcaggaattcgacatgatcgacccggtgttgatcgccggcatggaccaagaccaacggcgcccgatcgccgatgcgttctggaaagagggtgatcccacaaagcagatgggcgagcaggccgaaagcttcgggcagttcgcgagccgagtatccgcgttcatgaccgaccggctcccgctgctacccgacggaacggtctgcttcggtcacggcatctggatcggcatggtggcgtggaagctgttggggttcggcgcagacaccagtgatgacatgcgccgcttccggcgtttccagactggcctgccgctgcccaacggcgcggtctacgcgcttgaggaattggcgcccgctcagtggttactcctcaatagattcgcgtga

SEQ ID NO: 508157 - DNA, 4926 bp, Stenotrophomonas maltophilia
gtgaccgtacttgagactctgctcgacaccctgcgccagtcctcgatgaccgagcgcgagaagggcacctacttcgaagaattgatcctggcctacctgcgcaacgaggccacctaccgcgacctgtatgccaaggtctggacctggtccgactgggcgcccgcccacggcttcagcgcgaaggatgacggcattgacctggtcgccgaggaagccggaaccggcgcgatccacgccatccagtgcaagttttacgacccggactaccggctgcagaagaaggacatcgacagcttcttcaccgcctcgggccgcaagccattcgcgcaccgggtcatcgtttccagcaccgaccactggtccgacaatgccgaaaacgcgctgatcgaccagcagccgccggtcagcaagatcaccctgcacgatctcgaagccagccagatcgactggtcgcgcttccagcccaacgccccggtcgcgctgaaggcgaagaaatccctgcgcccgcaccagcaatccgcgctcaaggcggtcaccgccgggctgcaggacgcagaccgcggcaagctgatcatggcctgcggcaccggcaagaccttcaccagtctcaagatcgcggaaagcatggctggcaagggcggccgcgtgctgttcctggtgcccagcctgtcgctgctgcagcagacgctgaccgagtggacccaggaaagcgcgattcccctgcacagtttcgcggtgtgttccgacagcgacgtcggcaagaagaagggccgcaaggaggacgacgccgtccagaccctcgcccacgaactgcgctacccggccaccaccgacgcccgcgcactggccaaaggtgtcgccgcgcgcagcgacaacgcgcacatgaccgtggtgtttagcacctaccactccatcgaggtcatccacgacgcccagcagcaggggctggccgattttgacctgatcgtctgcgacgaggcccaccgcaccaccggcgccaccttcgaaggcgacgacgaatccgccttcgtgcgcgtgcacgacgccgcctacatccgcgccggcaagcgcctgtacatgaccgccaccccgcgcatctacggcaacgaggccaaggccgtggccgagcgcgacaacgtggcgctgtactcgatggacaacgaggcctggtacggcaaacagctgttcgtcatcaccttctcggaagccgtcaagcgcggcctgctggtcgactacaaggtcatcgtgctggcagtcgaggaaagccacatcaatcgccgcctccagactctgctgaaggacgagaacaacagcctgcgcgtggacgatgccgccaagatcgtcggctgctggaaggcgctggccaagctcggcatccacgagggtgccggcgaaagcgcagaaccgatgaagcgcgcggtcgcgttctgccaggtcatcgagcccagccggggtggcaagacccacaaggtcagttcgaaggaaatcgccgacatgttcaaggcggtcgtggacgcctaccaggacgccgaggacatcgaagacgccgcgcgcatgacctgcgaggccaagcacgtcgacggcagcatgaacgccggcgagaaggaagcgaagcttgactggctcaaggcacccacgccaccggacacctgtcgcgtgctgagcaacgtgcgctgcctttccgaaggcgtggacgtgccggcgctggacgcggtgctgttcctcactccgcgcaactcgcaggtggacgtggtgcagtcggtcggccgggtgatgcgcaatgccccgggcaagcagcgcggctacgtggtgctgccggtggtgatccctgccggcatcgagccgcacgaagcgctgaacgataaccgcacctatgcagtggtctggcaggtgctgcaggcgttgcgcagccatgacgaccgcttcgacgcgatggtcaacaagctcgacctcgtcggcccggaccgcagccggatggaagtcgtcgccgtcgccgacacggtgcagcgcaagaccgcgcggctgctggacggcaatgcccgcaaggcggccaaagccaagagcaggcacagtatcggtgaagcccagcccggctacgaagccgaagtgcaaagcgaattcgagttcgagatcggcgaagtcgagcgcgcgctctacgccaaagtggtcgagaagtgcggcaaccgccaccattgggaggactgggccaacgacatcgccaaaatcgcgcagacccacatcgaccgtatcaaggcgctgctggaagaccccagtcaggccaaggcccgcgaagccttcagcgccttcgccaacgaactgcgcgacgacctcaacgacaaggtctcggacgccgagatcatcgagatgctggcccagcacctgatcaccaagccggtgttcgacgcgctgttcgccgactacagcttcgccagccacaacccgatgtccaaggcgatgcaggccgtgctcgacgtactcgacgaactgcacctggagaaggaagccgacaccctgcaggcgttctacgacagcgtgaagctgcgcgccgaaggcatcaacagcgccgccggcaagcagaagatcgtggtcgagctgtacgacaagtttttccgcaacgccttcccgaagatgaccgagcgcctgggtatcgtctacaccccggtggaagtggtggacttcatcctgcacagcgtgaatcacttgctggagcaggagttcgggcagaccctcggcagcaatggcgtgcacatcctcgaccccttcaccggcaccggcaccttcatcacccgtctgctgcagtccggcctgatcaagccggaagagctggatcacaagtaccggcacgagatccacgccaacgaacttgtgctgctggcctactacatcgccgcgatcaatatcgaggccacgtatcacggcatcgccggcggcgactacgtgcccttcgagggtatctgcctgaccgacaccttccagatgtacgagaaggaggatctggtcgatgcgctgctggtggacaacagccagcggcgcaggcggcagaagacgctcgacattcgcgtgattgtaggcaatccgccgtattcgatcggacaaggcagccaaaacgacaacaatcagaacatcggctatccggcgttggatgcacgcatcgcggaaacctatgccgcacgctcaggcgcggcgttgtccaaggggctttacgacagctacgtccgtgccatccgctgggccagcgaccgcatcggcaatgccggcatcatcggtttcgtcaccaatggtggctatctagagaaggccgccatggacggggtgcggcgctgcttagtggccgagttctccagcctgcatgtattcaatctccgcggcgatatccgcaagaacatgctgagcaaaggacaagcgaaggaaggtcagaacattttcggaagcggcagcatggcgggcattgccatctcacttctgatcagaaatcctgaagccaatcagcgtggtcacgtctactaccacgatattggtgacgatctaagccgcgatgagaagctgggcaggatagaagcctatgccagcgtcgacggtattcccgaacaggaatggcagcacatcatcccggatgcgcatggcgactggctgaagcagcgcgatgacagcttcgggcgtttcatctcgctgggcgacaagaagggcgacgcgtccaagatgttcgacaacttctcgctaggcgtggccaccaaccgagatgcctgggcctacagccatagcaaggccaagcttgcggaaaacatgcgcaacatgatcggcttctacaacgccgaagtggcgcgcttcgatgccgcgcatattggactggacaccaaggcgcggcaggagcgcgtggacggattcattgacagcgacccactccgcatcagttggactcgcgcgctcaagcagaacttgaccaagaatcgcacctacacattcgatgccgagtgcatcgttcccagcctgtatcgcccgttcaccaaacaatggctgtacttcaatcggactttcaacgagatggtgctgcagatgccgcgcatcttcccagatgctgctgcaaaaaacgtagtaattcagctaagcggagctggagcacgatctggattttccgcgattatttctggccatataccgtcccttgacaccattgagaagggccagtgttttccgttctatctctacgatgaagccgcccaacaatccgatgacggcctgttcgcgagcattcccaatgatggcccacgccgacgcgaggccatcaccgatgccggcctcgcgcatttccagtccgcctatccgggcgagacgatcagcaaggaagacctgttctattacatctacggcctgctgcattcccccgactaccgcgaacgctatgccgacaacctgagcaaggagctgccgcgcatcccgcgtgtgcgcacggcacaggatttctggcatttcagccgcgccggccgcgacctcgccgcgctgcacctgaactacgaaacggtggacaagtacccgctcaccatcgagaccaagggcaagctgttggatgccgactaccgcgtcgagaagatgaagttcgccaagaagaaagacccggacaccggcaagtccgtcaacgaccgcggcaccgtgatctacaacggcaaaatcacactgcgcgacattcccgaaaccgcatggggctacatcgtcaacggcaaggccgcgctggattgggtgatggaacgccaggccctgcgcgtggacaaggccagcggcatcgtcaacgacgccaacgactgggccatcgaaaccatgggcaacccgaagtacccgctggaactgttccagcgcgtggtcaccgtcagcctggaaacgcagaagatcgtcgctgcgctgccaccgctggatatccgtgaagacggctga

SEQ ID NO: 508158 - DNA, 222 bp, Stenotrophomonas maltophilia
gtggtctatcgtccggcctacggcccgggctatggctggaaggtcggccaccgctatcgcgactactaccgcggcccgatctacgtggtgaacgactacccgcgctacaacctgcgtcgcccgccctacgggcaccagtggatccgcgatgaccgcggcaacatgctgctggtggccatcgccaccggtgtgatcgcccagtacgtgctcagcagccgctga

SEQ ID NO: 508159 - DNA, 684 bp, Stenotrophomonas maltophilia
atgcgaacactaagccttaccctcgttctttacttcgcgctttccggagatgcatcggccaatccggagatgagccccgagcaagcattcgatcttttcgccaaggcggtgctggagagtgacgccgatgcgagtgcaaagctgcatcgctcaatggtggacatcaatcaccacgaggcagaatcggtagcgcatcttcatcagttggctccggcgcttgtcgaggaaatggtagacggactggttcagtacaaactcttttctgccaagtccgctcatgagtacggcacgttgatgaccgacgcttatgcaggcgcccaatgcaaagcaacggggacacgagcggcttcgcagtatgtgagggaaaaggagagagtcacggaaatcatcgtgcagttcagctgcaaggtgccggctttcaatactgagagcggtgaggtgacggatgcggccattctgagaaagatgcgcaaaagcacgaagtatgccttccgcacatgggcggcaatgctcaaaagcggcgagaagcgcacgatgactggtgagacggtgctgactggagatcctgatactggttacttccccgactcctacaacctgagatccctgacatcagtgctgtactcggcgctaccggcggaacgggtggatccctttgcagatatggagctggatgcggaataa

SEQ ID NO: 508160 - DNA, 663 bp, Stenotrophomonas maltophilia
atgcgacgagtctgcctgcttttcctgttctgctttcccatcgccacgcatgcatcgtcgtccgggaaactcacgccagagcaagcatttgacctgttcgcccaggcactgctggaaagtgatgcccaagcaggtgaaacgctctctcgcgccatgcgcgccgccaaacatagcgacgcccccattgcgatcaaggccgcgcgcctcgtgccggaaatggtcgacgcgcttgcgaagggcgagatcgaagacgatgtgccggccgagttcgctgaacagcttggcgaggtgctcagatcgacctatcttcgcagccgctgccgcgcgatctcatcagttccaatgggccacagcaatcaggccttccaggaggtgcagctgtccttcagctgccaggttccggattggagtgcggcaacgcctgcactgaccggcgaagtcatcagcagaatgatggcggatccatcgttcgcctatcgattgatcacgactacggtacctggcctgccccgacgcacgattaccgataccgtcgctctcaccgccgatgcaaacggcaactactttttcgtcgacgtccaagccctgcttggtccactgatccagtccacgatgccaatggtgatgctggccggccacgacaggccgcaactccagccatga

SEQ ID NO: 508161 - DNA, 411 bp, Stenotrophomonas maltophilia
atgactgctgcgcactacccctacctgttcgccactctcggtgaagctgccaaccagctgcccgagaccgtcgcccgcacactggaaaccacgctcagtgccacacacggcagcactgtgccaaccagcaacaccctgctggcgtgcctgcagcgcatccgccatgtggaggccgccgacggccagccgtggccagacaagggccatacatcggggcaatgcatggccatggcacgagcggaccgggccaatgccggcctgaccttgctgctggaacttctgcatgccaccgaacgcgtgcgcgtggatggcgatgatgatcagcaagtgggtgacgacgtgcgcgaaggactgctgctggcctgccgtgggctggccgagtatgtggatgtgcagttgcacgcgacttga

SEQ ID NO: 508162 - DNA, 732 bp, Stenotrophomonas maltophilia
atggacatgcaggcaggaggcggattcgatcctccggcaaagatcgattcgcaggaactgacattccactggctctaccagcgggtgcaggggctggttgagcacagtatctatccgaaggccggcaggatagagacgtggtcgttccgcgccggaatagtggccgccgtcgtcggcgtgctcagtagtcagctgccggatcgatgggttccgctcactgttacttctctgttcgtcacggcatgcctcgtggtggagctcagtagcttcgttgtggccggcattcttgcggcccgcaggggtatccgccagttcagccaaccgcggctctcgcacgcccaggaaatggacactgagttcgctcattggcaagtcgtgattactgacctccgctgcttccccagggtcgagcgcgagcggcgactcaagttcgtcagcaccttgcgcaccaacatgatcgaacgcatgggcatgatgtatggcggtctgcagaggcttggtccattcccgctgctgatcgcgttctacctgcagttccgtggatggaaatggggcgactgggcaagtgcatttgacatcagcctacttagtgcactgctgatcttcggtatggtgctgttgtacgccgtgggctggatgctgatcggcctgcgcacccgcctggacacttatgtcgccctgcttgagggctccatacaagaacccgaaccggacgtggttgcgcccttgtag

SEQ ID NO: 508163 - DNA, 471 bp, Stenotrophomonas maltophilia
gtggcgtggcaccgctgggcggccgtggcgctgtgcatcgcctcattggttgcggcacagcgtcagttgtcggcgcgcctcatgccctcgcctctcgcgttcaagagcacctccggtgagcgctattcgcagctgcgtcgccaggcgatccagttcgtcgaggcacggccgaggcagggcttccagttcgtcgaacggcatgaagacggcgctttccagattctctgcagaggcgttccggtgctgtggctggagaggcgctctcagcatttgctgatgcaggcaacacgggatgtggaacagcgagcgcccgacgttctgcagctacgggcgctgctgcaacggcagctgcagccattggactacctggaacaagtgcttgctggtgtgccggagcccgttttgatggatcggatgctaggggttctcgctggtggagtacctgatggggcgcgatgtgtgacggaatag

SEQ ID NO: 508164 - DNA, 1221 bp, Stenotrophomonas maltophilia
gtgctggaggccgaaaccgtgggcgccagctggcagcggcgctgggagtcgttccagaccaacaccgccaacgcgacgatggccctgcatggtcatgcctattccggcgatgacccggatggcttcatgggcgccccggaggtgatccggcacctccgcgactatgcccacgagcgttccctgccgatcaacgagggatgcggggtgcatcgggttgggcctgggcccggtggctacgccatccacagcagccaggggctgatccatgcccgcgcagtggtggtcgccaccggtgaataccgccgcgcacggatgccccgggtcccgttcgcgcccgcgccaggcctgaccgtgctgcactcgggcgactaccgcagtgcccgtcagctacccgatggcgccgtgctggtcatcgggggtgggcagtccggcgcgcagatcgcccaggacctgcgcgacagcggtcgcagcgtgcactggtcactggcccagcggcattcgcatacccgccggctgcgcggcaaggactcgatgtcctggtgggacatggccgggcgcatccaccagcatgtgagtgaagcggcgggcgtacttgccggggaaccggatgcactgcgcaaggcccgcaccgcagagttcccacttatttccggcaagggaaacggtggcctgggcagctcgatcagcctgctggcgatgcaccgcgcgggcatcaggctgctgggccggttgcagggcttcgatggaaacgtcgcccgcttcgccgatgtgcgcccgcagctgcgtaccgcgatcgaggccacgcaggccgagtacgcctatcttgattcgctggccagcgcgtactacgccacgcgtcccgagccacgcaccgacgatgcccgctacattccggaggaggtctatctgcactgggaaccggacgcatccccgcgcgaactggatctgcaggcggaaggcatccgctcggtggtgctggccaccggcttagtcgccgaatggccctggctcgacgtaccgggcgcgctggattcacgtggctacccgctcggcgacttcggtgtttcaccgcaaccggggctgttcttcatcggcatgcacaacctgcagcggatgagttcatcgttcctgtgcaacggcggtcgcgatgcacgcgacctgctgcctgccatcctgcggcacctgggccgaagcgggagtaccggcatcgacccagggtaa

SEQ ID NO: 508165 - DNA, 282 bp, Stenotrophomonas maltophilia
atgaacaccgaaccaactgagatctgggtcttccacggcgcaggcgcgcgcttcgccgggggcgtcttcggcaatcgtgaggcaggcttgtcatgggcggccaaacacgcgctgacgggtgtgctcacctgctatccgttgaatgaaggcgcgtacgactgggcgctccgatcaggcgcctttgcacccaagcgcccagagcatcgcgaagcgcatttcattggcggatttacatccgcatcaatggaccatgtgcacgtcgaagacggcataccccagtag

SEQ ID NO: 508166 - DNA, 1107 bp, Stenotrophomonas maltophilia
atgtatacggattgtgaagaatggattcacacacatctaggggatgccgtgagcgctaagaagaagatcgaagataaattctcccgatcgcaagatgcccttgtcttgcagcagtcagatctatctctccagtccattgcggatatggtcaagagtggggctatcgatatcagtccgaagtatcaacgacgagagaggtggacgccagagaaggagtctggacttatcgagtcgttccttctgaatattcctgttccgccgatctatctcgcggaggatgagtatggaacatactcagtaattgatgggaagcagcgcgtgaccgcgattgaaaaattcttgagtggttcgcttgtgctgactggtctggataaattctctgaagtcgatggtgcctcgatagcagacctccctgcggcattggtcaatgcactgaagattcggccgtatcttcgcgttgttaccctattgcgacagtcggaccctgacttgaagcatgaggtttttctcaggctcaataaggcaggtgttgcactaaactcccaggagattagaaatgttgctttccgtggtgcatttaatgacatgctttttgagctttctgaagatgcatatctgagagagcagcttaaggctacgacagcctctaaggtttacagggaaatgacggatgttcaatacgttcttcgtttctttacggtccgggagtactggcaggacttctatggaaacatggattctgcaatggacaagttcatggcggcaaactacagggctaagaagccaagaattaaggagtgtgaggccgcgttcgctaagtctatagatttttgtcggcaagtatggggtgatgatggcttcaagaagccgaacggcaatagtagagtgctccaagggtatttcgacattcagatggtttgctcgtccttgctaacagatgcggagcgggcgcgggcactgtcccaaaaaaatgtcgtgaggtctggcttagaggatttgctgagtaatgattctgtttttgcggaatcgatatcgcagttcacatccaactcaaagaacgtgcattaccggatttccactttcacggatttcctgcggagtatttaa

SEQ ID NO: 508167 - DNA, 924 bp, Stenotrophomonas maltophilia
atgacagccaaggatgagctgcttcagcgccttgagttcatgggggctgccattgatttgcctgcagttatcgatgtaggcatagcaaaggatgttcataatggagttgccaacctgcttcgaaaggggttggcgattgtctcgtttaatatattggaagatttcataaagaagaggtcgggcgaggctctcgactttctctccgggagtggtgttgaattcgcactgctaacggatgcgatgcaggaggcggctatcttggatacgctctcgtctctgtccttccgtgcgaagctcgagaagaaaaatggcggggatggctggcgctctttgattcaggaagaggctctgaagattcactcgactggccagactaccttcaaaatatcttcgctatcactagcttcttctggttccaatgttcagcctgcagacgtggtgtcgattatgtcggcatttggtattaaaggcggttgggcgaagataactgcagtcatcgcaatgtttggtggtggtcttcctgatgcggcacaggcttacagaaatgcgtttgaacggaggcgttcgtcagcacattcagtaggttatcagtactctcacgcttggctattctcactcaagaatgaaattatacccttggccgttgcattggacgttctactggctgcacggtgtcgtcaggttaagtccaacgtgaccatgcgggtggaagatcatgttattgaagacgcattgaagtttaggtttttggagcagtccggaactttgtttaggcagacatcttcgattggcggagcgtctaagaagaattggcctgacctgcaatcggcacttgctgctattcggcccacgctggaaatgcgaggggagttcttgatagtgcttgatgctggtggacgtataaaaaattggtacgtcaactag

SEQ ID NO: 508168 - DNA, 297 bp, Stenotrophomonas maltophilia
atgaacgtgatggatactgcgctgtctggcatgcgtgcggcccagcagggcgtgcaggtggctgcacacaacgtggccaacctcgccactccggacgcgcagcgcctgcagctgcggcgcagcgcggtggagcagggcggggtggaaaccaccgtcagtgccaccgatccggactcgacggcgccgctgggcgacctgctggcggccagggccgaggtggtggcatttgccgccaacgccttggtgatccgccgccaggatcaaatgctgggctcgctgctggaccggaccgcctga

SEQ ID NO: 508169 - DNA, 816 bp, Stenotrophomonas maltophilia
ttgagcacggcgctggtgcgcgcgttgcatgcgcttttgccggaaacggccgtggtccgcgttggctgggacgacccgcagctggggagtggccgagggggctggcccttgcttgcgattgacagcgctgcgtccgtggagcccgccaccggcgatggccagcacggctgggagtatgacggtgcgcggctgctgctgtcggttgcgggcgcggtgccttcacccgcgtggtgggggctggcccggcaggcgatggagctggcgctgcagcgcggccgccaggccggccagatcaaggcactggaagaggccgaacggctgcagcaggccctgttccagattgcagatctggccggtgccgacctggaaatgcccgagatgctgcgccatgtgcatggtgtgctgggcacgctgatgtatgccgagaactgctacatcgtggaatacgacgatgtgcgcgaccagatccgcttcctgtacttcgccgatcaggtcgatgacttcgtcgccgatcccacgcagagccatgacgccagcgagatgccgcgcagcctgaccgtggcgctgttgcgccatggcaagccgctcagtggtccctcgcgcagactgctggcgcaggtgatggaacaggagcacgacccgcagcgtgggcccgaaagcctggactggctgggcgtgccgatgctgcgcgacggccgggtctgcggcgccatcgtggttcagagctatgaacaggcagcccgctatggcgaggccgagcgcgcattgctgggcttcgttgcgcagcacgtacagaccgcgatggaccggcgctag

SEQ ID NO: 508170 - DNA, 342 bp, Stenotrophomonas maltophilia
atgcggctgctggccctgacctacggaaccgaaggcgatacgcgtcccctggccatgctctgccatgggctgatcggcgcaggccacgaggtgacactgcttgccgatggcggcaccctgggcagcgcgcaggcactggatgtgccccatgcggctcttgaaggtgacatccatgacgaagtggtcgcgctggtctcgcgtggcaacggtgttgccgccgccagtagcgggctagcacggatggcgctgcagcatgtcagcggctggatgcgccaggccgatgccgctgccgaaggctgcgatgcgattctgacggtggcctggcggcctttgtcggcatga

SEQ ID NO: 508171 - DNA, 366 bp, Stenotrophomonas maltophilia
atgaccaccaacacgcacaacgggcgctggagccaccggctgggccggggggctggccgtgcctggcgtggatacctgcgccgcgagcagcgtgtcgccggctggctggtgacgcgcggggtgcccgcgggcgcggcgacggcggtgctctggatcgtcaagctcgccgtgctcggtgcgctgctctactccgcgttctggctggccctgctgcttgcctttgcggtgactgctgcatggctcgtgcagcacgacgactctgatcaagaggaaccgcaacccgagtggagggaaggccccaacggcttcgggctttatgacaagagcgactggcgcatcgacccgcatgtgaccgacgacgactga

SEQ ID NO: 508172 - DNA, 360 bp, Stenotrophomonas maltophilia
atgggacagaccaaccgccgcgcatccgcatggccttcgctggtcgtgctgctggccgtgtcgctctcggccctgcagcccgccattgccgacgacgctcctgagcgtgagcagctcgctgcgctcgcccgccaactcgacctgatcgaccgcatcgccgagcacgccgccagtaccgctccccaggaacgcgcccgctaccacttcgactacgcccggctgcgcgcagacctgaagcgcgttcgcgccggcctgcaggactacctcgtgccccagcgcgcccagccgcgcgatcccgtcccgttggccggcgattacgtccgccacgaccgcgccgacgacgaggcgccatcgccatga

SEQ ID NO: 508173 - DNA, 198 bp, Stenotrophomonas maltophilia; identical to SEQ ID NO: 346440

SEQ ID NO: 508174 - DNA, 1044 bp, Stenotrophomonas maltophilia
gtgacaacgatttcttgtgtggatttgttctgcggagcgggcgggctgacgcacggcttcgtgctggaggggctgcccgtggttgccggtatcgatctggacccggcctgccgctttccctatgaagccaacaaccaggcccgattcgtcgaacgtgacatcagcaaggtcaccgcgtctgaactgaaagcgctgttcggcgacgccgacttgacgattctcgcgggctgcgcaccgtgccaacctttctcgacctacgcacagcgctacgaactcgacggaaaggatggcaagtggggcttgctgtatgagttcgcgcgtctcgccaaaggcgccaagcccgatgtcatcacgatggaaaacgtccctaccgtcgcgaagcacgaagtgtttcatgactttgtcgatacgctgaaacggctcggctacaacgtttggtttgatgtcgtggacagctcccgctatggcgtgccgcagatgcggcgacgcatggtgctgctggcatcaaaacatggtgacatcacgatgatcgaaccgacccacgaaaaaccgaagacggttcgtcaagccattggccgcttgcgcccattgagtgctggtgaagcggctccgagggacaaattgcacgtcacttcgacgctatcggaaaagaatctcaaacggatcaaggtatcgaaacccggtggcacctggcgcgattggccggatgatctggtcgccgactgtcaccgcgccgagagcggacgcacctacccgggcgtctacggccgcatggagtgggacaaacccgccccgaccatgaccacgcaatgctacggctttggcaatggccgtttcgggcacccagaacaggaccgagccatctcgttgagggaggcagcgatcctccagagctttccacgcgactacgcgttcgtgccggatgacggcgaagtgagcttcaaggttctcgggcggctcatcggcaacgcggttcccgtcgatctcggtcgtgccatcgcgcgcagcatcaacacgcatatcgcatcggtcacggcccgatga

SEQ ID NO: 508175 - DNA, 459 bp, Stenotrophomonas maltophilia
atgtcgcgcattcagccctcgtcccccgagaccagtcgccgcatggcgaaggttcggcagaagggaaccgatgccgagatcgcattgcgaagagagctttaccgaaggggcctgcgttaccggatcgactacgaggtcctgaagaaacctcgccgcgtcgcagacgtggcatttccgggtttgaggatcgccgtcttcgtcgacgggtgcttctggcacgggtgccccgagcatgccacctggccgaagcagaacgccgagttctggcggcagaagatcgagacgaatcgcctcaggggcgccgacacgaattcgaggcttctcgaagtcggttggacggtactgcgattctgggaacacgagtccccgatcgaagccacggaaaccgtcgcacaggcggtcgccatggcgagagcgaagcactgcacatcgcctgctggcgcgcacaagaagaactga

SEQ ID NO: 508176 - DNA, 3141 bp, Stenotrophomonas maltophilia
atggaaatctcgaacgatcagaagcaccacacctaccgtacccgtccggagcccggccagctggtcgaggttcgccggcgccagtgggtcgtggcggatgtcgcctcctcgaaattggaatcggcttcggcgtcgcagaactgcgtgacgctttcttccatcgacgaggacggcctcggcgaagaactggaagtcatctgggagatcgaacccggcgcacaagtcatcgagcgtgcgggcctgccttccattaccgggcaagaccactccgacacgctcgaagccttcctggatgcggtgcgatggggcgccgccaccaatgcagaccgagggtttctgcaggcaccgttccgcagtggcgtcagcatcgaggactttcagctcgatcctttggtgcgcgccatcgacatggcgcgcgtcaacctgctcatcgccgacgacgtcggcttgggcaagaccatcgaggcggggctggtgatccaggagatgctgctccggcaccgtgcccgcaccgtcttgatcatctgtcctgcatcccttcaggagaaatggcgcatcgagatgctggagaagttcggcctcgacttccgcgtggtcgacactgcctacatcaagcaattgcggcgcgaacgcggcatccacgccaatccgtggacatctcatccgcgcctcatcgcctcgatggactgggtcaagagtggcgaggggctgcgcgccatgcgcgatgtcctgccgccccatgccggccatccgcgcaagttcgatctactggtcgtcgacgaagcgcacaacatcgcccccgccgccggcgcgcattacgccctcgagagtcagcggacccgcttcatccgcgcgatcagcccgcatttccagcatcgcctgttcctgaccgcaacgccgcacaacggctacaccgagtcgttcacctcactgctggagttgctggacgatcaacgcttcgcccggaacatcctccccgacgagaagcagctgagccaggtgatgattcgtcgcctgaagagcgatctcgtcgatgctgacggcaagcccctgtatgcccagcgaaagctccaggcgctggcggtcccatacacggacgaggaacgggagatccaccagaagctgaacgactactgtgccagccgcgaaaaagacgcggagaagaccggcagcacattcggcacttcgttcgtcaatcaactgctcaagaagcgcctcttctcgtcgcccgccgcgttcgcttccacgctcgagaagcacgtcgcctcgctgtcgaatggcgccaagcccaagggtcgagatgccatggccgagcgcatcctgcgcaaagccatcctgaaagcagacgaggattacgccaacgaccaggaagtcgagaatgctcaatcggaggccgtcgaggaggcatcacgccgttcccaaccgcttacgcaagagcaacaacggattctggccgacttgaggcaatgggcacagcgcgccaagaaccagaccgactccaaggccagagccatcctagattggctctcagccaatctgaaaccgggaggtcagtggaatgaccgccgggtgatcctgttcaccgaataccgcaccacccaccagtggatgcacgagatcctcgccagccatggtttcggtggcgaacgactcggtctgctccacggaggactcactcaggatgagcgggagcccatcaaggcagccttccaggcatctcccaaggattcccccgtccgcatcctgctcgccacggatgcggcctccgaaggtatcgacctgcagaaccactgcaattgcctcatccacctggagatcccctacaaccccaacgtgatggagcagcgcaacgggcgtatcgaccgtcacggacaacgcgagaaagaggtgctgatctggcaccccgtcgacggcggtgacaaaagccatgcatcggtcggtggccatggtgacgacattctgcgtgcgctgcgcaaactggagtcgatgcgcgccgacatgggcagcgtcaatccggtcatcgcgccccagatgtccgggctcatcgaaggctcgctgaaggatctggacacccgcctcgcggaggccaagattgccaaggccaggcgcttcgtgcgcgccgaacgcgagctgaaagagcgcgtcgccaagctccatgaacgactcctcgccacccagcaggattttcacctcacgcccgatcacatccagatggcggtgaagactggtctcgcgctagcgggccgccccccgttggaacccgtcgccctcgcagatgcaccccaaggcagcgcattcaggatgccacccctatcgggatcatgggcgcgctgtctggagggcctgcgtcacccgcatacccagcagatacgccccatcacctttgaccacgctgtggccaaggggcgagacgatgtcgtgttggtccacctgaatcatcgactggtgcagatgtgcctgaggctgttgcgcgccgaggtctgggcgcaggatgacgtgaagaaactccatcgcgtcaccgtgcgcacattaccggatggcagcatcgagggcccggctgtggtcgtcatctcgcggctggtcatcaccggtggcaaccaccatcgccttcacgaggaactgaccgtctcgggcggctatctgcgcgatcagtcgttccggcgcgaagagggtgtcacgcgtgtccagcagtggctggacgaggcgcagccagtcactgcgagcgattcgctactcgatgccattcgggtgcgcttcgatcgcgcccagcccgccatcctgcaagcggtcgacgcccgctcgaaggatcgactcaagtttctggccaatactctgcagacccgcaagcaacaagagatggatgacatcggtaccgtgctcgacgagttggagaaggctatccagagcgagttgaagaaagaccaacagcccgagcagctttcgctgttcaccgaggacgagcgcactcagctcagacgcgataccgccgcgctggaggcacgcctcgcgcgcatcccggccgagcgcatccaagaggtccaggccatcgaaacccgctattccaagctcgacgatcgcactttccctgttgccgtcgtcttcttggttcccgagtcagccatgcaaggggatgcagcatga

SEQ ID NO: 508177 - DNA, 1878 bp, Stenotrophomonas maltophilia
atgagcaatcacgacctgcaccacgactggctggcgctcatcgagatctccggcccgttcctcgccgttcccgttctcaaggaagcctttccccaaggtctggaagaactcgacggaaccaagcgcaaacggctgcgtcaggcctacgaggaatggcgcgaggcgctggagacggacgatccgcagtttgccgaattgcacgctgcgtggattgatgaggtgttggcgcgcgggctggaactcgacgaggatggcaaaggcgacgttctgaagcgcgccgactggtgcgcggccgaactgaatgtgagcctgccagaacacggcgtgacgctgtccccggacctcgccgtcatcgacgagcaacgggccgacaagccgcagatgctcatccacacttacggacaggatgtcgatctcgatgccactctgaagctggacggatgggccgccaccccggccgatcgcatggttcagttgtgccgcgccaccggctgccgcctcgggctggtgaccaatggcgagcgctggatgctggtcgacgccccagttggtgccgtcaccacctttgccagctggtacgcccgcatctggagtcaggaacccatcaccctgcaagccttcgtgcacctgctgggtattcgtcgcttcttcgtcgatgaaaccgagcaactgccggcactgttcgaccgctcgctgaaatatcaggacgaagtcaccgacgccctcggtgagcaggtgcggcgcgccgtcgaagtgctgatccaggccctcgacaaagccgaccaggaccgcgaccgcgagttgctgcgcgacgtgaaagagccggtgctctacgaagccgcgctgacggtgatgatgcggctggtgttcctgctttccgccgaggaacgcggcttgctgttgctcggagacgagcgctacgaggccaactatgcgctctcgaccctgcgcatgcagttgcgcaaggaatccgaggagatcctcgaacgccgctgggatgcctggtcgtgcctgctggcgatcttccgtgccgtatttggtggcatcgaacacgagaacctgcgccttccagcgctgggcggctcgctgttcgacccggatcgttttcccttcctcgagggccgcgccaagggctccgactggcgcaccgacccggccaagccgctgccgatcgacaaccgcaccgtgctgctgttgctcgaagccatccagcagtttcagggcaggacattgtcctaccgtgcgctggacgtcgaacagatcggttacgtctacgagggcctgctggaacgcaccgtcaagcgcaccgccgaggtcacgctggaactggatgggaccaagaatgccaaagccccctgggtcaagttggccgagttggaatccgcccgcctcgacggtgccgaacgccttgccgaactgctccaggagcgctccggcagttctgccagccgcgtgcgcaacgatctggtaaagcctgtcgacgatacgctcgccgaccgtctgctggccgcctgccatggggacaccaacctccgtaatcgcatcaagccttttgcctacctggtacgcaccgatccatggggttatccgctggtctaccccgccggggccttcatcgtcaccaccggctctgaccgtcgcgagactggcacccactacaccccaaaatcgctgaccgagaccatcgtcaccgagacgttgacgccgatagcgtacgtagggccatccgaaggtaccccgcgtgagcagtgggtgttgaagtcacccgccgaactgctggacctgaagatctgcgaccctgccatggtcaggcgccttcctggtgcaggcctgccgctggctggccgatcgcctggtcgaggcctggtcactggctga

SEQ ID NO: 508178 - DNA, 2253 bp, Stenotrophomonas maltophilia
gtgcaggcctgccgctggctggccgatcgcctggtcgaggcctggtcactggctgaaggcagtggaaatccggtgagcgtggatggcgaagtcctggatgtgccgcacaccaaggagcctctgccccgcgacaccgaggcacgcaccgtgatcgcccgccgcctcatcgccgagcgctgcctctacggcgtggacctaaatccgctggcggtcgaactcgccaagctctccatctggctggtgacgctggccaaggggaggccgttcggctttctggaccacaacctacgttgtggcgacagcctgctcggtattcatcggctggatcagctcaccgaactcaccatgacgccgaccgggaaaggtcagcaacgcctgttcgggcagaacatcgaacaagccgtgcgcgaggcgatcgaattgcggcaagcgctgcgccagatgcccatccgggacatccgtgacgtcgaggctatggcgcgactggatgccgatgcacgccagaagctcgacgtgccggagcgcatcgccgatgcgttcatcgccgaagtgctttcttcgggagggaatgccaacgtcctgtccagtaccgtcggcacgctcgcgattcacgccgggcaggccgtcgatggtaagcgcgacgcgatagaaaccatgattcggcgagcgcacaacgcattgagcgccgatctccctcctgaaaagacaagacgtttgccgttccattggccactggaatttccagaggtctttgcgagatcgctctccggattcgatgctctcgtcggcaacccgccgttcctgggcaaccgcctctggaaaagcgcaatgggtgacaagctgcaatggcagtgccagatggtcttgggtgcatctccgggcaagatcgacttgtgcgtggtcttccatcgtcgcgccgtcgacctgctgcgaaccgatggctgttatgggctgctcgcgaccagcaacatcgccgagggtagtgccatcgatgtcggcctcggtgtagtggttcagaacggcatgatctatttcgccaagaaaggcatgccttggcccggcacggcagccgtggtggttgccatcgttggtttcatcaagggcgaatggccggccgaatgcgatgccgatggccggaagtgtgctcgcatcggaccgaggctggagccagaagcctcggatgtctgggccccacaaaccctgccggatgcactctttgctttcgaaggtgtaaacaacagcaaaggtctggcattcgtcatcacgccggacagcccctggtttgagcgactccagaatgaaccggacagcctgctccgtccttacatcacaggtgacgacatcacgagctcggcgctcaatcgcatcggtcgatgggcgctggatatcggtgatcgcagtttggacgagatcgccagacgatggccgatcgcccatcgcttcatcgtcgaagaagtgcaaccgactcgcacggtcgccgctctcaagagttacaaaggtttgatcgatcgttggtggcaattctggaaccaccgcgccgacctgatgcggcgcatacggcagcgcggaaatttcatcggctactcaaagaacacaaagtacccggttggcatgctcgctccgtccgattggatctacacgaacaaggtacttctgatcggaatggagcgggatgacctctatgccatctcgctaagcacaggctttcgtgcgtggctcgaacgattcagcggtgggaatctgggcgagacgctatcgctttccatcagcgagtcggtcgccaagtacccagttccgagcagtgaagtctcccgggcgggcatcgatgcggcaaagcgtttcaacgacttggcggttgcattcggcgctgcgcacgaatgcgggttgaccgacgtcatgaacgccatccatacccctggcgaggaggatgcaacgatcgtcgagctgcggcagttactggtcgtaatcgataacgaggtgacagcggcctatgggtgggatgaccttgagatcgtctacgacttccgtgagatcgatggaggctccgccaatgatccttggcgttggtctttgtcgagcgaccttaccgctgacctccttggacggctgaccgcactcaatcgtgaacgcttcgaagcagctgcgagtagcagcagcggcgcgtccacaacaacaaagtccaaacgcggacgcagaccgaaggcggcctctcccgccaccctcgacgggctgttcggtgagggagagctatga

SEQ ID NO: 508179 - DNA, 1956 bp, Stenotrophomonas maltophilia; identical to SEQ ID NO: 346444

SEQ ID NO: 508180 - DNA, 4020 bp, Stenotrophomonas maltophilia
atgacgaaaacttccaacgcatggatcgccatcgatcatggcctcggcaccgaccacaggctcgcgccctatatcttggttctgaagggtgagcgttctctctatcaggccatcgaggaggacgactgggttctggtcctgaaccccgttggtagcatcacccgtgtcgggcgtgtgctgcgggttcgttccgatctcgaaaccaccacgctctacttcgaccgactgctgtcgatcacagaccccgtctcgatcggcctcactgcactcacgccaccgtcttcgagcagcatcggtcgggtccagtggaccgatttcgtcgaagccctgcccaaggcattgcacaagaccatcgccgaagtgccgacggtcggttccgatcccagatctccccagcatcagcaggaactcgcctacatccgcgaactgctgcaactggccgtgatggacgacttgctcggcccggctggcggccctcatgagcgcatcgtcgacatgggtgtgcgggatcgctatctggtgggcaagctcgccccgcgtgaggcggcacagggtggcatcgaagggctcgaagggccactggcgaacgacgaggtcgaagagcccaccgacccgaaggcgcccggccagcatgaacccggtgcggagttcggcacggcgacggggcgtgtcgagcccgagtctgacgccgccgatgagatcgacgctgccagcaatcaatcgttggtaccgagcagcctgggcatgaccttctgtgtggatggtgacgccgaacggatcgaaatcgaggtgcgctggggtcgctacgagcgcagcgatgagcacgagatcttccgcatccgcaagaacaaggagaccggcgccgaggagcagaccaaggccaaggtctggcaacgcatcccttgtggcggcaagctggtgctgccgctcaccgaaggcgtgatccctcatcaggcgccggacaagacctatcccgaagtgcgggtgcagggctccgtgcgcgccaagaacgcgaatggcgatcgcttggtgacgctgttcctggtcaacgcacaggaagaacccgagaccaaccgcgataccgcctgggtcttccagccggagctgatcgtgcgttcggaagctgaagcacccaagcgcgcaatcttccgccgccggcctgtgctggatgcggacggtatggacccggagcgtgaatcgctggagatgatctaccgcaaccgggtggagttcgcggtggggcacggcgtcgccgtccatgccgaagcggcggatgacgtgacgctggccaccgaggtgcgcatcactgtcatgccgcagtacgaggtgcaggtcaccgagacaccggggctggaccccgccgaccggccggcgatgaaggaaatggtgagcagtggcctgctcgacatgcagcgcctcgccacactggacatcgatccgctggtcgacgccctcaacctgttgaccaaggattacgccgcgtggatcgatgagcagcgtgctcgggtcggcatcgacgtgcttggctacgacgcgcagtcgcaacaggcaatggatcgatgccaggagatccacactcgcctgcagcagggtatcgatacgctgaagagcgacgcgaatgccctggcggccttccgtttcgccaaccgggcaatggccacgcagcgcgtgcgtagccaatacgccctcgaaatccggcgtggcaaggacgtcaccgtcgagcagttcgacgtactgaagaaccgcagctggcgcccgttccagttggctttcctgctgctgtcgatcccatcgctggccgacccgacgcacccggatcgtgtgcaaccggtcgaagcctatgccgatctgctgtggttccctaccggcggtggcaagacggaggcgtacctaggtgtagccgccttcaccatggccattcggcgcatgcagggcaacctgggcggctacgacggctcgcgcggtctggccgtgatcatgcgttacaccctgcgcctgctgacgctgcagcagtttcagcgtgccacggcactgatctgtgcgatggaggtgctgcgtcgcgaggcgctggccaagggtgacgaatcgctcggcatcgaacccttcaccatcggactgtgggtgggcaacaaggtgacccctggcacgaccgaggacagtcatcgggccatcgaggacatccgcaatcccggtaagtacaacgccggcgcggcgtctcctgcgcaactgaccagttgcccttggtgtggctcggaagtcgccccagggcgcgacgtggaggtcgacaaggggcgtgggcgcaccttcgtctactgcggcgacaagaagggccgttgcgacttctcgaaaggcaagtccagcaagctcccgcacgcgggcattccggtactggtcgtggacgaggagatctaccaccgtcccccgacgatgatgatcgccaccgtggacaagttcgccatgatggcgtggcggggccaagtgcgcacgctgttcggtcgggtcggccaggaatgcgagcggcacggcctgctatggcaaggcgcggactgccatggtaaccaccaggccggaaaggggctcgctgccaccaaggtcaagaacatcagcccgatccgaccgccggacctgatcatccaggacgagtttcatctgatcagcgggccgctcggcaccatggttggcctgtacgagacggccgtggacgagctgtgcggctggaagctcggcgaacatatggtcaagccgaagatcatcgcgtcgaccgccacggtgcgtaaggcccgcgagcaggtgaacaacgtcttcatgcggcgtgtgtcggtgttcccgccgcacgggctggacgtggaagacaactatttctcggtccagcgaccgatcgaggacaagccgggacggcgctacctcggggtctgctctcccggaagttcacgacctgcgatgctgatccgcgtctacacggcgttcctgactgctgctcaggcactgttcgatcacttcggcgagccagcagatccgtacatgaccatggtcggctacttcaactcgctgcgcgagctggggggcatgaagcgcttggccgaggacgacgtgcagacgcgttcctaccgggtgcagatgagcatggtcgagcggcccgcgttggcgcaacgcagcgtcagcaacatccgcgagctgacctcacgggtctccagccaagacatcccgaagtacctcgacaacctcgaggtgaagttcaagtccgagttcgatgccgcagccggcaagtacgtgaccaagtggcaagagggcgacacccgggcgatcgatgtggtgctggccaccaacatgctgtcggtgggggtcgacgtcaatcggctgggactgatggcggtcaacggccagcccaaaggcacggcggagtacatccaggccaccagccgagtgggtcgttccttccccggcttggtctgcacagtgctcacctgggcacgaccacgagatctctcgcactacgaaaccttcgagcattaccacgccactttctacaagcacgtcgaagcgcagtcggtgacgccgttctcgccgcgcgcgatggaccgtggcctgaccggctcgctgctgagcctgatgcgtctggagaacgatgttttcagccccaacgagggggcaggcaagttggacaagtcagaccagaccgagatcaccgatgccatcgatgtgctcgtcagacgagcctggaatgtcagcgagctgtccagcaccaagggcctggccgaacaggaactcaaggagcgcgcagatgagtgggccaaggaagtaggcaaaggtggccgcatcctggcctatgagaagcgcggccccgagaaggacaagacagttgcattgatcaggtcaccgggcatccaggcctgggacaactggaccgtaccaatgtcgatgcgcgaagtggagcccggcgtgcgtttgatcatgaatacaagccacatcacggacgaccacgattggaagcctcgtcccgcgacgaaggatgaggactga

SEQ ID NO: 508181 - DNA, 1860 bp, Stenotrophomonas maltophilia
atgacgacgagcaataagactccagtcggagaagtaagacccagccagttgctctggacctacgggccaggggcgttgatcgatctgccgagcctgtccgtcgtgacgcttggcatcgaccgatgggaaaaggaccgctgccaaccgatccaggaagccagactgctggccgccgttcggaaggtgcttggagcacaggtcgagaacttgcggatgccgccgttccagaaaagcgagctcgtcgatgtctggtcggccgaggccaacatcggcgttcccgtccggccattcccgcgctggatgcgctgcgtgaaatgcggcctgctgtcccccttcgatgccggactgttcgagatcaaggagaaccgcttcaggcccgagcgaacccggttcgtccacaaaggatgtcggggttcgaagggcgatcaacccgccaaggacgccgatgccgtaccggcacgtttcctgttggcctgtcgcgatggtcacctcgacgacttcccttggcactacttcgtccacggtggaaacagttcatgcaagggcacgctacgcttcttcgagagcggcgcctcgctgcagacggagaatctatgggcgaaatgcgatacgtgtggtgcgtcgaggagcatggcccacgccttcggcaaggccggaaaagagaatctgccgggttgccgaggacgacatccccacctcgaccacttcgacaacgaatgtgacgaggaagcgcgggcggttctgttgggcgccacgaacagttggttcccaatcacactttcggcgctcgcgattccccagaccaaggacccactcagtcaactgatccaggatggctgggagttctttgaagagctggagtccgaagcggaagtgttggtgacggcgaagacgcttaaaaagaccggagcgctgccagggatcgacaaatatcctgcggcgtcgatctggtcggctatcgaggcgcaccgtagcggtggcggacaggaggtcgtgggcgaggccgatatcaagggccccgaatgggacgtgctgacagaagcgaatccgcccacggactacccgcacttcatgagcaagaaggtcggcacgccaccggcttttgcgaagcacatcggcagagtgctgcttctggagcgactgcgagaggtcaatgccttgctcggttttactcgggtggaggcgcccgaagaaactggcgacccgaacgaacggccccagatggccaacctctcacgaagcaaaccggattgggttcccgcgaaccaggtacatggtgagggtatcttcatccagttcgatgaaccggcgctcgtcgcttgggaagcactacctgccgtcgcgcaggtcgacaagatgctccggggcggccacaggggatggcgcaattcacgtcatctcgatcctgacgagggctaccccggcattcgctacgccctgctccacacgctatcgcacttgctgattcgtgagctggcgttggagtgcggctacaacgcagcgagtatccgcgagcgaatctatgccgacacctcgggcgagagtccgcaggccggtatcctcatctacacggcagcggcggactccgatggaacgctgggcggtctcgtcgatctcggcaagccggagaatctgggtcgcctattggaacaagccttgaatcgctcgaagatctgctcctctgacccgctttgctccgagcacgatcccgagaaagatcgctcacttcatgctgcggcgtgccacgcttgtagcctggtggccgagacctcctgcgagcgcggcaatcgctacctggatcggtcattgctggttccgaccctggaacgtatcgacgcggctttcttcaagggcttgtga

SEQ ID NO: 508182 - DNA, 762 bp, Stenotrophomonas maltophilia; identical to SEQ ID NO: 346446

SEQ ID NO: 508183 - DNA, 693 bp, Stenotrophomonas maltophilia; identical to SEQ ID NO: 346447

SEQ ID NO: 508184 - DNA, 1209 bp, Stenotrophomonas maltophilia; identical to SEQ ID NO: 344164

SEQ ID NO: 508185 - DNA, 177 bp, Stenotrophomonas maltophilia; identical to SEQ ID NO: 324481

SEQ ID NO: 508186 - DNA, 1149 bp, Stenotrophomonas maltophilia
atgcagttcggcctccagctcttgcacggccaccgggcgggccgtggccgacagcttcacgcgtgcggccgcctggtcgagcaggtcgatggccttgtcgggcaaaaagcgcgcggtgatgtagcgatcggacaactcggcggcggcgatgatcgcatcctcggtgatgctgaccttgtggtgggcctcgaaggtgtcgcgcaggccgcgcaaaatcatcatggtctgcgctaccgtcggctcgggcaccatcaccggctggaagcgacgctccagcgcggcgtccttctcgatgtacttctgatactcgttgagcgtggtggcgccgatcaggttcagttcgccgcgcgccatcatcggcttgaacacgttggccacgtccagcccgccttcgccgccaccctggcctgcaccgacgatggtgtgcacttcgtcgatgaagagaatcagctcgccctggtgctcggtcacttccttgagcaccttctgcacgcgctcctcgaactcgccgcggtacttggcgccggccaccatggcattgatgttgagttccaccaggcgcttgtcgcgcagcgtctcgggcacttcgccggcgaccatgcgctgcgccagcccttcgacgatggcggtcttgccgacgccgggctcgccgatcagcaccgggttgttcttcttgcgccgggccagcacttcgatggtcgtctcgatctcctgcgcgcggccgatgaccggatcgagcttgccctcgcgcgccatcttggtgaggtcgcgcgaatacttgtcgagttccggcgtgttggtcggcgtctcggcgcggccatcctcggcccctttgccgaccaccttgcttacctgctggcgcagcgcttgcggcgtgaggccgtaacggcgcagcaggttggccgccaaaccttcgccttcctcggcgagcccgatcaggaaatgctccggcccgacataagagtggccgagttcgttggaggccacgaaagcacggctgagcgcgtccttgacccggggcgacacgccgatctcgccctcgaacggcttatcgccgcgcttggcttcggattcgatctggcgcttgaggtcatcgaccttgatcttgaactgccccaggatggtcttgaccacgtcgctgtcggatag

SEQ ID NO: 508187 - DNA, 2973 bp, Stenotrophomonas maltophilia
atgaatctgaacttcaatggacgcgtcctgaagcgtaccgctctcgcggttgtcctgggcgccctggccggcaccagctatgcccagagcactgccggtgacatcgtcggtacggcgtcctccgccgacaaggtccaggtcaagagtctggcctcgggtgcgacccgcgaaaccaacgtcagcagcgacgggcgcttccgcctctcccagctgccgaccggcacctatgaggtgatcagctacagcggcggcacccaagtaggcagcacccgcgtcaatgtcgtcgccggtcagacggccacggccacctttgccgctggcagcgccacctcgctggataccgtcaatgtacgcgcggccgccgttgctccgatcgacctgagcagcgtggaaacccgcaccactttcaccgccgagcagctcaactcgctgccggttggccgcgatgtgaccagcgtttcgctgctgacgccgggcaccgtctcctccagcggctacttcggcccggcatcgttcggcggtgcctcggcagcagagaacagctactacgtcaacggtttcaatgtcaccaacctgtatgacagcctgtccttctcggaaatcccctaccaggcgatcgaccagctggacgtgcagaccggcggctatggcgcgaagtacggcttctccaccggcggcgtgaccagcgtcaacgtcaagcgcggcaccaacgaatggaagggcggtttctcctggaccggtgcgccatcgtgggggcgtgaccacctcccgaactcgcaccgcaatgacggcgagatcttccgcgattacagccaggccgacagctcctccaacgtctactcggcctgggccggtggtccactgattgaagacaagctgttcgtgttcgccatgggccagttcagcaactccaagagctcggtctatggcgggcgctcggagtacaccgacgctgctaccggcggcacctcgtacgattaccaggtcaagacgccctactggctgctgaaggtcgactggtacctcaacgagaacaatcacctggaatacaccgggttcgacaacggcaaccgctatacctacgactactacaacaatgtctatgacgtggaagccgaacgttcgaaccggaccagctacaagggtcagctgatcggcaagcgcggcggccagaccgacatcttcaagtggaccagctacctcaccgacaacctgaccgcctcgctgcagtacggccagatgcgcaataccgcctctgagttcaccgtcgaccgcaatggcgtgatgagctactacaacggcgacgtccactccccggacggtgcctgcccgtacgtcgtctacaacggcaacccgatcggttgctcggtcgcctcgtcggtcgacatgatgggcggcaagaacgagcgcaagggcggcaagctggacttcgaatggcagctcggcaaccaccgcctggcattcggctacagcgacgagaagtgggagtccacccagggcacggcttactcctccggtgcctactgggtcgttcgcccgacgcgcgcgcgccctgacgcataccggatcaactaccgcaccggcggcagcgtcagcatcgaccagaagtcgtggtatgtgcaggacaactggcagatcacggacaacttcatgctctacctgggcatgcgcaatgattcgttcaacaacaagaacaccgacggcgtgagcttcgtcaagcaggacgacatctggcagccgcgcttgggcttctcgtgggatgtcaccggcgacggccgcagcaagctgttcggttcactgggccgctactcgctgccggtcgcggcgaacgtctccctgcgcgctgccagcccgtcgtactacaccgtcgactactacgactacctgggttcctacgacccggtttcgggtaagcccaatgtcgcagccacgccttacaacagcctggtctacaacggcgaaaacggctcaactccggaccccaaggccgtcgccagccgtggcctgaaaccgtacacgcaggatgaagccatcctgggctaccagtaccagctgtccagcgccaatgatttcttcaatgactggacggtcggcatcaaggccacctaccgcaagatccacaacgtcatcgacgatacctgcgattcccgcgccatctacaacgccgccgtggccgctggctacgacgtgtcgagctgggacagcgaatggagcgtgccgggcagtctgccgggttgctacctgttcaatccgggccaggatctgaacatctccctggacgtcaacggcgacggcactccggaagacatccacgtgccgggcaacgtgctggggccgaaggccaagcgcacgtacaaggcactgacactgagcgcggacaagcgcaccgatcgctggtacgccagcctgtcgtatacctggtccaagctcgatggcaactatgaaggcctggtcaagagcgccaatggccaggacgataccggcaccacgtcggacttcgacttcgccgagatcatgtacggcgcggacggctacctgttcaatgaccaccgtcattcgatcaagctgttcggttcgtatgatttcacgcccgagtggcagctgggcgtgaacatccaggcacagtccggttccccgatcagctgcttcggcggcggcaccggcaccttcgacaccgagtacggctacggcgccgccttccactattgcaatggacagttgtcgccgcagggcaccaccggtcgcacgccgtggacgctgaatgtcagcccgagcctgacttatcgtccgaactggctgtcgggcctgagcatccaggcatcggtgctcaatgccttcaacagcatcaagccgctgcaggtctatgaggtgacccgcgacgaagactacgaccgcacctacaacaacgtgggcgtgggcaagtactacaccactcctcgctacgtccgcttccaggtccagtacgactggtaa

SEQ ID NO: 508188 - DNA, 189 bp, Stenotrophomonas maltophilia
atgaccgggttgcgtagcgcgtgtggcagcggtgggaccggcatcgggaccggcatccggaccggcatcgggaccggcatcgggaccggcatcgggaccggcatcgggaccggcatcgggaccggcatcgggaccggcatcgggaccggcatcgggaccggcatcgggaccggtagagtcgactgttag

SEQ ID NO: 508189 - DNA, 531 bp, Stenotrophomonas maltophilia
atggcgttccccgtactcggacatgtcgatgcgcagcagcgcaccttcatcgccatagatggactcggccagcgccttggcgagctcggtcttgcccacgccggtcggcccgaggaacagaaaagtcgccaccggcttgctgccttcgcgcaggcccgcgcgcgccagacgcacggcatcggccaccgcgcgcaccgcttcgtcctggcccaccacgcgctcgtgcagccgctgctccagatgcagcagcttctcgcgctcttccaccgtcagctcgctgaccgggatgccggtcagccgcgagacgatctgcgcgacatgctcggctttgacctcggcgctgcccgaggcgcgctcgcgttcccattcctcgacgagcttcttgagttcggcctccttggcctcgatgcgcttgcccagctcggcggccttgtcgtactgcttgcgcgaggccatgtagtcctgctcacgccgcagctggtgcagttcggcctccagctcctgcacggcaaccgggcgggccgtggctga

SEQ ID NO: 508190 - DNA, 1134 bp, Stenotrophomonas maltophilia
atgctcggtcacttccttgagcaccttctgcacacgctcctcgaactcgccgcggtacttggcgccggccaccatggcgttgatgttgagttccaccaggcgcttgtcgcgcagcgtctcgggcacctcgcctgcgaccatgcgctgcgccagcccttcgacgatggcggtcttgcccacgccaggctcgccgatcagcaccgggttgttcttcttgcgccgggccagcacttcgatggtcgtctcgatctcctgcgcgcggccgatgaccggatcgagcttgccctcgcgcgccatcttggtgaggtcgcgcgaatacttgtcgagttccggcgtattggtcggcgtctcggcacggccgtcctcggcccccttgccgaccaccttgctcacctgctggcgcagcgcctgcggcgtgagcccgtagcggcgcagcaggttggctgccaagccttcgccttcttcggccaggccgatcagaaagtgctctggccccacataggaatgactcaactcgttggaggccacgaaggcacggctgagcgcatccttgacacgtggcgacacgccgatctcgccttcgaacggcttgtcgccacgcttggcttcggattcgatctgccgcttgaggtcatcgaccttgatcttgaactgccccaggatggtcttgaccacgtcgctgtcggtcagcgccagcagcaggtgttcggtatcgacttcgggccggccgaactcggcagcatgtttggcggcttcctgcaacagggcctcagactgttcgctgatacggctggccagcccactgccgcggcggcgcgccgtgcccgccgttgcgggagcggattcgccgaacgaggcatcgacgacctcgtcggtatcggccgccacggacggtgcatcgtcaccgatgcggaagaagtcgctgccgaggaagtcttcgaacaaaccgctgcgcgagccaaacagagcctccagcggcgagacggtgcgcttttgctggcgcgccagttggcgatagtgatcgtcacacaacagcatggtgctgtggcgaccattgagattggcttccacccgcaccgtggcgggctggccgcagacttggcactgctttctggccatgctgatgctccttaa

SEQ ID NO: 508191 - DNA, 279 bp, Stenotrophomonas maltophilia
ttgggggacgcgatcccccgacgtcctcggaacgaaaggaatctggagccggtgacagcggctcacctcagacgcgcgcgcaccaggttcgagatccgcgacattgcgacgcggtacggctggcagggcgaagtggagcgcgctctagtgcgctttgaagccccttcgctcaaatacctgggcagtgatcaactcgaccaggtgttggcacagctgcggaccctggaagaatgcctgcagaccccctgcgatccgcccgactcgccaccggcccgttaa

SEQ ID NO: 508192 - DNA, 219 bp, Stenotrophomonas maltophilia
atgagcccgcagattccgcgaatcactgccgacctgatcagtgccctcgcaggcattagccagctcgaacgcaaagaggcattgccccagcgctgccacgtcatccaggccatcgccgagcgcggcgcccaggttgacgccctcacggtcggcgagttgctccagctcgccaaccaatccaaagcccacgccaccgtacagagagggttccccgcatga

SEQ ID NO: 508193 - DNA, 492 bp, Stenotrophomonas maltophilia
atgaacaacacacccttcaccgaggaacagcaagcagaggtgcggcgccgcatcgtcgccaccgccagggatgccggcggcatgatcaccacctctcagctgtgcgaagccctggaggacgtgccggacgcagagcgagtctatgcaatgtgcatgctgcaacgacagggcgagctggagtccaagggcacaggcagcgcggcgatccacttcctggtgcgacccggccaggacgcgacagcagtcgcacgcgtgcccccgttcgacctcgacaagggaaaggtaacgatcaacgtgcctgcaccgttgcccccgagcgcagcccggcaggatgacctgcttggattgcgcaaccgcatcaatgccatcacccaggacctggacgaagtgctgctagaagcctgcagcaaagaaatgcctcacaaggcgatccagcatctgctggacgccaatcgggccgcccgcgcggcagccgacaccgttacccgctga

SEQ ID NO: 508194 - DNA, 285 bp, Stenotrophomonas maltophilia
atggccgagcagcacacctatcaagagttcctgcagctcgcggcggagattgccgaccggaccgtccgcagcgatatcgaactgtttgccaaggacgtctatatcgacggcatccagcactacgacctggacgcaccgaggctcttcgacgaagacgtgtcgatggttcgggacgccctggagtacatcgacctgcgtggcgaaggcgtcttcccgtgggtgatgcaccgccacccgcagcaccccaacctggtgcggtttgaagaccgggcggcgggcgtatga

SEQ ID NO: 508195 - DNA, 603 bp, Stenotrophomonas maltophilia
atggaacagcacggcctgagcgaggcagatgctgcatctgctgaggtcggctcctcccaggcggccaccggataccgtggcggcgaaatcccgcagtccctggttgccctggcgggcttggtcgcggagggctatcgctgctcgctggtcatccagcgccgtcgctgcctgggcgtccgctccggctcgttgacagttatgggaacgacagtggtggagttctatggcacgggctccgacccggaagtggccgcgtacgccttcacggtactgcgtcgccagctgcagcgcggcaaggccgcgcacacccggcgcatccgtaagcaggcgaaccgtgatcgtcgcggtgaggaattcgctcgcggcttcgtggccgcactccgccgcctgttctcccagcaggaaatgagccaggaacgccgagccgcgattgacgcggcgatcacgctgcggaatggccagctcggcaccacagcgggcaaggcgatcaccaaggggcgcgccagcgacaacgaccgccgggcgggcttcaaggcgggcgaacaggctcggctcaatcaagggctgggcatgggcgcacgccagttggaggtgatcccgtga

SEQ ID NO: 508196 - DNA, 432 bp, Stenotrophomonas maltophilia
atgattgaccaacgcgacttgctcgaaatgccagacggtgaagacgcgctcgatctgatcgagcgcggtagctacgatcttcccgacacccagtgggagggcatgctggtcgctttggtcgctgtgcttgaggctgccttccgccgcctggggatagatgaggcccaggccactcgcctcgccattgctgctgtcctggctcagggagactatgccggtggacgccagatctacatcccgaggggcgttcgcttgcgcaacgcccttcgggacgcagaaatctacaggcaggccaagcgcggtaacatcaccgagctggcgcagaggcatgggctgacggaggttagcgtctaccggatcatccgcgagcagcgagagctgcacctgtcgagggtgcaaggaagactcgatcttggagaagttggacgatga

SEQ ID NO: 508197 - DNA, 360 bp, Stenotrophomonas maltophilia
atgaacatgtgcaaggtagctctctcacttatggtcgcgctgtgtttggccggctgtggatcggcgcagaacgatctagttggaaaggcagaggatgcggttagacatatcgccaaagatccggattcagtgattttccgggaggtgcggattgttcagctcgataccggcgcgggcatggctccgatcgtatgcggggagttcaacgcaaagaatggctttggcggctactcgggttttgaggcgtttgcgtggcacccagatggaaagctgcttgcaaaggccctgtaccctgatggcgtggaggtagtgcagcaggggatcagcgctctctgcgcaggcaagatgccggaagtctga

SEQ ID NO: 508198 - DNA, 651 bp, Stenotrophomonas maltophilia
atgtcagtgagccggattgagtccacggccggaaagctcctggccatcgtgctgctgctggccaccgcgatcgccgctggcctgtgggcaggcaatcgctgggccgagggcggccgcgcaatcaaggaccgcgccgaacaagaggcgtacatcggggacctggagcaacagctcacccgtctgcacgcgcaggccgctgatacggctattgcctatgccgaggcgatcgaccggatgaacaccattgccaactcgttggagcacaaccgtgaagagaaccgcaggttcaccgaagaccagcgggtggcgctggcatcgttgcttgatcgccgtcccgagctgcgtgctgctcgcgttggcactgacgtcctgcagcactggaaccaaagcaatcagggcaagcccgccgccgccgcccccgcccgcgatgccggccagcctgaaacaggaatgcccggcgctgccgatggcacccaacgacctgctggcgaccctgctggggaatcacgacctggtggcgtccctgtatcacgactgcagcgcacaggggcgagcgttgatcctggccgccgacgactgggaggctacggcgtggcagtggtactgccgggctctggagcagtcgcaagtccggccagcggggtgcgctga

SEQ ID NO: 508199 - DNA, 174 bp, Stenotrophomonas maltophilia
atgaccaacaaacccaccccgaccagcggcggcgcctggcgcgtcattgatggcgccctggtcaatgaggctcagccgagcctggcgccgcaccagatcacgccgaaggtcgccaccgagccgcccaaggcaacgcgccagcggaccaccaccacgactcccaccgaggaatag

SEQ ID NO: 508200 - DNA, 441 bp, Stenotrophomonas maltophilia
atgacggaatcaaccgcaacgcctcagacacagggatcggacaccgatgtgatcgacgctcctccccggctgcctgacgcgctgctgcaggagctggtcgaaattgccggcgctggattcggcttcggaatcacccttacggtcgggggcacgctggtcaccggcaacgtctgctccggcagcaagtacatgcagttcattttcgaggaatcactcgccaacgtggacgagcaagtgaaggaggctatcaagaagcgcctccagccctacgccgacatctacgcacctggcgcctggagcggccaagcgcccacctacattcacctggagaacgctcggttcgtcactccgggcgtgtcagggtcgactcctgcctcgccggtgatttggcgcgggcgcatctccgacgtttcgggcttcttcttcggggtactgggttaa

SEQ ID NO: 508201 - DNA, 345 bp, Stenotrophomonas maltophilia
atgccgctgcccgatgacttctactggacgaaacactctgccagccggacagaagatccgctgacggtgatcgcctgcgagggtgaatgggttgttgccatgttccagcgggtgaacggcggcatctggatagcgtccctggaccgccatcggcatggaccaggcggacccgcgcgggtgtgcaccagctacgagcagggacggacaggcgccgagctgtgggtggccaggcaccaggggcgcctgcgcgaggatgtggccaagatcaccaggtggcgcgaggccgtgagagcgaacaggctggccaaggcatcgctccctccccccttccattggatggaatag

SEQ ID NO: 508202 - DNA, 282 bp, Stenotrophomonas maltophilia
atgcaaaacaatactttcactgccgaagaatccgtcatgatcgacttggggctgaacccgggtttagtggaaaactatttcgaagtctccctggagcccgtcagcttcgaaaaggaagagggcttctcttggggctctcgctggatcgccgtccacgaggcgcattgtcacaacgataatagactgatggcagacggccgagagtttgttgtcacaaaggccaacccgacgttcaaaaccttgctcaacgcttggcgtgaggagcagcaacgagctgggtga

SEQ ID NO: 508203 - DNA, 210 bp, Stenotrophomonas maltophilia
atgcctaagctctatgccatccaatccaagcaaccggcctcacgccggttgtctggaccgcagaaagaactgatctacattgatgaatgcaacgttctgattgaaagcgatgcggatgtcttggacatccgcgagcttctcaagctctatgaagaagatttggaaaagaggagcaagagcgttttgcaggagatgcctcgtggttggtaa

SEQ ID NO: 508204 - DNA, 798 bp, Stenotrophomonas maltophilia
gtgcggtcgcgggacgtgttcacccattgcccgttcggcaccaccgccctgcccggccccacttacggcgactggtcggcgtgggcagatacggggggccgtcgcaacgaggtcaacacgtgcaagcccacggccccgcgctgcagcgatggcagcttgcaggtggcggcgtggtattcctccgattacgtggacctcccgctcccttcgggctcctccgcgattcaatactggtatcccgacgcagtggttcgtctgactccagcggagacagcacggctgcaatgggcattgaacaacgtgccggtaacccgcgtggagacccctgccccgatgcctggcaactggccggccgacgtgagcgaatgggctttctacgaagagcaatgcaacgcactttcggacgcggggaacatccgttacgcctattcctacgatttcgagtgcgtttccaacatgggcatgcactactgcgactacaactggaccaccggcggcacctctttggccgtgtgccgccaggcctgcgcgtccgatttggtgggcaagaccaacaatccgtatcgctgggagtggcccgagtcgtcggtggtggcttcgacgccctacaccacctgcacgggccagcctggatgcacgcccaacggcggttttggcacccagcaaggcctgccggcgtgcaacgagcacaacgtgggcgagaccttcgcgttcaactggtatcgccagttctacaaccccgtgcgggtggactaccaggcactcacgctgacgtgcagggggcccaccgcccactga

SEQ ID NO: 508205 - DNA, 159 bp, Stenotrophomonas maltophilia
atggcgaacccggatattttggctggaatgtttttccgcagagagggcctagatgtgtatcagctggatcagctccgacgtggcggctatctggagatcgaggatagcggtcgcgaagtgttgtccggctacggcagaagcctgatcggtatcagctga

SEQ ID NO: 508206 - DNA, 261 bp, Stenotrophomonas maltophilia
atgaaacagaagatcgtggaggaagacgggcgcctggtggcccgtttcatgcctagccccttggatgcagactcagatgcggtggcgctggtccaggccatgcaacaagtccgcaacaacctcttccacgggggaaaggaagattcggaagaggatccatacacggaagacgacgactgggtgtatgccgcgactcaagttgccctcgccctccaacgcgcgttggtgaacggatggctcgatagcagcggggagcaataa

SEQ ID NO: 508207 - DNA, 666 bp, Stenotrophomonas maltophilia
atggagcaggactgcttggagaatccgccagagtgcttcgaccccgagcaatgggacatgtccatggtctacgaggcggcctttcatcagagcctcgaacattacgacctgctccatgaaatgcgagagcgcaccctgctgggtatcgccgctggcatgtatcaccacttcgaaaagagctttcgcgtccgcgtcgctcgcgaactgcgccaggccgggtgggtcattggagagaagacccgggatcaggtctggcggtgcgaatggactcagctggaggcgctgttggtcgctttcgggtgggatgtgccgtcagtgccgcactaccaagacctcgaggccttgcggctggtcgtcaacgtcttcaagcatggcgaaggcccggccttcgaagccttgaagcagcgtttccctcgattcgttccccaactggagtcagatgaggggtcgtggcgctacgtggactacacccacatgtgcgtgaccgaggagcatttggatgctttctcaaatgccatcgtgagcttctgggaggccatcccccttcaactggcagtggaagagggggtgactgctttggagcttccatccttctacgccaaagcaatgcggcaagacgggtgtccgaccttcatgacgcagcagaccgctccccactccccctga

SEQ ID NO: 508208 - DNA, 198 bp, Stenotrophomonas maltophilia
atggataccgcatcgcaagaagttttttctgaagagcagcgccaagaggtcatccggagccaagagggcatcctgatggagattcggaagcttcatgtgaagcaccaggccgatctgactgatcgcttcaataaggggttggtgttgggaatgtttgttggagccgcggctctagcgcttgggatgatgctcggatga

SEQ ID NO: 508209 - DNA, 246 bp, Stenotrophomonas maltophilia; identical to SEQ ID NO: 501367

SEQ ID NO: 508210 - DNA, 3003 bp, Stenotrophomonas maltophilia
atgaaggcttacagcatcaagcgggcggcgttgtgcgtcgccctcggggcgtgtctgggcgtgatcgcgcccagcgcattcgcacaggatggttcggtggtcggccggttggtcacggattcgggccagcgcctggaggccgctaccgtaaccgtgcgcaatcctgccaccggtttctcgcgttcagtgaaggccgacgccagtggcagctaccgcataccgcagttgccggtaggcacctacaccttggaggtggcggtggctggcggcgcgcctgcgcaagtgggtgaagtgacggtgtcactgggcaacgccaccacggtcaacgtgccggtctcgggcatcagcacgctgggcgccgtgcaggtgcgtgcacctcaggtcatctcgatggtggacgtaacttccaccgactcgtccatgaacctcagccgccaggatatcgagcggctaccggtcgaccaggatctgaaatcagtggcgatgctggcgccgggcgtggtctcgggcaaaggctcgctgggtgcgcaggggatctccttcggtggttcgtcggtggccgagaatgcggtctacatcgatggcctgaacgtgaccgacttctacaaccgtgtcggcttctcgtcggcaccgttcgcgttcttccaggaattccaggtgaagaccggcggttactcggtggagttcggccgtaccaccggcggcgtgatcaacgctgcgacccgctcgggcagcaacgatttccacgctggcgtcgagtacaccttcgagccgcgtgcctggcagtccagcaagaacgatcactacaccgctgacggtacgccgtacatcatcggcagccaggacaagcacaccaccaaccgcctcaacgtatggggttcgggtgcactggtgcaggaccgcctgttcttcttcggcatgtacgagatccgcgacaatcgcgcccagtacaccaacaacgatggcaacgtcttcaaccagggcagcaccaacgacccgttctggggcggcaagctggactggcagatcaacgacaaccaccgcctgtcgctgatgggattctcggacaaggacaactgggcctacgacgtctacggcttcgacctggccaagggcgagcccactgccaagaccaacgagatctacacaaccaacggcggcaagaactgggccgcgtcctacaacggccagctcaccgaaggcctgtcggtgcgtgcgatgtacggcaagaaccagcgctatgcctcgcagcgtagcatgaccgacctggagtgcaaccgcgtggtggccgagagcggactggctccggcaggcgtaccgctgggctgtaccaccaactctaccgtgcagtcgcgcgtggatgaccgcgagcaggcgcggctggatttcgagtggcagctgggcgcccatctgctgcgcttcggtgtggatcacgagaagaacgtgtccacctatgaccgctattatccgggccccggtgcgttctactacaacgtctacaagaccacccccggctcgatcctggagaacggcggcgtggtaccagcgggcactaccgcctacgtgcgtgcgcggcgcaatgaagtggggggtgagttcgaaagcaccaattcggcgtactacctggaagacaactggtcggtcaccgacaacctgctgctgaacctcggcatccgcatggagaccttcgacaacaaggacgccgaaggtcgcagctacatcaagatggacaacatgtgggcgccgcgtgccggcttcgcctgggacatcaagggcgatggtgcaatgaaactgttcggcaacatcggccgctactacctgccggtggccaacgtgatcaacatcaagcaggccggtggcctgcttgatgaacgcacctactatgccttcaacggttgggacatccgcgagatcaatggcagccgctatgccgtgccgcgcaccggtgcgcagatcgggccggtggacaactcgcagggcgatggcaccgtgggtgacctgcgctcggaagtggaccgtgacatggatccggtctaccaggacgagctgatcctgggcttccagcagatgctcaacgagcgctggtcctatggggtgcgtggcatctaccgcaagctgcacaacgccatcgatgacatgcatatcactgccagcgcgcagtgcggcaacgccgaagtgggctgggtgatggccaacccgggcaggaaggtcaccgtgtggggggataccaactgcgacggcacctccgatggctggttgaccgtggacaccagcaaggaaggctttgcccagtacgatgacaagggcaattacatcggccagatcggttgggacaagccgcgtcgcgactacaaggcactggaactgcagttggaccgtggctgggacggcaagtgggcgatgaatgcctcgtacacattggcctatgggcgcggcaacgccgaggggccggtcaactccgataccgatttcgccgataccggccgcaccgagaacttcgatgatccatgggtcaaccgtggaggctatggttacctggccaatgatcgtcgtcatcagttcaagctgcgcggcagctatgcgatcaccgagaacctgctggtcggcgccacgcttgatgcccgttccggcggcccggtcaccggattcggtgtgggcaaccccagcggcaataccaaacccttccacagctactacatctgcgtgcagaactgcacgtccagtgttccctccgagcgtgtctacgaacattccccgcgtggcggctacgggcgcatgccgtggacctacgaactgggtgcgaacatcacctggaacaagcagttcggcgaggccgacctgaaggtcaagctgtccatctacaacctgaccaaccagcagaagaggatgtcggttgaccaggagaaggaaaacgccattggtcacatcagcgacactttcctgtggccgaccagcttccagtcaccgcgctatgcgcagctgaccgtgagcctgaactactga

SEQ ID NO: 508211 - DNA, 1218 bp, Stenotrophomonas maltophilia
atgagccagttgccacctgcctttgacagaatttctgcggatgatctgcctcgtccttcaagctcattgagctcgggagatttggtagtggactcggtctatgctggtggccgccgaggaaacgcgggggacgaccctcttgctccactccttggagtaagcaatcaagggggctttcggcatatcggacgccgagagctgcctaagatgattgtgctcacgacaacgatgaacgagccagactggccggactccctggacctcgaaactggtgtgcttacttatttcggggacaatagaacacctgggcaggccctgcatgaaactcggcgctggggcaacgaaatgttaagggacgccttcgctcgaggtcagactgatcagctccgccgcgaggtaccgcccatattggtcttccgaaatactggcacgtatcgagatgtggtgtttgtgggcttggcggtaccgggtgcactaggagttcaaccggcggaaagcttggtcgcgacttggcaccaggcctcgggtcgtcgctttcagaactatcgtgcgctttttactattttggatgtggcgaaaattgatcgcgcttggctactggatatccatcgcggcgagccgcactctcaaaatgctccacgagcttggtgcaactggattaagcatggaagatatgagccactgagagctcgttcaaaccataaatatagaagtaaaatggagcaacttcccagcaagcccgaagatgcccgactgataaactgcttagtggaccactatagagccaatcccgttgcattcgagcagtgcgcggctcgaattacgagaatgctccttcctggtacaactgcccttgatttaacccgtccatctagagacggcggtcgtgatgcagttggacgttatcgcataggccctcccggatccagagttgaagttgattttgctatggaggccaagtgctactcttccgattgcgcagttgggattaagcatacttcaagacttatatctcgactgaggcaccgtcagtttggcgttctcataaccacatcgtacgttaactctcaggcttacaaggaaattgtcgacgacgatcatccggtgcttattgtttctgcagtagacatcgtgagtacattgagatcgaacggcattgccggcactagtgatttgctaaattggcttacggccgatgatgagctcatgcctacttag

SEQ ID NO: 508212 - DNA, 1572 bp, Stenotrophomonas maltophilia
atgcgagactggaaattgacgttgcttcgactcagaatggccgacacgccttcctccaactctcccgcggcctgcagatcaatgcgaagtgtttttgaccacaaacttgagagaattgcaagtggaagcagaccaagagtactagacttgttttcgggttgtggtggcatttctttaggttttcagcgagcgggcttcgagatcgccggtgccgtcgagttagaccccgatgctgcgcgctcccacgggatgaactttcaccaaggttcgtccgcacactcgaaatcggtggacatcactacgacatcacctttcgaactagccgaggacctcgaccttgagagtgttgagggttcaatcgacgtgattaccggcgggcctccatgccaagcttttgctcgtgtcggtcgatccaagctccgcgaggtggagtcacacccccgcgcgttcattcttgacccccgcgctcagctttttcgtcgctacctatcttatgtccgggctttcatgccactcgctgtcctcatggaaaacgtgcccgacatccttaaccatggcggacacaatgttgcggaggaaatttgcgagagcttgtctgagataggctatgttgcaagttatacacttctcaacgcagcgctgtatggcgtcccccagatgcgcgaaaggatgttcctagttgcgtacaggcgtgagctcggcatagcgcccacgttcccgcaagctacccattggatggacttaccccccggatatgagggctcacggaacgtggcacttaaggcgctgcggtccatgagttctccctcacgattttacacgcataccccaccctcagatccttcgctcacaccagctgtaactgccgcacaggcaatagacgacttgccaagcatcgatcccggagcgctaattcgagaagggctcctcgcccgacggcgggctaacatttcagcttattcggaatatcgcagtgacggcacgagcgattttcagaaggaaatgcgtcagtggccaagcttcgagagcgacgatcggggcgctaccgctcatgtcattcgatacctcccacgcgactatcgaattttttcgcggatgcgacagggcgatcagtaccctgaagcccacaaagttgcagaggaaattttcaaggaagaattgcttaacctgagaatccgtggcatccagattccagcaaattcaaagaattactctgaactttatgcgaccatagttcctccgtacgaccctactaagttcccgaataagtggcgcaaaatgtggagcaaccagccggctcggaccttaatggcgcacctaggcaaggatagctacagccacattcattactcacaagggcggacaatttccgttcgcgaggcggcgcgactgcagtcgttcccggatgggttcaagtttaatggcgcaatgaatacagcttttaggcagataggcaacgctgtacccccactgatgtcctaccagctagcccgtgagatgatgcttcgattgaatttatcagcgtcagaggtgaagcgtcagctaccagagggccaaggcgctctgacctag

SEQ ID NO: 508213 - DNA, 2154 bp, Stenotrophomonas maltophilia
atggctgatggcacgaagcacaaaattagagctagaagtcacttgcttcaccttcttggcgaggagcttattggtgacgatagactggcggtctttgagcttgtcaagaacagctacgatgccgatgcgacggtcgtcgaagtcacagtagacgtccagagcggtagcgggggctcgataactgtgaaggacaatggttcggggatgtcgcgaagcgacattgttggcaagtggttagagcttgcgacgagctcaaagcggactgaggacggactcagatctccgatttatatgcgtaggcgccttggagaaaaaggggtcggtcgcattgctgcgttgaagttgggcagcaagcttcgtatgctcaccagggctgaggcatgcgaagaaatcgaggtggagatcgattgggattcgctgattgatcaggatgactatttagaagggctggaggttgatgtcattcagaagagtggcgctcccaccgctttcgacggttgcactggaacgatgattgagatatccggtctgaggaggggtgattggtcccggcgtgatcttcggggtctatataggctagttacttcactatcgagcccatttgaagcgcccgacaaattcagtgtcaagttctccgcccctggtcgagaggctgatcttaaggacctcatcgcacctaatgattttctagatatctctgtttggaaatacagatttacgcttgctgatggcgagttttcctggagctatgatttcaatcctccaaattggaaaagcgttaaatctcgtcatttagaagggaaatcggagaagcttgagctgacgcaagaagatgcggccgatggggggaagcgccgcaagacaaaagctggtgatgagccgatcttctgttctgctgaagacctcaagggtattggtacgataacgggcgtcatatttgcctactatcgacggtcggaagtactaaattcgacagggagttcgtcgcaggtcaggtcctggttggatgaccagactggggtcagagtttacagggatggggttcgggtcttcaattacggagagaagaatgatgattggcttggacttaacgctcgtcgcataaatacgccagccggaaagcttggtgcgagctccgtagtgtcagcgattcaccttgatcttgatagtagctactctttaaaggagaaaacaaatcgcgagggattcgatcagaatccggcctacaatagattgaaacggttggtcctgagcgcgtttgagcacctggagaggctgcattcggatgatcgaaaggcacttgatgaggtcatcaagggtgggtcatcgacgaatactataaagtttgtcgatgctataaagaatattaaaggtgcggccaagaagaatcgcctgggccaagaggtttttgatgacatcgaagtaattgagagggaattcgaggagcttcgtgatgtcatgactaacgccggtatggcgggactcaatctggcggtcatttttcacgaggtagagcgagaggttgaggccatagcgtcagcccttgagcggggcgtaaatgaagttgcactaagatcacaagtggagaatttgcatcagctactgcaagggttcgcgccgcttcttaggaaaaattcttccaagaatgtgcaggtctctggaatagtaagatcggctctttcgactcggcagccaagatttaatcatcataaggtcattctttcgactcctattctcaccggagagtcgcctgactttaaggtgaaagcggtcccgaacttggttgccggagcgcttggcaaccttctagataatgctctctattgggctaggtaccgtcgcgagagagatgagtgcgaatctccagctgcggtgatggttctgaccgactgggatcagtctcagcagcggggactgattgctgtggttgataatggaattggcttctccttcgacgcctctcgggcgctcgaagcatttcatactactcggccaggcggaatgggcttgggtctctatttcgctcggcatgttatggagcagtgtggcggagaaataactgttcacacagctcaggagcttagggatgaaataagtgttccggaagcttttgatggagcagcggtggtaatgcgattcaaggagacgaattaa

SEQ ID NO: 508214 - DNA, 1437 bp, Stenotrophomonas maltophilia
atgtttggtccggtaaaggcaattgctattgatgacgagccgtcgcatctcttgtccgtaatttccgcgctggcggcggtcggtatacccgcaagtggctattggtacaacaaggatagtgctgcgctccagccagcgccccctgctggtggtcacgaacatataaggttaatttttacggaccttaatctctcagagctcggggggattcccgagccgagctcactgtggtcgacgattgcctcagttctcaaacagctcgtttcgaaggatagtggaccgtacttgctagtattctggacgcgaattgaagctaatgcaggcgttgtaaaaaagatgctatacgagcgtgcggaatctatggaaggcattcccctgccgcttgatgttgtcgaaattgcgaaaggaccgcttcttgtccgtccagttgaaggggagaactttgacgagcagctggcaagctacttcagtgaactccattcaaagatggaaaactttacgaatctaattgagaaggcaatcaagacggatcgtcagctccgcgtattatccgcctgggaggctcgcgcggcagaggcggcgtctaaggcggttaacgaagttgtacgttgcgctcggttagacacggacaacgacgcagttaaggagagcaaatcgatagctgtcacgctttccagtattgccgccgctgccgcgggcaaagtggcggctgtgcggaatcctgcgcatgccctggacgcggggatgatggacattgcgacggatcagtttggcgcatccgtggcagatgaagcgtataaggaacttgtttccgagtcgattctgaatgatttaaaggatgtgactccattcactaagccgcaggagatgtatgctgagttgaatacattcttccacgtggatcgtaggactgatcaagttggacctctcgatcgaggcgcagttgtatacgtaagatcattgggaaattcactaaatggatttaggccgatggattatttgacttccgaattcttctttccgcatgaacttttgggcggaatggagaaggttgactacgtgaaccagattgacgaaataaaggcagcaaagtccgcagtttttgtagagctcggtgcggactgtgaccatgcacaggacagcgctagaactaggcggttcttgcttggcttctgcgttagtcagaagcatcttaatttagctaggttaaatggaaatttgcgaagcggtgcccttgagctgctgggtccgtggaagattgagggcgacgtgaaatatctgctgatatcttgtcgccgattctgggtttggcagagttctgtgatagccgattccgaggtcgcctttaggttgaggtcgtcgttggttgataagcttctccataggtattctagctggaatagtcggcctggcgtggtcgagtttcggcaggcctag

SEQ ID NO: 508215 - DNA, 378 bp, Stenotrophomonas maltophilia
atggctgccatcgaagacaatgacgcgctgttcgattctcagttgatcatcggtcccacgatcgttgcgggaagcaacctgcttcgccatctgcaggcggcgggcgagttcgacatcaactctgcacacaattggctgtacctgcccattgagcaggcgttcgcagatgagctgggatgcgcgcgctatgtgcaggagccgattgacgcctactcacagggcatgttgcagcagttggctgccatcgaggcctcgccagacgggcagggggcgcttgaaggcgacctaggctctaccgttcgggcagtggaggccgtgaggatgctgcaggacacggtgagggtggcgctgatcaatggggatctggtgttggcatag

SEQ ID NO: 508216 - DNA, 645 bp, Stenotrophomonas maltophilia
atggagcaaatggagtcaactcagcccagacgtggagaattcttcctcttgatgccggataccacgcgagggggaaaggggcacggggtagtgttcgagaatgtgaagaaacttcgcacacctccacggttgatcctgcgccctgaaggtggtggatttccacctatggcagagaaaccactgttggttcactcgcccaagaagggggggcttcctgaagatcttgaaggaggaatgagcggttactggctcgtctcggagcgcttgcgtaacgcgttcgtctctgtcgatcccgacggattcgagtttgcggagagcgaataccgcctcgccaatggatctgaagggccgcgctacttcctctgcgatgtgacccgagtgatcgatgcggtcgatgaagctgcgtcaaagctccgcgttgttcgcgacgagggctatcccggaggcaagttttacgacctcaggggtggaagttccctggcgttccgaaaggatgccgtcagccgggcgcacatattccgaacgccgtactcagggaaccttgttttctgtgacagcgctttgcgcgatgcggttctggccgccggcatcggtggtaggggcgagtcgcgaggactatcgtttacggacgcagctgatatctga

SEQ ID NO: 508217 - DNA, 465 bp, Stenotrophomonas maltophilia
atgaacaagatctttgaggaacacgtttcagacgctcaggcgagcatggttcgactcgcgctcgattatgccggtgcgacgcctgacgaagtattcatcttcgttgcgagtgaagatgggatttcaatgtttgatttcttctacagacttaacggttctgtggtggagaaggaacagctgaatgacgtccgaaaatctggaggtgggatgtatgactcgttgaatgagagcttggcttgggtgcttgatgctgggctggatgaaatagatgcgcttgaagaaaagtgcaatgagttcggcgctgagatgcctactgagatccgcattcactacgttgtggggagcaatgagatgcgggcgaaaatgtcgtgtgaaccaaagttctcacacagtgacgatctgacaccggggagtttgttcgatagctgggttggcgatgttcgtggaggctcgtaccctctgtaa

SEQ ID NO: 508218 - DNA, 714 bp, Stenotrophomonas maltophilia
atgaagaaactgctgttctgcctgttgccgttgagcgcgctgctggtcccgccgatggcacatgccaacctctcgatccacccgatgcgcgcagccgtcgatgccaagcgtggcgggcagatccgcgtgtactcgcactccacccagccacagtacgtgcaggcacgcctgctgcgcatctctaatcccgcgcaggccggcgaggaagagatggaagtggaggccgccgaggcagccattgccatcacgcctggaaagttcgcactcagtggcggcggcaaccgcctgatccgcgtcattccgctgcgtaatgtcgagaaggaagcggcgtaccgagtctatttcgagggggtaaggggcccggatggaacccttctcgaagacggcgagcaggctgcccaagccaacgtcggcgtcagcctggtctggggcgcgctggtgaacgtgttgcccgccaacggaagcgtggatctgcaactgcagggagacaccctgcgtaacaccggaacactgcgcgtcggcatcactggcgcggctgtctgcacggccgaaggtgtctgcaccccgcaggacctgtcgcgcagtctctatcccgatgccgatctgaccctgcctttccagattgcgcccggcgactcactgcagcttcgctatcgattgagccgcgatggccatcgagaacacacacagaccctggaaagcagcgtcagctga

SEQ ID NO: 508219 - DNA, 168 bp, Stenotrophomonas maltophilia
atgggtgggtgccaaccgttggttggcaccgatgcgaccctggtagaggccaaccttggttggcgcctcgtgccgaccaaggtcggcacctaccaaagcgtcggtgggtgccaaccgttgattggcatcgatgcatccgccgggcacagccccgcgctgctctggtag

SEQ ID NO: 508220 - DNA, 231 bp, Stenotrophomonas maltophilia
atgcgcgtgatcgctgccgccctgcttgcctgccttccactgcctgcgctggccgcgcccacttacgggccgcggctggagggtttcgactacggctatccggtgaagaccttcgcgctggaatcgcagcggcagccgctggaaatggcctacctcgacatcgcgccgaagaaggcacccatcggcgtggtggtgctgctgcacggcaagaacttctgtgccgccacctga

SEQ ID NO: 508221 - DNA, 1191 bp, Stenotrophomonas maltophilia
atgccactgaccgatgccgcaattcgcaagaccaaacctactaccactgtccagaagctccgtgatggtggtggtctgtacctgcttctgcgccccgatggtgccaagtggtggcgctgggattaccgccgtccagtgaccggaaagcgcaatacgctttcgttggggacgtatcccgatgtgagcttggccgccgcccgtgaacgtcatgcggcggggcgtaagttgttggcagagggcgtcgatccgggcgagcaacgcaaggctcagaaagttgcaaccctggagagcaccaccaatacgtttgaagctattgccaccgagcatctgacgatgagagccaagaagctctctgcgggttcgatcaagcgtgagcgacgactggctgaaaaggatctgagtccttacatcggtagccgccctgttactgcaatatctgcccgcgaattgttggatgcccttcgcaagatcgaagcacgtggtgccgtggagactgcacatcgagccaggatgctggccagccaggtctttcgctatgccatcgccactggacgtgccgaacgcaacccggccgaggatttgaagggcgctctcactccccctgatgggcaacacttcgccagcatcaccgatccacccttggtggctggactgttgcgcgccatgcatggataccaaggttcgccagtggtgagggctgcgctgcaattggctcccctggtgtttgttcgccctggtgaactacgtcatgcacgatggtcggacattgatcttgatgctgcccagtggcgattcaccgcgaccaagactggccagccacacattgttccgctggccgtgcaggcggttgccattctgcgggagctgcaaccactgaccggacgtgccaactacgtgttccccagcatgcttggcaaaggccgccccatgagcgagaacaccgtcaatggcgcactgcgtcggctgggctatgactccgacaccatgaccggccacggctttcgcgcgatggcgcgcactgtgttggatgaggtgctgggtttccgtccggattacatcgagcaccagctcgcacatgccgtgcgtgatccaaacggacgggcatacaaccgtacggctcacctggtcgagcgggcaaaaatgatgcaggcctgggcggactatttggacggtctgaggacctcccgctga

SEQ ID NO: 508222 - DNA, 273 bp, Stenotrophomonas maltophilia
atgcttggttccccctcacctccggcgaccgcacctggtctgcctgtcgatcacgcccggcccgagtccgcacgtggcgagcgcttcctgcgtaaacccgaagtgctcagccgtaccggcatttcccgctcgcacctgtactggctgatgaagcgtggccggttccccgcctcgatccccctttccccgcgcgtcaccgtctggctggagtcggacgtggacgcgtggattgctacccacatccccgacacccacctgcgagtgcagccatga

SEQ ID NO: 508223 - DNA, 285 bp, Stenotrophomonas maltophilia
atgaccgattcaagagctttcctgcgctgcccgcattgcgataccccagccatcgttcgtaccagcgtgctgcattccaagctgctgcgtgaatccgtgctccagtgccgcaatgcgctgtgcggccacacgttctccgcctacaccgagatcgtgcgtacgcatgtgccaagcgcctgcccgcgcgccgagatttgcctgccgctcagcgattccgcagaacgccgcgctctcagtgagaacgccactgaagcaccgcgcgccaagcgcagcacacggcgatga

SEQ ID NO: 508224 - DNA, 210 bp, Stenotrophomonas maltophilia
atgtctcacgacaccctggccgcgccgtcgcgctttgccacccgtcttgcacaccacttcggcgaaatcgccgacaccctcgattgggaccattcccgttggctggcgctcaccgtgcgcctggacgccaccggcaaggctcccgaagcgctgacgctgggcgaggtgcagcaggccattgccgccaccgtgcaggaggctgcgcgatga

SEQ ID NO: 508225 - DNA, 216 bp, Stenotrophomonas maltophilia
atgaacgctctctctctgaatgccgccgtcgccaatgacgacgcggccacgcatgacctgttcagcgctgcgcgccagttgcagcgtattcacacgatgccgatggctgcgctgtcgcagctggtcaccgccttggagcgccgtcccggtgcgctggaagccctgcttgtaggccagctgctggccatggtccgcgacgcggaggtgctggcatga

SEQ ID NO: 508226 - DNA, 642 bp, Stenotrophomonas maltophilia
atgaacgtcgataccgtcagcgtgtccggcgtgccgggcgtagccgatggcgtgctgagcgccaccatcaccgatacctggttcgatgccgagcgcaccgcccatattgtcgaagtggctcgccgcatcgagcgcctgcacaacaaggcctcgcggcgtcttgccatcctcagtggtgaattggatgaggcgctggaaggccaccccttggaagaccgcctgcgcgagcgcctgctgtggccgctggagcgcgattgcctggagctggccaccgttgcggcacgggtgcgcgtgcgcctgtcactcttcgccccggcgcagtcgcaggcgcagttcgatcaaggcatggccttgcagctggccgacctgcaagccgaacaggccgcgcctgccgagccgatgcaggaggctgctcccaacgctgcatccatgccgtatggctactggatcagcgaggaaagcttcaatcgcgtggagcgtgcgcgctcggcggccctgctgttggccagcgtcgatgaacgcatggccgttcccttcgacgctgtagcgttcagcgccgcctacgtacatgaggacctggccgctgtggtggccagcgccaagcacagcagccagttggaggccgaccatgacgcggcctga

SEQ ID NO: 508227 - DNA, 696 bp, Stenotrophomonas maltophilia
atggattcattgcgacactgcgtgcggcaggtctatgcgtgggtacgggcgatgctgtcctggccaatggccgtctgtgtcgcgtgcgcgccgacggtgatagcaacggccagcgcagcgggtggtatgtgctgcacgcaggcccgctgttggctggtgcctacggcaactggaagaccgggctcaatgagtcctggtgtgagggtggcagcgaggtgctcagcgaggccgatcgcgcgatgctgcgcgaggccgtggtgcgcgcacagcgccagcagcaggccgagcgcgcccagcgccaagcggtggcccggcagcaggcgcgtgagcgctggcagcgcgccagcgctgctacgcccgatcatccctacctggtggccaagggcgtgggcgtccacggcctgcggcagttggacggcgtgctgctggtgcccttgcgtgatgcgcaggggcggttgtggagcctgcaaaccatcgccgccgatggcagtaagcgcttcctggccggtggccgtaagcgcggcctgtactacgccgtgggccgcacggtcagcgacgtggtctgcatcgccgaaggctatgccaccgccgccagcatccatgaggctacgggccaccccaccgccgtggccttcgatgccgggaacctggagccggtggcctgcgccctgcgcgccaagtttccctcggcggtga

SEQ ID NO: 508228 - DNA, 1080 bp, Stenotrophomonas maltophilia
atgccactccactccacccttgatgaaatcggcgaacagttgctggcagagctattgcctgcgcccgcgacaccagtacccaaactattccagattggcgatggattcgcgatcggaacgcacataggaaataagcgatcaaggaacgaggatagggtcgcaattgcacgagtagatattgcctctcaaatgacctactcagcgcacattatctgcgacggagtaggaggatcacagcggggcgacgaagcggcggcgattgcttgcgcgtcgattgtgtcacagttgagctcccaaacgcgccatcgctcgcccgcccagctaatgcctgaactgatcagaactgcagatgatgcggtacgacttctgctcggcggcgcaggacagaccaccctctgcatgctgctcaattcaaatgacggacagtgcgccttggcaagcattggcgatagtcgcgcttattcgtgggatcaaggcagcgaacttattcaactgaccgaagacgacacgcttgccaatgaaattaagcaccacaagctggagcatgcgcaagcatatctcaacgcacgtggcctggagggaagcctatcgcaagccctcggcgagccaggcagaacgagcaacgagctcagtatccatgtactgactgatcggagctttcctcctggcggaatactgctagctacggacggaatctggattaatgatgcaaacgcattcaacttgattaccaggcattcccgtggtccaggcgaactcgtccgccgtctgctaacttgcgcatcctggcttggaggaatcgacaacgcttcagccatagccattagagatccacagcaaatgccggaaaccgtggactctccccctcgcagtacacgcataactttgtggctcgcagataagcaggttgtcacctatcggtccacagctgaattctcggaatcatacaagccgccgatagagaagcagacaaagaagcgccgaaagaagaccggcgccaagcccactcagttggagctacctgactcagatgtagcaatgaggggcaataacatagttgctggtccggacgacgagtag

SEQ ID NO: 508229 - DNA, 1062 bp, Stenotrophomonas maltophilia
atggatacacggaggtatgcaatcgcgccacagcaaatggctggcggctacggctcagtgatagaagtccacgaccgctatctagatcgttcagtactgttcaagcaaatgcacgatcctgcgaataacaatcagctcgttgcagaggttgcagcactaacgcgcaccagatcgagacatatcattgatatctacgatgttgataccgacgagcgcggcatgctaacgggcatcatcatcgagaatctccgtggcagggactttctgaattttcacgccgaggctgcacagagacccgcagaactcacaaaggtgatctaccagcttgcttgcgctgtgaatgatctccactcagccaacatcatccatcgcgacctcaagttggagaacttcaaggcatctgatgcaggaatcgtcaagctgtacgatttcggcatatcgtccgcctcgggaactcatgtaaccactcagaatcgaggcacgcttgactacgcggcgccggaactattcactcccaacggcgttgtaacacgcgcatcggacgtctattcccttgggatctgctgctggaaactggcaacaaatcaattccctgcccagctgactgagcggccaccacagaaatctggaccgccccctcatctaggcacacttgccccatttatggacagtgaactcgtagagatcatccacgcatgcattgatccggaccctacgattagacctagcgctcagcaggtgatggagctctgcgaaaccctcctcctgaagggccagcacaaaggtttgttcttcagcgaacgctctacggtttatgagctttcggcccaaaagcctactgttcgaataaatatcgctcctttgggcgagattcgcgcagcctatgacgggactgaatttaaggtgacaggcgttacggggaacgtgtacatcaacaacgtcaccgcagtggtagggcgaccacttcacgatgcgtgtgtagtcacatttggctctttcgatgttggtcgcaatcgtcagtacatcagtttcctttgctccaaaccggagatagtgctgtga

SEQ ID NO: 508230 - DNA, 951 bp, Stenotrophomonas maltophilia
atgagtgcgcgcatcaatcaccacaacatagcatccacctttgattaccatgaggacagtcaaaggacattcttagttgaggagctcgtcgacggaacagatctaggttacagattggcgaatcagttccagttcctcgacccttcgctggcggcgcacgtgcttcacaacgtaattcgcgcagtacacgaagcccatcgcgcgggaatttgccatcgagacctaaagccgagcaacatcatgacatcggacgactacgccttgtcatcgatcaagctgaccgacttcggaattgcgaagttggctgagagtgagattagggaggaaatggctgagttcgagcgtgatgaatccacccttacaacctccagcacattgctcggcgcgatcccatacatggctccagagtgctggcgaagctggattgatgcaggaaagcctatggacatctgggcaattggatgcattgcctaccaacttgttactgggaacctaccgttcggctccggtcgcagagcaattgctgaagtcgtcagaatagagcagattggcgcggtgagcctcccccgcccccctttattcgggcgttcagccgcgactcgcggcttggaggaagagctctggagcttgattacgcggtgcctggctgttgacccacaagcacggcccaccgcatctgacctgctcacgtcctgtggcatctggtgctatgcgacagctgagagacgactaggctccatccttaactttggcgtcacatatgctggcggtggacgaagccaaactggcacaattcaggacgacgtcccttcaaagtcatacttctaccacgccagcgaattctacggcccaggcaacccagcggctggtcagcgggtaagtatttgcgcctatcccggctcacctagactgcgtgcggcaccagtactcctacttcgtcaaccgatctag

SEQ ID NO: 508231 - DNA, 606 bp, Stenotrophomonas maltophilia
atggaaataaattgtgttcgaccagagaaactctaccgctactcggagcggaagtggctggaaaggtctcttcgcctgggagagttccggctcatgccagcatccttctacacggaacttgagggcgacgctgcccgccaagactatgagctatgccgcagccgatcggtggcaccagagcttgtctatatctctcgcgaagatggtcagctcatacgtcccataggtgaggtgatgttcactaatcgcttgctccgagactatctaatgatctgcttttcttctcatcgatatcctgaagatgcaggcggattcagtggtgccgatgcctgtctagtgattcatgatccagaggagctgctagagcgattgcatgcaaagatcgaagcagctgtgcggggcggaatcagtatggatgcttctgttagctatggcgtgccacatgaacttggggtggcgtactcgaagcctgcagcatacgcggctcaatgcgagtatcgcctaaccgtacttcccccggatgatcgcttgctctcaccattgcttattagcattggaagcattgaagcgattgcagagattgctccaattgaagcgactcgctaa

SEQ ID NO: 508232 - DNA, 210 bp, Stenotrophomonas maltophilia
atgtctcacgacaccctggtcgcgccgtcgcgctttgctacccgtattgctcatcacctcggcgaaatcgccgacaccctcgattggaatcattccctctggctggcgctgactgcgcgcttggaggccatcggcaaagtgcccgaggcgttgacgctgggcgaggtgcagcacgccattgccgccaccgtccaggaggccgcgcgatga

SEQ ID NO: 508233 - DNA, 285 bp, Stenotrophomonas maltophilia
atgaccgattcaagagctttcctgcgctgcccgcattgcgataccccagccatcgttcgtaccagcgtgctgcattccaaactgctgcgtgaatccgtgctccagtgccgcaatgcgctgtgcggccacacgttctccgcctacaccgagatcgtgcgtacgcatgtgccaagcgcctgcccgcgcgccgagatttgcctgccgctcagcgattccgcagaacgccgcgcgctcagtgagaacgccactgaagcaccgcgcgccaagcgcagtacacgtcgatga

SEQ ID NO: 508234 - DNA, 264 bp, Stenotrophomonas maltophilia
atgagtgagaacgcggtcaatggcgcactgcgtcggctgggctatgaatctggctctatgaccggccatggcttccgcgcgatggcacgcactgtgttggatgaggtgctgggtttccgcccggactacatcgagcaccagctcgcacatgccgtgcgtgacccaaacggacgggcatacaaccgtacggctcacctggtcgagcgggcaaaaatgatgcaggcctgggcggactatttggacggtctgaggacctccctctga

SEQ ID NO: 508235 - DNA, 447 bp, Stenotrophomonas maltophilia
gtggaagcggcacgcgccggcgagcagggccgcggcttcgcggtggttgccagcgaagtgcgtaccctggcacagcgttcggcggcagccgcgaaggagatcaaggcgttgatcgaagcgtcggtggaacaggtcggccacggtgcacggcgcgtgcgcgaggccggtgacaccatggccgagatcgtggcgtcggtgcagcgtgtcaccgacatcatggccgagatctccgccgcctcgcaggagcagagcgcgggcatcgaacaggtcagccagaccgtgatccagatggacggcaccacccagcagaatgccgcgctggtggaggaagccagcgccgccgcgcgcagcctggagcagcaggcgaaccggttgatcgacgcggtggatgtgttcgatctgtcgaccaccgccgcagcgaaggacgcgctggcgcgcgcggcctga

SEQ ID NO: 508236 - DNA, 423 bp, Stenotrophomonas maltophilia
atgagtagcgaatggctgtcggcgcgggtcgggtacctgcgcggactcaaggcaccatcggaacagcagcggctgctgttgttgctggcagaaaagccggatcgaacggccgatgatgaaaggaagctggcggcactggtaagggccgaaaaagcggccgaccgggcggcacgggcaaaggccgacgccgcacggattctcaatgccgacaaggtcgcgcagcgcaaggcgcgggatcgcgagctttacaacgtggccggcctgctcatcctcggcggcctggtcgattcaaagaagggaacgcctacgatggaccgcggcgaactgctcggcgccctggcgtcgctgtcgaaggttccggccgatgatccgcgccgggccgaatggaagaaaaccggcgacaaattgctggccggaaagtga

SEQ ID NO: 508237 - DNA, 1095 bp, Stenotrophomonas maltophilia
atgaaggtcggcaaggcggggaaggcttccccgcatgccgcctacatcgcgcgcgaaggccgctacgccggacgactagagcggggcgagaggctggaggcgaccgcggcgggcaacatgcccgcctgggcgcactccaaccccatcgccttctggcaggctgccgacgctcacgagcgcgccaacggcaccacatatcgcgaaatggagctggccctgccgcgtgagcttgacgccacgcagagggccgagcttgtccgcgaatgggtgcagaacgagatcggcgaccgtcatgcctaccagtgggccatccatgttcctttggcggcagacggtggcgagcagccgcacgcccacctgatgttttccgagcgccaggtcgatggcatcgaccgcgacccggaacagtatttcaagcgatacaactccaagacgccagagcgtggaggggccagaaagggctacgggccaaatgccgggaagaccctcacgaaggccgagcgagtggccgatctgaaagagctgcgggcgcgttgggaggtcatggttaacgtgcacctggagcgcgctggccgggccgagcgaatcgacatgagaagtcatgccgatcgcggcaccggcaccgagccggagacgaagcagttgccgagccagtggcgcggccaggggcgagagaacgtcatcgagttccgggcggcgcgggcagagcatatcgccgcgaacgccgagctgcggcgcgccgtgcccgacgttccggccgaagtcatatcgctgcaggctgcactgaaaaagcgagccgaggatctggtgaagcggttcctcgccctggttgtgaaacgcggcaaggcggtcgacggctacgacgacaagcgggatcgctccctgtgggagctggtgccggcgacgctcaagcgcctggtggagcagttcatcgccgcgcccaaggtcgaccaggtgaagattctggacaccctgcagagcgatccagcgagggctaagccggtggcccagttgctcgaccagcacgaccaggccatccgcgaccatgccaaagaccgatcggcgaaaaccgctaaaggcgaccaggcgagatag

SEQ ID NO: 508238 - DNA, 438 bp, Stenotrophomonas maltophilia
atgagcaagggcgatcgccagtgggagttggcacgcccgatccgggcgtggccaggggaacacttcaaccacgaggatcgcgagatctacgacgtccatcgtgcggtcacccttatcaaccgcaacccggagaatttcgagtttgtagtgctcccgatcgacagccttcgggagcaagtcgagggacggggtggggtagatctagggtacgtcgccaccctgtcgaacgaggatgccgtccggccggtactgcttggccgctaccatgacggcacggtgcggatgctggacggctatcaccgcgccacctggcttctgcaacaccatgtcagccccatgggtgcctggctacttaccccggcacaaaccgacgcaatccgcgtgcccgtgccgcccgacttcattccccgcgaggcgcgggtcacaccgcccgcctga

SEQ ID NO: 508239 - DNA, 477 bp, Stenotrophomonas maltophilia
atggctgaaatggtcaagctggccaccgcccgcgagctggtggacgccggggccgtgaagcaggccgaggtcattggcctgccaggcggctggacggtgcagctgcaaacctacaaccacgcgcgagtgctcgccaccaaggccaatgagccgcgccgtttcgggacgttcgagagcgccttgaaggtgctgcgcgacctgggcgtgcggctggacctgctgcgcgtcgacgccgagcagtgggaagcccagggcctgttcggtgccaagcgccgccccgatcggtcggcggccatgcgactcaaggatgccgatgctcgctatgccgcgttcctgcgcgagggtacggaaagagccatcgccgatcgccgccctgccctttccgccggcgatgcgaagaagcacatggacgcgatcaaggcgaagcaccgggtgcggcttgatgccgcgatccagggcaagggcgcccgtgcatga

SEQ ID NO: 508240 - DNA, 306 bp, Stenotrophomonas maltophilia
atgaccgtggcatggggacaaaccgcgctcgatgatcgagcgcggtttctcgatgaagccttggagcgtgcgattgaggttccagatccgcagatctatgcggcggccgaacggcaggatgaccagctcgagctggaaggaaacgcgctcgatggcgtggccacctacgccgaagggccgacgaccggaacccggctttatccctgcaaaagcgggaaatacgtgattatctacacgcgcagcggaaaccacgtggagatcctttggatcgcgccttcgtgctcgaattggaaaccgacgccatga

SEQ ID NO: 508241 - DNA, 288 bp, Stenotrophomonas maltophilia
ttggatcgcgccttcgtgctcgaattggaaaccgacgccatgaccgactacgtgctgcagcagatcctcgacaaatcccgcgcggcccgcgacgggcatttcggcgtgctttcgaccggggagaagctggctgcggccctggcgctcaaccgcgcggacctgctggccagcgtcaactacacgatggccgaagcgatcgagcgcgtgggcgccgattggctggccagaatccccgaggcggcccgtgtcctggagtacgaggccgaagaagccggaggcgcggcgtga

SEQ ID NO: 508242 - DNA, 216 bp, Stenotrophomonas maltophilia
gtgattgcgcggctgcgccaggcgcggagggatctgctggcgatcgcggcccggctacgcggcagcatggccaggctcgacgccaacctggccgagatccgcaagctgcggacggctgcagctgcgttcgatgaggacgcctgcagggtggcggccaaagccgatctgtcgccggcggagctggacgcgatcgctcgacgcctgcacttgggatag

SEQ ID NO: 508243 - DNA, 648 bp, Stenotrophomonas maltophilia
atgattgtggctgtcgggggcacaaaaggcgggatcggtaaaaccaccctcgcggtacagctggccacggcgcaggcctgcgccggcaagcgcgtttggctgattgacggcgatcgccagggttcggcgattgccagcatcaccaaccgggccgagcggcctgagttgccggcgattgcggccggccactaccccgagggcaagaccctgcgcgcccaggttctcgcccagcgggatctattcgatgaaatcgtgatcgacgtgggcggccgcgattccaccagcctgcgcgctgcgttgatgctcgccgacgtgctgatcgtccctttccggccgcgcaactacgacgtgtgggcgctgaccgagaccgccgaactggtggccgaagccaaggcgcagcgcgaaggcctgcaggccttcgcggttctcaacatggccgatcctggcgtcctcgccgcggacaatcgcgaggccgccgaggccgtccaggacgtgcccgagctgcagctgctcgatacgcccttgcgtcagcgcaaagcgctggccaacgccagcagcgcgggactgcacatcacggagctgcggccgtccgatccgaaggcgtgccatgaagttgcggcgattgttgccgccatctacggcaaatga

SEQ ID NO: 508244 - DNA, 279 bp, Stenotrophomonas maltophilia
atggcaattcagcgcaaaccccccgttcgaccagttgcagatccggccgaggccttcatcgaggcggcgcccgatggcgcggctgccaagatcggcaagcgagccaacgggcgcgtctacaaggcgcgcaaggtgccggtgtccttcacagtcgagcaggagctgttgactgcattcgacgctagggcggccgagctgggcctcagccgcgcggccgcgatggcgttggccatgtcccgccttgtccgcggcgagctgatcgtccgcggcgaccagtag

SEQ ID NO: 508245 - DNA, 1116 bp, Stenotrophomonas maltophilia
atggccaccgctgcagagcatcgcgaccaagcgcaggtcctcgacctcgaggcgctgcgcgaccaggaagcgcgcctagcttcggagcttgccgatgccgtgtttacctacggcatgggcagcgagcaggcccaggagctgctgcgccggatcaacgccttgaccaaggcgaagaaagacgccgccggcgaggagaagcgagctgtccgcaggcgcaccaagaaggagaacgacgccaggttcatcactgaggcgctggcgatcgaggccgaggctgctgcagaggccggcatggtcggctacatggcccgcgtgcttgtccaagccacgatgccgcacagcaggccggaaacgaacgaatacatccgccgaaacggcaacctcactgtggccatgtcggcgctgtcggagattgggttgccatatggcagctacccgcgcttgttgttgacttggctcaccaccgaagcggtgcgatcgcagtcatccacgctgcacttgggcgccagcttgtccgagttcatgggcaagctcgggctggtgccaacaggcggccgctggggcacgatcccgcgcctgaaagagcaggccgatcgcctgtttggctcatcggtgattgcctatgaaaacgtcaacgacgccggcggacgcatccgatcgcgcggctcacgaattagcgtcgccgaggagtgggatctgtggtgggatccacagcgattcgacgatgaaatagcagggcagggcgggctgttctccagctgggtgaagctctcggacaagttctatcaccaggtcactgatcggcccgttcccgtcgacctgcgcgcgatccgcgccttgaagaagtcgccgctcgcgctggacctgtacgccttcaccacctaccgcgtgagctatctcaaccggcgggtggaaatcccctgggaggcgctgatgatgcagctgggcgcggattaccaggacaacgcccaaggcaaggccgacttcaagcgcaagctgctggccgcgatgcgcaaggtggccaccgtctaccccgatctgcgggccgagcagggcgatcgcggcctagtgctactgccgtcgcctactcacgtggccaagaagctcggcgggtag

SEQ ID NO: 508246 - DNA, 1086 bp, Stenotrophomonas maltophilia
atggaaccggatgatctgcaaattgcgggctttttgttcgagcacgtgcagccggcttttgaggccttcgtggtggatggaagcaccaccatcatcaccctcatcgcgacacccgccgttgccctgctcacgatctacgtgctgttttggggcgtagcgatggctgccggccagatcagcgagcctttcaccgatggcatgaagcggattatccgcatgtgcatcatcattggcttcgcgctgaccgccggcatctatcaaggcacagtggtcgacttcttcatgaaggcgccgatggaactcgccgggcagatcgtaatccctgggagcaacccgatcggcgacgatatcaactcgatgtcgaccatgctcgatcagaccgcagctaccggtttccaggtggcaggcaaagcctggcaggatggagtggtaatgaactcaaaatcgctgacaggaatcagcgccgaggggcttctttaccagggcgtcgcaatcctgctcagcacgatcgtcgtgataaccgtcgcactcgccgcttgcttgatcctagtcgcctattcggcgctgacggttcttctggccatcggtccgatgtttattcttctggcgctgttgccgggcactcaacgttggttcgaggcatggctgggccaggtagtgaactttgccatcaaggtcttgctggtcatccttgcggccgctttgatgttcaaggtgctcgagacgttcttccagcacatgaccaccatgggaacagccgagatcctgatggcttcgctcaaggccatcggcatggctgtattcgtgttgggtgtgatgctctcgatgcctgcggttgcttccgcgataggaggcggtgtcgcagcttccactggcggcctaggcgggcgtttggcatccatgggtacaagcgcagctcgcatggctgttacaggccactctagccgcgctatcaccggtgcagcagccatgcggaacgcccgcaaggttggcggcgcagctgcagctggtggcagggctatcaaagccgggatggaaatggccagaaagcggttccagccacccaacacggcgtctatcgcgtaa

SEQ ID NO: 508247 - DNA, 339 bp, Stenotrophomonas maltophilia
atgaccaggaacatcgcgactctcgcgctcgctgccgctcttttttccgggctgtcagctgggtgctcaaaggaaacgccggagcctgcctcgccggctacgaccgacaacacccctatccctgactgtagaacgctcacggcgccggcaagccgggactaccggattgcgtcggagcgtgagtgcctggcacaggcctccctcgatgcccggatgaagtcgaaagcgtgcctggtgcagcaggagctggggcgttgcatggcaacgaaagaggcccaggccaatggctacgacgcggcccgggcaatggctgaaaccgccgaagcacgccggcaatag

SEQ ID NO: 508248 - DNA, 681 bp, Stenotrophomonas maltophilia
atgaagatcaaggcacttgccctttcagttgcgctgggcgtgaccaccatcggtggaatcacgtccaccgtgcccgcccatgcgtcgggcattccggtgctggacgtcgccaacctgatgaacgcgatccagcagtacacgcagatggtcgagcaactggcgcagctgcaggcgcagctgcagcaggcaaagcagcagtacgaatcgctgaccggcggccgcggcatgggaaacctggtgcgtagcaccggcgctatcccgaagaactggcaagaaaccctggcctcgatgaagagcggcgagctaggcgatctctcgagagagatccgccagtcggccagcttgctcgatgaggatttcttcgccgacgtcgaccaggccatcaaggacagcttggacgagtcgatggctgcccacaccaaccagcaggcagtgaatcagtcgttctacgacaccgccacccagcgagcggaaaagatggagcagttggccaaccaggtcgattcggccgccgatatgaaggccatttccgatctgcaggcccgcgtcgcgatcgagcaggtccagctgaccaacgagctcatcaagctgcagtcgctgaactcaatcgcccagcagcagcgcgaaacacgggcgcagcaacagcagcaacaggctttcgagacctctttcaagtactga

SEQ ID NO: 508249 - DNA, 483 bp, Stenotrophomonas maltophilia
atgcccctacaacgaaagcgcgagactgaggttttcactgtcaggcctactagcgtcacggtcaggaaaagacaacctgaagccgtcgtcatcaggccccgcaacgccgggcctgaatctatggatgccttcaacgcccggttcacgccggccgtcctcgccggcggtggcctcgcaatcgctacctggctggtgtcctttgccacctcttacgccagcgccacagccagcttctggattggcctgcttggtctgttggtcacaggagcggcgatctaccgcgagctgtttcgtgccgagttgatcccgcactggatcgtcggcgcctgcgttgccatggcgccgttcctgctcgccaccgtcttcaagctcctgccactactccctattcgcccggctttcgtggcggcgatcggcttcggcctggtgatcggcgccgcagctcattgcttgggcctgctgacgccggcccacggtcggtaa

SEQ ID NO: 508250 - DNA, 1179 bp, Stenotrophomonas maltophilia
gtgcccgagcccgtatcgccgccgcttgccggcctggcgcacctggtaggacgcgccaccggccagtcgctgaccggcggcaaccgcatcgagccgcttgtcgatggcgagcgggcctacccggccatgctcgccgccatcgaatcggcgcggaacagcgtcgccttggcctcgtacatcttcgacagccaaggcatcggggcgcagttcgtcgatgcgctgcgccgggctcatgagcgcggcgtgcaagtgcgggtgctgatcgacgacgtgtatgcccgctggacgccccgcagcgcctaccgcgccttgcaacgcgccggcgttccggcggcgacgttcaacccgacgttgattcccgcgcgcctgcatgccgcgcatctgcgcaatcaccgcaagctgctggtgatcgatggcgaggcaggtttcaccggtggcatgaatatctgcagcccgtattggcggcccgatgcgccgggccaggcctgtcacgatttgcactttcgtctgcgcgggccggtggttgcgcatctgatgcagtgcttcaccgatgattggtgcgatgccacgggcgagcagctcggcgagggtttctggcgcgaatcgcccgcaatggctgatgagcaagggacctcttgggcgcgcggcatcgaggccggtcccgacgaggccctggacaggatgcgctggaccttcatgggcgctttgagcgcggcgaagcattcggtgcgcatctggacaccttatttcgtccccgatcagccgatgatcgcggcgcttagcacggctgcgttgcgcggggtgcgtatcgacgtgctgacgcccgcaaacggtgaccatcccacggtgcaatgggccgcgcgcgcccactactggcaggtgctggagcacggtgtgcgcatcttcgaacgtcctggcccgttcgaccacagcaagctgatgctgatagacggccagtggtgctgcctgggttcggccaactgggatgcgcgcagcctgcgcctcaacttcgagttcaatgtggaggtgtacgacaccgcgctgtctacgcggctggaatccctttttgatgccgcccgtgatgcatcgaacgagatatcggccatggcgttgcgcgcccgcccgctggccatccgcttgcgcgacggggtggcccgtctgttcacccccattctctag

SEQ ID NO: 508251 - DNA, 441 bp, Stenotrophomonas maltophilia
atgaagaatgatcttcacctcgtctgtccgcattgccagtccatcaaccgcgtaccgactgcgaagctatcggaacatcccaactgcggccgctgccagcagcccttgttcacgggcgaacccatcgagttgaccacggcgacgttctcgcgccacgtggagcgcagcgacctgccactgttggtcgatttctgggcaccttggtgcgggccgtgcaagatgatggccccgcagttccagcaagcggcgcgccagctcgaacccagggtcaggctggccaaggtcaataccgaggcagaaccccacctggccgcgcagttcggcatccgcagcattccgacgctcgccctgttccaaggtgggcgggagatcgggcgtcaggcgggcgccatgggcgcgcaggacatcgtgcgctgggcatctgcacaggtggggcgctga

SEQ ID NO: 508252 - DNA, 1146 bp, Stenotrophomonas maltophilia
atgcagatgcaatatagctatcgagctgtcgacaaagagtttcatgaaccatggcagagagctttgggaaatgcggtcgagcacgccctcaagccattgctcgacaaacacactaaagattcagtgcgacttcgattcgtccttgatcgcgacaagaccaagcggcaatttctggccagtggctatatgcacctgcccggcagaaagattgtcagcgttactgcatcacatgacgagctgacgcccctcgcgcagatgctcgcacagtcgttgttccgtcaggccaagaagcattttgaccggctgcatgctcaggaccaaatcaagcgcaaagcacgacgcaagcgcttgcgcgagctcaaggtgcgaattgccgcaaaacccgcgtcagccgcccatgaggccaacgtgacccgaatgcctctactgtcgaaacttgaggctgtcgcaaggcgtgagctggcttatctgcgtgccgtcggcgatttaccgcgcgattatccgacgctgcgcgacgtggtggatgaagcgattgtccaagctgaggtggaatggcaatccgtgccggaagaaaaagcggcttacttcggtcttctgaaacatctgttcgccgtcctggatcacgaagtggcaaacagccggcaatttggcgaattcgtttctctggacgcgccggtcgaagcggatgcccaggacgtcgccgaggccatggtggaagaggaagtcttcgaattttatcagcccgatgacacactcaggctggccgatatcatcgctgacagtcagcatcccgatgccgcaacgatcgcggaagagcaggagctagttgatcggtcgagcgagttcgcttttgcattcgacctgctgaaggacatgccgcgtttgtggcggcgcatttttctgcttatccgtgtggacgggctggatgccagcagcgtctctgaaatcctgctgattcctagtaaggaagatactgtccaaaggtggctcatgcaggccgaagcgttcatcgctgctcatttggaagaggccggagtaagcaaagacgggaacgattggctccaaggcgttgattggtcggcattgtctgtgacccgaagcgcggcagcctcactgtggtccaaggaggcgaaccatgaagaatga

SEQ ID NO: 508253 - DNA, 729 bp, Stenotrophomonas maltophilia
atgaacgaaaaccagaccatcaacaccaccacccccgaatcggccattcaatccggcgaaggggccgaggcagcgccggtatcggagagcaggcagcggctgaacgagctggcccagcagttggccagcgtggtgcagcgtaagcgcgccctggtgggcaaggtcgatacgatgcagcgcgccaaacaggctgcacagggtgatgccgctgctgcccgccagcagtggggtgccaagctgcgcgagagcgatggcacgctgacccgcgacattcagaagcttcgcgcgaatgagcgctcggcgctgtcgctggctgaggaatacgaggcgatggagggtgagattgcggtcgagctgccgcgcctggagctggaattggccgaggtggcgggccactgtctcaacgcaagaagcagcgtcaccagggaagtggccgatcaggcctacgagcagttgctgctacaggctggggacagcctggtcttcgcctttgctttgttctcgagagcggcgggctccggcgatacaggcgcactggcaagccggttctttgaccgcctcggcaatgaggttcgccgtcgcctggacgatgccgcagtgacggaccgagtgacgcaagtgttggcgctgccgtcgatggacctgagcgcggtggatatgcagctggtgcgtagcccgattcgtttttcacagttgcgagagaagatcagtggtggggaggcagcgtga

SEQ ID NO: 508254 - DNA, 1125 bp, Stenotrophomonas maltophilia
atgagccagttcgccatcctccgcgtcggaaaactcaaaggctgggggtctgtgcgctctgcgggaggtcacaacctccgcacgcgcacaacccctaacgctgaccctgacggtccaccgcctcgggttcttcatggcggctcggacctcggcgatgccgtggccgaccgcctgcgggaagccggggttaaaaaaccacggcgtgacgcggtgctctgctcggagatggtgctgacgggttcgcctgagcgcatggcctcgatgtcgggggccgagctggaagcgtgggccgctgacaacgtggcttggctccgtgaggaacacggggccaacctcgtccaggtcgtgttgcacctggacgaacgaaccccccacctccatgccgccgtagtcccggtgaaccgggacggcggcctgtcggccaagcgctattggggggaggcggcgggcctgtctgcgctgcagacggcctacggcaaccggatggccccccacggcctacagcgaggggtgatggggtcgaaggcccagcacgcgacgctgagggccttctacggcgctctggaggccgcgcactcccctaccccgcccggtcccatgccgtcccggcctcgggccgaggacggggcacggctggggctggtgagggcgggggcggtggcggacgcggaacgcggctggcgccggcagttggtgcggtggggcaaggcgttgttggccagcgaggaaaatgcccggttggcggcggctggcttggccagcgaaaaccgggccatgcggcgggagcgggcggcgacggcgttagcgttaacccgcgcccggaccatcgccaagacctggcgcttgctgtcgcgggttgtccccgatgacctggcggcgttggttctccgtgcgcaacgccaggacagggcggcccggctcgaagagcggcgacggcagaccgccgagcacgaggccgcctatgaccgggaacaggccctgcgggcggccgcccagcggccgcaggtggcggtccctgccgggaccgggggggtggggggaacccccacggagacggcccccggcagggggcccgctcttgggccgtcaggcccgccccggcgacccggttttgggccccggtag

SEQ ID NO: 508255 - DNA, 1164 bp, Stenotrophomonas maltophilia
atgtccgccaaactccgctggttgcccttgttgtgcctggccctggcgggctgcagtcagctggagaatccgggcaatgtgaccgctgccgacaaggcggcgcgggcgccggccagcgatggcgagaacatggtgtcgatcaatgcggctgacgcaccaccaccgccggccccgccgcgcagccgggcggatcggccgtggccgcaggcgcagctggagaatggccgtgcctgggtcagctgcagcacggaatatgccggcgatgccggcgatggtgtcgaactggagggcctgcagcgcgagcagatcacccaggccctggcgccgtgcgccgaacgtggcctgatgcgcgtgcgctacgccggcaagatcaatccgggcttcgccgaaatgatgtggcggttggccgtggtcgctgacgatcagaagatccacaagcgcatcctcgatctggattccagcggcggccaggtggaatcggcaatcgtcgccggtgacagcatcggtgaatcgggctggaccatctgggtccgcgagggctcgatctgccacagcgcctgcgtgttcgtgctggccgccggtgacaaccgcctgctatcgggcaaggtcggcatccaccgcatgatgcgcatcagttccaaggccacctcgcgcgcggaactcaaccgcgagctgcacgaggtctacgacaacgtgaaggactatctgcagcgcaacggcgtggcggtgggggtggccgatctgatgatgaccgtgcccaaccgcagcctgcgcctgctgacgccggacgagctgcgccagtacggcctggatggtaccaacgcggtgcaggacgatctggaacggatcaagcagatgcgcgcctgtggcgatgacttcgtgcagcgcaaggacgcgttcctgatcgccttcgaccagcagtgcaagcgcgaaggcgcggacatggaatcgatcaacagctgcggccaagcactgaagcagcgcttcggtttcccggatgcggtgtgcccggaagaaagcccgctttcggagatcgatgtggcaacgctgccaccggcaccgtcggagccgccgccggtggccgaacaggcgccagcagacaccggcacgcctgccgcgcaggccgatgccgcagcggtggagggaaacgctccggcacgctga

SEQ ID NO: 508256 - DNA, 1128 bp, Stenotrophomonas maltophilia
atgctgggccaacccgacctcgcccgccgacaggatcagcacccgccagcgtgccgccgcacgggcctcaccggcccggttggcgcggctcttgccgttgccgttggccagcagataggcagcatcaccggcctgcttgggatcgatctgcgccaattcatccagaatcagcgtcgcatcgttatgcagcaccgccacgccttccaggccgttggccgtgctgcgccactcacgggcatagtccgggggaccgaccacgctggccgccacacgcagcgccgtgctcttgccactgctgctgccaccgaccaggtggaagccaccgccggtagcgccagtgaagtgcagcagcggccctgcgaacatggccgacaccgccagcaccaggcgcgaattgtcttggcaccgccgggccacgtcgcgccgccaatcgtccagcgaaccgaccgccgcatagtggtgctgcaatccgccgctgtgctggtagaccagccgttcctcgccgctgccgtagctctcaccgttgggcagcacatagcggccctcatgccaacccggcacggcgacgttgcgagcgcgggtgtcgatgcgctcctggatgatgtaggccagcaggcgctgcatggtgttgcggtgggccgacatttccacgccaccggcggccaactggcgcacgaactcgcgcggatcgcccaccagcatttctgcgggcgcggcccactggtggggatggccatcggcatcggtccaggtcagcaggcgtccccattcctcgctttggctgttgcgggtcttggcctcaaccttcaacggcgagcagacgaacaccggttcggcgggctcaccatcctcggtgacgccgacgtaatagacgccagtctcgttgagctggtagtgcgctcgtgcagcgccgccattgtcgttgccagaggctttcttgccccccttggtcttgccctttgcacccttgcgcacggcactttgaatcgagccgcgtacggcaccggtaccggcgtccttggcggcatcattgaaatcgacagacgtaacgttgctcatgcacggggctccggtgccgcgtcggcgcgctgcgccttcgggataaagagagggatcatcaggaggtag

SEQ ID NO: 508257 - DNA, 273 bp, Stenotrophomonas maltophilia
atgaaggaggtctccgccgaggcgcgcaaggccatcggtggcgacattaagacggtccagctgggttggcccatgggcatgccactggtgcgaaagatggatgaccggctgtgggaggtgcgtagttcgattcccgaaggaattgcccgcgtcatgttcaccaccgtcaagcaggacatggtgctgctgcacgggttcgtgaagaagtcaccgaccacgcccaagaccgatctggcactggcgaagaagcgtagagatgaggtgatcaaatga

SEQ ID NO: 508258 - DNA, 675 bp, Stenotrophomonas maltophilia
ttgatcctccttgatgcaaggaagaccaaggaggcgctcgctgcgctggaactggccagcggaaagctggaactggtattggcgcgtgacccaaaacttgctttggcgcccgtcgatgtacgcgtcatcacccatgacatccacgccgacgtggaatcggtcaagaaagcggtcgagttgtctcgggagttgttggaggatggcgaggtgcaaaaggcccggcccatcgtcgccaatctggccagcgaaatcgtgatcgaaaccgacaacctgccgatggcaacgtacccggctgcgatcaagtcggccgcacggctcatcgacagcggcaagatcgaagacgccaaggcgacactcgcccgagcactgaacacgttggtggtgacctcggtcgtcattcctctgcccgtgctacgggctgaagccgcgatggcaaaagcggaaaagctggccgagaccgacaggcgcgatgccaagcagagcgaggagctcagcgccctgctggcctacgtgcgcacggaaatcgagctggcgcagatcctgggttatggcaagaaggcggacttcaaacccatcttcgatcaggtgaagtccattgagcaaaagtcggctggtggcaaaagcggcaagggatggttcgacgagttgaagacgcgcctccaaaagctggtttga

SEQ ID NO: 508259 - DNA, 291 bp, Stenotrophomonas maltophilia
atgccgctgaacagcagccagccccagcgctcttttttctggatatggcgcaccgctgcaaccaagttgaaagcgccattgaccaaggagaatgcgccgaacactaaggtcgtggccaacagagccgattgtggcatccagaacgcaagggctgcgaaaatcaatgccaagacaccgcgcaacgcaaaaatccaccagttttcggtcaatgaacacagtgttttggtgggctcatccgcactggaatcgatgatggtgtctgtattcatgctatatctcctaaagatctaa

SEQ ID NO: 508260 - DNA, 366 bp, Stenotrophomonas maltophilia
gtgccgctgatcgatcagggcaagatcgaagaagccaaagccgcgctgcagtcagcgctcagcacgctggtcgaggagcgcagcgtgcttccgctgcccgccctgcgcgccaggctgctcctgaagcgcgccgagaccctggtagaagatggtcagcggagcgaagcgtccaatgagcgcctggagacattattgaacgaagcgcggcagcagttggaaatggcagaactgctgggttatggaaagaagaaggactttgagcccctgtatgctgaactcaagaaagtcaagcaaaagacggctgggggaggcggcggaaaaggctggctcgatgaaatcaaggcaaagctgtccaagttgttctga

SEQ ID NO: 508261 - DNA, 300 bp, Stenotrophomonas maltophilia
atgccgctgaacagcagccagccccagcgctcttttttctggatatggcgcaccgctgcaaccaagttgaaagcgccattgaccaaggaaaatgcgccgaacactaaggtcatggccaacagagccgattgtggcatccagaacgcaagggctgcgaacatcaatgccaagacaccgcgcagcgcaaaaagccaccaattttggctcagcgaacacagtgctttggtggggtcatccgcattggaattggcgatggtgtctgtgttcatgcaatatctcctaaagacctatacgagatga

SEQ ID NO: 508262 - DNA, 420 bp, Stenotrophomonas maltophilia
atggagggtgagattgcggccgagctgcctcggctggatctggagctggccgaggtcacgaaccgctgtctcagcacggcgaacagcgtcatcagtgaagccgccagtcagacctatgagcagttgctgaagcaagcgggtgacagcctggcggtggccttcgcgctgttcgcgaaggcggatagatcggatagaaccttccagaatgcagtttatgacgatgagttggccagtcggttctttggtcgtctcggcatcgcagtgcgccatcgcctggacgatgccgcagtgacggaccaggtgacgcaagtgttggcgctgccgtcgatggacctgagcgcggtggatatggagctggtgagtagccccattcgtcgttcacagttgcgggcacagctcagtgctgggggcgcggcgtga

SEQ ID NO: 508263 - DNA, 213 bp, Stenotrophomonas maltophilia
atgggtcttggccagcgcagtgattgcatcttgggcgagttcggcgcgctttttcgcggcttcccgggcggccttgtaatctacctgtggctgcgccgccttggatgcggcagagggtgctgcagcacctgggctagaacgtgccgccgattgggcctgagccggtccgctcagtccgacgacgaccgccagggcaagtgcggtgaaggttga

SEQ ID NO: 508264 - DNA, 975 bp, Stenotrophomonas maltophilia
atggagcttgttaggcagttttgctcactgccttggagctatgaggtttgccttcgcctgccagatggcctttaccaactcttggtggcccatcgcggggggctcacgctttccgatcgccatcgactggtccttggggcggagcacgaagatccgtaccccaacccaaccaaccaactttccctctcagcactgacaagctcaacactgttaggtgcgttctccgggacacgtcaaacatcgttctgggataaagacgccgcatatcttgtcgttaaggtcgaaggctatttcaggatatccgcgactgagcccatactttccgcacgcgatgacattttcgcttttcttggcctgggcattgcccttgggctcttctcggctggtgccgggggcgccctcggcgaggcgccccaatctactcagttgatcgtgtatcgacagtctcgcgaagacgcaccaggatcaagcttctttgccctggaagatcatcaacagaagggcatccaatgccttggcctagcatgggatcttggtcgtgagcccagtgccgtcctagaaaaattggatcgcgtcagcctgatccttcgatcaaaggagagcaagaacatcaagctttctgcgcgctggcttttcgacagctactgcggccgtgacaagctgcttagctacgtgcaggcaacggtagccttggaaattctgctcggagatgaggatccagatgcaaatgtcagcttgagcacccttattgccaatcgatgtgcctaccttatcgcgacctcgccagagggacgatcaaacatagttagtgcctttcgcgacatatatcgtatccggtcaaagattgttcatcgcggaaagagtcgcctgaactcagacgagagtggtcttttccgctaccttcaggagttggtgaagcttgtaattgataaggagcagcgactcatggagcgaggcggtaagaaggaggaatga

SEQ ID NO: 508265 - DNA, 816 bp, Stenotrophomonas maltophilia
atgagcggacagatcaaatttaccaagccggccagacacacggttggcacttcaggctcaccttggatgacgattctaaaagaacaacacgagacctttgcccggttctttacggcgccaacccgcgaggcgctgcgtgacctgcttcgtcgaaacataggcgagaccgactacctggacttcaaggccgattggcctgcgctgccaaagctcgctcgccacatcttggccttggcaaattctggcggcggcgcgctcgtcgtgggcgtatcgcaacaggccgacggtagtctggtcccgagtggcttgtcgagcatcaaggacaaagcacagctgatcccgccgctcagcagttatctgcccaagtcgcttgagtatgagattcttgatttttcctttggggcggcagaatacgaaaccttggtgggcaagtcgttccaagtcttactggtggaagaaaagcctaaacttctgccgttcctagccttgagagaaggggagggcctgcggactagcgtggtctacgtgcgcgatggcacgacgtccacagaagccggccactttcagctgcaagcggtgctcaaccgacgcatcgagtctggctattccagccagcccagcctagacctcgacaagcatttggctcagctgcgtgtcttggatgagcatcgcgacacgaacgacagctgggtgaggcagttcattcgcgatgagcaaagccgcttcgacgatacagagtcagacgactacaaagagttcatcgaagacgcttaccaggcgaaaaagcaagccctttggcgattgctgggtctgtga

SEQ ID NO: 508266 - DNA, 477 bp, Stenotrophomonas maltophilia
gtgtccactgaagcaccccgtccgccgctgccgccgttcacccttgaatcggccatcgagaaagtacgcctggccgaggatggctggaacacccgcgatgctgacagggtttcgctggcctattcgctggacaccgagtggcgcaaccgtgccgagttcacccatggccgcgaggaagcgcggcagttcttggcccgcaagtggaacaaggagcttgagtaccggttgatcaaggagctgtgggccttcaccgacaatcgtattgccgtgcgctacgcctatgagtggcatgacgactccggcaactggttccgctcctatggaaacgagaactgggaattcggtgcggatggcctgatgcagcgccggttctcgagcatcaacgacatgccgatcaaggaaagcgagcgcaagttccattggccgctggggcgtcgcccggatgatcacccggggctgtctgacctgggtatgtga

SEQ ID NO: 508267 - DNA, 2649 bp, Stenotrophomonas maltophilia
atgtccaacaccccctttggtgaatcgtcatgcgctgccgccgccagcggttgcgtcgaggtgcgtggtgcgcgcgagcacaacctcaagaatgtcgatgtctccatcccgcgcaatgcactggtggtgttctccggggtatcgggttccggcaagtcatcgttggccttcggtaccgtcttcgctgaagcacagcggcgttacttcgagtccgttgcgccctatgcacgccgcctgatcgaccaggcgggcgtgccggacgtggatgccatcgatggcctgccgccagcagtggccctgcagcagcagcgcggcgccagcaatgcgcgctcatcggtgggcagcgtgaccaccctgtccagcctggtgcgcatgatgtactcgcgtgcgggggcgtacccggccaaccagcccatgctgtacgccgaggacttctcgcccaacacgccacagggcgcctgcagcacctgccatggcctggggcatgtctacgaagtgaccgaagcgctgatggttccggacccgtcgctgagcatccgcgagcgcgccatcgcttcctggccgccggcctggcatggccagaacctgcgcgacatcctggtcacgctgggctacgacatcgacgtgccgtggaagacgctgccgaagaaggaccgggactggatcctgttcaccgaagaagcccccagcgtgccggtctatgccgggttcacgcccgccgaaacccgtgctgcgctgaagcgcaagcaggagcccagctacatgggcacgtataccggcgcacgccgctacgtgctgcatacctttgccaacacccagagcgcgctgatgcgcaagcgcgtttcgcgctacatggaaggccggttgtgcccggcctgccacggaaaacgcctgaagccggaggcgctctcggtcacctttgccggcgtggatatcggcgagttcatgcggctgccgctggatcagctggcggcgctgctggagcccatcgcacaaggtgatttcggcgcgcacagcaacggcgcacgtacccgcaggagcgctacaccccgcgatcgcgcccggcgggccgcgagtggccaggcgacccatgagggcgctccggacgtgcgcctgacctcggccttgtccgaagagaagcgcctggcggcacaacgcttggcaggcggggtcatggcgcgggtacgccaattgcgtgacctgggcctgggctatctctcgctggaccgtgcgacgccaaccctgtcggccggcgaactgcagcgcctgcggctggccacgcagctcagctcgttgctgtttggcgtgctgtacgtgctcgacgaaccctcggccggcctgcatccggccgacagccaggcgctgtacgacgcgcttgagcgcttgcgcgacggcggcaactcggtgttcgttgttgaacacgatctggagctgatgcgccgcgcgcagtggctggtggatgtgggcccacaggcgggggaacacggcgggcgcgtgctctacagcggcgagcccgatggcctgcgccacgtccaggagtcgcgcacggccctgtatctgttcgatcaggtgccggcgcctgccagccaacagcgcagcgccaaccgctggctggaattgaagggcatccaccgccacaacctgcggggcgtggacggacaggtgccgctggggctgctgacggcagtgaccggcatttccggctccggcaagtccagcctgatggcgcaggcgctgcccgagctattgctgctgcacctcgggcatgagcctgcggacgacaacgccgatagcgcgcccaccgacgggccaaccgtgatcgaaacgacccggggcacattggccggcgatgtagacgccatccagcgggtggtgcaggtcgaccagaagcccatcggccgcacgccacgctccaacctggccacctataccgggctgttcgatcacgtgcgcaagctgttcgccgccacaccggccgcgcgccgccgccgtttcgatgcgggccgcttctcgttcaacgtggccaagggccggtgcgagacctgcgagggcgaaggtttcgtcagcgtcgaactgctgttcatgcccagcgtctatgcgccgtgccccacctgtcatggcgcccgctacaacgacgccacgctgaaggtgcagtggaatgaccgcaacatcgccgaggtcctgcagatgacggtcgaccaggcgcatgcgttcttcagcgaggaagaggccattgcccggccgctgcagttgctgcaggagatcgggctgggctacctgcggctcggccaaccggccaccgagctttccggtggtgaagcgcaacgcatcaagctggccaccgaactgcagcgcagccaacgcgggcgcacgctgtacgtgctggacgaacccaccaccggcctgcatgcctcggatgcggacaggctgctggtgcagctgcagcggcttgtggacgcgggcaatacggtggtgatgatcgagcatgacatgcgcgcggtcgcgcaggcggactgggtgattgatgtcgggcctggcgcaggcggggcagggggcaccatcgtggcgaagggaacgccgcagcaggtggcgcgggccaaaggcagcaggacggcaccgttccttgcgaaggagttggcctctctgtag

SEQ ID NO: 508268 - DNA, 453 bp, Stenotrophomonas maltophilia
atgatgccgggcaggttctcagcgaagttcgcggcgctctttgttttgatggttgccgcctgcacctccgtgcccccgctggcaggtgccagggaggcccgatcaccggtccttgtcaagctcccgcctgagcagagtgcggtccttgcaaccgggctgctaaggggagtactgcagccaatcaacggctgcgtctacttcgtggacccaggtggcacggcttatcttgcggcatggcccgatggttactcgctggccatgaggggaaacgttcccataggggtgcaggacgtacgatcggggaaaatgatggcgttcggaatcgctgcatcattcggaggaggtcatggcaacgatctgctccgttcgcgccttgccacgaccatcccggcgggctgcaccggcccactcatgaccattcatttgatacgccaggccaaggggcagccatga

SEQ ID NO: 508269 - DNA, 522 bp, Stenotrophomonas maltophilia
atgctccagcagatcgtctcgcagacaccaacctgggtctggcttctcctggcgttcctggtcacgcgcggcattgccgcgatgaagccgggcgaaacgtcactgcagaaactggccgtcgtgcctgtgctgttcaccgtatggggcgcctggtcgatcagccatcgctacggagtgtcctggagcgcctggggcgagtggctggccggcatcggtaccggcgcggcactgggatggctgctgctgggccacgtgaagctgaccctggatggcgctgccggaaagctctggcgcaacgcggactacagcgtgttgccgctgctgctggtcacgttcctggtgaagtacggtttcgaagttgcattcgcggtgtcaccgtcattgatcgccaatgccggcgccagtgcggcctacctgctgcttgccggtggattcaccggcctcttcatcggcaagtactgccgctatctggcctcgctgcgacgggacgcagcggggagggggctgggggtcgcaggctga

SEQ ID NO: 508270 - DNA, 492 bp, Stenotrophomonas maltophilia
atgaagttctcgctgttgggcgtggcgttgccattggtgatcgcgttgggcggagtctccgccgcaagtgtcagtgcgggaccgattgcgggcacgacgtccgccactgtggttgcgaaggccaggtatgcttcggattcgctggaagccggctacattgtcgattggatcaagcggaactcacccgcctatgcgcccgcattgcagacgggcgaactgaccatctcgcacacctatcagcctgcaggcaacctcaagcccgcgggcgcggcggggccgccggtcccattgcctgcacgcggagtggagggcgaggtcatctcgatctccaataccttgccgagcggtgcctccgagtcgtggacataccggtggtcgagcggggcgtggaagctgatcaagtacagctttgacgcatgccagggccccgccggcatcagtgcgaagggggccaacacagagattgctgcgaaggggccctgcatcgactga

SEQ ID NO: 508271 - DNA, 906 bp, Stenotrophomonas maltophilia
atggctagcccgtcccccaatcccgccaggccgccgttgcagctcggagccttccgtcgctggatgctgacagtcgctgcattgctcggcgtggcgctgctgatgtacctgatcggcgcacttgtaccgctggccaggccgagcggcatgtacgccgggatgggggtgatgatgctgctgccgatcctgttgctgtgcgcggcattggcagcagtgctgggtgccacgctggttgcggcggttgcatggtgggtgggtgtaagacggatcggccttgggctggtgctgttgcttgccgcaggtgtcagcgcggtcagcttcttcgcgggctgcgattcggcgtggttcgatccctcggcgatgtcgcgccaggagctggccgccatgaacgcgaagctggaagcgatgagcgcacaccgggcgcgcctgcacccggccatcgcgcagggcgatctccccgctctgcaggcggcactggacgccaacgacccgacgctggcaccggcccagctgctctgcctggtgcggaccgacgtgatcgaggggcatggccacgagggcctgccgccggtatccgaagagcgataccggttcctgcagggcgtcgcagaggccgcctggaacaaggcgacccctgaggacgggcggcgtgcgatcggcctgctggccattgattcggcgctgcgccatggcactgcccgggatgtggagcggtggcttgagcggggtgtcgacccgaggaacgtcgactgggccagggatgtgtccgcacagaccgaacctgccggcctgtgcagcacgtacgaacgttggccgctgagcaccgtggatcagagcgaactcgatccagaccgcaagcgtgacctgcttttcagattcggcgtcaaggcgcttcccgcgtggtag

SEQ ID NO: 508272 - DNA, 1575 bp, Stenotrophomonas maltophilia
atgcgcaaggtattgctgctgttgatcctgctgaccggcctggcgccgaccgcctgggccgccacggtcaagaccacccaccgcaccattcccagctgggatggaacgcctctcggggccttcgtcatcgaaccgcaggacgcgggcagcgggcgctatccgctgctggtgatgcccagcagctgggcggtgcccagcgtggaatacgtgggggtggcgcagtcgctggcgcggcgcggctatgtggtgatcagctacagctcgcgtggcttctgggaatccggcggcagcatcgacatcgctgggccagccacggtcgaagatgtcagcgccctgatcgattgggcgctggacaacacccgcgccgacccggcccggatcggcgtttcgggcatctcctacggtgcgggcaccagcctgctggcggcggcacgcgatccgcgcatcaaggccgtggcagcgctcagtggctgggccgatctgcaggcgtcgctctacagcaacgacacccccagcgcacagggcatcgccctgctggtggcggccggactggtgaccggacgcgccggctcggagctggccacgatcaaccgcaatgtgctggttggcaactaccagggcgccgtggagtcgctgctgccggtggcggcgcaacgcagtcctgcggccagcatcgacgagatcaacgccaaccagccggcggtgttcctggccaatgccttcaacgacagcctgttcccgccgggccagctggttgatttcttcaaccggctgaaaggcccgaagcagctgcagctgcgccacggcgaccatgcgctcaacgaagcgttcggtgcactgggcatccccaatgaagtctatgaccaggtgggcgactggttcgatcactatctgaaggcggtggccaacggcatcgaccgccagccggcggtgcagctgaagtcacagaagggcagctggagccgctatccggattggcaggcgaccagcaagagcgccatcagctacggactgaccgcaccctctggcctgctgctgccgaccggtggcctggtcgagaatggcagcaatactggctggaactaccgcatcggcagcgggctgctgaccgcagccaattccggcgtggcgatggcctccggcgcgctgcagatgatcaatctgccgccgggtgcctacgtgccgtttgttggccgcagcgctgccggcgtctggcaggggccgatccagtggagcgccaaacggctggacggtacgccggaagtgcgcctgacggtcacgcccagccgcgccaataccacgctgtatgcctacctgtacgccgaggatgtgctgggcaacggccagttgatcagccacaagccgtacacgctgcgcggtgccacgccgggccagccgaagacgctcgacctgcggctggaagcgagcagctggaacctaccggccggcagccgcctgaccctggtggttgataccgtggacctgcgctatgcaggcatcagccagctgggtggggcggtgaccttcagttcgccggccagcgcgccgtcggtattgaaggtgccgctgcattga

SEQ ID NO: 508273 - DNA, 909 bp, Stenotrophomonas maltophilia
ttgaaccggctgcgattgttcttcagcgcctatcccgtcgtatttgcaatggctgcgaagctgtccgtgctgagcctgttcctgccgggcttcatcgaaggcatggccgtggcgcgcgggcatggcatgcagatcggggccagtggcttcgccgatgccctggtttcgttggcgttccggctgtgttgtttcgccgcggcggccgtgctggcttccaccgttctgttcgggcgaggaggcgcactgtggatccggcatccgctcgcgtcaggcgtgtccttctacctgatgttgatcgtgctggatcatctgtcggtgtggatgtacctgcagatgggcccaccggacgcacattccctggtctgggtggtggccacttcactgctgcacacgctgttgctgacagcggtcgcactgctgcctgcactcctgttgcaacgcggtcgcgcaatccaggggccgcacaccggcgtggtcagcgccagtcaggtgggcgccggcatgctgttgctcggtggcgcgtgcctgccagcaattctcgtgcagcttcgcctgatggcattggagtccggttccccgacggtgggggatggcctttggctggagctgcagatcgttctgctgctcacgctggtgctggcggcactggcttcaaccgcgggcgttgtgaccggaattacgccttccgctgctccggcaatggggcgcctgctggccacagcagcgctgctgaccggaacggcctcgctgatcgtgatactcgtgtctggcgtcctgctgatgatcgcgcaggtgcctgggccgttcggactgctgctgttggcactggcgatgctggccgccagcgctgcccagtaccgggttgccagaacgctggcgtcgcgacggctcgcaacgccagcacactga

SEQ ID NO: 508274 - DNA, 531 bp, Stenotrophomonas maltophilia
atggacggcaccaccctgattcgtggcttggctgcgccgctgggattcaccctgctggcaatcgtcacgagcgcctccgcctccggcgcacgccagggcgtgaagccgcagccgggcgaaatcgtcctgttgcgagatgtctccgcgcggccggcctatcgcatggcaccgccgggcatggcgctgatcgccgatccgaagccgcagcgcgaaatcgccgctgcactgggaacgggtggccctgccatcgggatggacgaactcagcgacgaggactacgccggaatgggcgcgggccaggccaggcccatggccgcacctggcggcaccacggtcgaacgggtcacccagcaggccctgggcagcaccctgggacgcagcagcgacggcatggtcggcagcagcctcggcggcgccatgagtggaccgctgggcgccgtcggcaacagtacccgcggcattgccgatacggtgcgtggcgcgctgggtcagttcccgctgcagggcacggccccggcaggtggcaaatga

SEQ ID NO: 508275 - DNA, 618 bp, Stenotrophomonas maltophilia
atgaagcgcctgtgctggctgctgctggggctcggtgccacgcccctgctggcgatggccgacgactacagtggcatgctcgcgtacctggacatgacccgcatcgacggccgcgccctggccggctcgagcggggccatcgccgtgaaccaggcggccggcgacctgaacatccaggccaatctgcgtggcatcgcccggggcgaacgcgccgaggtggcgatcagcacgcaacaactgcagcggggcaaccgggcgctgtcggcaccgttggctgcctccgcgcagatcggcggcaacgcgctggccggtgccagcggcatcgcttcaatcaaccaggccagcggcatcgccaacacgacgctcaacgtcgtcagcgcgacgctggcccgacagggcatacgcgaaaccgacgacacggccctggccgcagaaggttccgcgttggcaggggggcgggacgacgccggtcacggcgtcgcgacgggcacccgcagcgccggtgtagccagcaccgcactgcggggattcgacggggtcctgcaactcaatcagatcgcgggcagcggcaacgacacggccaatgtgctgggcctggtcgtgcaggaccgtccgtga

SEQ ID NO: 508276 - DNA, 750 bp, Stenotrophomonas maltophilia
atgttccgtcactccctgccgatcgtcctgctgctggcgatccctgccctgcccctgcaagcggcagagggcgcgcctggccacggcctcaaggagattccggaccccgaactgaacctgatgcgcggccgctacaccgtcggcggcaataccgtggcgtggttcggggtaacgatggtctcgcagtggcaggccggcaatggcacgaccctgcagggtgccctgaccctgggcatggacttccgcggcggcggctcgccgaagctgagtttccagcccagcgtgcacgtcaccgccgctgacgcgcccttgcccggaacacacggccgcaccatcgacagcagtggcctggccaacgtcagcgggctggtgcagagcgtgcaggtggccggcgatggcaacagcgcacgcaatgccaccacgctgaccgtacgcgatggcggcgtgcccacattgccaggcggcgacgcgcgttcggtcagtacgcagcagtccggcgcaaccgccaccgctgtactcgatggcaaccagttgcgcctgcagttgcaggtggatggccagggcctggtacagcaatggatccgcaatggcagcgtcggccagggcatcgccctcgccggtgatggccagatcgccagcaaccagctgcggctggaactggtacgcgacaccgtgggcggcaacctgccgttgagccagaacgtggcccaggcaatcgcgctgaaccgcggcatggggccgggccagtag

SEQ ID NO: 508277 - DNA, 885 bp, Stenotrophomonas maltophilia
atgtccatcggattcatcggtctaggcgtgatggggacgcccatggccgtcaacctggcccgcgccgggaaccgtgtactggcatggtcacgctccagccacaacgacgaggcagcgcgctcggcgggcatagagcgcgccggatccgtgcaggaggtattcaacgcctgccacacgatcatcatgatgctggccaacgatgaagccatcgacgccgtgctgctgcgcggttccgatgacttcgacgcgcgcgtgcaagggcatctgctcatcaacatgggcacaagctccgccgcctactcaagggcgctggccgatcaggtccgtcgcgcaggtgggcgctatgtcgaagcgccggtctccgggtcacgcctgcaggccgaggcggcacagctggtggtcatgctggcaggcaacgaagcagatctgaccgaggcagcgcccttgctggcctcgttggggcggcagattgtcgcctgtggcgaggtcccggcaggcctgcagatgaagcttgcggtgaacctgttcctgatcaccctggtcaccggtctggccgaagccgtgcatttcgccgaggcacatggcatcgcgctggagcgctttgcccaggtactcaacgccgggccgatggccagtgaggtttcgcggatcaagctggacaagatgatccgcgacgactttacagtgcaggcttccattaccgacgtgctgaagaacagccagctggtggcggcagccgcccgcagcgccggcgtacaggcgcccttgatcgaagcaagcgacgcgctgttcgcccgcactcagcagatggggctgggtgggctggacatggcagccgtcgtgcaggcgatccggcaggtccagggcgctgacagcggcgcttga

SEQ ID NO: 508278 - DNA, 258 bp, Stenotrophomonas maltophilia
atgagcgacgatagcggcctctggctgttggcggcaggtccggccggcgcaactgcgctgtactgggcgctgtaccgctattaccgcaacaccgacaaatcgcattccttcgaacacgaaaccgaggtgcaggcgaagccggtcacgggctcgaaccagaaggtcggccaggtgcgtggcacggaggccacgcgcatcgaaggcgacaacgtataccagtaccgtatacgggttgccagggtaaagcccgaccggtag

SEQ ID NO: 508279 - DNA, 1161 bp, Stenotrophomonas maltophilia
atgacccgcggcgtctgcctggctctgctgctgttactgcttccttccctcaccctgtcagccccagcgcctgcgccggtcgaagcacgggtgcccttcgcaccgacgcccttcgttggcagcgacggcctgcgccatctggcctacgagctgcacatcaccaactactatggcgacaccggggcgctgcagccgcaatcgctgcaggtgttcggcgacgacgccgaaaccccgctgctgagcctggatgccccggccctgcgccattgggtacggccgtcgcctccagaggatggcgccatctccattgcagcgggaaagcgcctggtggtgttcctgtggctgtccctgccagccaccggtaacgtgccgcacatccttcgccaccgcatgctgctgggcaccgagcgcggcggcagtgtggaactggatggcgcccacgttgcggtcaatgcggcgccggtgaggacgctcggtccgcccctgcaaggcggtcgatggctggcccatgaagggcccggcgcggcgcagtcacaccactggggcagcctggtggcggtgaatggtgatctgaccattccacagcgcttcgcgctcgacctggtcggcgtcgacgaacgtgggcgcgccgtgcgtccaacggcccgggatctgcagcacacccaccattcggactgggtgggttatgccgcccccgtactggccgtggccgacggcatcgtgcgtgcggtccgtgatgggcaacccgagcatccgccgctgaccgcgcagccggaacccgtttcactgacagcggatggcctgttcggcaactacgttgtcctggaaatctcgccgggtgtgtttgccagctacgcccatctgcgaaccggcagcatcaaggtagagcccgggcaacgggtccagcgcggacaggcgttggcccagctcggccagtccggcaattccgccgcgcctcatctgcacttccagctttccaacaaggccacgttcgaaggctccgagggcattccgtacgtcttccaggccttcgacgatttcgggcctgaaagcgaggcgcagctgttcggccaaggggaggcctggaagcccggcatggccgtgccacgggagaatcagctgccgctgaacgacatcgtcattgccttcccgccacgctga

SEQ ID NO: 508280 - DNA, 558 bp, Stenotrophomonas maltophilia
atgcccgatcccagcctcagcagcggcgcacgcgagctgctgaagtggattgcgctgctgaccatgaccggcgaccacgtggcaaaagtggtctacgggggctacctgccggtcgtaagcgaactggggcgcatcgcgttcccgctgttcgcgctggtgatggcctgcaacctcgcccagccgggtgcagacctgcgcaagtcgatccgtcgcctggccgtatggggcgtggtcgcgcaaccgctgcatgcacttgccttcggtccctggttgccactcaacatactgcttacttttgccctggctgcggtggcggtgcatgcgctggccaacaatcggccactgctgttgctgctggcggcgggcatggcgccgatgctggtggactaccaatgggcgggcgtcggcttcgtgctgcttgggtggctggcgttccgccatggtgcgtggtggctgctgctggtcgggctcgctgcggtgtgctgggccaaccacaacggctgggcgttgctggccattcccgtggtgctggcgttgattgctcatctgcttgcgtaa

SEQ ID NO: 508281 - DNA, 1188 bp, Stenotrophomonas maltophilia
atgggaatcagagaaagtgttgtagccgtgctgcttgtgctggcacctggcccgttgatagcgcaggtggccgaggtgaccgtgaccgggcagttccgacccagcgcactcaatccgggcaacacggaattcgagaacaccacgcctcgcggggacttctgcaattggcggcccgtcgagtgtgaccgcagcggtgcttatatcttcaatcttggcagaggcgagctatggcgcaaatccggtgaaggtgaccctgagtcgaagcgtgacacgacctacgttcgtttcccagaaccacgaaccgtaacgcttaccgaagaacgcacggggcgcacaatagatgcgcgcatcagctttgtggcgatatcactgcatctctccttcggcggcggtgtagacccctggtactacggcatcagcggcggatgcagcgcaatccggggggcgggcggtcgggggtggtcgaatgggggctgggggctgcgcaatccgcttgatcctcaggagtgctacagcacccgcgcacgtggagagcgggcctacagttatcagaacgtcggtattggcatccatgtcgatcttcccagtgctaccgcattgctggatggccgctatacggctcaggaaagctggacaaccggcggcgcggatgcggatatggaccttggtgacaacatcacaggcgcgacgatgatccgaatgaacttcgtcttcgacgtgttccatgatttccaggtccgcttcgccaatgaggcgcccagcgttcggctggcaccggaggacggctggtcgcagtggatcgttcatggtcgcccgcctgtgcgattgcgtcaggagctgccgttccacctgaccacatcgatggacttcagcatgaaactgcggtgtgagcatgaccttggcgaaggttgcggcatccgcaatgccgcatccgatgtggtggtaccagtggacgttgacgtgaccattccgggcatgagcaatgtgcgcgatggcaggcccacgcagaacacagcactgctgccggatgatgcgtgggcgcctcgcttcaccccggatggctatctgatgcagcggaggtctacgctgcgtttcaccgcaggccgcgaggctgtgacggagatgctgaagtcacccggttcgcattggcaaggcaacatgaccgtggtgtttgacgccaatccgtga

SEQ ID NO: 508282 - DNA, 1149 bp, Stenotrophomonas maltophilia
atggtgctgcctgcggcgctcgcatctgtggatgctgctgagctaaagataactgccgagtttcgccccagcgctcttaatcctggacacaataggtttgtgaacacaactccgcagtccggctattgcgcacagcattcgaacttctgcagggtaggcgatttcacaatcgacactggtttgaacgtagctcagcggcgtctgtacggtggcggggaagatccgcgcgaaaaatggtacctatccgtcgacggaaagtggcgagaagtgatcgttcgcaacgcgagcaaccatgagttgaaggcgcggcttcgtgtattcctggttggaatgcagtggggcctgccatcggacggcacagcacccggggcgaacggagcagcgacgggtggctgccgaggtcgaatcggggttggtagcggcgcatggtaccggtatgcctgggatgttcctgaaggtactcctgtctgtgtacgaaacccaagggcgactaccgatcaggtggcacgctatctgaatttctccattggctaccatcttgaaacgcccaacccgcttcaggcgcaggatggccggtacactggtagcgtgacctacacggtgggcaacgggcagcagatcgatctcggtcagggtgactactcggattcagagctcaccttacagctactgctggacgtggtgcatgacttccaggtccgattctcgagcgagtttcccgtcgtgcagttggcaccagaagggggctgggttcaatggatcgatcatggccttccaccttcgtgcctgaggcaggaacttccgtttcacctcacgacgtcaatggaattcagcatgaagcttcgctgcgagcatgatgtggctgatcgttgcggccttcagaatgccgtcaatgatgaggtggtgccagtggatgttgacgtcaccattccgggtatgagcaatgtgcgcgatggccgacctgcacagaacacagccctgctgccggatgatgcgcgggcgcctcgcttcaccccggatggctatctgatgcagcggcggtcggcgctgcgcttcaccgccggccgcgaagcggtgacggagatgctgaagtcacccggttcgcattggcaaggcaacatgacggtggtgtttgacgccgatccgtga

SEQ ID NO: 508283 - DNA, 300 bp, Stenotrophomonas maltophilia
atgaccggtttccgctaccttcccgctgccctcgtcgttgtcgccggactgctgctgggggcctgctccaagacccaggaggcgagcaagaccaccgccgccgaggacgtcaccgaagtgaagctgattccgtcctacgagtcgctggacaaggacaaggacggcatcgtcaccctggccgaagtggatgccgtggcacccgactgggccgagcgcctgcacgcctgcgataccgaccgcgacaagaaactgagccgcggcgagtacgacgtgtgcaagcagaccagcaccacgcattga

SEQ ID NO: 508284 - DNA, 393 bp, Stenotrophomonas maltophilia
atgcagggcgaggcacgcggcacctttgacgtaacgctgctgccgatcggtggcaaggacagtccgatcggggtgatgtccatcgacaagacattccttggtgacctgcggggcagcagcgtcggccagatgctggcgttccgcacgccggtgcagggttcggcgggctacgtggcgatggaacgggtgacggccacgctggccgggcgcgagggtgcattcaccctgcagcacaacggcgtgatgacccgcggtgttccggagctgagcgtgatcgtggtgcccgattccggcagcgaagggctgctcggcctgaccggcacgctggagatcaccatcagcgacggtcgccacgactaccggctgcagtacacgctgcctgacccggagtag

SEQ ID NO: 508285 - DNA, 681 bp, Stenotrophomonas maltophilia
gtgatcaggctggacgaggtgcagttcggctatggaacgcggcccgtgctggacattccccggttgctcatcgcgcagggcagcagcgtgctgctgcgcggcgccagtggtggcggcaagagcaccttgctgggcctgctggccggcgtgctgctgcccagccagggccgcgtcgaggtggccggccatgcgctgcatgggttgcgcgggccagcgcgggatcgcttccgtgccgatcatctgggcgtgatcttccagcagttcaacctgctgcccttcctcagcgtgcgcgacaacatcgcgatgggcctgcgcttctcgcgcctgcgcagtggacgcatcagcggtccgctggatgccgagatcgagcgcctgctgcgcgcgctgcagctggacccggcgctgatgccgcgacgtgccggtacgctgagtgtcggccagcagcagcgcgtggcggctgcacgtgcgctgatcggccggccggcggtgctgttggccgacgaaccgacctcggcactggatcgcgaggccgcgaccgcgttcctgcagttgatgtccgtgcaatgccaggccgccggcaccacggtgctggtggtcagccatgacgacagcctgcagcccttgttcgaccgcaccatcgccctggcggaaatcaaccacgcaggtgccgcccatgcttga

SEQ ID NO: 508286 - DNA, 534 bp, Stenotrophomonas maltophilia
atgaagcttcctgctgctcttttcctgctgctgggcgccagcgccgcgcaggcccatgacgtgcgccaactgggcgcacatgtgcacggccaggccactgtcgatctcgcgcttgaccagcagacgctggaattcgccctgcaggcgcccggcatcggcatcctggatttcgagcgcccaccggccaatgcaaccgagcgggcatcgctggcaggtgccaccgccgtgctgaagagcggcagctgggtcaccctgcccacggcggccgattgtcgtctggtcagcggtgatgccagggccgaaggcttcgatgcgaccgttgccgtgcccacggccgggcagcatcgtcatgccggcttcagtgccaacctgcagtaccactgtgcgaatccggcagcgcttcgtgccctggtgatgcgtcttcccacgctgttcccgggcctgcacgaggtcatcgtcaacaccgcgacggacggtggccaggggcgcaccgtgctgaccacggacaacctgcgcgtggtgctgtcaccgtga

SEQ ID NO: 508287 - DNA, 477 bp, Stenotrophomonas maltophilia
atggaccacatccccccgccccccgcaagggctctggcccagccgccaacttcggcacgctggcatccccgtttcgatctggccggtgcctggctgtcactggcctgcgccgcccattgcgtcgccctgcccctgcttctggccttcgtgccggcggcaatgatggcgctgcgctcgttccagcaccccggccacggcgtgatgacgctactgttgatgatgtcgcgctgggaatggttgttcgccttgatggcctcgacgctggcactggccagtaccacggccgggctgtaccggcatgggcgcaggctgccggtgcgactggccgcaacgggcgccatcctgctgttgtcggcttcgctctacctgccgctgaaggaatcgctgctctggcacggcgtcgccacggcctgtggtggcgtgctgctggcatgcgcgcacatcggcaatcggcgggcattgcacggccacaggtag

SEQ ID NO: 508288 - DNA, 594 bp, Stenotrophomonas maltophilia
atgctcatccgcactgcacgatggatcgtgatggcaagcctgctgggtgtcgtaacgctcagccatggcgcgccgcccacgccccccgccccatcgcgtgctgcccaggacgactacaccatcctgcgcctgctggtcaccgacgaccaggaccacctgctgctggaacacaaccgcagcggctggatgacacccgctgtacgcgccaaccgcaaacagagcatccagcaggcgctgcaacagctctcatcggatctcggcctgcaggtatcgccgttcacgctggcggccatctacagctatcgtttcaacgaagatccgccggacccaagccacgacgcggtgtcgttccggcagcactatcgcgccaccctgcgggccgggcagccaccggcgagaaccgcggacaaggaataccggtgggtgagccgcgacgaggcagcgacgctgatcggcatggaagcgctgcggatggaaaccctgcaggtgctcgaccaccccggaacgctgtggggcggtgcgttcgagctgtcattcaagggcgatgaggcaacgggcacccgattgatcgaaccgttctacccgttgcggtga

SEQ ID NO: 508289 - DNA, 12375 bp, Stenotrophomonas maltophilia
atgtcgcacctgcactcgcctgttccgcacactgcgccgcaccgccatccgatggcctgggccatcgcgcttgcgctgggcgccacgcccatgctgcctgcccaggcgcagcaggcattctcgccaggctggtttgccgaccgcggtgcagcgcagggcgcagccgcgcagagcgggcgcatgcccaacggtgtcccgatccagttccagttgcctgtccagcaacaggatgcagcgcgacagaaactgcagcagtcgatcgacaatctgggcaccgccgcgcaggccattgcgctgcagcagcgcttgcaggagcaggcgcgcacgcagcagcgcgccgccgggttcgtgattgctgacggcctcggcaaggacggcctgaaggttgatgagaatccgctgacccgtggctgggtgaatgcgcgcgaagcgatccagtcgcagggcacagacggcaaggtgcaggtcagcatcgagcagaccgccgaccgcgcgatcctgaactgggaaaccttcaacatcggcggcaacaccacgctcgatttcaaacagaatgcggactgggcggtgctgaaccgggtcaatgatccgagcgcgcgtccgagccagatcctcggccagctgaaggccaacggcaccgtgttcgtggtcaatcgcaacggcgtggtgttcggcaacaacagccaggtcaacgtgggcaatctggtcgcggcagcgacacggatcagcgatggccagttccgtgacaacggcctgtacagcggcgacaacaacaccgctgcgctcaccgatgccttcggcaaggtcctggttgagcagggtgcacgcatcaccacgcaggcgcctgcctcggcaacccgcgccggtggttatgtgctgctggccggccacaccgtggagaatgcagggcagattgaaacgcgcaagggccagacgcagttggccgctggtgacgcgttcgtgatacgacgtggtgtgggtaccgcgcagaacaccgcatcgaccacagccggcaacgagatcgcgccacgcatcgcggccggcagcaatgccggcagcgtgcgcaacagcggcctgatccaggcgcgcgagggcgacatcacgctggccgggcgcagggtggaacaggccggcgtagccgtggccactaccacgctggaccagcgcggcacggtgcacctgctcaacgccatcagcgaccgtgccggtacggtcaccctggccagcggcgcgaccacggcggtgctgatcgaagacgatggcaagaacacggccctggacagccgccgtgatgcgttggtcaaggcttcggccgagcaggacctgctgcgcggcgccagcagcactggcacattcgacaatctctcgcgcatgcaggaccggcgtgaccagtcacgcgtggagattgtgtccggcggcgacgtgaatttccaggacggttcgctgaccgtggccaccggcggtcaggtggtagcggaagccgcacgccggacttacgccggcaatgccgcgcgcattgatgtgtccggtgcggtgggcgtgcgggttgcgatggagagcaacaacgtccaggtgaaggtgcagggcaacgaactgcgtgattcgcccgacaaccgcgacagcggcaagctgatcagcagcgaggtctggatcgatcgccgccagctgcagcacgtggccgcaggcaccggtggcaacaccgccgagcgctggtatgccggtggtggcctgctggaagtcggggggtatctcgacaaccagggccattcgatcggcgaatgggccgcgcagggcggtaccgtgcaattgtccggcagcgaagtggtcacccatgccggctcgaggatcaacctggctggcggcagcctggatgtgcagagcggtgccatcaagcagagctggttgcgtggcaccgacggtcagctgtaccggctggatgatgcgccggccgagatgcggtacgacggcttgtatcggggctttgaagtaaagcaggagcgctggggagccaccgatgtgttccgcaatccgctgatcggtgccgaacagcgggtggagaacggctataccgtgggccgcgacgcgggccgtctgctggtgtccgcgcccagtgcggtactgcagggtcaggtggcgaccgatactttccagggtgcgcagcaatcgaagacacccgatgctgcgcgcgacggctacgcgcaggcgcagaccgcagtagcgcgcaatgcccagctgtggcttgggcgctacgacggcaacggcagaaacgcggtgttcgacacacaggtgcggatcgtcgatggcgggctgcctgccgccgacgtgtccctgcaggcgccgctgcaacaggaacagcgcaatacgctgtggctggatgccaaccagctcagcgcgcagcagtggggacgcatcgatctggccagcggtggcagcatcgcggtggagggtgcgctgcgcctgcaggacggtggccagctggtgctcacggccgccgatgtactgctggggggtgacattcagatcgcgggtggacaggtgcaggcgggcaatgaactgacccgcgtgggcgctcccgccgcctggctgctgcagggcggccgttcgcacgtggccctggcggagggcacgcgcatcgatctcagtggccgctgggtgaatgcgttgctggaaccggcgtccagcccgggcatggcgtggactgacggcggcaagctgcggctgcagaacagccatgatgttgtggtgccgggcagcgacgtgcgcgtcgatggcggcggtcgggttgatgcaaagggcaaggtcacgatcggcaagggcggcgacgtcagcctgcaggcagcgagcgtggccgacagcagtggacgggtcggtcgcctgcagctgtccggcgatgcacgcttgagcgcgctcggcggcggcagcggtacgctgtcgttgggcgatggtgggcgtatcgtgatcggcgggcagccggccgacggcgcactcaccctgcaggagaccctgttcaacaagggctttgccagctatgacatcaatggccagcaaggtgtggaggtggcggacggagccatcgtcgccgtgcgcatgccgggcctgcgcctggccgaagcagcgatgcaggcacgcgaccggcacgacgcattgcaggtctggtcggcacccctgtacagcgcggatccgatcaccggcaggttcagtcagcgcaacggtgcgagcctgacgctgcgttcacagcagggcgaggccggtggtgatctgcgcatcggtcgcggcgccctggtcagcgtggatgccggtcaatcgatcaccctgcgcggcgcgggcagcatcacggttgatggcagcctgaaagcggcgggtggccgcatccgcctggatgacattcgcgaaccgaccagcctgttcgattcgcagcgcaacgagcgcacctaccgcatcggtgcgcagggtgtactcgacgtcagcggtgacgccttcactgcgcgtgatgccagtggccgcctgcgcgggcaggtgcgcaaggggggcagcatcgagattggaggcgcgctcgactgggacggccaggacaacgtgcctgaccggccggtggatgcattcgtggtggttgaacgcggtgcgaaactgctggccaacggcagttcggcgcagctggacatcgatggcgccggccgccaggatgtggccagcgatggcggcaccatcgtggtgcgctcggccaatgcgctgtacttgcagggcgctctgcaggccgctgcaggcggcgccggcgcgcagggcggaaccctgggtatcgccttcggaggcagcatccatgcgggcggtgccagcgaagatgtgttggcgccgcgcgccatcgtgctcagccaggacgatcgcgagcaggccgtgccggcgaagctgcagtacgggcacgcacgcctgtcggcggcgcaggtcggtgccggtggtttcgacaatctttcgctgttcggcaacgtgcgtgccgaaggtgatgtggaactgcgcctcggccagagcctgcgcttccaaggtctgcaacaggatgggctgggcatgctgcagggcggcagcgctggcggcctgcttgcgctgagcgcgccctacgtgcgcttggcgcagagcagctggttgaggctgcctggcgataccctggtcggtaccgctgccgtggcggtggataccggtcgccagcatcgcttcagtgtggatgcggacctgatcgacctgcgcaataccacctggctggcggggttcgatgacgtgcaactgcgcagtcgcggcgatctgcgcttcctgggcagtggcgcagcgctcggcagtaccggcgcgcagctgatcgcgccgcgcagcctggacgtaaccgcagcgcagctgtacccggtggccgatgcgggcggcgtgctggcggccggtgtgtcgcaaccgggcagtgcgatcagccgctgggatgatgccgaaggcatcgtgcgcatccatggtcttggcggggcggttccagtcctgccgttgtcggtgtccggcggcctgtcagtggtggcagcgaccatcgagcagggcggcatcctccgggcgccgttgggcgccatcaccctgggtggtaccgatgccgacgggcgccgggccggctcggtgacgctgctgcccggaagcgtgacctccaccagcggcgcggggctcagtgtgccgttcggtggcaccgtcgatggcgtggactggcgcagggacggcagcgcccatgccataccgccggtaggcggtgtcgcgcccggcgcggaccccaagggcatcgccatcatcagcagccgtaccgaggtcgccgaaggggcgctgctggatctctccggcggcggcgagttgaccggtgctgcctttgtcagcgggcgcggtggctcggtcgacatcctgcgccatgcattggccgatgccaatccgcgttatggcttcagcgaatcggccagtccggtatatgcgatcctgcccggctacaccggcagtgcagcgccgctgggattgagtgacggctcgctggaccctggcattggccagcagatcacgattcccgcaggcgtgcctggattgccggccggcacctacacgttgttgccggccagcttcgcgctgcagcagggcgcgttccgggtggagctggggcgcaccggcgcggtcggcatcggtgcaccgctggccaccggcaccggctcctggatggtcggcggacacacggggtcggcgctgggtggcctgcgttcgcccttgctgaccgcgttgctgctgaccccggccgataccgttcgccggcattccagctacaacgagaccagctacaacgcattcgtgaccacgtcggcacaacggttgggcacgccgcgcggctggcagaccgtcgatgccggcacgctgcgcctcgggcttggcaatggcgccggcagggacggcacgcccgctgtgagtttccagggccagacccggtttgcgccggcggcgggcagcgccggcattggcggttcggtggaagtgaacctggtcaaccggctgggtgaactggaagtggtggcggccggtcgcacgcccagttctactggcaatggtgccaccatcgaggcggacgtgctcaacgcgttgcagccctcgcgcctggtgctcaacgcacaggtccgcgcgaccagcaaccagcgcctgcaggtggccggtgtcggccagaacctggtgttgcgtgacggcgcggtcctgcgtgcgcctgaggtgattctgggggcggtggccggaggcaagggcgtgcgcgtggaggcaggcgcaggcatcgacacgctcggtcgcggcgccgctccgttgcccgacaacgccggtttctactaccaggccgaaggcggagtgatggtggtgtccaacgggcgcaccgatctgctggccgcgcccttgcgcgagggagccgatccgtcgctggtcagcttcgacatcggcacctgcgacccgggccgtcagtgtgcgggccaggcacgattggtgtcggagggaagcatcaacgtcgccaccaatggcggcctgcagctgcgcgacacggccagctacggcacccgccagctcggcgtcagcgtggcggcgatcaatctgggcagcgacgatgccatcgcgcaggccgccgcggccgccgctttgccgccgggcatgctgatgaaccagcaggtgctgaccaccttgctgcgcggcaataccgccaccggcgcaccggcactggagacgctgaagctctcggcggccgagtcaatcaatgtattcggcagtgtcgatcttgatacgcgcgacagcgcgaccggcaagtcgagcctgcgcaccctggtgctgggcgcaccggccatccatggctatggcaacagcagcgaccgtgcgcgcatcttcgccggcaacctcacctgggccggtgcacttgcggcaagtgggtttgcggattcgaatgccgcgcagcccggcggggcggcgatggtcgaccgccttggcagtggccagctggacatcattgccgatacgttgcggctcggcccggcgccacagtcgtggcccgcctcggaggtcgtggccggacgccaggtcctcggcttcgccggggtgaacctgcgtgccgcacagcaggtggtcttcgccggcaatggtgcgttgaatgtgcatcagttccagggcgcctacgacccagccaagggctggacctacagtggcggcaacctcgatatccaggcaccgctggtcactgccgaagcaggcgcgaagctggcggtgactgctggtggcacgctgcgcgtgcacggcgcaggcgcctcgacggcggccgatgctctgggcgcagaattgacgctggacgccgacgatattctcctcgacacccgtatcgcgctggcctcgggccgcctggcggccacggcggcccgctcggtgcagcttggcagcagcgccaacctcgatctgtccgggcgcaaggtcagcctgttcgatgtggatacctacagtgtcggcggtgacgtcacgctgacagcaacggaaggtgacgtgcgcagcgacgcagcatcgcgcgtcgatctgtcggcgcagaacaaccgcgcgggtcgtctcaccgtgaccgcgctgggtactgccggcgggcatgtcgacctggcaggacggctgcttggccaggccagcggcacgctggacgcaggtggcagcctggtgccgtatgagaacggtgagctggtggtgcgcgcacgtgaactgacagacttcagtggcctcaaccagcgccttacccgcgacggtgtcactggagcgcgcagcttccagatcaagcagggagacctgctgatcggcgacgaagtgaaagcgcgcaaggtggatatcagcgtcgacggtggtgcgctgcgggtgctcgggcgcatcgacgccagcggcgaccaggttggcagcatccgcctggccgcgcgcgatggcctgcagttggacggaagcctggacgcccacggcacggcactgcgtgtggacagctatggcaagatcatcgacagcccgaaccgtgccatcgtcgagctggaaagccgcgatgggcgcgtgcagctgggttcggcggcgcggatcgatcttcgcagcggcaccggcgttgccgtcggtaccggagcagggcagaacgatggacgcgcccgcggcacgttcgtgctgaacgtgccgcgagtgggcagcgacgatgccggcgtcgataccggcagtggcgtgcaggtactcggcgcgcgcgatatcttcgtgaccggcgtgcgccgctatgacggcgcacccctggctgacacggcggatgtgaacggccgacgcggccagctggttacccagtcgtggctggatacggtggttgacccagccaacactgcatggatgaatgccgcgctgggcaatgccgggctgtcggcacggctggccacactggggaccgtgcgcctgcgtcccggcgtggatgtcgtcggcgcgatctcgtccagcaacccgcatggtgatctgaccgtcagtggcgatatcgatctttccgcctatcgctacggcccgcaggccaatcgacaggaccccgcgcgacgcggcttcggtgaggcgggcgcgttgcgcctgcgcgcagccggcgacctgttcatccatggcagcatcaacgacggctttgcgccgccacccgccagcccggatgatcgcggttggcagctggtgcccggacagagtttcggtgccggcatcacaccgttcggcagtgacatcctggtgcccaatgacaacgtcgtactggaggccggtacgcgcttcccggcgggtgccgtgctgaattacgcgattgcggtgcgcgatgcggtgctgcctgccggcaccacgttgccggtggagatgacgctggggcaggcacttacgttgccggcaggctatgtgctgccggcctccgtcacgctgaccgatggccaggtgcatgccgcaggcagcgtgctggcgcaggcgctgcagctgcccgctggttcgcgcctgggcgccggtttccagctgcgcagcgaggccaacgtaagggccacgacctggccggccggcgcgcgattgccgacggagctgcgactggcgacgcgcaccccgttggcgcgaggttcactgattccggcaatgaccacgctggagctggccggtgggcaaccgatcaacctgcgcccggtgggcagcgatggtcgacaggggcgcaactgggcgttggcgcagatgttgcccgagggcaccacctcgtgggatctgaccgccgttgcgggcgccgataccgaggcggccgacccgcgcgcacggcggatcggcagcggcgatctggtgatggccgatagccattacggtgttgtgcgtgcggctaccatggtctccacgttcgtgcgcgaacaacgggtgaccgccctgggcgcgcagcgcgaaggagtggatgcaagctgggtcggcaagccggtgaaggcgctggccgagcacctgggcaagcccgagtctgcgatctgcgcggctggcagcagctgcgaggcggcaccttacttgttcacggcgcaaggtgccgatgaaatgggcgatccgtcgctggtcggcatgcccgtgaaggaaactgccgagatgttcgggatgaccgaagaggagctgtgcggttcggtcagttcgggcatctgcgtgatgcccggcgagatgcgtgacgtggcgaccatgggtcaaccgaaacatggcacgccgctgtggagcgtgctgcgcaccggcagtggcgacctgcagttgatggctggccgcgatctgtcgatgcgctcggtgtacggcgtctataccgcgggaacgccgaccgcgctgggtaatggcctcgatgcccgtttccagtccgagcgcgcgccgccgtccggacgcgaagcattgctcgggctgcagcagtccagcggtgactatgacgcggcacttgccgcctatcgcgcgtggtatccggatcacggcggcaacctgagcatcgcggccggccgcgacgtgaccggggcaacatggggtgcgctgtcgtcgtccggctcggcggcgggtgacctggccaaccacgccagcggcgcggttgccaactggctgtggcgccagggcacaggtgcggttgcgggcgtcgagcagcagcctgtcgcctggtggatcaacttcggcacttacgccaatgtgtccacgttctccaaccccagtccacgcatggtcggcttcaccggctttggtacgttgggtggcggcaatctggagattgatgcgggcaggcatgccggtgtgaccgatgccaagggtgacgcgctgaagaacacaagcagcacccgtttctccaccgcgatcaacgcagccgtgggctcgaccggacgtgttgatgatgggcggctggttctgacaggtggtggcgatctgagcctgcgcgccagcggtgcactcaacccgaacctgatggccactacgatcaatcacgtcagcaacgagcaggacctggaactcaatggcacattcacgaacctgcgcggcagcctgagtcttgaggcctcccgcattggcggcagtgccgtcggcatctcccagtacactgatcccagcagtggcctgcgccccagcgatccgttccgcgctttcggtggcaaggcgatgggtggtccggtgctggtgctgggcgacgccgtggcaaacctgcacgcccggggcgacgtcatcctgggcggcgtcgccgatgccggccgtgtggtgcaattcaatgcgccgcaggtggcgctggcgggaggcggtcttgcggcgggtactaccggcttctcgctgtggaccgcggccacggcagtaaatctggtttcgttcggcggcgacgccaccccgctgacagcgcatgccagcaccccggggcagaatctgcgatcggaatccaccggcgacaatttcgcctactggatctatccctccaggctgcaggtgcaggccaccagcggcgacatcaagttgggcgaaggcggtgagaacaacatactgcttaccgctccttcccctacgggcagcatgcagttgctggctggcaattcgatcatcgccggcgatcggtcaccgtacatcagcagctccggtgcggacacgcgcctgccatccccgttcgatccggtgttcaccgcacgggacgcgaagggcactgaattgctcggcaacatttcgcccgatggcatcaatgctcgggtacccacatggggcgatgccataccgctgttcgcctttgggccgaaccgtcccatggcggcggtggcacgcaccgccgggggcacgccgaaccgcttctacgcaggctcgggcgacatcatcggtctgcgcacgggcgaacaatggatgctgaacgccgccggtggcagccgccgcaccgttcgcgagtggattgatgtggctgcgccggtgcagctgcgtgcaggccaggacatcctgtccagcaccgtccttgcgttgaacaacagtgccagcgatgtcacggtgctgcaggccgggcgggacatcgtgcatgccaacgtcaccgtatacggcagcggcaatgtcgatgtcagcgccggccgtcagctgcgccaggaagaccgcggcagcatcgtcagccgcggcggcctggtgcagggcgacacgcgcccgggtgccagcatcgcgatgaccgccggcaaccagcaggtcgactttggcgccgtgcgtgcacgctacctggatgcgacccggctggccgatcctgcgcagacactggcgtcgcagccgggcaaggtggtcaaggtctatgacaaggaactgaagcagtggctgctggagcgtttcaacatcagcgctgacggcgcgcaggcactggccctgttcgacacactgccacaggagcagcagcgcatcttcctgcgccaggtctactacgccgaactgcgcgagggcggccgcgagtacaccgatgcggatggcccgcgcgtaggctcctacctgcgcggccgcgaggccatcgccaccttgatgccggacaaggatgcagcgggcaagacgatccagcgcaccggcgatatcgtgatgtatggcggcgccggcgtacgcaccgaggccggtggcaacatcgagctgatggcgccgggcgggcagatcgtggtgggcgtggttggcgaggcgccgccggcaagcgcgggcctggtgacccaggggcagggcgacatccggctgttcagccaggacagcgtgctgttgggcctgtcgcgggtgatgaccacctttggcggtgacatcctggcctggtccgaacagggcgacatcaatgcgggccgtggctcgcgcaccacgctggtgtataccccgccacgccgcctgtacgaccgttggggcaacgtcagtctgtcaccgctcgcaccggtcagcggtgccggcttcgctacgctggacccgattcccgaagtgccgccgggcgacgtcgacctgatcgcgccgctgggcaccatcgatgcgggcgaagcgggcatccgtgtctcgggcaacatcaacctcgccgcactgcaggtgctcaacgcggccaacatccaggtgcagggtgagagcaagggcctgccggtgctggccacggtgaacgtcaatgcgctggcttcggccagtgcggcagcgaacagcgccagccaggcggcacaggacgtgatgcgcaagagccaggacgacgcgcggcgcaaccagccctcggtgatcagtgtgcagatcctcggtttcggcagtggcaccagcagcattgcgccgccggcacgcggcactactgccaacagcggctacgacgccaacagcgcgttccagttcccgcaggcaagccgcgacgagggcacgcagcgccggtag

SEQ ID NO: 508290 - DNA, 1170 bp, Stenotrophomonas maltophilia
atgaacaagtacaagaccctggccgcgctggttgccaccgcgctgctcgccaccgccggtgccgcttcggcccagcagtccctcatcaacggtggtggcgcctcgctgccggccgatctgtacaagggccaggccgacagcatcctgccggccaacttcagctacgccgtgaccggctcgggcaccggcaagaaggcgttcctcgagaacaccatcggcctgttcatcaccaacggcaccggcaacgtccatttcgctggcagcgactcggtcctgagcagcaccgagatcagcaactacaacagctcggcgctggcctccacgctcggcccggtgctgcagctgccgtcggtcgccacctcggtcaccgtgccgtacaacaaggccggtggtgatctgaaccttgacgtggccaagatctgcggcgtgttctcgggcaagatcaacgactggtcgcagctggacagcgcccgcagcggcgccatcaaggtcatctaccgcggcgaaagcagcggcaccagcgagctgctgacccgcttcctgaccgccgcctgcgccaccgaagacctgagcgccacccgtctggtcggcggcaagttccaggtcaagtcgaccttcgctgatctgttcacccgcgatgcgcagaacaacctgccggccttcctggaagcggccccggccaccggcggcacctcgctgtacaaccgtgtctaccaggttgccggcgccatcggctatgtcggcccggacgtgatcccgaacctgcaggatgcgaccaagattgccaaggtgaagggcttctcgccggatgaagtgagcgttgccgctaccctgaacaccgtcgccccgccgaccggtgccgacattgccaacccggccaagtgggtgccggtgttcaccaacccgaccgccggctacccgatcgccggttacaccaacctggtgttcgcacagtgctaccgcaccctgccgcagcgccaggctgtccgcaacttcctggaaaagcactacaacctgggcgtggatggcaacaacgatgctgccgtgcgtgcgcacggtttcatcccgctgacccagacctggcgtgaagccgttgccaacaacctgatctcggccaccccggccaccggtctgggcaacgccagcacctgcgccggcatcggccgttga

SEQ ID NO: 508291 - DNA, 807 bp, Stenotrophomonas maltophilia
atgagtgaggccgagccgccgttggagctgcagggcaacctgtggctgagcattgccgggcagagcgtgggtggccgcggacgcttcgcgctgctgggcctgatcgatgcgtgtggctcgatcagccaggccgccaagcgcatgggcatgacctacaagaacgcctgggacgcggtggacgcgatgaacaccgcggccggcgaacccttggtcgcccgcagtgtgggcggccgtggtggtggcggtgcgcgactgaccgagcgcggccacaagctgatcgcgcggttcgaggaggtcgagcgcgcgcaccgtacgttcctgcagtcgctgcaggccacccccgggctggacgaggatctggccctgatccggagaatcggcatgatcaccagtgcacgcaaccagttccacggccgggtcagcgcgctggccaccggcgcggtgaatgatgaagtgcagatcgaagtggcaccgggcctggcgctggtggccaccatcacccatggcagcgtggaatcgctggggctggcggtgggcgtgccggcctatgcgctggtgaaagcctcgtcggtgatcgtggcgcagggcgagggcgcgcgctactcggcgcgcaatcagttcaccggcacggtggagcggatcaccgagggcgcggtgaatgacgaggtggtggtggacatcggccatggctgcagcgtggtggcggtgatcacccgtgccagtaccgcagcgctggaactgcgcgaaggcagcacggcaacagtactgttcaaggcgtcgagcgtgatcgtgggcgtgccgatgtag

SEQ ID NO: 508292 - DNA, 1983 bp, Stenotrophomonas maltophilia
atgcgtacctgtcgtttcgttctacccctgtccgccctgctgctcccgcttgccgccaccgcggccgacacggcctcgccgccggtgttcaccctgggcacgatcgacgtgcatgccgagcgcggcacgtcgcccaccgtggccgaacgcagcctcgacgccgaacgcatccagcagctcgaccgcaacacggtcggtgatgcggtcagcgtattgccgggcgtgagcctggcgcgcaactcgcgcaacgaggacatggtctacctgcgcggcttcgatgcgcgccaggtgccggtgttcctcgacggcatcccgctgtacgtgccctatgacggctacgtggacttcggccgcttcaccaccttcgacctggccgagatccaggtcgccagcggcggcgcctcgctgttgtacggaccgaacatcctcggcggtgcgatcaacctggtcagccgccgccccgagcgcccgctggaaggcgacgtgcggctgggcatcgccgatggcggcgagcgcaaggcggcggtcaacctcggcgggcgtcgtggcgactggtacttccagctcggtgcgtcgatcctgaaggccgatgagttcccgctgccgaagggcttcgtcgactacaagcgcgtacccaccgacaccggcaaggaccggcgcaacgcctcgcgcgacgaccatcgcctgtcgttcaagctgggctacaccccgcgcgagggcgacgagtacgcaatcggctacgcgcgccaggacggcgagaaggacaacccggtctacaccggcaccgcgcgcagcggcatccgctactggcgctggccgtggtgggacaaggacagcctgtacttcatcggcaacacccgcctgggtgagcacaccacgctgcgcacccgcgtctaccgcgatacctatggcaacggcctggacgcctacaccgacggcagctaccaggtggcgatggacaacagcagcttccccagcatctacgatgaccgcaccgtgggcggctcggtgaccttggccacgacggcgctgccgcgccaggaactgcagttcgcgatccactacaaggaagaccagcacagcgagcgcaacccacactcgccgaccaaggacttccgtgatgtcaccacttcggtggcgatcgaggaccgcatcgcgctgaccgacacctcgcacctgcgcgtgggtatcggccatgaccgccgcgacgccaagcgcgtgtacttctggccgaccggcagcaccgatgccaccaacgccgtgctggagtacgtgcagcagctggcgccggaccagcagtggtacgcaagcgccgcgcggcgcacgcgtttcccgaccatcaaggaccgctactcggcgcgcatgggtgcggcgctgcccaatccggacctgaaggccgaacatgccacgcatttcgaaatcggcctgcgtggccgctggtgggacggtggccaactgcaggccgccctcttccagagccgcatcgatgacctgatccagaacgccgtggtggcctcgcgcgaatgcggcggcagcacctgcaaccaggcgcagaacatcggcaaggcccgccatcagggcgtggaactgggcctgcgccagcgcatcggcgacgactgggacctgcagaccagctacacctggctgcgccgcaccaacctggaagaccgccgcgtggccctgctcgacagtccgcgccaacggctgttcatggcgctgggctggcagcttctaccgcagttgaagctgcaggccacgctggaagccgaacagggccgcagggtcagctacgccgatgccgcacgcccggtacgcgagctgcccggctatggcatcaccggcctgaaggccagctggagcccgcgcgacgcctgggatttcgacctcggcgtgcgcaacatcggtgacaaatggtacgaactggccgacggctacccgatgccgggccgcacctggtttgccaacgccaactggaggttctga

SEQ ID NO: 508293 - DNA, 543 bp, Stenotrophomonas maltophilia
atgaccgccatacaggccccgcgcattgccgcaatcgtgcatgaccacagcggcgagcccgatgccctgctggccgcgttcgccgcacgccagctggccgccggccaccgcgtgcgcgggttggtgcacctgccgcacgaacccaccgccaacggcaacaagcgcatggcactgatggacgtgaccgatcccggttcgcgttatccgatcagccaggcgctgggcccggcctcctgtggctgcaacctggacccgggcggcatcgccgatgccagcgtggtgctgcgccgcgcgttgcaggaccacgccgcgctggccatcgccaaccgcttcggcacgctggaatcggaaggcggcggcatggccgatgagctgctggcgctgatgctggccggcattcctttgttgaccgcggtgaagctgccctacctcgacgcgtggcgccagttcaccggcggcatggccgtcgagctgcccgccgatgacgcggcgttgcaggcctggtgggatgcctgccgcaccgcgccggaggccgccgcatga

SEQ ID NO: 508294 - DNA, 1038 bp, Stenotrophomonas maltophilia
atgaggcggcgcgccctgctgcaggcattcgcgctggcaccgttgctggtcgtcaatgccaagttgctggcgatgccggcgcagcgcgtgctgcggctgggtgcgcccaaggccacgcccaagcgcgtgttcgcggccggtccgccggctgcggtactgctcgccgccgtggcacccgaacgtctgctcggttggccgatgaaggtatcgcccgaagccctggcgcagctgccggcgtcgctgcgcacgctgccggtggtcggtcgcctggccgggcgcggcagcacggtcagccttgaacgcctgcttgcgatgcagccggacctggtactggatgccggtgacttcgatgccaattaccgcgactcggccgagcgggtctggaagcagaccgcgattccgttcgagctgattgccggccgtctgcccgatcatccggcgcagctgcgccacgtcggccggctgctgggcgttgccgcacgtggcgaagcactggcgcaggcggcggaggcgcagttggcactggtgcacgaggtgctggcgacgcgtcccgctgcgacgcggcccaccgtgtactacgggcgtggcagcgatggcctggaaagcggtctgtccggctcgatcaacaccgaagtcatcgagttctgtggcggccgcaacgtggctgccagtgccggcgccgggggccttgcccgggtgtcgttcgaacaactgctggcctgggatccggacgtgatcctgacccaggatgctggcttcgccgcgcaggcggcacaggacccgcgctggcgcgccctgcgtgccgtgcgcgagcgccgcctgcactgcgcaccggtattgccattcggatggctggatggtccgcccggtgtcaaccgcctgcccggcctgccctggctgctgtccaggctgcatccgggcgcagtccccgcgctggccccggccgcgctgcgtgcccgcatcggcacgctgcatcagctgctgtggggccagccactgcccgccgcgcttgcacgcagcctggatgcgaacgcctga

SEQ ID NO: 508295 - DNA, 957 bp, Stenotrophomonas maltophilia
atgctgttgctggcgttctcggtcggtcagttcccggtgcgcccggcggcgctgctgcatgccatcggctggcagctgttcggcatcggcgaacccagcgcgcctgcagtgcaggccgcgctctggcacatccgcctgccacgcgtgctcgcggccatgctgatcggcgcggtactgtcggcagccggtgcggcctaccaggccatgttccgcaatccgctggtgtcgccggacatcctcggcgtctcggccggcgcgggccttggcgcttcgctggggctgttcctcggcctgccgatgctgctggtgcagggcatcgccttcgccggtgggctgggggccgtgggcctggtctgtctggtggcagcgctggtacggcggcatgatccggtcctggtgctggtgttggccggcgttgcggtgtcggcactgctcggcgccggcatctcgctgctgaagctgctggccgatccgtacacgcagctgccgtcgatcaccttctggctgctgggtggcttgaacgcgatggtcatcgacgacctcaaggtcaccgcgccgctgctgctgatcgggctggtgccgctggtgctgctgcgctggcgggtgaacctgctcggcctgggtgacgaggaggccagcgcgctgggcgtggcggtcaccccgctgcgctggacactgatcgccgccgccacgctgtgcacggcggcagcggtgtcgctggctggcatcatcggctgggtcgggctggtggttccacacatcgcgcggctgctggtcggcgccgacttccgtcgcctgctgccggccagcctgctgctcggcgccagcttcctgcttgccgccgatacgctggcgcgcaccctggcgccgatcgaactgccactcggcatcctcaccgccttcgtcggtgtcccatgcttcctgctggtcctggcgcgcagcgagcgtcgttcatga

SEQ ID NO: 508296 - DNA, 777 bp, Stenotrophomonas maltophilia
atgagcaccgctccgccgctgctcgaagcacgcgcactggtcatcggccatgccggcgtggcactgggcgtgccgtttgcactgtcggtgcagcccggcgaggtgctgtgcctgcttggcccgaacggctgtggcaagaccaccctgttccgcaccctgctcggcctgctgcctgcggtacgcggcgaagtggacctgcagggcacgccgctgcgcgcgcatgaccgcgccgctcgcgcccgccgaatgggctatgtgccgcaggccgcgccgctgccctttgcctggcgcgtgcgcgaggtggtggccatgggccgcgccgcgcacctgggcctgctgtccgcacctggccgcgccgacgaggccatcgccgatgactgcctgcgcgaactgggcctgcaggcgttggcggaccgcaccgtcactacgctcagtggtggtgagcgccagctggtgctgatcgcgcgcgcactggcccagcaggcgcaactgctggtgatggatgaacccaccgccagcctcgacttcggcaaccagctgcgcatcctcgataccgtgcgccgcctggccgagcgtggcatcggcgtgctgctgtccacccatcaaccgcagcacgcgctgcaggtggccgaccgcattgcgttgatgtccgccggtagcctgcaggtgctcggttctgcccgcgaggtcgcaacgcccgagcgcctcgccaccctgtatggcgtcgatgccacacgcgtcgccgccgccctgcccgcttccggaatttccacatga

SEQ ID NO: 508297 - DNA, 801 bp, Stenotrophomonas maltophilia
atgagtaccccgctaccgaccccgatcgaccacagcgcacgctaccgccaacacctgcaggcctgcggcttccaggcaaagccggccagtgcctgggatgcgcgtgccgcgcagtccagctggaagcggcgccacgatgactacagcgaggcattcctcgaccggcttgatctcagtggcgtggccacggcgctggatgtcggctgtggccccggcctgctgagcctgccaattgccgcacaggtgggccatgtgcacgcgctcgactacagcaccggcatgctcgaaggactgcgcgctgcgatcatccgcgacggcgtttccaacgtcacgccgtgggcgctgtcgtggaccgatgactgggacgacgtgccacgttgcgatctggccattgcctcacgctcgttgagggtgccggatctggaggctgcgctgcgcaggctggatgcgcacgcccgccagcgcgcttgcattaccttcgccaccagccctcgtgccggcgtaccggagctggccgagctgcttggccgtgactgggtgccgatgcccgaccatcgctacccgatcaacatgctgctggacatggggcgcgagccgcaggtggattacctgcccgaatcggtacgtgatgtcgcacaggatgccgatggcctggtgcgccaggcagtagagctgtttggtgcgttggatgcggatgaggaagcacgcgtgcgcgcatggcatgctcgttcgccgcagcatcgtttcggcatggcaccgacccggcgctgggcgttcatccagtgggcgacgaacggttga

SEQ ID NO: 508298 - DNA, 375 bp, Stenotrophomonas maltophilia
atgaacaaatccaacttcccgcacctgcacgccgaccacggcaccacccacgacgacggttcgccacaggctgcgcctgcagtggacaggaacaccttcatttccaatctcaaccgtatcggctccggtgcggcggccgatggccaaccctggccggagcggcatcaactccccggccgctgcctggccctggccgatgccgattgcgcgttaagtggattgcgggtggtgctggaaatgctgctggcggcggagcgcacccgccagaatggcgaacccgagcaatacgtgggcgaccgggtgatggaggggttggtcatggcctgtcagtcgttgtgcgcgcaggcggtggggcggttgcagcctgaaggctga

SEQ ID NO: 508299 - DNA, 879 bp, Stenotrophomonas maltophilia
atgcctgccctgcgcacctcctgcctgctgcttgtgctcgccgccgccgccagcggctgcgcgtcgacgacgccgaagtacctgcgtgcacccagcctggccgcccccgaaccggcgccgcaggacagccgcaacgcctacctggaactgatcgggcgcatgcagctgcagggcgcctggtatgcctcgctggcccacgtggacgctttccgccagcgctacggcgatccgccggcgctgcgcctgctgcaggccgatgcgctgcgcgaaaccggccaggccgacgcagcgatcgccctgtaccgcgatctttccagtggctcccaggccgccgcggccgcacacgggcttggcctgatcgccgcgcgccgtgatgacgatgccggcagtgaacaggcgctggcccgtgccacgcaactgcaaccgctgaacaccgactacctgggcgacctcggctacgcgcgcctgcgggccggccagttcgaacaggcgcgggagccgctggccaaggcgctggaactgtccccgggcaacgccaaggccaccgccaacctcgccctgtgggccgtgctgcgcggcgataccgccaccgccgagcgcctggcccagcaggccaacctcaacgaggacacacggcgcagcatccagcagcaggccgcgcagatccgcacccgcctgcagcagcgccaggccacaaccgcaacctcggcaaccgccccgccaccgccgcgtgccgtcgccagcagtactgcaggcaacacacgactggccgtcgagccgcgccgcgagacccgcgatgagcgcgatccgcagcgcctgccgccttcgatgctggaacgcttcagcacctctgatcacccgaacgggaacacaccatga

SEQ ID NO: 508300 - DNA, 456 bp, Stenotrophomonas maltophilia
atgaccgcaacgctcctgacccgacgcctgttgccagtgctggcctgcctgttgattgcaggcaccgcgcaggcgcagcaacagccgttgaccgggcagatgctcggcggcagcagccccgcaccggcctcgcaaccgttgcagtccgaggcgctgacgactgtggacctgtccgcgccagccccgccggcacctgccgcgatgccggcggcgatcgccgccactgatgccgccgcaccggtggtccgccctgcacgcagccagatcggcgataccgcccgcagcctgttccgcctgcaggcatcgggccagcaggccggccagcgcctgccgatcctcggcgaccaggccacgttgagctatgcccgctacatcaagagtttcgaacacgagatcccggacttctttgaaaccgatgtcgccaagtccaagggaacatcctcatccggacgctga

SEQ ID NO: 508301 - DNA, 1698 bp, Stenotrophomonas maltophilia
atgaccagtactgatccgaccgcgattccggggcaggtggatctcgagcccggcactcccgatccggtagcccaggccgagggcaccgcgcgcacggcgcggctggcccgcggcacacgcccgttgagcgatgccgagcgtcgccgccgccaggaagcgatgtgtaaaacggtacccgacaaggaggccgccaccacgggttgtacccagagcctgcacctgagcgtgttcttcgacggcaccggcaacaatcgccaggaggaactggacaaggacaagggagagcgggccctttccaacatcgcccgcctttacgacgcgcatgtaagggatcgacccaacagcaagcgccagtacctgtccggtgtggggacgccatgcccggaagtcggtgacagcggtggcctgctgggactgtcgatcggcaagggggggcgcgagcgcatcgatttcgcgctgcaggcgctggacgaactgatcgatacccagccggagccgatgcggatcctggtggtcagcgtgtcggtgctggggttttcgcgcggggcggcctcggcacgggcgttcgcccgcgacctcgccgcgcgctgccggcggcaggctgacggcacctggctgtaccgcgaacgcatccccctgcgcatcggcttcatgggcgtgttcgacacggtgtgctcggtgtggccgagcctggcggcggccgcggtgaactaccgcaatggccataccggctgggccgaaggcatgggcgttccggaaatcgtggagcagtcggtgcacatgaccgctgcccatgaactgcgcggccagttcccgctggattcgacccgcgagcacgcgctgtatccggccaacacggtggagatctggttccccggcgtgcattcggacgtgggcgggggctatgacccccagcatcaggggcggcagaacagcatcgcgcgctttgcgctgaacgagatgtacgacatggcgcaggccggtggtgtgctgctgaatccgatcagcctcctcgaagatcaggtcaaggccgagttcgacaagcaggatcctgagctgcaggcggtgttcaacgcctatctgcaggcggtgcgggtcaagcgtggacgcatggaagacgtgcaggcttcgcacatggagctgctgtaccgctggctgcgcgtgcgcgtggcgcgcggtgacaagctgccatcgatgcaacgcctggccgcgcgcgaggatgcgctgcgtgaacaggtgcggaccctgcgtcgccgccagtcgcagctgccgtccccgtggagcaatgacaatctgcatctggccgagcagggcaatgcggacaggaccgccgagtggaaccgggtttccgacgaactgaaagcccgcgatgacgagctgtctgccgtgcggaaacaacgccgcgggctggagaaggagaacgacacgatgctgggcaagatcgtcgggctgcgccggcgccgtgaacgcggtgcgacgctgacgatggccgagcgcgtcacattggaatcgtgggacaacaccacgctgctgccgccggaggtggagacgttcttcgatggctatggccatgactcggtggcgcactggttcatcggcaacctgagccagtggcgcgtgctgtacttcggcgcgaccaagtacacgccgggcaaggtggaggaaaaagccgaggcgccggaggcgctgcctggctga

SEQ ID NO: 508302 - DNA, 501 bp, Stenotrophomonas maltophilia
atgatgagcaacaagtacctgtggtggagcatgctggcggtgatcgccgtgctggtgatgggcgtgggctgcagccgggcgatggcacgcggcaagacgccgatcatgtcgttgtttgcgttcaactacagcccgtactacctcgccgacgtgcgcgtcgatgggcagtatctgggcgggctggacgggtacaccaatggcggctccgggatgggcccgcgggcgccgcagggcaaggggccggacagcgtgcgcgtgcgctggatcgaggccaatcgctatgacctggcgaccaaccgctacctgagtgaagggcaccgcgtgccacgcgaggccgtggtgccgctgaagaccccctatccgccgaacccctcgacgttgctgctgcatttctatccggacggccatgtcgaggccgagctgctggacaagggtgtcaacaaatggaatgtgcggcgcatgccagtgccgaaggagcacaaggaccatgaccagtactga

SEQ ID NO: 508303 - DNA, 864 bp, Stenotrophomonas maltophilia
gtgacccgggactggcatttcccacctctcgcgctgccgccactggaagcggaagcgcagcgcttcgtgctgctggatggcgcgcagtgcgaccaaccctcgcaggtgctgcgtacgctgccgtggacgccgctgcggttgtttgatggcctgctggccgacggcagcgaggacgccagcgtgttcctggcacggctgccccgtgacatggacatcgatcgcttcctgcagcgggcggctgcgcaggcacgctcgccgggcctgctcagcctgatcgacacgaccctgaccgctgaggcgctgcagcagcgcctgcaacggcgcctggatgccagctaccccaacggcaaggagttcctggcgcgcttctttgatgcacgcgtgctgccctggtgggtgcaggtgctcgatgagccgcagtgccgtgcattcctggcgctgggggagcgctggtggtacctgcggcacgacctgcaatgggcgcacctggatctgcacgacgccgcgcaggatccgcatgaaccaccgtgggtgctggaggcaccgcagcggcgtgccctgatcgacgccagctacccctataccctgatcgaccacttccagctgaccgaccccgagctgttggcgcgcctgccacgggcgcgctggtacaccttctttcggcgcgtggtggcgacggccgctgcggccggcatcgaagacagccgccgggtggtgatggtggcgacctgggcgctgttggccggtacggatctcggcgaggacccggcatggcagcagcgcctgcaggacttcgccagcgggcggcgcggcgcggccgatatcggcgacgaagtctggcccctggaagaaagctgggattga

SEQ ID NO: 508304 - DNA, 2772 bp, Stenotrophomonas maltophilia
atggaagcgattcgcaacctcatggtgcaggcagcgggcctggaggccggcagccgcctgtatcggttggatctacccggcacgccggcggtcgttgtcgaccattggcagggccatgatgccctgtcgcaagggcggcagctgcagatcgatgtgctcgcgctggacgcgtcgctgccactggccggctggcttgggcaaccggcgtgcctgcatgcacggctggccgatggccgggactggccgcgccacggcgtcattgccgatgcgcgatgcgtgggcagcgatggcgggctggcacgctaccgggtcaccctgcgtgactggacctggtggctcgaccaggcgcgccgcagccgtgttttccaggaacagagcgtgcgcgacatcctggatgcggtgttccaggcgtaccccgaacatgcccattggcgctggagcgatgaggtcgacgggatgctgtcccgctcacggccccgcagttactgcgtgcagtaccgcgagaccgatctggccttcgtacagcggctgctggccgaagaagggttgggctggtgcgtgcaggaggcggaggacgcaacggcggggcatggcattctcctgttcgccgattcgaccctgctgccggaagccgctgcttcgcaggcagccggtggcatccgcttccaccgcgccgatggcaccgagcagagcgatggcgtgcagcagctggggcagctgcgtcgcctgcagagcacccacgtgcagctgcacagcagcgactaccgcagcgtacgctcgctggccggccagctgccggtgcaggctgcagcgcaaggggcaagggaggattacgatccggtgggggcgcacgccttcgccgatgcggccgagctgcagcaccatgcgcggctggtggtggaagcgctggacgcgcaggcccgccagtggtgcgggcgcggcagcgtccgcagcgccgatgcgggacaggcctgggtgctgaccggcacgccaggcgccttgccgacggagctgctgctggtgacggtcgagcatgcgggcgtgaacaatctgccgacagacctgcgccatgcactggccgcggatacggcgcccgatccgttcggtacgttgcttggccaggcacgtgagcagggctatgcacaggatttcgtcgccctgcagcgggagcagcgctggcgcccggtgctggacgatggcaccggtgcccggcgcaatccgcgaccgctggcgcccgggtaccagaccgcgattgttgtggctgggcagggcagtgacggcggtgaactgcatgccgatgcgctgggacggatccgggtgcgtttccatttccagggcgagcagggtgatgcgggcagtgcgtggctgcgcgtggcgcagcgctatgccggccccggtgtcggcagccagttcctgccgcgtatcggccaggaagtgctgatcggattcctcgagggtgacatcgaccgcccgttggtcctgggcgcgctgtacaacgggcgcggcgaggccggggtcgcgccgacaccggccggggcgaacgcggagctggacacctcggcctatgcgcaggcacgcgatggagggggcagcgcgcaggccaacctgggcggtggccaggcaccggcctggcatgcggcggcggcgggcgaagcggcgcatcggaacgccggcgcgctgtggggcgttcagtcccgcgagtggcagggcgagggctggaaccacctgctgttcgacgacagcgaccagcagctgggcgcacagctggccagcagccagcagaccacggcgctggcgctgggtcatctgcggcaccgggcggacaactatcgcggcagcctgcgtggtacgggtttcgaactgcgcagtgatgcctggggcagtgtccgcgggcaacgcgggctctggatggatgcttatcagcatcgtggcgaggagccggccggcgccgccccgcaggccgcggcgctgctgcagcagttggcgacactcgccgagcgccaggcccgcgccgcggcgacccacctgacggtgcagcccgcgtcgcatctcggggtgcagtcgccacagcactcccggctggatggtacgcgcgcgccgctgcctgtactgctggccagcgtacgcagcacggtgcccggcgagacgatgcaggcggcggtcggcgccgcccctcaacgcagcgcggaggcggcagaagggtccgttccgcatagcggcgacgcgctgcttggcctctctgcccccgccggcgcggtgatggtggccggccagggactgcagtgggcgcagggtgaaaccctggtgctgggcagtggccagcacagcgatgcgacggtcatggggcaggcgcgctggcacggccgccaggccatcggtgtgctcgccgcaaccctgcagggcgccgatgcaacggtgcctgccttgaccatggccagtgcggagcaggtgctggatatcaaggcgcagcaggatcgtgtgggcatgcagtcgcggcagtcgctgcgcgcagccagcgcccagggcgctgttgaactcggagcgggccgcaccgtccacgtggccacctcggcgggcgccagcatcaccatcagcggcagcaacatcgtcttcaatgcgcccgggcgcatcacggtgcacgcggggcgcaagtcattcctgccagggggaggcagtcgctacccgctgccggtgttcccgcagtccgtgtgcaaggaatgcctgctgctggcggcgcaacgcgcggcgcccttgacgccgaagggaggctga

SEQ ID NO: 508305 - DNA, 618 bp, Stenotrophomonas maltophilia
atgcagaactggatcggacgcgccgccggtggactggcgttggctctctgcctggctgcgccgctggcgcaggccgctgagccgaccttcggcggctggcgcaatctcggttcccgcgatggtgccgagcctgcattgcgggacgttccgttcgcgctgttgcccacggccgtgacccgcgatgcgcgcttctcgatctacgaccgcgagagcaagcgcgtggtgtgttgcctgcaggtagccagtgccgagctggatgacaccgcgctgcgcaaggtctaccagttgccggagcagtgggtgaccgatctgcgcaatggccgtagcgcggcacctccctggccgacgcgggtctacgaaatgcgtcgcaccgatgaactcgtcgactacggtttcagtgatgcgccggaggcttacagcgatctgggcgggctgctgcttccggccagcgcacggctgctgcccgatggcagcgtgcaggccggggcgacctatcgcctgcagttccgcagcacgccactgggtgatgacagcagcgcgctggaccgcttcaccctgcaaccggtgcaggacgggggcaagccggtggcggtggaagtctcctacggaacctattga

SEQ ID NO: 508306 - DNA, 621 bp, Stenotrophomonas maltophilia
atgatgaagatcaacaccagcgtctggcggggactgcagcctgtgctgttgctcggccttcttctttcggccgccgcttgcacggggaagccgaattcatcggagaacccggccgcagttgtgccgccgacgggggcggtcaccacgacgaaggaagtgcctgcaacaacagcgggcaacgcacgatatgccggcgtcaagatgctctcccctcattccgggtgcgctttcctgagcagtccgatcaacttctgtgatgatcgtcatcgtgcccagatcgacaaggtgctcgccgagcagcggccgaacttcaacgggcactacatcgtggcggagctggaggaatggcctgagtacttccagcgctcggtggtcgtcatcaacgcccggagcggggtggtgtatccgttgccgatcgacgcattgtccggcccgttgtccagcaaaggagagccgaccacttatggaaaggtggacacatccgtggatgcgcagcagttctgcctggtcggagcgatgctggcctaccgttcgatcaacgacgggcgtttctgcttcggattcgacggtgtccgctttaccggacaccagactgcatacatggcgtccgaaggccagtga

SEQ ID NO: 508307 - DNA, 615 bp, Stenotrophomonas maltophilia
atgcaccaggacaggtcagtgaatcgtcaacgccccgttgcgctgcgtcagctgttcctggccagccttgtgctgtcgctggcggcgtgccggcaagccacctcacaggatgtcgagcaggccgacaccgcccgccgtgcgcaggccgccatcgaggcacagatcaaggccgacgcccatgccgcgcaggcggagccaccgctgccgggtgatccggacagcactgaaacgctctttgacggattgctcgattgccagccgaagggctggtacctcagtgctgaatcaggccggcccgcgaacccttacctggccctgcacacgccggaaccctgcgaacgcgatgaggcgttcgggatggcgtacttctgcgtcaaggccgatttccatggcctgccggtctacagggtggttgcccatctgggaaccgcacccacgcccatcggcatcctgatcgatctgccactggaccaggcgcgtgcgcgaacccggatggcgctggggtcggagtttcccgatgatgcgcgcagccggcgcggcgaaaggccaatgctgggcccccaggccggtgatgcacagaagtcacagttgatatgtacgcccgattgggcctga

SEQ ID NO: 508308 - DNA, 594 bp, Stenotrophomonas maltophilia
atggcgggtttcgtgattagagctgctcttttggtagtgggtgtcgcgctcgcagtggggtgccatgcgcagcctcccgaagtgggcggctggcgcagggtctccgacagtgatctggagcggcagttccacttctccatgctgcctcatgccgcagctgcgggaagtcgctgggcggtctacgatgccaaggcgggcaaggtagtgtgttgcctgtcagtggaaagtgccgaggtgggcgaaagcgagctccaggatcgctttgacattcccgggccgtgggtcaccgatctgaccaatggctggaatctcgatgccgcgccctatcgcccgcatgtccagctgctgaaggtgcagggtgcgatgagcagctataccttcaaggaagaacgtgaagccgccggaggcctgctgctgccgccggacgcgcgggcggtgggggcgaacatcctggagatcgccggcgagcgctatacggtccagcgccgcgagacctcgctggctgatggagacggtggtgttcatacctacaccttgaagccctccaagggcggggcggccttgaagatcgaggttccgttcgggacctactag

SEQ ID NO: 508309 - DNA, 2202 bp, Stenotrophomonas maltophilia
atgagtgaggctgcacccgcgccgatcatcggtttgaacatccgcagcgaggccagcggccgctcggcccggttgggcctgttgccgcgcggtgcccggatcaccgtgaagaaccgcaaggacaaatgggcacagattgaccggatcctcgaaggcgagatcgcaccggttcgcccgggcgaggccgttgacccagccgcgaagcagggctggatattcatgcccgagcttgatcccggtccgaagcaaccggtccagctggacaaggtggtcattcccgaaaagccgatcgcgatcggtgcaggcgcactgctgggccatgtcggcgagtaccagcagtacgtggatgcccagccgttgcccaagcgtggcatacgcccattgatgcacctggaggttttcgccggtagcgagcttcccgtattcctggccaagtcgcgtcgctatgcgtcgctgctgccgccgggaacaggaagcctgttcgtgatcgagaagggcgcgcgcctgaagaaggcggccgatccggacggcgtgatggagccggagcctggcttgatccagctcaaggactcgggcctgggcgcgtggacgcttgtccagcgttcggagttgaaggtgttcgatcgcaaggcgctgggtacctattctgcgagcagcaaaagttatgcaaacgcaaaggatggacagttcaccggtgtattcgtaggccctgccgatacccagcgtacccagtcggagaaggaagcgcgaaagcacaactaccagcggcgcgagatgcggatgccattgggagagccgttctggatcctgcgcaaggatctgcagcagtgctcggcgggtgggatgaagtggtggaagaagcacccgttgcgtgccgatggtcccgacggtgaggccgtgggcctggtgcgggtgatgtcccgcgcagagctggagcggctgcctgcgccgaaacgtgcgctggacagtgatggcaaggcctggtgggaagtggctgcctgcggcgagaagccgggtagttttgtgctgggctgggcatgcgaggcggggcacgccaaggtgggctggcagtcgccttgggcgtggccgggattcgagacggtggaggaggggggcatccagccggtcgacatgatggcggcgacgctggtgaagctggggatgatgcagccccatgaggtgaccgaccatcgcatgcgtgcggacaaggttgagcgcagcgcgttgatccagaagctgcacgccttgctggacaccgacggcaatgggcatatcagcaagcctgaactgcaggcagccagcaagcagcccctgctcgcgcaggcgttgagccggatgattgtccgctacgaaagcgagtggggcggggaagacgccaagtggaacgagctggatccgctgatgctcgacggcgctgtggaatggagcgcggagaagctgcgcatcaagaacctgcgctggtggaaggatgtggcgcccaatgtgaagggtttcccgggcgcgccggaggtcttccacctgcacccgatcgggttgctgaacaacttctactccgcggtcgccaccgccaatgccaacgcggcacccagcaaggacgacagctacaacggcgagcgtgagaagagcggtgcgcaatggtacaagcggttcaagcagagcaagaacgttgcggatctgaaggagcccttccagtcgaacatcacccgcttcctcgcggcgctggatgaggccggtgtgaccgtgaacatcaatacgacgctgcgcccgccccagcgctcgtacctgatgtactacgcacgggaaatcgtcaatggcacggatccagccacggtgcccgcgttcgagccgcagaatggcgatgcggccgtgaacatcgattggcagcacctggatgccaatggcaagccggatctcaaggccgccaagcagggagccaaggccatggatagcgcctacggggccgcgggcgccatcggcaagccctaccgatcaaaccacaatggcggtgaagcaatcgacatgcggttgagtcctgcctggggcatcggcaagacggtgaagaaggccgatggcaccagtgtgacgatcggcagcaagcgtgacatcatcgacgtgggtgccagttacgatgtcctgcattggaactacgacggcaagccgaaaaaggtcgatgatccccattggtccaagacaggcaactga

SEQ ID NO: 508310 - DNA, 1482 bp, Stenotrophomonas maltophilia
atgagtgctaagaacctgaaggcgttcctggatgctgtcggcttcgaggaatcgagcggagacatcggcatcatcaatacctataactacatcggcaagtaccagttcggtgagcaggcgctgatgcagcttgggtattacaagacgacggccgagatcaagaaaaagcaggagtggaagggccactggacgggcaagaacggtgctacgagccgcgaggtgttccttgcggacgaagcaatgcaggacaaggcgggcgaggagtggatgcgcgaactctgccggcaggggcgctatttcggcacgaccaagttcatcggtcagaccatgaagggcttcgtggtgaccgagtccggcatcattgccgccgcccacctgaagggctacggcccgggcaagccggacaagaagaccgggcaatgggtgcgccctgccgtgcttgcgttcctgcgtaccggcggggcggaggacggtaccgacgcctacgggtcgagtgtttcgaagtacatgaagaagttcgggggctacgagctgggctgctgcgcgccggtagaggcgcagacaacctggatgtatcccttcccgaggcagggcaagagcgatgcctttgatggcgcgatgtacctcggccttcctgcccaggaagaaggcgccttggcgcgtgtcgacgatggcttcttcccggtgggggccagcggcctgtggcatgggggcgtccatttcgatgcaggcagtggcaccgtgctggaccagacccagggcgtgcgctgcatcaaggacggcgaggtggtggcctaccggatcgacgaacgctatccggaaatcaccttcccgcaggtgcagcgcaaggcactgtattcgaagggcttcgtgctggtgcggcatacgctgaagctgccggccgatgcacaggcgaaattcgaggcggccgacaaggcggcgaaggaagcacaggacaagaaggttgcgacggcggcggacagcgctcctgcggcgccgcagacggcggccgctccggctgctgccgccaccgctccgtccaaggcggtcgcgccggcacccgccacgaaaactgcgaaggactcgaaggactcgaaggactcgaaggattcgaaggattcgaaggattcgaagccagccgccgcgccggagccgggaaccgagctttccttctacagcctctacatgcacctgatggacttcacgggctatcaggaggatcgcaagcgcgcacgccccgggttctggaccgagggcaacgagttcgtggtgggcgagaaagcgaaggacgcgcaggaggtgccaccgccgcctgcggcggcgcaggcatcgatcgatgaggatgaccacatcggctgcgattgcggtggaacttcgggtgaatccgatgatgtcgccgacgctctggagcagttgggctgggggcctggacaggtgaaggaatgggacaacgtcgtgcaggaggcacacgcagatgagtga

SEQ ID NO: 508311 - DNA, 567 bp, Stenotrophomonas maltophilia
atgaagaagacgatattcctgctgccactggtggcggcgttgtcgtgggagtgcgctgcagcagcgccactggacgcgcatgcaagcggcgcccgcccgggagacgcctccatcgatcttccgcagccgacctgcgccaagcagcccctggcgacatatctgttcgccctcgtcggcaaggggctgtcggcccccgatggctgcgggcgcagcaatgcagtggtgacccaggcattcgatacccttctggcagaggtgcccgccaagcaagcaccgtcgctgaaggcgcgactgctgaccgggcccagtgcggcaggcaagccgttgtcgatcgaagggcgtacctggtggctgtactccgcctgccaggcacatgcctgcggctcaacacagctggcagcgctctacgatcccgcagacaggcacatggtcggccgcttgatcctgaactgtgaggtgcgctggttgggcaatccatcagacgcgcagcgcgcggtgctcgatgcacgcaagcccgtgaatctcgagatggtcaggcggctgggtgactgcgggggcgagccatga

SEQ ID NO: 508312 - DNA, 2760 bp, Stenotrophomonas maltophilia
atggatcagctgaacaacctgatggcgcaggtcgccggtcttggcgacgcccagcgtctgtatcgcctgcagtccgacgcattcacggcatgcaccgtggagcgttggcgtggacgtgacgcgttgggcgaacacgcgtggaccgaagtagacgtgctttccaccgatgcggatgctgccctggaggcactgcctgcaacgcgtgccacattgaccctgcaactggctgacggtgggcaatcccagcgcagcggactggtggccgatgccgcccgggttggaggcgatggtgggctggtccgctaccgtctgcatctggtgtcatggacctggtggctgcagcacgcgcgccacagccgtgtgttccaggagcaggccgttcgcgcgatcgttgacgcggttcttgccgggcatggggacatcgcgcgctggcgctgggccgagggggtcgacgacttcctgggcgaacgcgtgcgcagctactgcgtgcagtaccgcgagagcgatctggatttcctgcagcgcctgctggccgaagaggggctgggctggcggctgtacgccgatgaagaggctccctgcggcaatggcatggagatcttcgccgacagcgtggcgttgccggaggatgcgaccagcgccgggtccggcgtgcgtttccatcgcagtgatgccaccgaagccagtgacagcgtgcaggccatcggcatgtgccggagcctggccagcaccacggtcagcctgcagagtgatgattaccggcaggtacgtgccttggccggccagtcgccgatggacggcggtggcagccagtcggcgcgcgaggatttcgatgccgtgggtgcctacgcgttcagcgatggtgccgccgcttcgcgccaggcgcggctgctggcccaggcacgcgaagcacacagccgacgctggcgcggacagggcaccgtgcgtggcctgcgatcgggggcctggctgcggctgcagcaggcgccgggcgcgacaccgccggagctgctgctggttgccgtggaccatgccggcatcaacaacctgccgaccgacctgcggcgcacccttgatgatgcgttcggtgtcgcgccggccgagagcgacgacgcggcgctgtggcagcaggccgatgcggtgggctacagcaaccggttcgaggcggttgaacgcagcacgccgtggcggccactgctgctggatggcaccggtgcccggctgaatccgcgcccgaccgtgccgggctaccagacggccgtggtagtggccgggcagggcggcaccagcaaggatctgcatgcggacagccagggccgtgtgcgcgtgcgcttccatttccagcagggacagggcgggggcgctcacgacagtgcctggttgcgcgtggcacagcgctacgccggccctggcgttggcagccagttcctgccgcggatcggccaggaagtgctggtcggcttcctggatggcgatatcgatcggccgctggtgctgggaacgctgtacaacgggcgtggcgaggccggtgtggtgccgacgcccgctggtgccagtggccagggcgacgtgtcggcctatggcctggccggcgatgcacgccacagcgcgcaggccaacctcagtggtggccaggcaccggcgtggcatgcggccggcgcgggcgaccaggcgcatcgccagggcggtgcgctgtggggtatccgctcgcgcgaatgggatggcggtgaaggcagcaaccatctgttgttcgacgattccaaccagcagctgcgtgcgcagctggccagcagccagcaggtatcgcagctgacgctgggtcatcttcggcaccaggctgacaactttgtcggcagcgtgcgtggcaccggtttcgaactgcgcagcgatgcctggggtgcggtacgcgcgacggcgggcgtgtggctcaccgcctatggccatcgatcgtccgcgcccgcgggcgaggcggtgcagccctccgcgctgctgacccagctgcagacgctgggcgagcgattcacccaggccgcgcgcaagcacgtgaccagcccgctggcgatgcaggagggggcgagaggggcgatgcggtcgcgcattgtgcagaagcaggcccccttgccggcgatgacggcagctgtccgaacggtggttgccgggacgcaatacacgtcgggagtcgcggaagcccctaagcacagtgccgagcccggtgaaggacggactccccatagcggcgctcctctgcttgggatgacggcacccgacggggtagtgcacgtcgccggtcagggcatgatgtggagcagcggcgaagcactgcttctggccagcggcgggcattccgataccacggtcatggggcaggcccgcctgcatgcaagccagtcgttgggcctgttggcaaccaccgtcgaggaaggcggggcagctgcagcgatgtccgttgtgagtggcactggggcgcttgaagtccaggcacaggcagattccatccgcatccaggcgcgctcgggcctgcgcggtgcgagtggccaggcccacatcgagctcgctgcgggcaaaacgctgcatatcgctacgtcaggaggcgccagcatcaccgtggccgatggtggaatcgtggtcaatgcgcccggttcgatcgctgtccacgcgcagcgcaaatccttcctcggtcccagcaactacaagagcgagttgccgacgtgggtgctgggcgacatgaagcagaaacggatcatcggtttctcaggatga

SEQ ID NO: 508313 - DNA, 1062 bp, Stenotrophomonas maltophilia
atgctggatcaggaagccctgctggccccgatttccgaacacgccccgaccggtgaagacctgtcattctcggccgagttcgatcggatcatcgaaaaccgtcgtgccgacgacccgaccctggaccagggcgcgtggcagaccgacatcaagtacgccgactggagcagcgtactgcgcgatgccaacgatctgctgcagacccggaccaaggatctgcggctggctggctggctcagcgaggccgccacccagctggagggattccagggcctggccgcgggctaccgggtcaccgccggcctgtgcgaccggttctgggaagaggtgcatccacaggcaccggacggcgacttcgaggaacgtatcggcaacctcagctggctgctgaccaattcgctgcagtggctgcgggcggtgccgatcatcgtcgccccacagggccgcttcagcctggccgatttcgagcacgcccatgcccgcgccaacagcagcgaggacgatgacggccgccccggactggacatcctcaatgccgcccgccgcgatacccagcacgggttctatcgccagctggccgatgacctgccggactgcagccaggcactggccgagctgcaggccgcggtcgacaaccggctcggcctggatggccccagcttcagcgcggtccgcgagcagctcgagcatctgcagcgcaccgtactgcgcttcgcgcgcgaggcgggcgtgctgctcgatggcgagaccgggccggcagaggacacgttcagcggcaccgacttcgccgcggatgccccggcattcgacccggcgccggtcagcgccgccccgcgtgggccggccggtgcaccgggttcacgcaaggaagccctgcagcagttgcgccaggtggccgagttcttccgtcgtaccgaaccgcacagccccgtggcctatctggccgagaaagccgcgcgctggggcgaaatgccgctgcacgtgtggctcaagcgggtcatcaaggaccatggcacgctggagcagatggaagagatgctggacgtcaacccggaagactga

SEQ ID NO: 508314 - DNA, 786 bp, Stenotrophomonas maltophilia
atgcgcctgtgcaattctctttctctcgtgctgccgctgctgctggccgtcgcgccactgtcggcgcagaacgcgccggctgcagcccaggcgaccacggagcgcccggtggtgatcgaaggcgtggtgcctgaccaggcaaccaaggccaagctgctcaacaacctgcgcgcggtctatggggccgatcgcgttgtcgaccgcgtccaggtcgagaccatcgccacgccgccgaactggggcgattacgtatccggcatgatcaaccctggcctgaagcgggtgtcgcccggcaagctggaagtgaacggccaggccgtgaagatcagcggtgaggtcggcaacgaggccctgcgccagcaggtcgccagtgacctgagcctggccagcaacaccagctacacggtcaccaacgcgctgaaggtgggatcgcagcagaacgtgctggaccagaccctggccaaccgcatcatcgagttccagagtggcagcgcccgcctcacgccgttcggcatgagcatcctcgacgagatggtggccaagatggcgcagatgcccgacagccgcttcctgatcatcggccataccgacaacgtcggccagcgcgagtccaacctgaccctgagccacgcgcgtgcgctggcggtgaagaactacatgatgtccaagggcatcccgggcagccatatggacgtgctgggcaaggggcctgatgagccggtggcggacaacaccagcaacgatggccgcgcgcgcaaccgtcgcatcgaattcaagatccagtaa

SEQ ID NO: 508315 - DNA, 984 bp, Stenotrophomonas maltophilia
atgagccgcgtggtcagcgcaggtgtgtcgtactttggcaaggtgccatcgcgtggcgatttcgtgcgtgcggccgacaaccatcagttgctgggctggctggatcgctgggccggcgaaagcctggagctgctgagccagagcccggactggaagcagcgctacgacgaagcaccggagatccactacgccttccttggctcgcgcagcaagatggtgttgtgcggtcacttcctggccagccgcgatgcgtccgagcgacgcttcccgctgctgtcggcgctgcgcctggatgcaccggaaccgctgccgttcatcgggcgcagcccgctggcgatgtccaacgcgtggtcgggcctggcccgtctggcccgccaggcctaccaggacagtgatgccgcacaggcactggcgcagctggccgacgcgcgtttcagcatcagcaccgatcccggtgactacaacggcagcttccaggatttcctggagaacaccacggtcgccgacctcgagcagcgcctgcgcgattccggccatggtgacgtggcgctgcgccaggtgctgccggccctgggcctgctgctgcagccggtgctcagcggcggtgacgtcaacatcgacaaggcactggtgttcccactggtccgcgatcccgcctatcgcccgctggtggcggcattctggctcgacctgctgtcgagtttcgtcgcccgcggtgatttcgaactggccgtgctgatccgcaatgatgccgcgccgagcatgatcgtcggcttcaacggcgccgaccgccaggtgctgcgcgcggtgctggatccggccgaggccggcgacttcctgatccgcatccagcactcggaatgggtggacgactacctgcgcggcgactacaacctcaaccgcttcggcagcttcctcgaccgtgacgacctggccctggccaccgcacgcaagctgttcggcgagactttcctgggaacctga

SEQ ID NO: 508316 - DNA, 3720 bp, Stenotrophomonas maltophilia
atgagtttgagcaatttcagctactacctgcgcgactaccgtctgtggatggtgatcggcctggtcggtgccgctgcgctggcccactacggtgaagccgaagcgcggcagataggcatctgggtggccgtcgtgctggcaggcctgctgctgctggcgctgctggtctggggcatcaagcggatcctcgcgcggcgtgcggccaagcgggtggaggcgatggtcaaggacgaggcggacaaggcggtggcctcgtcgcagccggcgcagcgtgccgataccgaggcgctgcgcacccgcatgatggacgcggtcaagcagatcaagtcctcgcggatgggcgtgctgaagggcaacgccgcgctgtacgagctgccgtggtatgtgatcatcggcaatcccgcggccggcaagagcacggccatcctcaactccgggctgcagttcccgttcgaggacaaccgcggcaacgtggtgcagggcatcggcggcacccgcaactgtgactggtacttcaccaccaatggcatcgtgctcgataccgccggccgttactcggtcagcgtcgaggaccgcatggaatggctgaccttcctcggcctgctgaagaagaaccgtccacgcgcgccgatcaacggcgtgatcatcgccgccagcctggccgagctttccggcagcaagccggaattcgcgatcgagctggccaagaacctgcgccagcgcgtgcaggaaatcaccgagcggctggaagtgttcgcgccggtctacgtgctgttcaccaaggctgacctgatcgccggcttcagcgaattcttccgcaacctggacccgggcgagcgcgagcacgtgtggggcgcgacgctgccgttcgacgtacagcagcagggcgatgcactggccgccttcgacagccacttcgatgagctggccgaaggcatcaaggaaatgagcctgacccacatggcgatgcagcgtggccgcgaggtgtcgccgggcctgctgtcgttgccgctggagttcgtcggcatcaagccggcgctgcgtacgttcatcgccacgctgttcgaagacaatccgtaccagttcaagccggtgttccgcggcttctacttctccagcgcgctgcaggaagggcgctcggtgcaccatgcttccgagcgtgtcggccgccagttcaacctggagcgcggctccaatgtcgatgaggcgccgaccggccacaccgcgttcttcctcaaggatctgttccgcaaggtgatctttgctgacaaggagctggtgcggcagtattccagcccgcatcagaaccgcctgcgctatggcgtgttcctcggcgcggtaggcgtgctggcgttggcgctgggcctgtggacctggtcgtatacgaccaatgcgcagctggtggccaatgcgaccaaggatctggaccaggccgtgcgggtgcagaaggaccgcatggacctgaagtcgcgcatcgacgcgctcctgctgctgcaggaccgcatggagcagctggaccgttacggcaaggagggcggcatcaccacccacctcggcctgtaccagggcacggcgatccgcgagaagctgctgcgtgagtacaaccacggcatgcagcaggtgatgctggcccccaccgtatcgaacctggagaactacctgggccaggtggttgccgagcgcgacaagctggggcagggcaacagtaccgccgccgagagcgaagtgctgtaccagaatgcctcgccgaccagcaccaacgatgcctacaacgcgctcaagacctacctgatgctgggtaatcccaagtatgtggaaggcgcgcacctgtcgcagcagctgaccctgttctggcgtacctggctggaggccaaccgcggccagatgagccgcgaggaaatggtccgcgcggccgagaagctgatgacgttctacgtggcgcaggccggcaagccgagctggccgcaggtgcagaacaaggtcaccctggtctccgatacgcgccaggcgctggggcaggtgatgaagggccagccggcaatggagcgcgtgtatgcacagatcaaggcgcgggctggcgcacgtttcggtaccaccacggtcgacagcctggtgggtgtcgagcgcaatggccgcctgatcaacggcagctacgccatttccggcgccttctcgcgcaaggcgtgggaggagtatgtgcaggatgcgatcaaggaggcggccaatacccagctgagtaccaccgactgggtgctgggcaccaccgagcagagcgacctgtcactggctggcagcccggagcatgtctcgcgcgagctggtgaacatgtacaagaacgactacgcccgtgagtggaccaagttcctgcagggcctgagcgtggcggagttcagcaccttcgacgaggctgtcggccgcatcaacaagctgggcgacgccagcaactcgccgttgcgcatgctgctggagcgcatcaacgaggagacggtgtgggacaacccgcaggcgctggcacgctccagcaaggcgcgcaagggcttcgtggcctggttccagcgcactatcctgcgcaaggacccggcggcgacggcggcggcgcagccggtcggaccgatcggcaaggccttcgaaggcatcgcgcggctgaccagcgagcgcggcgaccagcctgccgtcatcaccgcgtacttcgagacgctggccaagctgcgtgcccgcctgaacgcgatcaagagccagggcgaaatcggcgtcggcacccgcaagctcatgcaggacaccttcagcaacgagggttcggagctgagcgtgggcctggcgctggtggacgagcaggtgctgaccgggctggacgagaagcagcgcgaggcactgcgtccgctgctgctgcggccgctgacccagaccttcagcacgctgatcgcaccgaccgaggatgaggtcaacaagacctggaaggcgcaggtctacgatccgttcaaggcgcgcatcggccagcagtacccgttcaacctcaactccgatgtcgatgcggcacccagtgacattgccggtatcttcggcgccagcggcagcatcgccgccttcaacaaggaggcactggggacgctggtgatccagcgtggtccgctgctggagacccggcgctgggccgggcagggcgtgaacctgtcggccgagctggtggccaactatggcaactgggtgagcggttcggcggctggtgcggcgcaggacaccacgatcttcgagatcctgccggccccggcagccggtgcgctggagtacaccatcgagattgatggccaggtgctgcgctaccgcaatacgccgccgcagtggaccaccatgcagtacccgaacgtcggccaggtgccgggcgtgaagatcacggcggtgaccggcgatggcaggacggtggaagtgttcagtgcgccgggctcgaacggcgtcaaccgcctgatgtcggccggccaggtcgagcgcctggatgattccagccgcatcacctggacgggcaatggcgtgtcggttccggtcgagatgcgcatcgtgcgccgtgccggtgaagcggcgcagggtggcggtgattggcagcgcggcttgcagttgcccgaacgggtggctggtggcgaacccgccgcaccggcggtgcccgctgccgcgccgccggcgacaccggccccggccccggccccggccgctggaggtgcccgatga

SEQ ID NO: 508317 - DNA, 1434 bp, Stenotrophomonas maltophilia
atggcaggatggctgggcaaggcagcgtcggtggtgatggtgttcatcgctacctggggcgcgacgattctctattggcgcaacagcggcacggtaccgaccggcatgcagatgctggcctacctgggcctgctgcctgttgggctgagcagcgcaggcttcatgctgcgcggcgctgtgcgccgtggcgcagaatcggcgctggacaaggccacgtctgatgacgccaaggcgggagctgcaaagcaggaggcgaccgatccgcagtccgctgcgccgccttcggtcgcgctgcttgccggcacccttcggttgggcgtggatctggatgcgccggcgctgctggcgacggctgcggcgccaccgcgcccttcgctggatgggcgcttccgtgacaactacaacctgccggtgcggatgagcgcggcccaggatctggacgagttcgaggtcgtgcaggcgcgccaggatggcatcgacacggcggcgcatgaacgccgcgcactggcgttgctgcgaccggtgctggaagaactgctggaaaccgtgttcacggcgctgccggagatcgtggcctctgaggaagtggtggtggctgggctgcgtcgtcgcgacgaacagcgcgtggagaacgtactcagcatcgagcttctggtgcccggcagctggtccgatccgctgcgccactgggcacaggactggctgctggagcaggcgcgcctggcgggcctggatgcgcgccgcttcgatgtgcgcgtcaccacgctggatggcgcccgcgaagtctggacgcatctgcagcgggtgatcgatgcgctgtcgacggggcagccgcgctggcacctggtgctggcggccacctccttcatcgattccgcgctcgtcgcggcctggcaggcctcgggcgtgctggcgaccgcgcagaatcccgatggccgggtgccgggcgaaggcgccgccggcgtgctgctgtccagccgggcgctggcgcacgacggggcgggccgcgtgtggcgcccgcaactggtgcgtgccgaacagatcgaagcgcagcgcccggccgagcagcgccggcagctggcggcgctggccacgcactggcatgcctccctcggccaggcgccggcgcaggcgcagttcgtgctgcacgatgccgatcaccgcggcgacctgatggtcgatgccgctgccatcgccgcgacgctggcgcccgacctcgatttcagtccgcagagcctggcgctggcgatcagtgccggcgagctggggccggtgctgccgatcgcccagctggcgctggcccatgcacaactccaacgccaggccgaaccggtgttgctgctcggcgttgccgacaaccagcagcgcctgttcggcctggtcgaccctcttccttccccgacgctgccggccgatgcgccgtcggcctcctga

SEQ ID NO: 508318 - DNA, 261 bp, Stenotrophomonas maltophilia
atggcacgaccatttattgtcgttggtgacaagctcagccacggtggcagcgtggtggcaggcactggcgagaccgacatcaatggcaagccggtggcgcgcgtgggtgaccgtgccgtgtgcgcgatgcatggcacgaccacgatcgtcagtggtgacgcaaccgtcatgatcgacggccaaccggtggcgcgcgacggtgaccgtaccggatgcggggcgacattggtggcttcgcaggccgctaccggcctgcgctga

SEQ ID NO: 508319 - DNA, 882 bp, Stenotrophomonas maltophilia
gtgttgccaatcgtggttgcagccattgccgtcgtgctgcttgtggcactggtgtgctgggtgttgttgttccctgagacggtggagtcgctgcgccaggcgttggcgcgccggttcggcggattccggcgcagggccgggcgggtcggtggcaaggtcggtcacggcgtcacgcgggtgcgcagtggggttcgtgaagaggccggtgcggcgcatagcgcgatccggcgtcattggccgattctggcaattgccacggccgctttggtgattcccccaattgtgatactggtcacacgccagacggtggtgctggaagattttcgcggcgatgatctggcggaatccagttcgatggtggcccagctgttgcgtggcgagcgtctgaccccgccgccgccgccgccgccggaggtgttcacgaccgccgaggtgcgtcgtttgcggcctgaaattgtcacggcggaccgcaagtggaaccagatcgatgcggatctgcagcagcgcgtgctggccatctacgaggtgatgcggcgccagtatggctacgagatggtgctgatcgagggctatcgcagccctgagcgccaggctgagttgatggcgggaggcaaggcgacacgggccggtgcgtggcagagctgccatcagtatggcctgggcgtggacagcgccccgatccgtgacggcaagctgcagtgggacatgaatgatgagtggaccaagcgcggctacttcctgtacggcgaactggctgaacaggcagggctggactggggcggcaactggcgcagcatcaaggactatgttcacgtggaaatgacatcccgctgccgcgcggcgcgtgcggccaagcgtgaagagctgtcacgccaagggtga

SEQ ID NO: 508320 - DNA, 879 bp, Stenotrophomonas maltophilia
atgccgactcaaaccaagggctggaagcacttgaataatggcggaatcaaccggccaagtctgctctcagggggagcgcagaccaaaggccaggcccccaatgcgggccgtattctggcagacatggagggccggcaggcaaccgcgtcgcctcgtgctgcgcgcgtatcgtctggtggcacccgtcgcctcgggctatggctgggcatcggcgccgccgtcgtcgcaattgccgggcttgctgcgtggggcctctccggcagcgccgattaccccgagcccagcgagtattcgctggccccggatccggctcacgcaacggggcacccggatatccccgccacgtcatcacgcgacggtgcggccatgatcgtggacgcgccgcctgcagtgggtgagcccgcgctacctgcacccgcagagagcatgacgcccgcgcctgctgatgcagccgcggcagtcgccgcccccgccacggcaacaacaggcaccagcgcacgcagccctgcagcagcgtcacgcagcacgcgcgaggcgccgcgggccggcacccagggcaagggcgatgaaaacctgctcggcaccctgctcggcatcatcaaggaagaagacaaggccaagggcaaggcgaaggccagtacccagccgcagagcatggatgacctgatcgcgcagatcgaggccgaccagcgcaagcgcaccgaggacgagcgtgccgccttcgagcgcgtggccagcaagaagtccgcgtcgaccgagtcgaacatccaggcccagctgcgcagctgccccagcccgacctcgctgaagggcgtggattgccgccggcggatctgcgccgccgtgagcggcaaggacccggcctgcccggcgatgtag

SEQ ID NO: 508321 - DNA, 204 bp, Stenotrophomonas maltophilia
atgcccgtgaagatcgaatcgataagccttgtctacattgcgttggtgcttggccttctcagcctcgtctcgcactcggtttatcactaccttgcacgcttctcgcgctggcaatccaagacgaagcgctggttggcgatcagtccgctgctgggctccatggcgctgctcatcttcacggtgtactacgttgctacgcactag

SEQ ID NO: 508322 - DNA, 1056 bp, Stenotrophomonas maltophilia
atgaaggtgtccggattcaaggtgctcccaggccagaacgggcactgggggcatttcctgcaggaggtgggtctgccggggcgggcgtccacgagccctggtcgcgcggttcagtggattgacgagagctccctggtgttcgcaggctggaagcgaccctcgaatcggggctttctgttcgtcctgtcactggtcgcgtcgttaccactcatcagtatggcgatcaacgtggctttgacgatcgagagctgggcgcagggctggccgcatttgattctgctggtcaccttgtatgctggcggggcgatcggttgtctggcgtcggtctgtcatctgtatcgcaagcctgctgagccgccggtggtactcagtcgccggcttggaaagttctactactgggtggacacgaaaagaggctgggtaagtctggattacgatgctgcggtacccatcagcaggagagatctcgtccgtggcaaacatggctccacgccagtccaggtactcgctgttgttgagttgacgccaggcagtcgccagatcgacaagttcctgcccctgtcggagccggagctcaacgacgcaggtcccgaagagctttgggagttcattcgtcattatatgaacgggaatatgcgaacgcttcctcaggttgccttcgctccgacgacgggtggagtgcaggcggatctggcacgaatggagcggctcgtcttcgatccctggattgatcctgaccatcgtgtcaaagggctttccggctggttgtctgtcctgtttctcggcagcctcatgttctggttcgagctggcgggattctggctgctgcgtcacgcacctcgtgttgcgtggcccgacgccctggccagcgagctggactccctgacgatgaaggcaccactcaaccggagcgcatgctcacagcagcggacaagcgaggaacgggcgccacgcttatgggtccgctggctgctgccggcattgttcaatgcagtgatcgtgctcgcgccgatggttctgctggcgcttctgccgtggacctccggcaacgcctga

SEQ ID NO: 508323 - DNA, 1053 bp, Stenotrophomonas maltophilia
atgagccagttcgccggctggcttgcccagcggtatcgcaacaaccgtcgtttggacaactacgaagtcgctgccgatgtccggaattttgatgcatcaacgctggcgcccctggataagggcattgtctacctcgatgacgattgcatcgagtacgttgatcggcattttctctatcgcggatgggcagcgatgtggggctttgtcgttattggcttggcgctgctattcgtctcggccattgcgcatgcaacggtgacgatgcaggctgaaggcaaggcggtcagctcggagatggccattaccgtcgctgtcctgggtgttctgatgctcggcttcgtcgcatttgcctacaagatgcttctcggaagagacatcttccgctgtcagtactaccccatccgctttgatcgcgctacgcgtcaggtgcacgtcttcacgggggggcgcagcaaggtggtgtcggcgccctggtcggatgtccgcttcatcatcggcagggacaagcctgcgggacctggcgaggactacacctacgatctcaggggcctggtgatgcgcggcgatcaggtggtccacaccttcgcagtcgggtcggattgcggctccaaccccgccgtcgtgctcgcgcactgggaaatgatccggcgtttcatggaagaggggcgttccgcgctcccgttcccgccgttgcagctctacacctcggtagcgccgagcttccgcaatgcattcatcattcatgtgtcttcggccggctcagggctgatgtggatcgcgctgccgctcaccttgccctgggcactgttccgcttcctggcgatgaagctgtgccgcaagccagtctggcccgcgtccatcgtcaggcgcacggcggcttcttcgggtacgccgccactccgcgccccagttgtgtacgggcgggtcgatcatgtaggcggccgtgcggacgaaatggagcgcttctggaaggagtcgatagctgcagcgaaggcccggaacgatgaggtggggcatcagctgaaggaacgtgcggctgagagggggagatga

SEQ ID NO: 508324 - DNA, 1047 bp, Stenotrophomonas maltophilia
atggattacgctggaatcgacgcaaggaaccttcgcttcgcggtaaatcgctcattgagggcagatgaggagcgagagcaattgaaggtctcggttcccgttggcatcccggcgtgcagcggattgtccgtgatcagattcagtgcgtcctaccttgagcttgtagaccgttggtatccggtgaagggcttcaacgtatggctctcggtgctcggcgcgctggcgatgattccaacgtcgctgtatctcctgttcaacctgatcatcttcggggagcctttcaaagaggaggagcgatggatcctctggtgcttctgggccttcatcgttcccgtttcatcgttcattctcgcgggtatcgtgtggttgtttagaagtgagtgcttccgatggacgcactacccgattcgccttgatcggacggggcgcaaggtgcatttcttccgccaggacggaacggtcgctactggtgactgggaccgattgttcttcttcattggtgaggcgaccacgccacccttgggaaagacgcacgacatacgggctcacttcctgtcggaggatggaaggactgtccttgagacgttctcggtgggctacgtgtatatgggcgaccgacgtgatctgctcgggctatgggagttcatccgacagtacatggagggcgatgatgaagtggttgcccggaattgcgctgatgttccaatctgcattccagttcatgatcgcaaggaaggttttgtatttggtgtggttcgaacattcgcaggcttgatccactggccatggctccatctggtcgcatgcctgcctttcagcttcattgccatcggacgttgggtggcaatgtccacctgccgtattcccgtatggccgaatgagatcgaaaatgatggtgctgtcactggaaaggatcgctggcagcgggattggcgggacaatcccagacttggcttcctggagaagacatggccgctgatctgtaccgcaactggcgttggggcgggactctgcatcatctacatgatcgagcgctcgttaggatga

SEQ ID NO: 508325 - DNA, 936 bp, Stenotrophomonas maltophilia
atgttcaccggatggatgcgggagtttcccctggggcgtgggctttctccacatgaggacgcctcgcgtttcgatgcccatagcccccaatccgtgacgcctgccgagcgcgcctgcctggtccgcttcaactcgacctacatcgatctgatcgatcgtcgttttcggctgcgcggcatggtatcgaccaccgtggtcctgcttggcacgctggggctgttcctgcttggtttctttcttctcttcactgtggtcatccccaaccttgagggagacggctgggactgggtgatgtatgcgatggtggctgcgtgcgtgatcggcgccccagcactgttctggcatatcacccttcgatacgagttcttcacctacgtctggtacccgacgagattcaatcggcgtaaccgcacggtctacttcttcaccggcgggaaggagggggccgtatccgtccgttgggatgaggccgtgttctacatcgggcgaggaaccagcgaggagttcctgcgtgatctgcgttgcagcatcattgagcatcacgtcgtcaagcggaccttcgctgtcggccactacttcgatgacgagctgaagatacgggcgatctgggagttccttcgtcgctacatggaggacggtcctgcggaagtggtcgacactatcgacggtcggcagatgaacctgtccgtggtgccttcattgcgcaactgctatctctttgtagtggccagcctcgggccagccatgctcagcgccagattcatcctgatgccgctgctgttgcctctggtgttctgccggtggctggtcctgcgatcctgccgcatgcccgtttggccgcagtgggtagaggaggcgtgtgcaattgatgcggatgacccacttggaatggtcgagacggacgtcatggcgccgcctgagtttgaacgtaaatga

SEQ ID NO: 508326 - DNA, 813 bp, Stenotrophomonas maltophilia
atgctccggcccctcatccatataacgccgaatgaactcccatatctccctcaccttcttctcatcatcaaagtagtgaccaacggcgaaagtgcggcgcactacatcaccgtccattacgtgcactcgaatatcacgcaagtacttctcacgatccccgtgacccaagtgaaagtacgcctcttcccaggggacgctgactacgcctccgtctccacctccaacgaaggcatgcaccatccgcgtgcgtcgattaaacctgattggatagtacttgtaggaaaaaaaatctcgcccaaaggtgagccaacaaaccaagggccactgaccaacaaagatcaaaagaaacacagcggcgacccgccaatcatagatgccatccggtcgagcgtttggcacccagaaagaaagcatccaaagaccaaacagcgccatcgcactgcataccaacgttgcaaccgttgtaccaaccatgcctctcagacgatagcggcgatcgattacatccatgtaagtggaattaagactgattacacagtgccgctcagagcaacgttcatctcgctcccgcggcagcctctccagtcgctcaatcgcatcaatcggcctgtttgtcctgaatttcgtcagccaacctgtatacacgtcaatcctcttcgccgggcgatcttcagccgtgctctagcaacttcctttgcctggatgatacctgcgcccgcgcgtgccaccataggcgcatcggcaactaccctggacctatccgctatcagtaacggcgccgcccgcgcacttgccatcgattgcccctgttga

SEQ ID NO: 508327 - DNA, 921 bp, Stenotrophomonas maltophilia
gtgactagttccacgaagcggtatggtgaagttctcatcgaagagtgggagggtgaggagcccttctttgacgcggattttgcaaagaagcgaaccaagggcgctgcgcaggttggtgtggctcaaccccgcaggatcctgaattccactgacggtgtccgagttcatagtggcccctcatcgtccgatgttgttctggcggcctatgagaacggcatcctgattagtgggttgagaggtaatgcaagtctttctttacttgcgtggttcggatttcttccagctttaggtattattgcagtggcgctcttttgtgtaagtgtgctttttagaatgggcgctgatgccatctttgagcctggcattgccatttctcttctacttatttcaatagctgcatttttgtttggaatcggtgcaattagctttttatttcgtgtccttgtaatgatgccgtcggactttcctgtcatttttaacaggagcacgaaggatgtatgggttgctgttcctacgttgccatcgtttgtccggatatttgagctccatccggtgaggtttgaacgctacagctgggcagaccttcggcctcgaacctataggatcttcgaggtcacgccgggtgtgagctctgcccgctggacttatattctgaccttggtctttggtcaaaataatgatccgcgaaaggtggcctgtgaaatgaacatcggtttcaagggctggggagacgatttcgaactgctgcagctttgggagcatattcgccgatacatgaacgatggcggccctgctttggatcagggcgagaagttcaagaccttcagcacgggccgacttcccaagttcccggacgaggcaatggcggcattggggcggaagctctcggagtccgaggcttgggctgctccaagggcctga

SEQ ID NO: 508328 - DNA, 1548 bp, Stenotrophomonas maltophilia
atggtaggcgccgtggcgcttggcgcgggtaaggtgaagaaaacgctttctccggcattgtacgactgggtgatggccctgatcagcagcatggtcaaacaagccgcgccacagattacacatctgatcgtggacgcacctttgcgcatggccggtcgtgcatggcgtgaggtctcaagggcattcactgcggcagcggccgacacgccggccggcaagcagaggggcgtgaaaagcctggtggtaggaagcggaagctcgctccagctggccggtgccggtgaagcggccgataggcgagtaaagctgcatctgtggaccagccagagtgaagaacaactgcgcgcgcttcaatccactacccaacagggtcagtcggtggcaagcgcgcgaccggcgccgggatcgacagcggccacgggcgccgcagctgcagttgcagcggcacccattaccatgggatccagtggtctgatgagccttgcttcggccacgcccaaggtgattgccgatgcgcctacgatgatgagtgcaggcgcaggcatcatccaggcaatggaaattgccaaggtatggaagaagatggaagtaggcacggcgaaggagcgcagggaggccatctttagtttcttttcggcgggtctaggagtggtctcggcattcctcgatgtcgcaaaatcgtacgcacagaatgttctcaagaaggtgctggccaaacgtctggaggccaccgttgctctgtttgccgctattggttcgttcattgattcggcgcagagctttattgctgctgcggatgatgtgaagaatggccgcggcgccgcggcagcagtgcatgctattcaagctctttccgtacttgcgggcggggtcgccttttccgtatatgcggcatctttgttcgtgcagagtatcggagtttccacttcgtggcttggctggggcatcgttctcgtagttatcggtcttgcgctcggcttcgttgcctcgcttctaatgacgcttccccttgaggactgggcggccaggaccgtttggggaagttcgttctcgacccgttgggtatcgcagcaggaagagctcaaagaactcaataaagttcttttgggcgttgaggtagatgcgcaatatagaagtgcgttcagctggaagaacgtcgcgtctgcggatggcgtgatcatcggtggtgcagtgaagcgcatgaccgcccatgactccggtgcgaggttcaccagggagtttgtggtcaagcttaaacttgtagagcagatgcggaagcggctgggaataagtattcttgtgagcggtcagggagcggccgggacggagagcatcgccagctattccaccgatgagttgggcaatgctggagagaactggggccggggcgtatcagaaggcaagatggatcatgcctcgattgaggcgttgacaatctccggccatgttgagaatagtcgattctcggctctggccgtggagctgacaattcgagatgctcttgatggaggagacgttatcgtcaatgagaggatggtggttgagtga

SEQ ID NO: 508329 - DNA, 219 bp, Stenotrophomonas maltophilia
atgaacataggcttcaagggctggggggatgatttcgagcttctgcagctttgggagcatattcgccgatacatgaacgatcacgggcccgctttggaccggggcgagaaattcaagaccttcagcacaggtcgactccccaagttcccggatgaggcaatggcggcattgggtcgaaagctctcggaggctgaggcttgggctgtttcaaaggcctga

SEQ ID NO: 508330 - DNA, 1143 bp, Stenotrophomonas maltophilia
atgtcgcgaaagcatgttgggacgctgcgggttctggcgcgcgcgtatgccagccccctgatcgcgatggtgggggcggtggcgctcggcgccgggaaggtgaagaagacgctttccccggctctgtacgaccgcgtgatggccttgttgagcagcatggtcaagcgagcggctccgcagatcacccatctgatcgttgatgccccactgcgcatggcgggtcgcgcttggcgggaggtttcaagggccttcactgcggctgcggctgcggctgacacgccggccggcaagcagaatggcgcgaagagcctggtggccggaagcggaagctcgctccagctggccggtgccggtgaggtagcagacacgcgcgtcaaactgcatctctggaccaaccagagcgaagagcagttgcgcgcgcttcaatcgacggcccagcaggggcaatcggtggcaagtgcgcgaccggcgccgggatcgacggcggccgcgggcgccacggctgcagttgcagcggctcccattgccatggggtccagtggtctgatgagccttgcttcggccacgcccaaggtgactgccgatgcgcctacggtgatgagtgcaggcgcaggcatcatccaggcaatggaaattgccaaagcatggaagaagatggatgttggcacggcgaaggaacgcagagatgccatcttcagcttcttttcggctgggcttagcgttgtttctgcgtttgttgatgttgctaaatcgtacgcacagaatcttctgaagaaggttttggcgaagcggctggaaatgacggttgcgatatttgcagcaatcggatcatttattgattcggcgcagagttttattgcgacggccgacgatgtgcgaaacgggtggggaatcgctgctactgcccatgcgcttcaggcagtttctatattcctgggcggggcggcgtttagtatttatgctatttctatagttgttcagggttttggtgtttccgcgtcgtggctgggctgggggattgtattcattgtcatagggtttgccttaggttttgtagcatccctcttcatgactcatcccatggaagactgggcggcgaggtgcacttgggggggacgggttcgcgtcgacgtggccaagtaa

SEQ ID NO: 508331 - DNA, 921 bp, Stenotrophomonas maltophilia
gtgactagttcctccaaaagaagcggtgaggtcagggtcgatgagtgggagggtgaagagccctactttgacatcgatttttccaagaagcgcagtaagggtgaagggcaggtcggggtcttccagccacggagaatactgaatagttccgaggatgtatcagtccattccagtccttcctcctcggattgcgtcatttccgctcacgagaacggtattttggtgagttctatccgtggctcagcaagccccgccctgctagcatggtttggttttctaccgtcatgtgggttgcttgcggctggctgctatgcaatttatatattgacgaggctgggggcaggcgcagtcgaggatccggggtttgctctggcaattctattcgctgctgccatttctttctttgtgggaataagtgcatttagtgttctttttcgaattttggttattatgccgtcggactttccgattatttttaatcgaaaaactggtgatgtgtgggtcgcaattccaagaatgccgtctttcattcgcgtatttgagcttcagcccgtgacgtttgaacgctacagctgggaaagtcttcgtcctcgaatttacaggttcttggaagtcacgccgggcgtaagctccgctcgctggtcctatattttgacgttggtctttgggcaagagaatgaccctaagaaggtcgctcgcgaattgaatataggtttcaagggctggggggacgatttcgaactgctgcagctttgggaacatattcgccgatacatgaacgatggcggccctgctttggaccagggcgagaagttcaagaccttcagcacgggccgacttcccaagttcccggatgaggcaatggcggcattggggcggaagctctcggagtccgaggcttgggctgctccaaaggcctga

SEQ ID NO: 508332 - DNA, 3378 bp, Stenotrophomonas maltophilia
atggcttcaggtgatagcaatcgatactcaagcaacgccatcagcgcggccaggggaaccaaggcgtgcagcgctggtggttgcccgtcatgcgtcaaatccggattgcccgtgctgcttacccggccggggttggcggaggcacgatacgccgctcgatcaagcgtgcagacacgccaattgatggctgggctttctgcgccggacctgaagttctccgactatgtcatgcgtacgctgaggacggggtacgtctacgtctactatcagacttcagagatgcatgcgctgattggtggggacgggtgggaggcctacgcagttgacgaggcgggctatgtcagcccgattccgttggagaatccgcccctgccagaggaaatgccgcgcttcagttgtgagcgtgcggcaggctatgccgccgccatgctgatcaacatcaaggagccttccaaagcgggcgaggtctgggtaggtttcagcgaagtgccgctgtccctgaaggtaaggcagaactacgctgcaaagccggaactcctgaatcagcgctttacccggctgaacgcgtccaacggtcagagtgaccgtgtgctggcgctttcggatggggcgatccagggggcaatcgtggactacgacgttgagcgtggtcgcatgcttgaaggtctgcgcggaaatcctcatcgtcccgggcaggtagcgctcgacagggatggcaaggtcccggagaagcctgcttctgaagatgcccagaccgaagagcggcgcgaatccgcaaaggacgttgcagcagcggctgccgcaatcgcggctacctccaaggatccggccgccaagcggccgttgatcctgggtgtcagtgacccggttggcatggcccatgaagccgcgcacctgcgattgaccttgcccagcaaggctgtgaagtggttgatggcgcaaagggacggtgcgcggcgcctgcagacagctgtgacgctggtgggcgtccagcagatgctggtcgagcaggccagggtccgcgaggccgacttccgtgatcgcaatccgccggcgatgtccgcaatggatcttcgggcggaaatgatcacgaaggctgaattcgaggcccggcagaaggctggcattgttccgtcgtctgcgagttggtcgccgatcgctattccgatgagcggtccttggggcagcggcgtggcctcgagcgggcagaacggctacggcaacgtgagcgtgcccggcggtgccttcgaggccgatgcacttgagcttatcgagaagatcaagaagaaggcgtcaggccggacgcgtgacaccgtcaccgggaagtggttgggctgggaggattacctgaaggaattcggcaggttctccaccgaagacaaggcgctgcgcaagcggatccagggggaccatcgcgatcttctgtcgtggaatggccgcaagctgatcaccgagttcgacttcgatgagaccagcccggccgatggcatctattacagccaggtagttgcgaatctgttgcatggtgggcccatcgacgatgaagcagttgcatggtatgcagacttcgtgaaggatgatccaagcaacaaggacaacctcctggtcagggcaatgctgggcaatcaacaggatagttttgatcagtttgccgcgtggagtgtggaagaggggcaaaggaacaaggcgaccgacattctcaataatctgcttgatctggccgagaagctcagcgagtccaaccagggagggaaagcttccgcgctggccgtgaagcatgtcggtacgctgcgggtgcttgcacgtgcatatgccagcccgttgatcgcgatggtaggcgccgtggcgcttggcgcgggtaaggtgaagaaaacgctttctccggcattgtacgaccgggtgatggtcctgatcagcagcatggtcaaacgagccgcgccacagattacgcatctgatcgtggacgcacctttgcgcatggccggtcgtgcatggcgtgaggtctcaagggcattcactgcggcagcggccgacacgccggccggcaagcagagtggcgtgaaaagcctggtggtgggaagcggaagctcgctccagctggccggtgccggtgaagcggccgatacgcgagtaaagctgcatctgtggaccaaccagagtgaagaacaactgcgcgcgcttcaatccactacccaacagggtcaggcggtggcaagcgcgcggccggcgccgggatcgacagcggccacgggcgccgcagctgcagttgcagcggctccgattaccatggggtccagtggtctgatgagccttgcttcggccacgcccaaggtgattgccgatgcgcctacggtgatgagtgcaggcgcaggcatcatccaggcaatggaaattgccaaggcatggaagaagatggaagtaggcacggcgaaggaacgcagggacgccatcttcagcttcttctcggctgggtttagtgttgtttccgcgtttgttgatgttgccaaagcttatgcgcaagctgttctaaagaaagtccttgttaagcggctcgaggccgccgttgcgatatttgcggcgattgggtcgtttattgattcggtgcaaggatttatttcaacggctgatgacatcaaaaatggtcgacgcgcaggcgcagtcgcacatctccttcaagggatttcattttttatcggcggagtattcttcagcatctatgctgcatcgctcctgattcaaggtttgggggtaactacttcttggttgggatggggtattgtctttatcgttatagggtttgcgctaggcttcgttgcatcactgcttatgacgcatcctatggaggattgggcggcgagaactgtttggggggatagcatttcatccgcttgggcaacgaatgagatcgagcttcaagagctgaataaggttcttctcggtattgaggtggatgcgcagtatagaagttccctgagctggaggaatctcacctccattgatgatgtgatcattggtggcgcggtaaagagaatgacggcccatgactcggggtcccggttcactagggagtttgtggtgaagctaaagattgtggagcaggtgcggaaacgcctgggaataagccttcaagtctatgggaatggagcaaatggatctgaggttgtagctatctactctactgatgaaaaaggtggtcctggagagaactgggggtccggtgtttcaagtgggaaaatggattatgcatcgctggatgcgcttaccatctccgggtttgtcgaaagtggaagattttcggtgctggccgtggaattgataattcgcgacgctctgtcagaaggggacgtcattgttcatgaaaggatggcggttgagtga

SEQ ID NO: 508333 - DNA, 972 bp, Stenotrophomonas maltophilia
atgattcatcactcacttgagtcgttggtccgggacgtcggcgaaaggctgcacggagtacgtcagccgcgttgggccgctgcagtcattgatccattcgtacacgatccatttgatgatgggttcttggcggacctgggcgcagcaaaaatcagaatcaatgtgccgctccgtgacagggtgtcatcccgccttccgtacctccttctgctggaagccacgtctcatggcgtcgcgttgctgcacaccacctgccttgaagcgctggaagagcaacgggactctgagcgtgaagcggaacatggattcgctatcgggccgtggattggcttcgactcagatcccgacgaagtcgtcagacattgggccatgatctgtacgatacgggttgcaggacaggggcggagataccttcgcctggcggaccggcgggtactgaagtggctgtggcgccgcctggacgcagcccagcaggcattcatggcagggcccatgacgcagatcctggtgttggggcgagattcgagtgttgctgaactccacgtgccaatgacaccacggggggagcgcagtgagcatctttggaatttcgatgtgaccatgcttgacgactgcgaagctgtgcagagcatgctcagaggatgggcgcggtttgcgcccgccctgccccagaactaccttgagctggccgagttcgcactttccgaggcgcgggcggctggagcacaagggctgcatgaccaagtgctgcttggagcgtacgcattgcaggtagacaatcatgttcttaggtcaccagagcttcggaaccttgtagccgcatcgcaggcgcagggcgcgaatcttgctctggcactttctgcagttcccgatagcaggtgggatgccatggccatgtctgtaaggcagggcggatccggcgcacgccatctggagaccactcaaggagagagaagctatggcttcaggtga

SEQ ID NO: 508334 - DNA, 2730 bp, Stenotrophomonas maltophilia
atggatctggtaaacaacctgcgggccgcgctggccggcccttcgcacgcacagcgcttcctgcggctgcacacgtcgctggggagcgatgtgctggtggccgaaaccctggatggcgtcgagcagatcgacggcatcggtttccagtggacgatcaccgccctgtcgttggacgccggcctgcagttggcgccgctgatcgggcagggcgcgctgctgcagctgcagcaggccgacggcagcctgcgtccgctgcatggccgtatcaccgccgccgagcggctgggcagcaatggcggcctggcccgctaccggctgcgcctgcagccttggctggcgttcctctcgcagcgggtggacagctacgtcttccacgacaagaccgtggtcgagatcgtcgaggacctgttcgccgactacggcggactggcaccggcctggcgctggtcgctgggtgacgccagccagtacgcgcggcgcagcctgaccacgcagtaccaggaaagcgacctggccttcgtccagcgcctgctggccgaagagggcatctattactggttcgaacatgccggcgagcccggcagcgcggacttcggcacgcacaccctggtgctggccgaccacagccatgacacggccgaactgggcagcgtgcgcttccaccgccgtgacgagagcgagcgcagcgacagcgtgcagcagtggtcgaccgcgcaccgctggcggccgggcaaggtcgagcgtgcgacctgggattaccgcacgctggaacgccgccaggccagtgccgaggccgggcagggcaacgacctgggcatcgtcgaccgcgacacctgcggcccgtatggctggcaggacaacgcccgcggccagcgtcgcgcacagcagcacctggatgcgctgcgcgtgcgcgcgcacacgatcgaaggcgccggccagtggcgagcgctggcgccgggcgcgcgcttcggcctgtcgcagcatccgcaggtgggcgaggacgcgtcgttcctgtgcctgtcggtgcggcaccaggcgcgcaacaacctggatgccgacgtgttcgacgcgctggaacagaccctcggaccggccagcgtcaccgtaccgacgctgcctggcgcactgtccgggctggcctatggcgatgcgcccgatgacgtgtccgccgcgttctacgacaaccgcttcgtggccattccctccgaggtgagctaccggccacagaccgaggacggccatggtgcacacctgcatccgcggccgaccatcaccggcacgctcagtgccatcgtggtcagcgacggtgacccgctgctgtccgaccgcgatcaccgcatcaaggtgcagttcccgtggcagcgcggcggcagcgccagcagcggcctggcccaccccggtggcgatgacaatgcaccggccaacggtggcgcctggacctgggtgcgggtgatgacgccctgggctggcgacaactggggcggcgtggtgctgccgcgccgtgggcaggaagtgctggtggcgttcctggaaggcgacatcgatcgcccggtagtggtcggcgcggtctacaacggccgtggccagcaggatgcgcagcacaaccagatcaacggcggtggcgccaacgccaccggcaacgctgccgcctggttcgagggcaacgaccacgcggcggtctacaccggcttcaagagccaggcgctggccgacagccagggcggtaccggtgggtatcagcagctgcgcttcgacgatacgcccgggcagggccgagcgcagctgtccaccacccagcacgagaccacgctgaccctgggccacctcaagggcggccaggacaacgtgcgcgaaagcgagcgtggcttcggcgtggaactggccacgcaggcccagggcgcgctgcgcgccggccgcgggctgctgctgaccaccgagcagggcgcgccgcagatggcggcgccgcaggcactgagccagctgcaggaaagccagcagctgctgcagcagctggcagaatcggccgccaaccagcaggcgcagctgccgagtgacccgaaagagctgccggtcgataccaccctgaccgagctgcaggaagcgctgcgtgccacccacagcggcagtgctgcgggcagcatcgcgggcggcgatggcgaagcaccgggttggagcgcaccggtgctgctgggcagtggcgtggccggcgtgttgagcctgacccccgccgaccaggtctgggtgagcggcacccacaccaccctggccagcggcgtggcgctgaactggatgacgcagggctcactgacgatggccgtcgccggcggcctggtgctgtacaccgctggcgtgcagcccagtggcgaaagcccgaaccaggagcgcggcatcgcgctgcacgcggcacagggcaaggtgagtgcgcgcgcgcacaagaaccaggcgatcgtggcggccaagacgcaggtgcgcatcgccagtaccgaagcggacgtgcagctgtcggcgccgagcaagcacctgctggcgaccgcggcgggtgcctacatccggattgaaggcgacaacatcgagctgggcgcgccggggaaggtggagttcaaggcgagccagcgggaatgggtggggccggcgagtgtggcgggggagctggcggtgccgtccggtgacctcaaggcgtgcccaacaaaggacagcgagctggcaactgctggcgctgcagttatctga

SEQ ID NO: 508335 - DNA, 351 bp, Stenotrophomonas maltophilia
atggaattctatggatttgaccgcgaagccgccctcaaccactgcgacagcctggaactgggcctgggtcgtgaactggaccgtgtgcgtgcctggaaccgcctgcgcccggagcacgtgatcgaactgctggacaccgccgtgccggccgcccgccaggatgcacgcaacatcgccgcgcagatcagccgcggttcctggcgcatccacatggatgccccggtggtcggcaagccgcagctggtgagcaacgtgcgcgaactgcagatcaccgccggcggccgcgactaccgcctgaagatcagcgaaggcgtgcgcctgcagctggaagagatcgtccaggctgcctga

SEQ ID NO: 508336 - DNA, 2754 bp, Stenotrophomonas maltophilia
atgagcatcaacctcaaaaccctgatcagcaagctggacgacacctgccgccaggcggccgagcgcgctgcgaacctgtgcatggcgcgcggcaactacgaggtcgacctggagcacctgttcctggcgctgctcgagcagccgcagagcgatttcgtgttgatcgcacggcgcagcggcatcctgcccgagtcgctggagcgcgatctcaatgatgagatcagccagttcaagaccggcaacagccgcacgccggtgttctcccagcacattccgaagctgttcgagcacgcctggctgatcgcctcgctggactcggaaaccacccgcatccgcagtggccacctgctgctggcgctgctgaccgagcccgatctggcccagctggcctatcgtggctcgaagctgttcgtgcgcttcaagcgcgatgagctcaagcacgactttgccaagctcaccgagggctcgcaggaagcggtgcagaccgtgcgcttcgccgatgcttcggccggcggtgacgccggcgagagcgatgacgcggccacgggcgaggccaagggcgggctgtcgaagacgccggccttggatcagttcaccaccaacctgacccagcgtgcgcgcgagggcaagatcgacccggtgatcggccgcgatggcgagatccgccaggtgatcgacatcctgatgcgacgccgccagaacaatccgatcctcaccggcgaagccggcgtcggcaagaccgcggtggtcgagggcctggcccgtcgcatcgccgacaaggatgtgccggacgtgctgcagggcgtggagctgcacactctggacatgggcctgctgcaggccggtgccagcgtcaagggcgagttcgagaaccgcctgaagaacgtgatcgacgaggtcaagaagagccctcacccgatcatcctgttcatcgatgaagcacacaccatgatcggtgccggcggcactgccggccagaacgatgcagccaacctgctgaagcccgcgctggcgcgtggtgaactgcgtaccatcgctgccaccacctggagcgagtacaagaagtacttcgagaaggatgccgcactggcccgtcgcttccaggtggtgaaggtcgaggaaccgagcgaggcactggccgctgcgatgctgcgcggcatggtcgggctgatggaatcgcacttcaacatccgcgtgctggatgaggcggtgaccgaggcggtgcgcctgtcgcaccgctacatcagcggtcgccagctgccggacaaggcggtgagcgtgctcgataccgcgtgcgccaaggtggcattggggcagagcgccacgccagccatcatcgaagacacccgcaagcacctggaccgcctgcaggcggagatcggtgcactgcagcgcgagaccgctggcggcagtgaccagcatggggaacgcctggccgaactgcatgcgcagcaggccgaagcgcaggccgtgctggccagcaacgaagagcgcctgggccgcgaacgtgaccttgccggccgcatcgccgcactgcgccagcagatggagcagggcgaagccgcgtcgggcgaggccgagccggccagcgacgagggcgacggtgatgtcgccgtggccaagccggccgccaagcgtggcaaggccaagccggaactctcgccgcagcacgccgaactggcgcggctgcaggccgagctgcgcgagctgcagggcgagacgccgatggtgccgctgcaggtggatggcaccgtggtggccgagatcgtctcggcgtggaccggcgtgccgctgggccgcatggtcaaggacgagatccgtaccgtgcgcacgctgggcaacctgctggtcgagcgcgtgatcggccaggatcatgcgctggatgcgatcgcacagcgcgtgcgtaccgccaccgccaagctggaagatccgaacaagccgcgcggcgtgttcatgttcgtcggcccgtccggtgtcggcaagaccgagaccgcactggcgctggccgacatcctgtacggcggcgagcgcaagctggtcaccatcaacatgagcgagtaccaggaagcgcacagcgtgtccggcctgaagggctcgccgcctggctacgtcggctacggcgaaggtggcgtgctgaccgaggccgtgcgccgcaatccctacagcgtggtgctgctggacgaagtcgagaaggcccatccggacgtgctggagatgttcttccaggtgttcgacaagggcatgatggatgatgccgaaggtcgtgagatcgacttccgcaacaccctcatcatcctcacctccaacatcggctcgtcgcagatcatgcaggcctgcctgaacaagccggccgaagagattccgggtgccgaagcgctgtccgatgcgttgcgcccggtgctgatgcgcaccttcaagccggccttcctgggccgcctgaaggtggtgccgtactaccccatcaacgatgacgtgctggcgcagatcatcacgctcaagctcggccgcatccgcgaccgcgtcatcgccaaccacaaggccaccttcagctgggacgacagcctggtggaggccgtgcttgcgcgttgcaccgaagtggactcgggtgcgcgcaacgttgaccacatcctcaacggaaccctgctgccggaaatcgccgagagcgtgctggcggcaatggccgaggggaaccggatcaacgccatcaaggtcaccgccggcaagaagggtgacttcaaatacaaagtgtcctga

SEQ ID NO: 508337 - DNA, 1092 bp, Stenotrophomonas maltophilia
atgcccagcgcgcagcggcgaatcgatcctggcgtagcccagcagctgctcaccgaaccgcaccgcttccagttcttccaggcggtgcggttgcttgagcaggtgttccagcggcagggcgtcaagcccggccaggccgtgccgatgcgcgtgcggttccgcaactcgctgtcgctcggattcccggccaccgaattgtcggccgagggcgaagtgtattcgctcaagggcgagcggctgcaggatcgcgaggccatcgaacaggccctgcatggcgaggagctggccgaagtccacctgaccccgcagttcatgggcctgctcggcaccgccggcgccttgccgctgcactacaccgaaaccctgcagcttcgggagttgtaccagcgcgaccggaccgcgcgtgcgttcctggacatcttctccacccgtgcggtatcgctgcactacgccgcctggaagaagcatcgcctggcgttgcagtacgagctggatcgccgcgagcgcttcctgccgctggtgctgtcgctgctcggcatgggcatgagcgagctgcgcgaccgcctgcacgaaggcgagggcgagatcttcgaccaggccgtggcctattacgccggtgcagtgcgccagcgaccggtgtcggcggcgctgatgcagcgcgtgctgtcggactacttccaggtgccgctgcacctggagcagttcgtgggcgcgtggtaccgggtcccgaccgggcaggccacgcggctgggccaggccaatgccgtgctgggcgccagcgcgttggccggcgatcgcgtctggcagcgcgacctgcgcctgcgactgcgcatcggcccgctgcgccgtgaccagttcgatgccttcctgccgggcggcagtgcggccgaagcgctgtccaagtggttgtcgctgctgaccggcggcatcctcgaatacgaagtgcgcctggtcctgcgcgcggaagatgtggagggcagttcactcggcatgggcggcggtgtgcgcctgggctgggacagctacctgtgcaccgcgccacaggcgaccccgcgtgaggacaccacgtatggcatccacacgctgcaatga

SEQ ID NO: 508338 - DNA, 1836 bp, Stenotrophomonas maltophilia
atgcaggacctgctgccttactacgaacgtgagctcggctaccttcgccgttacgggcgcgagttcgccgagcgctacccgaagattgccggtcgcctgcagctctccgccgagggcagccaggacccgcatgtcgagcgcctgatcgaggccttcgcgctgctcagtgcgcgcgtgtccaagcgcatcgaagatgactatcccgaattcaccgacgcgctgctggacgtgctttatccgcactacctgcggccgttcccgtcctgttcgattgcccatttcgacctggagggggtggcatccaagctgagtgcgccggtgcgcgtgccacgcggcaccgccctgcagagccggccggtgcgtggcgtaccgtgcgagttccgcactgcctacgacgtcgtgctcgcgccgatcggcgtgaagcaggtggtctaccgcagtgtggccgatgcaccgatggccacgacgctgccggccggaaccggtggccagatctcgatggggttccagctgctgtccgatcagctgggtttccaccagttgggaaccgatcacctgcgcctgttcctcgatggcgagccctcggtgcgcgcggccctgcgtgatgcgctgatgctgggggtgaaggcggcatacgtcgagtccgacggggatggtcgctggcgccgcctcgacaaggcgccgttgagcgcggtcgggtttgccgatgacgaggcgctgatcgatttcccggcgcgttcgcatcctgcctatcgcctgctgaccgagctgttcgcctatccggaaaagttcggcttcgtcgacctgcacctgccctcggtgacggcaggtgccagccgccgtttcaccctgcatctggtgctgcaggcgcacggccaggaccgtggcaacacgatggtgctggacgaactgggtgtgcacaacgtgcggttggggtgcacgcccatcgtcaatctgttccgcaccagtggtgagccgatccgtgtcacccatcgtacggtgaactacccggtgctggccgatgcccgccgcgcgttcgcctatgaagtgcactcaatcgattcggtgcatcgcatccggcagaccccgcagggtgagctgatccaggccttccgcccgttctattcgctgcatcacggggaagaccccgagcgcaccggtcagtactgggtggcgcgccgtgacgaggacgtggcgcggcagagcccgggcttcgagaccgagatcagcttcgtcgacctgtcattcaacccggtgctgccgcagaccgatacggtcagcctggaactgacctgcaacaaccgggacctgcccaaccagctggctttcggtgtggcgggcggtgacctgagcatcgaaggtggcagcccggccaaggcgatcagcctgctgcgcaagccgaccaagccgctgcgtttccgtcacggccgcaacgcccagtggcgcctgatctcgcatctgtcgttgaaccagttgtcgctgaccgccagcggcctgcctgcgctgaaggagatgctgcgcctgtacgacctgtccggcagcaacgtctcggcgcggcagatcgacggcatcctcgagctgcagcagacgccggtgaccacctggatgcacggccgccagttcgcctcggtggtgcgcggcctggagatccgcctgacgatcaatgaagcccatttcgtgggcaccggtgtggccgccttcgcccaggtgatggaccacttcttcgcactctacgtgcatgccaacagctttacccgactggtgctggtttccggcgacagcggggaggagatcgtccgatgcccagcgcgcagcggcgaatcgatcctggcgtag

SEQ ID NO: 508339 - DNA, 489 bp, Stenotrophomonas maltophilia
atgaagggactcgaacccagcctgctggaaaaactgttcgacgacgcccccaagcaaccgggcgccgggccggtattcaagtccgtctcgctggagcagtacaaggaatccatcgcccgcgacctggaggggctgttgaactcgcgcgccgcgttccaggaaggcgacatgaaggaattccccaattgccggcaatcgctgctgacctacgggttggcggacttctccgcgatgagcctggccaacgcctacgatcgtgccgccatctgccgctcgctggagcaggccgtggcgcgccatgagcgccgcctgcgcaacgtcaacgtccatctggacgcgggcaaccagttcgccggtgggctgcatttcaccatccatgcgctgctcgacctggagcctgcacgcgagccggtcagcttcgacgcgatgctgcaaccctcgaccctgcagtaccaggtcacccgcgcacgccgcatgcaggccgcctga

SEQ ID NO: 508340 - DNA, 498 bp, Stenotrophomonas maltophilia
atgcagcacgctttcctctcgattgacaccatcaagggcgagtcgcacgacgacaagcacaaggactggatcgaaatccagtcgttctcgcaggatctgttgcagccgcgttcggccaccgcgtcgacctccggcggcaccaccgcagcccgcgtgaacctgtccccgatcgaaatcaccaagtcgatcgacctcgcctccacggccctcaaccaggccgcctccaacggcaccaccttcccgaaggcgcagatccagttcatgcgcgccgacaaggacggcaacgcgatcaattactacacggtcgagctgctgaacgtgctggtccaccgcgtcaccacgaccgtggacaaggaaggcatgccgcaggaagttgttcagttgagcttcggcgccatcaagtggacttaccagcagcagaagccggaaggcggagttggtggcaagaccgtggcgcagtggagcgcaaccaagaacatcccgaactacaccgtgtga

SEQ ID NO: 508341 - DNA, 1491 bp, Stenotrophomonas maltophilia
atgtcagccgaagccagccaactggccacccaggccgccgtggccgaagaggtgggcctgctcgaccagatcgtcgagaagagcaaggtcgccaagtcgcagaccgaacatgatcgtgccaaggacatcatcgccgcgctggcgaaggaagtcctggacggtaccgtggtggtctccgacaacctcaacctcacccttgatgcacgcatcgccgagatcgaccggatcatttccgagcagctcagcgcggtcatgcatgcggaagccttccagaagctggaaggcagctggcggggcctgcactacctgtgccagcagacctccaccggcccgaacatgaagatcaaggtcttcaattcgccgcagaaggatctggtcaaggacttcaagtcggccatcgatttcgaccagagcgcgctgttcaagaaggtctatgaagaggagttcggcaccttcggtggtgcgccgttcggcgccctgatcggtgactatttccttggccgccagccggaggacatgtacttcatcgagcagatgtcgcacgtcgccgctgccgcgcacgcgccgttcatctccgccgccagcgaaggcatgttcggcctggagacgttcaccgacctgggcaagccgcgcgacctggccaaggtgttcgacacggtcgagtacgccaagtggaagtcgttccgcgagagcgaggacagccgctacgtcggcctgaccatgccgcgcttcctggggcgcctgccgtacaacccgaaggacggcaccactgtcgagggtttcaacttcgtcgaagagatcgaagcggccgaccacagcaagttcctgtggtgcaacaccgcctacgcgatgggcgcccggctgacccaggcgttcgagagctttggctggtgcgcagcgatccgcggcgtggaaggtggcggcctggtcgaggatctgccgacccataccttccgtaccgacgacggcgaagtggcgctgaagtgcccgaccgaggtggccatcaccgaccgtcgtgagaaggaactcagtgacctcggcttcatgccgctggtgcactgcaagaataccgactacgccgcgttcttcggcgcacagtcggcacagaagccgaagaagtacaacaccgattcggccaatgccaacgcgatcctgtctgcccagctgcagtacatcttcgcggtctcgcgtatcgcccattacctcaaggcgatgatgcgcgagaagatcggcagcttcgcttcggcgggcaacgtcgaggaattcctgaaccgttggatcgcccagtacgtgttgctggacgacaacgcttcgcaggaagccaaggcgcagttcccgctgcgtgaagcctctgtgcaggtttcggaggtgccgggcaagcctggtgtctaccgcgcggtggccttcatcaggccgcatttccagctcgatgagctgtctgtttcgttgcgtctggtcgccgaactgccggcgtccgcgaaaaagtcgtaa

SEQ ID NO: 508342 - DNA, 501 bp, Stenotrophomonas maltophilia
atggccaagaaggaaagcatccagaagcggctgcagaagatccgcccgccgcgcgtccagctcacctacgatgtggagaagggtgacgcgatcgagcagaaggaactgccgttcgtggtcggcgtgatgggcgatttcagtggcaatccggaacagccgctgccgaaggtcaaggatcgcaagttcgtcaacgtcgatctggacaacttcgatgaagtgatggaaggcgtcgcaccccgcgcggtctatcgcgtgccgaacaagatcagcgacgacggtggcgagttcggcgtcgagctgaagttcaattccatcgacgacttccgtcccgaggcggtggtccagcagatcgaaccgttgcggcgcctgctcgagtcgcgcaccaagctggccgatctccgcaacaagctggcgggcaacgagaagctggaagacctgttgaccgatgtgctcaacaacaccgagcagctgaagaagctcggcgtgaccaaggaggactga

SEQ ID NO: 508343 - DNA, 624 bp, Stenotrophomonas maltophilia
atggaagtgaaggcaatggggaaggctgtgtaccggccgatgttcgcgctgatgttgctgtcgggcctggcggcctgctcatcggcgccgaagaaggccgaggtcgtgccgttcgaaacgacgctgagcaacgccgaagcacaggtcaccactggcggcgccgatgccgcgatcagtgcgttcgaactggcggccaaggccgacccgacgcgcaaggagccgtgggtacgcatcgcacagctgcagttcgaccagggccagtacgcccgcgcgatcgtcgcagccgaggaagtactccagcgcgatcccaatgatctggtggccgatggtgtgatcaccgtcgccggcttccgtgtcgccaaccagtcgctgacccgcctgcagggccgtggcgcactggcgtcggacaccgcacgcaaggaagcgcagaccctggccaccaccctgcgcaacaccatgggtgacgccattctcgacccgacgcccaagcccaagccgcgcagccgcgcccgtgcaggccgtgccgcggctcccgccgctgctgcccagcccgccgcgacgcagccggccaagcccgctgcccgctcgaacacctccgatccgttccagaacatcggcaactga

SEQ ID NO: 508344 - DNA, 627 bp, Stenotrophomonas maltophilia
atgaatgcgcaacttttctcattccatcgcgtgatatccgtcacgattttgtccctggtcatgtccacgtccctgaccggttgtgccagtgacagcaagttgggcaaggcaatggacaagaccctccaggccgtgggcatccgcgagggcaagcccgaggcgccccccaccattccgctgcgcctgtacgccggcagcaacctcaacgccggcaacgacaagcgggcgacggccgcggtggtcaagatctaccatctgcgcagtctgcaacgcttcgaacaggctcccttcaacgctttcctcgaccaggccggcgagcaggctgcactcggcgcggacctgctttcggtcaacgaggtcgtactgaccccgggtgcccggcaggaattgtccgagcagctgagtgaaggaagtgcagtgctcggcgttgtcgccctgttccgcgctccggccgagaatcgctggcggctcgcgttcgacaccaagggcaagacgcttccgcaggatggcgtcaccatcggcgtccatgcctgtgccctgaccagcgacagcaaggcgctgttgacacgtatctccggtgatccaggcagtcttgcatccatccgttgtgcaggcgcaaagaaatag

SEQ ID NO: 508345 - DNA, 1353 bp, Stenotrophomonas maltophilia
gtggcttatgtaagcaggatgtcgaaggttctctggggtgaaggcctgttcctgcgcccccagcacttccagcgccaggacgcctaccacgaagcacggctgcaggatctctcgcagaccctgcacccctatgcatggggtgcacgccgggtgcgtttcgatccacatgcactttccggtggcacgctgcgcccactcgatctgtcggcggtgttccccgacggcgagacctacgatgcgcccgcgcacgacggcctgcccgatgcggtatcgctgcaggagctgccgccaggcgtacagtccaccgtcgtctatctggcactgccgctgctgcgcgatgatggcgcgaactgtgccgatgccgaaggcacggttctggcccgttaccgccaggccaaccgtgacacgcaggacctgttcaccgatgcggtcgaagccgagctcgccttcctcagcaaggcagtgaagctgctcaccgacgatcagccgcgcgacgcctacgccacggtgccgatcacgcgcgtgcggcgcacctccagcggcggcttcgagctggacgatgagttcattccgccgtgcgcccagttgcaggcgtcaccgttcctgcatcgcgaactgcgggcggtgctcgatgcgctgcaggcgaaggtcgatgcactgtatggcctgcaccggcagacctcgcagaacatcatcgaattccgctccggcgacatcgcctcgttctggctgctgcacaccatcaacagctcgttcagcgcactggcgcatctgctgcaccatccgcagctgcaccccgagcgcctgcaccaggagctgctgcgcatggccggcgcactgctgaccttctccaatgcgtaccagctgggcgatctgccggtatatcgccacgaccagccggaagcctccttccgcaagctgctggagatcgtgcggaccctgctggataccgtgatctccacccgctatttcaagatcgcgctgaacgaggtgaagccgtcctaccatctcggccggctcgattcgcagcgcatcgacggcaatgcctcgttctacctgtccgtctccgcatcgctgccggcgcaggagctgatccagagcgtgccggtacgtttcaaggtcggtgcgccggacgatgtcgagaagtgcgtgctgtccgcgcttccgggcgtgaagctgacccacgcggcgcaggtgcctgcggcgatcccggtgcgcccgggcagccattacttcgaactcgacgcacgcggcgcgctgtatgagcgcatgctcaaggcgcagtcgttgatgatctacgtgccggccggtattgccgaactgaagatggaactcgtggcggtgacctcatga

SEQ ID NO: 508346 - DNA, 795 bp, Stenotrophomonas maltophilia
atgatgaactcccccctgcccccgacgccgggcccgatgccctcgctgaccgccaatggcgcgatggtcaacccgacgccgcaggcggccaatccgcagagcctgcaggacctgatggccgacggcttctaccttctgctgctgctcaagcgcggccagctgccacacgatgccgagagcttcgtgcagacggtgcagaagttcctcgatggcgtggaacgcaatgccatgcgcatgggcgtggcctcggaagatgtctacgctgccaagtacgcgttctgcgcggcggtggacgaggcgatcctgtcccagccgtcgccgctgcacgaaacctgggaacgcaacccgctgcagctgcgcctgttcggcgagcatctggctggcgaacacttcttcgatcgcctggaagaactccggcgccagggcgccgcgcgcctgccgtcgctggaggtctatcactattgcctgttgatgggcttcgaaggcaagtaccgcctggaaggcaccgagaagctgggctacctgaccgcgcgcctgggcgatgagatcgtctacctgaagggcaagcgccacggtttcgcaccgcacgcactgccaccggacaacgtccgccacagcctgcgccgcgtggtgccgttgtggctgccggccgtggtggtgggctgcttcggcatcgtcgccttcttcggcatgcgcacctacctcggccacgaaaccggccagcagctggccgcctacaacgacgtggtgcagatgcccgagcgcaccgcccacatcacgatcaccctgccatga

SEQ ID NO: 508347 - DNA, 4590 bp, Stenotrophomonas maltophilia
atggacatcccaagctcctcactgctcgcatccctcgcttcgctgtcccaccgcgaacgcctgatccagctgaaggggcctgaggaaggcctggtcgtcgaacgcttcgaaggcatcgaatcggtgtgcggcgacaaccgcctgcagatcgactgcctgtccaccgacgcgttcctggacctggagccgtggctggaacagccgctgaccctgcagctacgccaggccgacggttcgctgcgccagtggcacgggctgtgtaccgaggctgcgcagctgggcagcgatggtggcctggcccgctatcgcctgatcctcgaaccgtggaccgcgctgctgcgcctgcgccgcaatgcggtgatcttccaggatctggatacccgcgccatctgcgaacagatcttcgccgactacccgcaggccctgttccgcttcgacgtgcaggccgagctgccggcacgcgcgatcaccacccagtaccgcgagaccgactgggccttcgtcacccggctgctggccgaagccggcctggcctggcgcatcgagcaggcgcaggacgacgatgccgcacacaccctggtggtgttcgagccgggcgccgagctgcccgacgcaggccgcgtgcgcttccatcgcgccgacatggccgaggccagcgacggcatcaccgccttcgccgagcgccagcagctggtgcccaacgccagcaccgtggccagctggcacagcgagcaggttgctgccgtggccgcgcactccagcgccgatgccggcaccctgcccgccttggaagtctacgtgcagccgcgcgccggtcgattcgcccaggccggctgggccgacgccgaagcacaggcacggctggacgcgctgcgcgtcggccaggtgctctacagcggcagcggcagcgagcgccagctcagcgccggcagcaccttcaccttggcccagcacccgcagcacgaaggccaggccttccagttgctggccgtgcagcatgtggccctgaacaacctggaccagggcatcgccgagctgctgggcagcaccgcgctggagcgtggcgcctaccgcaacagtttcctggccaccggcagcggcgtgccgttgcgcgccctgccgcaggaccggccgaccctgcatggcccgcagactgcacgcgtggtgggcattgccaacaccgccgtgactcccaaccgcgagcaccaggtacgcatccagttcggctggcagcgcggcagcaggcccaatcccggcggcctgaccgacaccggcagcgcccagcccggacacgctcccggcgaccacaccagtggcagctgggtgccggtagccgagtgggtggccggccccaactggggcacggccttcctgccccgcgtgggcagcgaagtactggtggaattcctgcacggcgacatcgaccagccgcgcatcaccggccagctctacaacggcgaagtcgctccgcccttcggcggcggcatcgacgagaacgcacgccaccccggcgtactcagcggcctgcacacccaggcccatgacggtagcggcacccagcaatgggtgatcgacgacacgcccgggcagctgcgcacgcgcctgcacagctcgctggccgacagccggctggagctgggctacctgatcgcgcaccaggacaccgcccgtggcgcgctgcgtggcgagggctttgaactggccacccagggctggggcaacgtgcatgccggcgaaggcctgctgctgtcggccagcctgcaggagcgcgcggcatccacggtgatggacaacgccagcgtggtggcccagctgaagggcgccgagcgcagcctggaacagatgcagcagaccctggcgcagcagcaggtgccggggttggcggagttcgagcgcaccaagcagctgcgcgagcagatcgacccgaaggcgcagggccgcttccagggcgatgtgaacggacagagcgcgatgaaacccggcagcgatggccgcagcgccggcgaccagccggtggaacggctgggcacgccactgctgctggccgaggcaccgcaccatgtggcctggaccaccccggccagcgcggtggcctacgccgggcagaacctgcagatgacggtgcagcaggacctgcacgtcagcgccggcgagaccatcgccacggtgtccggcgagcatgtctcgctgttcgcgcagagcggtccgctgcgggtgatcgccgcgcagggcccggtcagcctgcaggcccacgacggcgagctggaactgctgagcgatcaggcgttgaccatcaccgccaccgacgaccgcatcgacgtgctggcgcagaccaaggtggtgctgcaggccggcagcagtgcgatcacgctggagggcggcaacatcaccttcagctgccccggcgagttcaaggtcaaggcgggcgaacatccgttcatggggggaggcagcaccccggccagcctgccgccgctgcccgctttcacgatcaagcctgatccgggccgtaccttcgaaagcacgttcgcctacgaccagctgcgcagcatcgccgagcagtccacaccggtcgagttcgtcatgatgatggcgccgaccttcggcttcgatgttccggcgcggacctacatgaagctgcaggacgcgctgaagaatggcagcctgcaggcgcccgaacacaaggtgatggccggcgcgccctacccggccgactacgacaacagcaagcgcatcatccgcgtgaacagcatggcggcagaccgcgcggcgacgaccatcgaggcgtcacgcgaactgctggcggtgctgctgcatgagttcgggcaccacgtcgacaacgtgctgcgcaatgatctggcggagaaggatgcgaacggcaagccgaccctcgctgcggacagcggcaaggaagaaggcactgcactcgcctatcgcctggcgttcttcgacctggaaggcacgcacgaaaccgagtatgcgcagtacacctcgcccgagttcaacggtgcgttgaaggtgaactatgcggaagtacaggctgcactgaagcaacaggggcccgtggcccaggaaaccaacaagagcgaggatgggcgctacgaggggttcagtgcgggtgatggccagaaccatgacaagcgacccaacgagtcgtttggacatcggtcgatcgaggcggtgctgggcaaggtcggcttcagcattgatgatcgagccgctatctatttcggaaactggctgcgcgactactcgcagctgctcgacccaaagattgtccgtccaccgaatctgccgaaggaccttggcaagtacatctctagatcggcgctgacgaaggttgtcgacgttctggcaggcagtgagttctataccctgcgcaggggaaactatcgcaactacggcgtcactactgaacgactgggtgtgtaccgtccaagcgagcacatagacaatccaaagaacatcaagccgtcgcctgccgatcctagaactatcgatccggattttgagccctgggtaacacccggcagcgacctgctgaagatcgaccccaatcggtcgatgaagcgttacatcgtgcgttccagtgacttcatggaatccgaactccgcaaggccatgacactcgggaagacacccgatggcatgcgtcatttcggctcggcactgcatgtactggaagattactttgcgcactccaacttctgcgagttgagcctccgaaaactgggccacaccgctgttcttccgtggaccgcgacggcgaactgcaagcattccctcccggttgttactggcatgttcggctcgactgacgtcatcgcgagccttgccgaacccatcgcgcacaaagtgttcggaattgaaagctgggagttcaaggcaagcaagcctggagaccggtctgatggtgagaagatcatgttgatcctcctctcggaacacagtgacaagcgctactacgaagcgtttgaaaaattcctcaagcttcgtgatcgcatagcgagcattccagggcatcagtatcttgagcgcgccggctggattgccagcgcgccgatgcgcctggtcctgaactcctacaacttcgtttatcaacagctgttgctattggttggcaacagcgttgacgacgcgcagaccatgttcgattccgatcccaacaagaatggctcgacagatccaagccattcccagttggccaaggatcacgacgtacatccactccacactctcgccgcgactctggctagcagtgcggttgagcaggttggcattgccatgaacaagcattggcgaggcatacccgcatccgacccagccaaggttgcagcgtcctatctcactcacccccaagacagcacttggcaagacggcctggttcgcgcgtgggcgcagaagcatcctgccaatatcaggcgagcagcatctgccaccgagctccaacacctccatgaggaacacggaaagcacgcacttgaagaaatccgccgtgttggccgctacggctcgaagagctgggactacataaccgagttctacgaagatctgtttggcgagaaaaaccaggtcaagagcaagaaatga

SEQ ID NO: 508348 - DNA, 624 bp, Stenotrophomonas maltophilia
atgatcagaagaatcctactgctttctttttttgttcttgcactgggagcctgcgacttcgggcatcctgcagccgcaggcactgacgctccgagcggggcgagccctttggctttccaggatgactacgtcaagtacaacggacagcgcctggatttcactcaggacctgtccgactggatcaacgtgcttggccccaaccatcgcaccgcgtttcccgatgaccctggcattgtggtctgggacgatctgggcatccgtgtctacaccaaccatcccaggaatcaacgtgtggtcacagcatcagtcacccttcgcggagaacccgaggattcgctgtcctacatcccaccaggcgaaggcgttcgacctcgccaggactatgcctactccgttctggtcaacggtgtccgcgtaaacaagggcactcgcgtaggcgacatcgcacacctgagcggaggacagctacgcattgattgcagtcgcggcataagcatctgtggcgcaagcaggaacgatgaaaagttcatccagatgaagatgtatttcggagtggatgaccgacggtacgacagcaccccctatgtcatcgaattcggccctggaagcaacccggcttattga

SEQ ID NO: 508349 - DNA, 522 bp, Stenotrophomonas maltophilia
gtggacctggcgttcaacgaagactacgtcgagtacaaaggacatcgcctgacgttcaagcaggatcttgccgcctgggaaaaggtacttggctccacgcaccgcaacgcgctttcggatgcctcggacatcgttgtctgggacgacctgggcatccgtgtctatacgaactacccaaaggatctgacggtccgcaccgtcaccgtcaccctgaagggcctgcctgaggacgcgctggcctacattgcgcccggtgaaggcgttcgtccgggcaaggactacacgggcactgtcgcggtcagtggcgtgaacgtggacagcaatacacgtgtcggggacatcgcgcagctgagcaatgatcggctgcgcatcgactgcaaccgtggtatcaatctctgtaccgcaagccgcagggatgcccgattcatccatgtcagcacctacttcggcgtcgatgatcgtcgttatgacagcaccccgtatgagatcgagtttggcccgggacgtgatgatgcgcgttga

SEQ ID NO: 508350 - DNA, 567 bp, Stenotrophomonas maltophilia
atgaccacgccatcgctgcccgaagcggaactgacagagctctaccctggcacactgctgaagcaactggctttcaaggacgtagacggcccgggcctgctgctgctttcgcgcagcgcacaggcattgccggcgcagggcgacgcagaaccgctggatcagatcacgctgcgtgcagagctgttccggcgcaccgatgaggcgagtccttgggtttcgcgctggagcgtcgaagatccggttcaatgcgaaggcctggatctggaggcaggctatttcctggatcaggtgacagccaccgacctggacaacgacggccgagccgagttgacgctggccagccacagcgtctgtggcggtggcattgacccgcagcagctgcgcatcgggcttcgccagggcgagcagtactacgaagtgcgtggcgaatcgctggtacacgtggaaggcgatgaacctttcggcggcgagcgtcagaacgatcctgcgctggcatcagctgcggcgccgttgcgtgcgcacatcgacagcgtgtgggaagcgatcaagcgcgggagttcgccgtga

SEQ ID NO: 508351 - DNA, 546 bp, Stenotrophomonas maltophilia
gtgaccgtgccatggtgccagcgcctgcatccgcccgtgctcctgctggtgctttcggttgccgcaaacgccgccatcgcgcgcacgccgccgcccagtccactgcaacgcgcctgcgcggccgacatcgaggaacgtatcgagctgcggttcgcggacggcaggcatgtaagcgcctgcgcacctggcgtcggcgacggctgcgcgtacggcagcgggcagaccacgctcgacgctacgcccgacctcaacaacgatggtcgcgccgacgcgatcctcacccacttcggcagcagctacggtgacatcgacgtcacccataaactggtgctggcgcagtgcccggacggaacctatgcgcgcctgctggagggacggttcaccacgctggccgcacctccggcaccgcatccggcgtggccggcgctggaggcatcgcgtgactgtccgggcggccgggaaacgattgcactgcacttcgagcgggctgccgcccgctaccgcggtccggaacacttcgatcccgacaatgcctgcacacgctga

SEQ ID NO: 508352 - DNA, 1224 bp, Stenotrophomonas maltophilia
atgatccgccccctgcgctccctgttgctggcactcagcctggttgccacggttgccacggctgcgccggcacccatggacggcgaccagctcaagcaggtcgtcctgctcagccgtcacaacctgcgcgcgccggtggtagcctccggcgcgctggccagtgcgacgcccgaggcctggccgcgctgggaggtggcaccgggcgagctgactaccaagggaggcgtgctggaggtctacatgggtcgctacatcgcccagtggctgcgccaggcgcagctgttgccggtgtcgggttgcccgcaggaggatgacttccacgcgtacgccaacagcctgcagcgcacccaggccaccgcgcagttcttcgttgccggtgccttcccgggctgccatgttgcggtcgagcaacgcatgccgctgggcacgatggacccgctgttcaatccggtgatccaccgcgatgacgcggcgttccgcgcacgtgcggcatcggcgatgcagcaggcgctgtccgcatccgatctggcaccggcactgtccgtggtggaggagatcacccgctatccgcagtcggcggcatgcaaggggtacaacgactgccatctggcgctgtccgacaccaccttcagcgcggaaccgggaaaggagccacgcgtctccggatcactggctctggccagcgggctggtcgatgccttgttgatggagcactaccagggcagtggcatcccccgcgaaggctggggccggttgaccaccgaggcgcaatggcaggcgctggcgcagatccgcaaccgctaccaggacatcctgttcggaacgcccgaggtggcgcgggatgtggccggaccgttgctggcacgcgtggatgcgttgctggaagatcccgcatcgccgaaagtgagcctgctggtcggtcacgattccaatatcggttcggtgctggcggcgttgggaatcagcgactacagcctgccgggccagtacgagaagacgccgatcggcggcctgctgcagttcgagcgctggcgtgatcgccacagcggggtggaacggatccgcctggcctacgtctacccgaccaccgcgcagctgcgcgatgcgctgccgctggccaacgcgcagccgccgggccgcgtcgcgcttcgtgtgccggggtgcgcggctcaggggtgcaccgtcgccgagttccaacgcctgctgcatccggcatcgcgctga

SEQ ID NO: 508353 - DNA, 474 bp, Stenotrophomonas maltophilia
atgactgagctccactattgcgactcttggttcgccgcgaagaagttcgcacagaacataatcagtgaaccccaagccaggttgaggcatgaaaagcgtgcctcgtacaccgttctcattggctcgccagtcaccccatcagcgtttattgaagtgctgctggacaaagaaatgattggcgtcgactttcttgatgaacatctaagggaacgcctgacctaccagttccacgaggtaaagccaggaatgctcttcctgagcatggccgtgtaccgggagttcgctgaaacgagtgacaacgttgttgaaggaaccagctatcacttcaaagaagatggtcgacttaccataatcaaggagactttctccccacatcatctggaagagtcttcaagcgtttttgaccctgccagcaactacgaaccggttccatcctttggttgttactctagtctgatctcggaagaacgatag

SEQ ID NO: 508354 - DNA, 219 bp, Stenotrophomonas maltophilia
atgctggtcgccagcacgccggcatgggccgaacccggcagcacctccctgcagatccggctgaccgtggtcgagggctgcagcggcgatggcggcaacacccgatgcacggcaccgcaccagcgcagcgacacgcccgagcttccgcagcagatccacgacctcgcgccgccggccgacagcgacgacgcggcgcctgccgtgaccgtcatctactga

SEQ ID NO: 508355 - DNA, 612 bp, Stenotrophomonas maltophilia
atgatgttcgggaacggtggggtgtcgttgctgatcggcggcctcgggcttgcagcggtgttgatcctcggcgcgcgcctggtgcgccgcgtcagcgcaggcgaccccagcgggcagcactggctgctgcgcacgctggcgctgctgtcaccggcgtgcgtcattgccagcctggcggtcagcatgatcggaccgcacctgctgcagcatcggcacggcaccagcaccacgatgggcctggtgacgagcgcactggtgctgatgttcatcggcgcgttcaccgcgccggtggcctggcgggtggcggtccagcagcgcctgcggcgctcggcagccacgttgccgttcttccatgcgtcaactgcctcgctctggctgttgtacgccctctgcgcgatgtacatgccgctggcaaaggccgccgagccggcactgctgccctggctcgaacacgagggcctgctgcagtcggtggcgctcggggtgatcaccgtgctgcacaccgcgatgaaggcagtgcttcttaccctgccggtgatggcagtgcgcgccctgctgacccgcaaccgccgcggcagcaaagctgagatcccgcgcccgtcgccgttatga

SEQ ID NO: 508356 - DNA, 513 bp, Stenotrophomonas maltophilia
atgtctttgcgccgggaaagcggcttcacgctggttgaactgatggtggcgctgatcgtgctggcagtgctggccaccattgcgtttcccagcttccagagcacgatccgctccaatcgggtcgtctctgcccacaatgaactgatcggcctgctcaaccttgcgcgcagtgatgccatacgcaacaaccgtggcggcggcgtgtgcggcagcagtgatggcacgcgctgcgacggaaagtgggacaagggcatgatggccttcagcgatacctccggcaacggcgatttcgacaatggcgaaatcgtgctgcgtttcaaccagatcaacccaggcctggtcgtggccggcccgcagacgctggtggccttcgatgcgcgcggccgtcgccgcgcggcaggcgatcaggtcattaccctgcgccccgacaagtgtggcaaggatccgatgatgagcacgatcaccatcaatgcctcgggccaggtcaacagtacgaaggggccctgcccatga

SEQ ID NO: 508357 - DNA, 477 bp, Stenotrophomonas maltophilia
atgaagcatccgtcattccatgccgcgcgccagcatgggggcttcagcctgctggaggtactcattgcgatcgtggtcctggcgtttggcctgctcggcttcgcgctgctgcagaccatgaacgtgcgctacgtgcagagtgccaattaccgcacccaggcgaccaatctggcctatgacctgaccgagcagatgcgcagcaaccgctaccagtcggcgtggtacgccaatgcgagtttcacctcggggagccggaccgccgccggggtctgtgcgccgaccaccgcggccgtcagcatcgcgcagaacatcaccgactggcagtgccgggtggtcaaggcgctcggtgacaacgccgcagccaccgtgaccgtcaacaacggtgtggcgaccgtggccatcagctgggccgatgagcgctggaacccgaaaagcccggatacgccgaccaccttcgccctgcagacccagctatga

SEQ ID NO: 508358 - DNA, 1152 bp, Stenotrophomonas maltophilia
atgaatgcatcgctttccacgtccgcccggcaggcgggtctgtcgctgatcgagttgatgatcgccatggtcatcggcctggtgctgatgctgggggtcatccagatcttcatcgcttcccagtcagcatcgcggttgtccgaaggtgttgcgcgtgcacaggaaaacggtcggttcgcgctggacttcctcgagcgtgacatccgcatggccggccatctgggctgcgtcaatgaccaggcacacgtgacgaaggggcagggagagccgcattacaatctcggcgcggtgtccggaagcggcaatccgttggatttcagcgtggcggtgcagggctatgaagcccctgataccgggcctggcacccagctggaggtaggcaagggttcgctgcctgccaacctgccgaccgcaatcgccaagctttcgccggcgccgatgccgggcagcgacatcctggtgctgcggttccttgctcccgagggtgtgccggtactggccgtgaatggttcggttctgaccgtcgatgccgcacgctggcagcgactgaccgaaggcggtgtctccgctccgaccctgtttggtgtttccagttgtgatgcggtggacatcttcaaggggacaaccgccgccggaaccatcacggccacgggggtcagcctgtcgcggcacgcaccgcagcctgcgccgacgatggtctatcgcgccgaatcactggtgtattacgtgggccagggggtgagtggtccggggcttcgccgcgcccgggcagatgccagtggcgcctacaccatcaatgaagaactggttgaaggcatcgagaacatgcagttgctgttcggcctggataccactgccagcatcgcgccgggctcatcgccggtgggcaacatcacgcgcctgcagactgcttcgacggtcaccacccagacggacgcgaccggcgccggtcagtggctgcgggtcggtcaggtgcgcgtgggcctcatcgcgcgcagcgcctcaccggcaagcgcaggcaaaccgaccgatgcggcagccaagctgggtgtgctgggggttacctacagccaggatggcgtgaccgacgggcgctaccggaccgcctacgaagtcagcatcgcgctgcgtaaccgactctacgggaattga

SEQ ID NO: 508359 - DNA, 462 bp, Stenotrophomonas maltophilia
gtgttgtacgtggcgctgatcatgctgctgctgctggcactgatcggcatcgcgggcatgcaggttgctggcatgcaggagaagatggcctccaactatcgcgcggtgaatcgctccttccagaacgcggaaggcgtggtgcgcaatgcagagcgcgcggcggaggcgatcgccaaccgcaccgatgtgccgacgggcagcgtgctggcgtcgggcgatatcagctacgactgcgaggaccgtttcgaccccgtgcagtgggggcgttcgcaggtgatcaccgccgtgccgaaagtgagcgttcgccgcatcgacaagtgcggtggcccgggtggcaacgccctggatgaggggcaggccgatgacagcgcgacgtatacctaccagataaccgcgttcgcggccgatgaccctgccaatgcaacgtcatcgtcggtgatcgataccattttcaagctttga

SEQ ID NO: 508360 - DNA, 3693 bp, Stenotrophomonas maltophilia
atggctacgcgtagattcaagtggattgcagcggcgtcggccgtagggttggccggcctgggcgtggttgcctacaacctgaccgcagcccaggcccaggggttgctggcacaggcgccgttgaacaaccaggtgcagacgccacccgcgttcatcatggcggtggacgactcggggtcgatgaccttccagacccagttccccgggcaggatggtgccggctgcgcgagcggcggcagcttcttcgatcgcaatggcaatctgaatgtgggcgtcggcacctgcagctactactacgtgctgcccggcccagtcatcagcagtggctactatgcgatcccgcagctggattcactgggatttgcccgctcgcctacctacaacccgacctacttcaatccggaggtgaagtatgagccctggatcgatggcacgggcaagccctacgatgaagccaatccgacgtcgaccctgattgatccgcgaggttcgacaagggtggcgttggctgccaactatttcagcggtacgtcgcggatcctgaccggcatggtgattccgaaggggaccacctacaacgatggccgggaccggaccgccgaacaggacataacctggagagggtcctcgaacatctacgtccagtactggccggcgaccttcttcctgccgtggacgaacgacaaggatccctacccgcagcgcgaagacaaggccggtgtgtattccggagtgagccgggtcaagatcgacaacgcctgtggcagtggctgtgcgatgtggaagtacacgatcaccgacagcaacaaggacgcgctgcagaattttgccaactggtactccttctacggcaaccgcaaccgcgcgatgatcgccggcatgacccggtcgctggcaggcgtcaacaacctgcgggtaggctatttccgcatcggtgattacaccaattacaacagtgtcaggaagccgctggcaatgcgtgacctggcgcagcccgatgccaagcttgccctgtattcggacatgattgggctcacggccaatggtggtacccccaaccgctgggccgttgacgccgctgcgctgcagttcacccgcaccgacaaggacgcgccggtgaagctggcctgccagaagaatgcggtgatgctgttcaccgacggcttcagcaacgggggaggaccgaccaccgcccagaatgccgatggcggaatgggcattccgttcagtgattccaacttcaacaccatggcggacatcgtcagccagtactacatcaatcaaggcggcaagcccccgctgcgtcccgatctgccggcgggccaggtgcctgtggtgcaggcctgcaagactggcaatcccgacaagcggctggactgccagaccaacctgcacctgaacttctatggtgtcacgctgggtgcccggggcacgctgttcaacccggacctggaccaggatccgttcaccgactccacgatctactccaggtggcccgcctcggcagacaatgaccgaagtacggtcgacgacatctggcatgccgccgtcaatactcggggcgagtacatcaatgcccgtacgccggctgagatcaccacggcaatgcgccgtgtgctgtcggcagtgaccagtggcgcgtctccttccggcggtaagggcgccagtggtgcacgcatcggtgcgggctcggtgtcggtcgaaccgacctatgagatcgccaacgaaggtacagactggttcagccgcctgacggccagcaagatttcggtggaccccaagacccgcgcagtggtctatacgccgatctgggaggccagtgcgcagcttccgaccgccgaaatgcgcaacgtctatttcaccaagagcggcgccaccagtcgtttcaacggtaccaacgtttcgctggccgacctctgcaccaagtcgaccgagctctatccgggcatgtcgcgctgcaaccaggccgaactggagaaactgggtgcaacggcggactctgccgtgaagtatctgctgggagacactgccggagagaagcgcagtggtggcaagctgcgtgatcgaaccacccgcctgggcgatatcgtcacatccagccctgttgtcagcgcgccctcggacgactacggctatcggcgcctggcgggcaacctgggcaccacctacggcgcctacctgaccagcaaggccgagcgcgcacgctacatggtctatgtcggggccaatgacggcatgctgcatggcttcgatggcggcatgaacgcgaagggcgtggttaccggcaatggcggcgccgagagctttggttacattccggcaaccgcgctggggcacatgggcaacctgctgttcccctacaacgctgccgatctcaacgaccagaagttcgatcaccgctattatgttgatggccagatcagcgtaggcgacaccttctacggcggcaactggcacaccacgctggtaggcgcctcgggtgcaggcggacgcagtgttttcgcgttggacgttactgcgggcaacaccttcagcacggccagcaagctgtgggaaatcagcgacctggacaacagcctgccggccaacgtgcgcaacaacatcgggcacgtgctgggcaagccagtgatcgtgccggtactgggtgccaacggtgtaccgacctggaaggcgatcttcggcaatggctacaacagccgcagccagaaggccgtgctgttcgtggtcgatattggtacgggaacgccgaacgtgaccatgatcgaggcggttgagacgtcgggcgcgcctgacggcaacaatggcctgggcagtatcgtggccatcgaccgctggggtggcgacaagcaggaccagcgccgtcgcgatggctatacggacacggtgtacggcaccgaccagaagggtgccgtgtggaagttcgatctgcgcagcagtgcgacgacggtaggcacgcctgtgttcaccacccgcacctacaccgacaacaaccgcaccctgcggcagccgatcaccggtggcatcacggctggtagcggcccgaatggcggtgtcatgctgttcttcggcagtggcagcttctccttcatcggtgaccaggccgatacgtcggtgcagagcctctatgcggtcaatgatctggccaacggtgcggtatcggcgacgttgaccagcgccagcctgaccgggggtcaggtggtgaccaatggtgaccagcgcacgcttgttcgtagtacgccgcccaatggcagtctgggctggtatgtggacttgcccgcaggtgagcgctttgtaggcaatccctcattgtccgatggcgtagtgttcatgccgacctatctgccgacacccggtggttctggttgttcttcgtcgggaaccaactggctgttcggtctggaagcgttgaacggcggcggggccttcgggcgcgcccggatcggctcgcccgacggcaccgcgatcggtgatggtgtcgccgcactgaaaacggtgacgaccagcaccagcggcggaccggtacgcgatgtcaaaccaggcgctctgccaagagatacgccaccagaactcgagccgggtggtggaccgccaacaccaccgcagcccgcatgcgtgtcgttcctgaagaatggcgaccagtctgtctacattccctatccgtgtggtcgccaatcgtggagacagatccagtga

SEQ ID NO: 508361 - DNA, 444 bp, Stenotrophomonas maltophilia
gtgagcaagcgtttcgtttcgcgtcccgcaaggcgatccatccagcagggcttcacgctgatcgagttgatggccgtggttgcggtcatcgcggtcctggctgccatcgcctatcccagctattccgaacacgttcgcaagtcgcatcgggccgcggtcaaggcggaaatggtcgagtacgcacagcgcgccgagcggcatcacacgcagaacaacagctacgcctcgttcaccttcagtgagacgagctcgaccaagatcaactcgcctcgtgagggcgggtcgtccatctggtatgaagtgagcattgtgccgacggcatcgacgttcaccatcaccgcggtgccccagggcgggcaggccaaggacagctgcgggacgttgagcatcaaccaggccggcgtgaagacgccggcgaacacctccagccagacctgctggtag

SEQ ID NO: 508362 - DNA, 528 bp, Stenotrophomonas maltophilia
atgcctcccatccgccgcctgcagcaatgcggtctcagcctcatcgagcttgtcgcagtcctggctgcactggcgatcctgtgctcgctggcactgccccccttggcacggcatctcgaccattggcacgccgacatggtccgcatgcgcctggtatcggtgttcaacagcgcccgcgccaccgcccttacccaccgccgaccagtaaccgtctgtcccagccaggacggcatcgagtgcagcgacgactgggtccgcggctggctgattgaaaccgagcccgcggcgttccccgcagacgtcgctgtccggcgtcaattccagccaggcacgcaggcttcgggggtacgcgcgggcatcagcagcggacgccgccggctacgattccaggccgatggccgcagcgcaggcagcacgctgaccgtccagatctgcgcaggctcccgcctgcacggtacggtggtggtgaacaatatcggccgaacccgctccacacgacagcaggtgcccgctccctgcccactctga

SEQ ID NO: 508363 - DNA, 570 bp, Stenotrophomonas maltophilia
atgctcaagcgcgtcctgttccccgttgtcgctctgctgctgtccgcactgatcgtcgtgctgggatggcagaaccaccagctccggcagatcaacgcgcagatggctgcccaactgcagaacatgcggctggaagcgcacggcctcgacctgggcagccgcccggacgcactggcgctgcgcacgacccggcacacccacgtcgatatcggcggcgcgcgcgacgtacctcagatcctgtacttcttttccaccacctgccgctactgcctggcctcgatgccgcagctgcaacagatcgcagcggcgcgcggccgcggtgaactgatcggtgtgggactgcccccttacgaccaactggccgactacgccggaaggcatgcattgcagtttccgatcgccatcgacagcgaaggcgatgcgtccaggcgctaccgcgccacggtcacgccgatgctgatggtgctggcccccgatggcagcgtgacctacaagcatgtaggccagctcgatgagcaggtggtgcgcgccgccatgaactcactggcgccagcccccgccctgccctga

SEQ ID NO: 508364 - DNA, 1116 bp, Stenotrophomonas maltophilia
atggcaaccaagcgacgccggggcgactcctggcagtacacgatcaagcgagcggggctgctaccccagccggtctacctgagcttttcctcggaggcggagggcgatgagtacgtgcgccgcctcgaggcgctgctcgaccgtggagtggtgccggaggagctggccaacaccaaggccgccgcgaaggatctacgcagccaggtcagcgagtatcggagcgctcagcacatctcggtcgatgacgagcagctgctgcccgtcctgctctctcggctgccaatcggaattaccctgccgcagctgacgtttacgtgggcgaccgagtgggtcacgaccatgaagcgtgagcagaacctcgcgccttcgaccatccggcactacgtgggtgccttgtcgcgggccttggactggctggctgcgcatggcgcgctgccaatgaatccactgcggcttctgccccggggctattcgacgtacacggctgacgacaaggtagctgtgaagcgtatcgacggggaagcgaaagctgaccaggagcgtgatcgccgtctggagcctggtgaggaagaacgcatccgcgagatcctggccggcgcaaagccgccggggcgtcagcggccgctcgatctgccacagcgcgaggcgttgataatgatgttcgacatggcgctagaaacggccatgcgcatgcgcgagatctacacgctggagcgcagccagctcgacgtggtgcagcgtacgatcttcctggacaagaccaagaacgggagcaagcgtcaggtacccatgacttcagttctgctggcgaagcttgccgcgtacgggggtgactacgaagggctgcttttcccattctggactggcgagcgtagccctctggccctgcggcgcgtgtcgagcaagctgtcgcgccagttcgaacgcatctttgtctcggcggggtgcgcggatctcggcttccacgatctgcgccacgaagcgaccagccgactgtacgaaagaacctcgctgacggacattcagattgcgaaaatcaccgggcatcgcgatccgcggcagttaaagcggtacgccaacctgcgtgcttcggacttggccgatcaactctggtga

SEQ ID NO: 508365 - DNA, 249 bp, Stenotrophomonas maltophilia
atggctgaccgcccgagcctcaacgaccgcgccgtggctgccctcgccgcagtgtctgccatggacagaaacgtaaggtccaacgaccccgagagcaccatcgtgtggcagctgaaggaccaggcctcaggcgcgctggctgatgcgttccagcgtgcccaccaccttgcctgcttggctgaaaccgtccgccgcgacatgaaggcggcggtggccgatgcccgcaaaaaggacaccagtaatggctga

SEQ ID NO: 508366 - DNA, 549 bp, Stenotrophomonas maltophilia
atgttgtttgataaaaacaaccgtggctgtgaaggttccgagatggaccttggcacccgaatcaagacagcccgaaagcatgccgggctcacccagcttcagctaggcaagctcgttggcttgagccagcagatgatccagaaacttgagtcaggcaaggccgacgcaaccgtttcccttctggacatttgcattgagaccggggtctccccccgctggctcgcacgcgacgaaggcgagatgctggattctcagcccctgatactcaatccagagatcatccgccgcacgcacgaggagttggattcgtactactcgctgcttgcaggcaaggagtttgatatcgaagccgatcccgaactcttcgtgaaggcttatgagtacctggctaaggaggcgactattgtcgcgtcgggcgaaaggttcgacttcgcgcgttggttggcacgagttcttaagggggtgagggatggagcaacaagcgaggatgctggcacagttgatcgcggagcgagcagaggcagcgccatcaaggcgtcgcaggcctag

SEQ ID NO: 508367 - DNA, 342 bp, Stenotrophomonas maltophilia
atggtcggcggcggtgtcaccgccacggctccctggtgggctgcgggcagcgtcgtagccgtgtggattctgcgcgagacctgggctgcatttctgtcgcgcaagaaggaacgcaccgagactgatgcgaacgtggatctcatcaagggtctttccgagcgtatcgggtcgctggaacagagggtctcggtccaggacgagcggctgcagcaagagatgatgatgcggctcaaggcacaggaggaggccagcgcattgcggatgcgagtcaggcagcttgaatccacgctgcgtgggctcggtgcagtcattccgcctgaagacccggtggtgtccgcatga

SEQ ID NO: 508368 - DNA, 492 bp, Stenotrophomonas maltophilia
atgatccgtgccctcatcctcgccactcttctgctgctgggcgtgattgtctggcagcgagggtcgatttctatcgcgcaccgcgcgaccgaccaggcagctgccgcccgtgacgtgatggagcgcgaacgcgatgcggcccgcgccgaggcgaatgcaacggccgccacgctggcggccgaacgtggcagcgcagccgctgcgaacgctttggccgccacatatgaaaaggaaaaggacgatgcacagaaagcctctgatcgccttatcgctgatcttcgcgctggcaaccagcgcctgcaccagcgctggcaagcgaccgtcgccactgccgagctgtccgcagccgccgctgccgccagccagcctgatggtcgagccgacgaccgaattgagagtgcgggccgagctgttggcgccgcagcccagtgcgatgcacaggtgaggggactgcaatcctttgccctgctatgcgccggaggtgggaagtga

SEQ ID NO: 508369 - DNA, 3750 bp, Stenotrophomonas maltophilia
atggctgatcggctggaagaagcaattcgggtcgtcatcgaaacgcagggccgcgaaggtgtggacgaactgcgcgcggcgttcggcgatctgggggatgtgtcggtcgagaccgctggcaaggcgacgaagctgctcgactcgctcaccgggctgaacgaggcggcggcgaaagcggatgcctttgacggcatgctgaccgagctcgcgcagttggagcagcagtttgacgataaccagaaagccgcactggcgctcagcctcagcatcggcgagatggacaagccctcccgcgaggtgctggcaacccagcgggatctgcgtaaggaaggcgagcggctgaagaaggcgctcaacgagcaatgggatgccgtcggcaaggccgatgacgagctttcttcgctcggcgtcaataccgcgaacctagctgaccatcagcagcgcctgcggatcgaagtcgcccgtagtgcggctgcgctcaccgaacaagccagggctgcagcggcagaggccgaggcgggccgacgtcgcaagcagcagatcgatgaggccgagacggccttccggaaacaggccaacaccagcagggctgcggccaagtcgctggcggagtatcgggagcgtgccgacgacgcgaccgccggcagtgccgacctggcgtcggccaccgagagcactgtcagctggttcggtaagctgaaggctgtggcggctggcgcgctcgcgtttgtcggcctgaaccgggtggtcgatggcatcaaggccatcgtgaaggaaggcagtgacgctgagcaggagctgtcgcaactggaggccgctctgcaggcgaccggccgaagcggtgagttcaccgcgcaaagcctggccgcaatgcgcaagcagctccagagcgggctcttcgacgatggacagatcagcgcggcccaggtacgcctgctgtcatacaccaatatcgtcggagagcagttcccggcagcaatgcagatcaccatcgatcaggctcagcggctgggcatgtcgctggaggggtctgccgaggtcgttggcaaggcactgcagacgccgtcgaaagcgatggaaagcctgagcaagcagggcttcacactggatgacagccagaaggcgctgatcaagagcctggaagccaccggccaggtggcaaaggcgcaggccatcatcctcgatctgttggcggaatcctatggcggcgcggccgccgccgcgaaggttggcaccatcgccggcctgtggaagacagccaccgatcgcttcaaggattggaaacaggaggtcgcagaccagggggtgctgacctacttcaaggagcagctgaacacccttctggcgacgctggatcgactggccgccgatggcagcctgtcccgctgggccaagcagaccgcccaggccatcatcaccatggccgaggcggttaaaggcacgacgcagtgggttgtggaccatgcccgcgtgatcggcttgatggctgccgcatatgcgcagttcaagatcgtgggggccctgctccagctgaacgcatggcgcgcagcactgatcgcgaccacgaatgcgcagatcgccaacaatgcagcggtcgcaagcggcagccggggtatcggtcggttcggtgcgttgctgcgcggtttgccgaaggcagtccccatcacggtggccgtgctgggattggaagcggcgatgggcggtctggatgtcctcaagaccgtggcgcaggacatctggaagcagcacgacccggcgctgaagcgtgccggtgaagcgcagcgggcctacatcagccaggtacgcgattcggcgctgcagctgcgtgaacaggcagtgtccttcgttgcgtaccgtgacgtagtcatcaagtcggccgaggaagtcgccaagctgggcgaggcggagcggcaggcatacgagaagcgtctgtccggcttggagcagtacctcacggcgcaggaaggcttcctgctgatgcagcagaaggccggcgtcgcgacggcggagcagctgcagcagctgggtctggttacacagaagttgctggaggtgtcgacgggctttgcgtcgctccggggtggcgtccagacggctgcggacgcgctcacgaatggaatcggcccggctgcccagctggtggtgcagcagttggcggggatcgacgggaacgcaaagctcgcgaagcaatcgatcggcaaggtgttcgaggggctcaacttcgcagacacggcgagcctggaggcggtcggagcggcgttgggctacatcgcctcccaaggcgccgccgcagagcgcaatgtgcgtgatgggttgctggagacgctgaagaagctgtccggtgacgagctgctccgcttccaggcttcggcccagtcggcgtttgaggctatgccgcaaggcgccaccaatgccgcagccgtgctgcagaccacgcttgttgctgcaatggagcggcttggtgtttccgcatcgcgcatgggcgtcggcttcagtgctggtggcaaagacgcgattgcggcgtttggtgctgtggccgagagcgcgatcgctaccggtgtccagatcgagaccgcattcaaggcagcgcttggcaaggtcgcgacgctggacgaagcgcgtacgttgggcgcgctgctggaatcggcagggcggcagggtaaggtcggcttcgatgcggccgcgcggtcggcggcagcgctcaacgctcgcatccgcgaaattcaggttgccatcgatccgctggccgacgaatttgccaggcttggcatccagtcccaggcgtcgctcaatgcgacgcgagacgccgccaagagcgccttcgaagcgatccgtgacggcgcggctcgcggtaaggcctctgtcgaagacgttcgtcgcgctttccgggcgtatgccgatgcaacccgtgctgcggccgcagacagtgatcagtggcgccgggacaacgtcgatagccagcttgcagtacaggagtcgatctacgacaccgaacgcagcatgcagcggctgggcgatgtgagcgacgtggcaatgcgccagctgcaggacggtgccagccgcagccgcgagcggctggaggaggtacgccagagtgcgggaggtgcggcggacgaggttgaccgggtagggagtagctccgaacgaatgggcaagcaaatggggcaggccggggccgcagcgcaaggaatggcgttcagcattggcgaggtctccgaatcggcgttgcaggcgatgcgcaagctcagcggccccaacccgcttgtgcagtttgccaatgcgctgaaccgggtcactgaccagcgcaagcagctggctgagtacaaggcagagctccaggcgacagccgaggcggaggacgaactctccaaagcagcgaaggaacggctggcagggcagttcgactacgtcggcaagggcgaaatcgcagaggttgcgcagctggaggcccaggtcatgcggcagcggctgcagctagaccaggaggccgctgccgcgctcgccgagcgccgcaagcaggctgaagctgaggcagaggcgcaggcgaaggcggacgccgctcgcatcggcagcaacggcagcaacgagcaggtcattgtcattgactggaagctgccttcgaaggaagtggtggccggcgctaccgcagccgaagtgcaacaagcacagcgcctcgcgggccttgtcgctccgttggtcctgcggcaggtgcagcaaagcagggccgtttccgtgcgaggacgtagctga

SEQ ID NO: 508370 - DNA, 417 bp, Stenotrophomonas maltophilia
atgacccgcatcgttcttgccggaatcgaactgccggctgaccttcagtggaccgatgagttcacggcctggaaggtagggcaacaggcgcgtacaagcctgacgggtgccttgatcgtccaagagtctgcgcggcaggccgggcggccgatcacgctccagacaacccgggacggtactgcctacgtcggcgtcgtcagtcttcctgttctacgggcgctgcaggccagtgagagcgaggctcgccttgcgccgctggacctggtcatgccggcccacaacagcggcgagcggtcgttccaggtgcgatggcgccgcaccgacggaccggccatcgaagtcgatcccactcgctttgctgtccccgcgcttgatgcggatctcttctccatcaccctacgcctcatgacggtctga

SEQ ID NO: 508371 - DNA, 3603 bp, Stenotrophomonas maltophilia
atgacgatccttgcaaccgatatcaagatgcgccagtcgcagcgcctcaccgacaaccccgatggcggcggccgcatggtccaggccgagattgtcgacggagccatgaacaacctgttccccgacattggtgatgaagagcggactacgggccgttcgacgctgcgcaagatgttcgtgcacgtggatacacctggcccggatgtgctgaaggatgcgatcgcggtactgatcgacccgccatccgatccgcgcgtgactgtgaccatgttcgctaccggctcctacagcgatgtgcgcttggacgcgaagaaccgggtggagagctacatcacacggggcactgaatcgcggttcatcctgctgggtgaccacttcatcggccagatgaccatccaggtctacaccaccaaggatgcgccgagcccggacatcaacgacaacctgagcctgctgacgctggccgcgtcggggcgcgatcccggggagcagtacgtgcgggtgaagaacgtgctttctcggaccacgcggacgtttaccgatgaccagggcgccttcgagcgcgatgtgctggtgatcgagctggtgaatgccctgctgctcaatttctacgggcaggaggtcattcgctactccgcaacgaagccagccacccgggtctacgagaccaacgttgtggatgcgaccagctaccacagcgtgaagcggcttaccgctgctgggaagccgggtgacctgtctgtgcagatcgactcgccctatgtgccgattgtccccacgtccaccgcagagaccgccgtgagcgatgtgctggctggcatgggtaccctgagccacattccttcggggccggccaacagcctggcgctgagtttcagcagcacgttcgcggcgggtgttgcggtcactcgcttcctcggtaccgggatggctgtcggaagcgtgaaggtgctggtgggcagcatcgagctgacggatgacggcaccggcggcctggcctctgcagcggtcacgccgtggacgggctccgtcgattaccagacgggtgcggtatcgcttgttcactccaccggcatgggcagtaccagcatcaacatcaccgcgaccccggccggcaccatccccatgcaaggcttcaccgatgagatcggggtgacccagaacaaccagggcatggtctggctggcccagttggagccgctgccggcgcctggcactgtcgtggtggactaccgcgcgctcggccgctggtatcgcctgaccgacaacggtcgtggccagctcgttggcaagcccgggcagggcagcggcaccatcaactacatgaccggctcgctggtgctgaccaccggtgcgctgcccgacctggacagcagcatcatcagtgcttggggcacatcgatcattgccgaggcccgtgcgggcgacaccaacatcaagccacccgcactgcggttcatgctgggcaatgccggtgccgcgcccgggaccgtgcgcctgacggtgcgggtgggcggcggggatgtgaacgtggtcgacaatggcgtcggtggcctgctcatcgccggacagcttcgcggctcggtcgcctatgcaacgggcgagtgcctgctgcagctggacacgctgcccgacgccaatagccaggtggcggtcaactacgactggggtgagccgctccatgccgcgccgcagccggtgccggatggaaacggcctggtgtcattcacgctgccgcaggggccggtcaagccgggctcggtgatgcttgactgggtcattaccgtcatgcgagacgcctacgatctggcttccgcgccgcagcccatgcgcgtcatcgccaaggacgacggcaacgggaacctggtggctgtctcggtgggggacactgccgccactaccgcgctgggggccatcaattacagcaccggcgcggtgagcctgcaggccggaaagttcatggttcgtcaggtgtcgtacccccagtatgagctgcgctcggggcggttgaaggtggtgggctatggccgcgtggacgtgctggcgcagttctccgcaggcacgctcgtctcagttggctggacgctggccggtgctggtacggaatcggccgaagaatcgttgccactgccgccggtgtccctgcagctgacaccgaccatcagcgacagcatcgtgcctggcagcgtcaggttcagcttccgtgaccggacctacgtggaccgcagtggcggcctgtaccactccgtcgaccctttgaccggggcgggtgtctacgccggtagcatcgactacaccgctggcgtggtgagcttgacccaatggctggccggtggcgccaacggcgtgcagatccaatctctgctgacgcgtatcggtgacccgggcgttgccaacagcttcttccgtgcgccgggctcgccgctgcggccgggtatgttcacgctgcgagccaaccgcctggacggcgagctgctgacagcgacggctgatatcaatggcggcatctcaggtgcgcagatccgcggcacggtggactgggagagtggcgtcgccaaggtgcagttcggccagttggtgccggtggctggcaacgaggggcagccgtggtttgatccggatctggttgaaggtgatcgggtctggcgccccgcgctggtgctggccggctccatctacatgggggcagtcgtctaccgctcgatcccgctgtcggaggtcgtcatcggcctgtcgtcggtgcggctcccgagcgacgggcgcgccccggctttcaagcccgggcaaaccgtcctcatccaccacactgccaagcatgtggtggcctcgccccaggcgaaccagaccgtttccttcggccgtgggcgggtggcggccatcgaggtccgggattcgctggacgcaccggtggatgcggcctggttcgcggctgatctggacgcgggcacgctgaagttcagtgatccgctgaacctggctgcctatacgctgcccatcacaatcagtgagcgcgtggaggatcggcgtttggttgtgcagccacagatcacgggcgagatcgaaatcaacactggcctgacccatgactatccggtgggcgaggcgatgatcagcaccgcgctgcgtctgggcgaggcgaatggctcgctggatctgcaggcacgggtggtgaacctgtttgaccaggcttcttggaccaacgtttggacggatctgcccatcggaagtgtggcgccgggcacctacaacgacaccgattatccgctggtggtgactaatgcggacgcgatcaccgaacgttgggctgtgcggttcacatccgcgacgcagttcgagctgattggtgagacggttggtgtgatcgcttcaggcaacacgacgtctgatcttgcgccggtgaatccacgcacagggcagccttacttccgaatgcggaaggaagggtggggcggcggttggtcgaccaacaatgtggtgcggttcaacaccgtgggcggtctggctccggtgtggatgattcgcacgacgctgccgggtacccccgagggggcaacagattcaacccgactgcaagtcgtcggcaacgtagcgggggagcaataa

SEQ ID NO: 508372 - DNA, 996 bp, Stenotrophomonas maltophilia
gtggcaactctctacatgagtaccgatctgggtgcgccgcagctttccggtcaggctgggagcttggttgctttgctggacgctgtcctagtcgatggctacggcgccggtgctgatcgcaaaaacggtgccggctggaccaaggcgttcactggtacgaacaagcgggcttaccgcaacagcgcggtttctggaactggcttctacctgcaggttgaggaccctggtgcttcagggactactgggtatgcgttcgtgagagggttctctgcgatgaccgcgtttgataccggtcttaacccaacccccacggttgcctcccgggccaacggtgtcgttgttgccaagtcgtcggtcttggatggaggctcgcgaaggtggctgatcctggccgatgagagaatcgtctatatcttcatcaatccttggcctaccgcaaactactaccatccctatttcttcggtgatttcatttcatacaaggcgggggatgccaacaactggtgcattgcatcgaatgggcttacttcgtttacgtcggctctcgatgttgatcagaccgtatttacgacgtcaaactcttacggaaatgtagatacaggtcggcctgcgctgtatctcccttcaagcgcggccagtccgtcccaggcggcccccgcctacttggtcggaggctatcgcgacggcaattacagagcgtgggggggtgccaatatctactcagctccatatcccgatccgatcagccaaggcctgttgttcagcaacgtccagatattcgagtctagtctcggcccccgaggtcagctccctggcatcatcgtgcctctgcacaaccgccccctcccagccttggtcatgcagcccgcaggacaggggatgggcagcgcgacgacgttgctacccgtcaatttcaccggtgaaatctggtcgaattctgggccgagccaagaaggtcaggtgatcttccttgaggggggtgactggtggcagtga

SEQ ID NO: 508373 - DNA, 1017 bp, Stenotrophomonas maltophilia
atgccccggccaggcccccaaggcagtcgagccgaccggtatccgagcgagggatgccgccacatcgtagatgtcgcagcggcaagagtcgggaggtgtccgcgccaagcgaagcgattggccgcgccagctcgagcaagagcccaccaccccaaaatcgcgccagctgaggcgaggccagttgcctggcgccatggcatggacaactgctgcgtagccaatcccaaagcgccccatccgatggagcacgtcatggctgccgacccgatgatctcgcgccaactcatctggcgcatagcctgctggcgcggcgcaagatcccaagccaacaccgtcgccttgcgggaaggtttggcatctcgccaggccatgtcgacggctggcgtgagccgcccggcttcaccccacccaatgcgtcccgaccgtcgaagataccccgccagcgcccaacgcattgaagctgacgcacgaatcccacggacaaccggttccgggggctcgccgccatcatcgtccacccccaggttaaggccaatccactcgccgctaagtacttttagcgggccaagattcagccctatgaactttccatccgtcgtgggcacggcctactccatcggggctggtgcaacccagtcctgtaccgctgcgttgacgttcccccggtcatcgacccccactaccaggaacttcatgtcgagcatgaggcggtcgacgcgccatgttccatcggcccgtgaacgagtggttgcaaccacatcaaaggtccgccggtcgagaatcatgattctgccgatggcaggttggttcagaatccgcaggcgtccatctggagcatccggatcgctggaaacgggagcgctgccggcaagatatccaaaaccagcccaccggctcccaacggaacatcgaacgcgggttatcgcgcgaccattcactgccaccagtcacccccctcaaggaagatcacctgaccttcttggctcggcccagaattcgaccagatttcaccggtga

SEQ ID NO: 508374 - DNA, 1026 bp, Stenotrophomonas maltophilia
gtgatcaacaccgtctctcttgtccgcctccctgatcgcacccccattgaagtgacgcggatctcgctcagctccagtcgcagcacttggggatggacgttcgatatcgagctggccgatccgcagcagctcgcattgctgaagcccaccgctgcggggcccaggcagtttgaggtcaccctcaacggctacgtttggacgggcatcatcgagagcttccagaaacaaagggagttcagtggcggtggcgtgcgcctgagtggtcgttcacgcactgcgctgctggccgcgccgtatgcgccggcccgggtgaaggccacgatggaagagcgcagcatggcgcagctggtggccgaggagctggctgataccgggttcgccagcgaatacgacactgttgactggaacgtgccggcaggtgcctggttctatgacgccagcacgccgctagacgctatcagcgcgctcgccgaggcgagcggcggtgtcgtgcagtcggaccccgccgcactcgccatgcgtgtgcgggcggcctatccggcgagtccttgggattggcgcaccacccagccggatcacgtgctacaggaggacatcgtgctgactgaaagcctgcagatgcgcagcgcgccgctgtacgacgctgtcgtggtgacgggtgagctggcaggcaagggcgtcacgtgcaaggtgcgcaagtcgggagaggaggggcgcctctacgcccagcaggtcagcagccccttgatcaccgtgccggcggcgggcgcggagcgcggcaggaacatcctgtgcgatcgcggtgagcaggcggccgtcgacctgaccgtgccgctgttcgctcagccgctcaaggctggggaggtcgggctgctgttgccgctggatttggttgaggtggtcggtgccgatggcacctggcacggccagtgcgaatcgctgcggatcgaagtgtctgccgatgaccgggctgtggtgattgagcagacagcaaccctggagaggcacttcaccgatgcggactga

SEQ ID NO: 508375 - DNA, 234 bp, Stenotrophomonas maltophilia
atgcggactgacctgtgggatcaattcggcgaactggttggcggcagcccgaggctgatcgccactgtcaccgcgcacaactccgatggcaccagcagcctgaccacctatgacggcgtgcagatgcgcgccttcggccagctccagctggccctcccctacaacgtgtgggtgcgcgcggggaggttggtcgaagcggcgcccaaccttcctctctacgaactgaccgtctag

SEQ ID NO: 508376 - DNA, 426 bp, Stenotrophomonas maltophilia
atgccatctgtgtcagtgctactgaagaatgagtcctatcattttttggtcgatgaccgggtttcgttccgactgaagaaatccgatagcaccggtttcactagaaactatccgactcaagaggcactggcgtttcacgacccgcagttgccgctgactggggtcccagctcagcatcgagttgaagtcacgtaccaactgaacgaggcagagacggacctcaatgacattgtcgttgtagctcgcgatggcgagaagatcctctggacctattccatgctgcgagacaattctgtaacctcgctgcccaccacgcaggcggctccgcaggcagagcccgatatggtcaggcccacgggcttggtgcgtgtaaagggcgccaagacccacaacgacgacaaggccggtgacgccggtgaaagctaa

SEQ ID NO: 508377 - DNA, 1092 bp, Stenotrophomonas maltophilia
atgtcctccttcaacaaagacatccttcggacagtccgccaggcccggggtaagagtcaatcgcagctggctgaggaggcgggaatttctcaggctgctatctcgaagattgaagcgggattgatcactgagcctacggatgaggttgtggaccggcttgctgaagccgtgggcttcccgcgcagcatttttttcgaagccgaccggtcgtttggcctccctatcagcctgcacggcaacgccatgtatcgccggaaggcgagcgctggcagtcgcgcgctagagaagctggaagcggatctgaatatccgcctcatgcacatacggaggttgctgggatctgttgatgtggatgcgtctctgcccttgccatcgttggaccctgatgagttcgacggtgatatcgagctcatcgcggacatggtgcgtaggacttggggtattcccaatgggcctcttttcgggttggccgattacatcgagcgagccggcatcttgatcgttgaatgcgatctgtcgtccatcggtgtcgacgggctaacgattcggacgatgggttctccaccgtgcattttcatcgatcagagcgctcctggtgatcgacagcgattcacgctggcgcatgaacttgggcacgttgtaatgcatagcgttccgtctgccacgatggaggacgaagccaatctctttgccagtgctcttctcatgccacgcagggacatacgcccttatctattggataagatcagtatcgcgaagttggcttcgttgaagccgatctggcgtgtctccatggcgtctctgctgatgcgttgccagtccatcggtgtgctggcgaccaaccaagcgcaatacctctggcgacagatgagcgcgctcggctaccgtcgcagcgaaccggatagcatcgccgttaagcgtgagcctgtgagagtgctgaaggaagtgctcgacgtgcatttgagggaactcggctacacggctgaagatctggctatgtccctgcatatccgtatggaagagctcgctgagctttatggtgtgaagccgttggaagcaccgccggctcggcggctccaggtggtcaagtaa

SEQ ID NO: 508378 - DNA, 642 bp, Stenotrophomonas maltophilia
gtgacgaacccttcgatccagcgtcggcgcatcaccccttcggtcctgtatccgggcacgccggtgctgctgatgaccacgctcaatcccgacggcagcagcaacatcagcccgctctcttcgttctgggcgctgggcaaccgggtggtgctggggctcggcacgcagggccagggctatcgcaacctgcagctgcgcaacgagtgcgtgctgaactttccctcctctgcgcaggcggcccaggtcgaggccatcgcgcctgcgaccggccgcgatccggttcccgatgccaagcaggcgatgggctacgtgcatgtgcgcgacaagttcgcgctgggcggctttaccgccgtaccgtcagcacaggtggcacccgctacgattgccgaatgcccactgcaggtggaagtcacggtgatggcgatgcacgcacccagtgatgacgatggccagcacttcgtgatcgtcgaaggccgcatccgctgcgtgcatgcgcatgaggcgatcacccatgcaggcagccagcacatcaatgtcgctcgctggaaaccgttgatctatctgttccgccactacctgggcgtgggtgaaccggtcgggcgcaacttccgcgcgcagacgccggcacacgacccggcatag

SEQ ID NO: 508379 - DNA, 621 bp, Stenotrophomonas maltophilia
atgagcaaggtgcttgtcctccactccagcctcaacggcaccgcctcgcgcagcgccggcctgatcaatcgtttcctcgccgagcgtgccgcgcagggcttcgatgacgacgtcaccgtgcgcgacctcaccgcactggacctgccggtgctggatgaggagatctttcacgcactgcgcggtgcagagaacccggggccacgtgcgcaacaggccatcgcgctgtccgatgcgctgatcggcgagctgatggacagcgacctgctgctgatcgccgcaccgatgtacaacctcaacgtaccgacgccgctgaagaactggttcgacctggtggcgcgcgcgcgcgtgaccttccgctacaccgacacctggccgcagggcctggtccagggcgtggaagcggtggtgttcagcccgcgcggcggcgtgcatgtcggccagggcaccgacacggtgacgccctacctgcaatcggtgctgggcctgatcggcatcaccgaggttgatttcgtctacgccgaaggcatggacatccgcccacatggcatcgagcagggcatggcccgcgcgcatgcacaattgaccgctttggcgcagcgcatgccattgccgaacgcttag

SEQ ID NO: 508380 - DNA, 933 bp, Stenotrophomonas maltophilia
gtggccttgtctgatctgaacggtatcgacgtgttcgtggccacggtgcaggccggcaacttcgcgcaggcggccgacgcgctgcaggtcacccgctcggcggtggccaagagcattgcgcggctggaggcgcggctcggcaccccgttgttcctgcgcaccacacgcagccagcagttgaccgaggccggggcgctctactaccagcattgcctgcgcgcgctggaggaaatccgtgcaggcgaggccgcgctcgagggcgggcgcacccaggttgccggtcgtctgcgcgtgtccctgccggtactgttcggccacctgtgcatcgcaccgatcctgcttgagctggcgcggcagcatccggcgctggcgctggatctgcagttcagcgatcgcgccgtggacctgcgcgaggagggcatcgaccttgcgatccgcattggcgcattgccggacagcagcgatctggtggcgcgaccgctgggcgaacaccgcatggcgatctgcgcctcgccggcgttcatggccgggcgcgagctgccgtacaccgtcgacgcactgcgtgggctggaggcggtggcttacagccggcgcggccaggtgatggaatggaagatgcgggtggagggcgagccgcaggtgttgaagccggatgcacgcgtgcagatggacgatctacagggcgtggctgatgcggccgtggcagggctgggcgtggcctggctgccgtactggctggtgcgcgatgccctgcagcaggggcggttgctggaagtttttccggccgcctccagtgcgatctatccgatccatgcggtgtggccgcgggtgccgcacctgccgttgaagacgcgggtagcggtggacgcattgctgcagcagttgccggcacgcctgctggaggtggaggccggacgcaccgatgggcgctga

SEQ ID NO: 508381 - DNA, 213 bp, Stenotrophomonas maltophilia
atgcaacccgccttcccgggcgggttgcatggccgtgacgaccgcgcgctatcccgccttcccgtggggaatgcggataatcgacgcgatggtgtgaagggccatgccatcagcgtagaacgcagcacggccgaccggcaatcccctgcggcagtgcagcgcgcgcaacaattcgcaggcatctatgctcggcgccattcccggatggaatga

SEQ ID NO: 508382 - DNA, 513 bp, Stenotrophomonas maltophilia
atgcacccgctttcatcgaacggcgacgccccgaccctgcacctggtatgcggcaagatcggcgccggaaaatccaccctgtcgcaccagctggcggcgcagccacgtcacatgctgatcagcgaggacgcttggctggccgcgctgtatcccgaccagatccattccatcgccgattacctgcagcgcgcggccgcgttgcgcggcgcgctgacgcagcatgtatgcgcgatcctgcaggccggcgttccggtcgtgctcgacgttccgttcaacacgcccgccgcccgcgcctggggccgcgaactgttcgagtcggccggcgttgcccatcaactgcattttctcgatgttcccgatgccatctgcaaggcgcgtctgcgcgcccgcaatgcgtgcggcgagcacccgttccaggccagcgatgaagccttcgagcagatcacccgtcacttcgtggcacctgtgccggaggagggcttcgtggtgatccgtcatatgcaggacgggtga

SEQ ID NO: 508383 - DNA, 171 bp, Stenotrophomonas maltophilia
atgaagaagtcccgttttgccgaggagcagattgcctacgcgctcaagcaggtcgagctggggatgtcggccgggacgccgctgctgtcgcgggtaatgacggtgaaggtgcccaggttgacgaagcttgtgcaagcgccgcgccgaggcgtcgcttggtcagcccggtag

SEQ ID NO: 508384 - DNA, 1176 bp, Stenotrophomonas maltophilia
atgattgatcaacatccattgggtatcgagcacgagagtgaactggatcgcctgtacgacgccatagaggcgggtgaactggacgtggtgcgctccatcgcggacgcgcagccagctttactgtggctggcccactttggctatgcaggggacgacagcgtgttgcacctggcggcggcaagcggccaggaggcggtgtgccaatggctgctggcctgggggcttccggcggacatgaacttcggcggagatgatcaccggacgccgttgatggaagcggtgtctggcggtcacgccgctgtgtgcaagctgctgctgcaggcgggtgccgatccggatggcaccgcgctgatgcgctgtcacccgctgtacgccgctgccctcgaaggacatggggatatcgtagagctgctgctgcaggccggtgccgacgtcaaccgcctgcaccggcagttgaatcagtcggcgttggatgctgcgcgcatctggggccatcccgaggtcgctgcgacgttggagcgacacgggggcagaagcgtgcgcgactaccagggtccctacgtgcagggagccggtgaatcgatcatcgtcttcgtgcacaacacggtcgggccggtgctccgaccagaattctcgccggcgtcgcgtgacccgagggcatcactgcacctgggcctgattgacggcagatccgacttcaagctgctgttcagcaccggactacatgaagccggtataccgatgatcgagctcttcctccctctgcagcgcaactggccactgccacgcacagggctgggcgacgatagcgtgtggcgtttcccgcaactgctgatgtcgcgcatggtggcacaagtgttcgcacacgggccgatcagcgaggggcacctgattgaacgcagcgatcccgagttcactgacctgccgtggccggagggggtcgatgcactgctggccgtggataggccctggaacccggaggacgagcgcgattcgatcccgccggacgagcgcgtcaacctgctggtgctggccccggtcaagtacacccgcaaaggcaggcccgatgccagcgccctggcgaacctgctagaacgtaagcgcatggccagctggcgcgtgctgtcgttgcgtcgtgaggatccacctgacggcgtggcagtcctaccgggctga

SEQ ID NO: 508385 - DNA, 621 bp, Stenotrophomonas maltophilia
atgctggcgccgcatccagtacttcggctgggggtggaagtcgtactgcgccggcacgctggcgtgcaggtctgtgccagcttcacctgtgagcgcgaactgttcgacctgctgcagcgccagcccggcgacatcgacctgctgctggtcgatctgctggcatcgcatgggcccggggaaggattgtccctgcttcgcctgctgtcacggcgctggccgctgctgccggtgctggtgctgtccgcacactgcaatgccagcacggtgaccctggcgatgcaggccggcgcgcgcggcttcctgtccaaggagacttcgccggacatgctgcgacgcgcggtcgatgtgttggtccgtggcggacgcttcgtaccgccggaactgcgcacgccgttgagtcgatcgcggatgcggcggacaccggagccgctgctcgcagcattgagccgacgtgagcgcgaagtgctccggctggtcctgcagggctgcagcaccggcgaggtcgcacggcgtttcggccgtacggccagcacgatcagtacgcagaagcggaccgcctatcgcaagctcggcatccgcagtgacggcgaactgttccgcatccggcatctgctcgaatga

SEQ ID NO: 508386 - DNA, 393 bp, Stenotrophomonas maltophilia
atgccggaagttgcgggtgcggggccttcgacggcgttcgtcgaacgcgtgtcacatcatccggcgggcacacacgaagctgcggcgatcatccgttggctggacggcctgcccgacgccgaccgtcgggtgatggagccgggaaccctgaccgtgcgccagcgccgggtcggaagcggcgccctggctcgagcgtcagcgatgcctcccgtcccgctgccggcgtcgggtgcacccggcgagagaatcaccattaccaaccaattgcctggcggcttcatcgagacgtggactttccagtgggtgtcggggagcggcggcggtggctggaagcagacagactatgagatgcatgccccggtggttgaacccgaacgcccgcaggagctttga

SEQ ID NO: 508387 - DNA, 633 bp, Stenotrophomonas maltophilia
atgttgatcgtcgaaagcgaatttttgaatggccatcttgccgcgctcagggaggagttccattcattcgccgcggcaatggaatcggcactttcggcgtgcagggacaaggtcgtcgattggaagtactccgtgggcgaggccttggagcttgttccctatgagcatcttgttcccagcgttctggagacgaaggggcgtgtgcttcgcgagccgacgcggaaggaattgaactccaagcgcctggtgaagcatgggcttgatggaggcgggttgccgatcatcgagatccgccggctggatgcggatgttgaacgctatggggagctggtgagattcatcagcggtgacatgatcgtgagctgccaccttttcgataacgagaagcaccgcaacaggttgatgtcactgaccagagtgatcaggcaaagcgatgccgtacattacgtatctgcgaacccgcctcatcaatgggcagtgagatccgaccagctgcttggcagcaggatctccagaagttcaatcatggcgacaagctggtacaagcagatggactatgacttcgtgtacggcacaacaggacggcttgatgcaatcctgatcggtgaccatacgcattggtcggccgagtaa

SEQ ID NO: 508388 - DNA, 1200 bp, Stenotrophomonas maltophilia
atgcatggcatcctgcgcgtcccgctccacaccgatgcctccatgcagatcagacgttgctccatcgtgatgttcgagccccgtgcggaagtggcgctggatcttgacctgctgctcaagggagaggccggcctgggcaccacgatgcagtggtacgcgctggccgcgcaccttgatgcgccgctcagggtggaggctggcgatgtggagctgctgggccgtatcgtgcccgacgcctgggtcgacgcggcgcacagcgacattggcgaagccgatctcgaccggttgctgcacagtggtctgctgatcagtgacgacccagcctacgctgggcaccgccagcgagaccagcgtgtacgcgatgccagctggtggccgctgtcggcgctggcccatcggctggggcgctggaacggcatcgacagcgcgcagcagatgcgcgaagagaaacttgtcacggcgcaggacctgcgacgtagattcggtcctccaccaccagccgtgatgccccccgccaccgagccgctggctctgcccctgccagaagacgagccgcgtgatctgctccttgcgaggcgcgcgacctgccgcaacttcgataccgcacgatcattgccgttgcgcatgctcgcccaggtgttcaagcggacggtgaaggcgcacgccgtggtggagcccggcgaagacatggcctttctgaagaagcatgttccttccggtggaggcctgcatccgctggaaacctatgtcatcgccgtggacgtcgatggccttgccgcaggtgtctatcactatcacgcgctggaacacaccttgcggccgctgccggtggatggcaccggtcttcgcggcagcgtgctgacgctgctggctggacaggactggttcgcggctgcgccactgcacatcatccaggttgcgcggttcccgcgaagcttctggaagtatcgcaaccatcccaaggcctatcgggcagtgctgctggatgcaggccacctgtcacagcagtggatgttgtctgccaccgaacttgggctggcggcctacgtcaccgctgccatcaatgaagtggatatcgaagccctgctgggcctggatggcatcgacgccagtccggtaatgatgtgtggattggggtggcgggcagcggaccagaccaccagcgagtttgatccactgcagcgggtctggccgggttga

SEQ ID NO: 508389 - DNA, 285 bp, Stenotrophomonas maltophilia
atgagtacttccgacaagaccctgcttacggctgcacaagccgcccaggtactgtcgctgctgcagagcgatgacggcttccgcagtgccttcgccgcttctcccagccttgcgctgcagggtctgggcattgctcccaatgccgatggctcgatgtgcgctccagtggacgcgctggccagcaaggaagcctttgccgctactgccgaggccctgaaccagcacctgcagtcctgcggcgccttcgtcctgccgcacttcttcgaagccggcgccgacagctga

SEQ ID NO: 508390 - DNA, 2469 bp, Stenotrophomonas maltophilia
atgaatggcgacaacggaacgtcgacgccgcacaaccagcaactgcgcgcgctgttgttcacggatctgtgcgactccctgctgctggttgaacgtattggtgatgtcgccgccgccgaactgttccagggacacgaccggctggtattggcgctgcagcagcgctggaacggccagttgatcgaccgttccgatggattgttcatgctgttcgagcgcccgattgatgcgctcggattcgcgctggattaccagcgtgggctgcagccgctggggcagtcgcgtgatctccggttgcaggcgcgggccgggttgcacgtgggtgaggtgattctgtggaacaacagcgctgagtccgttgcgctggggtccaaggccgtggaggtggaaggtctggcgaagccgatggcggcgcgcctcatgcagctggcacgaccgggccaactgctgttgtcggcagcggccgaatcgctggtccggcgtgcagcctcccagcttggcgagccggccgaccggttgtactggaagtcattcggccgctggcgcttccgtggtgtggcgcagccgatggaggtgatcggcgtctcggcggtcggcaaggcagcgctgcgacggccgcgtgcgagtgacaaggccaggccggatgtcccgttctggcgtcgcccgatggcgatggcggcgcaggtaacgctggtggcagcctgcgcaatgggcttgtggttgctgactcgtccacaaccggccatcgcctttgccgaacgcgactgggtggtgatcgcggagccgcgcaacctgactggcgatcctctgctgagcgagtcgatcaaccaggcgttccgcatcagcctggagcagtcgcggtatgtgaacgtgctgagtgacctgaaggtgcgcgacaccatgcagcgcatgctgatcagtcctggggccgggctggaccggggggttgccagcgaggtggcccagcgtgatggtgcacgcgcggtgctggcgccttcggtcctggaggtgcatggccgcctgcgggtggcggtcgatgtgatcgatccgtcgaccgcggccaccgtctacaccgtgcatgtcgatggcaaaggcctggactcgcttctggcatccaccgatgaagtggtggggcgtctgcgcgagcgtcttggcgaaggcggtatggagattgatcgacattcggtgaatctgccgcaggtggcgacgtccagcctggacgcgctgcgtgcttacgccgcaggcatcagggcgctggaccggcgccagaccgatgaggcgctgggctttctcgcgcaggcggtgaaggtcgacccggaatttgcgatggcccatgtggcaatcatgcgcatccactggatgcgcggtgaaagccgcatggcactggatgcccatgcgcgtgcgcaggcattgcgggcgcgactgacgccgcgcgatgcactgtacctggacggatgggcagggcaggccagcgatctgccggaggctgacatcgcccgacgctggaagctgttgaccgacctgtatcccgactaccacggtgggtatgtcaatcgggcgctggcgttgtccggaatggggcgctacgcagaagcggtgaccgtggtgcagccggcgcgggttccgcaggcatgggcccgcagccacacgctggatttctcaggacggttgaagctggctgcgggcaacaccaacggtgcggttgcggatttccgcatggccggtgatgtcggaggctggagaaccagcgccaacctggctacggcgatggccgtactcggagactggagcgctgcacgtgcccagttggtgggcgtgtcggccgatgatttcggcgcccgcatgcagcaggcagcggtgctggtcgatctcggtgagctggacaaggccgaagaggttgcccgatcactgcaggcgcagtgcaatgagccggccctttgccggctggcgtcggcctggcgcgccagcattgccggcatggcaggagagcggtcggatcccgcagcgagccgcaagcggattggagaggcgttggccgacctgcgccagcagcccagcggcaatctgcacacccggcagttcatggttctgggcctgattcgcctggctcagcgcgaaggcgtggacgtgacgccccagttgcgcttggcgcgtcgcgcgatcgacctcaggagcgacccacgctcgcgccagttgctggacatcatcgaagccacccgcgagttgcatgccgggcaggcggtcgcggccgtcgagcgcctgctgccgtgggccgacggcacggagttgtaccagttgcacgtggcgctgcgcgatgcaaggcatgcctcgggagattccgcggcggccgctgcagaagcacgctggctggccgcgcatcgcggtcgtgcctatgccgaggattccggcaattacatcctgcaggcgctcaatgtccgtgacagccgcgcaccgctgggcgcggactga

SEQ ID NO: 508391 - DNA, 327 bp, Stenotrophomonas maltophilia
atgctgatccccattcccgcgtatgtgcagcaggccgacggcagcaccgtgcaggtggtggtgctggacgcaggcgtgctcgtggcgctgcatacccttggcttccaggggcaggcacccaccttgcgtgctgaagtgggcgacgacatcggcaaagctcgtctgttcgctggcctgcgcgatctcggcgtagcgttctcggccggccgtgaatggtgcccggcggaggtgtttgcctggcttcgcgaccgcggcctgcttgaagggccgtgcctgcgcatcgcctggaccggtccgcagcagtactacgtctgcagcgacccgtga

SEQ ID NO: 508392 - DNA, 951 bp, Stenotrophomonas maltophilia
atgcgagccctgatcctgatcgcttcaccgatcgccctgcccgcagtgcaggcaaccgagcgcgtcgttcctgccgggcacgtcgtcgtgcagacagacgatgtcacgcgctttttccaggtgctggatgccaaccacggacgcccgagcgccgacgacctgcagcagggctatctggatgcgggcaccgatgcactgcgcagcttcaccaaaagccgtatcggttcgatggagcgccttgcccaggccctccgggacaaacccgcgttgttcgcaaaagcgagaacctgcgcgacagcattgccaacgatccgcacgcgtgtcaccgcggccgtcgatcagttgggcacgctgttgccgtctgcacgctttcccccggtcacgatgctggtgggccgcggcaacagcggcggcgttaccaccggagaaggtgtggtcatcggcctggaagcgctgtgcaacgcagactggatgcaggccgatgtgggtgaccgcttcgtgcacctgatcgcccatgaatatgtgcacgttcaacagcgcggcgcgagcgtcgaagtcgagcagcccaccctgctctatcagaccctgctggaaggcggcgccgagtacgtgggcgagctgatctccgggcaaccggccaacgcgcatctgcagcgctggacgcagggccgcgaatgcgccttggagcgtgagttcgcgaacgaggccgcaggcaccgatctttcgaaatggctctacaacggtcctggcgatgacgctcgccgtggagacctcggctattggatcggctaccgcattgcccgcgactacatttcgcacgcaccagacaggacgaaggccatcatcgcgttgctggacgtgcgccccgaaacagctgcgttactgctcaacgcgagcggatggcaacccgcgtgtcctgccggcgaacgcacggaaacgcagacgttgtga

SEQ ID NO: 508393 - DNA, 375 bp, Stenotrophomonas maltophilia
atgaccacaccggacttccctcgcctgcatccacatcactcgcccgccaatgccggtgagccgtcagaccaggcacctgcggccgatccgaacgccttcgtcgccaccctccatcgcatcggcaaaggagctgccgccgatggccagccctggcccgaacgtcatcagatgcccggccggcgcatggcgatgggggatgcggactgtgccgtggcgggccagcgcgtaacgttggaactgctgctggccgccgagcgtgttcggcagaacggtgcggagagcgaatacgtgggtgaccgcgtactggaagggctggccatggcctcgctggcgttgaacgcgcagatcggcatgcggatgcggccggaagggtga

SEQ ID NO: 508394 - DNA, 309 bp, Stenotrophomonas maltophilia
atgagtgtcgcaggtagacggaccttgtttctatcaagcgccagtgcactggcctggcttttcctgctcgccctttggggggcggtcactttcaatcggaacaccgacaactccctcggaatctacgagctgtccactgtgccgggtgtagaagcactcttctgggtctgcttcttcgggcagcccatgctgaccgtggtgatgttcatccggatggcgttgcggcaccgctccgcgttctgcgagatcccactcgcgatcgcggtctggggcctgttcctgtacaacctgtcgttctttcgaagttga

SEQ ID NO: 508395 - DNA, 312 bp, Stenotrophomonas maltophilia
atggaacctgtcgtgattgaaggccagcgcacgcggggaagctactttgtattgattgtcgaaacctgcgtcgactgtgtcggcgaatcacgctccgaattcgggagattcgagcgggatgatcccgtgagacctgatctcgcagggcagtatcgcgcgtttgcgaagctggctctgggtggcgggaaagtgggctcgtggcatattttcaggattggcggattcggtgccgcactgatcgtcagtggggaagtgaagtcacgccttgagtgggctggcgtgactgacgtgatcttcgagcaggtcgggtag

SEQ ID NO: 508396 - DNA, 561 bp, Stenotrophomonas maltophilia
atggcgtggctctaccgttcctgcttcaatggctgtctgcaggtgtgcgtgttcgccaccaacgacttcgatggactacagaacggagcaggtgtgatccaggcgacttccgcagcagtgatggaagacatcgaatggtatgtctacctgctgaccctgggcgactacagtccgcatgcgtttgtggacggcgcggctggcgcagcagatcgagaacgctggagcttcgccgtggagctcacctatcgctgcctttcctccggtctgtggcggctgacctaccacgacctgctggcagatctggggtttcccagcatcgatgccttctgccacaagctctcggttgtccgtccggatcagctttccggcgaggggcaggtgctgtggctggatacctacatggaagcaacggagctgtgcctggatctggtctcgcgttacctgcgttcgcagtcgagcgatgagacgacctttcatccaggattctacgatgagatcgaacggatgttctccgacgccggagtaccctggagccgtgggccggtatttcccatcggctga

SEQ ID NO: 508397 - DNA, 534 bp, Stenotrophomonas maltophilia
atgaagattctcgccatctccggcagtgtgcgccggcaatccaccaacaccgcgctgctgcgggcgttgcaggccatcgcaccgacgggcatggagctggaggtctacaccggcattggcgacctgcccgtgttctcgcccgacctcgaaggcgccgatgagccgggcagcgtcaccgacttcaaggcggcgatcacgcagagcgacggcgtgctggtgtgcagcccggagtacgtgcgcggcattcccggcgggctgaagaacgccatcgactggctggtctccggtgaccagatcgtgggccggccgatcgcgctggtgcacgcctcgcatcgtggcgaggacatgctgcaggcgctgcgcgcggtgctgtcgacggtgagtgcggcgttcaatgccggactgttcctgcgcgtgccggtgctggggctggagccgcagcaggtggcggatgtgctgcgttcgcaggcgcatcgcgccgaggccgatgcatttctggcggggtttgcggggtattgccgttcgtctttgtag

SEQ ID NO: 508398 - DNA, 2133 bp, Stenotrophomonas maltophilia
atgagcgtcttcatcatcgtcaagatcatcctgctgctcgtggcgctggtggcttggctgaactaccagtcgcggcgcaaggacaaccagaatgcgctggccgccctgcgccgtacccaggtcgtccgtgaactgcaggacgacgaagcgctggccctggagtccctccgcgtcgcccacggcctcgcgtgggaaaccggcgtgcgtcgcctgcgtggccgcttcagccgccacggcatcatcgccaacggcgtcgaaacactccacgacaccctcgggggcgtggacgtgctgctgccctacgatgcgcccttgttcctggccgaggacaacgacgccgacgttgtgctgacggagcgccaggccatcgtggtgcggctcaatgatttttccgttgtcgaaggacgcagccgcagcctgcacgacggccgcgccgacgggctcccgcctggtgccccgccactgcccgcgcccccgtcgctggccgcccagccggtcacgacactggaagagcgtgccgagaccttcgaggaagcgcagctgcggcggcggcccgcgttcggatggctgcccgctggcttctggatcgtcgcgctttcactgctgttgacggccaccatcgccgacctgggcgatgcgctgccgctggtcatgctgctggccgttgcggcggccctggccggtatcgtgtgccagctccgcccgccgctgcgcaagatccggcctggccgggtccgtcgcgtagagggcgtcctgcatcggctggagatgcccaatccaatgaatgccgcgctgcggctgcaacgcttcttcgtcggcgacagcctgcaggtacaggtcccggtgcactggcagcagtgcgggcgccttccgctgcagcagaccgtgcagctggacatcgcccaggacaccggcgacgtcatgtcgatcggcccgcactggtcgcgggtggatgaacagcgccgtttcccgccgatccgctggggcggcactctgctgctcctggtgatcgcgctgctgggggcggtgaccgcactgctggccggtgacggcgacgacctccgcctggcctggcatgggctgcagggcacccagacgcggactgacagccgtgccgacagcgtgctgcaggatcctccacagcccggtgaccgcgtgcggctcagtggagaaggccaatgcgaactcgcgttgaccccgctggccgataccggcacggaggtggtgcttccggactgcgcgcggatgcgctggggcgccaccacggtggtgctgcctgcgctggcggtgcccgacccgctgctgtcgctgtatcgcggcagtttcgtcgatgcgcagaaagacggctattcgacgatgctgcgcatgctgatgatgcagcagatcagcgatccctatcagcaggcgctgatggccgcgcgcggcgagcagcagatagtgacggcgctcggccgcatgatcgatacggtcgaagccgcctgcgcggtcggcctgcgtgactgcgcagggttgcagcagtccatcgttcgcgcgctcggtgcatcggtggaggtggacggccaggacactgcactggacgactggccgaaactggcccagcacatgcgccggctggccacggagggcgaggacggtatgtacatgaccggcagcgacctcgccgcactgcgtggaatcgcccgcgagcatgccggtgccgccatcgccacccgattggcagcgctcacaccgcagttgatcagcctgcagcgcggcggcgtggtgctggaaacccccgatgacctgcgtgacggagcgcaacacgcaccgcgggaccccgtgcgttccgacaccctgctcgatcactggcaggaggcaggggcggtggtcgcaacccctgtaccgttcgcgttgcaggggctcgtgctgtccacccggcaggacgcaggcggtctgcgcctgcgcgtggaacccggcgcctccgatgaccgcatccagcgtgcagtggccagcagcctgatgctgctgctgtcactgacgctgatcgtggtgcaggcggccctgctggcgcggggcatcctgcgcgcccgcgcccggcgacgcgcgctggacgccgacctgcagtcacgcccggcaccgggccaaccggcctga

SEQ ID NO: 508399 - DNA, 2406 bp, Stenotrophomonas maltophilia
gtgaacgtcgctggcctgcctgccgctgtggtcatggcctgcctgctgctgcctgcgactgccgccgccgctggctgtgagtcgccactgcgcatcgcgtggcctgccgaccgcgcaccgttgtcctccagtgagcagggccaggcgcgtgggctcagcgcagggtacctggcactgctggaagcacagcgtccgctgcagatgcagccgttgccgggcgttgcggtggccgagggggcattgccccacggcacccaggcactgctggggtggccacgttcacaggtgcccgtcggctgggtggccagcgcgccctacctgcagctgccgcaggtgatcgtgcggcgccgggatgcgccaccggtcatcggacttgaggcgctgcgcgggcgcaccgtggccagtcccgacccactgccgctggctgcggcgctggccgagcaggcgcccggtgcgcaactgctgccccccgcaccgatggaccacgcgctgtcgctgctgggcaccggcctggtcgacgcggtgatcgccaatctcggcgaggtcgaggccgcgttgcgccgctaccagggagacccgctggtggtcgcggcaccggcgggaatcgacgacgcgctggtgctggccaccgtgcccgcctgtgccgatgtcatccgcgggttcgaccacgccgtgtcgcagctgagtgattcgcagcgcgaggcgatccgtgcagcctggttgccggccgtgccacgcagccagtcgccatcgtcacccttgcgctggctggtaccggcctcgctgatcctgctggcgctcgcattggtatacgccttcggctattggcgcgtgcatcgtgaaagcgcgcgccgccgcgtagccgcgcaacgcctgcaggaggtaacctcgaatctgcctgccgtggtctaccaggcacgacgctccgccgcgggctattacagttttccgcagattgcaggtgacgtgcagaccttgttcgggatcagcgtggaaaccgcactgatcgaccagcagcgcctgctggcagcggtccaccctgatgatcgcaatcggctgatggacgcggtcgatgccgccgcgctggcgcgtggcccgatcgacgtcaccttccgcacgcgatcgccacagggctggcgttgggtgcgctcgcatgggcggccgctgtcctgcgatgacggcgatgtcgaatggagtggctactggatcgacgtcagcgaagcccagtcgcgcacccgcgcactggccgaagcgcgccgggaggccgagcaggcagcgcaggccaagacccacttcctggccacgatgagccacgagatccgcacgccgatgagcaccctgctgggcatgctcgaacgattggccggcagcgcgctggacccgggccagcagcaggtgctggcgacggtcggtgatgcagcgcggatgctgcggcagattctcgacgatgtgctgcacagccagcgattgcaggttgcaccgctgcagctgcggcccacggatctgggggcactcgtgcgggcggtgcagcagctgttgatgccggtggcggccagccgtggtctgtacctgcgcgccgagctggatccggcgttgcaggttggatcgcttgccgacggcctgcgcctgcgccagatcctgttcaaccttgccggcaacgcgctcaagttcaccgagcacgggggcgtggaactgcgggtgcaggtgctgcggccgttcgatggcggccagcgcctgcgcctgcaggtgagtgacagcggtgtgggcatcagtccggaacggcagcaggcggtatttgccgcctacacccaggccgaggcatccacaacgcgccgcttcggcggcagcggcctgggcctggcgatctgccgcgagctggccgagtcgatgggcgcggacctgcaactgtgcagtacgccaggcgagggcaccacggtaaggatggagctggagctggctgcctgtgcgttgcccgtggagccactgcctctgccgatcgtggcaacgcggcggctgtcaccggcccgggtactggtggccgatgaccatcccaccaacctgctcctgctggagcagcgcctgtgcgacctgggactgcaggtgcatgcctgcgaggatggacggcaggccctggaggcctggcgggcgcaatcgttcgacctggtcatcaccgactgccacatgccgcacatggacggcttcgcgctggcacgggcgatccgcgccgacccttgcccgacgcgtgcgcaggtgccaatcatcgccctcactgccagcgtgctggatcgcacccgcgaggcctgtcgtgccgccggcatcgaccacttcctggccaagccggtggaaaaccaggaactgcgcgcgctgttgaccgtgctgcttgcgccggattcagcggctcagtag

SEQ ID NO: 508400 - DNA, 318 bp, Stenotrophomonas maltophilia
atgaagctcatgcctttggtcacgacgatgctgttgagcgtggtatccgcgtctgcatctgcgttcacgcttccccagatgagtgacctttcaccgcactcgagcacgcaggcctgccagggcgcgtggaacgcgtcatcagccagccgcagttgccatgtcaaccgtattgatggacgacccggcacgcagtgctacgtcgatgtcaggtgtgtgcgcaacaacggcagccagctgaccaatcagtacacgatggaggaatggggcgtgcgcgcgcttgcgaactgcgatggcttcctgagagtgggaggctgctga

SEQ ID NO: 508401 - DNA, 3234 bp, Stenotrophomonas maltophilia
atgccggccgaggccgctcccgtacgccgactcgctcgccgctccctgcgcgtccacgcactgctgatcggcgtggtggtgctggccaccctgcaggccggattgctgttgtccaccggcacccagctgttgaacgaagagcgcagcaagatcgaataccacttccgccgactggatggaaccctgctcgaacaggaaaggttccttcgccaatggcggctgcatgatgtcggtgcgcgcggccagccggtgccggatgccagcgttgaactgcagcgcggacccttgttcgccaatttcgtgctgatcggcaacgagggcgacggcgcggcgtcccgaccgccgaccgagctgggtgatcgtttcctgcgcttctacggaacgttctggtcggcttcgcactatcccccaccacactgcctgctggtcgatggacagggcacgcgcggcctgctggcacccgtacagatgtccggtgcggatgcgagccagaacagtccgcaccacctgcgcccggcgatcgcggcaatccaccgggcaatgcgcagccagcccgccctgcagcgcggcagtatcgcctgggtcgcagtgccgtggcgcgatggacagacccgcctgctggccatcgcccatgccccacaggatgcacgcctgtggggcgagagcagcgacagctcactggcggcgctggcctgcctgctcgatccggcgcgggtcgatgactaccggcaggttctgggtgtgccggtgttccagcaactgtcgttgttcactcccgatggccgaccgctgctgggcgatgccaccgacgccagcaatgcgggaacctcctggcaggccggcatcgccggcctgaaattcctcatgcgcagtgatcgagggtggctggcggtctaccacgtcagctggcagcaggtcctgcagcatccacagggtccattgctgggggcaacggtggttgcgctgctgctggcactgggtggcacgctggtgctgcgtgcgtatcgacgttcggtcatcgagccactgcgcagcaaccatgcacgcctgctggaaagtgaagccttcagccgcaccatcctggacaacgcgccgatcgggctgtgcctgctgcgacgcaccgatgggactgtcttgctggacaacgccctggcccgcaactggctgggcgaagatcaccatgcgggaggctggtacggtccatggcggcgcagcgtgctcgccgcaggaggcaccacgctcggcgatggcctggcctacgccacaccggatggccgccatctgctggtgaaggcgacaccggcacgctatcgcggcgagccggcagtactgtgcctgttcatcgatctcagcagccagcacgaagccgagcaggtgctgcagcaggcgcggcgcgccgccgaccaggccaaccgggccaagagccagttcctggcgacgatgagccacgagatccgcaccccgctgtacggcgtgctcggcacgcttgaactgctgggcctgacgccactggatgcgaagcagcaggattacctggccacgatccagcgctcgtcctcgacgctgatgcaactgatcagcgacattcttgacgtgagcaaggccgaggccggccaactgagccttgagcccagcccattcgttccagtgcgcctgagcgaagacgcgctggattcctacgccgctgcggccgcgaacaagggattgcagttctatgcctgcatcgatgcggacataccgacttcggtgtgcggcgatgcagctcggatccgccagatactcaacaacctgatcagcaatgcactgaagttcaccgacagtggccgcgtggtcgtgcgcgtctcggcacgctgggaggaggaacgctgctggttgcaatggcaggtgaccgataccggcatcggtatcgccagcgagcaccagtcccatctgttcgaaccgttcttccaagccaacccaggcaccgatgcgatgcgtggaaccgggctgggactggccatctgcgcccacctcgcggcactgatggaaggtcaattacgcgtggtgagcgagagtggcctgggcagcagcttcagtattgaactgccgctgccaccggcgctgccagaccctctgcagtcgccccagccaaggctgcccgcaaacctgcaggtgcaggtccggggtagtgcgcgtgaactggtgcaatccctgtgcgaacgactgcagcaacgtggtgcgaccgccagcgtctaccgggaggacatcacgctacacctgccaccggcgacggtactgctcgacctggtactggacggtgaaccaccggcatggaatggcggtgcgcgcgtgctcgcctgccgtgatggaggcgcgcgcgcgcagctgatcaacggcagctggcaagtgggcctgcatcgcctcgatgccattgtggccgcactggcgactgccagcggccagccgttggcggccagcgccgaaggtcgactgccggcaacgcgccgctttggcctgcaggtcctggtggccgaggacaatccgatcaaccaggcgatcctgcgcgaccagctggaacagctgggttgccgtgccgtggtcgccagcaatggcaatgaagcattgggctactggcagcagggtgtgttcgggctggtgctgaccgatctgaacatgcccgggctggatggctacgggctgtcccgcgcacttcgggcgcgcggggccgatgtgccgatccacggcgccactgccaatgccgatcccgccgaacgacagcgctgcagggaggccggcatgcagggtgtgctggtcaagccgatcacgcttgaagcactgcaacgcctgctgagccggatcagcagcggggacgcagcagcgtcgccacctgcggacgccccggcacccagtacagcgaccgaccacgaccctccgctgcaggtacccgcgaagatgcgggcactgttcgtacagaccatgcatgccgatctggaccgcctgcgtgagaccatcgcggcagccgacgccggagacgtagcacaggtgctgcaccgcatccgcggcgcactggtcatcgttggcgcgcctgcgctggtggacagtggcctgcagatcgagcaatgcatcgcacgcggcgacgggctggccgagctggccggaccgttgaacggtttccagcgcaggctgctgcggctgttggatcttctgcccgatgccccgcccccttccctccctgacgactcgaccctgccatga

SEQ ID NO: 508402 - DNA, 717 bp, Stenotrophomonas maltophilia
atggcggggtggggccggttgcgggggccgctgcaagtccccctccggggcccggcccagccgcaggcggctgtgcgttcgggcgcttgcgaagcagtgcttcgcaagcaaagcgccctcacccatgtaagctcggtcgccgcatccatgcggctcacgcccccgccaccggacccaccctgccttcgacagttctccgcgatctgtcggaatgcatggcctgctcttggtgggtgtcgaccttggtcgacacgtagatccacgccatgcgtggatgctcttcgttcaattgtcgaaataatcgatttcaatggagattcatccacgcatggcgtggatctacctccgtcaccggaaatccgtcggggatggggcggtgtgggttggcaggaccgttggcgccatggatggcgccatcgagcccccatggatgggtttacggcgtgtcctgccaacccacaccaccccagccaacaagcaaaactcccagagccggctgttgtcgttgcctctgcaggtgcagggccgcaggccctgccgacccaccctattcctcgaccgggaagtcctcgatcggtttcagcacatcgtagtgctcgcgatgcagcttgcccttcagcttcggcagctccggcagcggtgcatccacccgcgtgtccggcaaccggtccagcaggttgcgcaccagcgtcagccgacccagccgctgatcgttga

SEQ ID NO: 508403 - DNA, 768 bp, Stenotrophomonas maltophilia
atgcgcgccctgatcctgctggcccaccccgaaccctgttccttaaacgcccaccttgccacgcaggccgccgagcagttgcggcaggatcacctgcaggtggacgtgatcgatctgtatgcgcaaggcttcgacccgttggaagccgcgcaccaccatcctcaacgcctgcagcccggccgcttcgatgcccagcgcgaacaacggcacagcgccgaacaaggccagctgcctgccgaggtgcaacgccatctgcaactgctgcaggccaccgacctgctgatcctgcagttcccgctatggtggttcgctgcaccggccgccctcaagggctggctggaccgcgtgctggtctacgggccgatgtacaacagccgccagcgccacgaacacggcgtgatgcgctgcaagcgtgcattgctgagcgtcaccaccggctcatcggcacgggcctgcgcgatcgacggccgcgagggcgatacccggctgctgctctggccgctgatgtacagcctgcgctatgttggcttcgacgtgatggaaccgcatgtggtgcacggcgtgcgttccggacttccgccagaccgtgtgcaggcgcacgacgaggcactcgccacggctgcccgcgactaccgcgaacggcttgcccggtggtcgcagtggccgaccgtgcccttcaatgacagcgaggatttcgaagaaggtgtggtgctgcgcgcggaagcacctgcgttcagccccttcatccgccatcgcgatgcgggatga

SEQ ID NO: 508404 - DNA, 258 bp, Stenotrophomonas maltophilia
atgaatatctcccgagcggagcagagaacgctgcacgtcctcgcccagggtggctgcattgcctgcagccgtgatggctcaggccgcgtgcgcggtgtcgaatgcttcaaccgtgaaggactgctgctgagcgattgcacgttggccgtcttcaggaagctgaaaaacaagcgcctgatcagttcgcacgatggccgcccctaccggatcaatcgtgccggactggtcgcggtgcgcccgcagctggacaatcgctga

SEQ ID NO: 508405 - DNA, 666 bp, Stenotrophomonas maltophilia
atggactgggttgcccaggcacgcgcattggccaccgaagcccacgcagggcaacaggacaaggccggccacccctatatcgagcatgtggcacgagtggcggcggcgatccgcgacgatgacatggccaaggccgcagcgtggctgcacgatgtggtcgaggactgtccggacttcgctgaccggatgcaggcgtttccaccgccgatccgcgacacggtcaacctgctcagccgccacagcgcgcaggatgcaacccactattacgcacgcatccgtgaacatccactggccttgaaagtgaagctggccgatatcgcggacaacgcccatccaaggcgcctgcggcagctggcccccgcgctggccgaacgcctgcgcggcaagtacagcatggccctcgctgcactgggccagcgtcaatcgttgtcggatgcggggagcggagccacgccgcagcagcgcctgcagcacctgatggaggcggcctgctcgctggagcagtgtgttggcggacctggatccaccacgggcacccgcgacacgtcactgtccgcacaccacgcggccctgatcagggttcgcgacatcgtgctcgccgagctggaaacgcagatggaacccgtcgcgttcgccatctggagcgacatgcatatccgggcctga

SEQ ID NO: 508406 - DNA, 270 bp, Stenotrophomonas maltophilia
atgctccaccaccccgcccctgcctgccacgatgccgttgccctgcaggcgggtgtactcggcggggtactcggcgtggcgctgttcaaggcgatcgccctgtcggtactgaccaacggctcgttgatggcgacgggattgtggctgctggcctgcgccctgctgggcgcctgggcgctggccgcctacctcgcgtgcctcgcgctgagccgccgcgtcttcgtgctgatgctggcactgtgcacggtgctggtggtctgcatcgcctga

SEQ ID NO: 508407 - DNA, 1524 bp, Stenotrophomonas maltophilia
atggtgtacgacgtcgtgattgccggcgctggcccggtcggtctgttcctgtcctgcgaactggccctggctgggtgttcggtcgcggtgctggagcaggccgaggtgcccgaatcaccgctgaagcggctgccctttggactgcgcggtttgaacgcgcccacgctggaagcgctggaccggcgcggtctgctggacgcggtcgccgccagccaggtgctgaaaccggacaagggcgcaccgccgcccggcacggctcactggctggcgcagccgcggccgctgggtggccatttcgctggcatcccgttcgcgctggacaacgtggacatcgagcgttggcgctggcgactgccaacgccggtgggggtgcagatggcgattgagctgcaggcgctggaggcggtgttggccgagcgggcaagcgggttgggcgtacgcatcgaccgcggttgtgcagtgcaggcggtgacagcggaggaggcgcaggttgcggtgcagaccggacgcggcagggtatacggccgctggctggtcggttgcgatggtgcccgcagcaccgtgcgcaagcagtcgggcttcagcttcgctggcaccgagccggagttcaccggccattcgctgcgggtcgagctggcagatccgtcggtgctcacgccggggcgccagtacaccgcgcacggcatgtgcaatttcaatccaccggatgtgctggcgctggccgatttcgacggtggtgctggtcatcggaccgtgctcgaccaggatgccgcgcaggcgttgctgcgtcgggtctccggccgcgatgcaacgatcaccgcgctgcatctggccaccacctggaccgatgccgcacgccaggccacggcctatcgcaacggccgcgtgctgttggccggtgacgccgcgcacatgcactcgcccttgggcgggcaggggttgaacctcggtatcggtgacgcaatgaacctcggctggaagctggccgccgtggtgcggggtgatgctgatgaggcactgctggacagttatcaggccgaacgccatccgatcggcgccagggtgctggactggtcacgcgcgcaggttgcgctgatgcgcccggggactggcgcgcgcgcgctggcgacggtgatggccgatctggccgacacccgtgatggtgcgacctatctggccgaacgggtctggggcgttgcccagcagctcgatctgggcgatggccatccgttggtcggtcgcagcgcgccggacgtcctgctggccgatggccgccgcccaggggaggtgctgagggcagggcagggcgcgctgctggtgttcgaggcaggggctccgttgctgcaggctgttgaatgcttgccgcaacgccctccctgcatcatgtcggagcaggagggcgtgctggggctgggcgcggttcttgtccgcccggatggcatcgtcgcctgggcctgcgacgcgggcggtgatcaggcggggctgccccaggcgttgcagcgctggttcgggatggccgcctga

SEQ ID NO: 508408 - DNA, 645 bp, Stenotrophomonas maltophilia
atgaccccgcctccgggccgccgcgagcagcgcaaggccgagacccgccaattgatttcggacgtcgccaccgaactgatcatccggcacggcttcgaagccgtgtccatgtccgggattgccgaggccgccggggtctcgcgcaagacggtcttcaactatttcgccagcaaggaggacctggtgttcgaccgcgacgaggaagcgcgggcgctgctgcgcgagggcatggcggcgcgcagcggcctgactccactggccgccttccagtcacttgtccgcgaactgctggaccgtggccatcccctgctgcggatcaatgccggcgcggccgccttctgggccaccgtggccggcagcccggtgctggtcgcgcatgcacgccgattgcaggcccagctgaccgatgacctcgcacagttgatggcggtctccgcaggccgggacaccaatgacgcagaagcccgactggccgcggccatgctgatggcatcaatggtggccgcctatgagaagggactggccagccagctgcagggcgaggatccgcgcgaggccatggtgcaggtgatcgtgcgtggtgccaccggcgtgctggcggccctcgccggcaccccctacacggacccgcacgcacgtccatag

SEQ ID NO: 508409 - DNA, 423 bp, Stenotrophomonas maltophilia
atgctgctgcggctgttcggcgcattgttcctgctgctgcccggcattgcgctggtggcttcaacgtatcggcacacgagtgcagcggcgaccgctgccgtattcctgttcgtcgccgtgcatgccgccctgcatggactggcagcatggcgagcggcaacctcacgcccaacgccaccgctgctgcgcgttctggatggtcatgccgccggggcaatgattgccagtgcactgccgatcgccatcggtgcaggcatgacgaaactgccggttgcaacgttcttctggttgttggccggcgcggcgagtcaactctgcggtgcacggctggcaagccaccgcctgcgcaatgcgctgctggttctcggtagtggcctgcagttcatcgccgcagcactgctcgcccttcctgccgcaagctga

SEQ ID NO: 508410 - DNA, 1191 bp, Stenotrophomonas maltophilia
atgagcgccgtaccgcgcaagcgccgtcgtgcgctcatcattgctgtcgccctgctgtgcagcgcgctgattctgtttgcctggcttcggcccgcaccgccaccacaactgcaggttgcaccggtcgttcgcggcaacatcgaacaggtggtggaggccactggcacgctgaagccctcgcgactggtaagcgtgggtgcacaggtttctggccgcatcgacaccctgcatgtaaagctgggcgacaaggtgagggccggcgatcccatcgccgatatcgactcgcggacccagcgcaatgcactgctgagcgcccgggccgcacagcgcaccgcgcgtgccaaccgcgatgcattggccaccgacctgcgccagctcgagctgacactgcatcgacaacggcagctggtcgcgtcgcagctcgtggcacgcgccgacgtggatgcggccaaggccagggtcgatgccacccgggaacagatcgccgcgctggaaggtgagatcgtgcagcggcagaccgaggtggatatcgcgcagaccaacctcgagtacacccgtatcaccgcccccaccgacggcaccgtgctggccgtggtggcgcgccaggggcagaccgtgaacgcggtacagagcgcaccgaccatcgtgatgctgggaaaccaggacgtgatgacggtatacgcggagatttccgaggcagatgtcgtgcatacctccattggccaggaagcgttcttcaccattcttggcgatgcaggacgtcgctacagcagtacgctgcgcgacattgcaccggctcccgaatcgatcaccaacgaagacacctccggcttcgctccggcaggtgcttcggcgggcgccagtcgcaccgccatgtactacaacggccagttcgacgtagacaacgccgatggtcgcctgcgcagctacatgacggcgcaggtacgcatcgtgctggggcgcgccaagggcgtgctgaccattccctcggccgcgctgggtgcgcgcgccaccgatggcagttacagcgtgcaggtgcgcggcgcggatggccacccggccctgcggcgcatcaccaccgggctggacgaccagatcaacgtggaagtgcgcagtggcctgcaggagggcgagcaggtggtactggcgcagaccggcgatgctgccgccacagccgccgcgcagccatga

SEQ ID NO: 508411 - DNA, 1968 bp, Stenotrophomonas maltophilia
atgatggacgtgacgcaggacgcaccactgctgcgcgtgcgcggcatccgccgtgaattcgcagccggcgaacagaccctggtcgtgctcgacggcatcgacctggatatccgcgccggtgagctggtggccatcgtcggccaatccggctcgggcaaatccacgctgatgaacattctgggctgcctggaccggccctcggccggcgcgtatcagatcaccggtcgcgagaccgcgcagatgtcaccggacgaactggccgaactgcgccgtgagcactttggcttcatcttccagcgctaccacctgctgaccgacctgaccgcgctgggcaacgtggaagttccggcgatctatgcggggatgccggctgccacgcgccacgcccgcgcggccgagctgctggcgcggcttggcctgggcgagcgcctgcagcacctgcctggcgaactgtcaggcggccagcagcagcgtgtttcgattgcgcgcgcactgatgaacggcggcgcggtgatcttcgccgatgagccgacgggcgcactggatacacattcaggccaggaggtgatgaagatcctgggcgagttgcatgccgagggccacaccgtggtgctggtcacccacgacatggccgtggccgaacatgcacagcgcatcatcgaaatccgcgatggccgcattgtcgatgatcgtgccacgggcaggctcctgctggcaggagcgccagcgacggccctgccgcagcgcagcgaaggcagtggctggcaggccatgcgcgaccgcttcggcgaagccttccgcatggccctgcgcgcgatgaacgcgcaccgcatgcgtaccttcctgaccatgctcggcatcatcatcggcattgcatcggtggtggcggtggtggcgctgggcaccggcgcacggcaggccatcctgtccaacatctcctcgctgggcacaaacaccatcgagatctatccgggctccggcttcggcgacgtgcacgccgcacaggtggaaaccctgacgcccggcgacagcatggcgctggccgggcagccgctcgtggacagcgccacgcccggcgtcgccagcagcggcactacccagcgcggcaaccgctcggccaacgtgcagatgcagggcgtgagtgagcagtacttccgcgtgcacggcttgaagctgggcgaaggcgccttcttcggcccacctgccgtggcaggctaccagcaggtggtggtgatcgatgccaatacgcgtgcacggttcttcgcagcacaggaagacccgatcggccagaccctgctgctgggcaacgtgccggtacgcgtggtgggcgtggtgaagaaggacgccggcgccgtcggcgacgcctcactgctgcgggtgtggctgccctacaccaccaccatggcgcgcatgctggggcagagccatgtgtccagcatcaccgtgcgcgtctccgatgcaatcagcatggaagtggccgagcgggccatcgggcgattgctcgcacgccgccacggcagcaccgatttctacatgagcaacaacgcccagatccggcaatccatcgaacagaccaccggcatccttaccatgatgatcagctccatcgccgccatcgcgctggtggtgggtggaatcggggtgatgaacatcatgctggtgtcggtgaccgagcgcacacgcgagatcggcgtgcgcatggcggtgggcgcgcgacccagcgacatcctgcagcagttcctgatcgaatcggtgctggtgtgcctgctcggcggaatgctcggtatcggcgtagccctggcgctgggcgccgcgttggagctggccaacgtgggtttcagcctggtgttctctgccagttcgattctggccgccttcgcctgttccagcctcatcggcattggtttcggcttcctgccagcgcggcgcgccgcccagttggatccggtggaggcgctggttcaatag

SEQ ID NO: 508412 - DNA, 378 bp, Stenotrophomonas maltophilia
atgaccaggaccacattgttgattgcactctgtgttgccccgttgcttgccgcagccgcaccggccgaccctggacagggctatatcgattccacgttcaccgcgatggacgccaacaaggatgggcacgtcgacaaggccgagtacgcgagattccagcaggaacgtttcagcagacaggccgattcgatcgacgtcgcattcaaggaaatggatgccgacaaagacggaaagatcagcaggaaggaagccgcggtggtgccggaaatcgcgaagtatttcgcgggactggatactgatggcgatggctatctgtcgctgaaggagatgcagcaggcaatggtggccgcacagacggcagatgctccgacaaggtag

SEQ ID NO: 508413 - DNA, 456 bp, Stenotrophomonas maltophilia
atgacccggacgtccacgcgtgtactgctcggcctctgcctgatcccggccgcagccttcgcccaatccgaccgccaggtggccgaggacatggttacccgcgctgccaatgtctgccccggccacagcaacgagcgcaccacgcctacagtgaaaaaggtgccggtcggcgcactgcgggtcatgctcgatcgtgggctggtgatgtgcccggaccgccggctggatgcctctgcacccgcggtgttctacggccgcattggtgtatttggttggaatccggaggtgccggctgctgcgacggtggttgtcgccaagatcgatcagatgacccgcaaggatgaatacccggtggaaacgctggtgtgggatgccgagggcgcggccctcacccagcagacggttccggcgttcgagccgcgccccggtgcggcggtgctgtacaaggtgcgctga

SEQ ID NO: 508414 - DNA, 957 bp, Stenotrophomonas maltophilia
atgtccgtcgagcccaacaaacccattgttcttgtctttttggctgctggagtgcagggcagtgccgtagtccgcgccgcactggcacgtggcttctcggtgcgcgcgctggtgcgcgataaatctcgcatctcaggaattcccttgccagatgtcgaatggattgaggcggacctggatagcgttgacgctatgcgagcggccagcgctggaatccgtcacgcagtgcttcaggtcccaactggtccggcagacgcgatggtgaagcatgcgcggaatgcggcagttgccctgtgtaacgcagagttgcagtcgatggtgcttaagctcgccagtgccagtcgaccagtaccctgcacggagcctagctttgtcggcaactcacgtgtcgaaggtactttaagagatgccgggctggcctttgcaaccgtgcggcccaccatgtatctggacaatctgctgaagccatctgcgctaagagagatcatccaggaaggcgtctttgcaccgccgattccggcgtcacagcggatcgcttggacttcagcggacgattgcgcgcgtgcagcgatcactcttctggagcggggcgcgaccggcgacttccgtatcgcgggcatgcaaagcatggatggcgccgaactcgcagcgagcattcaagcaggtctgggcttgcccgtccgctaccgggcgcagcccattgaagcgttcgagcgcgatgttgacagcgctatgggcgtgggcatgggggcacgcataggttcgaagtttcgctactttgcgagctatcccgaagaggctgacgcaatcctggcccagcctttcaagccttatccggagctgcaaggcttcgagccctttttggtgcagagatgggttcgcatgaatcggcagtcttttctgcagaacccctcgggcactatcgacaccgccacacacggccgttgctcgccttga

SEQ ID NO: 508415 - DNA, 1269 bp, Stenotrophomonas maltophilia
atgaccgccccactccgcacccttgccttgacgtgcgccgttgctgtcgctctggctgcctgcaagaagccggaacagcagatgcccccgccgccggaggtgggcgtcatcgacgccaagccgcagaccctgccgctgcagcgcgagctggtcggccgcctctcgccgttccgcagcgccgacgtccgcgcacgcgtacccggcgtgctgctcaagcgcgtctaccaggaaggctcgcaggtcaagcagggccagaccctgttcctgatcgacccggcgccgctgcgtgcctcgctcaacgcctccgaggcacagctggcctcggcccgcgcgacctacgccaatgccaaggtcgccgccgaccgcgcacgttcgctggccccgcagcagttcgtctccaaggccgacctggacaatgccgaatcggccgagcgcaccgcgctggccgcggtcaagcaggccgaagcatcggtgacctcctcgcgcatcaacctgggctataccgaagtgaccgcaccgatcagcggcgtggccaacaagcagcaggtcaccgaaggtgcgctggtcggccagggcgatgtgaccctgctgaccaccgttgaccagctcgacccgctgtacgtcaacttctcgctgagcgtggacgagctgacccagctgcgcgcgcagcaggccaagggcgcgctggcgctgtccggcgacggcaaggccacggtcaacgtcaagctggccgacggcaccacgtacagcgagccgggcacgctggacttctcctcgaccacggtcgacccggccaccggcgcggtgtcgctgcgtgcgctgctgccgaacccgcagcagatcctgctgcccggcgccttcgtcagcttccaggccaacctcggcgagcgcaacaacgcctacctggtgccgcagcaggcgctgctgcgcgacaccaccggcggctacgtgatggtggtcggcgccgacggcaaggtcgtgcgcaagaacgtgaagaccgatggcgcgcagaacggcaactggctggtcagcgacggcctggctgccggtgacaaggtgatcgtggccggcgtgcagaaggtcaaggaaggtgcaccggcagtggccaagccgtggaccccggggcaggacgccaacggcaagcctgccgcaggcggcgccgctccggcgggcgcagcaccggccgcaggcaaggcaccggccgacgcggccaagcccgagcaggccgatgcggccaagccggccgccaccgattcgaacaagcagtaa

SEQ ID NO: 508416 - DNA, 795 bp, Stenotrophomonas maltophilia
ttgctctatgacaaagcactgacgatccaatttcttcagaagaatgtggaaataattatggcgaaaccctccatagaacattggcaaaccgagattgtcagattctctctgatgacgaaagagccattcagcgagaagattgaagaatggtggaaagctctgaccggctctcctcccgaagaagtcacgacccgtccgattgccggcttcaagtcagtgtcctcgatgattgatgactacgtcctcgagctcagaactcaatttaatcgtgtggatattattgccagccccaatccaagcattagcaaggagcttctgagcttgggagcggcagaaacatcgaacgaaatgatttgcagaagagttgcagagtgggttgaacacagcgctcatttgccaatcattcgcttagcattcttgccaacctttttccgccccgtagaaaatacggagtacgcaaactccataatctcaagctaccttggaattccagaagaatgcctcagagaagccaaggatttagcactccaagctaatttccaaaaaaaatcagcggccgttgaaaatacggttatcaacaggattgcgaagttttcctcaccaattgctcaaataatgtcgatcggcgatggaattcctgtaccacaaatccacgagcgccatctctgcagagcagagatcgatataaacacggacgtagatcgtacggatggattcacacctagagagcaagctgtagtcctgagagagcttattacttcagccgaaactctgatcagcaagggatggctatga

SEQ ID NO: 508417 - DNA, 678 bp, Stenotrophomonas maltophilia
atgattctgtatgaggaatcggaaaacggtaaattctcaaaaattgatttagcatattttttacccgaaatctcaagagtgcggtccaatcaagcctacaccgaggagatttcggtaaagtcttcgcctggacacttcctcgttcagatcaagacattttcaagtggccctactgaaaacaaacagttcaaatcagctgaccaacacttgaagctttctgcaccagagtacatcggatctcgcgcatatgatcagtggcccgagcatgccccgcacaagagagataaactcagccctcaaattccatttttttcttcagtagcggaacgtcgatcacacccatcagaattcccatctcgggcaacagagcaatcgattgcattagtgatcgaaacaatctccaagctggagcgaggcggggccggaaggcaagcttcattctttgcagtatttatcgtagaacagagctttcgtcggcgaaattacgaccatgttaatgagcttttgcattccgcaaacccgttgaaattgacggagtggtcgctaatagcacttctgcgctcttctttttcggcaagaagacatctccctgcttgggatgcattacttgagagcacacattcaaaattcagccacgaagggaagaacgtagagaaacttctgcgcggactgatctaa

SEQ ID NO: 508418 - DNA, 717 bp, Stenotrophomonas maltophilia
atggaacagaacagctattttgaattattagggaagatagaagaagaatttccaactgagattggccttgcgattgtcattgctggcgagaacatcacacgcaaccaaggccaacggcacacgggatttgtttgcaagggagccgatgggaggttatggctatttcatcaaggatggcataacaggtgtcgccacgaagagctcagcccgggctatgcgcttgtcgttgatgactttcttgatgagttttcagccacagcaatcacttcattcttagcgaatgtaattcaagccagtcaagggaatatcccctattctccgaactgggatcattcaaagacttacctagaagcgggctctggacgctacgtcgcaacgagcggcggggacggattgacatgcgcaacatttgttctcgaatcgctaaaacgttatggttttgacctagtcaacgccgagtcatggccaattcgcgaacaggacaagatctggaaaacccaggcccttcaggctctagagcgccaccttaccatcgacgattttgcgattcagttggagaaagttgcaactctaccgcgctgcaggcctgaagaggctgctgcggcagcgagtgcatttagagggaaacctctagattacgagacaattgccccaatctccgaccaaattctcgccgaattgcaccacatggggcttgactcaagtccctcggcataa

SEQ ID NO: 508419 - DNA, 240 bp, Stenotrophomonas maltophilia
atgaacgcccggatccgtcgcaacctcaccgcacccgcggccgctgctgtttcgaccctgatcgtgctggcctggttggccgcgcccagcctccccgactccgctgacagtgcgcaggacgcgaccgcccctccggcagggaacgccgatccctcccccccctctcccccgcgtcggctgcacagctccctgtccatgccgtatttctcgttcgcacagccgctgaccccacggagctga

SEQ ID NO: 508420 - DNA, 981 bp, Stenotrophomonas maltophilia
atgtcgacgtgcatgacacgtcactactggcctcgccttcctgttaacgccccaggcgttggcctggtcgagtgctgctcgcactgggttgccaccgcaattagggccgccgcgttatgggtctacccccgtgtcgccatccggctctacgtggcgtcggatgtggagaacgttcgggatctggccagccgtattgaaggttcccacggcgtcgccggctcgctacgcagcgccagcacgatgaacgttctcggggaggggctcgctcccgccgacttccgtcaaaccagtctcgtagtcagtagccttccaggcgatatgttacgacgctacaacgttcaaaaatgcagtaagctcttgctcaaccgccggatcagcgcacaggaaaaacacggcctcgtggtggtaggcctccgtgagcgtggagtggatgctgattcctgcggcttagggggttctcacaaacacgtcgtgctggcgctgcatgcccgcttggtcagcctgatcctgaagcgcgcgcttagccaccgccgtccgctcagagacatgctccattgcaggggttccgaccccgcatgcggtgtagaagaccttgcccttgaacgtggtgcgccagacacaaacactcccaccatcgctcagggactgcatgttaagaacaaggctgctgatcatcggaattcatgggaaaggtgggccgcagctctccaaacgacgccatccgcttgggcggctgagacacgcggggagggggccagccctagcagcacccccatggaccgtgggcgacctgccggcccaatcgtggcggtcatcgtccaatgggtgtacctgttccatcacacgtctcgcgggatgggagctccagcaagggagcgctcgatctgtctgggggccgccaccggtattaaggccagcccgggcctcgtccacgctgaacgcaaagaggcttgcgccttcgatcggtgggcctcacagtga

SEQ ID NO: 508421 - DNA, 306 bp, Stenotrophomonas maltophilia
ttgtgtgatcaagacctggtttggttccagccgggcaagccagcccggtttggactcaccgaggtgggtaagtcgcagctgatggagatgttgaaggcgtgttgtagcggggccgtcgatgagccgcttgccaaggtcaagtcgatgcgacccaacagcgtggagttctcggctggaatggcttacttcgacgaattcgaatgcaatctgcgcctgggcgttcgacctgaaattctcccgaatcgtttggccttcctcgcttggctgatcaaagagcagcctagcgcgcccatcgccccaaagtag

SEQ ID NO: 508422 - DNA, 1446 bp, Stenotrophomonas maltophilia
atgctcgccgtcgcccaagccattctctacgtccgtgacaaggaaggatcggaggcagtggcagaagccgcggtggcacgctcggaggctatctctctcgcaaggcgcgtcgcggccgaacaagcgtctcgcatagggctgcctcgctgctcggccgccgacattgactcgctgaaagagattgcgtttcgctccagctatatgagcgacatcggtcgcatccaagacggacgccttgtctgcagcgccctttgggggcgctcgcgcccctacagcctccccgctccacgcttctccagcggaggtgtccggatttggcatgcatcggatctcgttggctccccctacaccgggtccaatctgatcgcccaaggcgacacgttcaccgtgtcttctccgtctgccttcgagagcttggaccctgcgcgcagcagctccatcagcatcgaaacgaaggaccgatcatttgcattccggaccttgtccccgaccagccgcgtcggcaacccctctgtcgtccaagctcagcattgcagccatgtggctgacgtctgcgccttcgtcaccagccctaggcacgtggtgtccgagctgccctcggcgttgctcaccaccatcttggcagccggggcgacgatggggctgttgctggcgttcctgctgatcaaacaccgaatcacggcacggcaaaccatccagcaacggctggtgcttgcgctgaagcgcagcgagatcgaactggcctaccagcccctgcgtcggattggcacgcgggagctcgtgggatttgaagcgctcagccgctggcgcccgccgggagacgatgaaatcccgccggccatcttcgtgcccatcgcccaccgcctcggcctgagtcctgatctttttcgatacgtcctggcccgtgccatgaatgacctcgcccccgctttgcgggagcacaggaacctctacgtgagcatcaatgccgagcctgtggacatggcccaagagtgcatcgttcgctacatcagcagcgttaccaccgattttggcgtgctccccgaacaaattcgcatcgagatcaccgaacgggaagaactcgtgtctgccaccgccaagagcaacatgcaggccctctcggttctgggataccggttcttgatcgacgacttcgggacgggcagcgcgaatttctcccacctcgcccaatcgccgtttcgaggaatcaagatcgatcgcatgttcgtggccgctatcaacgaggactcccccctgcggcccgtgttgccagggatgtatcgcatcgcacgtgagcttgggctggatgtcatcgcagaaggcgtcgaaacagaagagcaagatttgctgctctaccggatcgcgccggacgccatcggccagggatggcattacggccggcctctctcaacaaaagacgctctggccgccatccaggttgggtag

SEQ ID NO: 508423 - DNA, 243 bp, Stenotrophomonas maltophilia
atgctgcgagccgttgcctaccgaagcgttgccgacccgggaattgattccacccgcctcgatcagatcgtgcgcggtgcacaacgcttcaaccggctaggcggcgtgacaggagcgatgctcttcgatggagcccgctttctccaatacgtggagggaccaaacgatggcatagaaggcgccattggacgcatcagggccagcgatgaccacaccaacctccatgtgcttgggaatcgctga

SEQ ID NO: 508424 - DNA, 213 bp, Stenotrophomonas maltophilia
atgggtgggcatacctacgttgtcaccatcaccagtccgaccgatgaagtcttccactacttggcgacggtagacggtgtggacgtcaaggtgcgggagaggggtgtgatccgcaataagggcgacgcgatgcagctagccttggccgccgtcgaacggcacatcgcagacctgtctcacaagatcgcccacgattcgactacggcaagttga

SEQ ID NO: 508425 - DNA, 741 bp, Stenotrophomonas maltophilia
atggggcggcgcggtgaccgtggccccggccacggtgcgcctggcaggagatgccttcaccgtggggctgtctgggcttcctgcgcgggcctgcgtgccgttcgtctccgccatcgcaggcgacgcgaacgtgcgggacgtgatcgtgggcaacaccagtgttttgttgggcaacggcggaaccctagacatccccggcttgggattggcgtgcggggccgatggggccgtggtcgatgtcgtttattactcaggccttgtggccggctcgtcggtggccgtggtgcccacgcttcccctgccctccacgcccgccgtccctggcccttcaacgccgacaccggctggccccgtatccaccgctcccagcgtgcccgatgcagtgccgggcgttcctgggagcgtgtcgccaagccctggggttgctccttccccggcggttccgccgcttcctgttgcgcccagcgttgcggtgcctcagccgctcccaacgccggtccccaccccggctccgccggccttggtgccgtgccggcaatcggaaagctcggcggcccgggcgagctgtccggcgggcacgtggggcacagagacggtgcgcacgcgccaggtctgcgctcccggcgacgtggatccaaactcagacgccgcgtggaagcatcccgaggcgtgggttcaagcccagacggtggcggccgtgacgacgagggattgccaggcctgcccggggaccacccgtga

SEQ ID NO: 508426 - DNA, 306 bp, Stenotrophomonas maltophilia
atgagccctcgttggccaccttctgaactcgtgcgcctcgcctgggctgcgcgccgggatcttcttgccaggcagcacctgcttcaggcgttccaagagggggccgatttccattcccctctgtccagtagcgatctgaacaatgacctgttcgccgtcgccggggattgcgtcgcgggcgtggtggttcgggagctgacgggcgtcaaggacgccgaagagtggttgcacgcgtttcttcgcgcgcacgacttgcatcaagcgctggcacccgcagtgggaatcgctgccaaacggcgcttctga

SEQ ID NO: 508427 - DNA, 894 bp, Stenotrophomonas maltophilia
atgtctgatctcatcccgggcatgcacctccccgagttcctggctcgccgcgaccaggtgttgggcggctaccaacgcgccttcgaggcgttgctggacgccaacgagcaggccaagcaggcggggcttgatgacttctcgacgctggaaggctacagcgcaggcgaggggcggttgtgggagcgcgtctgccaggccttgggggccgtcaatcgccggtattccaaggaagcggagcccgaaccgctccagatcctcatggagcgcatcaccccagccgtggacgctgcttgttggacccagttgatgaccctctccggtctgtggtccttcatcgacagcaagcggcgggttgaatggaacgaagcgattcgcctgggggctggtttgcgcgacacgggcaaggcgaccgcgccacccccaacgctcacggcagaaaacgtggcggccacgtttcagtctatccacgccgagcgggggcagatgctcaacgagggcttgctggcactcttccgggggttgtcgtgggactacaaatccaacctgcccgtgtgcttggccccgaagttgattcttaaggggcacttcgaggcgcaggaccgtttcagcacgagctggtatcccgatatcaggagttccaaccaattggacgatctgattcgggcactttgccaggccgacggcaagcccgagccagattcgcggagcggctcaaggcgatttgcaggcgctcaagacatgacgggcgccccctgggaaccgtatttcgagttgcgtcgcttcaagaacggcaacgcccacgtcatcttccacaagcacgccatgggcctggtggacaagctcaatgcccggatctcggaactgatgcccggggcgctgccggcgccccggtag

SEQ ID NO: 508428 - DNA, 366 bp, Stenotrophomonas maltophilia
atgacgaacgcaacgccgatgttccccctggcccccgagcaccgggatttgggcattgttggcttggcccaggccggcacgcccgctcgcaccatcgccgctgcggtggaagtggagctgctcaccgatgcggggaccgagccgatcctgccgccacgcacgttccgcatcgaaaacatcgagtgggacaccgagggcgagttggcggagcagctcccgagcgaaggaacaatcaccgtccccggctgggaacacggtgagttgtctgaccccaacggcgccgaatatcaagcgttgagcgatttcagcgacctgcacggccactgcatccagggcagcaaggtcacggaggtgttccatgtctga

SEQ ID NO: 508429 - DNA, 204 bp, Stenotrophomonas maltophilia
atgcatggcgcgtatggccgccactggatcatcgaatcgaccgcgagcaagagggaagatatccttctgcaggacatcggattgcgtgtctgggccgagtcgatggccatgaaggccaatcgcgccacccagcaggacgctgcatccgacgacacgccgatctccaaagggttcctagtgatgcacgagacgggcaactgctga

SEQ ID NO: 508430 - DNA, 144 bp, Stenotrophomonas maltophilia
atggctttgttaagtgtccccacaccccacttcaagggggaggactttctgttgctgacgcaacccaggacatccaaccgtctctcagacgttagcagcccggcttatcacgcggacaagccgggcctcggcatcatttcttga

SEQ ID NO: 508431 - DNA, 813 bp, Stenotrophomonas maltophilia
atgacgctgacctgcaacggccggctggcgcaggtggaggatctgctgcctgcactggtcaactatggccacttcacctcgctgcaggtgcgcggccacgccgtgcagggactggacctgcatctggcgcggctgtcgcaggccacgcgcgaactgttcggcagcgaactggatgtggcgcaggtgcagggctggatggcgcaggcgctgcaacaggccggcctggccgatgcctcgctgcgggtgacggtgtactcgcgccgcttcgatttccgtaatccgctggcgacggtaccggtggacgttcttgtggccgtgtctgcaccggtggcgctggtcgcgccaaagcgggtgcgtagcgtggtgtggcagcgcgagctgccgcagatcaagcacgtcggtacgtttggactgtttgccgagcgtcgcgcggcgatgggcgggggctttgacgatgccttgctggtcggcagcgacgactgcatcagcgaaggcacgacctggaatctggccgtgcacgacggtcaccagttgctctggccgcgcgcccccgctctgcggggtaccgccgagagtctgctgaagcagcactggcccggcccgcaggtcacccggcccctcccgcgggcggccctggccggtgtgaaggcggccttcgcctgcaacgccagcggcctatgggcgctggaggccattgacgagcatgtcctgcccggctcggaggcgctggctgaacagggcagggcagtgctggcggcggtggcttgggacggcttggggtcagatcccttttgcgtcgcaaaagggatctga

SEQ ID NO: 508432 - DNA, 435 bp, Stenotrophomonas maltophilia
atgaacaagatgatcgtggtagcggcgctggtgctggcgctggccgcatgcaaggacgacacgtccgtatcgcagaaggccggcagtgccatcagtggcacggcggccgatttcgtcgccggcctgggcgaaggcgtggacaagcgcatgaacgtgacgctgcaggccgatcctggcctggccgcacatggcctgaccgtgaccctgggcaagagccgcggcatgggttccaaggaagcggcggtgtatgtggtggccgacaaggccttcaagggcaagctggtggcgcgcgcgctggacgcagagggcaccgagatcggccgcgcagcggccgaggtggagttcgccgcagacgacgcgcgctacgtgaccttccagttcaacgaggaaatggacagccagctggtgcgcacctacgcggtggtggcgcgctga

SEQ ID NO: 508433 - DNA, 5595 bp, Stenotrophomonas maltophilia
atggaagccatgaagacgcacgcgcgaagctgtcgatgcctgatcgggctgatttttctggggatgttcagtgcttcgggcgcagctgcgcaggatgcccagcccggcaagtatccctgggaggagttcgacaaacgtttgcggagcagcatggacgttgccaggttgtcggacgatttgctgggagacagcgtaggtctttcaaatggcgccttgtcattctcggcgaccgaggtatcgctggaaagtcatcacgcgttaccagtgagcctgaaacgcaagtacgtgatgaagaatcgctatcagtacgagaacgatgcgcttcttgctgactgggacctggacttgcccagcatcagtggcgttttctcaacagactgggtcatggggcacgccgcagcgtcgcccggtgcgcgctgcagtgtcagcacggtgtcccaggcgcagccatccattccattcagcgggtcgatggatgtcagtgacgtatggtccggaaactcgatgaacattccgggcgtgagcagcggggaaatgctgctgatcaacggggcaacggccaggcctgcccaaggaggcccgtactactggatgaccaacgaccaggtcttcgttggctgcctgcctgccattcgcaacggcaccggcgagggatttctggcggtcgggccagacggcacccgctattggttcgactggatggcccagtacgtcgagccgcagatcaagaatccgttgaatggtacaaagcggctggatcgtaggctcaatgtgctgtacgccacgcgtgttgaagatcggttcggcaatagcgtggcgtacaactatgccaacgcagccaatgctcccgctcgactgcaatccatcgttgccagtgacgggcgtcagatcagtttttcctataatccacgaggtcagatcgagaccgcaaccacgaatggccggacttggcgctatctgtatcgaagcgacggcaaggtctcgctgtcggcggtcatccaacctgatggaagccagtggaagatcgacttctcgggcctctccaatgccgcgtactacgccacgctgcctattccaaatgagccagtccgcagttgcttcatggacggaactccgctcgtggggccgcagttggcaactggccgtatcgagcatccttccggggccgtagggacatttactgtcgccatccgcgagcatggccggagcaacgtcccgatatcctgcaagaatttcacgacagggataggtggaaacgacaccggtgatgatgtcaaccagtgggcgattgcgtacaaggcctacacgctgatcgagaagtccatcagcggaccggccatttctccgatggcctggaagtacagctacagttccgcaatcagttccattttttacccgggtggaacgatggatcggccatgcccattgacgggtggagtggtgtgtggcgaaccgatctgcacgagtgacagctgtgcgggtcgcgcaacgacggtggtggaggggcccggcgctgagtggacccgctacacccacggaaacagcttcaagtatgacgaaggaaagctcttgcgtattgagcgtggcaagggcggcgatatcctgcaggttgtcgagaacacttacgcgctctctcctgcaggccggccgtatcccgcgcgttttggtgtcagcgcgcaggataccggcgacaactttccccgcgaggcgatccagccagagctgtcaaccgtcacgcgcctggacggggtggtctacacccgtcgcacgaacagctttgacagcctggctcgaccactgagcgtctcccggttcagtagtcagggagacgcccgtacggatgtgactgagtatggcgacaaccttggcctctgggtgttgggtcaggtggcgcacgtttccagctcggatacggcgtccgtgatcactcgcaccacctacgacggtcgggcacttccgatcgaactccacagccacgggcgccttctgcagcgctacagctacaatccggatggctcactctcgagtattgccgatgcgaacaatcacatcacccatctggcgaactggaagcgcggcgttgcgcagacgctgaagttcgcagatggcacgacactggttcgtggcgtggatgacaatggcttcgtcacgtcggtcacagacgagatcggtgccgcaaccgggtatgaatatgacccgatggggcgcatctcgcgcatacgctatccagcgggcgacacggtggcatgggcggatactgttcgcagtttcagcaaaagcagtgcagatgagtatggggtcgctgcaggccattggcgtcaggatgtttcgaccggaaatgcacgcaagcgcgtctactacgatgcattctggcggccgctgctgacccaggagtttgatgcggcgtcgcctgctgaaacccagcgattcgtgagagccagctacgatctacaggggcgccttgagttccagtcatatccgtcggcatcggccaatgcctccacgggcacttggacgacgtacgacggcctggggcgagtggcatctgtttcgcaggacagcgagtctggtttgctgacgactacgaccagttatcttgctggtggactggtaaaggtgattgatccgaaaggtcgggtgactacgactgcataccaggcctttgatcagcccagtcagacgcagccgatcgccattgcacatcccgggggggtgttctccgagattgtccgtgacgtttttggcaagccactttccatcaagcggcgaaacgcgtcttctactgaagcgctgacgcgcacctatgtctacgacggtcaccagcagctttgcaagtcgattgaaccggaaactggcagtaccgcgatgggatatgaccctgcgggaaatctgctgtggacggcatccgggctcgcattgcccaacgtcgcctcctgtgatgctgccgcagccttgtcgtcttcgcgccgcgtggaccggacgtacgatgcgcggaaccgtctagcgacactgcgttttcccgaccggaatggtgatcaggactggctctatcatgccgatggcaagcccgcgcaggtgaccactctgaatgacgggggcggggccgtagcggtgaacggctatacctacaacaagcgtcggcttcttaccggtgagtcgctgcaggagtcggccggacccgccctttcgctggggtatggctacgacagcaacggtaacagggccggaattgcctatccgagcgggatgttcgtcggccttgccccaaatgcgctcgggcaggcaacccaggccggcccttacgcgactgcagtgagttattaccctaatggagcgattcgccgattcacttacggtaatggcgtcgtgcacagcatgcagcagaacgcccgccagctgccggcgcaggttgttgacggcaacggagtgctcgactattcgtatctttatgatggcgctggaaacgtcgtcaccatcctcgatggcgtcgacagccttcgtgatcgtcggatggagtatgaccagcttgatcgccttcagcaggcgacctctgcgatgtttggcggcaatggtgtcatgcgctacacctatgacgcactggataaccttcgtagcagcagcctcgccggagtgagggaccaccagtactggtacgacgcatccaatcggctgaccaatgtacaggcgacgggtggttccacgattattggcttggactatgacccgcaaggaaaccttaggaatcgaaacggcgttgttcacacgttcgatgtcggcaatcggctgcgaaaggtggccggggctgagtcgtatcgctatgacgcatacgggcgacgagttttgtcgtctgccgagaatgaggatcgccggattttctcgctgtatggcgaggatggcttgctgcggcgacagaacaatgagcggacgggtgaaatctctgaatatgtctacctgggcagcagtctcgtagcgaaggtcgttgggcatgttgcaccgggcgttccgtcgctgtcggttccgccttcgtcggagacggggagcttcagcgtaagctggggggaagtcggtcgcgcggcgcgctacgagcttcgtgagcagcgagacagtggcggctggaccacggtgtattcgggggctggtagagcctgggcggcgagcaatcgttcggccggtatctacggatactcggtgcgcgcgtgctcgtcgaatgcgtgtggtgcctggagcagtgttggcgcgatcaacgttcaggctgagccggttgatgttcccattgtcacagtgccggccacgagctattcaggaagctacgtcgtgacctggagcacagtcgccggcgccagtcgctatgagctgcaggcatccactggaggtgcgtgggcgaccctcctctccgccaatgtcgcgaatcatcccgttagtgggcagcccgccggctccgtgcagtaccgcgtgcgcggttgcaacgggcgtggatgtgcagcttactcggctcccgcttccatccaggtcatcctcaagccggcggccgcgccgacattgtcgttgccggccagcaacagctccggtgcgtatgtggtttcctggagccaggtggcaggggcagcccgctatgccctggagcaacgctccggtacaagtgaatggacgcagatcgcgaacgccgccaggacttcgcaggatgttgcggggcgccccagcggtgaggatggctatcgcgtccgtgcctgcaatgatgccgggtgttccagctattccgccgtcgcgaccacccgtgtcctgcgcatccctgccgtggcgcctgtaatgagtggcaactccgcgcagtatggcagtccggtcgttgttggctggagcgccgtgcccgatggtgcgagctatgcgttggaagagcaggcgccgggtagagtctgggcccaggtgcagaactccagcgcgatcgccgcaacgcttcccgaacgttcgacagggacgtacggctatcgcgtgcgagcctgcaatgccagtggttgcggaccgttgtcctcggcgctgcttgtcgccgtgctgcgggcgccgtctgcacctggtctgtccatcgattcgtcaaacgttggaagcggtcaagggttcagggtctactggggagccgttgccactgcgagttcctatcggctggaggagcaatttgcagcagggcagtggacgcaggttctggactcggccgagacccagttcgctgcgggtgctcgcggcgcgggtggctacggctaccgtgcccgtgcatgtaatgccgccgggtgcagcgggtactccgctgtggctaccttcacgctggtcctgcgcccggtgcctgatgtgccggggaacctcaacgtcgccgaaatgcggagttcctgtgaaatggcctggggagcttccgcacgcgctgagcggtatgaactgagcaatgacggtggcgtggtttaccagggggccaatacgtccttctcacaggcaaatccgcgtcgatgcgtttcaccgtatcgcgtccgtgcctgcaacagtactggctgttctgagtggtcgctacctgtctatcatggtggaggggctatgctgttgcggagccgatga

SEQ ID NO: 508434 - DNA, 288 bp, Stenotrophomonas maltophilia
atgagcaggttcgggggaactgcaggcggtgtgtcgacccgcttcaggagaattgaaaatcgaattcggaagctgggggcattgggcgtctggctgtgctgcgtgctgctcattggccttggcctgtcgccagccgcaatggcacagacgacagtcacgtacatccacacggacgccttgggctcggttgtcgccgagagcgatgccaacggcaatgtgatcaagcgctacgactacgagcccgacggggctctggtgggtgatcaggtcacggacgggccggggtaa

SEQ ID NO: 508435 - DNA, 441 bp, Stenotrophomonas maltophilia
atgacgcccaaagaacaggtcgagagaatactcgaagacatgctgaagttcgccagaaagatgcttgtagagcatggagagtttcacccatttggagtttaccttgcctctactggagatatggtgcatacgggcgtcaagatgaatggtggaggcgccgcaggtcggatgaggctgcttcagttggcgctgcaggagtggaaggattgtgcgatcgcatacggcatagcttccaatgtatggttgccgcagaatgatgattctggtctcgatgcggttaaagtgttcttggagcatcgggatgggtattgtgcggaagtgttctgcccgtatgacctttccaagagtgatccgctgatagttgcggaaatttttgctcaagaaggcgatgcagtcttcttctcccgctcgcccgctgacgacgagaggtgttcagcttga

SEQ ID NO: 508436 - DNA, 267 bp, Stenotrophomonas maltophilia
atgctcggctgcttcaaccaaccaggctcagtagccctgccagtctatctgcgcccctgctccaagatagcgatcctgccaagcctgttcccggcccagggaatcgatgaacgcttcttcagaaagtggctcatatccaagctcgatttccatcttgttctctggatccagatgaaacgtcaaactcgtccagagtgcatggtgccattgcgaaaagagctgatgcatctccagaagcgctgcttccgcagcatctggaagctctag

SEQ ID NO: 508437 - DNA, 501 bp, Stenotrophomonas maltophilia
atgcaccgtctcatgatgtcgctcgccctcgtgcttgccgccatgcctttcaccgcatccagccaggaaacgcccaccatgatcgaactccacgtgcgctgcatcgacaatgctccctgccatttcctcggcgaggacatccgcgtggaactggaactgcgcaatgccggcagcgaggacgtgcaggtgccggccgagttctaccgccggcgcgggcccagcgtgaagctggtggaccgccattccggcaaggaaacgtcgctggccatcaacccgcccgatgcgcgcctgttgaagtcaccgcagacgctgcggccggggcagtccttccggttcccatggcgcatcctgccgtcggaaatcagcggtttcgccctgcgcccgatcgatgtgtcggcggtgttcagcgtcaacctgacccccggtgtgcgcggcgggcaggcccgcatcgtcagcagcgagctgcacatcaccgacccggccggcagcacgtcgcgctga

SEQ ID NO: 508438 - DNA, 1107 bp, Stenotrophomonas maltophilia
atgacgatgtcacggatgctgatcgtggtaggtgacgccctgcagacgggcggttcggtgcttacgggttcaccgcacaccgatatcgaaggccgtgcagtggcacgggttggcgaccgggtgatctgcagtcgccacgggccgggctccatcgtgtccggcgacagcactctggtcatcgacggccagccggtggcccgcgatggcgacaaggccagctgtggctgcacgctgatggccggcaagcagcagcgggcgcatgtggcgggcggtggtggaggcagcggcggcggcgcggcgatggctgcggtggcctcggcggccaagatgctgctgaagaagccgcagctgcagacgccaggcttcgcgcctccgggtacccaggcaccgcagtgctgggtgaaggatcattccacccaggtgtcgcagtcgccggacggacgctacttcgaaggctatgcgcctgatggcgcccggtacgagtatgagctccacgccagcttccgcgtcgacgtgccgctcaagagcggcggcgacatcgtagtgaccagccgcttccgggtgacgaccaaagggcgcgtcagtgccgcccaggtggcagaggcgaagcagcgcctgcgcgacggtatcaagcggcactggaacaaccagttcaccatcaccgtggccgatccccagtgcggcacgcggaccttccccgtgcgttatgacattgatttcgtcgacagcgggcaggactattcggtgctgctgcacgatgtctacgaacgtgagatggtcagcgacagcgtcctctatgcgtcggtggacacgacgccgtggacctatgcgcatgagtacgggcactgcctggggctgccggacgaatacgatgatgcggccgtggcaaacgatggcatcgtgaagttcttccttcccagcggtacgttggacaccgaagaggtgcatgcgccggaattccgcgaagacagcgacccgctggcgaccatcatgtccagcgtggactgcagcgtgacccggccgcgccactgttacaacatcggacgcgaggtacaggaactgctgacccgcgagatcgcccgggagatcacatgcaccgtctcatga

SEQ ID NO: 508439 - DNA, 921 bp, Stenotrophomonas maltophilia
atgagccttgccctgctctgccccgggcaaggcgcgcaacatgcggcgatgttcgatcgcgtgcgcgaccttgccggcgcgcggccgctgctcgatgccacgggcgaactgctgggccgcgatgtattcgccgccgcggcggccgacgaccgtttcgacaatgtgcaggcccagcccttgctgtgcgcggccagcctggcgcattggcagggtctgcgcgacgtcttgccaacgccgacggtgatcgcgggctacagcatcggtgagctcgccgcgcatgccatcgccggcagcttcgatgccaccacctgcctggccctgtccgcgcagcgcgcgcgcctgatggatgccgcaaccccggaagatgccgggctccaggcagtcctgggactggaccgcattgccacgcagcgcttgtgcgatacgcatggcgccttcatcgcgatcgccaatggccacgaccacttcatcgtgggtggtgcatggcggtcgctgcacgcgttggcggcagacgcgcaggcgtgcggcgcagaaatccgcccattgccggtccatgtccccgcgcacacgccgttgctggccagcgcagtggcaccgtttgccgccgcactggaagcagcgcagatgcaggcgccgcggctgcccctgctggccggcgtcgatgcccgcccggtgcgggatcgcgctgcagtggggcacacgctgtcggcgcaactggcacagaccatcgaatgggcgcaggtgatgcgccaggccttcgagcgtggcgcgcgggtgttcctgcagctgggcccgggcaatgcactggcgcgcatggtcgcgccggcctatccgtgctgcgaggtgcgcgcggtggaagagttccagagccttgaaggcgccgcgggctgggtccgcagtgcgctggaacggctgcagtaa

SEQ ID NO: 508440 - DNA, 915 bp, Stenotrophomonas maltophilia
atgagcacgatcactttcagcagccgcagcggccaggacatcacgctggcagcggtgcttgagctgccgccgggctttgacgagcaccagcaataccccgcggtggttgttgcgcatccgggaggcggcgtgaaggaacagacggccggcctgtatgcacgcaagcttgccgcgcagggactcgtggccatcgccttcgatgcctcctaccagggcgaaagcaccggcatgccgcggcagctggagaacccgtacatccgcaccgaggacatcagcgcggtgatcgattacctgaccacgctgccatatgtcgacaacgcgcgtatcggaggcatgggcatctgcgcgggcggaggctacaccgccaacgccgcgatcaatgatcgtcgcctgaaagcgatcgccacggtcagcgcggtcaacattggttcgatgttccgcaatgggtgggacaactcgctgactgatgcagcagcgattcccgcattgcagggtggctctgatgcacgaacggcagaggccggcggtgccgataccgtgaggattccgttggccccgatgcgccgcgaggatgcgcccaaccaggagctggaagaggcgtgggagtactatcacacgtcgcgttgcgcgcaccccaatgctccgggtttcgccaccgcacgcagcctcaaccagatcatcacctacgacgcctacaacaaggccgaggccttcctgacccagccgctgctgtgcatcgccggcagcatggccggcagcaagtggatgagtgacgatctgttcgcgcgtgcggccagccaggacaagcgcttccacatcgtggagggggccaatcacatgtcgttgtatgacgtgccacagttcgtggacgaagcggtggcgcagctggtgccgttcttcaacgacgtactgtag

SEQ ID NO: 508441 - DNA, 438 bp, Stenotrophomonas maltophilia
atgaccgtgcgtcccattgccaccgccgtgctgctcgttgggctgcttgccggctgcgctacccccgcatcaaagaccgtcgccgacccgccgcgtcatccttccattgcggccggcatgagtccggtgcctgccttcaccggtggcggggcgggttggagcatcgagatcgcttccaccggccagggcaaccacgatgccagcctcagcgctgacggccgcacccacaagggcagtctgcgctatctcggccagccggccgatgcgccgagttcgctgatcgtgctcaacggcgagcttggcaggcagccggccattgtcgagatcaagcgcgagtcgtgccgcaatgccgagggtgtggacaccatggccagtgtgcaggtgacgatggaaggacaaccgcagcgtcgtggctgcggccacctggccgtgtactga

SEQ ID NO: 508442 - DNA, 933 bp, Stenotrophomonas maltophilia
atggaactgcggcacctgcgctacttcgtcatgaccgcccagctgcagagcttcacccgcgcagccgaggcgctgcacattgcccagccgccgcttgggcagcagatccgcgcattggaggaggagatcggtacgccgctgttccatcgccaggggcgcggcgtcgtgctcagcgatgctggccgcgtgttctggtcagcggcagtcgacatcctcgcccgtgtcgaccgcgccaaggaggatgcgttgcgcgccgcgcatggtgaggccggcatcctgaccttgggcctgaccgaatcggcctcgttcaatgaagcagtgaccacactgctgcgcaggttcaagcaggcgcatcccgccgtgcagctgcagctggtcgaagatggcagtgaatcgctggtccggcggttggatgacggcgaactggacgcggcgatcatgcgtccaccgtactcgcatcctggcgaactggtgatccagcagctcagtgccgagcccctggtggcggtactccccgccgaccacccgttggccggccgcgggagcatcgcgttggccgagctgcgcgacgagcgcttcattcttttctcgcggaaatcaggctatggcctgagtgcagacgtggtcgcggcctgccgcagccagggcttcacgcccaccatccagcaggaagcgccgcaggtcgcctccgccatcaatctcgccgccgccggattgggcatcgccatcgtgccggcctcgatgcagaacctgcaccggcccggcctcgccttcgtggcgctgcagctggggatgccgaccacaacgctgcagctggccgtgcgcagccagcatcccgcactggcagccgcgctccttcgctgcgcaggtggcaccgggcaagcgcagccatgtcctgacgaccccgccagcaaagatcggcccggcgcttga

SEQ ID NO: 508443 - DNA, 921 bp, Stenotrophomonas maltophilia
atgtcgacgggcaccctttccgaacgcgccgacgcggtgcggcgcttcaaccgcttctacacgcggcagatcggcgtgctgcaggaatcactgctgcgcagcggcctgtccctcaccgaagtccgcatcctgtacgaactggcccaccatgcaccgctgtcgccctcggacctgtgccgcgagctgggcctggacgctggctacgtgagccgggtaaccgccaggttcgagcggcagggctacctccgaaaggagcgctcggccgaggacgcgcgcgtggtcgttctgaccctgacggcgctggggcagagcgtgttcgcgccgctggaagagacctcgcggcaggagatgatcgatctgctggcggcgctgcccgacatggcgcaggtgaaactgcttgcggccatgggccagatcgaaagcgtgctgggcgacagctcgccctcgtacctgctgcgtgacccgcggccgggcgacatggggctggtggtctcgcggcaggccgcgctgtacgcccgcgaattcggctggaacgcggagtacgaagcactggtatcggaaatcgtcgccaagtacctgcgcgagctggacccggcgcgcgaacgctgctggattgccgagaaggacggcgacatggtcggctcggtgttcgtggtccggcaggacgacaccaccgccaagctgcgcctgctctatgtggatgccactgcgcgcggcatgggcatcggtgcacgcctggtcgaggagtgcatcgcgtttgcgacgtccgccggctacacgcggatgacgctctggaccaacagcgtgctggccgatgcccggcgcctgtacgaacgtgcgggtttccggctggtgcaggaagccccccaccacagctttggccatgacctgctcggccaggtctgggaacgggcgctctga

SEQ ID NO: 508444 - DNA, 558 bp, Stenotrophomonas maltophilia
atgcgggatctggaagtggaagcgcgactacgcacgctggagcaacgggcagcccgatggcgctggctgctggtggcagcgcccgtgctgatgatgtcgatcgtgctggccggtcgcggttttgccaggccggaggccggcattgttccggagatccgcacccagcgcctgatcgtgcttgatcaggaagggcgcaagcgggtggagatcggcgaggacgcgccggacctgcatatcaagcgcaatgcgcgggtggcggggttgattatcttcgatggcaatgaacaggaacgcggcggcatggtcaccgccgacgatggcagcgccacggttgccctggatgccccgcgtggcgttggctatcgcgtgtcagatcgggccggaatgaaagtgggcgcggacggctcggcgctcatcggagtcctgtccaacgccgggggctttgccgccaggctggtcgcgcagggggcggaaggacagctggagctgagccgcgtggattccgccgaaggcggagcatccacccgtgtggtccacgtggaggctgatggcaggtga

SEQ ID NO: 508445 - DNA, 570 bp, Stenotrophomonas maltophilia
atgcatgagcaggatatagccctacgcttggaacgcctggaacacgggctgcgccgcaggaatctgctggctgcctcgatgttcgcgctgggcgcatcgttggccctgatcggaaccagcgtggccacacctgatgccggcgtggtgccggagatccgtacctacaagctgaccgtgctcgacagtgaagggcgcacgcgcgtgcagattgccgaggatgccagtgacattgcccgcaactcacgcgcaacgggcatgaccatctacgatgcgaagggcgatgagcgcggtggcatcggcaccatggccaacggcagcgcagtgatggcgttggatgcaccggttggcgtgggttacaaggttcgcgatcgggcgggcatgagggtcgctgccgatggctccgccgtgatcacggcactgtccaacgagggcagctttgccgccagcctggtggcgcagggcaaccaggggcggcttgagctgagtcgcaaggactcggccaagggcgaaatcagcacccgtgtgctgacctttgattcggactcgaccaaggtggagaaggcgccgtga

SEQ ID NO: 508446 - DNA, 453 bp, Stenotrophomonas maltophilia
atgcgggggactccggcgccgttctactccctcatcaacacgaccctcgatggggatcccgccgtggttgtggtcaacacggcgctgcggaccttcgacgggcgagatgcatttccctggcacctgcggatcgttatcgcctgcagggggttgggggagaagggtatgcccaacccggaagaagtggcggtgatcacccgtctgggagagtgcctggaagcggccgttgaagtggatggcaatgcggttttcctcgcgcgcatcactgttcgtggcgagcgcgtgctgttgtaccgcgtgcatgatcccgagcaggcgaatgatggcttgcagcacctgcttgccacgtccgagccggtgcgggcgtggcagttccagatggagtacgacctgggctggaatctggccagacccgaattggacctgccgctacgagattcagaggtcaactag

SEQ ID NO: 508447 - DNA, 1221 bp, Stenotrophomonas maltophilia
atggacagcgacaacggccgcgaccgggatgcctgccttggcatggatcatgtcgcggcgctggcactggcgctgctgctggggggcagcgtgatcgccctggtcggccagcacaccgccgcgcgggcggggccggccatcgtactgagcctggtattggccgcgctgggtactgcgccggtgctgtattgcctgcatgtcctgaaccagcagcgacccgccggcgggggcctgcatggcgtgctgcaggccagctggggcagggtgggagcgggcgtactcagcggcgtgttgctgctggaactggtggtgaccagtgcgggcgtggcgcagtccatcgccggccacctgcaggtgctgctggcccactgcggtatcgaggccggaaacgggatgccggttcagctgctggccgccaccggtctatggctgcttggcatggtcgggctgctgccgccacgtcacgtcgcattgattgtctgtgcgctgctgacggtgaagatcggcattggcctgctgctgctggcactggcggcccgttacgtgcactacgcactttggattccatggttgccggaagccacggcgccgtatcgctacgggctgggtggggtactggcggcgagcgtgccgctgctcggcgtgttcgccagcgtcggccttgcgctgggaattcccggcatgggccggcaggcgagggcacgacagccgctgctgctggcggggatgctgctgttggccatgctgctgttgatcgtacttgctgcgctgcaggcgggcctggtggagttcccggcattggccagcacgcgaccgttgtcggtggcgctgcagcagcacccgcagctgcactggatgatgccgttgctgccactggccggcgcggccgggttggcggcgctgctgctggtactgatgatgttggccgcgcgcctggcgacgcagctgcggtctgcggccggccctgcagcgcccggcttccaggtgcgactgacgtgggtcgcggtggtcctgtcggcggcactgctggcgctgctggcacccatcggtgcgctgccggtgctgccgggtccggccaccctgctggtgatggcggccttgtgcctggccgtgcttcacgtgcaggtgccaccctcgcgcgtcctgccggtgcttgcgcccatggccgccgtactgtgcctgttggccgcagtggagcggatgcgcgcctggcctggctga

SEQ ID NO: 508448 - DNA, 162 bp, Stenotrophomonas maltophilia
ttgctgcgaggggccggcgacatgcagcacagaccgggcaggggccgcgaaggcggcgaggaaaacaccggccgcagcggcacgatgcgcgtgcacgttactgaacgcgatgtcacggttctgttaatgccgatggagcagcgccacgccatgcatggatga

SEQ ID NO: 508449 - DNA, 2871 bp, Stenotrophomonas maltophilia
atgaacgttcgtaatcccgcagtgcggttcggcttgctgccggccggcatcgcgctggcgctggcgccggcctttgcttcggctcaggaagcaaagggcaccaccgacctggaccgcatttcggtcaccggctcgcgtatccgcggcgctgcagtcgaaacccagcagccggtcgttaccctcagccgtgagaacctggaaaagcagggctacacctcggttgccgacgtcctgcagaacctgacctcggccggttccccggccatctcgcgttcggaatcgctggcttccggcgaaaacgtcggcggctactacgtcgacatccgcaacctgggcgcccagcgcactctggtgctgatgaatggcaagcgcctgggcgcgaccacttcgggttaccaggatctgagccagatcccgatgtcggccatcgagcgcatcgaaatcctgaaggatggcgcctccgccatctacggttcggacgcgatcgccgccgtggtcaacgtgatcacccgcaagcgctttgacggtgctgaagccagtgtctatgtcggccagtacggcaagggcgacggcgacaccaccacctattcgttcaccctcggcagcgaaggcgagcgcggtggtgtgacgctggccgccgagtactccaagcaggacccggtgtgggccaaggaccgctggttcagccgtgacggcaacgccggcccgaactacccgggttcgggtgccagcccgatcaaccagaagggtggcttctgcgacccgtgcgtgacccccgacctgaagaagggtgagcccggctacatcggtccgaacgaccagcgctggtacaccctgcgcgatggcggcgacccgaccaagcgttcggactaccgtctggaaaccagtgctgacgccgtcaatgccaacgagcagatgatggtgcagaccggcatcgagcgtaagtcgctgtacgtcaacggcaactacgacttcaccgactcgatcgcgttcaatgcggacgtgatctacaacgagcgcaccaccaaccagcagatcgccggttacccgtaccagtcggcttcgttcgataccccgctgtcgaaggacagcgcgttcaacccgaccgatcaggacctcaccttccgtcgccgtctgtgggaaatgccgcgtaccaccgaaagcaagctgaagaccctgcgctttgcgccgagcgtcagcggcttcttcgagttcgccggcaggactttcgactgggacgtcggtgcgctgtggaaccgcaacgaatcgaccaagaccggtcacggcgacatgagcctgatcgcctcgcgccaggcgctgggtgcttcgttcgttggtccggacggcgtggcccgttgcggcaccagcatggctgacccgctggccaccagcaattgccgtccgtggaacccgctgctgccgtacggcgtggcaggcaatggctcgctggctgacccggctgcccagtcgttcctgttcccgtacttcaccgacaccggtttgaccaagaccaccagcttcaccgccaacctgtccggttcgatcgtgaccctgccggccggtgatctgggcttcgccgtgggcgtggagcaccgcaaggaagaaggccgcttctcgccggacgccttcgcacagtcgggtgagtccaccggtctgggcaagcagaccacccagggtgactactcgctggatgaagtctacctggagctgaacgtgccggtcctcgccgacatgccgttcgccaaggagctgaccctgaatgctgcgacccgttactcggattacagcaacttcggcaacaccctgaattccaagttcggcttcacctggcgcccgctggacgagctgctggtccgtggcacctgggctgaaggcttccgcgccccgaccatcgatgatctgtacggtggcctgagcagcagcttcgagtcctacaccgatccctgcggcgtcaccgctccgggctcggtcaatggcaacggcgcttgttcctcgcgtggtgtgccggtgggttacacgcagttgggtcagggccttgttccctgcacctcgaccccgtgcgctaccccggaccagttcatttccggttccaactccgcactgaagccggaaacctccaagagcaccaccgtgggtgtggtgtggagcccgcgttgggtgcagggtctggacatctcgctggactggtacaagtacgaaatcagcgacatgatcatcgccgacagcgtcgatcgtatcctgcgcgactgctacgtgctgggtgattcggcccgttgcgccggtcacacccgtgctggcgatggccacatctccgcgatgacctatggtttggccaacctgggccagatggagacccaaggctacgatctgggtatcaagtaccgcctgccggaactggcgatcggccagttcaacatcgattggcagaccagctatctgtccaagtacgacgagcagggccagaatgctgatggcaacaacatcaccatcggccgtgtcggcgaagccggcctgttccgtctgcgctcgaacgtcggtgttacctggtcgaagggtgacttcggtgtgtcctacatggcgcgttactactcgggcatgaacgaagcctgcgtggccaaccgtccctgcgacgtcgccgaccgttatcagaacggcgagaagtcgccgctgcgcaagacgggctcgaacaccttccacgacctgcaggtcagctggaaggcgccgtgggatgccacgatcgccctgggtgccaacaacgtgttcgaccacaagggtccgatcatgttcacccagccgaactcgagcttcgcctattacggcggcttcgacgtcggtcgcttcctgtacatgaagtacacccagcgcttctga

SEQ ID NO: 508450 - DNA, 4971 bp, Stenotrophomonas maltophilia
atgaatcacatctattgccgcatctggagcacggccaaacagtgctgggtggtggccagcgaacttgcaggcgtgcgctcccgcaacgccggcaagacttcgtcgtcggcaccgctgcgtatcctgctgctgaccagtgccatgttcagcattgccaccgtctacgctgccgaaaatcaagaggtgccgtacttcccgtgcgagccggatggccaggagtgggagccggaatgtgcctggttcgcgagcggtgctccgggcgtcagtagcgccgccttctcgggccgcgccgatctgtactacacgggaaaaggcgtcgcgatactcggtgaaggcgccaagatgcttgatcagtcagcggtggccatcggacttgccgctgaggcgccatacagccactccactgcagtgggcaaggacgcgaaggcgttcggggacaggagcacggccttgggcagtgcagccgccacacacagtcagtacagcactgccgtcggtttttttgccgagacatcgggtgttgacagcgttgcattggggtttcacgccaaaacagagggcagcggacacgccgttgctgtaggcacccgtgcgaaggccaagggactgggggccacctcgctgggaaacagcgcactggccgagaagttcaatgcgattgcaattggtagtggtgcgcgctcctcggcagacaatgcaattgcacttggcgccgactcccgtgcaacggaggtggacagtgtctcggttgggaacagcagtaccaagctgacccggaggatcgtgaatgttacggatgcccgcctcaccgcggccagcacggatgcggtgaccggcaagcagttgtatgcgaccaacacgaaactggccgtgatcgagaagacggccgatgcggccaaatcggaggccgccgccgtccgaggcattgcccaggcggcgagcaatcgtattgacgcaaccaccctggcactcgggagaggagccaccgccgaaaatggcagctacggcatcagtacggcactcggtaacaatgccaaggcctacaacgggcgcagtgtggcactgggtgacgacgcacgtgctggcgtggatgcggagggcaacaaggtctcgggccagaatgcaggcatctccattggcgcaggcacacgcagtgccaatggcggtgtggcgacgggtttccgtgcgaacgcgagtgggaatttctccattgccgttggcacggatgccaaggcagaagcggagcatagtactgctgcgggttacttgagcaaggccagtgccagccagaccaccgcgctggggcgtggcagcgaggcgacggcgcagttcgccagcgcgctgggcaatctggccaaggcgaccaccatcagtgcggtggcattgggcgaccgtgcacaagccaagcatgacaatgcagtggctttgggcgctggctcagtcacggcttcggtcgattccgtgtccgttggtagctccagcaagaagcgcaagatccagtacatcgcagatggtgcggtcagtgccggtagtaccgatgcagtcactggcaatcagttgcatgctacccatcaggccgtatcgaaggcgcagacagctgcggacaccgcgaagtccaatgccgatagcgcgttgtcgaaagccaatgcgctctcagggctgctgagccagacctcagcttcgggcaatgtccgagtaggcgaaagcaacagcggcactgtgctggacgtccgcaacagcgcaagcgccagccgcaagatcacgggcgtggcagacgccacgctcagtacaacaagcactgaggccgtatctggcaagcagctcaatgccaccaacagcaacgtcacggccgctcgatctgtcgctgactccgcgaagaccaatgcggatagtgcgttgtcgaaagcgaacacgctctctggactgctgagtcaggcgtccgcatcgggcaacgtccgtgtgggcgaaagcaacagcggcactgtgctggacgtgcggaacagcaccaacgcgagccgcaagatcaccggtgttgccgatgcagcattgtcctctaccagcaccgatgcggtgactggccggcagctcaacgccaccaatagcaacgtcagcaccgcactgagtgatgccagcgcggccaagaccagcgcaaacaccgctctgacccaggtaggaacgctcaacgggctgctcagccaggccagtgccagcagtaatgtccgtatcggtgagaagaacagcggcaccgttttggatgtgcgcaacagcgcaagcgtgaatcgaaagctgaccggtgtggctgatggagtggtcagcgccagcagctatgaggccgtcaacggcaggcagctcaacgcgatcaatgacaaggtggcgacggtggagggcgttgccaggtctgcgggcacggaggctgctgcggcaaagacagatgcagccagggcgctgatcgaggcagcggcactgggcggccttgttgcgcaggtgtctgagtctggcaatgtgcgcctgggtgagaagaacagcggaacgaccttggatgtgcgcaatagcatcaatgccaatcggaagatcagtggtgttgcggatggagccttggatgatgccagcactgaggcagtatcaggtcgacagctttatgcgaccaatggccgtgtgtctgctctcgaaagggagtatcagttcgtcagctttggcacggatgagcttagtgaaggagcagagactggcagcttcggtgtggcaatcggtgattcggcaaaggctagtcctggaggtgaaggggggactgcggtcggagcattcgccaactcacttggaaggaactcggtggctgtcgggcgcggatctgttgtaacgacgagctccgagaatggatttgcacttggcgccgccgctcgagttgaagatgtgggaggggtggctattggtgcaagcagcaagattgcaataggtgcaacgaatgccgttgcgattggtgcggcatccgaggcgacggaagccagtaccgtgtcattcggaaactccgttggccagcgccgcttggtgaacatcgcccgcggcaccgccgaccacaacgccaccaccgtctcccagcttaaggactccctcgccacgctcggcggcgccgcaggcatggatgccaatggcaacatcatcgccccgacctacacggtgcagggcgagacgcagaacaacgtcgaggatgcgttgatggcactcgatggcgccgtcatcaccgccggacgtcgcgcggacaaggtggaaggtcagctcaattcgattttccaggattcaccttccgcccgtgccgacggcatgagccagatcgcgctgaatggcgttaacggcatggtgctgaccaatcttgccgacggccgggtggcaccaggaagccgcgatgccgtaacgggcaaccagctgtacgccgcagagcagaagatctcgcagaatcggaatgatctggacgcgatgcgcaaggagcgggagatggggcagcaggcaatgcgggagttggatgcgagcgtcatcgactacggtggtgcgcgtttgactggcgtggccgaggcgaagctttcggctgatagctcggacgttgtgcgcggcagtcagctctatgagaccaatagccgcattttggaacttgagggcgacgcgcagttcatgagtatcggctcagcccccttcagtgagcgtgctgcagccggtgtggcaggcgttgcggtcggaaattcagcaaagactggactagaaggaggaaccgcggtgggcacgtttgcggaggcgatgggaaggaactccaccgcaatcggtagagcggcgagtgtctctgtggattccgagaatggattcgcaatgggagtcggtgcacaggtcggtggaggcgcgggcggtgcgaatgagggtatcgcgattggtgctggcgcaagagttggaagcggggctcacggctcgctggcacttggaaatagctctctagtagatgaagaaggagttgtgtcatttgggggtgtcggtatgaagcgccgcttggtaaacatcgccaacggcaccgccaaccacaacgccgccaccgtcggccagctgcgcggtgcgctctccgcgctcggtggcgaggtggatgccaacggcaacatcgtcgccccgcgcttcaacgtccagggccaggcgcagtccaccttgaatggcgcacttgaagcactggatggcgcggtcgtcaccaacacctcgcgcgtggacaaggtcgaaacccagctccgctccgtgttccaggacaccccctcggtccgcgccgacggcgtcaaccagctcaccctggccggggccaacggcatggtcatctccaacgtggccaacggcctgatcgcggccggcagccgtgatgcggtcaacggtggccagctgcattcgatgcagcagcagctcaacggccgcatggatggtctggagcagcgcatcgacgatgccccggtaccgcgtgcgctggcgacgtcctcggtgccgaagccgcaggccgaggaaacttctgtggtgccggaaggcaaggactcccagcaggtcgcctcggtaggcgagggcgacaagcccacaccacagccgaaggccaacaaggacgaatcgccgaagccgcaggtggacaccgctgagctggagaagatgctggcccgcgccaacgagtacaccgatggggcgatcagcaacttcgagcgccgcctggacaagatggacaagcgcttcaaccgcatggcggcgatgagcagcgcgcagacggcgatggcgatgaacactgccggcctggccacctacaaccgccttggtgcgggcgtgggctacagcgagggtgagtccgccatggcggtgggttaccagcgcgtactcaacgagaagggctctgccaccttcagcctcaatggggcgttcaccaacagcggtgagcgcagcatgggcgtgggtgtgggcatcggctggtaa

SEQ ID NO: 508451 - DNA, 750 bp, Stenotrophomonas maltophilia
atgtatggttgggtaagccggttcatgagctaccgcaccttctatgtgtggcgtgcgcgctaccggtactacacgcgccacttgaatggcaggatcgtggtcagtgcgctgtgcctggcgggtgtggtcctgctgctctggtactactggcggtacaccaacgtgccgccgccgcggatgcacccacaggccgcagccttgcgggtggaaggcatcaccaacgaggcgatccaccgcatcgtgctggtgcgccatggcggcagcacgccgggccaggagttcaccacgccgcaggaggttcgcgccagtacggtgcgcacgatgcgggtgcgacaggtgctggacggggaagtggcatggcgcctgaaggcgaatctgctggcggacatcgcggactacatcgaggttaccggaggatgtgtgccttacccgtgcgctcaggtgcaggcccgcctcctactgttgcgcgaggcggcggtgcagaatgcgggtatcaaccagaccttgcagcggattctggacgggccgagcgatctgatgccgagcctggaacgtggtgaccgccagcgggtgaagagcggctggtcggattcgttcgacgacatctactaccagacatggttgttgaacgatctgcagagcatgcacgcacggatgatggcggagtaccccaggcgcgccccggcgccgtggctgccggagtggatgatgggcacggagtcctcaaccggcagcggaatgccgccgtaa

SEQ ID NO: 508452 - DNA, 279 bp, Stenotrophomonas maltophilia
atgatcgtcagcttcaggcacaagggcctgaaagcgctctatgagcggggcgacatttccggagtccgtgccgatcatgtggcccggttgcggcgtttgcttctgcagctggatcaggcccgcgtgcctggggacatggggctgcccggaaatcgcctgcatcccctgcgcgggagctatagcggctactgggctgtaagtgtctcggcgagttggcgattggtgttccgctttcgtgggctcgacgtcgaactggtcgattaccttgattaccactag

SEQ ID NO: 508453 - DNA, 687 bp, Stenotrophomonas maltophilia
atgaacgcacgcgtcgctgctgttgggctgctgatggtgttggtcagccccgctgtccaggcttcggatgacgtctacgtcgagttactgtggtcgccgacacccgcggacgccatcgcgcgatcagtggcctaccagttcgttgccgatggactgcacgaccaccgcatctgcgttgccgccggtggagaagacgccgatgtgggcggattggaactcaccattcgcgacgccaatggcgttcgcatctcgcaggtccggcatgacggtttccgtggccgcaagacctgtttcccagcggaccttggcactgcggggacggccggcacgtggacggtggatgccgttcttggcgacggccggaccggcaaagccgccgttcgtgtcgatcaccgcttggaggagtctccgctgtatctagggcacgacggcccctacgttgctggccgcccgaactacgccccgtccgtcccggcggccgaatgggtgggcaagctggtctgggtgctggacgtggatgccgaaggcaaggtaacccgcgttgaagtggaagtcgccgaaggcgttggcgaacgcttgcgtgcccgtgcaatggccgctggctggttgagccagttcggccctgacccggcgcgtgcgaccaagccattgcgttggcgtcggacactggaatttgctgcggaatga

SEQ ID NO: 508454 - DNA, 462 bp, Stenotrophomonas maltophilia
atgggccgtgaagacgctgccatgacactccagcactgcccttcgctggtcggcgcacttgccgccgaccttggtaccgccgcccttgcttcactgccgtcggcgtcgacggcgccgccgtccgacccgcgactgcggcggatcctcgatttcatcgatgcgcacctgggtgagtgtgaactggacgagcgcatgatccgcgatgccttcgcgctctcgcggcccacgctgtaccggttgttccaggccttgggcggggtcgcccgctacatccgcgaacggcgcctgtggctggcccaccgccacctcgaccgtgacccctgctgcagcgtcacctggctgctgtatgaggtgggcttcgcctcggaacgccagttccagcgggccttccaggcccgctatgggatgtcgccggcgcagtggcgccgtgcctgccgcggccagccaacgcggctttcatga

SEQ ID NO: 508455 - DNA, 507 bp, Stenotrophomonas maltophilia
atggcgaacagccagaagttcattgcccgcaatcgggcaccgcgggtgcagatcgagtacgacgttgaggtctacggggcgcagaagaaagtacagctgcccttcgtgatgggcgtgatgtccgacctgtccggcgccaacgccggcgaactgccgtcactggaagagcgcaaggcgctggagatcgatgtcgacaacttcgacagccggctgcagtcgatgaagccgcgggtggccttcagcgtgccgaacacgctgaccggcgaaggcagcctgaacgtggacatcaccttcgagagcatggacgacttctcgccggccgccgtggcgcgccgcgtcgagccgttggccaagctgctgcaggcgcgtgcacagctggcgaacctggatacctacatggacggcaaggccggtgcggaggcattgatcgcacaggcgatccgtgacccggcgctgctgcaggcactggtcgccgcgccgaacagcgatggcaaggacggggagtaa

SEQ ID NO: 508456 - DNA, 1497 bp, Stenotrophomonas maltophilia
atgtcgaccgaacagctgatcgaagccggcagcgataccggcaccgcactggaatcgggcggcttcgccgaactgctgaacaagcagttccggccgaagagcgaccgcgcacagcaggaagtggaatcggcggtacgcacgctggccgaacaggtgctcagccgcgcggacatcgtcagcgacgatgtctcgcagacgatcaaggcctacatcgccgagatcgaccgcacgctgactgcacagctcaaccagatcctgcaccatccggacttccagcagctggaaggtgcctggcgcggcctgcactacctggtcaacaacaccgagaccgatacccagctgaagatccgggtcttcaatgtatcgaagaaggaactgggcaagaccctgaagcgctacaagggcaccgcctgggaccagagcccgatcttcaagaaggtctatgaacacgagtacggccagctgggcggcgagccctatggctgcctggtgggcgattactacttcgaccagagtccgcaggatgtcgagctgctggccggcatggcccaggtggcgtcggccgcgcatgcacctttcctgtcggcggcggcaccgcgcctgctgggcatggatggctgggatgaactggccaacccgcgcgatctggccaagatcttcaccacccccgactacgcggcctggcgttcgctgcgcgactcggaagattccaagtacatcgggctggcgatgccgcgcacgctggcgcgcctgccctacggcgccgccaccgatccggtggacgagttcgatttcgaggaagacacttccggtgccgattcgagccgttacacctggcagaacgcggcctatgccatggcggtcaacatcaaccgctcgttcaagcagtacggctggtgctccaggatccgcggcatcgagtccggtggcgcggtggaaggcctgcccacccataccttcccgaccgacgatggcggcgtggacatgaagtgcccgaccgaggtggccatcaccgaccgccgctccgccgagctggacaagctggggctgatgcccctggtgcatcgcaagaattccgacatggcagccttcatcagcgcgcagtcgttgaacaagcctgccgagtacgacaaccccgacgccaccgccaacgcggcgctggcggcccggctgccgtacatgttcgcctgcaaccgcttcgcgcattacctcaagtgcatcgtgcgcgacaagatcggttcgttctccagccgcgagcagatgcagaaatggctgggcaactggattctcaactacgtcgacggtgatccggccaactccagcgaggagtacaaggccagccatccgctcgccgccgccgaggtggtggtggaggaggtggaaggtgcgcccggctattacacctccaagttcttcctgaaaccgcactaccagctggaaggactgaccgtttcgctgcggctggtttcgcgcctgccgtcacaggccaaggcctga

SEQ ID NO: 508457 - DNA, 501 bp, Stenotrophomonas maltophilia
atggcattcgacatgcatctgaagttccagggtggcagcgtcaccatcgaaggtggctcgacccacgccaagcacaagaacgagattccggtactggcctggtcgtggggcgtcagcaacagcggcgacctgcacagcggcggggtcagctccggtggcaaggcacacgtccaggacatctccatcaccaagtacgtggacaaaagctccaacgcgctgctgcaggctgccagcaccggtgcacgcctcgaggaggcgtggttgtacgtgaccaacgccaccggcgagcagaccgactatgtgaccctgcacctgtccaacggcgtgctgatcacttcggtatccaccggcggctccggtggcgaggaccgcctgaccgagaacgtcaccctgcacttcggcaagttccagtacgggttccagccgcagaagcccgacggcaccgccgacggcgcggccaagaccttcacctacgacatgcaggccgtggccaagggctga

SEQ ID NO: 508458 - DNA, 810 bp, Stenotrophomonas maltophilia
atgaacgtgccgcccaccaccgataccgcaccggccgtggacctgctgcgggccggtgacctgggcggcgcgctgcaggcgcagcgcgaacgtgtgcgtgccgcaccgaccgccgccgctgaacgtgtcttcctgttccagctgctggccgtgctcggccagtggcaacgggccgaggcccagctgcaggcggccgtgcagctggatgccagcctgtcgctgctgggcagtgccggccacgccctgctgtgtgccgagcaggtgcgtgccgaggtattcgccggcacgcgcctgccgcccgtactgggcacgccgcagccctggctggcgccgctgctgcaggccgtgcagctgcagcagcagggccacatcgacgcagccattgatctgcgcgaacaggcgttctcgcaggcaccggcggtcgcgggtgactgtgatggcgagccgttcgagtggatcgctgatgccgacccgcgtttcggtccctgcctggaagtgatcacccccagcggctatgcgtggctgccgctggatggcctggctgaactgcgcatcgatcctcccgaagacctgcgtgacctggtctgggcaccggccgaactgcacctgcgccagggtactgcgctgcgtgcgttcgtgccggtacgttatccgggcagcgaagccggcgatgacagcggcctgcagctggcccggcgcagtgaatgggacgagcacggcatcggcagtggccaacgcatgctggccaccgacagcggtgaccatcccctgctgcagatacggcagctgcggctgcagcgtgcggactga

SEQ ID NO: 508459 - DNA, 504 bp, Stenotrophomonas maltophilia
atggccgagctgaccaccaccgagcgcctgcagccgtccctgctggaccggttgaccgacgatgcaccgctgcagcgcgacgaaagccgcgaacagcgggtgatctctgccagccgactgcgcgagtgcgtgatgcgcgacctgtcgtggctgctcaacagcgtgcacctcgcggccaacacgcgcctggaggacatgaccgacgtcgccggttcggtgctcaactacggcattccggacctgaccgggctggagctggccggactggatgtcgcgacgctgcagcggcggctgcgcgaggccatcctcgccttcgagccgcgcctgatcgcacacacgctgcaggtgaccgtccaggccaacgcgcaacggatggaccggcgctcgctggtgttcgacatccgctcggaaatgtgggcgcagccgatcccgctgaatctctacctgaagaccgaagtggacctggagaccggccgcatggacctggtcgagggcaatgcctga

SEQ ID NO: 508460 - DNA, 1872 bp, Stenotrophomonas maltophilia
atggatccgcgcctgctccgccactacaaccgcgagctgcagcacatccgtggcatgggcgcggagttcgcccgcgagtttccgaagatcgccgggcgcctgggcatggatggcatggagtgtgccgatccctatgtcgagcgcctgctggaaggcttcgccttccttgccgctcgcgtgcaggtgaagctggacgcgcagttcccggtgttcacccagcacctgctggagatggtgtatccgcactttctggcgccggtcccttccatggcggtcgtgcagctgcagccggacctgaaggacgccaagctggctgcgggccaccgtgtaccccgccacagccgcctcgttgccacgccagtggccggcgagcgcacggcctgtgaataccgtaccgcgcatgaggtgacgctgtggccattgcagctggtcgaagcgcgctatttcgagaatccggcggcattggcggcggcggaggtcgcaattcctaccgacagcgcggcgcgtgcggggctgcgcctgcgcctgcaggcacaggcgggcgtacccctggcgacgttgtcgctggatcgcctgccgttgttcctggccggcaccgatggcctgccacggcggctgtatgagcagctgatgggcaacgcgtgtggctgctggctgcgtgcgggaggtccggcccactggcagcccgctgaatccctgcagccggtcggtttcgacgacacgcaggcattgctgccgtatgacgggcgttcgttcagtggctaccggctgctgcaggagtatttcgcctgcccggagcggttcctgttcgtcgaactgaccgggctgaagccggtgttgcagcgcgccaccggcaaccagctggaggttgtgatcctgttcgatcgcagtgagcccggcctgcacaatgcgctgggcgtggacaacgtccgcctgtactgcacgccggccatcaacctgtttccgcaggcggccgaccgcgtgcatctgtcgcccggacgccacgaataccatgtgctgcccgaccgtacccggccgctggacctggaagtgcacagcgtcaccgccgtggacggctacggtgacggccagtcgcccgagcagcgctttgcaccgttctatggcagccaggcacgtacctggcacgatccgcaaggcgcgtactacacgctgcgtcgcgagccgcgccagctgtcggctcgccagcggcggcagggcgcacgctccagctacgtgggcagcgaggtattcatcagcctggtcgatgctgccgatcgacccttccccagccggctgcgccagttggggctgcagctgctgtgcagcaaccgtgacctgccgttgcagatgccggtgggcaagggacgcaccgacttcagcctggacgatggtgcaccggtcaccgcgatccgctgcgtggccggaccgacccgtccacggccggccggcgacggcggcgaaagtgcctggaaactgctcagccacctgcagctgaactacctgtcgctgttcgaggacggcgacgcacgcggtaccgatgcgttgcgcgaaatgctggcgctgtactgcgatccacacgacgccggcgcgcagcgccagctggagggactgcggggcgtctcagcgcgttcgatcgtgcgccgcatcccggtgcccggcccgatcaccttcggccgtggcctggagatcaccctgacctgcgaggatgctgctttcgaaggaaccggagcctatctgctggcggcagtgatgcgccagttcttcgcacgctacgtttcgatcaatgccttcaccgaaaccgtgctgcgcaccgttgaacgcaatgaggtggcccgatggacggccagaccgggcgcgctgctggcgctgtag

SEQ ID NO: 508461 - DNA, 1068 bp, Stenotrophomonas maltophilia
atggacggccagaccgggcgcgctgctggcgctgtagacgcgcgcgctgcgctgctgcaggcgctggccgcggcaccgcacgcgttcgaggcgttcaccgcgctgcgcctgctggaacggacgcacccgcacctgccgcgctgggggtgctcgacacgcccggaggaggatccgctgcggctgcggcaggcaccgagcctggccttcgctccccgggatgtcgatgcggtggttccggcaacccgcacgtgcccaccgcagttgcgcatgttcggcttcggcctgttcggaccgaatggtcccctgccactgcacctgaccgagtacgcactgcagcggcagcgcagcgcacgcgatgacagcctggtggcgttcgccgacctgttccatcaccggctcatgagcgtgttctaccgcgcctgggccgatgcacaacccgtggtacaggccgaccggccagaggacgaccgcttccgcctgtacctgggggcgttggtcggcatcgcatcccccgcactgcagcgccgtgatgcgctggacgatgacttccgccgccatcacgccgggcacctgctgccgatggcgcgcaatgctgggggcctgcgtgcgttgacagaagcggcgttgcaggtgcccgcgcaggtgatcggattcatcgccgaatggatgcgcctgcccgaggacgcgcagctgcacctgggggtgcgcagcaaccggctgggccacagtgcggtgctgggcgcgcaggtgcgcgggtgccagcatcgtttccgcctgcgcatcggcccgcttgacctggccagcttccgccactggttgccgggtggcacgcagctgccacgcctggcggccctgatacgcagccacagcggcgacacccaggcctgggacgtgcagctgctgctgcgcgccgaccaggtgccgacgctgcgcctggcccgcaatgggcgccttggcctggacacctggctgggtcgacgcgcctggagcgtggccgacgccgacgacgtggtcgtgcatccgcgcgccgcgatggccttcaccgaccgacctggacccctgccatga

SEQ ID NO: 508462 - DNA, 2739 bp, Stenotrophomonas maltophilia
atgaccgagatccgccgcagtgcgctgttcggcaagctcaacccgcttgcctaccgtgccatcgaaagtgccaccgtgttctgcaagctgcgcggcaaccccaacgtggagctggtgcattggctgcaccagctgttgcagctgcaggattcggacctgcaccgcatcgtgcgccatgcgcagctggacccggcgcggctggcgcgtgacgtcaccgatgcgctggagcgcctgccgcgcggagcggggggtgtcaccgatctgtccagcgcggtggaggaggcggtcgaacgcgcctggatccaggcgtcgctgggtttcggcgaagcgcaggtgcgcagtgcgtacctgttgctgggcatgctctccagccgcagcctgcgtagcgggctgtcggcgatctcgcgcgagttcgacaagctcaggccggaagcgctgagcgagggcctggccggcatcatcgcgggctcgccggaagaggggcagcgaccgaccgatggcttcgcgctgggcaatgccgccgcaccgggtgacgccagcggtgccatcgcacccgctgcgatgggcaagcaggaagcgctggcgcggttcaccaccgacctgaccgcgcaggcccgcgatggcaagctcgatccgatcatcggtcgcgatgatgagatccgccaggtggtcgacatcctgatgcggcggcggcagaacaacccgatcctggtcggagaagccggggtcggcaagaccgccgtggtcgagggcctcgcccagcgtatcgcgcgcggcgacgtgccccccgcactgaaggatgtgcagctgcgcgcgctggacgttggcctgctgcaggctggcgccagcatgaagggtgaattcgagcagcgcctgcgtgcggtgatcgacgaagtgcaggccagcccggcgccgatcatcctgttcgtggacgagacccacacgctggtgggtgccgggggcgcggccggcaccggcgatgcggccaacctgctgaagccggcattggcgcgcggcacgctgcgcacggtgggcgccaccacctgggccgagtacaagaagtacatcgagaaagaccctgcgctgacccggcgtttccaggcggtgcaggtggaggagccggacgaggcgcgtgcggtgcggatgatgcgcggcgtggccagcatgatggagaagcaccaccaggtgcagatcctggatgaagcgctggaagctgcggtcaggctgagccatcgctatatcccggcgcggcagctgccggacaagtcggtcagcctgctcgatacagcgtgcgcacgcgtggcggtcagcctgcacgcagtgccagcggaggtggacgacagccgcaggcggattgaatcgctgcagaccgagcaggcgatcatcgaccgtgaatccgcgatcggcatcgtggtggccgagcgcggcgcgacctgcgcgcaggcactggccgacgaggagcagcgcctgtccgggctggagcagcgctggcaggccgagaaagcgctggtcgatgaactgctggacctgcgtgcacagctgcgcagcggcaacgtgcccgtggaaggtaccggcagcgcactggaagcggcggcggcacaggccgatggcgatgccgtggtggcctcggtaccggtgcaggcacgcgaccgtgatgtgctgctggcacgcctgcagctggtacaggccgaactggcggcactgcagggcgaggcaccgctgatcctgccgacggtcgatcaccaggcggtggcggcggtggtggccgactggaccggcattccggtcgggcgcatggcacgcaacgagatcgacaccgttctgcgactgccggagttgcttggccaacgcgtgatcggccaggaccatgcgatggagatgatcgccaagcgcatccagaccagccgcgcaggcctggacaacccggacaagccgatcggcgtgttcctgctggcgggcacctctggcgtgggcaagaccgaaaccgcgctggcgctggccgaggcgctgtacggcggcgagcagaacctgatcaccatcaacatgagcgagtaccaggaagcacatacggtgtcgtcactgaagggggcgccgccgggctatgtgggttatggcgagggtggtgtgctgaccgaagcagtgcgccgcaagccgtactcggtggtgctgctggacgaggtggagaaggcgcacccggacgtgcacgaactgttcttccaggtgttcgacaagggctggatggaagacggcgaaggccgccgcatcgacttccgcaacacgctgatcctgctgaccagcaacgccggcaccgaactgatcgccagcctgtgcgccgatccggaactggttcccgacccggaaagcatggccaaggcattgcgcgcgccactgctgaaggtgtttccgccggcgctgctggggcggctggtggcgattccgtactacccgctgagcgcggacatgctgggtcgcatcgtgcggctgcagctgaaccgcatcaagaagcgggtggaggcacgttatcgcattccgttcgagtacgacgactcggtggtggaactggtggtgagccgttgcaccgaaggcgaatcgggtgggcggatgatcgacgcgatattgaccaattcgatgttgccggagatcagtcgggagttcctgcttcgctcccagcatgacgccactcccgaaagagcgagcgttggagctgactcaaagcagttcatctacgaattccgttga

SEQ ID NO: 508463 - DNA, 438 bp, Stenotrophomonas maltophilia
atggcagcgctgcgtggatcgacaaacgggtaccagctatctgcgtacgacgtggatcttcaggatgatccaccattgaccggattctccgcgcgaacgaaaccaaaggagttcgttgccaaggcccgggccatcatcgagcttgtcaagcttacgaagctgaaggtttcactcgaagactttgtcgtcaccagaacggctgctggcgacctcagtcgcgaaacgccggtggaatggcgatacacaactaccgtcgggcatgggaatcaccaggctgtctggacactcatcgtggacatggacatcgtcgcgccagggcaggcaggcaatggtcccgaccggacacacgtcggctactcctgctggaagaacgggttcgatgcggtcccccgcatcaatgggcacatcttcgttgagtatctgcccgcctcacgctga

SEQ ID NO: 508464 - DNA, 543 bp, Stenotrophomonas maltophilia
atgtgtccgcactgcatcgatgtggaatgcgacaacggctcggtctgccaccgcgggctgttcgctgcctcttcagacgtgttctctcccttggccgctggaccgcacagcagcaccaagaagagctcatctcttggacagttcgaaagcgagcatctgtttccgcacgcagccctgaagctatctggaatcggcttcaattatcagagcgagccgacgctcagtatcccctacgtggttcatcgggcggggcagggaggagcagggggcggtgttacctcaacaggtagcagcagcgtcgccagcgcgtggtcaagtcaccttggaacgctggcacgctccgattttccggctgcgttgaggcttgccgtcatagatcagctcaacgcgcactacgtcaacggaaacctcagcaatgctgttgccatgcagatcatcagggtggtgaacggccatgctggcctgggtcgactcaacgcggagcaagctggtgagatcaacaacatgatcgctgatttctatttccgtcattcgaagggatga

SEQ ID NO: 508465 - DNA, 708 bp, Stenotrophomonas maltophilia
atgccgtcgcaggcgctgatcagacagttcaaaagccgacccgagcatgtgatgcgctcgcacgtggttcgctggagcggcgatgctccggaggacagcaggatcatcagggtggcgctgcttgacagcgaaacgagtggcaatgcgcgtgccgaatggaaggcgggaccactgaaggtgaaggtcgacgcgaagcgcttcgaactccgttgggaaggatccagattcaatcctccaagggcagggagcgatctgttctctgtgtactggagtggctttcgggcctcctccggatgctcgatcctgctgcctccttccggtggccccgatatgatgttgacccctgaattctcgggctgtgccgcggctttcagcaaagggccggacggcagtacgttgttcagtcactacaacctgaaggacggatcgagaacgctcgataggccgggaatgatggctgccgctacactggagcacggaaagggtgtgtttcttctgagcaaagagcagatgcgacaggttggaaaacggtcgatgctcgaaacatccccgacggctgttcttgcgacaattgtgggtacccgcaacgatcgccggtggaccttctgggtccagtatcgcgagatcgacggcgacacccagcacatacgatcagtcgaacagatgcagaaccgatcaacgggccaccttgacgtggattcctcgtga

SEQ ID NO: 508466 - DNA, 288 bp, Stenotrophomonas maltophilia
atgcaacccgccgcccgcctcaccgatctccacacctgcccgatggtcaccggggtggttccccacgtcggtggtccgatcacggcacccggtgcgccaaccgtgctgatcggtggcctgcctgccgcacgggtgggcgatctgtgcacctgcgttggcccgccggacagcatcgtcaaaggctcggtgaaggtcttcatcaagggccaaccggcggcgcgcctgggtgacagcaccgcgcatggcggtgtgatcgtaatcgggtgcttcacggtactggtgggctga

SEQ ID NO: 508467 - DNA, 564 bp, Stenotrophomonas maltophilia
atgaatgacacgctgccgcccgccgagggcatcacccacctgcttgcgcgctggcaggacggcgaagcaccggccagcgatacgctggcgcgactggtctacgacgaactgcaccagatcgcggtgcgcagcctggcacgtggcgtggccgatggtttccagcccaccgagctggtcaacgaggcctggatgcggctgtcggcacgcgagcatggcttcgcatcgcgcgggcatttctatgcagtggcatcgttgcagatgcgccaccttctggtggaccttgcgcgcatgcgcgatcgtggcaagcggcgcgggcagcaggtcacgctgacggtgaagctggtcgatcccggcgtgcagccggtggacctgctcagcatcgccgaggcgttcgatgagctggccaggctggatgcccgcaaggcgcgtgcgttcgcgatgaccgaactagtcgggctgaccgtggctgaaaccgcgaatctgctggacatttccattcccaccgccgagcgcgatctgcgtttcgtgcgcgtctggttggccgcacggttgtcgtcatgctga

SEQ ID NO: 508468 - DNA, 2880 bp, Stenotrophomonas maltophilia
atgctgagcctggagcgctggcgccagttggaaagtctcttccaccgggccagcgcactgagcggcgcggcgcgtgcggcgttcgtacaggcggaggtcggacatgacccgccattgcgtcgcgaactggaggcgatgctggcggtggaggccgaagctacggtgcgcctgcgggtgccgctgcgccaggcggtctccgagattggccgcgaaccgcccccgatcctgccaccgggtacccgctgcggcccgtgggcggtagacgcgatgatcggcacgggtggcatgggccgggtctaccttggccatcgtgccgacggcgcctatcggcagcaggtggccatcaagatgatggccaacccggggctggatgagaaaagccgagcgttcttcgagttcgaatgccagatgcaggcacagatgcatcacccggccatcgcgcagatctatgacgcggggatgcatgaggacgaacgtccctacctggtgatggagtacatcgacggcgagggcatcgaccgctggtgcgcccagcgtcgcgcaccgctggacctgcgggtgcggctgatgatgcaggtctgccagggcgtgcagcatgcacaccagaagggtgtgatccatcgcgacctgaagccgagcaatgtgctggtgggtgccgtggatggcgcaccgcagccgaagatcatcgacttcggcatcgccattgccggcagccatgacgataccgatcgctggtccggcggcacgccgggctacatgagcccggagcagacaggcctggagatcgatatcgacgcgcgcagtgacgtgtactcgctgggcgcgatgctgcatgagctgctgtgcgggcaacggccaccggcacggatgccggagccgctgtcgccgttggcagtgttcctcgctctgacggtcgaggcgcaggccgggctggccgcgtcctgccagtgcagccggcgtgaactgcggcgggctctggaggaaggcctggatgccatcgtgcgtcgtgccaccgacccgcagcgctcggggcgctatgacggtgtatcggcactgctggccgacctcgaccgctggtgtcgcaacattccgccgttggtgtcacgccagcagcggttgctggtggcccgcaagttcctgcagcggcatcggttgccggtggtcctggcggccttgaccctgggctgcgtggtggttggcctggcggcatcgctgtgggcgctgcagcaggcgcgcagccaacaggccgtggccagtcaccgccagcagcaactggagcgcatggtcgaattccagcaggagatgctgcagagcgtggacgtcgatgcgatggggcatgcgatggccgcggccaacggcgaggcgatgcagcgggccttgcaggattcagctgacgcgccgctggatctggaagcactgcgggccaaggttccggcctcggacatcgcccgtgacctgctggagcgctacgtggtggcccatgcactggatcgcctgcagcaggactttgccgatgatccatccctgtctgcggacctgcgccagtcgctggcccgcgtgctgatttcgatcggccgttacccggcagcggtgcgcgagctgcagtcggtgctgtcggtgcagcgcgagcagcatgcaggcggcctgcgcctggtatcggcgctggctgatctggccgatgcgctgtatcgccgcggcaacctggtcgaggcgcgcggcctgctggacgaagccctgtcactccagcggccggagctggcgccggacaatccgctgtggctacgggtgggcgcgcagcaggcgcaggtgatggcggggcagggagaactggggaaggcgctgcagcggcagcaggccctggtcacggcgtggacgccgcggctggagaaggacgctcccgcgctgttggaactggagctgggcatggtgaccacgctcagcgagctgacccgccgcgaagaggccctggcgcggctggagcccctgctgccccggttccgtgcgcgttttggtgacaacgcaccgcgcacgctggcggcgatgctgatgctggcgcgcctgcagaatacgttcaacgagtacgaaaactcgttggcgctggccagcgaagtgcgccagcggcgcgagcgcagcctcggctccgagcatcccgacacgcttgcggcggcggccctgcagggcttcaacatggtgcgcctggcacaggccgagccggcgttcacccagacccaggccttcatggagcacctgctgggcgagcagcagcgcgtgctggggcccgaccacccggatgccctgcagaccaaggcggagctgatccgggtgctggccaagcaggatgatccgcagcgcttcgagcgtgccgtgcagctgcagcgtgaactgctgcagcagcgcacgcgcacgcttgggcggatgcatccggacacgctgttcaccctgggcgggctggccagcatgctggccaggaccgatcactatgatgaggcgcgcgaggcggcgtatgccgcgctggaaggcaaccaacggctgatgccggacgactatcgcctgatctcggcgacctgggacgtggtggggcgggtcgagaaccgtgccggccgcttgccggccgcgcgcgatgcccatgccaaggcattggaactgcgcgcgtccagccgcggcgtgctcgacgcgcatacgacggagagcgcgtcgcggctctacgccgtgctcaagcgcatgcatgccaccgaggcgatggccgacatcgaacggcactatctcgatccggtgatcgcacgggacccggcaacgctcaatacatcgcagcgcagcgtgcgcgacgaagcactgagggcgctgaaggaaccgggggagccgggcagcctcggccggtga

SEQ ID NO: 508469 - DNA, 2025 bp, Stenotrophomonas maltophilia
atggcgcgcacgatctccctgcagtcggacctgggcggacgactgcgcttccagcagcttcagggccgtgagtcgctcggccaaccctaccgctatgtgctgtcggcactgtgcagtggagatccgccggatccctcccgcctgcttggcactccgttcggcatcagcctggtgcatgacaatggcagccgccatctgcatggcatcgtcgcggccgtcgccctgctggggcagcgcgaggtgggcgatgaacgcttcaccgcgatcgaagtcaccctggtgccgcgtctgtggctgcttggccagcagcacgacagccgcatattctccgggcaatcggtggcggacatcgtgcgcacgctgctgtcggagatcggttgcaccgatgtgcggctgcagttggggggccatcctgtcgtgcgcgattattgtgtccagtacgatgagccgagcctggacttcatccatcggctgttgcagcaggaaggcctctactactacttcgagcacgctgcagatcgccacacgctggtgcttgccgatggcctgggcgcccatgccacggtggcaccgttcgagcgcctgccctggcaggccgagcgcgagccgccggcgctgggagcaccgggcatggccgactggcagcagcagcaccagctgcgcccgacgcactggcagctggatgagttcgatccggcgaagccgcgcgcggtgctgctgggagaggcgcaggccgatcgcgatgacggtgccggtacgcgttccatctaccgcggccatggccggcagcagagcgcggaacagggccggcagcgggcacaggtgcgcgttgaagccgagcaggccgcacgtgcgcagtggcatggccgcacccgcgcctggaacctgggtgccggccatctgttcgaactcgaaggctgtccgcagaccggctgcaaccggcagtacctggtggtggccagcgagcttgacgtcatcgaggcggctcccggttcggtaacggccagtgcgggtccatcactgcagtgccggttgcaggtactcgacagtcgcgtgccgtaccgttcgccggccgacacgcggtggccgcgcattgccggcctgcagagcgccatcgtggctggcgacaacgacgaggacattgccgtggatgcgcagggacgggtgaacgtgcatttccactggagccgcgcggcccgcagccatggtcgcgtttcgtgcccggtacgcgtggcgacgtcctgggcgggcaaggggtggggggcgcagagcctgccgcgggtcggccaggaagtactggtcgcgttcctcgagggcgacccggaccggccgctcattgtcggcagcgtcttcaatgcggaccacgtgccaccctatgcgttgccggaacagcggacgcggtcgggcatccgcagccgcagccatcccgatgggggcgcggatgactacaacgagatctgcttcgaggaccgcaagggcgccgaggagttgcgcctgcacgcgcaacgcgacctgcatgtggaggccgagcatgaccgcaccctgaaggtcggccatgaccagcaggccaccatcggcaacgaccagaccctcaccgtcgagcatgaccagcgtgccacgatccgccacgaccgcagcatcaaggtcgacaatgaagactcgctggacgtgggcacccatgcgcggatccacgtcggccagcgcttccggctggaggctgggcaggagatcgagctggtcacgggcgcctcgcgcatcgtgatgaacagcgccggtgacatcgcggtcgagggcgttaacgtgcgcatcggtggcaacagcacggtagagatcgaaggaggcgtggaagtccgcatcaaggcgggcgccagcatggatatcggtgcgggggcgagcctgaagatgcactccgacgccaccctgcaggtgcagggtggggcgatggccgaggtcaaggcaccgatgctgaccctgtccggtgacgcattggccaagctggccgccgcgttggtgacgatcggatga

SEQ ID NO: 508470 - DNA, 531 bp, Stenotrophomonas maltophilia
atgaatacggtcgcgcaggcctgtgcggacatgcagatcgacgcgcaggcctgcgcggtgctggcgcccgggctgccgccggcccaggcagtacaggtgctgctgcacgccggctacgtgcaggctgcgttgcagctggccgcgcgcctgttgcccaagcgctacgtggtggcctggctgtgccagtgcgcacgtggtgaaacgctggcgccggaagcacgtgcgggggccatgctggccgagcgctggttgcgcgagcccagtgaaggtaaccgccgtgctgccttcgagttcgccaatgcgggtggctaccgcagcgtaggtgcctggctggcagccagtgccggctgggccgagggcagtctggcaccggcggggcaaccggtggtggtggtgccgccggaccatctggtggcgtgcgccgccgtcgcagcgctgggcctgcttgccgccgagcagccgcaggccttccagcaacgcaggcgtggctatgccgagcaggctctggcgctgctggacgcggcgcgatga

SEQ ID NO: 508471 - DNA, 1290 bp, Stenotrophomonas maltophilia
gtgaatgccatccacaatctgatcctgaccgtcagtggccgccaggccgcgcagttcgggcccgcggcacagaaggtcttcatgcagggtgggggcagcctgggccgttccgacgagtgtgactgggtgctgcctgcctcgggtgtgtcgcgcacccacgcggtggtgcgcttcctcaacggcatgtacttcatcgaagactgcagcaccaacgggctgctgctcaacggccaggcgctggtgcgtggcgagccggccgcacttggcgatggtgaccgcttgcagctggacagtttcgagatcgatgtccgcctgcagagcgtggggccatcgtcgatgccgctgccgggcgcagacgccggcaatcccgacctgacccaggtggtggtggccgcgctgccacggcacgagggtgcagccgtgcctgtgttggaggatccgtttgacgtgctgtggggacgcgcgacgggaggggcctccgcagcgccggatgccatggtggcggacctggcactggcgccgcaggacgaactggatccgttgcgtctgctgcccgccagtgcagcagcgcccgcaccgccgcgcagtgacgccgatggctggcaccacgccgccgccagccacgatcatttccgtccgcccgcaccggtacaggcgacgcagcggttgcccgacgactgggatctgacccagggagacttcagtgcggcaacgccatcgtcgcccgccgctgcccccgcccgcacgccgggggcagcgatgccggaagatctggaccgggtgtttgcgatcgtggtggaaggggtgatggacgtgctgcgcgcccgtgcggaaatcaagaacaccttccgccttccggtcaccgtgatccagcgttcggagaacaacccgctgaagttcgcggccaccacgcaggaggcgatgcagaagctgtcggcgcccgccggtggtgcgttcctcagcggcgctgcggcgttcgatgatgccttcgatgacatccgctgccaccagatggccatgctggctggcatgcgcgccgcttacgaggcaatgctgttccacttcagtcccgaccggatcgagcaggaggccgatggcaacggtcgccgtctggcgttcgctggcaagggacgctactgggaccgctatcgcgagaacttccagcgcatggtcaaggatccggacgactgcttccgccgcttgttcggcgatgagttcgcgcgggcctatgaaacgcagctggctcgctatcgcagcagtcgcagcagcggtggtccacgcccgggctga

SEQ ID NO: 508472 - DNA, 1338 bp, Stenotrophomonas maltophilia
atgacccagaacaacaaggtcgtatggagcgaggggctgttcctgcggccacagcacctgcagcaacaggagcgctacctggagcgctacgtcgacctgcgcgtcgcgcagccgccgtcacgcgcctggggtttcaccgaactggaactggagagtgacctgctggcggtcggcaagctcggcctgcgtcgtgcgcgcggggtgttccccgatggcacgccgttcgcgatgccagccgatgacccactgccggccgcactcgacctcaatcccaacggtcgcgaccagacgatctacctgaccctgccgttgcgcctggcatcgcaggtggatgtgggacgtcctgaatcacccggtgatcagctgtaccgctaccgggtgcgcgaaagtgaagcgctggatgcatccggaagcgtggaggagcgcgtgctgatggaggtgggcagcctcaacgcgcgcctgctgcccgaatcgcaaccgcaggaaggattggcccggatcgcggtggcgcacgtggtggaaacccgggcggatcgccgcgtggtgctcgacgagaccttcattcccagcgtggcgtccagtgcgtcgtcgccgcgactggcaaccttcctggtcgaactgctgggcctgttgcatcagcgcggtgaggcgctggcggcgcgggtagcggtcactgatcgcggtggcgctgcggagatcgccgacttcctgctgctgcaggtggtcaatcgctggcaaccggtgctgtcgcactgggcggcacagccgcagctgcatccggaagcactgtatcgcgcgctgctggcgctggccggcgagctgagcacgttcaccgcagccgggaaacgcccgccggtgttcgccccttaccgtcacgaagcgctgcgcgagagcttcgaaccgatcattgcggccctgcgtggcagcctcagcgcggtgctggaacagactgcactggcgatcccggtacaggaacgcaagttcggggtatgggtggcggtgatccctgatcccggcctgctggacaatgcccagttcgtgctcgcggtgcgcgcggacctgcccagcgaggaactgcggcggcgcctgccgtcgaccgccaagattggtcccgtcgagcagatccgtgatctggtcaatctgcagttgccgggcatcgggctggcaccgatggcggtggcaccgcggcagattccctaccacgccggccacgtctacttcgagttcgaaacgcagtcgcccttgtggcgagcgctgcgtggcgccggtggcctggccctgcatctgggcaacgagtttcccggtctgggtgtgcagctgtgggcgatccgggggtag

SEQ ID NO: 508473 - DNA, 1254 bp, Stenotrophomonas maltophilia
atgaacgcacgggacatgcgcaatccgctgatgcaggatcggcccggcaacccgcctgccgattcaccggattcgcgcgcggagatcagcgagttcctgggtgacagcctcaacccgctggtgcaggcggcaacgccgctgctgctgctggcggtacagctgcgccacagtgcgcaggttcctgaccttgcgcgcctgcgggaacaggccgagctgcaggtccggcgtctggagacacggctgcgcgaagcgcgctatccggccgatgtggtgatgaccgcacgctacgtgctgtgtgcggtggtcgacgaagccgtgctcaacgcgccgtggggcgaacgcagcggatgggcccagcgcaccctgctgaccgccttccacggtgaatcctatggtggcgccaagttcttcgtgatccttgaacggctgctgcaggatccgggccggcatctggaactgctggagctgctgtacctgtgcctggcaatgggattcgctggccgctaccagatcgaggccgatggcagcctgcgcctgtcggcgatccaggacgatctgtatcgccgcatccgcagtcagcgtggcgcaccgccggaagagctttcgccgcgctggcagggcgtggcggagcggacctggcgtggccgttggcatctgccgctgtgggtcagcgtggcggttgcagccagcgtgctgctggtggcgttcctgtgggcgaacgcgcgcttgaatgcgttggcggcacccatcaatgccgaagcggcgcggatgggcctgcaggtcagccatgtaccgaacgcggccgtgcaggtaccggcgctgggcctgaagcagcgattggctgcggaggagcgtgccggccttctcagcgtggacgaagccgctgacggcagtgcccgcatacgactgaacgctgcggccatgttcagttcggggggtatcgagctggaggccgcgcagcggccgctgttggccgccatcgcgcgtgcgatcgatccactgcggggtcgggtggtggtagtgggccataccgatgaccaacccgtgcggtcggcgctgtggaaggacaactacgccctgtcggctgcacgcgcgcgggcggtggccgatgtgctgggcgccggcttgcgcgaccacgcccggatcgagaccgtcggcgcgggcgattcgcaaccactgacgacgccgccgcagttgccggccaaccgtgcacgcaatcgccgtgtcgacatcctgttccagccgggggactga

SEQ ID NO: 508474 - DNA, 3486 bp, Stenotrophomonas maltophilia
atgcaggcaatcatgggcgcgctgcgccgggtgaactgggtggttgccgccggcgtgttgctgctggcactgctggtgtggttcggcggcccctgggtcgcgattgccggacgcgtaccgctggcgggcgtgatggcgcggctgctggtgctgctggtactggtgctgacggtgttggggatcgtgctggtgcgccgctggcgccggcgccgccgcgagcagcgcatgggcgaagcgctgcgccagggggatgacccggcgcaacgcctcgccagcgagcgcagccagcttgaacgccgcttcgaggaggcgttggccctgctgcgccggcgccgtggggggggcatcggccagctgccgtggtacctgctgatcggcccgcctggatcgggcaagaccacactgctgcagaattccggcctgcagttcccgctggccgcacgacttggcaacgatgcggtgcgcggggtgggtggcacccgccagtgcgactggtggttcaccgatcaggccgtgttcctcgataccgctggccgatataccacccaggattcggaccgtacggtggacgcggcggggtggcgggacttcctgcagctgctgcgtcgccaccgtcgcgcgcgcccattgaatggcgtcgtggtcagcatgagcctgtccgatctgctgcagcttgatgcaggcgagcgtgagcagcatgcacgtgcgatccggcagcgcctggatgagttggccgagcagctgcagctgcaggtgccggtctacctggtgctgaccaagtgcgatctgctggcggggttcggcgagttcttcgacgacctgggtgcagacctgcgcagccaggtctggggcaccaccttcccgttgcagaagacgctcgatggcagcgcggcgcgcagtttcgccgatgcctatgcgcgactgctggaccggctcaatgcgcgggtactgcaacgcctgcacgatgagcgcgaacgtggccgccgcgcggcgctgctcgcgttcccgccgcagttcgccgctctgggcgagagcgcgcggcagttcatcgagtccgccttcgcagggcatgcctacgcacccgcacccttgctgcggggggtgtacttcacttcaggtacgcaggaaggcacgccgatcgaccgcatgctcggtgcggtggcacgcagcttcggcctggatgcagcacgcgcgcctgcgccttcggctgcaccacggaccttcttcgtcgagcggctgctgcgcgaagtggtgctgcccgagcacggactggccggcttccagccgcaggcccagcgccgtcgtcggcgctggcactgggccgcccaggctgccgtgctggtggtgtctgcaggagggctggcggcgatggcagccagctaccagggcaaccgtgactacctgctgcaggcgcggcaggcgatgcagcagcgcccgcagacgccggatccgggcgcagcgaccgacctgcgcggctatctggagcgggcggtgcagcgaggccaggcaagtgccgctgcggtgacggctgctgcccccacgcagccggtgccgtggcgcatgcgctggggcctgtaccagggggatgccgtgcagcggacgttgcgtgaggcctacctgcgcgaactcaacgcgacgctgttgcctggtgtggccgcgcagctgcgcgagggtcttggcgacagcgcgtccgatccgcagcgcctttactactacctgaagggctacctgatgctgggcgagcctgcgcgcctgcagccgacgcagctcggcctgctggccgggctcgacgcacggcaccgtttcggcggcgacacggtgctggccgacgcctatgacacgcagctgtcggcattgctggctgcgaaggggcagctgcgcgcgatccgtcctgatccgctgcgcgtggaacaggcgcgcgccagcctgcgtgcagcggaactggcgacgctggtctacagcgacctgagcctgcaggcccgtgcgcagcctgccacgctgcgcctggacaaggcgctgggcctgcaggccgacgcgttcgagcggcgtagtggcgtaccgttgtcgtcgccgtggccggcgctttacacgcaacccgtgtttgcccagcttgcccgcgaaggcgtggacgacgccgttgcgcgcttcgttgccgatgactgggtgcttggcccacaacggatcgacgcattggcgcgggcgcggctggtacagcaggtcctgcgtcactatgagcgtgactacatccgggcctgggatgaactgctggccgacctgcagttgcgacccggtgctgatgatacggaggcttccgcccagctggcacgcattgcaggcccgacctcgccgctgcgcctgctgctggtgctgctgcgcgatcagacccaggatctgctgcgtgtgcccgccggcaatgcggcccgtgcaacggcagatgccgcgaaggccaaggtaggtgcggcggcgctggccagggcaggggccggcggcgctgcgctgcaggctgcactggcaccggccgtgggggaggcggccgcacgccctgccggagcagcgatcagcgatcacttcgccgcactggcccaactgtgtgcgggcgctcccggcgcgacgccgcttgaccaggccctggccagcttcgcgcaactgggcgagcggttgctggcgccccctgcggcgggctcggttgatacccgactgcagcaggccaggcagcaggccgcgcagctgcctccacctgtttcgacctggttgctggcgctgaccggccagagcgccgcagccatcggcgcgcaggaccaggccgtgctcgacgagcgtgtcgccaccagcgtgggccaggtctgtggtgaattcaccggtcaccgttatccattcgatcgcagtgccagcgaggacacgccgctgcagaatttcgccgaactgttcggcaacggcgggcgttttgatggcctgttccggcagaccctggcgccgctgctcgatacgcgtacgcccacctggcggtggaaagaggttgccccccccggcagtgacccggcgctgccggcgcgcatgcagctggccgatgcgatccgccagaaatacttccgtggcggcgaacagccgctggtcgagttcaccctgctggcaccgcagctggatgaaggcgtggcacggctgcagatcgatatcgagggacagacgctggactacaccgccggcgccgtagccagcctgccggtgcgatggccgggcccgactcccggccatgtttcggtagcggcgttcgacgcagccggcacgccactgggcgcgctgcagttccagggcgactgggcactgttccgcgcgttgcaggcgggcatgctggaggcgcgctcggatctgcgctacgtgctgcatctggacatcggtggccaccccacggcgctgccgctgcaggcccgcaacctgcgccatcccttcaatgacgccgacctggcacggttccgctgtggcagctga

SEQ ID NO: 508475 - DNA, 627 bp, Stenotrophomonas maltophilia
atgacgccgacctggcacggttccgctgtggcagctgatgcatcgtcgctggcgccggtggttggcttccacggcaagttgcctggtatcggcgatttcgcgcggcgccgcctgtccgatgcgctcgtgcaggcctgggatgcgcatgccagcctgcagttgtcccgtcatccccagctggccgggacggctggcaacggctggtcgttcgctctggccgccgggctctgcgacgtgcagggctgggcgggcgtggtggcgccatcgcgtgatcgggtgggccgggccttccccttgctgctggcgttgccgctgaccactgaggacccgatgcaggctccgctacttccctgtgcgtgctggttcgacgcgctgcacgcgctgcaggcacaggtgaggcagggcgcgctgcagctgccggatgcgctggacagcgcctgtcacgaactgccacgggcatggccgggacaggccggccctgtcgcgtggcagacgtgctgggcgcagcgtggcagcctgtggtggcgcgacgcgcatgcccccagcgcgctgccgggcctgcctgttggcggtgtactgccgcacgcggtcgatgccccgtgcatcctcgaagagcgtgcgccatga

SEQ ID NO: 508476 - DNA, 723 bp, Stenotrophomonas maltophilia
atgaatgccatgggtacccgctatgcatcggccggccacaccgacaccggaaaggtacgccggctcaacgaggacgcgatcctgctgcgtgacgacgttggtctttgggtggttgccgatggcctgggtggccacgccgctggtgatttcgccagtggcctgatcgtcgagcggttgtcgcgcctgccacggcaggaggacgtggtcgatttcatcgaggccatcgaggacacgctgcagcaggtcaaccaggagctgctgcgacgcgcgcatgacctgcgtgtggacctgatcggctcgaccgtggtggtgctggtgcaggaccgcgatttcatgctgtgcggctgggtgggggacagccgcgcctatggcatggaagacggctgcctgcgccagcttacccgtgaccatgtgcacggcatcaaggacgacgccacccagttcgccggctctgccgccgtggccgcgcctggcacgctgacccgggctgtcggcgcgcaggagggcctgctgatcgattggatcgttgccagccatgccgcgggcacaccgttcctgctgtgcagcgacggggtcaacaaggaaatccccgatgccgagcttgatatggagtgccgtcgccagcgcgagccacgcgtgctgctggcgcggctgttcgaactggccctgggacgcgccgcccgcgacaacgtgtcggcggtcatcgtgtgcaggcaggagtga

SEQ ID NO: 508477 - DNA, 3558 bp, Stenotrophomonas maltophilia
gtgcaagaggacacgacctccgtggttgaactggtaaccgccttcagcaggggagcgctggacctgcctgcactgctgcgggcgctggcccggcatgaccacgtggccgatgccgactatcgcaacggtgtggacacgctgtggcgcatgcgccagcagcaggcgatcgacgaggtgtcgatgaataccctgctgcagcgtctgcaggatctgcgcgatgccagtggcagcacgctgtcgcgcgatgacgatgccaccgtggtcaagcccgcacgcagcgccgtgccggacgagatgacacgtgtgcagcccggcgaggatgtcgcgcgcacggatgcggctgccgagggtcgcaccggcggtaccgcgtcgcagagctcgagcctctcggcatggcagcaggttgcggcagccgcgggccagacagtgacggttggcagcctgctgaagggacgcttccagctggaacgcgaactgggccgcggcggcatgggggtggtgtacctggcccgcgatgcgcgcaaggtggaggcgcgtgatcgcgacccctggctggcggtgaaggtgctcagcgatgagttccgtcgccaccccgatgcgctggtggcactgcagcgcgaagcgcgacgctcgcagcagctggggcacgacaacatcgtgcgcgtgtatgacttcgacaaggatggcgccatcgtgttcatgacgatggagtacgtcgatggccaggacctgcgcacgctgatccgcgagcaggcctttgatggcatgccgatggcccgtgcctggccgctgatcgagggcatggccggcgcactgcgccgcgcgcacgcctcgggcatcgtccattccgacttcaagcccggcaacgtgatggtcaccgcgcaaggtgtaccgaaggtattcgacttcggtattgcccgcgccggcaagcatgcggtggatgtggcgggcgaacagaccgtgttcgatgccgcctcgctgggagcgctgacaccggcgtacgccagcctggagatgctgcgtggccagccgccgacaccggccgacgatgtctatgcgcttggctgcgtctgcttcgaactgctcggtggccgccatccctatgacaaggccagcgccgaagtagcactgcgcgagggtcggcgcccgcccgcgctgcgcggccttgggcgacgcccgtaccgtgccctctgtgcggcggtggccctgcctgcggacaaacggctggccaacgtcgatgcactgcttgaaggcctgcgtccgcgcagctggcgtgaacgcgtactgccgcgggtgggctatgcctctgcggcggtggtggtgctggccggcgccggtgtactggtcaaccgccatgtgcacgagcagcgcctggccgaagtgagtgcgcggttgggagccgatgatccgcagcgctatgaagacgccgcgcaggcctgggaaggtctttccagtctcgatcacgaacagcgtgccaaacttctgctggaccacccgggactgatcgaaggcttcctgctgcggcgcctggatgcgctgtgggcgccctccgccggccgctacgactacccggggacgcaggaagtgttcgcgctgcgcgatcgcctgcgactgtactcacccacgctcgatgcgcggcgcgagcgcctgcaggccgagcgagaccaggcgctcaacacgctcgacacccagcgccagcggcacattgccgagggggatctgttcggccatggcagcggcagcctgtcgggagcattggcagccatcgccgcgatcgatccgcgcaatccgctgctgcgtgatcctgcgctggaacaggcctatgaacaggccatcgccagtgcgttgggacagggtgacaccgcgcaggcggaatcacggttgcagcaggcgcagcgcagcttccccgatgcgctggggttgcgtctgcaggcggcgcaactgcgggtggcatcgcagccggatctgcaggtgaccgcgctgcccgccacagtcgcgcaggcgcgggagcgcctgcagcaacgcctggccaacccgagcgccgatgccgcttggcagaccgatgtcgcggccgcactgcaggtgatccggcgcgatgccggcgccgacctgcctgcggcgcagaacgcgctggccactgccgtggctgccatcctgggaggacaccgggaaccgacgcagctaccggatgaccttgtgctgctcgacttcgcacgtcgccaggcaccggacacggccgcgttggcggcggctgccagtcagctgcagcagcgccagcaggcactgcagcagtcgctggccgacagccgcagtgatgctgcattggctgcgcagagtgaatcgctgcggcgcgcgatcgccgctggagacctggacaaggcacaacgcacctggcagcagctgcatgtggtgcagcccgatgccccgttcgtgcgtgagcaggcgcccgcactgctggaccaggctacccaggaccaggcggtgctgcggctcgcccagggtgatccggcagccgctgacgcactgctggcgcgcgcgctgcaggtgatgggcgcgcgtcccgtactgcaggcggcacgtgcacgcctggacgtggtggcggcggtactggccgccagcacgcaggcatcgacgaaggacagcgagcgcgagcggctgcgccagcaactcgatgcacagtaccgccgtgatccgcaggcgatggagcggttggaaaaagcgctgcgaacgcacgggcgtctcaagggcgattcgctgcaatcgctgctgcagggagagaagggcgcgatcgtggccgcacaaccgccaccggcctcagcggcaacggccactggcggcacgcatgcagcgcgcaatgcaccgcgtccgcctgcggcaacgccggtcagcgctgccgtcgccgcggcggccgatgcggatgatgcgccgttgccaccggtgcccgacggccccgatccctgtgcaggtctggccgggcgtgcacagccctgctacgacgcgcttgccgatgcccgtgggccgatgctggtggtggtgcccggggtgtcgggcgggcctgcgtatgcgctttcgcgcggggagatcgcggtggatgacttcaaccggtactgccgggccagtggtcgttgcagtgtgcagccggcatccggcgagcaggggcgatggcccgcacgcaatctcagcctcgcccaggcgcagggctacgcgcgttggctgacccgcgccagcggcggctggcgctaccgcctgccgagcgatgccgagtggctgcacgccgcgcaggcgcagcaacaatggcggcaggcgccggacagcaactgcattccgcccagtgccagcgctggcagcggtgtgccggtgggcgtacgcggccgcgagccgaatccgtggggcctggtcaacctgaccggcaacgtctgggaatggaccagcaatggcagcgtacgtggtggcagctacgccagcttctggtcggactgcacggtgcaggcacaccgcgcgctggctggtgccgcgcagccggatgtcggcttccgggtattgagggagctgaagtga

SEQ ID NO: 508478 - DNA, 285 bp, Stenotrophomonas maltophilia
gtgagcggctgggaagagcacgccaaccgcagcctgcagtcgttggccgatgcccaccagcgcggccagatcgacctgcaggaataccgcgctcggcgccgtcgggtgctgcagggcgtgcgtgaacgctgcctgcagacccagaggcaccggcctgcggaccctgttgccggggtctcgccgggtccgacgaacggtcgctcacgaagtgcgctggttctcattttgtatgtcatgctgacgatggggttgttgctgtgcatctatgtcttggcagttggctga

SEQ ID NO: 508479 - DNA, 1665 bp, Stenotrophomonas maltophilia
atgccattgaagcgttcgtcgtttgcgttgctgctgtcggcagccctgccagtcgcggcgatggcccagcaggtcgaaggggggccggccaccgcgctgcccgacatggccgcgcgcaccggcaaccagaccctgcaggtgcgcggcttccgtgccagcgacgttggtgagcatccgcagcgtggcatcacgcctgcgcaggtgcaggccgtgctggatgcctactttgcccgcctggcgcatggcgcagatgcggtcgcgatggactttgcgcagctccagggggcggccgatgcggtcactgcggcctatcgcaaggcgggcttcctggtcagcgtcgcctacctgccaccgcagaaacccgacgctgaaggccgcatcgaagtacgcgtgctggaagggcgcatcggcaaggtagtggtgcagggcaaccagcgttaccgcacccatacgctcagcaacgtggccgagcgcctgcgcgggcagccgctgcgccaggccgacatcgacagcgctttgctgtatgcacgtgacctgcccggggtatcggtatcttcggtactgcagcccggtgagaacgttggtgaaaccgatctggtactggtcgcgcgtgaaagtggccggccgtacgaggtcagtaccagcgtggacaatcacggtaccgagttgaccgggcgcgggcgcgcccagctgggcgttacctggaacagcccgctgggcctgggcgatgtattcgcggccagtggaacctatgcgttcgatccgcaggccagccgcgccggcgcgctgtcctacagcgtgccgttgcaggcggtgcagggactgtcggtgctggccggcgccaaccgcagcgagctggaagtggacgacggcatcctgcgcggtttcaagctcaagggcccggcctcgcaggcctatgccggcgccgactggaagttcatcaaccgccccgacctgcaggtgaccagctcggcgcgctatatccgcgagagctcgcgctttgaagcgctgggcctggtgctgtccaagcagaagtacgacgtggccgaggtgggcgccagcctgcgccataacgatgcgcgctggcatggcatcaacctggcacagttgagcgtgcgccagtcgctgcgcgatcgctcggccgacttcgatgcgatcaacccgacccgcgacagccggttcaacgtggtgcgcctgggcctgctgcggctgcagtacctcagccgcagccaacgcctgttgttcaagttcaatggccagtacagcaacaactcgctgccggcgctggagcagttccaggtgggtggcaacgacagcgtgcgggggtatgcgcagggcgagacgctgggcgatcgtggctggtacggagcgctggagtaccacgtcgatgcgccgggtttcggcgacgtcgcctcgccgttccgcggggtgccgtggcgcgaagtactggagctggacgtgttcgccgaccaggcgcgcgtgttcgatgtcgatgggctggaggcaccggccgatctggcatcggtgggaatgggcgcgaccttccgcctgcgccagtggaagaacctcgaactgcgcgtggcggcggccaagccgaccagcgccctgcgaccgggtgacggccgcgatgtccgcgtgtatgcgcggcttggcctgaccttctga

SEQ ID NO: 508480 - DNA, 7539 bp, Stenotrophomonas maltophilia
atgaaccgtatctaccgactcgtcttcaatccttcgctgggccaggtgcaggttgctgcggagttcgcgcgcgggccgcgtcgctgtgtcccggggcgatcacgcgccgccttgtggctggcacccctgaccgcggcgctgctgctgaccggcagcctgcaggccacggcgcagaccctgccacagaacggcaccattacgtcgggctcgggaatcatcaacgtcaatggcaacaccatgacggtcacccagcagagccaggctgcggtgttccagtggagcagcttcagcatcggctccggcaacacggtcagattcgatcaggcgggctcgaggtcgacggcgatcaatctggttaccggcccgtccgccagcatcatcagcggccagctgctgtccaacgggcaggtattcctgctcaatccggcgggcattacgttcaccggcactgccagcgtcaacgtgggtgggttgctggccagcaccttgatgcccggcgcacaggggattccgctggatggtggtgtgttgccacccagtttcgaattgggcggcacagggaccaatgccgcggtcagcaacctgggaggcacgctgacggcgacggccggaggcatcagcctggtcggcggttcggtgttcaacaacggctacatcgcggcaccgctcggcaatatcgatctggcggcggccagtgcggtcaccgcggtgaccggcgtgtcatcggccggcatgccaagcctggcgttcgtcaccaccgcagcgagtggcatggcaggaaccggtatcagcaacgtcggtaccctcagtgcacgcaacatcagcatgacggcgctgatgggacctggtctttcctccaccggcatcaacgcgggtggcacgatcatcgccaatgcgattgatggcgccgacggcagcctcaccatccgcagttccgcaccggtggcgatcaacgatgccatcatcacggccaacgcgatgtccacggtgggatcggctgtcatgggggggccggtcgccatccagatgaccggcggcagcatcgacgccacgaccgtgaacttgaatggcggcatcaacggcgacgtggtgctgtcaggctcgatcaaggcagactcgatcggaatcgacgcgaacaacatcacccagaccgcgggttcgctggagggcgcgctgcaactggacacgcagggccgagtgaccctgggacaggcgagcaatgccatcagccgcgttggcggccatgtcggtaccgacctgaccctggccacctcgaccagcctggcgaacagcggggcgctgtcggtaggtggcaataccacgctcgacgcagctgcgggcaacatcaccctgacccatgccggcaacagtttcggcaaccgggtcagcgcgaaaggggccgacgtcagtctggtcggcatcggtgcactgaacctgggcgatatcgatgcgcgcagcctggatgcgcagggcggcagccttggcctgagcggtacgatcaccacgtccggtgaccaggcctatcggtccgcagtgacactccagggcaactcgacgctgcagggcggaacgatccggttcgacggcacggttgatggcagctactacctgggtgtcgccgccagcggagtgaccaccttcctgggcgccattggtggcagtactgcattgcagggattgaatgtcgccaccggcagtggtgcgcgcttgtccggcgacgtcaccacccttggcatgctcgcgttcaccggtccgttgcaggtatacggatcgcgccgcctgacttcgctgggcggaaacatgacgctgggcggggcggttgacggtgacggtggcgatctgagcctgagcgcgcgccagctcacgctcgccggcgcagtgggcgccaccggaccggtggatcgcctgtacgccagtgccgataccatcaccctgggcagtcgcattgccagcagacgcgagatgctgctgcagggcgacatccggctggacggcaacacgcagctggtcagcaccaatgatggcgtcatcaccaccgatggcatttccagcaacatcggcagtggctacaacctgacgatcagcaccggcaaccggatccaggtcaacggcaacatcagtgccgccgatgtcgacatcagcggactgatcttcagcggtcgcggcatcgtcagcaagggcaacctcggcatcgactcccggctcaatctgctccagaccggcagttaccaggtcgacggcctgtcccggttcagcagccagggagacatcacactgactgatgcaggcaaccgcttcagcggtgaagtcgcgctgcagggcgggaacgccgaacttcgcgcaggcgacctgctgctgggtagtacttcgctgcagggcagcctcgggctgcatctcactggcggactgcagcaggccagcggcagcgcgctgaacatcgggggtaccacccgcatcgacgccggcggtcccatcaacctcgacagggcgaacggcttgggccagccggtcaaccggtttggcggtgaggtgtcactgaagggtcgcggcagctacatctccgctgcgggcacgctggccttctccgatttcgatgtggacagcctgttggcgacggcggatgtcgtgcagcttcccgccagcggcaggagcatcggcctgcagtacttccagggcaatgtggtgctgacccgcgacagcgtgctggacagccagcttggccagatcaacttccgggggcgcatcgatggtgggtacgcactgacgctcgcacgcgggctcaacgtggtgtttgccgatgacgtgggcggcaatcaggcgctcgccagtctcgacatcagtggtgcgggtccgctccagctcggcggcaacatcacggccgacggcgcgatccggctgggcaacgtcaacctggcttcgaacaccccccggttgttcagcgtccgcagcaacaacggcaacctgctggcgggtcgtatcgacggcagcagcgatggccgcagcagcctggcgctcaacgcgcacggcgcgcttgaactgcagtccggtgcgggtaccacgcccggcgcggggctggccaatctcgaactcaagggggcaagcgtgatcgcgcaggcgatccgcaccagtggccggcttgacgtcagcagcaccaccgggttcacccagggcggtacgctcactgtcggcggcgatgccagcttcagtgccggcagcagtggcaacctgatgctggatacaacggccaacacctttgccggcaaggtcgcgttgagcggcaaccaggtgcggatccgcgcgcagccgggcctggcactggatggggtgacggctgcggcgctggatgcgggcagtgcgggggcgctgtcgttggccaatgccaatgttgccggcactgcggtccttgacggtacgtccctgctgttcgaccaggtgagcattggcggagccctgctggctaccgcgagcgccggcgacatccgccagggaagtgggagcctggcgatcggcaacaacagccagctgacggccagcaccgatatcgtgctgggcggaaccggcaatcaactgggcagcgcactgcaggtacagggccgtgacatcgccctgtccagcagcacggcactggatatccagcagctgcaggctgcgcgcgatgccgtgctggcgggtaacggcgtgcggctcgggaccacctccgtgcagggaacactgcaggtgaacagcaccggagcgatcacccagtctgctgcgctgcaggtggcgggcaacagccgcttccaggcgggttcggacatcaccctggaccaggccggcaatcgtttcgacggcagcgtcgccctgcagggggccaatgttgccctcggcaccagcggtggcctgctgttcgacgccgtatcggtgtcaggaaacctggatgcacgcgctggcagcgccggtgtttcccagcaggcggcagtccaggtcggcggccgcagcgatatccgcacgcagggcgccattgcgctggatcgtgctgacaaccggttcacaggtgcggttggactcgacggaaagggtgtcgatctgcgcgccgcgggcgatctgcagattgatcgtctgaacaacgccgggcaatccgatgtacgcctgcatgcgggcggaggcctgcaactgcccacctctgccatcgatgccggtaccggcaacctgaccctgctcgccgatggcggggtgttgcaggccaatgcgctgctggccggcaacaacgtcacgctgacaggccgcgatggcgtgcggctgggcggtgacctgcgcagcggtggttcactgaccctgtccagcagcaatgctgacatcgtgcagatcgctgcgcccaacggcgtgggcggcagcgtgcaggctgcgggtgcggtgcaggtcaacgcaggcaacggacgcatcgccctgggcaacgccggcaaccgtttcggtggcgcgctcaacctgtccggtggtgatatcaacgtggccgccgatacgctgctgctgggcagcgtcaacgcgggcggcacgttgtcgctggccagcgacggcgacatccgccagcagggtgccgtgcaggtggtgggcgcgacccacctgagtgcaggcggtgacatcgacctgcaggcggcgggcaaccgttttggtgatgccgtggccgtgcagggccggcaggtggcgttggccagcaccgaccccctgcagctgcaaggggtgacggcggacagcctgatcgcgcgcagcggtggccacttgagcctgggcgccgccggcatcgcgggcaatgccatgatcgaaggggcctccctgctgctggatggagccaccatcggcggcacgttgttggcgaccgcacacgcgggtgcgatccgccagggaagtgggagcctggcgatcggcaacaacagccagctgacggccagcaccgatatcgtgctgggcggaaccggcaatcaactgggcagcgcactgcaggtacagggccgtgacatcgccctgtccagcagcacggcactggatatccagcagctgcaggctgcgcgcgatgccgtgctggcgggtaacggcgtgcggctcgggaccacctccgtgcagggaacactgcaggtgaacagcaccggagcgatcacccagtctgctgcgctgcaggtggcgggcaacagccgcttccaggcgggttcggacatcaccctggaccaggccggcaatcgtttcgacggcagcgtcgccctgcagggggccaatgttgccctcggcaccagcggtggcctgctgttcgacgccgtatcggtgtcaggaaacctggatgcacgcgctggcagcgccggtgtttcccagcaggcggcagtccaggtcggcggccgcagcgatatccgcacgcagggcgccattgcgctggatcgtgctgacaaccggttcacaggtgcggttggactcgacggaaagggtgtcgatctgcgcgccgcgggcgatctgcagattgatcgtctgaacaacgccgggcaatccgatgtacgcctgcatgcgggcggaggcctgcaactgcccacctctgccatcgatgccggtaccggcaacctgaccctgctcgccgatggcggggtgttgcaggccaatgcgctgctggccggcaacaacgtcacgctgacaggccgcgatggcgtgcggctgggcggtgacctgcgcagcggtggttcactgaccctgtccagcagcaatgctgacatcgtgcagatcgctgcgcccaacggcgtgggcggcagcgtgcaggctgcgggtgcggtgcaggtcaacgcaggcaacggacgcatcgccctgggcaacgccggcaaccgtttcggtggcgcgctcaacctgtccggtggtgatatcaacgtggccgccgacacgctgctgctgggcagcgtcaacgcgggcggcacgttgtcgctggccagcgccggcgacatccgccagcagggtgccgtgcaagtggcgggcacgacccgcctgagtgccggcggtgacatcgacctgcaggcggcgggcaaccgtttcggtgatgccgtggccgtgcagggccagcaggtggcattggccagcgatggcgccctgcagctgcagggtgtgacggcaggcagcctggtcgcgcgcagtgcagaacgcctgaccctgtccgcggccgacgttgccggcaatgtgacgctgcagggccagcagctgcacttcggcacgacacatgtgggtggcaacctgcaggccacgggtagcaacggcatcgatcaggacggcacgctgcgcgtggatggcagcaccgacctgcgcagtgatgcgtcgattgcactgggatcggctggcaacgagctgcgtggcgtggtgtcgctggctggcgtgggtatcgatctggccagtgcgggcgacctgcgcatcggttcgctcgacaaccgcagcgccgcagttcgcctgcaggcaggaggctcgctgaacctgcccaccggcgtgatcgataccggcggcggtgacctgcagctgctggccggcggcgcattgcagttgccggcggcgttgcgtggaaacaacatcaccctgcgcagcggccaggacctgcagctcggccaggacgtgctggctgcgggggaactgcagctcggcagcggtggcgcgctgacccagagcggtggtgtgctggccgcacagcgcctgcagggcagcgccggcggcaaggccagcctgcgcggcgacaaccgtatcgccacgctcggtgacttcagcagccagggcctggagctgcggaccacgcaagggctgcaggtgaccggcaatgtgcaggctggcgcgcagggcctgctcgacgtgcatggtggtgatctgcagctcaatggcagtgtgcaggcgggccagctgcgcctgcagtcgtccggcgcgatccgtgccggtgctggtggacgcctgctggctgatcagctcagcggacgcgccgccgggccgacgatgctgggcgacgcctcgctgttcgtggccaatgccatcggtaccctcggcgatttccagtcgcccgcaggcttcagcctgaccaacgccggtaccctggcccttgcctcgctcaacggcagcgcattcagtgtcgatgcgggcaatagtgggttctacctgaaggtgcagggcggtgacatccaccagctgggcaccacgccggtgctggccggtgccagccactggtggtccagcggcagcatcggcacccagcccttgccgatctatctgaccagcgccggcagcagccacgtggtggacttcatcggccgcccaccggcgtacttctatggcatcggtacggatggactgccgctggtggtgggcggcggcctcaacctgcccacggcgatcgttggcgcgcggacccagggcagcgtgctgccgcgggttgcctatgtcgacatgggcgcattgagtgcccagtaccgcgcgttcggcatcgtccagcccggcatccgcctgccggccgaccagaccgtggcctgtgacagcggtgacccggacgcggagtgcgcgcagtga

SEQ ID NO: 508481 - DNA, 1035 bp, Stenotrophomonas maltophilia
atggaccgcaacgacctgctcgaccgcctgtgcgcggcactgcccgagggcagcgcctgtggcgacaacctggaatacgatccggccttcctggccctggaccaggcggcggcggcgcgcgccgagcgggtcgtcggcgacagtgtgctggccgctgaagaacccgactgggaccgggtcggcgagcaggcgctggcactgctgcagcgcacccgcgacctgcgggtggcggtgcatctggccacggcatggagccggcagcagggctgggcgggttgggccgatggcctgcgcctggtgcagggcctgctgcagcagcaatgggccggggtgcatccgcagctggatgcggaagacgatgacgacccgactgcccgggtcaacgcggtgctggcgctggccgatccgctgggggcacttggtcgcctgcgcgtgctgcccttcgtgcagtcgccgcggctggggcgcttcgccctgcgtgagctgcgtctggccgaaggcacgttgaagggggcggcagagtccccgccttcgccgggcctggaggagatcgacgcctgctgcctggattgcccgctggagatgctggcggccagcaccgaggctgcgcggcagtcgctgcaggcggcacgcgcgatcgatcagttgctgggtgaacagctgggaccggcggctccggacctgaaaccgcttctggacgatctggccacgctggatcgctacctgcaaccgcgctggcaggcacgcagcggcagccaggccggtgcgggcgacgaggaacatgacgcgtcacaggacagcgacagcgcaggtccggtctcaagccgcagccaacgcatcgaaagcgccgacgatgtgcgccggcggctggacgagatctgcgagtactacgcgcgctgcgaaccgtccagcccggtacccctgctgctgcagcgggcgcgtcgcctggtcggtggcgacttcctcgccctgctgcgtgacctggcgccgggtggcatggacgaagtgggacgggtggtgggccgcaccgaatag

SEQ ID NO: 508482 - DNA, 1164 bp, Stenotrophomonas maltophilia
atgcctgctgttgttgccctccgccaccgcgctgcgggttggcgctccctgctgttgctcgcgctggcctcggccagcctgccggctgccgcgcaatcgatggcctgcggcacctacaaggacagcggcggcactatcacgctgaccatcgagagcgaaggccacggcttcctgtccggcccctaccaggccaccgaggaactgcgcatcgcccgccaggaagatgtgctcggcaccggcaacctgtccaccggccgcctggaaaactggtacttctcggacaacgaccgcacgatcaacacgccctatcgcgagttcacccgtgagcatgctgccgcctgcaagacgatgcccgagcccatcgagggtggctgcgtgatgtacacctccgagtgcctggaggcattgccggaggccgcgccggtgaagctgcacgcctggtgtgccgagggcgtgggcgcggcctgcacccagctgctggagacctaccagcagcaggccaaggacgccgcgccggaaacgtccgaaccgccgatgcccgagatctgcaaggaggagtcaccgtcgttcgacgccgagggctgcaccgcagtggccaggaagatcgcttcggaaatgatgggcaaggccctgctcggcctgcagcattcggtggatgcgccgctgccgcccgcacagctggatgagctgaccgagctgtgccgcgtgcaacagggcgaaacattctgcgccgacgtcgccgaagccttgtggagcggtggccgcctgcagcaggcccgcgatgcgctgcagcgttcctgtgctcagcgcgcggatgccccggcctgcgggcctgccaaggaccttgccgttcttgccagcgcctccgcgtccgcgctcacgccagtgccagccaccgcgatgccctgtggcagctttgaagccgagcgcagcgtgctgtcgcagctgcgtttcctcgagggtggcgtggtcgaggccggaggccgcgaacagccactgcgtgcgagcctgcgcgaaggccgcatcctcatccatcgcgatatcggcagcgacttcgtgctgcaactgctgcagaacggcaacctggtcggcatcgacagcggcaaccgtttcgcctattacgagcgcaagcctgctgcgggcaacgcccgctgcacgccatga

SEQ ID NO: 508483 - DNA, 1122 bp, Stenotrophomonas maltophilia
atgcgcttgctgacacttttccctgccctgttgctgttcgccgcgctgcctgccagtgccgatgcgctgcgctgcggcgagtaccgcagcgtcgacgacggcatggccctggtgttcaccacccccagcagcggctaccgcgacaacggcatcggtgagccggagccgctgtgggtcgatcgcagtgcggcacagacgcgcctggtcatgctcgacgatggcgtggcggagccgatccggatcagcgccgatgggcggcgcatcgaggacgacgtgttcgtggtctataccctgcgccagcccagggcctgcgctgtcgagcccagcgctgtggccggcagctgccgcgctgctggcagttactgcatggtgcagctgccaacggcctcgcccggccaggcccggcgcgcctgcgacgagggtgtgggcgccggttgctcggcgctgctgcagcagagactcgaaagcaacaccgcggcagcgaccgatggcgccggcagtgcgcacttcgagcgcccgccagcctgccgcgagcacgcccccacccacgatcctcaggtctgcgaagcgctgaccgacgatgatctggctgccgccatgcgacgggttgatcagcgcctggaacaggccgagaaggcaccgaagggaccgccgttgcccctggcggcgctgcaacagctgcagcagctgtgcctgcaacaccgtggtggccgcttctgcgtcgaagtagccgcgcaacagttggacgcgctgcaacctgcgttggcggtgcaggccctgcaggtggtctgcgatgctggacgcgtcagtgcctgcgaacgtaccgcaccgctgcgtgaactcggcgccgacctgcacctggtggcgctccaacatgtgccgtgtggccgctaccaggccgacggtggccagttcgacagtttcgacttcggcgacggcacgcaggcccgcctgcacgaaggcgccgtccagctgcaacagaacggcgaaacgttcgtactgcgccagctcggcaacggcgacctgctcggcatggacaaccagacggcctaccagcgttaccagcccgtgccaggcacggcacaatgcatgcccccgcgcgagggtcgtggttcgccgtag

SEQ ID NO: 508484 - DNA, 1212 bp, Stenotrophomonas maltophilia
atgagaacttccgtagaggatctcaggagagcaattgaagatccatgcagaacggttgacgtttgctcagtactgctggatgcatggtttgaagtaactccacgtcgtttgggtgaggctctttcaaaattcagagatgagcggattgagaataaaggtcatattgagaattttgaaagaacattcaagaaattggatcctgcggcgagaagaagattgcttggctccccatgggtttccggattcatggatgatccagatggggtgtcccatgaagatgcagatggaaggcctgtcacgaccatcgaagcgcttcatctcgccgcaatggcggaatgtccagttgctcccatccatgacgaaatgggcgaacttcaccgagggacggtaatcgaaagtcctcttggggagtgggtgatcaggcggagtgaatccgggcttgaaaaggtcgagcgcgcaaaagtaggaggtgtgatcgctctggacgtggatagtgggctggcgcgtcgaaacgagccggagagcggaacgttctgcaatccattcctgagcatctcatcagaagagcttgttgtaatccaagacaagctggaagcggccatggggctggtggacgaagccactccacacctgggtctcctgattcggacattcacaaggcgtgtgcttgtcaggaagtcgatcgagtcggatgatcaggcttcacctctgaatcttggatccgagtatcggccgattcatgcaggttgcatccgaattctcaatgtccacaggccggaaatgaccgtggatctttgcgcagaggcaattctgcatgagtccgtccactcgtacctctccgcctatgaagaggtacatgggaagttcatgtcaggtgcaatcagggttcgtccggtctcaccctggtcaggtaacttcattccaaaccactcactggcgcacgcggtttttgtctactacgccatccatcagcttctcgggaggttggttggtatcggtgctggggttggagaagaagccgtgaggagaatgaagcgacggctgatgcacgtagcaggcggattcttcatcgaacggaggatctcgacgctgttcgtattggagtcacccgcgtcggtgcagctgatggcagtcgtggatgaaattcaggaggagatcagggccgagtacgggcagagaatgccaaaggaaatgttggagagcgcggcatga

SEQ ID NO: 508485 - DNA, 1233 bp, Stenotrophomonas maltophilia
atgctggaagcgctgagcgtcgccgcgctggctgaagtcgccggccgcggcggccgaggccagctgctggatctgggtgttgatcgccagcaggctggccttggccgcatccatcgattcgtgcaggatcgcgcggctgccgggcaggcgccgggcgtccggggcgaggttgccgatggcgtactggttgagcacgtcgatggcatcacggatcgcatcgaggtgctcgaagatcacggtattgatgccgccggccagctggccatacacgcccgggaagtcttccggaatgcgatggccgatgtccggtccggcatgcatctgcgccatcagctgggtctgctcggagaagcggcgcagcatcgcggtcatctcggcggtggcggccagcatcttgccggcttcgtccttgctggtggcctgggtgctgacactgaggtcgccacgggcaacggcctggatggcatgcacggccttgcccagcgggccggtgacggcgcgcgagatgaccgttgccagcgcggcggccaccagcgacagcagcacgatgcagccgatgatggcgatcatgctggtgcgatgggtggcattggcagcggcgatcttgccgtccatcaggccggcgatgtgggtgccgagggtcttcatcgcggcgaacaggtcacgacgggccgggcgcgactgttcgtcggaaatctgttgcgccagggcgccatcgccggcagccacggcctcgcgcatcgccttgttggcggcgaagtagcgttccagctgcacgttggccgcgcgatagagttcgcgctccttgtccagtgccggcagcgccgagtacgcggccagttcgtcatgcacggccttggcggtgtcgtccatgcgcttgttgtagtcggcaactctctccggctgatcgagcatgctcagcagggccagttcgtaggtgcggaactcgcccagctgcgagcgtgcctcgcccagatgctggaccgacggaatatcgttgccggccatctcgcccagctgattgttggcctcgctcaggcgcaacagggcgaaggcgccgaggaccagggtcatcaacgtggtgagggtgaaccccacggccagcttgcgggcgatgggcagatcttggaaccacttcatgcagggtgctccaggtgggcggggtgccggcgtcgttgcgtcggctgggggtggttgcagagcgaacgggggtgcccggtgggggttcggtga

SEQ ID NO: 508486 - DNA, 1137 bp, Stenotrophomonas maltophilia
atgcccaccccattggccggcagtgccaacgcgcagccacagaattccggcagcagcgcaacgcgcgcgccacgcggtgacggcagcaaagagttcagccagctgctgcaggggggcgccacgggcgccgatgcgcctgccaagccgtcgagcacgccgacgccgtccacgcagagtccagcgtccgacagcaacggccaggccggcgccgatcgcaggccggacagcgctgccgcccccgacgagcccgccgccacggtgcccgcagcagcggccaagccggttgccgaaaaggacaccccggccgcgagcgaggaagccccttggccaccgctcggcctggccgggctggtgctggcgataccggcgcctgccgatcctgccagcgctctgccagccgcggcagtgacggccagcgacgctggcggcaacgccctgcccgcgcccgctgcagcgccggtcgcagcggccctgccgtccaccgcggcggctgccacatcgtccaccgccagcagcgccagtgaccaggcggccacgctgccgttgcctgagatggtgctgcccggcaagcgcagcgagcgtggcgaaggcagcgacgcatccctcatcggcgaccgcgccatggcgccgctgttgcatgcgccgggcaacgcggccgtgcaggatctgaaggccgcgctggccaccggcaatgccatcttcaatggcgagccgacgccgaagccggtgctcggtgacgatggtttcgaccaggccatcggtgcgcgcctgggctggctggccgaccagaagatcggccacgcccacatccggctgagtccggatgacatgggcccggtggatgttcgcctgcagttgaacggcgacaaggtgcacgccagtttcagcagtccgcacgtggaggtgcgccaggcattggaaagcagcctgccacgcctgcgtgaactgctgggcgaacagggtttccagctggcccacgccgatgttggccaccagggccccggtggtgacggcaatgcgtcgggccaggccggtcgtagcggcatcgcgggtgacggagaaccgtcgccgggtgacaccagcgtgtcgtccacgcagttgatccgccagcgcgggctgctggacgcgtacgcctga

SEQ ID NO: 508487 - DNA, 306 bp, Stenotrophomonas maltophilia
atgatcgaccccgtggccccggacgtcctgcgtgcctccctgcgacgagcacttctgggccagaccccggcacagctgctccaggcgtcgatcgaggcagacgccggcatgcaacttgtccgggtacgcttcgagttcgaaggccagccgtcggaagaagcatgggaatcctgctcatgcgcagcgacggaagtgatttccgactttccggcgccctggacgatcgacgaggcctatctggcccgctcccttgctactggactgttcccgcttgcctgggtggcctacctgcgcccaggcaactga

SEQ ID NO: 508488 - DNA, 384 bp, Stenotrophomonas maltophilia
atgaacgccctgctcccgcacgtcctgctgccggcagttctgctggtcagcctccccctgtcggcgcccgccgccgaacccgccagaccctccaccgcggccgagtgcatcgccctcggcaccagccgcgacatccgcccctccagcacggaacgcgaagtgctgctgcgcgacggcaacaaccactatcgggtccacctgcagaagcgctgcctcggcgccgccgcctcggccagttacgtcttctttacacccggcacgcccgagcagatctgtggcgatgctcgcagcacgctgcagaccgacagcaaccactgcaccgtgacccggatcgaaccggtcgatgcggcaaccttcaagcgcctggcccagcagggacgttga

SEQ ID NO: 508489 - DNA, 192 bp, Stenotrophomonas maltophilia
atggctagactcaacacgttcttcacactgggcgttgcgcgcatgacctatctgatcgtactggacccgcagtccgtcaccagccgctgctatgccagcaagggaccggttccgcacgaggcggtcgctttcgtcatcgaggatggcggcgaccaggggcgacagcagggattccgttcgatcgcggcctga

SEQ ID NO: 508490 - DNA, 168 bp, Stenotrophomonas maltophilia
atggttacgagccggtacgcgctgcatgaagaaggtgaggggagcccgttcacgggctcccttttttgttgcctggaacgcgcatccacgcaaggcgtggatgaattcttcgtggcgtgcggttttttgcattgcatcgcaacaaaactgcagaaaaagctggattaa

SEQ ID NO: 508491 - DNA, 2328 bp, Stenotrophomonas maltophilia
gtgacgcggcgcgaccaccctcgccggcagggctccctcctcctgctgctggccctgcttctgctgccggccgcttcggccgaggacgcgcagtcacaacgatggctgcccggtcacgaggtccgcgtcgccaccgcaccctcgctgcgcccattgccctcagaccttgcgggcacggcgccgctgcccaccctcgcccacggctacgccgatctcgtggcgcgacattccggactccagttcaaggagcacccctatcccagcaccggcacatcggtgagcgccgtatgccgtggcgacgccgacctggtactggtggtcggggcggccaggcatctgccgccgtcctgcccccatctggtggcctctgcccctttccgaggtagcaggaccatgctggccggccgcgtggatgagcgcttgccgcaagacatcgcgcaactggatggccgaacggttgcggtggtcagcggcgggccctatgccggatggctggccgcccatcatccgcaggttccactgctgtacctgcctgaccggcatgccacattggccgcggtcgaggccggcatggccgatgtcgcgataggcgtggagaccactctgcaaccgatgatccggcagtacttcgccggccagctgcaggtgcagccattcgagatcgggctctccaccgacctgcgcctgctggtacgccacgaggaccggcaactgctggcacgcatcgaccaggccctgcaggacatcacactggaagagcatgccggcctgctgcagctctgggcctggcagatactgccggctccggttggaaaggcgctggactggctgcgcacgccgcccccgatctggctgttggcagtgctggcactgctggccggccttcccgtgttctggctttcgctgcaccagcaacgcggacgtgagcggcgcaagcagacacgcgcagcaggtgtgatcagccacgagatacgcaattcggcccaggtggtactggcctcgatcgacctgctcagtcaatcgcccgcgcccaaggcgcaacgcgaactgcttgccgccgccaaagccgcaggccatgcgctgcgcggcatgttgaatcgctcactggagttcgcgcgcttggccgaagggggattcacgccccgcgcacaggcctgcgatgtgttcctgctctgccgccaatcgttggacgcagtccgcccacaggcactgctgaaaggactcgaactgcgcttcgaaggcacgccggaccaggcatccgccgtcgctctcgaccccgagggactgcgccagattgtcgacaacctgctggccaacgcagtgaagttcaccgatatcggcgggatcgatctgcgtgtacagctgagaccagccaccgatccccaggagctgctgctcgatgtgatcgacagcggcatcggcatcgatgcccgccaggctgcacgattgttccagccgttccagcaaggcaaggacgggcaggcgcgcggcggcagcggattgggcctggcgatcgcccgcggactggcccacgccatgcgtggcacgctgacactgcacagtgtgccgggtcgcggcagccggtttaccctgcgcttgccggtgcaggctgcaagatccgacttgccgccagcggaacagacactcctcggccttccgcttgccggcctggatctgttgctggtcgaagatcacgcgatgaatcgccagatcatcgccgaacaactgcgccgccttggggccgaggtccgcgccctggccgacgctgacgatgcccttgccgagcaggcgcagaccccgcgacggatcgtgctggtggacatcggcctgcagggcatggatggctacgcgctggcgcagcaactgcgcaaccagcccggggaaccgccgcggctgattgcactgtcagcccggacaggacgcaggcacgcgacgcgttgccgcaatgcaggattccatgcagtcctggccaagcccctgcagatcggacaactgctgcaggcactggagctgccgccagcggcaggggctacgaccgtcgacaccgtcgcgccgctggatcaggcctatctggccgacatcaacggcgagctgctgggcatcgagcaggccgcggaggactacgatgccacggcgctgcgtcatcacgcacatcgcctgcagggtacgctgcaattctgttgcgcaaccgatcaggccggaatcgcgtccgacctgtgggcgctgggaaacgacgccgcacccgactgggccgatgtgcggcgcttgctgcagctgctgcagcactggcatggctcccgcagtgcggacgccatgccccctgactga

SEQ ID NO: 508492 - DNA, 627 bp, Stenotrophomonas maltophilia
atgaatggacatcccgcaccgcgccgactgcgcctggcactcctggacgaccatgaagtcgtccgccgtggcaccggcctgcacctgtcacaggacgcccgcttcaggatcatcgccagccacgggcacagtgacgccttcatccagaccctgcagaagacgcgggtggatgtcgcgatcatcgatctgacactggcccgcgacgatcgcagcagcgcggagctgatccccctgctgcgcagcgcattcccacgcacgccactgcttgccttcgccaccctctcccccgccacccatctccatcacctgctggaggccggcatcagcggtatcgtcagcaaggccgagccactgcccatgctgtccgaagcgatcatccgtgtgtcgcaggggctcgagcgcctgccacccgaccgcaccattccggcagactgcggtgagctcagccgcaacgagcgcgaagtgctgaacctgctgctggctggcctgaccgtctccgagatcgcgctgcaccgtcaccgcagcgtcaagaccgtcagcacgcagaagatcgcggtcctgcgcaagctcgggctgcgcaacgatgccgaaatctatgccatgcggcgcccacaggacgccccgtga

SEQ ID NO: 508493 - DNA, 597 bp, Stenotrophomonas maltophilia
atgaactcccccgccgcaagccaccccagcccggcagcgctcaagctgacacccacccagcttgcggcgatggcctcccccacacggatggcgatactgcagcgcctggacgcagagggtccggcgagcatccgcgagcttgccgagcgcctgggccgcccggccacagcgctctaccaccatctggcgcacctggagaagcatggcctggtacgcatcaccgagcaccgcgacaccggccgccggcctgaagcggtctacgcggcggcgtcggcacagctgtcctcccgcgacgcggtgcgcaccccgtccggccggcggagtctcgttcacgtggcgacacgcgtcgtcgccgccaccctgcgcgccttcgcctcggccgccacccatgccgccgcccgctttgaaggaccgcaccgcaactgcgtggtcaggcacctgtccttccgcgccgacgatgcgcgcctcgcccgcatcaacgcattgatcgacgagcttgaggccaccgggctcgacgccggcacacagggcgacaccatgctgttgaccgtcctgatggcacctgccacacacaagccgcgcggaacaccgacctga

SEQ ID NO: 508494 - DNA, 1485 bp, Stenotrophomonas maltophilia
atgggctcggaaatgcgcacggcacgtatctggattgccctgggtggcctgctgttggcaatgatgggcagcagcaggcccgctgttgccacggaagtgatacgtagcgatgtttcgggcagagcgaaaggcacactggatgcggccgtgatccaaggcatcgacagtggcgtcggccaggtcatgcgtcgcttcaatgttcccggtgcggcggtgatggtcctccaggacgggcgcctgatccacgcgaaggcctatggccagcgcgatctggcgcgggggctggcggtgcgtgccgacacgcccttcgagatcggctcgatcaccaagcagttcaccgccgctgcggtcgtgcagctgcaggaggccggcaggctcacgctggatgatccacttgccaggtacctgccagacgccccgcatgcgcaggaggtgaccctgcgccagctgctgtcccataccagcggcctgcatgactatttcgacgggcccgaaccggaggtcgatgccctggtgacgcagccgattgcgtttgatcggctgatcgcgcgtatcagcgatcgccctctcgatttcgcgccgggcagccgctggtcgtactccaataccggatacatcctgctcggccgggtcatcgaggtggtatcgggcgagcgttacgtcgactacgtgcgacggcacctgctggagccgctgggcatgcggcataccttcaccctggccgacacggggcgactgcaaggcatggcggtggggtatcggcacgaggcgggcgtcctgcgccgatcaccttacttccacccggactggagcggtgctgccggcgccctggtcagtacgctggacgacctcgcgcgctgggaccacggcctgagcgagggtcgcgtggtcagccaggccggctaccgtgaaatgatcacgccggtccacaccggtgagggtggcagcgccgactatgggctggggttgttcgtcaatgcggtctacggccaggcccggatcggccataccggtggttcgcaggggttcaccaccgccgacgaatattttcccgatcttgggctgcgcatcattgccttcaccaatcttggggacaaggcgccggaggccggaatcacgctgaccaatgcggtcttcagtgcgcttcatcccgccatcgtcgctgcctggagccggcctgcgcctggcgaagaggccgcagtcaccgcgcgtgcgcgtgcgacgtttgaacaattgcaggccgggcacggctatgcggatttcagcgcgaacctgcgtgcaaggctggaggcggggatgggcgccgggctatcgaaggcggtcgcgccctacgggaagccggtcaccctgatcttcaaaggtacccaggccagcgagaggggcacgatgtaccgctacgtggcaacctttgggccgggcgtcttcatgccgtacatgatccgccccgacgaagaaggcaaggttgcagggttcgcgctggattga

SEQ ID NO: 508495 - DNA, 606 bp, Stenotrophomonas maltophilia
atggacgggcacttcgacagtacagacctgccaggcagtgatggctttgggattcgggccctgctcgccgatgacctggatctgatctgcgcccaccgcgaggcgatgttccgcgagagtggccgcccagcagacgtgctggagcagatggccggtcctttccgtgcctggctcgcgccgcgcctggcctccggcgactatttcggatttgccctcacggacctggggcgccccatcgcgggcatcggcctgatgctgatcgactggccgccccaccctgcccacccggagcaggacagccgtggctatgtgttgaacgtctacgtcgagccggcctatcgccggcgtgggatcgcccgcacgctgatgtcatgggccgaccgtgctttcgccgaacgcggcgtcacctatgcggtgctgcacgccaccgaacagggaaggccgctgtacgccgatctgggctgggcgccgacccgcgaaatggcccgcaccctggacgcagccgctcccggcagtcaatccagcgcgaaccctgcaaccttgccttcttcgtcggggcggatcatgtacggcatgaagacgcccggcccaaaggttgccacgtag

SEQ ID NO: 508496 - DNA, 1191 bp, Stenotrophomonas maltophilia
atgactaccgcttccctgcttgatcctgccgcgttcgatatgccacgcgatgtgctgtggctttcccattgcaaggacgggccgctgccgcgggcatccgcggatgcggtgcaggcattgatgggggtgcagctgcggccgtgggagttgcgctgggaggaggacttcctggatgtccagcgcaggttgcggcatgccgctgcgacgctgctggccgctgacgctgcggacatcagcctgatgacctgcacctcgtccggcctggaggccgttgcgttcggttacccctggcaggccggtgacgagatcctgattccggcaggcgagttccccagcaaccgcctgccgtggctggcgttgtcccgacgcggcgtgcagtgccgggagatcgacctgtggcagccaggccagcgcccgaccgcacgggatgcgccggaagatcggctgatcgaagcgatcacgccgcgcacccggatgatcgccgcctcctgggtgcgcttccaggatggaatcaaactggatctgcagaaactgggagcggcgtgtcgcggcgcgggtgtcgatcttgtggttgatgcgatccagggtgccggcacgacaacgctcgaactgacgggcgtgagcgcgctggcgaccgggggccacaagggcctgctgggcctgcaggggcagggcttcctttggaccgagtccgggttccgccagaagctggttccgctgggaacctggctctccgggcccgaggagttctcgcagacttcggacccggcgcccgcggccgacctctgggccacggacggacggcggctggaagcgggcagtccttcgatcctgtcgtgcgaggcacttgcctcatcattgcagctgctgctggactgtggcggtgtggccgccatccaggcgcatgtggtatcgctgcagcggcagctgctcgatcaattggcgcagggtgacgggacgtggcgtgcggaagctgcgcgactgatggcgctgctcgaacaggatcgcctgggcccgacgctctgcttcgcgcttccggaggagcggttggcgcgcctgctggcgacagcagaggcgcagggcatccacagcagcgtccggttgggttatctgcgcgtcgcactccattgctggcatgacgccgaggatgtcaggcgctgcgcggcgtggctgctgggcacgctcgactga

SEQ ID NO: 508497 - DNA, 372 bp, Stenotrophomonas maltophilia
atgcatcccttatcccatccgcgcacctgcaacctgttgctggtggaggatcagttcgacctggccgccttgatggagcaggcactacaggacggggggagccaggtgacacacgcctacagcgtattcgacgcgatggaactgctcgacacccagcacttcgatggcgccgtgctggatgtggagctgcgtgacggcgtggtgtttccggttgccgaccgcctggccgacctcggcattccctatctgttcgtttcagcagtctatgaccagctcgttccggcgcggcatcgccgcgcgccgttcgtggccaagccgttccatctcgacatgctgcagcaggcggtgcatcgcaccgtaaccgggcattga

SEQ ID NO: 508498 - DNA, 534 bp, Stenotrophomonas maltophilia
atgcgcatattctcgctgcttcccctgctcgcggtcggcctgttcgggtccggctgcagcgcgagtgacacccgccccttgccgcgtccatccgcggtggacgtgccgcgtttcatgggcgactggtatgtgatcgcacacattccctcacggcccgagcgcgaggccttcgacgccgtggaaagttacgcgctgcgaccggatgggcgcatccagaccacctttacctatcgcaagggcagtttcgacgccccgcagaagtcgatgcatccgatcggccgggtggagaaggaaggaaacggcgccgtctggggcatgcagttcatctggccgatccaggccgaatacatcatcgcctggctcgacgaagactaccgccagaccatcgtggcgcgcagcaagcgtgactacgtctggtatatggcacgtacgccacaggtctcggaaagcgactaccagcaggcagtgcagcgcattgcggcgatgggctatgacacccgcaagctgcggcgcgtgccgcagtcggtgcgatga

SEQ ID NO: 508499 - DNA, 690 bp, Stenotrophomonas maltophilia
atggctacaggcgcgctgcgggttctgctgaccggtgccacggggctggtggggcagggcgtcgccctggcctgccagcgctcgccccgggttgccgatctgactgcactggtccggcgcccgggcagcctcgacggtagcggcagcgagctgatcgtgccggacttcctgcgcatccaggaacggcgggatgatctcttgggattcgacgcctgcttctactgtgccggcgctccaccggtgggcacggtcgaggccgagtaccgacgggtgacactggacaccaccttggccgtcgcccgcgcctgggccacggcgaacccgcaggggtgtttcctgtatgtatccggcgccggtgcggatgcgcgaagccggttgatgccattgcggatcaagggcgaggcagagcgggcactgcagtcgctgccggtccgcacggtcatgctgcgtccgggtggcgttcgccccgtgcagggcaccggcacccgtcatggcctgctgaagccgctgtactggggtggcgcacccttgatgaaactggcgggtgtgatcgcgccgtcactggtgaccagcaacctggctctgggccaggcgatgattgcactggccggcagggaacatccgcctgccacggtggagtgcgcggacatcaaccggatcgcgatggacgtgagcgacccggttgcctga

SEQ ID NO: 508500 - DNA, 939 bp, Stenotrophomonas maltophilia
atgagcacccaacagaccgtcagtttcaagaaccgtagctgggatgtcgccgccaccctgcgctttccggaaggcttcgaccctgccagcaagtacgccgccatcgtctgcgcgcacccgatcagcagctgcaaggagcagacgtcgggcgccatctacggtgaggcactgaccgccgctggtttcatcactctcgcctttgacgcctccacccaaggcgccagcggtggtgagccccgcttcatggaagatcccgctacccgtgtggaggacttccgctgtgccatggattacctgatgacgctgccgtacatcgatgaagaccgtgttggcgtgctgggcgtctgcggcggcggtggctatgcggtgagtgcggccactaccgaccaccgattcaaggcagtcggcacggtagtggctgccaactatggccggctgatgcgtgagggtgacatgtcgccggatgctgcgttgaagacgttggaagcactgggcaagcagcgcactgccgaggcacggggtgctgagccgttgatcgtgggttacattcccggctctgaagcggagcgcgaagctgctggaatcaacgacatcgacatcgtcgaggcggtgcagtactactgcacgccgcgtggccagcagccgggctcgccgaacaagctgcgcttcaccagcaccggcgccgccctgagctgggatgcctttgcgttcaccgagcatctgctgactcagccgctgcacatcgtcatcggcggtgtgcccggtggcttcggttcgtatcgtgacggcctggagctgtacgcaagggcgcgttcggtgcagaagagcatccagatcgtggccggcgccagccactacgagctgtatgaccagccagcagccaccacccaggcgctggagcagctgattccgttctaccggacgcatcttggcgcttga

SEQ ID NO: 508501 - DNA, 870 bp, Stenotrophomonas maltophilia
atgaatacacaacaaccacgtgtctggttcatcaccggtgcgtcatccggtctgggcaaggccctttccgaagcggtcattgcccggggtgaccgcgccatccttaccgcgcggcggctggaccgacttcgcgcgatcgccgcaggccatgaggaccacgtcctgccgctggcgcttgacgtgaacgatgccgatggccgtgcacgtgccgtggccgacgccatcgaacgcttcgggcgcatcgatgtgctggccaatgtggctggccgcggtgtggtgggcgcctgcgaggagttcagcctggaacagctgcgcgagcagatggagctgaacttcttcgctgctgccgaaatgagtcgcgccgtgttgccgcagatgcggaagcaaggcgctggccacattctcactgtcagcagcattgccgggctggtggcaatgaacgcggccggtccctactgtgcagcgaagttcgctatcgaaggctggaccgaagcactgacgatcgaagcaaagccgctcggcatccgggtgacgctggtggaaccgggcgcgttccgcaccgagttcgccggtgatgccaacatgcggccagcacaccgcatcgatgcctatcggccggttgtggagccattcgaaacctacctggaatcatcctccgggcagcagatgggtgacccggaaaaggccgcgcagcgcatgctggacgttgtagccagcgatgacccgccggtgcggctgatgctgggtgcggatgcctattcgatctgggaggccaccctggccaaccgccaggccgatctggccaagtggcgtgagcgcggtatcgataccgcgttcgagggcgccgctacagtgcagatccagctgtaa

SEQ ID NO: 508502 - DNA, 774 bp, Stenotrophomonas maltophilia
atgaaacgcctgcaggacaaagtcgctatcatcaccggcgccggcagcggcaccggcatgggcgcggtcatcgcccgggtcttcgccagcgaaggcgccgtcgttgttgctaccggcacccccgaccgcaaacagaaccttgacgcactggtgcaggacctcaccgcccagggccatcgtgcaacatcggcgttcctggatgtgacccggcccgaacaatgggccgaggtggccaccaccacgatcgggcgccatggccgcatcgatatcctggtcaacaacgccggcacgccggggccgcgcgacggccgctgggacaacgccacggccgaggacttcagccacgtcatcgacgtcaacctgaccagccagttccatggcatcaaggcggtcacgccgcagatggaactgcagcacagtggcgcgatcatcaacatctcgtccgccgccggcatcatcgtcttccccgacgtgccgccgggctacagcgcctccaagggcggcagccgtcacctgaccaaggccgccgccgtcgatttcgcccgccgcggcatccgcgtcaacggcatctacccggggctgatcgacacgccgatggcgacccatttcaccgaggatccgcaactcctggaaagcctgctcaagggcattccgatcggtcgcgtcggcacttcggaggaaatcgccaaggccgcgctgttcctggccagcgatgacgcgtcctacgtcatcggtgccgaactggtggtcgacggtggattgaccatcatctga

SEQ ID NO: 508503 - DNA, 927 bp, Stenotrophomonas maltophilia
atgagcgcggatccgctgtccgatgtgttgtcactgctgcagccaagcagccagttctttgccggattcgatgccgccggcgactgggcattcgatttcccggcgcacgaaggcatcaagttcacggcggtcatggggggcggctgctggggccgcgtcgaaggtgagaacgcgccgttccacttcgaagccggcgactgcttcctgctcaacagccgctgccggttcgtgctcgcttcggatcccgaagtggccatcgccagcggcgagcccatcatcgaagcggcggcgcggcagggcgttgtcactcacaacgggggaggagagaccttcctcatcagcggccgattcgcgtttcccgggcggcatgccgccgtgctgttcgatgcgctgccacccctgatccatgtgccacgcgcttcggggcaagcaggcgtgctgcgctgggcgctggatcaatgggccaatgaactgcacgcgccgcagccgggcgcagggttgatgtccacccatctggcccatctcatgctggtacaggtgctgcgcctgcacctggctaccccgggccgggtgccgaagggctggttcctggccttgaccgacagccacatcagcctcgccctcggggcgatgcacgcggctccggcccagtcctggacgctggagtctctggcgcgtatcgccggggtttcgcgcacggtgttcgcgcaacgcttcaaggcactggtcgggcacacggcaatggactatctgtcacgttggcggatgctgcttgcggcggaccggctgtcccatggagccgatgccgtgtccagtattgcctttgccgtgggctacgaatcggagagtgcgttcagtactgcgttcaagcgcatcatggggcaggcacccgcgcagtatcgcaggcaggccacctcgcccaggtaa

SEQ ID NO: 508504 - DNA, 978 bp, Stenotrophomonas maltophilia
atggcaggcagtcacctcaaggatctctcggcctttctgatggttgccgaagaggcaagcttcacccgcgccgcgatccggctgggcatcacccagtcttcgctcagccagatcatccgcgggctggaaacccgcctggggctgcgtctgttcgctcgcaccacccgcagcgtggccctgaccgaggccggcgagcgcctgctcggactcatcggcccggccatgaacgaactggaagccgggctggcccgcatcggtgaactgcgcgacaagcccgccggcaccctgcgcctgaccgcagacgagtatgccgtgcacgctgtactgatgcccgccatcgcccggctggtaccggactaccccgacatccgcgtggaaatcaccaccgactacgggttgaccgacatcgtcagcgggcgcttcgatgccggcgtgcgtcgcggcggcctggttgccaaggacatgatcgcagtgccgatcagcctgccgataccgatggtggtggtggcatcaccggcctacttcgcccgccacccggcaccccaacagccgcagcagctggtagagcaccagtgcgtcaacctgcgcctgcccacccatggcgagatctatgcctggacattcactcgcgccggccgcgaccaccgggtgaagtccgaaggccaggtggtggtcaacagtatttcggccatgcgcgatgcagctttgcagggcgtcggccttacctatctgccactgcattacgtgcaggactggctggcgtcaggagagctggtcgaggcgctgaccgagtggcgcaagacttatgaggggtatcacctctactacccgaaccggcgcttggcttcgccggtgttcacactgttgctgcaagcgttgcgtgacaacctggaagacagcaggaagcgcagcgcaacgagtgcagcacgtgccgccacccagcgtgcaccggccaggcctcgccggcgcacgacctga

SEQ ID NO: 508505 - DNA, 915 bp, Stenotrophomonas maltophilia
atgaaagcagtgcaattccccaatggcaacatcaccatggccggccagctgcatgtgccggagcacgccgcactgtcggcccgtcatccggccatcgtggtcgttcacccggccggtggcgtgaaggagcagaccgcaacggtgcatgcggccagcctggtcaagcagggcttcgtggtgttgaccttcgatgcctcctgccagggcaacagcaccggcgcaccgcgcggcaatgagaacccgtatgcgcgtgtggccgatatcagcgcggcgattgacctgctggtcacgctgccgatcgtcgacgccgatcggatgggtgtgctcggcatctgtgccggtggcggctatgcggcacacgccacgatgaacgatcgccgcatccgcgcggtgggcaccatcagtgccgtcaattacggccagatgttccgccagggttgggacggcgatgccgatccccggaattcagttgcgctgcttgacgccgcagcgcaggcccgcagccgtcaggccgagggcggacagctccagtaccaggatgcgcttccagccaaccgcgaagcggccacacacccggactttgccgaggccttcgactactaccgcacaccgcgtggccagcatccgaacgccactgggctgttcccgctgcagaacctggccgaactggtgggctacgacgccttcaacaacgcggaactgttcctcacccaaccgttgctggcgatcgccggcagcgaggccggcacccgctggatgagcgaggagctgcaccggcgcgcggccagcaccgacaagcacctgctgatcctggccggtgctacccacgtggcgctgtacgaccagcccgaattcgtggcgcgtgcgggcgcggcactgggcgagttctaccaccaggcgctggtggcgcgctga

SEQ ID NO: 508506 - DNA, 1044 bp, Stenotrophomonas maltophilia
atgagaacccaggcctacgcggcgctgtcggcaaccacgccaatggtgccgcacaccatcgaacgtcgtgaactgcgtgacgacgatgtcgctatcgaaatcctctacagcggcgtctgccattcggatctgcacatggtccgcaacgactggggcagggcgatctatccggtcgtgcccggccacgagatcatcggtcgtgtggtggccaccggcgcgtccgcgcatcgcttcaaggcaggtgatgcggtggctgtcggcaccttcgtcgacagctgcgagcactgcgaccagtgccacaagggcgaagagcacatgtgccgcgagatgctgaccgagacctacaacggcctggaccgcgtgaccggccagccgaccctggggggctatgcgcggcacattgtggtgaaggaggctttcgtgctgcgcgtgcccgaaggattggacctgtctcgagccgcaccgctgctgtgtgccggcatcaccacgtattcgccgctgcgcacctggaacgttggccccggcagccgggtggccgtggttggcctgggcgggctgggccacatggcggtcaagctggcgatcggactgggcgcacacgtcaccgtcatcagccgctcgcgcgccaagcaggccgacgcgcttgctctgggtgcagaggcactcctgccgaccgacgacgcgcaggcattggcggctgcggcttccagcttcgacctgatcgtcgataccgtaccgaccaagcacgacatcaacccgtacattccgctgctggatatcgacggcacgctggtggtcgtcgggcaactgggcgatctgcaggagccgttcaccgtgcccatgatcatgggccgccgccgcgtagcaggctcgatgatcggcggaatccgcgagacccaggaaatgctggacttctgtgcgcgacaacagatcctgccggactgcgagctgatccgcatggaccagatcaacgaggcctttgatcggcttgagcgggccgacgtgcgttatcgcttcgtcatcgacatgtccacgttggcctga

SEQ ID NO: 508507 - DNA, 1104 bp, Stenotrophomonas maltophilia
atgcgcacggcattgatcattggtggttcgctggcgggattgtcagcggccctggcactggccaacgtcggcgtggcctccaccgtgctcgagcgggcaccggcgcgtgggcgcgctggtgtggccatccgcgccggcggcactgccttgcggatggcattcactgtaccggcgagccagcaggtggtggatgcattgggcggtgatgccatcgaacaggccgtgctgccgcatgcgtggtgggacgtctacagtgcgctccgccaggcggcctgcgtcgagcccggcatcacgctggtggatggcgaggcggtggtcaccgttggtgagcgggttgacgcggcatgggcccgtagcgcagaagggcgggagtggacggccgacctgctgatcggggccgatggccatcggagcgtggttcgacggtgcgtcgccccggagcagcccgaggcctcctacgcaggctatctggcgtggctggggcaactcgacgtgccaccccggaacgcgcgtgcgctgagcggtgtcgagttccattcggccggccacgatgtgctggccatctacccgttgctggaggctgcacacgccaccccgcgatgcgtgggttgggcgtggttcgaagcgcgcagcacccggctgttgcaggccctcggtgcggtctgcgaggaccgggtgcggttcacgccgacggcggacgcagtgcccgcagacgcccgtattgcgttggccaatcgtgcgcgggtgcagtggcctgcaccgtggggcaaggcactttcgcgggcgatccgccaggcgggcgcgctgccgatgcccatctccgagtacgtccccacgcaggtcgcgcgcgggcgcctggccctggtgggggacgctgcgcatgcgcaatcgccgatgaccggcgcgggattcgctgagtccatgctcgatgccctgcacgtgtcacgggcgttacgcctggaacccgacgtggtggacgccctggcgctctaccagcaacggcgcctgccccacatgcgcgagcaggtgctgcagggccaggtcttcgggcgctccttccgcgacgccacttcgccgggtgcggcgcgccagcgctgggcctga

SEQ ID NO: 508508 - DNA, 426 bp, Stenotrophomonas maltophilia
atgttcagtcacgtaacccttggcagcaacgatcttgtgcggtcccgtcgcttctacgacgccgtaatgggagtactcggcgcccgcccggcactcagcctcaacttcaattccgagcgcatcctctaccagcacgcaggtagcctgctggtgctggccacgccgctgaacggcgaagctgcctcggcggccaatggcggcaccatcggcctgctcatggccagcccggcacaggtggatgccttccatgctgcggcgctggccaacggtggaacctcgtgcgaggaaccgcccggtgtgcgcgagactccggcgggctcgctgtatctggcctacctgcgtgacccggacggcaacaagctgtgcgcgttccatacgctggccgattccgctcccacgcttgacactgcgggggcgtcgtcgtga

SEQ ID NO: 508509 - DNA, 975 bp, Stenotrophomonas maltophilia
atgagccctcagcgccccctgaactccggcttcgaccggacgagttccgcagccgatgtggtgcggggtatcgatctgcgcggcaagctggccatcatcactggcggccacggtggcctcggcctggaaaccacccgggccctggccagcgccggcgcagacgtgctggtacttgcgcgcaacccgacggcggcccgggccacgctggccgatgtgcccggggtggaggtggacatgcttgatctggcggaccaggccagcgtgcgtgcctgtgccgagcgcttcgtcgccagcggacgcagggcggatatcgtgatctgcaatgccgcggtcatggccaacgatgaatcgcgcgtgggcaacggttgggaatcgcagttcggcaccaaccacctgggtcattatgcattggtcaatctgctgtggccggccattgcgcgaggtgcccgcatcgtttcgctgtcctcgatgggacatcactattcgcccatgcgctggacggacctgcagttcgaaacggggtacgacaagtggctggcctatgggcaatccaagaccgccatcgcgctgttcgcgctgcacctggatgtgctcggtcacaccgctggcgtgcgttcctactcggtccatccgggcaagatccacacggcgctgcagcgccacatggcactggaagaaatgcaggcattgggctggcttgatgcagagggccggttgatcgaccccagtttcaagacgtccgctcaaggtgcggcgaccacggtgtgggcggccacgtcgtcgctgctggatggcatcggtggggtgtactgcgaggactgcgacgtcgcatgggaggaagaccttcccgtcccgagcgaagggggtgttcgcccgtatgcggtggacgccgcgcaggcagaacgcctgtggcggctgtcggccgaactgaccggtatcaatgcttttgctggcgtgacgtcaggcgcggagtga

SEQ ID NO: 508510 - DNA, 1062 bp, Stenotrophomonas maltophilia
atgtcggaggcacgcgctcccttggccgaacggctgcgcccggtatcgcttgccggcgttgtcgggcagtcccatctgctggcggatggacagccgctgcagcgggcactggaagcaggcctgccacgttcgatcatcctgtgggggccgccggggtgtggcaagaccagtatcgcgcaactgctactgggggcatcggggcatcgccacacatctctgccggcagcggtgatgacgccctccgaactgggccgggcgctggccgtggccagccaccaggcaggccgcggccacctgctgttcgtcgacgaggttcatcgcctggaccgtgccacgcaggatgtgctggtacgtcatctgcagggcaacgacgcccgcttgcttgctgccaccaccgagaatccgtcgttccagttgcgaccgtcactgcttcagcgctgcgacgttcatgtactgcagccgctgcagccgatccacatcatcggacaactgcggcgtgctctggtggatgggatgcaggggctggcccactgcgatctgaagatcgacgacgacattctgggcgccatcgccgttcgcgctgatggagatctgcgcagggcgctgaatgctctggagatcctggcggatctggcgcctgcggatggtcggatcccccattcgttgctggatgacgcgctgccccgccaggtgcgccgcttcgacaagcagggtgaattgttctacgaccagatatccgcagcgttcaagtcggtgcgcagcacgaatcccgacgcggccctgtactggatctgccggatgctggatggaggctgtgatccacggtacctggcccgcaacctgagcaagatggccatcgaggacatcggcctgtccgacccgagagcacagaccagggccctggaggcctggaaggtactggagcgtttcggcgacgaactgggcgcggccgcactggccaacacggccctgtacctgggggccacccataaatccaacgccacggtgatggcatggctgaacgcgcgctcgcgcagcgggtcacctgcggacgctggctga

SEQ ID NO: 508511 - DNA, 798 bp, Stenotrophomonas maltophilia
atgcaacttggtatccagaacaaggtcgccgtggttaccggtgcgacccagggcatcggctatgccatcgccagcacgttgctggcggagggcgctacggtggtagtgaatggccgcaggagcgaccaggtggaccaggctgttgcgcggctgaaggccgagcacggcgacgcagcaccggtgcagggcgtggttgcggacctggccagcgcggcgggttgcaacgtgctgctggcacaggtgccggcgtgcgacatcctggtcaacaatgccgctgtcttcgaagccgcagacttcttcgagattgccgatgacacgtgggacacctactgggcggtgaacatcatggctggcatgcgccttgcgcgttcgtacctgccggccatggcaggcaaggcctggggcagggtggtcttcatcggctcggagtgcggcatcagcacgcctcccgacatgttgcactacgcaaccaccaagaccgcactgctgggtctctcgcgtggcatggccaagcgcatggccggtactggcgtgaccgtcaacgcggtgctgccggggccgaccctgagcgaaggtgtggaggcgatgttgcaggatgagatccgccggaccggcaagagcatcgaggagcagggcgcggcgctggtgaaggccatgcggccttcgtcgatcaccgagcgcttccagactgcgcaggaagtggccaacctggtggcctacacctgctcaagcctcgcatccggcactaccggcgccgcgctgcgtgcggatggtggcgtggctgacacgccattctga

SEQ ID NO: 508512 - DNA, 1047 bp, Stenotrophomonas maltophilia
atgggcggtaccattcgccaccgttcgtggttgatgtgcaatcgtccgcccgcttcgcgctggagacggggttggcgcggtacgctatgcgcggcccttctgttgccgttctggtgcatggatcctctgtctgaagtactaaccctgctccgccccacccatacgcgcaccgcagcgctggatgtggcgggcccatggtcactgcgttttcccaaccggcagggcatcaagttctgtgccgtcgagcgcggggaatgctggatctccgccgagggcggccaacagctgcagcacctgcagcaaggtgactgcttcctgctcagcaaagccggctcgtatgtcctgtgcagcgaccctcaactcgcccctgttgatgcagcctcggtactcgacctcgaagccactggccgcaggacgctgcacggcggcggcgaccatctgatcgtcagcggcagcttccgcttcgccgataccgatgcggtgcgcgtcctcgaccccttgcccggtatcgtgcaggtgtcacatggcgacagcgaggccatcctgctgcgccgtgcgctggcccgccttgccgaagaactggtacagccacgcccgggggctgcgctggtggtcgagcaccttgcccttctgatgctggtggagatgctccgcctgttcctgtcctccgagcaccctgccctgccgcccggctggatgcaggccatgaccgacccgcgtatcgccgacagcatccgcgcgatgcacggcgagccggcccgtacctggcggctggatgatcttgccagcatcgcggccatgtcacgcacggtctacgccggccgcttcaagcagctgatgggcgtttcgcccatcgagtacctgaccaactggcgcatgctgttggccgcctcccgcctgcgcagcacccagcagacgctggcacgcatcgcggcagacgtgggctacagctccgagttctccttcatcgcagcctttacccgggtgatggacgtcgcacctggccgctatcgccgccaggtccgcaccagtatcgatgcggactga

SEQ ID NO: 508513 - DNA, 1851 bp, Stenotrophomonas maltophilia
atgaatgcggcggccaccctgttgttcgcattgaagctctatgtggcctgcatgttggcgttcgtcgcctccgtgcacctcgggctggagcagaattactgggccagcgtgacctgcgtcgcgttggccaatccaatctcggccaatgtccgctccaaagcgctgtaccgtctattgggcaccctcggtgccggcgtgactgcgctggccatcggcggcctgttcggcattctttccttcccagtggtgctggccagtggtgtggttgccacgctgggcttcaccgtggcggcggccaaccgcaccccacgggcatatgcgctgcagttgtttgccgtcacgttgtgcctggtcgccgtgggcaacgtggagcatccggggcgcctgttcgacatcgcgctgctgcgcgtcaccgagatctgcatcggcatcgccgcgatcaccctggtggacggcctggcgccaaccgcattgggcccgtcggtgagaacccgactgcgccgctggttaccagaggtcaggcagtggctggacgacgcggtcgctggcaacgtggctacggacgtggctgcgcagcatcggctcaaggccgtggccgacctttcggcgctctcgttggtggccgagcagctgcgtttcgacagcacggtaagcaatcgccagcacaggctgctgtttgcgctgcagcggcggctggcgcgtcttgtgcccttgatcggagcgttggaagcgacgaccgcgggcagctcgcgcctgcatgacccggcctggcgcacgcgcatcgtggcaacccgccagcgcgacctggcccgtgcacggcaggcatggaccgatatccaggtgctggatgatgccctggagaagggtgacccgctgccgccgcatctggagcgcagcctggccacgagccagccactgccgctcgcgccggatcatcatcacgcactccgcatcggcggtggctgcgccctcgcgtatgcgctgatctgcctgctgtggtgggccaccggctgggcacaggggccgaacatgctgatcatgggcaccgtgacgctggccttcttcggcatcttcgatggtgccaatctggctgcgatgaagttcggtcgcttcgccgcgttgtcggtcgcgttgtcggtggtactgggatacctgcttctgcccatggcccagagcttcactggattcgcacttgcgtgtgcactggtgatcctgccattggcggtgtggagcatcgaggagccgctggcgatcctgctgctggcgctgacactcagtaatgcaggtctggccagtcactaccagccccaggacttcggcaccttcctggacatggccgcgggaaccctgatcggcatcttcatcggcttcttctgcctgctgctggtcaagcgcatgggcgccgaagcggcctcgaagcgattgcaggaggacgggcggcaggacctggcgacgctgggccggaccgcggatcgcgacgtggaggacgccttccttgagcgcgatctcgatcgcatcgggcagcttggcgcccgtgccacaggcgcgaatgcggtggcggcagcgcacctgtttcggcagcttcgcctcggccacagcctggtgcacctgcaacgtgccacccactatgtgacagggatcgaacgcgacttgctggatgcgctgatgcgtcgactccaccgtgaactggcgggcgcagcgtcgcccggaatgctgggcgatcacctcgaccgggtgctgcgacgcgacatcctgctgggcagcccggaaggcgacgcactgaccgatgcactggttcacctgcgcctggccctggagccggtgccggcgcagaacggagaggcagcatga

SEQ ID NO: 508514 - DNA, 219 bp, Stenotrophomonas maltophilia
atgatcggagagctcgacctggctggactgtttgtctcgccgttgctgccgtgcctgctgatcggattcgtgctgcgcattgcattgtcgcgcgtgctggatcggattggcgcctatcggctgctcggcaatcgccctctgttcgacctgtcgctgctggtgatgctcgtcggcgcgctcatggttctctttccgcttgtctggcgcacatcgtcatga

SEQ ID NO: 508515 - DNA, 900 bp, Stenotrophomonas maltophilia
atgaagaatctgcaacccctgctgcttgccgttgcccggcaagcccttaccctcatgttcagtgccattgctgcgttcgtggcctggcacatctacagctactacatcagtgcgccacagacccgtgacggcaagatccgcgccgacgtggtggcattggccaccgaggtctccggccgcgtctctgaagtacatgtgagagacaaccagcaggtgcagcgtgggcaggtcctgttcgtgctggaccgtgaccgcctggccaatgccctggaacgggcggacgccgcggtggcactggctgcggagcgatcccgctctgcgcgccgtgaggcttcgcgctacggtggattggtcggcgtagcatccgaccaggacatcgctgcccgccgcacgcaggctgaagaggcggcggccagtcatcgccaggccatcgctgagcgggacctggcgcgcttgaatcttgaaagcgctaccgtgcgttcgccggtgaacggcaccatcagcaatttctcgttgcgccccggcacctacgccagcgcaggccagccgttggtgagcatcgtcgacagcgagagctatcacgtcgcaggctacttcgaggagaccaaattgccacgcatccatccaggtgcaccggtccaggttcatgtgatgggtgaggccgccacgctgcgtggccacgtggccggcctggcaccgggcatcgatgaccgtgagcgtgtgactgcaaatggcaccctgctggcgaacgtcaatccgacgttcacctggatccggctggcccagcgcattccagtgcgggtcgaactggatgaaatccctgaagggatggcgatgatcgcggggcgcaccgccacggtgaccctgatcgaagacgattcgcaggggaggaccccatga

SEQ ID NO: 508516 - DNA, 1440 bp, Stenotrophomonas maltophilia
atgatgcgcgccgttccctatgggcatgttgtccggcgggtactgccgatgtgcatcgtgctggccatcagcgcgtgccgtaccgtagggccggactaccggcctccggtaccgccggctgcaggccttgggtttgcatcgatcgagcccgtacagggagcgccggcggccgtcagcaatgctccgttaccagaacgatggtggcggctgtacgacgaccccgcgctcgatgcccttgtgcagcgcgcccttgccgccaacaccgatctgcggatcgcacaggcgcggctggagcaggcccgtgctcaggcgcgggaggtccgcgccgcagcgggtgtgggtactgctgtcagtgccggggcaggtgccagccaggcttccagccttggtcttggatccagtgcaggcgtgcatgccagtttcgatgctggcatcagcatcgactacgatcttgatctggccgggcgggtaaagcggctcctcgaggcgcaggacgcgcagaccgaggccgtcgctgcggcgcgggacctggccaccatcggtattgtcagcgacgtggtgcgcgcgtacaccgacagttgcgccgccggcgtgagccagcaggtggtggcaggttccattcagctgcaggcctcggagctggcattgatcgagcgtgcgtggaaggccgggcagcagccagccatcaatgtaacccgcgccaggggcttgcttgggcagctgcaggcgcagataccgccactacaggccggccagcaatccgcactgtcacgactggcgttgctgctgggacaggcaccctcgcaactggatgcgcagtaccagcactgcacctcgattccgaccatggccggtgtggtgccagcgggcgagggcgctgacctgatccgacggcgcccggacgtacgtgcggccgagcgtcgactggcagcggccacggcacgaatcggtgtggagatggcgggcctgtatcccagtgtgcatcttggcttgagtgcgggtgccacatcgcgtcgactggaccatctgttcgacgattccgcactgcgctattcggtaggcccgctggtgtcatggagctttccgaaccgctccgtggcacgggcaaggatagacgctgccgacgcggcgtcacgggctgaactcgccgccttcgacggtacggttctcaaggcgttgtcggaaacagagattgccgcggcagcctatgccaaggcattggaagagaacgccgtactggtggatgtgcgcggggcggcccgactggcgcatgcgcaacagcagcagatgctgaaggcgggaacagtatcggcattggaagcgctggatgtggcgcgtagccttgcggcggccgagcaggccgtcgccacctccgatgcgacggtcgctcgaagccgcatcgccctgttcctggcgctgggaggaggatgggagtcgtaa

SEQ ID NO: 508517 - DNA, 1293 bp, Stenotrophomonas maltophilia
atgtcagatcagaagagaatcgtcatcgtcggcggtggcatcggcggcttgctgcttgcgacccagctcggccaacagctgggtcgcagcggtcgtgccgccgtcactgtggtggacaagagccccacccatatctggaagcccatgctgcacacgctggcagcgggcacgcgtagcctgcagcagcaacaggtggtattgctggcgcatgccagcgagcacggcttcacttaccagccgggggaaatgcgcggcctggaccgggaatcgcgggaagtccttatcagcgacctgcgctcacccgacggagagttgcgggtacctgcgcatcgaatcccctacgacgtgctcatcctcgccatgggcagccatgccaatgatttcggcacgcccggcgtccgcgaccactgccacttcatcgacagcctggcccaggccgaagtcttcaatgatgcacttcgaacccgggtgatgcgtgccatggcccaggacgagcgcctgcgtgtggccatcgtcgggggcggtgccaccggtgtggagttggctgcggaactgagtcggctgctggaactcgcttccagctatgcagaccctacccttcgtgatcgcctggatttgaccctgctggagggaggcccacgcatcctgcaggcgtttaccccagcgatctcggcgtcggccacacaccagttgcgcaacatcggtttccaggtcctgaccggggcatccgtgatcgccgcagaggccgaaggcttccgtcaggccgatggcaacctggttcccgcagacctcatggtctgggcggctggggtgaaaggcatcacgtttgcagagggcctggatgggctggagctcaatcatgccaatcaggtgcgggtgcgccccagcctgcaatccacaacggacgacaccgtcttcgtgctcggggatgccgcaagcctgaccttggccggtgccacacgcgccctgccacctacggcgcaggtggccacccagcaagcacagcatctggcccgccaccttccggcctggctggagggccggccgctgcccgagttcgcgttccgtgacttcggtgcactcgtttcgatcagcgattacaacgcctttggcacgctgggagacttcggattcttccgtggcgcgtcgatcaaggggcgattcgcacatctcagccatgcgctgctttatcgccgccaccagcatgcgctgcacggcttccgcaaggcgaccctgctgtggatggccgaacgcctgaacggctgcgtccaaccccgcgttcgtcttgcctga

SEQ ID NO: 508518 - DNA, 759 bp, Stenotrophomonas maltophilia
atgtcacgtttgaaggacaaagtagcaatcatcaccggcgcgggtgccggcatgggggcggccgatgcccgcctgttcgcgcgcgagggcgcccacgtcttcatcactgacatccgcgccgacgcggcacaggccattgcagcggagctcagtgctgaaggcctgtcggccacggccctgcccttggatgtcacccgcgaagaccagtggaacgacgtggtcgaccaggtcatcgcaacgcacggccgcatcgacgtcctggtcaacaatgcagggcttcccggtccttttgatacctgggacaacgccacgctggaaggcttcaacgccatcatccagctcaacctcaacagccatttcctcggcatgaaggcggtcagtccgcacatgaagcgcgcgggcaagggctcgatcgtgaacatgtcgtccatctgtggactcgtggccatcaccggcatccatcctggctattgcccgtccaagggcgccaaccgcctgcttgccaagggggctgctgccgagttcgccagcttcaacatccgcgtcaactcggtgcacccgggcatcatcgatacgccacagaacaaggacctgatcgccaacgatggcgccaaccatggcatgcgctcacgcatcccgcttggtcgcttcggacgtgcagaggaagttgccaatgtggtgctgttcctggccagcgacgaagcgtcctatgtcaccggtgccgagatcgttgtcgatggcggctacgtcattgtctga

SEQ ID NO: 508519 - DNA, 873 bp, Stenotrophomonas maltophilia
atgcttgccgtccactcttccgaatccaccgcgatctctccggtcgcctccgtgcgccgcatcgtgcatcgcacccgcggccgcagccacggacccatcacccggctggtgagtccttccgacctgggcgaacgtctcaagccgttcgtcttcctcgaccttatcgatgcgcgtgatctttcgcgctcccaggcccctgcgctgggcctgcatccgcattcgggcatcgccacgctcacctggctgctggaaggggcggtcgactacgaagacgaccaggggcgccagggcagtatcgaggccggctggatggagtggatgcaggccggcagtggcgcctggcacggcggcggattcggtgattccgatcgcctgcgcggtttccagttgtggcttgcactgccgccggcactggaactgggcgcgcccttcagccgctacttctctcctggcgagatccgcagcgaaggcccggtgaccgtattgctgggagcgtacggcacggcccgcagccccatcgatgccccggcaccgatcaactacttctcggtgaagctggcggcaggggattcgtggcggttccaaccgccgccgggacatgacgtggcctgggccgcggtgagcgtgggctcgctgcgtgtacccgaagcgatcggtgcaggtgaactggtgatcttcgaggaaggtggtcaggaggtcgcgttcttcgcccgcgaggacaccgagttcgtgttcggtaccgcagcacggcatccgtatccactggcaaccggctactactcggtccataccagcccgcaggcactgaacgcgggtgaggcgcggatccgcgagctgggtacgcagatccgggcggcgggaagcgctggctga

SEQ ID NO: 508520 - DNA, 1584 bp, Stenotrophomonas maltophilia
atgtcaagcacgatcacgcagcgaatgagagcctggctcttcccctgcacagtggctgcgctggccatctgtgcggccattggcctgcccgtggcaagccagatcgggatcgagcagatcttccaggccaccgaacgaaacgtggccatgggctacgcgcgggatgtcctgcagcgctccgaacgggtgtcagccaccttgaaggacgccctggcgcagctgacacagggcaatccggcaaccttctgtgatccctcacgggtcaccacgatgcgccgtatcgccttgatgtccccggacatcatggcgatcggccattcccagcaaggtcgcctgctctgctcctccttgccggtcccggtggattcggtggtgctcggtcccgtggagttccgcggcgagttcgatgtacgcaccaaagtgagccttcccctcgcgccttcaccgacattcatggcgatagagcgtgatggcttcgtcttcttcctgtacagaacgcacgtgatcgaccttccgctcgatcgtgacgctgtggttgcgacgtactccacgctggcgcgcagggtgcggacctcgcgtggcgaggttcgccccgcctggctcgcggccgggcgccgcggccaaggcgtcagcttcattgatggccgctacgcggtggccgtgctggaatccagccgaaacgccacgggcgtggtcgtcgcctacccgcgcagccgctggcaatcagagaagcgcagcattgccggcgccacgctcggcctggcgatactggctggcctgggggtggcgtcatgggtggtcctgtgggcccggcgactgctgagcgtatcggccacttcgctgaagcgaggccttcggcgcggggagttcagcctccactaccagcccatcgtcgagctggaaaccggacgatgggtgggcgtggaggcgctgctgcgctggcagcgtccaggcggaaccccggtcagtcccgcgatcttcgtgccgttggcggaacgcaccgggctcatcgcccggctcagccagcgtgttctggagctggtcgccgcagagagcccgatgctgctggcggaagatcccgatttctacatcgccatcaatctcgccggcagcgatctggcgtcatcgaagatgctcactcgactgcgcgcactctccgaactgcctggtgccagcggtcgcaacttccaggtcgagatcaccgagtacagcatggtgtccatcgacgcggccggaagcagtatcaagttcctgcgagaaatgggcatccaggtggtactggatgattttggaacaggcttctccaaccttggttacctgaccgagttcgcgctggatggcctcaagatcgaccagcagttcgtgcaacgcatcggcaggtcggacaccgccgatgccatggtcttccacatcatcgagctcgcccggtcattcgggctgcgcatcgtggccgaaggcatcgagacccagcaacaggccgatgcactggcagcgcatggagtacggcgtggccaagggtggctgtttgctcgtccgatgccgctgcacgagctgctcaaggcgctccggcgccgccacgattga

SEQ ID NO: 508521 - DNA, 942 bp, Stenotrophomonas maltophilia
atgcggcaccctccatatgccatcggttcacggcaggcacccttcatgctgtccgtgctggccctggtcggcagcagcgttgcgctaccggcacaggctgcacttccatccggcaacctcgggctgacctcgttcaacgatggcaagtccaagcccggcaatctgttccagcagttcgtcaacgtttacgaagccgaccgcttcatggatgcacagggcaggccacgaccggtcgacaacgagctgcagaccaccgtgctggccaccttcgtcggccgcatcaccgagcacaaggtcttcggcgcctggtacggctatgaagccctgcagccggtgctgtttgccaatgcggatttcaacccgaaggtgagcaccggcaatggcctgggtaatctgagtgtcagcccggtcgtattgcagtggcccgaaacaaccctgttcgggcgcccctacttccagcgcctgaacctgcaggttcaactgcccacgggcagctaccaccgcgaccgcgccatcaacccgagcagcaacgcctgggcgttcaatccgcactatgcgctgacctgggagttcgcggacaactgggaactcagctctcgcatccactatctgtggacgggccgcaacaacgatccaaatccagcccttgccaccgactacgtgcaacctggccaggcgctgcatgccaatgtctcggtctcgcgtgcagtgggccagaactggcgtctcggcctgtccggctatgcgctcaagcagatcagcgccgaacgcatcgacggcagaacccgggccgattcgctggaacgaatcagcgcactgggccccgccgtccagttcggcaccggcaggacccgcatcatggtccactactacaaggagttcgatgcggccaatcgcagcgagggggaccgcctgctgcttcgctggttccagttgttctga

SEQ ID NO: 508522 - DNA, 642 bp, Stenotrophomonas maltophilia
atgatcctctacagcttcttcaacagctccacctcctaccgggtgcgcatcgcccttgcactgaaaggggtcgagtaccagctgcgcaccgtggccatccgcaagggcgagcagtacagcgcggcccatcgctcgctgagccccatcggtggtgtgccggtgctggtcacagatgacggcgaggtcctgacccagtcactggcgattctcgactacctggacgccatcgctccgcaggtaccgttgttcccgacagaaccgatgcgccgcgcacgggtgcaggaactggcgctcctcatttcctgcgacatccatccactcaacaacctgcgcgtcctgaagtacctggagtacgagctgggcctggaggctggcgaacgatcggagtggtacggccattggatcgccaagggcctggccgccgccgaaatcctgctgcaacgcgccgacccagccacgttctgcttcggtgacacgccgggcgcggcggactgctgcctggtcccccaggtcgccaatgcgctgcgcatgaactgcgacctggcgccctacccgcgcgtgctgcagatccatcaggcctgccttgcacaccctgctttccaggctgccgcaccggaacggcaacccgactatccggcctga

SEQ ID NO: 508523 - DNA, 1374 bp, Stenotrophomonas maltophilia
atgtctgcaatcctgcgtaacggcgccgtcgacatccaggcattcgttgacgcgcagccattgagcggcttccagtggcgggtactgggtttgtgtttcctggtggtcgcgctggacggactcgataccgccgcgattggtttcatcgcccccgcattgagccaggactggtcactgactcccggccagctcaatccggtgatggttgctgcgttggcggggctcgccgtgggcgcattcgcctgcggcccgctcgccgatcgcttcggccgcaaacgcatcctgatgctgtccgtgctgttcttcggcggcttcagcctggcttccgccgggtcggactcggtcgcgggattgagcgtgttgcgcttcctcaccggactcggccttggcggtgccatgccgcaggcggtgacgctgatgtccgagtattgcccccagcgccgccgctcgctgctggtcaccaccatgttctgcggcttcaccctgggctctgcgctgggcgggatcgtctccgcgcacctggtgccactgttcggctggcgctccatcctggggttgggcggcgcgctgcccctgctcattctgccggcgttggcactgtggctgccggaatcgccgcgtttcctgttgctcaggccgggcaatgaggcacgtgtggcagcactgctgcgcaagatcgcagcgttgccagcagggtggtccggggcgttcctggatggcgtggcccgtgatcctgctacgcaggttgggcgctccccgttgcagctgatcatggcaccggcgctgcgccagggcacggtattgttatggggtgccttcttcatgagcctgttgatcatctacctgctgaccaactggctgccgacgctgatcaagggcactggcctgagcctgagccaggcggcgctgctgaccgccctgttccagatcggcggcaccatcggctcgatcgtgctgggggccaccatggaccggttcaatccctaccgcgtgctggcattggcctatctggccggcgcgctctgcatcggcgccatcgcacgcttctactacgacttctggctgttgggcgccttcgtggctggggtgggcttctgcatcagcggctcgcaggtaggggccaatgcactggcggccgcgttctatcccactgccagccgcgccaccggcgtttcctgggcgctgggtgcaggccgcatcggctccatcgtgggttcgctcagcggcggcgccatgctgggcctgggctggggcatccagggcatcttcagcctgttgatgcttcccgcagcgatcgccgcactgctgatcttcatcatggggctgcgctatcggcacgcacgcaccacgactgcgacagtgaccgcgcactga

SEQ ID NO: 508524 - DNA, 699 bp, Stenotrophomonas maltophilia
atgacgtatctctttgccccggcaccagtggtcggcataccggtggttggcagtgatcagcagttccccgtacgccgcgtgtactgcgtcggccgcaactacgccgcacatgcgcgggaaatggggttcgatccggatcgcgagccgcctttcttcttctgcaagcccgccaacgctgtcgtgccggtggccgccggagaagagctgcaactcccctatcccagcgaaaccggcaattaccactatgaaatcgagctggtggctgccatcggcaccggcggctccaacattccgctggagcaggcgctgtcgcatgtgttcggctatgcagtaggcctggacatgacacgccgcgacctgcagatgaagatgcgcgagatggggcgcccgtgggaaatcggcaaggccttcgaccagtccgccccgatcggcccactgtggcctgcggcacgaagtggatcgatcgaccaggccggactgtggctgcaggtgaacggtgaagatcaccagcgcagcacgaccgcggcgttgatctggtcagtggccgagaccgtcgcatacctgtcgcgcttcttcgagctacagccgggtgacctgatctataccggcactccagagggcgtgggcccggtggtccgcggcgacctgatggtgggcggcatcgacggtcttggggagttgaacgtgcgtgtagtctga

SEQ ID NO: 508525 - DNA, 1053 bp, Stenotrophomonas maltophilia
atgcacgcagtccaggccctcgacgcacgttccgcattcaaccgcgatatcgacgcggaccacctggtgccgctgtgggaacagctgcattcactggtgccgcgcgcgccggcagccaaggtggaggcagcgctgtggcgctatcgcgacctgcgtccgcatctgatgcgcgcaggcggcctgctgacggccgccgaagcgatacgacgggtgctggtcatggagaatcccgcgatccgtggccgcgcctcggtcacgcagagcctgtatgccggcctgcagctgatccttcccggcgaagtcgcgcccagtcatcgccacacgcaatcggcgctgcgcctggtgatcgaaggcaccacggcgcataccgttgtcgatggcgaacgcattgcgatggccccgggcgacttcatcatcaccccgtcctggacctggcatgaccacggcaatcgcgaagcggccgaaggtggagagcctgtggtctggctggatgggctggacattccattgctgggcttcctgggtgcgcagttcgccgaggaccacgacagcgatgagcagcccctgacgcagctggagggcagttcactggcccgctacggttcgaccctgctgccggtacggcaccgcgtggcaacgcccgtatcgccgctctcgcactatccctacgaacgcacccgcgaggcgcttgaaaccctgctgcgcaatggcgatctggatccttgggatggcatcaagctccgctatgccaatcctgcgaccggtggctgggcgatgccctccatcgcgacctgcatgcaactgctgccggcaggcttccgtggccgcacctggcgcagtactgatgccaccgtgtactcggtggtggaaggcagcggtgaggcgatcatcggcgggcaatgcttcgccttcgaagccaaggacaccttcgtggtcccctcatgggccgggctgtcactgcatgccaacgaggattccacgctgtttagtttctccgaccgccccgtgcatgagctgctgggcgttctgcgcgagtcgcgcgaagcggaatga

SEQ ID NO: 508526 - DNA, 939 bp, Stenotrophomonas maltophilia
atgcctgggattctcgactggtcgcgccgcctgcatatgcggcatctgcagtggctgttgttgctggaacagaccggcagcctgtccgaagccgcgcggacggcgcacaccacacagccgggcctgtccaaatggctgcgcgaactggaagaggacatcgggacggcattgttcgaccggcacgcacgcggcatcagcccgaccccggcgggccgtctggtgctgctctatgcgcgacgcgttctcaacgcgatgcagcgggcggaggaggatgtggaggcagtacgccacggcggcctgcgccgggtgatgcttgccacctcacctgcggccacgttcgatctggtccccgatgcgatcgcgcgttacatgcgcctgcagccggacatccagatcgggttgcgcgaggggacgatggatgaactgttgtcacagctggaacgcgtccaggtggatgtggccgttggacggctgagcggcagcaatccgccacctggcctgcagtatgagctgctgtacgtggagccgattgtgctggtcgcgcggcccggtcatccactcacacgcaagcgttcgctcacctggcagcaggcgttcgactacccgtggatcgtgtggcccgtgggaacgccgatccgtgccaatctggaaaccggcctggctgagatcggactgacgccgccgccctatgcggtggagtcggcctccatgctggccaacatctcgcttctgcgcgacagcgatctgttgctggccgcatcggcacatgtagcggatcacttcgtgcgcctgaagcagatggcccggctgcccttgtcgatggggtcggcaggagcactcggcatgtactggcgtgaagcgacgggcagcgattcggccatcgcagggttgatcgacagtctgcgccagtcggcacgacggattcgcgaggccgggtag

SEQ ID NO: 508527 - DNA, 1047 bp, Stenotrophomonas maltophilia
atggaggccatggacgtacccgtttttccgcctgtccagcttgatgtccgtacccccttcgagcccagtgccttcagcgcgggcggctatcgctaccttgtgtacgaactgcagctgcagaactactcggaagcatcattgcgcgtagaagcagtggacgtattgacgcccgcaccgcaggatggggccgagcttctcctcaggatttcaggacaggccctgcacgaccagatgagactggtcggtagcggtgctgttgattccgcgcagatgctggagacaggacgtgcggggacggtcttcctatgcgttgcgttcgacggatcgttcccggtgcctgaccgcctcctgcatcgcgtcgtgctggacagtgcagtggcgcagggccccgaggtgggcacgcagcacgacaccgtgaaggtgctgtccagccccgtccgtggcagccactggctggcggacaacgggctcgcacttgaccttcatcaccgtcctggcgtgtttgtcgccggagggacagcccagatttcgcgccgatacgccattgattggaagcgccgagtcgacggcaagctgctggcgggagaccccctggatgtacgcagctaccatgcgtacggggaaccggtatttgccgttgctgatgccaccatcatccaggccagggacgggttcccggacaacatcccgcggacaccggccgggttcactcctgccgtgccactcagcatggaatcgttggcgggcaacaccgtggttctggacctgggcgatggccagttcgcgcactatgcccatcttcaacgtggaagcgtcgcggtcaaggccgggcaacgggtcaagcgtggcgagctgctggcgaacatcggaaattcaggcgatgccagatggccacatctgcacttccaggtgacaaccggccccggcgtcatgagcagcgagggtgtgccgttcgtgcttgatcattttcgtgccaagggcccttcaggccaatggaccgtgaggcgtcaggagtaccccctgctcgacagcgagctcgacctctga

SEQ ID NO: 508528 - DNA, 993 bp, Stenotrophomonas maltophilia
atggcacaggccttcacacgtaccatctgcatgctgatctacgacggcgcgcagtcattggacatcagcggccctgtggaagtgttcgctctggcaagtcgccaggccgaggaagaccgtgctggcagtgcgccgctgtactccgtgaagctgatcggcagacactcgaactgggttgtggcctcctccggcatacgcctgctccccgatatgacgtgcgaggagatgcccgacaataccgacacgctgctggtgtgcggtggaatgggcgactcgctcgatgtcatcagggctgatcgggcactggtcgaatggctgggacgagccgcaacacgcgtgcggcggatcgcctcgatctgcagcggcgctcttctgctggccgaggcgggcgtccttgatggccgtgaggccacgacgcactggagtgatgttcgcgagctgcgcgagcgctatccgaaggtgcacgtgcagccagatgcgatctacacgcacgatggccatgtgtgggcgtcggctgggatcaccgcggggatggacatggccctggcgatggtcgcagaagatcgtggccaatcgctggcactgaaggtggccaagcggatggtcatgaccagcaaacgctccggcggccagagccagttcagccgccagttgcagtctctggatctacccgaccagttccagaagctggaacagtggatgcgggagaacctgcatcttcgcctgagcgtggacgaactcgcgcagcgtctgcacatgagcccccggcagttcaatcgcagattcgtcgcgaccttccagcttacgccacagaagtatgtggaaatgctgcgcgtcgaagcagccaagccattgcttgagggcacgcgcaaggacatgcaatgggttgccagtgagtgcggatacggttcggtggatgcgctccggcgcgcctttctccgccagctcaacgtgacgccaagcgagtaccgggcacggtttggctctgtctag

SEQ ID NO: 508529 - DNA, 1020 bp, Stenotrophomonas maltophilia
atggatccttggcactacccgcgcagccctgcttcgatcgagctcatgctgcgttttggcgaaagtcgtgggataaagaccccgcagctgatgacgggcacccgcctggcggccgccgacctgaaggaccccgacgcgatcatttcggcgacccaggaactgaaggtcatcgagaacctgctgaaagcgttgccgaaagcatcccgagccgggctggaggtaggcctgacctatcggctttcggcgtatggattgctcggctatgggctgctaagcagcgcaagcggcgaggctgctcttgccctcgcccggcgcctcctcccgctgacctacacctttgcctccatcacgatcacatcggatgggcgcaacgtgcagatggcattcgcccctgcccccgaattgatcggtgacacagcgcgctttgtggtggaacgtgccatgggtgccaccgcacgtgtactacatgacgtgatcgggcgggacttccgattggaatggttcgagctcgccggggcagccagtggctcaggctcgggtgtctctaccgtattcagtgcaccggtacgccatggcgccatcaagggttctctgggcttttcatccgccttgttgcagcgtccactgccacaggccaacccgatcacggccagaatgtgcgaacagatgtgcaatgagctgctgaggaagcgtagccccagggtagacacggcggccttcatccgcgaacaccttgccggacaatcattcaggcatccgccgtcggtcggcgaatatgcacgcatgctcaacaccaccgaacgcaccctcaaacgcaggctgcagagcgaaggaacaacgttccgcgagatatccaacggtgcgcgtttggcccgcgcagacatcctgatgcaggacgggcgcctgtccctcgcgcagattgccgcggaactgggattcagtgaaccaaccaccttttcgcaggcctacaagaagtggaccggggtgccgccaggcaaagcccgcaaaagcggcatttaa

SEQ ID NO: 508530 - DNA, 978 bp, Stenotrophomonas maltophilia
atgaacgccaagccagactactaccgtgatcagcaggaatggagggacctgcaaacgcggctacctgcgcgccttcgtcttgacgaggcaactgcccccaaggaggtgtactggagtcatcgaggacacgaggtccacctggacaggtacgttaatgcggaagcaccggcgaaggtcatcctccttcacggcgtaggcaccaatggtcgccagatgtcgatgatcctgggcgcgcctttggcacgtagaggtctggaagtagtggcactggacaatcttggttacgggctcaccaaggtagcgcgcggtgcccccttctcctacgacgagtgggtcgatctcgttgtcgacttcattgcgtttgagcgggcgcgggacgtgcgccccatcgtgctgtatggccttagtgctggcgggatgctgacctatcacgctgctgcaaaggcgccaaaggggacagtggctgggattgtgggcatgaccttccttgaccagcgatcacagcaggtgcgcgatgagacggcccacgacctgctgacctcacggcttggaattccattgatgggcctgttggcgaagtctccaattgctgcattcagatatccaatgacgctggcgtcgaaaatgagtgcgcttgccaacgacaaggtcgcaatggagatctttctgcgcgaccggacatctgctggaaaccggatgtcgattcggttcctggacagctatgggaactatcggcctgcactcgaacccgagcagttcgaccgctgcccggtgctcctgacccagccggcagatgatcactggacaccgttgcatctcagtacgcccttcctctcgcgcatccgccaggttgaggtcgagactgtactgctcaggaatgccgggcattacccgctggaggatccgggtctgcagcagatggaggagacgatcgcaaacttcgtcatgcgggtggcgtctgtgggcgggattggatga

SEQ ID NO: 508531 - DNA, 324 bp, Stenotrophomonas maltophilia
gtggcgcctctgatcgatggggcgtggaaattccaggtcggtgacgatccgcgctgggcgggtattgcgttggatgattcgtcctgggaaacgctcgacctgagcgcaccggccagcagcatcgacggcaatgtggggctgcccaaccatgtcggcggatggatggcacacggtcattccgggtatcaaggatatgcctggtaccggcgcacgcttgcgattccagagggcgaccgcgcgtgtgacatcctggggcctaccgccgtagaggatggctatgagttgtactggaacggcaagcgcctgggggctcgggcaggctag

SEQ ID NO: 508532 - DNA, 816 bp, Stenotrophomonas maltophilia
atgatcttttcgctgcccgccgatgccgcaggcacgcagggcgtgattgccatacgagcattcatgcagcccggcagcgctgccggccctgcgagcggcggcatccacgtggcgccgacacttgccccgcggccagaaagccgtgagctgtatcgcgtgcaatggtggcgtaccgtcgcgggctacattgttgaagtcgttgagccgcttgcgatggccatggtgatcgtgctggcactgttgctaagaccgctcagcagccagcggtcgttcatcgccttcgtttgcgtcgcgcttctgctctctgccgtgaagcggctcgataacgcgatcgtctcctggacggatctgctcagtcttcctgcctatgcatggctgaacaatgtgctgtggatgccgctcagcctggcggcatgggcactggcgtggaatcgctgggtacttccaccttcgcggatgatcgacggtagcgcctttgttctggcggcgctgggggccgcgggaggcgtcatgggggctgcctggggcactcaagtcttccgcctcggcacactcgcgctgctcgtgcttgttgccgcgcggattgcccgcaatgggccaatgcgaggcatggcgttgatcgtgatgctgatgatcaccgtatcgcagtacacgagtgaactcggttcgctggggtttccaacgatctggttcccgttcgggattggcgtgacactgacccagtacgtgtatggaatcgccatcccattgctggcggtgttgatcgtgcggagtgcaacgactgcggcgccagtgagcggcgctcgcccttgttga

SEQ ID NO: 508533 - DNA, 516 bp, Stenotrophomonas maltophilia
atgaattggatcaattccggcattcagttgttgaggcaaccagtgttcaagcgtggcgcaccgagcttcttcagtcaggtggttcgcggcgcgctcgatcaggagatgaatgatggtgtcgggaggcttatcgggcaacaacccacaacaccaccaccgaaaaccttgggtgaactgaccggggcggtgttggtcagtgctgtaaacaaggcatacggctgcgccgttccgaagcccgtccggaaacaggtgacccgcggcatccataacctcgtgctcaccagccatacccaggaggagtttgacgggaagttgaaagtccatggaatgacccttgttgagatcggcatcatcaacaaggatcccaccggatcgacctacaacgacccattaatacggaagatacatgcccatctgccggtgcaatgcaggtcgtgcggagcattcgtgagttcgcatcttatcgagcagggtcgctgcaggaattgccgggtgctgaatgtcctgccgcgctga

SEQ ID NO: 508534 - DNA, 282 bp, Stenotrophomonas maltophilia
atgattgatccgctcgttaccttcgtgttgctggcggccattgcggccgtctccatcggtgccgctcgcatcgtgtcgtggctgctggacaggcgtgaccatgccgccgtccagcgtgccaaggaagcggccatcgtcgcccagggacgcgccgaactggccgccactggctggaccgcggatcacgaagccctctatcaggccgagattaccgcgacaaagagcggtgatctgcttgccgcagcccgattcgccgagcagcaggaggcttcccatggctaa

SEQ ID NO: 508535 - DNA, 192 bp, Stenotrophomonas maltophilia
atggccgttgatcgtgcgcgcttccgcatggccgccgttcagcgcgccaaggaagcggccatcgtcgcccaggcacgcgccgaactggccgctacgggctggactgctgaggaagaagccgcattccaagccatccgtgcccagcagggcgtttctctgaagcacatgcgggagtcaatccatggccgctga

SEQ ID NO: 508536 - DNA, 195 bp, Stenotrophomonas maltophilia
atggccgctgagtgcttcgtcatcaccaaggcggattgggatcagctgatgcaggtgttcgccggaatgttcctgctgctcgcgttctgcgtcgtgttctcgccgttcgatctgcattcgtgggagtaccgcgtgcgccgctatctgcgtcgccgccgcattgcgcgtattcgggaggccgttcatggccgttga

SEQ ID NO: 508537 - DNA, 231 bp, Stenotrophomonas maltophilia
atgcagaagatgttgaaggccctgaagggcaagggtgccgctctggcggctgtcggcaccgcggctctggcttcggccccggcgtttgcctcgggcggcaccagcgtggacgtgggtgcgacggtgtccgcgatcaatgccgcactcggtccgatcggtcagatcggcattgcggtgctgggcgtgctggtgggcatcaaggtctacaagtgggtgcgccgcgcgatgtaa

SEQ ID NO: 508538 - DNA, 1380 bp, Stenotrophomonas maltophilia
atggcacggggcgttgttgtctgtgccgcatctgcctatcgaataggcgcgctgctcgcggttcttatcgctgggctggtggcagctttccctgcgcttgctgcgtttgatgagcagggagttgctcatcagaagtgcttagccaatttggcgaatctttcgggcgaaggggtcaaggacaaacgctgcgttgataggccagtgagcaatggcggggctgtcaaaggctatttccaaggcacctttgtcaaccgcaatggcgcaaccgttgattggggtccgaattttccgtatgggtcctcttgtaaggacaagggcggatacacgggcgttggcccgtggtcttcgattggtggcggagctcggtcaggtagctacggttgtcatggtggctgcgacggcgtgtggaacaagaatgccgattcgtcatatacgtggaccccaacgcaagatggctacctctgccctgatgacccagaaaaggcctgtggtgcaggtccactggcgaatgccggttactactggaatccagttctcaatgtgtgtgagccgccaaagcatcaatgtgagggcggaaagaacccgaattctctcggccagtgtgcgcctgagccgtgccctgatgggatggcgcagcaggccgatggcacctgcaaaaagaaggaaaacgaatgcccagcagggcaagttcgttcgcctgatggcaagtgccttcccggcgacggacagtgcgccaagggggaggtccgtggacctgacggcacctgcaagaaggacagcgacggcgacggcaagcctgatgagccaggcgataaggattcattctctggcggcgatgattgcagcgcgccaccgtcgtgtagcggctctccaatcatgtgcgggcaggcgcggattcagtggcgcatcgactgcaacacgcgtaagaaccggaacatcgccggtggcctatgcaactccatgccgatctgtacaggcgagaagtgcgatgcaatggagtatgccggtctactgatgcagtggcggtcggcctgtgcgttggaaaagatggcgcaaggcaacggcagtggcggcggggagaatgcagacgtcaaggcgatccgtgacgcgcttaccggcagcggcggttccgttacaacggccccggatcgagccagctccgatgtgtggtcgccgcgtagcggcacaccagttaagcccgataccggtggatatggctggagccggtcctgtccgcagcctccgagcattgatgtattcggtagctcgattcagatcaacactgcgccgatatgcaactggctgatccttggcggctattttgtaatgggtcttgcggcgctgggttcactccgcatcatcgcaactagggatgcctga

SEQ ID NO: 508539 - DNA, 312 bp, Stenotrophomonas maltophilia
atgccaatgctgatcagtacgctgctgactgcgctcgcagcgctctttcggtctaagtggggcccgtgggttgctgaggctatggtgtggctgggtttgtcctgggcaacgaatgaattcttggtgcagccttggattgatcagatggagcaggcgatgcgcgcaggtgcgccgggcggggagttcggagcgctggttctggcgtacgcgggaatcatgaagttcgatgttgcctgcaccatgattgcctcagcagcaactgcgaagttcgctgttggtgctgcaaagacgttcctgacgaagcggacctga

SEQ ID NO: 508540 - DNA, 1272 bp, Stenotrophomonas maltophilia
atgcctatcgaactgttcaccggtcagcccggaaacggcaaaacggcgttgatgatggaacgccttgtggcagaggccaaggctgcgagccggccattgtttgcagctggcatcaatggcctgagtcctggactcgctacgattcttgacgacccgacgcgctggaacgaaatagacccaactatcgagggcacttgcgtctgcggaatcgagttcacgccggatggcaccccgatcccccgacctccgcatgctcatacgctggtgccggatggttcgctcatcttcgttgatgaggcttggaagtacttcgggcatctgcacaatgcgacgaatcagaagaccccgaagcacgttctcgcgctgagcgaacaccgtcaccgtggcattgatttcgtctggacgacgcagcagcccaatcagctgtatccgttcattcggggccttatcggctctcacgcgcatgtggttcgtcggttcggaaccaagatgatcgacgtgtatcgctggggggagttgaacgaggaaattaagtcatctgcgaagcgcgaattagcgcaacgcactacacggctgctgccttcccagatatacggccagtacaagtcggcagaagttcacacgatcaaagcgcgcattccgctcaaggtaatgctgttgccggtgctggttgttgttgtcgccgttgccgcctacttggcctatacgtctctaacttcctcaggtcttacgggtagcaaggggaaagaggggacgcaatcggcgttagccgatgcggccccttcgccgtctcgcccagcgggagctagagaggatgcaccgcgttggccaacggccgccgcgtacgccaaagaccatttgccccgcatcagcaccatgccctggactgcgccggtcttcgatgatcggcaggcacggtcggacccgcagctggtgtgcatgtcgtccatggaggggctggacgctcagggcgtgcgtcaagaggcgagctgtcgctgcctcaccgagcaagggacagcgtatgaattgagtcagcccgagtgccgcacgcttgcacgcaatggccctgtctacaatccgtatcgagagcggtcggaggatcggcgagagcagcgctttgatgggacaagccaaccgcgcggaacggaaccggtgggattggcgggcagtgtggtccagcacgttgagcgacccatgggcagctttcccgagtcgccgccgttccaatcggacagttacatgacgacggcgccggggccgaacaagttatga

SEQ ID NO: 508541 - DNA, 339 bp, Stenotrophomonas maltophilia
gtgcgtgatcgaaaactgaccggcccttgggccggtttttcgtttaaggctggccgactggtcacccccgaaggccgcgagctcgagccgcaggatctggcctggctgtcgctcaccgctgcacaggcacaggaatggcgccgaatgatggagagcggccgcgcgatcggcaagccccggaaacccttgaccttcaacgctgccagcgtggtgaacctatccgatgcattggccgagcgtcgcaaaaagcgtttcccggcggtgatggctgggcccgacgccgaaccgcccaccgcagtccagccgttaccggggccgagaccgcgtcagcgcgtgtga

SEQ ID NO: 508542 - DNA, 1188 bp, Stenotrophomonas maltophilia
atgttcaatcgtcagaccccgcgttgggcccataccctgccatcggccattgcgctgatggcgccgttcgacctcctggcctcgctggccatggatatctatcttcccgtggtaccggtgatgccgcaggcattgcagacatcaccagcggtggtgcagctcacgctgagcatctacctgctggtgctcggcctgggccagttgctgttcggcccgttgtccgaccgcatcgggcggcggccggtgctgctgctgggtgcattgctgttcatcgtcgcgtcgtttgcgttggcgctgtccagcagtggcggggcattcctggcctggcgcaccgtgcaggcggtgggggcgtcggcggcactggtggcgacctttgccacggtgcgtgatgtgtatgccgatacacgcgaaggcgcgtcgctgtatgggctgttcgcctcgatgctggccttcgtgccggcgctggggccgatgctgggtgcgctggtggccacggcagcgggctggcgtgcgatcttcgtgttgctgggtgtgcttggcctgatcgcctggctgcgcgcgcagcgccagtggcaggaaacccgaccagcaggcagcagagaggcgcgtccggcactgcggaggatgcttggcagtggcgccttctggacatacacgctggggttcagtgccgcgatggggacgttctttgtgttcttctcgatcgcaccgcgcgtgctggtcgggcgcatgcagtactcgtcgatcgcgttcagcctggcattcgcaacggtggcgctgatgatgatcatcacctcgcgcatggcgaacgtcttcatcgcacgctggaatacgcgcggaaccttcgtgcgtggcctgtgcgtgatggtggcaggtgggctgctgatggcactcggtacggcgttgccattctcattcgccactgtcgtgctgcccatgtggggcattgccgtagggctggtgatggtggtctcggtggccgccaacggcgcgctgcgagacttcgccgatgtgtccggcatggcggtggcgctgtattacgccgtgcagagcgtgatcgtggccggcttcgggacattggctaccgtgctgctgccgggggatacggtgtggccgctggtggcctatggcctgctgctgccactggccagtctgattgctgtggcggcgttgcggtgccgcgcatag

SEQ ID NO: 508543 - DNA, 996 bp, Stenotrophomonas maltophilia
atgcgtatcgaaactgacaagcggatcgaagtcgctctgctgatctacccggattgccagatggcggccatccatggcctgaccgatctgttccggatcgcgaatgaatgggctgcgtatcctcacgaggatgaccggcggtgcttcatccgggtgacgcattggcaatggaacccgcaatcgggccgcatggaatgttgctgggacagcgatcccggcgatgtgaacgcccctggcttcgtgatctcgccgccgagcgtggcgatgcctgagcgcatgtccgcgatgccaaacgaggcgcagtggctaaaaacgctccattcaggcggcacgatcatgtgctccgtctgcgcgggtgctttcgtgcttgcccagaccggcctgcttgcacggcgacgggtcacgacgcactgggcgttcgcgggcctgcttgccggcacctacaccgacgtccaggtgaccaccgagaacgtcgtcatcgatgatggcgacgtgattacgtcaggcgcgatccttgcgtggaatgatctgggcctgttgatcgtcgatcgcacgatgggctccagcgtgatgttggcaacggcacgcttcatgctcagtgacggaatccggcaggaccagcggccactgcagggattcctgccaaagctggatcacgatgacgcagcgctgctggctgtccagcgatccatccttgccgaacccggattgcgccacacggtcagtaccctggctgagcgtgcccacctgaccgaaagaacattcatccggcgattccagaaggccacgggactcaatccggctgactacatccggcaggtcaggatggccaaggctagggacgcgctgcagctcggcgatatccctgttgcacaactggcctcgacattgggatacgacgatgtgagcgcattccgcaaggcattccagagcgtcgttggcatgtccccttcggcctaccgggatcatttccggatcaggcggcgcgcacagtga

SEQ ID NO: 508544 - DNA, 648 bp, Stenotrophomonas maltophilia
atgcccaacatcgatacgtccgtggaagacttcaccactgaaatcgaagacagccggcatctgttcgcctggtgcctggtgcgctacggccagattcccgaagcgctggcaatcgaacacgcacgccaacgctatcccgaccaggcccctggctgcgagtacgagcacgcactgatcttccacgacgagccctggcactgggcgatgctgcacgtgttgggtgaagggtactggcaccagaacccggaactggcgcagccgtcgctggcgtacgacaccgagtcggatgcgttgtgcctggctcgcggtgagtcggttcccttgctggatgaggacgagtatctcggtgcgcttgcccatgcccgccatatgcatgcgtggacgctgatccatcaggcaggcattgccgaagagcaggcgcagcagcaggcgctcgaacactacgcctactttccgccgcatcatcgttggcggatgcgcgtccacgatgcgcgtgctgcatggggcggcgtgatgggtgcgctgcacctcgatgactactggtcgcagccggagctgcacacgccaccacaggcctattggcatgcgtcgcgcgctttcgttgccgcgaatggaatccgcctgccggatggtccgggaagtgcctga

SEQ ID NO: 508545 - DNA, 213 bp, Stenotrophomonas maltophilia
atgcgcatcctgatcctgtccatgcccctgctggccagcgtgctgctggcgggctgccagcggccgccgacaccgaacccggagaagccaccagcaccacaggcgatggcgcgcgcgatgcatgagccgctggaccgcgccaaggacgtgcagaaaaccgtggacgatgctgccgcgcgtgagcgcaaggcagaggccgacgcaacgcagtga

SEQ ID NO: 508546 - DNA, 321 bp, Stenotrophomonas maltophilia
atgaccacctccaccacccaacagaagcgtgcgcgcaccgcccttgaacagttgctgggcaccgaagaaggcgacgacagcgtcgacctgttcgtccagcatcatctggatgagatcgaagccgactactggatcgcgcacctgggcacgcccacgccggcggccagtgcggtgctgggcctgctgcagccgcgcgaaccgtggggagacgatggatcggtgcacatcgatttttcgctgccgggcgatgtctcgcagtatgtgctgagtgtcgagctcgatgaggacgacgaagtgattggcgtttcaatggacagttga

SEQ ID NO: 508547 - DNA, 141 bp, Stenotrophomonas maltophilia
atggagctggccccggacctttcaaggccgctcgcggaaaaaatttcactgccccgggcccgctcgatccgcgccggtgtgaaggcctggaggccggtgcaacgcggcaaccctgtcgctggaaccctcgacttttggtga

SEQ ID NO: 508548 - DNA, 414 bp, Stenotrophomonas maltophilia
atgatggacgccttcgcccgtggcgataccgagctgatcatcgcgcgcacccatcccagcctgaagcagctggccggcggcgacgaggcctatgcacggatgacccgcgacacggtaaaggaactgcgcaaggccggcgtcaccatcatcagcgacgaagcgggcgtgccgggccgcacctatgcggccggtgacgaggaagtctgcttcgtaccgcgccagtcactgctgcgcgtgcgcgaagcgccgatgcgcagcacgtcattcatggtcgctgtgcggcgcgtcggtaccacgcaatggcgctatctggatggcgccgcgctgccggacaaccccgggctgttgcagcagctgctgcccgacctggaaccaggcgtggtcctgccggagagtgagacggaagcgctgtag

SEQ ID NO: 508549 - DNA, 624 bp, Stenotrophomonas maltophilia
atgaccgtcgccaagcgcctgcaggccgccctcgatgccgaaggggcgctgctgttcctggcccgctatgtgcgccacgcgcgttgtggccaggccgcggcctggtgcgcctcggccgatgtaccgacgctgcaggctgaagccgccgagcgctggggtgagcaggccgagatcctgtcctgggacgtgcagcgccgtgaacgccggcgctggcggcggctggagttcaaggtctacctggacgacgacaagtgctggtatggcgatgccatcgcgccctaccggcgcgcaccgagcgtggccgaactgctgcaggtgatgcatgcgcagtactggctggacccgttcgagctgtatctgtacgccgatggcctggatgagggcgccatcgtgctgcccgccggcggcatcatccacttccagcgctcgcccggcggtgtgtaccggctgctggcgctgcaggcggggttagccgatgctggggcgcgggagcgggccgtgcaggcggtgcgcaatgccatgcagcgtagccatgacgcggtctggttgcgccgccatatcgatccgcagctgccatggcaggactggctgggcccggcggaacttgccggtacccgtatttga

SEQ ID NO: 508550 - DNA, 942 bp, Stenotrophomonas maltophilia
atggcggctgggactggggtacgctcgccgttcatcaccaaggatccggcaatgatgcgctcccctttgtttctcgctctcgcgctggccgtaggtgccggcaccccgttgcttgctggcgaggccagtgcacagaccgcgcgtgcggtgcgtgccaccgcggaaatgagcatggtgctgtccggccatatcgagatcacgcctgagggtgaggtcagctcgctggtactggaccagaaatcggccttgactccgagcatcgcctccttcgtggaaggcacgatcggcggctggcgcttcgaacccacgctgcgcgatggcaaggcagtggctgcacgcgccccgatgcgggtgcggctgagggggacgcagatggccgatggtggctaccaggtcagcatgaccagtgtcgatttcagtgaatatgatccgaaggctaccgattcggtgacccggaagcagatggctccgccgcgctatccggaagacgcctatcggaatggtgcgcagggtgaagtgctgctgatggtcaaggtggcgcgtgacggcacggtggccgatgtcatcgccgagcaggtgaacatggccgtggtcggcccggaacgggccatggccaagatgcgcgacatcctggccaaggccagtatcagcagcgcccgcagctggaccttcaacccaccgaccaccggcgaaagcagcacacacgacagctggacggtacgcatcccggtgagcttcgccctgggcaatgaccgcaacgcagggcaggaacgctatggccgctggcgcgccttcatccccgggccccgccaggctgcgccgtggcgcgaacgccggtcgatcgagcaggccggcagcgacctgctgccggagggtggggtgtacatggtcgatggcgccaagcgcggcgtgcgcctgttgaccccgctggaacagggctga

SEQ ID NO: 508551 - DNA, 909 bp, Stenotrophomonas maltophilia
atgaccaagagccatttcaacagcctgcggcgcaaagtctcaaaatgggttgcatggagctcagtggatgcggtgaaacgggagctctttctcgaggatgcagaaggcaagctggaaagaattgcattgcaggccagcgaagactctttgccttatctctgccagagtctggaggatcttgctcactggtaccttgtcgatttccagcaccgcctgctcaacgaaggcgagcgtcatcctgagtcgctcgccgctgccgctgcacacgcccgtgcgcaggtagatgtctccagcctattgtttaagaaggggcaaggcgcgaggttcagctgtgaaatgctgccagacaccgccgccgtttctctgggactgtctctgatgacgggccggcgcgaggaggccatgcgcttgttcgaccagttgcgcgcaggcttggacacgcagcttcttgatctgcacaaggagggccgcccagggtccggggaaatctatcgccacttctggttcctgatgcttcttagcgcagctgcgttcaagaaacggattgatctgcaaaattactccctccccaccaacatgcagccctatgccgacgcacttgcgaactgggatactgagaacgtcgaccgggtcgatgatctcgcttccgccttggcggagtttcacgttcagcaggcccgcaatagatccgccaatgatatccgcgagttcgacagggaggatcggatgatctttccctacgaaatccttggatggcttcgcctgcacgaatgggccggtcgggagaatccatccgccttctcacatcccctgatgaaccagcccttggcatggctgccccccgaaccattgccagcctggaccacccgcacgcttgaccaagcgttggccgctgccagggatttttga

SEQ ID NO: 508552 - DNA, 573 bp, Stenotrophomonas maltophilia
atgaacgctgcatcgatcacgcgcgctgcggttgccgtagtggcccttgccctgggactggcagcagcggctgcctgcgcggccgagccgactgctgcggagattgacgaaaactcccgcgtccgtgaggcgatcttccgtggcgagcagggcggcccgcagcttactgattaccctgtggcgaaggtctacggcggacctgccgctgcgctggacatgagtacgcatgaggcgcgcatgttcaagacgcggatgtccgccgcattgaaggacggcaaggtcgagttcgccggcgagtacaccgtggccggctggggctgcggcacggggtgcttctcgcagaccttcatcagcctgcgcaccggcaagccgctgccgcagagcctgggtggggaactcggcccgaacatcgtccggatcgatccgcacagcgcgctggtggtggccgaaggcaccgagtacgacagcaactacgacaggaccggtcactacgcctacttctatgtgctggaagggcatgcgttgaagctgatccggaaggtagcggtgccggaggctttggaagaggaatga

SEQ ID NO: 508553 - DNA, 408 bp, Stenotrophomonas maltophilia
atgcgcgtgctgaccttcacctgtccactttgcggcgctgccgggcagcgattcccgctgctttccgcatcgagacggcaggcgaagacggcatgcaggggatgtggcgtgatgctgcgctcggatccccgcttgggcctgcacacgctctacctgctgtatacgcagatcatcgtgctgctggctgcattgcccatgatctgggcctatgccttgggccgatggttctggttggctgtgatctgggccgtggtgttggtgttgtcctggttccccggcgtgatcaggcacgcacgaagtccgatcgtgcgcgcctgccgggatcccgattacagctacgcgcgcaggccgggcggaccatccaccggcggcaccgcagaaccggcgccgtgcagccgcattccatga

SEQ ID NO: 508554 - DNA, 1131 bp, Stenotrophomonas maltophilia
atgacgccaccggatctgctgcagctggcggcaggcgctgcgattctgggcctggccgccttgtccaccggagtgagcttcggccgcgctcggcgtggcaaccacctgctcaccaccttcttcgcctgtttcgccgccgccaatctgttcggactggtgctgttgggtggccaggcgtggctgtcggccgacgcggtgcgctggctgcgggtcatcgaggtgccgctggtctatctgctgggcccgttgctgtacggccatgcacgtgcactgctggcgcccgcgcgggagcatgcgtcgccgttgccggtcgcgcacctgctgccggccgttctcgcgttcgtcatttccctgttgaacgcagtcgcgcctttcgagacctcgccactgggcaatgcgctgttccagctcagcttccatggctggctgctgcagggtgcaccctacctgctggccacgctgtggctctcgctgcgtacgccttcggccccccgcggaaccgccatccagcacagcgggctgcgcgggctggcgatcgtgatggcggggtgctggcttgccagcacgatgaaccggtggccgccggataccgctccgctgctggccagcatcgggctcagtctgctgaccaccgccggcatgtatctgctggcctgccgcgtggtgcggcagcagctgcgcgcgtctgtgagcgccgctgcaccgggcatggggaaccttgtccccgcgcccaccgaggacgtcgccgtcgcacgctaccagcgctcgggcatcgacgcggcgcaatgcgcggccatcgccagcgcgctgaccgcattgatgcaggaccaacgcctgcatgaagcccccggactcgatctccagggcttgagccagcatagcggctggtcacccaaccaggtctcgcaggcgctcaaccagggcctgggccagagcttctccgagttcgtgaccggtttccgcatcacggcggcgaaatcctgcctctccgacccggctgacccacgcagcgtgctggacatcggccttgccgccggcttcggcagcaagtccacgttcaacagcgcgttcaagcgcgccaccgggcagacccccagcgaataccgccgcagccgcaccacgtccggctga

SEQ ID NO: 508555 - DNA, 165 bp, Stenotrophomonas maltophilia
atggcacagcagaaccagaacccgaaccagaagcagcaaggccagcagaaccagcaggatcagcagcaggggcgtcgtgaccaacagcaacagcagcaacaacagcaggatcagcagcgcaaagagcgcaaccagcagcagggcggccacgacgaagaagaatga

SEQ ID NO: 508556 - DNA, 360 bp, Stenotrophomonas maltophilia
atggtcaggaaaggcccggacaccgaaacccccgtggacgaggccttccgtcccaccctggcctggatggcaaacgagatcgcggccggccgtgcgccccacgcagtgaacgtgcccgcgtgcagcgccgacacctgggatgtcatcactggcatcatcgcggactatggggaaaccctggtgcagctccccgaggccagctgggaaacttcggtcagccagtggcatggcgagcgctggaaggtcctggtcgacctgtacacggctgtggaagggcgaagtgatctggtaatggatgtggatatcgccgaaaccgaaaccggcttcgaatacagtctgcacttggtctacgttccctga

SEQ ID NO: 508557 - DNA, 327 bp, Stenotrophomonas maltophilia
atgaagccgaagcaattccgtctcaccgccaagcagatcaagcctctgctggagggctatggcggatgcatcgccaccgatcgcatcaccgttgatggccagcccgtgggctactgctaccgcgaggcgcccgacaacgagttggacagtggctggcgatttcttgccggtgacgaaaccgaagattacctggacgagccgggaaactccggcgtgtacgacgtgaacaccatcgccaactgcgatcatgccgtcctggcagtggtggacgcgccggcgggtaccgagttcgaacgcactgaagacggcaggttgctgcccgtctga

SEQ ID NO: 508558 - DNA, 1500 bp, Stenotrophomonas maltophilia
atgagcctggcgctggtccacagccgtgcccgcgccggggtcgatgccccgctggtgcgggtggaagtgcacctctctggcggcctgcccgccacccagattgtcggcctggccgagaccagcgtgcgcgaatcacgcgagcgcgtgcgcgccgccctgctctgtgcacgcttcgacttcccgcagcggcgcatcaccctgaacctcgcgcccgccgacctgcccaaggagggcgggcgctacgacctggccatcgcgctgggcattctggcggccagcggccaggtcgatccgcagtcgctgcttcagtacgaattcctgggcgagttgggcctgaccggtgaactgcggccggtggctggcgctctgccggcggcgattgcggcggctgacgccgggcgcatcctggtggtgccgccgggcaatgccgccgaggctgcgctggccgagcatgccgatgtgcgggtagcgcgtacgttgctggagtgctgcgctgggttggggaacccacgcctgctgccgcccgtggagcgtgtggacacgacgccgttgccgctgccggatctggccgacgtgcgcgggcaggcgcatgcgcggcgtgcattggaggtcgccgctgcgggtgggcaccatctattgctgatcggtagccctggctgcggcaagacgctgttggcgtcacgcctgcccagcctgctgccggacacggaggaagccgaggcgctgcagctggctgcgattgcctcggtgagtggtgaagggctggacccacggcgctggcggcaacggcctttccgatccccacatcacagtgccagtgcggcggcgctggtgggcggcggaaatccgccttgccccggcgaaatctcgctggcccatcacggcgtgctgttcctggacgagcttccggagtggaatcgaagtgcgttggaaaccctgcgcgagccgctggaatctggccacatccgcatcgcccgcgcggcgcggagcgtgcagtatcccgcgcggttccaactggtagcagcgatgaacccttgcccgtgtggctgggctggtgaccgcagcaaccgctgcctgtgcagcgatgagcgcatcaaccgctaccgtgcgcgcgtctccggcccattgctggaccgtatcgacctgcacatcagcgtggcgcgcatggacgcggtggagctacgggaaagcacgccgctgggtgagcccagtgctgcggtacgtgcacgggtggaagccgcccatgcccggcagcaggcgcgtggcgggctgaatgcccatctgccaccggcggcgctgcgggcctgcacgaaactgagcgaggccgatcaggatctgctggagcaggcgattgaacgtctgcagctttctgcgcgggcgatgcaccggattctgcgggtggcgcgcacgattgcagatctggcaggttgcgaggtgatccagacggcgcatctggctgaagcgatcgggtaccggcagttggacaggggaaagccctag

SEQ ID NO: 508559 - DNA, 531 bp, Stenotrophomonas maltophilia
atgaagaagcacggtcttgctgcagcggcggtatgcgccgcgatcacggtggcggtgtggatggggtggcccgagcccgcgggcgaccaggtgtgggcctaccagaagctgcggccggccgattatcggatgctgcatagccaggcgctcggcttcgtggccgcgaagactgatgagggctttgaactgtacgcgcgccatgtcggggcgacgtccttcgagatccggtgcaagggcgttctggtgatggacgtggagaacgcgccctcgcgcgtgctgatccgcatgcctgccgatgcccgcctgcgtgcaccggatatcgagcgcctgcgcatcaacttcgagcgttggctggatctgcaccagagccaaggaacgctgctggtggaaagtgcggggccttcgtgggttaaggcgcgttttgggcgcttcactgggttggtgcctgatgagcagcggtgtctgcttggcggcccaggccgccgccaggccgatcctagcaaccatgtccgcgccgaagtgccttcgtag

SEQ ID NO: 508560 - DNA, 603 bp, Stenotrophomonas maltophilia
gtgtcacgccgcagccgactgcttctctgcgcgggtctgatcccgcttccgtggttcctgttctggaccagcgttgccgccgtgttcgcgccgggctacaacccgcttgcacagcacgccagcgagctgctgcaggcaccaacgctcgcaagcatctgcgccaggatcgccgccatcggctccggtgtcggcttcgtggcgttctccatcggggtatggcgggagtccggccgccggattgccgtaggcgcgatctgctggttggtatttggcatctccatgctgaccaacgggctctggcccatgggccatccgatgcacggcttctacaccatcggcatcgcaaacatcattgcacccgcgatgtcgcatatcgaattgagcgcgtggtatgccaaccgaagggcgtacgccgtgaccgctttggtgagcatcgcaggaatcgtctatctctggttgaacgtggtgggggcggacccggagggcttcatggggctgacccagcggctgttctcgtcgatcaactcgctgtggccgtttctggttgcgttgtacctgctgcgcaggcgatcaagcgcgctgaaggcggagccggtgctttga

SEQ ID NO: 508561 - DNA, 684 bp, Stenotrophomonas maltophilia
atgaaaggctcttgcagttccgactttctgctcacagtggcaacaagcttggactcacggctagtgaaaaatatctctccactgagtccgaggaggcgagcactacttggacagagcctagagtacctctgccaaatatcagtttgcgaaccgcattgcatggggggggatcatgtgattgagtctctcgccgggcgttgcttcaatctttcaatgggatccgttcgcctcatatccgactacctatacgatgagtcactcaacctgactcgaagcattgcagagatcactaacctcgcatttttattcaatgaatcgcctttgctgctcgagaagtggaaaactgctaaacggccggatcggctaagggaattctcacccgcttccgtaaggaagtcgctagatcagctaggcgttccttcccctgtgactgaggccagctacagagagctttgtgagaaggcaactcacgtaacgcctgatactagagcaaatcagcacgacaaaactgatgagagacttggctacgttggaggccatttccaactcggcggacacatggagtctctcgatacactattgctctactgcgctctctcggctgttgtgctgagtaacattgtcggacggccgcagaatgtagaagtgctcgctgagcttggcagcaacacctttgatgcctaa

SEQ ID NO: 508562 - DNA, 1329 bp, Stenotrophomonas maltophilia
atgagcgcgcggcaaccttcgttgcgccggcggctgctgctggtggccggcatcggcctggtgctggtctcggcactggccagcgtcctgctgggcgaactgttcaagcgcagcgcgcatgaccgcctcgaccacgaactgcagcaggacatgctgaccctgctcgcgcaggcggaagtggatccggaagggcagctgcgcctgcgccaggaaccgaacgacgcgcgcttccagcgggtgttttccggtgcgtactggcagatcgccgacagccagggcaaggtgctgctgcagtcacgctcgctgtgggaccagaccctggccgccagcgccgatggcccggtcgagcgcaacctgggcgggccgatgcagcaatcgctgcgtgcgcgcgtgcagcaggtgcgcctgccccgcgccacgcagacctatgtggccgtggtggccaacgaccgcagtgcgctggatgccgacatcgccgcattccgccagcgcagtgcgttggcactgggcatcctggttgcggcctggctggcggtgctggccagccaggtgcacttcggcctgcgcccgctgcgtgggctgggccagcagctggaacgcatccgccgtggcgaggccgaacgcatcgaccgcagccagctggaccgggaaatcgcgccgctggccgatgagctcgatgcgttgctggaccatcaccagcgcatggtcgcgcgcgcgcgcagcagcgccgaggacctggcacatgcactgaagacgccgctgagcgttctggccgctgaagcgcagggcgaaggccgcgactggcgccgcaccctgcacgaacagggcgcacgcatgcgcgccagcatcgaccgctatctggccgccggtctggccgtggaccatcgccagcgcagcgaggtggccccggctgccgaagcactgtgccggctgatgacccgcgtgcatgccggccgtcgcatccgcttccagatggacgttgcgccgggcctggcctttgccggtgccagcaccgacctggaggaaatgctcggcaacctgatggacaacgccggcaagtgggcgcgcagcgaagtccgcctgcgtgccctggcccagaacgaccggctgcatatcgaggtgcgcgatgacggccccgggctggacaagaccaagctggaaagtgtcctgcagcgcggcgtgcgcctggacgagcgggtggaaggcagtggattgggcctggcgatcgctgcggagatcgcggccagccacgatgggtcactgcgcctgtcgaatgaaaacccgggattgcgcgcgcggctggaactgccgctggcgccgactgactga

SEQ ID NO: 508563 - DNA, 786 bp, Stenotrophomonas maltophilia
atgaaacttgagcagatcagcctgcgcaccggcttcctgctggctctggccggctgggcggcggcggtctggctggccaccggctttggcctcggcagccagctgcccggcaccgacggtgatgccgacacggcgccctcgctgccagccctgccgccactggccgccgagcgcatggccagcgccgacagttacagcgccatcggcgaacgtccgctgttcgccgaagaccgcaagccgcgaccgtatctgctgggaggcagcgaaccggccgccagcgccgcgctgcgcctgaccggcgtgctgctgactggcgatttcggcatggccacgttcaccaccgaacagaaccgttcgctgcgtctgcgcctcaatggcgacgccgtggatggctggcagctggtggggctggcgccacgccaggccacggtgatcggccccggcggcagccaggtgctggaactggccgtgttcaacggccagggcggcgaaccaccgaccgtactgcgtggtgccaacggcgcgccgcccgcaggcgcgatcgtggtgccgcccccggcgggtgctccaccagcaccgtccacgtccgcagcagctccgcagccgcagcagcagccggctggcgccgtgcctccgcccgccgctgccccacctgccaacaccaacggccccagcgaagcgcagatgcaggccatccgcgaacgcatccaggcccgtcgtcgccagctgcagcaacaacagcagcaacaaccgtcgccgcccccgggcgatggcaccaaccgatag

SEQ ID NO: 508564 - DNA, 912 bp, Stenotrophomonas maltophilia
atgcaccgtcttcttttctacctgctggccttgggtatgcacctgccttcggtaactgcccgcgccaggacaccggaagacgtcgtttcccaccatcttcaggcaatacaggaacgcaacgacctcgcactgcggatgcttgtccagcagcgcatggccggccaaacgggtgcaaccgatgtgcccgtcgatgctccgccaatggcggtgttgctggcgacctggacgagaaacatcgagcgtcatgccgatccgatcgatggcgtggatttaccgcatcttgcctgggcgctgcaggttctggccaacacccggtgccagccgcaccgaagcgaggaatggtacagcctgaccggaggcatgcaggttgccgacgtgcactttacctgccgcgtgggcgatgtcgagcgtcttcggtatctgtccgaggccacggtcttcgatggcggtgagcaaagcgagcagcgcttctggggagcctacatcgcgacgttgcgcgacggccccttccacgagatcggtggcaccacgcgcgtggtatcgaccactcaggagcccgattggcacagcgaagaatcgaaacatccgaacgatgatttctcacacgcccgcgtcgaaactgacgtctatgaagccctgatcgaagcgctcatcgcgcatccgcggggcctgtatcgcaccggcacctatgacgcccttgcgcagatgaccggcatcatggagtgcgacgatcttgtgcagcggcatcgtcgctgcatggcgcgcattgcgccgcaggaactcaagggggtgagtgaactggccagtaccctgagcaagcaacgacagcagattcccgaggcggagctgctgcagcaatgcgtggccttccgcccaagaatgcaggcactttggacccctgagtgccggtag

SEQ ID NO: 508565 - DNA, 762 bp, Stenotrophomonas maltophilia
atgacgatcatgtacagatgcaagatccactgcactatccctgagagaatcgttgatgcctctaccgtctatcgcgatctggagccgctacttcaagcgctactggaggtgagtgcgctgttcaatggctgggtggagcactcgcgcgggaagggcccgatcccattcaccgacagaacaaggttcatcgagatgcttgcgttcaacgcacggcaggacggtgatgagtaccccacagctccctctgctgcgggcgcaggcgcaaacctgaccacagcgaggacgcataaggaatggaaggcgacaggatgcacctcgatcaattactggccttggtttggccaattgacgatggaaatcgatgcaccgatcgaagcattcggtgaatccgaggcgtccgtcatcgtccgcaggtgcattgccgcgatagctcaaacagtcgacgtcgagttcgtctcaacggatgcggttggaccgaagcctgaaggcaagggctaccagacctactacctcaaccacaggctgttccctcaccgccgttggctgggctggatgggcttcgtccctgtgctggtgccgcacaggttcattccggaggcggccaagatggaagtggtgaaaggcagaggtacgatcatcgtggccgtggacgaaccgttcgacctgcacaatcccgaccacatcaagcgcgcgcatcaggtggaactgcgcatggccaatgcggggctgctggatgtcaccgacacgtcgctgcttgagtga

SEQ ID NO: 508566 - DNA, 723 bp, Stenotrophomonas maltophilia
gtgacgattccgggtggccgggaccctacacaggatgttcccgggcacgcgcctggcggaatcccgggagacacggccggtggccctacgcttggccagatctggcgcggcatcaaggaagccgcaggcgtcggcgccgattccaaggttgaaccgcgcgtggaagccagcgaaacagactgcgcgcagaccagtaaccagaacgactgcaatgcctgcaagctggcgcggggcttcctggtgcccgccaactacacgattccgttcaaacagtaccgcaacttcgactaccagctgcgcattgccaatcacctggcgggcccggaagtgttcgcctacacctatggcggcaccggactggaccgcgctcgcctgagactgacggccggcaagggcaaaaacgagatcaccgttaccgagtggaaccacggcggcatccgctttgatggcttctggcggagccgatgcacggtggtggaagcgaaggggcactacaagcagtttttctccgcaattggaaatctccacccttgggctgcacttggcggcaggcgtccgtcgatcctagacagctgggcgaagcagttcaaagcacacctgtgccacgttgcagcgctgggcagacccgcaaagctcgaatggcacttccttgaagtcgagtgcttcatggcagcccagcaaattcttgccagccactccattcatctcaggcatacgccatga

SEQ ID NO: 508567 - DNA, 348 bp, Stenotrophomonas maltophilia
atgctgacattgagcactgagcagtacgcgatgctccgtctgcccgacgcggctacattctgcagcccgctcgctgacgagacacgtagcggatttcccggcgaaaccgcgcatctgaacgatgcagcgctcctgcaggcagtgcgtacaagctaccgccatgcagtgacctcactgcacatcacccatctgcccacgatagtgcgctgggtgaaggccgacgtggcctgggcacctggactgcgcgatcacgcgctgaccgtggcgtggttccggcggaccacccacgccaacgcaacggccgccgatctgctggcactgctcgcctcgtgctttctgtccgactga

SEQ ID NO: 508568 - DNA, 507 bp, Stenotrophomonas maltophilia
atgatcggccactacgcctatgcgctgctggactgtgcgccggatgaagatcgcgaagcagcgctgcatcaccatgcgacgcacagcgcactgatgcatcgctcactgttcgcaggacaacccgaaggaaacctcctgcacgcgtcaccgtatctgctcgaactgccgcggggtgccattgaacagcccatgcatcattggttgcggcagctcggccaccagcctgcgggaaccacctgtctgttctcggacgtaccgttcgaggaggtgttcctccatctgcatgcacagctcgacatcgcccttcccgatggatcactcgcgctgatgcgctactacgatccacgcgcatggctgcgctaccgcgacgtactgacaatgcaacaactgcggcagctcttcgggccgatcaacttgtggcagatcaccgtgggcggtcagacatgggggctgacccgcagcgaactggagcagcaggaggtagacgatgctgacattgagcactga

SEQ ID NO: 508569 - DNA, 1116 bp, Stenotrophomonas maltophilia
atgtgcagttgcacgcggcgtagcgccgggcgatgccggtgcacctccacctgggtaggtgtcgaccttggtcgacacattcgcgccaaccaaggttggcacccaccagagcaataccgatgcacccctgcttcggtaggtgtcgaccttggtcgacacattcgtgccaaccaaggttggcagctaccagagcaatgccgatgcgcccccgctttggtaggtgtcgaccttggtcgacgcgttcgtgccaaccaaggttggcagctaccagagcaatgccgatgcgcccccgctttggtaggtgtcgaccttggtcgacgcgttcgtgccaaccaaggttggcagctaccagagcaatgccgatgcgcccccgctttggtaggtgtcgaccttggtcgacgcgttcgtgccaaccaaggttggcagctaccagagcaatgccgatgcgcccccgctttggtaggtgtcgaccttggtcgacacactcgtgccaaccaaggttggcacccaccagagcagtaccgatgcgcccctgcttcggtaggtgtcgaccttggtcgacacactcgtgccaaccaaggttggcacccaccagggcagtaccgctgcgcccctgcttcggtaggtgtcgaccttggtcgacacactcgtgccaaccaaggttggcacccaccagggcagtaccgctgcgcccctgcttcggtaggtgtcgaccttggtcgacacactcgtgccaaccaaggttggcacccaccagggcagtaccgctgcgcccctgcttcggtaggtgtcgaccttggtcgacacactcgtgccaaccaaggttggcacccaccagggcagtaccgctgcgcccctgcttcggtaggtgtcgaccttggtcgacacactcgtgccaaccaaggttggcacccaccagggcagtaccgctgcgcccctgcttcggtaggtgtcgaccttggtcgacacactcgtgccaaccaaggttggcacccaccagggcagtaccgctgcgcccctgcttcggtaggtgtcgaccttggtcgacacactcgtgccaaccaaggttggcacccaccagggcagtaccgctgcggctacgcgaagtgctggtaa

SEQ ID NO: 508570 - DNA, 411 bp, Stenotrophomonas maltophilia
atgactgccacacactacccgtacctgttcgccactctcggcgaggctgccaacgatctgcccgaagccatcgcccgcgcactggaaaccacactcagcgctgcgcacggcagcggtgcgccctccagcaccgcactgttggcatgcctgcagcgcatccgccaggtcgaggccgccgacggccagccctggccagagaaggaccgtacatcgggacaccgcatggccatggcgcgtgccaaccgcgccaatgccgggctgaccgtgctgctggaactgctgcacgcgacagaacgcgtgcgcgtggactgcgctgatgaccagcaggtgggtgacgacgtgcgcgagggattgctgctggcctgtcgtggcctggccgagtatgtggatgtgcagttgcacgcggcgtag

SEQ ID NO: 508571 - DNA, 636 bp, Stenotrophomonas maltophilia
atggatatctgggcaaggatgattccggtgttgctggttggcgtgttgccttgcgccacggcgctggcggccaagcccgctgctgacatggcgtgcgcgccattggcggccctgcccgggctgcgcgatgccggggtgaccgcgctgtcgatgcagcccagcgacggtcgttgcatggtcgaggtgacggcggccaatggcaaggcgttgcttcggcagcagcagatgctggaggtgctcatgcaacacgcctgcgcggcgcccgcggaggtgaccatcgacgacgcgcagctatccctgcaattgcgcctgccgaagcactgcgcggcgcgcagcagccgggatctgttcgcgggcggcggtgtttcgtgggcaccggcgcgcggcgtgtcgccgcgctatccaccggaggccatgcaacagggactttccgggcgcagcctgctcaaggcattgattgacgcgcaggggacgattgcagccgtgatcgtggagacgtccagtggccacgcgttgctggatgaggcagcggtggaagaactgcgccgctggcctttcatccgcaccgatgcggcgggctcggcaccggagctgaccatcgtgcgtgtacccatgcggtacgagtgggtggagtga

SEQ ID NO: 508572 - DNA, 462 bp, Stenotrophomonas maltophilia
atgaagcattcctggcgtatcagcaaatactggcagcggacgcctgaggggtacctatggtcaccgcccgaggagtggactgacttcagcgatgtcggcaagcgcgtgagcatcgaggattacctcgttgtcgaggatgcctatctggacgcgatcaggcgattctgtgtcggcattggtgtcgagtcccttcgcatccagtcgctttcttcgcacggcccgtgtcagtaccacgagggccagcaactcggcctgcacgagattgagcgggtggcgcgcggcgtgctgcgcaacgccttctggtgcaagctggtctgtcagaacgccgaagtgcacttcggctacgactactacatgtatgcggtgtcgtcggtggacgcctcggccgcattggcagacgccaacccgttattgaacatcgagcggttccgctctccctatctgcccgaacgggaagggtag

SEQ ID NO: 508573 - DNA, 339 bp, Stenotrophomonas maltophilia
atgttgagtgcattgattgctgttgcccttgccgcaggctcaccgcaacccacagggagccaatccacatctgcgtcgtatgcggactgcctgctgggtcatatccagccggggttgtccgatcacgcggtgcagctggtgcaacaggcctgtgcctcgaagtatccggagagcttcgtcgcatcgatggaactggagcgcaggatgagtgcacagcgccgggccgatttcgaggcggaacgcgtcgcgatcgagcgctctgcgaatgccgcagcaacggctgcacaggaggctgctgacgcagcagccgcaacggcaaagggagcgcggacgaagtag

SEQ ID NO: 508574 - DNA, 186 bp, Stenotrophomonas maltophilia
atgagttctatggcattggatgtcgcaggctttgaagctgggatgctgcagagggccgaagacgcaacgtcgattggcaccgcatttgaagtggtgaggaatggtgcggtagcactgttctgctcggactgttgcggcagcaacggcaatgactgcgtgccggaaatcgacccgggcatcaactga

SEQ ID NO: 508575 - DNA, 675 bp, Stenotrophomonas maltophilia
atggatggattcaacgcaccggaggagttcgagcggagcctccatgcctatgcaggcagtgaccacgctggcaccaacgcgcttgcgctggtcctgccatccacgcgtgcagtcttgaccagaagcagacagctcgcagatgcagggcgcctacgcgttgtgtgtaacgagaacagccctgggttgagcgcaagcggcatggttcggctggcgcagtccggccagcgaccagcactcgtcattttctcggaccagcttgtctcagcacacgaagcaaccctgctgattcggacctcgcgcgaggacatctacgtctcgccgctcgaaatgatcctcaatcagcgctacggctatgcactgtcgttctggggcatacagggctattccacgatcgaggcccattcggccgacagcagcgcgatcctgcacgggatcatcgaccatcttcaccagtgcagcagcctgggggatcaatggttgctgcgcgaacaacagtcactgcgcaggccggcgatcaggacatacaacgcgcgcagaaagatcaggatgttccgatccgcactgctggcacagtaccaacccgacagtatcgatgccgaactcgacgccttgatggaagcgatcgatacgcttgaaggcgatgtcgttgatcgacagggaaggcttgcatgctga

SEQ ID NO: 508576 - DNA, 1014 bp, Stenotrophomonas maltophilia
atgctgattccgcaattgttgactcaacttgcccgtcccttgcgccgccttgatcggcggattgcctggatcgagtcgatcatcaagacccctctgaccgacgacgacgagcactacctgcgtgttgcctgcgccgaatcgggaaacacgagatttggcgaatactactactggtacctgcagaagctgttcgttgccaacgttctgcggcgtgggaaccggaccgagttcctgtccctgctcagtcgcgccgaccgaacggactacagcgcattcgatgaactggcacgtacgccacgcgggcttctgatcgcagtgccgcaccatgcccactacattctgtcgatcatcatgctggcggagcgtttacggcacgagcggaaaaccttcctgttctatggaaacccggaaacccatccaggcaacgaaatcttcgacaggctcaacggctggttctggaacgaggacaacggtgttggtttcgtccatgacacccgcaaaggcctggcaacagccatccgtgaactgagggcaggcgcagccgtcttcatcctgccggacgttttcaaggacgagaacgccacgtaccccatcagcttctgcaagcgctcgatgagcatcatgctcggcaccgccgcattgtcccgcagaaccgatgcgctgatcgtcccgatgatctccacccccgtcgcgtcgggcctgggcttcaggagcgttttcgcaccgccgtgcgctgagccggcacctgcagcacagggccagtccgaacgcaggctgcttgcagacgactaccgcgtcatgcgcgggctcttcgccttctatgaacaccacatgcagcaccagctgatctactggcagaacgtacggcaacacatcgcccagaacggccctcatcttgaggtgccgaggtccgatgtggcgcgcgtggccgggctgctggcccgcgaccccgacatgctcgcccctaccgcagtaattgacctgagaagagacgcaacggcacccacatgctga

SEQ ID NO: 508577 - DNA, 1017 bp, Stenotrophomonas maltophilia
atgctgaaacagaaatcacgtcttgtgctcctcattgcattggcgctttccgcggcgggcatcaactgcgccgccgcagcagatgccaccgagcccccattgcgcacccttgataccgtcgtggtgtccggggttgcgccgggtcccggactctggagagtctcgcgtggcgagcacacactctggatcctgggcacgctcaagccggtgccatcctcgatcacatgggattcggcagcggtgcgagaggtgattgccgaggctcaggccgtgctgtgggagccatccttcaccgtagacgtcgacaccggctggctcggcaagctgtcgcttggctacagctacatgaaggcacagaacaatcctggcaatgcgcaactcaaagacatcctggcaccggatgtatacgcgcgctggcagaatctgcgcgacacgtacctcgctggccgcagcaacctcgaaggcaagcgcccgcttgccgcggcggacgagctgatgtcggcggtgatggcccagcgtggcctgagcagcaagggggtggtcgctcccgtcatcgtcgccgaagtgaaggcgcgcggcatcggactgcacacacctcgatatacgctcaagctctcgcgccagaacgccgcgcagatgctcaaggcagtcaggtcaacgtcgatcgacgacagcgcctgcctggtggcaaccatggatcttgtcgaatccggcatggatcgcctggtaaccaacgcaaatgcatggtctacgggcgagaccgcccggatcgacgtatccctgacctcgaaacgggatgaactatgcacggactcgctcagcaacgcgcccgcagcccgtgcttttggcatgcccgacatccgcacggtcgtaagggagaaatggcttgcggccgcagacaaggcactgcagaccaacacgacgacgctcgcggtgcttcccatcgccgacctgtccggcaacgacggatacatcgatgcgctgcgccagcgcggatatgaggttgagtcaccttga

SEQ ID NO: 508578 - DNA, 1758 bp, Stenotrophomonas maltophilia
gtgaataaagccctcgagaaggccatgccggtggcacgtaccctccggctgctggcgagtctttcgcgcaaccacctgccactcctggcgggtgcactgaccagcatcgtggttgcaaccacgttcgcccttgccgttcccatcgccgcaaggggcaaccgcggcctggacctgaacagcctggagaagatcgacaacatcttcctgacacttgccttgatctcagtggcgattggcgtggccaccgcaatgcgggtctacttcatcaatcgcctcgctgacgaagtcaccaatgacctgcgggggcagctgttctcacgattgctcgtccagccgctggaattccatcagcagcagccatcaacggaactgctttcacgattgacctcggatatcgagcacctgcggatagccatcggggtcagcttctctgtggcaatacgcagcggaatcatgctggccggtgcggtcaccatgttgttcattaccgaccctggcctggcgctgctgacgatcgccgccatcccgtttgcatcggttcccatcgccgtgggctccaagcacctgcgggccagcgcgcgcgactacaatgatctgcttgcgcaatcgcgcgtcgttgcggcggaagcgctgggccatatcagggcggtgaaggatttcgcccgcgaacccttcgagacagagcgccatgcggcgacgctcgatgccagcgtcagcggagctcgtcggcgcacgacctggcagtctgtgctgacggcattgtcattgatcgtcatgctgctgggcatcaccgctgtgttatggacaggcacccacaaggtcatggaccggacgctctcggcgggccagctgggacagttcgccatgtatgccgtgatgtgcggcatggccgccgccgcgcttctggacacatggggcgcgctgcagcgctccgccggagcgactgatcgcatcaccgcatttggtgacctgccacaccatgaggcgcaggaaaccaggctggtgcaggctctgcagggatgcatccgattcgagaatgtcgatttctggtatgccgctgcgcccgacaggcccgtcctgcgacgcttgaacctggacattgcgaagggggaaaaggtcgccatcgtgggcgcatccggcgcgggcaagagtacgctgctgtcgctgcttctgcgcctgcatcccgtgcgggcgggcgccatcttcatcgacggccacgatatctccacgttccagcctgcaagcatccgcaacgctatcggcacgatctcgcaggcgccggcgattttcggccgatccgtgcttgagaacatccgatacggcaagctcgacgctaccgacgaggatgtcaggaacgcagcagtgtcttcaggcgcagatgccttcatcaatgaattgcccgctggctacgatgagcccttgggcgaacgcggagcccgattgtcaggcggccagcagcaacgggtagccattgcgcgcgcactgttgaagcgggccgatatcctgctgctcgacgagccgacatcggcgctcgattcacacgccgaacaggcggtacatgaccatgttttcggaacgggcacggggccgaccacgctcatcgtcgcacaccggttgcagaccattcttgccgccgatcgaatcgtactcatcgatgaaggtgcggtcgccgccaccgggtcgcacgaagaactgctgatccgcagcgctcgataccgcgacctgatcaggccgcagatgcaggccatggtcgaataa

SEQ ID NO: 508579 - DNA, 408 bp, Stenotrophomonas maltophilia
atgagcaaggggtttacactgattgagctgatggtggtggttgccatcatctcgattctgactgcattggcgattcctgcgtatcaggactacaccgtccgtgcccgtgtggccgaggccttggtcggggtcgggtcatacaagtcgctggttgccgagaacgttgcggcgcaagccaagctgacttcttcggcctgtgacaacatggcgggtatcggtggaaagacgaccaatgtcgaggcgattgagtgcgagggaaatggagtgctcaaggtcaccacgaccgaacgggcgggtgcgatcgagctactgttgactccaacgttgggaggcgattccgcaatcagttggagttgctcgatcagggccggtgagcaacagcgtgttcctgccgaatgccgaggctga

SEQ ID NO: 508580 - DNA, 450 bp, Stenotrophomonas maltophilia
atgaagaaccagaagggcttcacccttatcgaactgatgatcgttgtcgcgatcattgccatcctggccgccattgcgctgccggcttaccaggactacaccgtgcgcgcccgcgtctcggaaggcctgaccctcgcttcggccgccaagaccatcgtcgccgaaaacgccagcaacggcgctgccgacctgggccagggttatgcgttcgacgttgcgaaggctgacaccaagaatgtgaagacgatcgcggtcgccaagggcaccggcatcatcactgttggcatgcagaccaacgccaagggtgtgagcttcaccctgaccccgcagagcggtggtaaggacctcgaagcgggcactgtcccgggcgatgtgattacctggaagtgcgaagtcgccgatgcggcgaacaacaaatacgtgccgtctgaatgccgtaagggtgcgtga

SEQ ID NO: 508581 - DNA, 387 bp, Stenotrophomonas maltophilia
atgtccgcacgccccatgtttccccatctttccgccctgattggcgacgccgtcaaccggctgcccgccgaagcggccgagcggctcgaaaccctgctcgatgaccccgaagatctgctgcccaccctgctggcccgcatggatggccgcgacggttccgatggccagcggctggaggcagagggtctcagcccggcgcaggccgcagcccgggccgggctcgaccgtacgctggcgggtctggacgtgctggtccaggtactgcacgctgccgccgccgcgcgtgaacagggcggcgcccaccagcagctcagcccggatgtggtcgatggtctgctgctgggcgcccgagagctggtccgccacgcgcgtcaacaggtggggtag

SEQ ID NO: 508582 - DNA, 2163 bp, Stenotrophomonas maltophilia
atgagagtaagttcttcggcgccgttgggcgaggattcaataggtcttagtgtgcgtgagaaggctcgatgtgctggatcatcggttggcatgatttcaccatgtggcattgatatctttatcggctgcttcttcgacggcacgcgtaaccaccgtttggactcgttaaggcgcggcgacttcactcagtccaatgtttcacgtttattcgatgtatttgatcgagggattttgccgggcacaggagttcgccgcagccagttttctagctacattcagggcgtaggcactgaggcgctaaaggagattggcgacaccggcactggctggcacgctcgtgctggcgcggcagccggctggggcggcgagggacgcgtgaactggatgctgatgcaggtccaggaccatcttctgactcatttcgcagaatctacggtgacaaaggcgatgggcttcgactctgccgtccctgtcgcgcggaaaatgagcgccgatctccgcctgagccttcaggacgtggagcgtctggcgcaggcagcacgaatgccgctttccaactatctggctgtcaaccagggcgagaaagagctcgacctgcgcaactcgctcagcggcggcttctggaatatggtcggcgcgttgcagcgggtgcgtggcacccatctcgcgcgtgccgatcacacggcgcgccgtgcggtgttgcaggaacggcgcgcctttctggaaaagaaggtggctccattccagagacagaatccccgggtggaccgcatccgcatctcggtattcggcttctcgcgtggcgcgactgaggcgcgcgtgttctgcaactggctcggcgacgcctgtgaccccggtccggggccgctgcgcctgtgtggcattcccgtgcagatcgatttcgtgggcttgttcgatacggtcgcttcggtaggtgccgcacagagcttctttgagtcggtgttcgacggccacggtggttgggcgtcggcagaagacctgcgtatccccgccgatgtgcgccgctgcgtgcatatggtggccgcgcatgaagtacgcggctcgttcccggtggatctggtggacggcgcgaactgcgagcagatcatctaccccggggtgcattcggatgtgggcggcggctacacgcccggtgagcaggggcgttcgccgaaggacgccgacaagctttcacagattccgctgtgcgacatgtatcggcatgcgctggcggcaggcgtgccgctgttgcccatcgagaaggcacgagtggaattgcagagccagttcgagatttccccgaaactgcgccagcactacaacgcctatctgcaggcgatggcgccattcctgccggctgtgaatcccgcatccagagccaatcgcacggcggcgctgatgtatgcgcactaccgccagtatctgttgtggcggcgccagcatctggacgacttcgccgcgctgccgggtttccagcgcgcgtcggcgcaggaccgcgcggacctgcgtggtggcaacaccgagctggcccaggaggtatggggcatgcgctacaacaacgcaacgcggcgagtgcgcagcaccgttgtcacctcgcaccacggcatggctacgccgcccccgtacaacagcattccggcgtttgatttcgtgcaggcaaagctgcgtggccagaaggaacagcagtggctggatgggcatatcgagcagatctgggaatcgcagcaggcaccaccgcaggctgtggcaacgtttctggatggctatgtgcacgactcgcgggcttggttcaagccgttcgggttggacgatgacgagtggctgcatgtgcagcagcgggaacgcgattcctaccggcagcggatgcaggagttggatgcgatcgagctggcccaccggcaggagcgggagcgcatgcaacgggccgggcagctgttccagccacgggtgccgctggcgatgtcggtacaggaactggaggagctgacagcctggcgcgagcatccggagaactatgaggaagtactgcagctgactggtcgcgagtattactggcagtggggctatctgcgctggcgcacctgttatctcaatccacccggtgtggcgattgcggaggcgtcggcgcgcagggggcagggcgtaaagaatgctgccgcatag

SEQ ID NO: 508583 - DNA, 618 bp, Stenotrophomonas maltophilia
atgaagggcgttgagcgaatggcggtggtgaagaaggtttttgtcaggattgctctgatcgggctggcgttatgtgcctttgctggcctggtgctcaaattcatgaatttcagaattggcccaccaccgcccggtcctccgaagcaacgcattattgagcccgacactggtcatgacattactgatgctccaccggagatgtcattgacaattggcgtgtcaaactactcggatgacgggttggggacggtttacatcaacaacgcttgggcgggtggaatggagccacgagcgagtgggaatgctgcaacctgctgcgtgactctgcctcgtctctggcatcctggactgaaggtgacggtggcctaccgcactagcagcatgtttatcaaggatccccgtagctatgttgagcgggatgttcctgtggcacggtatcgaccttttcttgatggcttcatctatttcatgtacttcccgaacgatcaagttagggtggttgcaacaccctattttccaggctatccaaagtttgcctacgacattgatcacgcggagcttgagcgtgatcctgaaaggatttctcgatttctcattgagtcggatggagaggaatag

SEQ ID NO: 508584 - DNA, 765 bp, Stenotrophomonas maltophilia
gtgaactggatgctgctgaaggtccaggaccacctcttgacccatttcgcagagacaaccgtcaccaccgcgatgggcttcgattccactgcccctgtcgcgcggaaaatgagcgccgatctccgcctgagccttcaggacgtggagcgtctggcgcaggcagcacgaatgccgctgtccaactatctggctgtcaaccagggcgagaaagagctcgacctgcgcaactcgctcagcggcggcttctggaatatggtcggcgcgttgcagcgggtgcgtggcacccatctcgcgcgcgccgatcacacggcgcgccgtgcggtgttgcaggaacggcgcgcctttctggaaaagaaggtggctccattccagaagcagaatccccgggtggaccgcatccgcatttcggtgtttggcttctcgcgaggcgccaccgaggcgcgcgtattctgtaactggctcggcgacgcctgtgaccccggtcccggaccgctgcggctgtgtggcattccggtgcagatcgatttcatggggctgttcgatacggtggcgtcggtcggtgctgcgcacagcttctttgagttggtattcgatggtcacggcggctgcgcggaagccgaagacctgcgcaaccccgccgatgtgcgccgctgtgtccatatggtcgccgcacatgatgtgcgtgactcgttcccggtggacctggtggatggcgggaactgcgggcagatcatctaccacagccgtagccaagggggcatttga

SEQ ID NO: 508585 - DNA, 627 bp, Stenotrophomonas maltophilia
atgaacggtgtcgagcgaatggctctgctgaagaaggtgtttgtcaggactgctctgatcgggctggcgctgtttgccttgactggcttggtgctgaaggtcatggacttcaggattggtccaccaccgccagctcccccgaagccgcgcatcattgactacgcgtccggccacgacattaccgatgcgccgccagagatgcatctgatgattggtgtggcgaactactcggatgatgggttgggtagggtctacatcaacgatgcttgggcgggggggatggagccgcgatcgagtggtaatgctgccacctgctgtgtgacgttgccacgcctctggcatccggggttgaaggtgacggtggcctaccgtaccagcagcatgtttctcaaggatcctcaaagctatgttgagaaagacgtcctcgttgcgcgctataagccgtttcttgatgggttcatctatttcatgtacttcccggatgaccaggtgcgagtggtcgcgacgccgtattttcctggttatccgaaattccaatacgacatagagttcgctagccgtgagcgcgacgaagagagagtcacgcagttcctgttgcagactttgcccaatgaggtggacgaatga

SEQ ID NO: 508586 - DNA, 195 bp, Stenotrophomonas maltophilia
atggcgatgatgagatgccatgaacggagccgggtggcagccgaagacctgcgcattcccgccgatgtacgccgctgcgtgcacatggtggctgcgcatgaggtgcgtggctcgttcccggtggacttggtggatggcgcgaactgtgagcagaccatctaccccagaatgtcccgcattcgagggtgcgtttga

SEQ ID NO: 508587 - DNA, 816 bp, Stenotrophomonas maltophilia
atggctgacgtcccgtggatcgatccgtggcggcattcccggttgccgtggcagaaccccggcgatcggcgcgcggacgcgcggcccgcctgtgcgctgctggacatggcattcgcgccagatgcctggacgcagctgcgcgtgctgaccgcagaaatggagccgctgttcacgcatcgctatgccggcaatggattggaccggttgtcgccgtgcctggttgccctgccggacgaagccggagcacgcgaacggttttggcaggcgctgctggacctgagccgcggcgcgccgatgctgtcggtgctgcgcagcaccgctaacccgaacgcattggccgagcatctacggcggatctgggagggctgttccagcaccggccagccgtggttgttgcgctgggccgatgggcgcaccgcctcccgcctgctggatgcgttggacgaagcacagcggatacgcgtgctggctggtctgcacgactggcacctgcctacccgcatcggagattggatgtgcgtgaccggcaagggcgggacgcagttcgatgcggacgcaagaccactgacgttcactgcggctcaggaaaccgcattacggagcggaagccaggccgatgccatcacgcgcttcattctgcagcggcccgcgctgcggccggaggacatgccgccctcgcaggtgcatcgctgtgcggagcacgtgctgggacgtctggcacgccgaggcatcgaccatcctgcgctggcacatcggatgacgatcaaggccgttgcctgctggagcgcccgccatggcgatgatgagatgccatga

SEQ ID NO: 508588 - DNA, 2610 bp, Stenotrophomonas maltophilia
atggatcacccatcatcgtttgttgccgcctacgaggcgtcgtcgcgcgtccatcgattctgcggtcctaccgccctgcggttgatcgtggagcgctggcacggcagcgagtcgttgtccgaaggcctgcgctgccagattgatctgctgggcgaggcatgcgggcacagcctggatgactggctgacccgaccggcaagcatcaccacgcgccagccggacggcgccgaggttgtccgcgccgggctgatccgcagcgtcgagcgcctgggttacgcaggccgtctggtgcggtaccgcgttcacctggccgactggaccgcttggctgcatgacagtcgccacagccgcgtcttccaggatgaggatgtggccagcatcatccacacggtactttcggtgcatgcgcccctggcgcattggtcctggcacctcggaagtgcccatgcgctggagcgtcggtgccggggctaccgcgtgcagtatcgccaatcggacatggcattcctgcagcagttgatggccgatgaaggcctgggctggtgcatccgcacgctgcccgaggcaccgggcgggcacacgctgatgatcttcggcgacagcacgcgatgctcgctgctgtcaccgccgcggcgccttcaccagagccagcgcgtgctggatggcgggggcatcgcactgttgcatgaagcctggcgggtagtgccgacccacatgacccgcgtgacggacctggacgatccggtgcgggtggtttcggccagcctgcctgttcgcacagtggcccgtggccccttggaggactattcgccggcccgccacgcggcgtgggagacctcgcacgacgccttggccgaggtgatgcgcgacaccgaagcggcgctgtgtgagcagcggcgctggaccggtgaggggaccgagccggacttccagcccggctacgcgttcgaggtgctgccagaacccgggcagcgggcggtgcctgcgctgctgcttacggcggtgcaacacgcggcggtcaatcaactgcctgccgttgtcgaactgcagcagcacctgccgctgcacgcattgcccgataccgtacccgcagaccgcgcgctgaagctgggctatgccaatcgtttcgaggtcatgccgttcgaccgtcgatggcgacgttcgccggagggcagggcagagcggtcgatggcccccgggccacaactggccaccgtgctcggcggtgatgacggtgcaccgctgtacatggacagcaacgggcgcatccgcgtgcggttcggctttgccaccgacagcagggctgacagcggctggctgcgggttgcccagaccttcgccggccctggcgtgggcagtcagttcctgccccgcgtcggccaggaggtggtggtggatttcatcaacggcgacctctgccgccccatcgtgattggcgcgctctacaacggccgtggcgaggcgcgcgctgaagcgctcgcgcagtccagtgataccggcagcagcgcccagaacaaccttgccggtggcaacgccccgcgctggcatgccgtaggcgcgggcgaaccggcccagcgcaatgcaggcgccgtgtggggcatcagctcgcagagttgggacggcgatggcggcaacagtctggcgtttgatgacagcgacgaccagctgcaggtgcgactcgccacaacgcagtgccacagcgcactcagcatgggacatctgcgttaccggcagcacaacttccgcggcagcctgcgcggaagtgggttcgaactgcgcaccgacgcgtggggagccgtgcgtgccaccgcaggcctatggctggacagcacgcagcgtgccgcgtccgccccggccggcctgcgcgctgcgccggtggccctgctgcggcagaccgtcgtgctggcgcagacctttgacgaagctgcacggcagcagcgcatagtgcggctgcgtggccctgccatcgagggcgatggcgcgagcgtgctgcagaccctggccgacagcgtggcggcatcgcagcggctgcagggtactgacgaagacatccccgcaaccgggtctgcggtgctgggactgtcggcaccagcaggcatctgccaggtggccgggcaggcgatccagctggcggcagggcacagcacgctgctggccagcggcgccagttcgggcgcgatcgtaggcggccacgtgcgttggcagtgccgccaggccatcggcgtgctggctggcgcgacacgcaatcctgatagtgccgggttgagtgtggtggctggcgaacaggtgcttgatatgcaggcgcaggcagacgctgcgcacctgcaggcgcgggccgggctggtggcggccagtcgccaaggggaggtgcagctggccgcgggaggcaccctgcacattgcgacggggggcggcgcggcaattaccttgaaggacggcaacctgcacgtgagctgcccgggcacgctgaccttcaagaccggcgaacggcacttcactggcccagtgcaggagctgtttccgctgccgcagttcgcgcagacggtctgcgtggagtgcctgcagaaagccatgcaggcaggtctgccctggtctgcgaagaatggctga

SEQ ID NO: 508589 - DNA, 417 bp, Stenotrophomonas maltophilia
atgtcacaccgcactcgctacccgaatctgtatcaactggtcggcgaatcgatcagccagctgtccgccgatatcgcccagcgtgtcgaggacacgctgtcccggcccgatggcctgatgccgctcctgaaggtccagatggacgtcgaccgcatcaccggagaggctgcgcaacgcgccgggttgaaagcgtcggaggccggcacgctggtcggcatcaggcataccgtcgcaggtatcaccatcctgacccggataatgtacgccgtgcatatcgcgcgtacccgcggaggtccgttgcaggtcgtaccttcggatgcgatggaaggcctgctgctggctgcacgcgagctgacctgccacgcgcaacagcagttgcgggctgagaagatccggggcggagcaacgctgcagtag

SEQ ID NO: 508590 - DNA, 486 bp, Stenotrophomonas maltophilia
atgaaacgcgcactgctcatgacttgcctgctttcctgcgcggttcttcctcccattgcattggcggcgaaggacaagactgaggtgatccgaccgggccagcccctgctggccgaagtcgaacggatcgaaaccgatctaaatgatggcaagacctattcggagctcaaacccgatgatcgcagccgcgtgcgcgaggtgctgggccgcctgcgatccgcttcggaacgcttcccggacgcatcggccatgcctgaatcggcacgaactcaagtgttcaatgaccagcagatcgtgaacaccgttttgacacaggcgcgtgaagatagtcgtctaatatgcaggcgcgaacgaactgtgggttccaatcgccagcagacgagttgcatgaccgtggcggaacggaatcgcaagagagaagaaggcggcaacgagctgcagcgggtccaacgtctcggtacacgtatggatacaactgatttttaa

SEQ ID NO: 508591 - DNA, 1155 bp, Stenotrophomonas maltophilia
atggctttgaatccaagcacgcttcgccgttacacccaatggctgcccattctggtctgggttgtcatcggtgtggcgtggtggtcacctctgggagtgatcgccggcttggctgcgtgtcttgcgttggggggcgtgctgcagcgcttcgatctgatcggtgatgcagtaggcggtgaacggttgcgctcgcgaacaccagggcgctttgccaaccggccgcctgcccacgacgtgcagctggaatggggcgagctgggcatgggagggcccgtctacagcacccagatgctgcgtgatggtgccatcgtcgaagacatcgccattgcaggtggtcgtgatgccagctgcggatggaaggacgttccgggaagcgcactgcgctgggcctcctgctatgttgaccggtgcgaggccgtcatcgtctacgacgagcatcacaaggtggtgtatgtgctggcgatgcctggctggcagttctggcagcaactgaatgcgcagcggcaatccgaaggagacgctggcgccgtgtcgtggctgcgcagcctgcccagcagcgcgcgccagctgtatccctgtcgcggtctgtggctgcaccaggcgcacccggcgctgagcgctggagtgccgaaggcgttgcggcatgtcctgcctgatgcccgggtgctgcaggccatcccgctgcttcccgacgacctgcgcctgactgcgcatccgaccttgttcgcgcgcatctgcccgtacgcgctctgtcttgatggcgagcccagtgaccgtcacgcctgcgatctggagacggtcattgccagcccgtccggtcgatgcgtggtggtggcgggcagcgtgctcgatggggagctgcgtcccatcgagggcgtgtggctcgttcactggcaggggcgttggcaagccattggccgccgtgcgatgggcggcagcggcaaggcccggagtggggcctggatcgatgtgatcgaggccggcgatgacggcacgctccgatgcgaggcctacgaggaacgctgggagtttgatgacatcacgcgttgcccgacagtacacacgtcgctggcgcttcccgtggagtggcgggacactccgttggcactgcgtgctcgcaatggacgcttcaaccttcgcatcccttcgccctga

SEQ ID NO: 508592 - DNA, 516 bp, Stenotrophomonas maltophilia
atgaaactgcagatagcgattctcacgttcattgtctctgcatccgttcaggcaggagacggagctccagctgatggacaaatcgctgacgaagcaaagaccccatcaagaatcgtccgcagcgcggaatggcctgacttcattgggggaacgatcagtgtggagcagtctctcaatcgcaactcgaagggacagtatgtatatcgctacgacgatcaaacggaagcgacgaagcactatcacgaggcttcctgcgcggatatcgggatgaaccccgccaagggcgagtccatcacagtggggccaggaagcgccgcgtggcattgctcaagcatcgagtcgaacagtgctagcgacgcaaagagtactgactatgtaatcgcctatgcaccaaatggacaggtatcagctggccagaacttcatttcctacggaaccgtaagattcaacagctcagtcagcgggaacatccagggtagcgcgcaaatagacaacgggaggtgccataccctataa

SEQ ID NO: 508593 - DNA, 660 bp, Stenotrophomonas maltophilia
atggcctctactgcttcacgtttctgccgcatctgtgggcccgggcccatcctgctggtactgcagatactggtcgtgctggcggtggcgatggcggtcggcttcttccactacagggtggacctgttgctggaaccagtgggcgaggcctgtgggggcccggatccggtggcacgcatgcaggtggctgagcagttgatggcacgttccaatgcgctgcagggctggtacccgctgcatctgattccagtggtcggcgttgggctggcattgctgggggcgatggcgatctgcgcctatcgcctgcgtcgcgcgtcggggcgcctgcggcaggccagctgggggctgttggcattgcatggcctggccctggcgttgtccctcagggcgctgcacttgtacgagagtgcctggctgagcgtggcaacgctgtctccggcagcatgcctggtggatcttgccgcagacggcaggatgccactggcccaggcgcagcacgtagtgttcgacatcctcacccgcgagcacgcgccgctgctgcgcaatcccgatgatctggcgatggtgctggccgcgttgctgctggtggccatggtggcgggagtgatgctgtggcgggcgatcgtgcgtgagcgccgggcgggatcatcggccccatag

SEQ ID NO: 508594 - DNA, 681 bp, Stenotrophomonas maltophilia
atggtgacgatgtatctgctggtgcgaacgctgttcccgttgctgatcttcgtgctcgcctggatgctgctgtcgcgcctgatcaaggcccgcgtcgcccgccttccgcgcgtccccttgaatctgccggaacacagcagcagcccacgcaagaaagatcgacgcatctacgaacgcaagctgcggcgcaagccagggctgcgtactgcaaccctgcccgcaaccgccccgcgcagctggaacttcgccgcagcgatcattgctttgtgcgcattgattgctgctgccctcgtcgtacccgatggtgcacgcttccaggtgatggtcgagagcatctccggctatccgtccacgattgcggaagcacaggttcccgccaccgcgcaggccgccgtgctgcaggcgtggcagcctgtgctcgcacagctgtcgcggccggtggccatgcgctaccccatcgggcgaaccggcggcgagcacaccgcacgcgccacgctgcccgtgctggtgaggcaccaggctgatcggctgcagattgccacggccgtgccggtggatgccgagcggctgcgtgcggagctcgcgcgcctggcgggggttccgagggaggcaatcaccgttcgccagagccagatctcaccttggctggaatcgggctggacgcccctgaccgcacgatag

SEQ ID NO: 508595 - DNA, 444 bp, Stenotrophomonas maltophilia
atgcagcgggcggtgattgttgttggcgaccgcaccaccggcggcggtgaagtgctgaccggtgcgccaagcaccttcatcaacaacaccgccgtcgcccgcgtgggcgacaaggccagctgtccgaagcacggtggcttcttcgccatcgtcaccggcgaccacaccttcatgatcgatggccgcccgttggcccgtcatggcgactcgctggcctgcggctgccgactgctggcctcgcggcagagcacggtgacggtggaggcgggcagcggggctgcaccacaggcagcatccccttctgccagcaccgcgctatcaccggcggggttcgtgccctctggcatcaggacggctagtccattcaccgaactgcagccgagggtgggctcggctctacacgacgctgcgccgctcaatccgccggccgatggtcgtagctga

SEQ ID NO: 508596 - DNA, 1170 bp, Stenotrophomonas maltophilia
atgacgacaaagtttggacggatagctgccatcaaggcttcgcgaatgcccggaactcttcctgagctggacttccgtcggctgagagacaatcagaatcgcggaatcgaaaccacgctcctgcccgacacaaatgtcgtgatccatatgatcaacgcgacgcaagttgcggatatgaccaagcgggaagtatccataagggagctgaagcctttggcggcattcctcagagaatgttgcgagaggcagctccgctacaacctgagccccttcttcggcctgaacgagatgcgtcgcgctgaagccggtcctgcagttcaggccctggacgagttcagtcgaatgttcggcctacactggattgacaccgagaacagtattcctggagaccccactgcgttgggactgatcgggcgtggattcctgcaacttcccgacgatgttcaacacttcatctccatgccctatgcgggtctgctcttagcgcttatcgtggcccgcgatattcacgcttcaccagttacgaagttccgtcgattcttgcgcctttacaggcgcctcatcgatgtgacttcaatccgcgagatcaccattgcgcggttcatatttgcccccgagccccccgtggacagtcgccttcatggaatatggaagcccatcatcttgaacttcacgggccggaagaagctcaccgagaagctaccatcacgaagcgaccttctggatcgagtggctaccaacggcgcatttgacctgcagttgttgaacgccgcaaatctaagtgattacaccggcgtcgacggcattcctcaggattcgtgggtattgaccggtgacgcgaagctcgcggcactgacttctgccgttcatcacaccgattttggaactggcttggttggcttgggtgtagcgacagaagatttcagcgatcaaggagagtactggcgagaaacaaacctcgacatggagaagctcaacgtacattttcgattctcccttagagtctcgcctcaacgccaaaggaaacgtgccattgcgttgttggcaatggctgagcggggcattgcggggcagctgtcgcgtcccgatagttccctgcgtcggtgggaaccagcggccaccactctcgactccccgtgcgtcctcattgactcgatgttcaagccgtag

SEQ ID NO: 508597 - DNA, 222 bp, Stenotrophomonas maltophilia
gtgcgttgccgcgccgttcccgggcagcgatctgaatgccgaaacccatcatgcgatgaccacgtgctgcttagccaaccgacccaaagcagacatgtggccgagagcaccttcatcgtccagggcgaccgcaacgacccggggcagcgccgcgccggcatcgccaccgaagtggtggccaagaccgatgtggccgattcgctgcggctgaaagagcagtaa

SEQ ID NO: 508598 - DNA, 627 bp, Stenotrophomonas maltophilia
atggctcacgccatggcaaggtacgcgctgcccagcgtgttgaacgcgcgctgggtgccgccgacgtcgttgttgagcatctccttccagatctgcttcccatgcctcagtgttcgctggttcacacattcagcatgccgccgctacgggcccggtgcctctccacctggccctcaactcacctataccatcttccagccagaaccgcagtacccaacaaggctgagcacgcatggagcaggcaacacgctacacggtgaccgtttgtctggccgccccggctgccgccaggtaaaaccgccaagggcgtgcagtacgcacaggggcgccacgatgatgccgatgagcatctggacccgtactacagccgccccctgggaatcaccgagcagcattgtagctgcctgcgtgacttcgccgaggaaccggccgagttcgaattcgatgtggatcgcccggtcaccatcaaccgttgcagcgatttcgtctgggcagcgctgcactacgccggcctgcatccgctgccggcgccactggacggcggcagcaacctgggggagttcgcggtgctgttcaacctgccggagatccagtgcgttgccgcgccgttcccgggcagcgatctga

SEQ ID NO: 508599 - DNA, 228 bp, Stenotrophomonas maltophilia
ttgagcggcgtactgaaagtcgtgctctccatcgtgcttgaccggctgtacgtactgcgcaaccagctggtacatggcggggccacgtgggacagccatgccaatcgtgagcagttgcgagatggcgccgccatcctgggccgcctggtaccggcaatcctgcatctgatgatgagggacgacgcgcccgacctgggcgaagtcgcctacccgatgatccccatctga

SEQ ID NO: 508600 - DNA, 354 bp, Stenotrophomonas maltophilia
atgagagctgtgatctatggcgccgtcttgctggcggcgttgtctgcggcgaccgccagctgtcatgtaccaaagtttggcttggaactgcgggagtttcggaaggtgtccgacgctgagtttgctgtcatgcgtaaggagaccgttcgacttgtgcgcgagggcctggtgctgcacgcgcggtacgcgggagagaggtacttcgagatcagttgcgacggcaagcccgtgatgctggtggacaactctctggagcagcttgtgattgtgctgtatgcggatagggagattggtgttccgtgcgttgtgccgctgctgtcgcattggagttcgcggattgtgccggaactgtag

SEQ ID NO: 508601 - DNA, 1344 bp, Stenotrophomonas maltophilia
atggatagcattcttctggagcagaacccggagcagtggtcactcattgaggcgcttgttgcgcgaagcgaaaggctgttcctcaagaagctgtcccgtaacgatgcgtcgtgggcagacgaaggtggtggccaccagtcaggcttctacgttcctcgtgacgtgcgcgaatctgacttcttcccggaactccgcgcgagaaaagacctgcctcacatctatgaggctgtttgcccctcgttctggcctcagactggggaggtcagagaagcttccggtatcaagtactacagcaataagcgctcggagtgccacttcactcgaattccggctgaactcttctctgggctgagccccgcatcatggctgctcggcggagcgcttcgtgagcctgagggaggtgcgcatcactggttcgtcgtgatcgactccgcatccggggatgcagagttgctcgagagtcgcctgaacatccaatcggattttcactttggcttgttcagtccgtccgacctcaagcaggcgtcatccattgagtcgaaagaggccgaagagcttatccaggaaatcgatacagcacttcgaagtggctccatcgacgcccttgttgccaagtacgccaagcttcccagcccagaaaagcttgcaggtgaggctcggaataccttcctcacgacggtccgagcaaagacgttcgacccatggacgatcaagaaacctggagatgcgctcatgcgcgtcagcagggatatcgagttctcgatctaccgcaggcatgaacttcgcatgagagctgtcgagatcgccaaggttctggcagatcatgaccgtgttgcaacggccgcagtgcaaggcttcccgtcaatggattcaatctttctctctgcgagccaacagcggaagagtcgcgcaggaaagtctttcgagtcccaccttgctgcgatgctgaaggcgggaggcgttagattcgaagcccaggcaatccttggccaacgacgccccgactttgttctacccgaccaagcgacagtggctcttaacaccagccggggctatgaggaggcagcaatcctttccgcaaagacaacgctccgtgagcgctggaagcagattacccacgagcggttcaactgcgcgattttccttgcgacggtggacgatcgcgtgtccaaggaagcgctggaggatcttcggaaggcggaaatcacgctggtcgttccagagtcaatgaagatgaggaccaatgagtccttctattgccacgactcgaacgtcatctccttcagggagttcttcgacgaagaactggccaccaagcgtccagcgcttgttctcgcggggtga

SEQ ID NO: 508602 - DNA, 753 bp, Stenotrophomonas maltophilia
gtgattcaggtcagagcattaaacgatgagggagtcgaacgattccgcgcatggctggctgcgccagaaggcgaagctccatgtggtcttctcactgatgctgcattctgcagagatgtcgtaggtgaatggttgatcgatcccgcactgcgcttcgggaacagctacgagcttggtgcatatcttgctgggcacgtgtttgggccggatgtagaccgattggtgatcagaggcgatcgcggcttatgggcatggatatccttggcgctgctcccaaacctgctcaagcgtgggcgcggcaacgatggaaagccatttgaccttcctcactatgtggatgtggagccgcgactggcctatcgtctgatcgtgaggacggcttgggaacttgtgcatctccacgggacaagggcccgggtagcactaagcaatccacgcactgcatggggggacgttgctgagcagatagccggtcggcaggagatctacgctcatcctggcttctggacggtcgcggagcgtctgtatttgaatgctgacggtgcgcttaaagcgggcgttgccacgataaggaagcgtgagcaccgtcgggatccgaaaagtaggattggcttgggtgctgcccgccgtcttgtaaccagtttcgggcagttcgagcggacctatctgctccgggacatgaatgctgaagagattcttgccattctgcctgcggagtatggggcatggggtaacgagagcagggcgacatag

SEQ ID NO: 508603 - DNA, 783 bp, Stenotrophomonas maltophilia
atgaagcagatatcgcgtcgaactaatccgactgggctgaacgaagttgatcggaggcatttttcgctgcgactgagcgatgatggaaagtcagatagaaccttctggctcgagcggtttgatttcaaggaggcagggattcccgcggaagctcatatcaactgcgttgcaactgctggcacatcggagcagtactttcagcttggacaggtttcgaacttcaacagggccgcaagggcagtcaacgaacttgtccgtgacaagcctctgcgtttcaggttcgtgtttcacatgcctggtgagaagaagctcattggcttcgcggatggcgttcgagctatcgatgagtccgggaacctcggtggaagcttggtggacatctttccgacggatctcaacggcccggtctgggaacttgatcttcctgctgccagtgcggaggtatcagccaagccatgcatcttggttgagcggaccatatttccaacggcgacggtagctgtaaatcatcattggttcgtggcactcgtcatgcccgaggtgatgcgacgcgttgcgctgcggattgcggaagatccgggttcgctcgagaacgacgatacttggacgggaacgtggaaggcctacatcagccagctcggtgtagattctccgcctgacgatgaggatgatcgtgtggacgaatgggctgcttcagttgttcgcaagttcgccgcaacgggtcagctgcggcatcaaattgatcgtctgattagcgaaatgcagggggaggcagcggagtga

SEQ ID NO: 508604 - DNA, 1623 bp, Stenotrophomonas maltophilia
atggcccgcttcctgctgatcgaagactttggcacgacgggtctggaaggtgcctatgaggattcgtccgtagacggttcgagcgagaactggaacgccttctggttccgtgagggggagggtgccaagcatgcccgtgccaatggtggcgcaggacaggggaagatcacgctttacttggccagtgaggttcgcaccgttatagcgttgacgcgccgaaagtcggacgagcgcgaactgctcttcggctgcagtcggttcctcaggaactatcgcttggatggtaagaaggagcgttgggccaaggaggccagatggggacgccagaaggatcccaatgagcaggccgtgccgatcgttgatccgatgctcattgaggctgcaaaacgggaactgaagctcgaccgcggcgacgcgccgggtacgagcttcattgtccccttgccccaggataatcttactgaggaaggaatctgcagcgcggtcatcaacgagttcttcttcgcaatcagccgagggcgactcgaggttgccgtcggatctgtagtgcttgatcggacgaccatcgtagaggctgccgcctccctcggcggcgacagtcgtcaaagcactgctttcagggacttcctgcgcttggcagccggcaagaacgggcagcaggcgatagccaccgccaagcccggttggtacaagggctttgatgaggcctcttttgagccgcaggatctgatcaatctcaaagacacatttgagcttggcggtcccaccgttgtggacttccctctccccatcaagacgaagcggggagaagtccaagcgaccacgttccgggttttcctccagtctgatgaggcgcttgagcgcagcgaagaactgtttatccggcaggatctggcaattgatggcgagaagaagctgaagtcagtccgtgcagcacaacccgttttggcgctcacgttcattgatgacccgatgctgtccgagttcttggtttgtgctgaggaaccaactcataggacgtggaacgcccagcggccgaaggtcaagaacgcatacatgacgccgaacatcttcttggcggcagttcgaaatgcagccgcgaagctggtgcaactggttgcgccggcgggaaaacgtgatgagaccgccttggctgtctatttcgccgatccagctcagacggtcaaagtgaagaaagggcccagcggggactcagggaccaaggataagccgggcgacgcggaagtgttggagatcccaccacccaagccaaagccgatcagcttcaaacccagcaagagcggcttcaccgtgcgtgcccatgcggttccgggtgtcgagttcgcgccgctggactgccgtatcgagacaggatacgccacggtccatggtgatccgttccggctctgggatgccgctgactactggctcggagacagcggaaggttcacgttggactcgaacggagtgactggtgtgactgttgatgggaacgagatcagattccgtctaagtcgtgatgacgcgtccattgccgttcatggcttcgacgagaatcgacagttggaagtgcggttgaagtacaaggaggttgctgatgaagcagatatcgcgtcgaactaa

SEQ ID NO: 508605 - DNA, 1062 bp, Stenotrophomonas maltophilia
atgcttgatcgatctgttcaagatagactcgaaagtctatctgaaacatatgatattgaaggtcgagaggtgaagggcgcgaatggctgggtcttctatgcgacaaacaaagtcacaggagtaaaggtcgcaattaagttctatttctggggggacgtccctgatctgcactccgagcctcgatcgcttgcacaattcaactcgcccaatatagttccaattctttctgctgagataatcagggatggctgggcatgcttcattacgcctcgttttccagaagatcttgaaggggcaatcgcccgaggctcactgtccactcacgcagcgctggatgtgggtattaatgtcctatcagggctgggtgcccttcatgccacttctatcgttcaccgagacgtgaagccagcgaacatattgctgggcattgatggcattgccgcaatcggtgactttggctctgtggccacgatcaggtcgggatcggaggatgttccgtcttctcaacattccgtgctctatagaccgccagagtcatttgagaccggaaggttcggtccggttggcgacatctaccaagttggcataactctttatgaggcgttcggcgcggagctgccaaaggatccacaagcttggatgtctaagcgggaagtcattgcatatggacatttggattcaattttcgacagaagccagtttgaagatgacgtcatttcgcgtgcggtcctgggcgggcgactgatcaaacttgatcggtatccattttacgtttcgaagcccatgcgtagtttgattgcagcaatgacgtcaaaatatcccgagaaaagagtggggagcgcggccgacgcgatggcgctgctcgtcgaagcccgccgcaagtcaattgcatgggtggctgcggggacaggggcacttggcacgtttgaaggtggaactgtcagggttgcagaggacggtcgagtggacgtgaatcgtggtcgcggaatgcgccgcgaccgcacattggaaggggtgggggcgtcggatagtgtcgcgaaagtaaacaagaagtttgcgtag

SEQ ID NO: 508606 - DNA, 591 bp, Stenotrophomonas maltophilia
gtgcatgcggacccgggcggctgcggccgcccgggtttctgctgtattgacggcgcccgcggcgggctcgaccatccgcacatggcaacgctcaaaacccatttcgaggccatggcacgctacaacgcctgggccaaccagcgcctgtacgccgccgtggaggcgttgcccgaggaggactaccgcaggccgtgcggcgcgttcttcggctccgtcgaagggacgctcaaccacctgctggtgacggatcgcatctggctgcgccggttggccgggcagggcgataccggctatgcgctcgatacgctgctgttcaccgatttcaccgcgctgcgtcaggcgcggatcgaggaggatgccggcatcgtcgcgttcgtgctcgggctgtccgacgcagccttggcgacccgtgtcgcctatcgacgcgtgtccacgcccgaaccgcagctgcagcgggtggacgccgggctggcgcactggttcaaccaccagacccatcaccgcggccaggtacataccctgctgacccaactgaccggccaggccccggcactggacctgctcgtctatcagcgccagcacggcgactga

SEQ ID NO: 508607 - DNA, 939 bp, Stenotrophomonas maltophilia
atgaaagggatggtctacaccacgatggtgttgctggcgaccgtgagcggctcggctgccgcagcatcggccgcctgtgagaaggcattcaagacggtaggggatccgcgaaacggcgcgatgtacatggccgacatcaccgtgccggggctgaaggtgcagagcgcgctggaccagctgcggcagatcggtgcggaggatgaattcgaagtgggcgggcagctggtggaaggcaataccggcaaccagtacctgatccagaccaaggggctgcgtacgccgctggtgctgatcggcaccgccgaccacaccggccgggtcacccttgcgacgaagctggcgcgtggccagacgatcggccaggaagaggcgcggcagtcgatgtgcgccatgctggacaagctgaaggggggcagccagggcgaagcgcttgccgcggcggcgcgctcgaagcagcccatgcctgcgccggaagaggtggccgcgccggacctgtccaagaagatgggcaaggaagtgcgcagcacgatggcggcctacaatgccgccggcagcttcaaggacctgatgctgggaaccaccaccaacaaggaagacctgggcgatcgttcggccaccttcctgccgctgtacgcgaagtacatcggccgccgataccgcatcgacgggcaggtatatacggtcaatcggaacagctactccacccgcccgggtgaagtggggtcgatcaactacctggtgacgccggaacgcggcctgctgcggatccgccagaacgactccttcaacaacaacaactacaccatccgctgcgagttcgcgccggaccaggctgccaacttcagcatgctgcgcgagcgtgactgggcaaagctggaaggcgaggtgagctcgctcgagggcagctcgatgaccctgcgcaactgccgccaggtgtaa

SEQ ID NO: 508608 - DNA, 1128 bp, Stenotrophomonas maltophilia
atgattgcaaaggatcgcctgcagttcctcgattctcttcggggtttggctgccgtctacgttgtgttgtttcacgtccagtcgatgccggcgccgacgctgactgtcgctggttggttgttgcccgttctgcagctgggggccacgggtgtcgcactgtttttcgtgatcagcgcgttctcgctgtgttatacccagcctcgtcacagagccagcggtcggccgttgctgagtttctacctgcaccgcttcctgcgcatcgcaccgctgttctatctgctgctggcgttctcgatcttccgcgatggccgtggcagccatgccggccacccgtgggccgaaatcgttgcgaacgccacattcacattcaacctgttccccggctgggagcagggcattgtgtgggcaagctgggcggtcggagtggagatgttgttctatgcgatcttccctttgctgtacctgttggtggataacgggcgtcgggcctggacgctcctcttggtgctgctggggctggcggcgctggccggaaccggcgcgctgggtgcacgcgcggaggcctcgctgggcggctatggttggctgacgcacgcgcccgtgttcgcgatggggttggtggcgttccatgcgtacaacgcgctctcgcaattgtctccggcgcgggcgcggtggtgggggaaggcactgaacatggccggtgccctgttgctgttgctggtcgtggcggggatcgcagctggctggagcggggcaggaccatggcagctggccggcctgggctatctggcagtgctgttgggctgctcgcaatgcccgccgcgtctgctcgtcaaccgggcgacggcgtggctgggtacggtgagctactcgctctacctggggcatcccattgtgatcgccgtgctggggccggtgcttcgccggctgttggcggccgttggtgatgggacaaccggctatctgctgtgcgctgcgctggtactggcagtcgcaatgccgttggctgcgctgggccaccgctgcatcgaagcgccgatgatccggctgggcaaacgcgtgatggcatcgctgtccgtatcacgtgcagggccctctcccaggcaggcagagggcggcccacgctag

SEQ ID NO: 508609 - DNA, 978 bp, Stenotrophomonas maltophilia
atgcctgtccagatcgccgttgtgattccgtcctacaaggtcaccaaccacatccttggcgtcattgatggaatggggaatgacatccatcggatctacgtggtggacgattgttgcccgatgaacagtggcgacttcgttgaagcgaactgcaccgatccgcgtgttgtcgttctgcgccatggcgagaaccagggcgtaggtggtgcggtcatgacagggtatcgcgcggcgatcgaagacggcatcgacatcattgtcaaggtggacggtgacggccagatggacccggcgctgatcccaagcttcgtcagcccgatcatcgccggtgaagccgactacaccaagggcttcttcgatctcgagcgcattgcgcagatgccgaagctgcggttgttcggcaatgcagggctgtccttcctgaccaagctctcttccggctattgggacctgttcgatcccaccaatgggttcaccgccatccaccgtgatgtggcgcgccacctgccgatggggcggatcagcaagcgctatttcttcgagaccgacatgcttttccggctcagcacgctgcgcgcggtggtgctcgatgtgccgatgcacgccaagtatggcgatgaagtcagcaatctgaagatctcgcaggtgttgtcggagttcctgttcaagaacctgcgcaacttcggcaagcgcgttttctacaactattatctgcgtaatctgtcactggcgtcgttcgaactgccggccggcgtggcgctgttgctgttcggcatgatctatggcctgcagcattggctgaccagcatcggtaccgggcaggttgccagcagcggtacggtgatgctggccgcgatgccgatattgctgggtgtgcagctgttgcttgccttcttcggtcaggacattgcatcaaccccacgccatgctgtccatccacggcttcgctggtcggcgcttgaagtggggaaggcctga

SEQ ID NO: 508610 - DNA, 1794 bp, Stenotrophomonas maltophilia
atgcgcgtgtcagcccaggcagagcgtgcggcgcctctggtctggccgctgtacctgctcgccaccctgctggtcagcctggtcctgtctgcgatcacgccgccgttccaggcgcctgacgagtacgaccatgtcaagcgtgcctacatgatggggcaggggcagatcctgttgaagtcggtggatgggtccccttcgggaggctaccttgacagtggtctggtgcagtacatgtcgtacttcgaaccactgaagggggcgtcacagcgcaaagtctcggctgacgaactgcaggcggcaggcagcgtgaagtggagcgaccagccgcagttccagacggcagtggggaccgcttactacttcccgctgatgtacgcgccacaagccgtagggctgggcatgggcaaagcgcttggcatgagcgtgggcaaatcctatcggctggcccgcctgctggaatggatgacctgcggggttctgttgctgctggccttcaggctccatcggccttcggcggtgattctggcgttgctcgcattgccgatgaacctgtttctgtttggcgcggcggtgcttgatcccatggccacgaccgtggcactgcttggcctttcggctttcatgcggatcgccaccgatggccgcgcctcgccaccaacggcggtagctgcactccacataagtgtcctgctggtctgtgcctgtcgcgcgaacatgctgccgatgctgctgttgccccttgtcgcggcatggctgatgcgggagcgtcgacaggcgtacattgcgatcgccatcagtgtgttcgtgctggcgtggactctgttcacggtgaagacgacggtctatccccccagcagccatcggatcgatcatgccgctcgcctgttgcaccttctcacgcatcccggtgaactgacctccatactgttcgcgacctggaccaatgtggcgcggatgtccttctacgtcgtgtcgttcattggcgtgctgggctggctggacgcgtccttctcaccttccttctaccacatgaccgggctgacgctggtggcgttgatgctgctgtcgctcgacctggaagggtggcgaacccagagcttggcgcgctggacgctggtcgtggtctgcctggcgtcggtcttgatgaccttccttgccctgcttgtgcagtggaccgatcccgcttcaacgaccgttgacggcgtccagggacgctatctgctgattccgggtctatgcctggtgatggcgctgacggccaacgcagtaccccgcgatggcctgctgttccgggccgggcacgggctggcaatgctgttcctggcctggatggcgtacgcgagctgttcgctcctggtcgagcgctaccataccggcgcgacgcagtccgcaatcgccgcgcctgagttgaagccctcgccaccgttgacatctgacaacaccgtgccgctgcacttcctgcccgcacagagcgaggatcctgctggcctgaagcgtatctcggtccggtttggtacctatatgaccacgcacgctgggcaggccgaactgcggctgtggacccagggaggagagcggcttgtgctgcccttcgagctgtcagagctcaccgacaatggctacgccgagttcaagctggatggcaaagcctatgtgggcggggaagtcgcgccgcgcgatggcagcggcgtaagtgtgtgggaaagccacagccaggagcgcgtggacagttgcgtattcctggaaacagaaaaccaggacgacctactcccgcgcggttgccctgagccctga

SEQ ID NO: 508611 - DNA, 3204 bp, Stenotrophomonas maltophilia
atggagaaccttcgaccacagcaggtgatcgatgcggctggagaaggctcgtccctgtttgcagcgctggtcgatctggccgcttcgcaagggctgccggtgcacccgttggaagcaccggacgcattgggcagcaccaagctcaacgcattggtgatgctggcgccggaccagatcagcgatggctggcagctcatggactggatgcggcgcctcgacacccatggcgggatcctgctgctgggccctccgccgcgtgagagcgcgatcaccggccacgcccttgcagacggccagcactggctgttcgtggccgatccggaatggagcatcggggcgacaccaccaggatccagcgatcagccaccgatcgaagagctcgcctccctggaaacggcacaagccgtgctgctggagcaacgccagcacatggagcaactgcgcagccaggtcgtactgcaggaaagcagcctcgccgaggtagaacagaatctgctgcgtgcagaacgtcgcgtggcgtcgctgcgccgcgcactggaaacatccgggaccacttcccaagcgacgcttgatcatctgcaccgagcccagaatcaggtcggagagctgctgaattcgcgctcctggcgcgtgaccgccccgctgcgcatggcacacgttgccgtctggcgcgtgcgttcactgctcaagcagcttctgcatttgtccacagccacgattcgcgtcgcccgccagaacggcatccgcgaggccggacgccggatcaccagccagctgcggcagcccgctgcattgttccgccagggcttaggtgccggaagctggaaactgaggccggtccatacgcttcccccggcaaggcccgcgagcagttcgcagcagctgcgcgttctgctggtggcggaaatgggcatcggacaatgcctgaagtatcgtgtgctgcagaagcagctgatgatcgaaagccttggctacgactgcaccgtcgtcaactggactgacgtcgtctctacccgcgatctgctctccacacacagcgttgccgtgttctaccgcgtacccggctatccggaccaactggagaccatcgccctcgctcgtgcggctggcgtgcgtacgttctgggaagtcgacgatctcatctttgacatcgagcactaccggaacaacagcaacgtcaacgacctcaacccagccttgcgcaaggccatcctcgagggcgtaccgctgttccgggaggcgctgctggcttgcgatgcctgcatcgcatcgaccaccgccatggccgacgccatgcgggcaaccggcgcctcggaggtctgggtcgtcgaaaatgcgctggacgtggagacactgcgcgcggcagaggagatcgccgccgcaccgccgcgcggtgatggattgctgcgcatcgtctatggctccggttccaaggcccacgattccgatttccgtatcgccgctccagcgttgctccgcattctgaagaagcgctatgacgttcgccttaccatcatcggtcatctcaaccttcccgaagcgttcaacgaggtcgatgctcaggtagagcgcctgccgccctccgactatccgacctacatgcgcaggctcgccaggtgccagatcaacatcgcaccgctggagcgcacggtcttcaatgacgcgaagtccaacatcaagtacctggaagcagcgatcctgggtattcccagcgtctgctcctccagtaccgagtaccagcaaaccatccagcacggcaccaccggccttctggccagcaccgaacaggactgggaagaacagctgctggcattgattgagagccccgggcttcgtcgccagatcggcgagaactcgcgctgccacgtagaagatgactacacccctgaagccgtagccaagcacaggctgctgccatggctggagtcgttggaaccgtccgtcgagcgccggccacgtattctgggcgtcaatattttcttcgaaccacgcagcttcggcggcgcgacgattgtagccgagcagatggcacgtatcatcaatgccgatggccgagcggaatacgcgacattcaccactctgccagccacagatgtacatgcctacaaggtgacccgctacgaatcgagcgcgggcgaagtgttcgccatgggcctgccacatgagcacgatcaggcactgcacttcgacaatccatatcccacgcatgggttccgggaaattcttcgcgcctggcgaccggacgtggttcatatccattccatccagggcatcggcatccagatcgcggaagtctgccaggccgaaggtgtcccgttcgtggtcacgctgcacgatgcgtggtggatctgtgcgcgccagttcatggtcaacgacaagggccgctactgctaccagcgcaagatcgaccttgatgtgtgctcgcgctgcgtaccgcagcccgcaatgaacccctatcgccagtaccgcctgcacgaagtgctgaccggcgcagctttgatgctgtcacccagcaagttcttcgcgggtgtctacgccgacaacgggtttgatcccgagcggctgcgggtcaacaagaacggcatcgtcaaacctgcctcggccattcaccgagagccacccagcacccgtccgctgcggttcggtttcgtcggcggcgagggcccgatcaagggaagcgccctgatcaagaaggctttcgcaggcctgccgcataccaattacgaactgcatgtcgtcgacaacgagctcaacctcgggcgtcgttcgatcttcgaatccaactggaaggttccaggcaccttcaaggcagtccccgcttacagccaggagaccatcgattcgttcttcggcagcatcgatgtgctgctgttcccgacccagtggaaggagagcttcggcctgtcggtccgcgaggcattgatccgcgatgtctgggtgatcgccaccgacgcaggcggtgtcgtcgaagatatcgtcgacggcgaaaatggcgacatcgtcccgctggatgatgatggcagcgcactacaggccgccatcaagcgccttctggatgcgccgggccagcttgacggttaccgtaatccgcacgccgcaatggtgcgcctgttcgatgagcaggctacggaactgaccgactacatgctggaagtgatcgagcgccagccggtgaactggcgcgacccggacgaactgatctga

SEQ ID NO: 508612 - DNA, 756 bp, Stenotrophomonas maltophilia
atggctttcattgaactggaacacgtcagcctcgatcttccgatctacgaggtacacggccgctcgctcaagcgtcaggtgatgcgcctgggacgctccaatgccgttgccgacagcaacgacggcgtcatcatcgtccgcgccctgcaggacgtcagtgttcgcttggaaactggtgaccgcgtcggtctgatcggccacaacggcgccggcaaatcgaccctcctgcgcgtcctcgccggcatctatgcccccaccggaggcatcatccgacgcgatggcaaagtggttccgctgctggacatcagcctcggcatggatgacaactccaccggctggcagaacattcgattgcgcggcctgctgctgggtatgaccaagaacgagatcatcgaaaagcaggagggaatcgctgaattcagtgaactcggcgattatctggacctgcccatccggacttactccagtggcatgcgcgtacgcttggcatttgccatttccacggcagttgatgcgcagatcctgctcctggacgaggtgatgggcgtgggcgatgccggcttcatgcacaaggccaagcagcgcctggcggatcttcacggccgttcggacatcgtcgtgctggccatgcactccaacgaagagatccgccgtgtctgcaacaaggtgatctggatggacaacggttcaatccggatgtacggcgacaccgagtcggtcgtgtccgcctatgagcagttcgtcaacggacattga

SEQ ID NO: 508613 - DNA, 780 bp, Stenotrophomonas maltophilia
atgaatgaagcactctccgacctgggacgcagcctgcgctcctggcgcctgtggacattgctgggctggctggaaatccgccagcgctacgcccgctcccgtgtcggtccgttctggctgacgatcagcatgggcgtgatcatcgcatccatcggcatggtctacggcaccctgttcgggcagaagctcagcgagtatctgccttacctggcgaccagcctggtcatgtgggggatgttcaccagcaccgtccaggaaggcagcaatgcattcatttccaatgccgcctacatccgccaggtctcaacgcccaagttcatctacatcctgcaagtgccttggcgcaacttgctgatcctgtgccacaacatcgtaatcgtggtagcgctgctcgccatcttcggcgtaaagcgctgggacaccctgccgctggtcattcctggtctggtcctggtcttgctcaatgcgacctggatggcgaccctgtccggattgctgtcagcacgattccgtgacttcccgcagatcgtcgcagcggtcatgcaggtggccttctacatcacgcccatcatgtacaagccggaagcgctgaccaagtactcgttcatcgtcaacctcaatcctcttgcctatctgctcaacgtcgtgcgccagcctgtactgggtgagcttccgtccgtgcggacctggggagtggccattgccatggccgttgtcggctggatcgtcgccctggtgatggtccaccgttatcacaagcgcatcgcgtactgggtgtaa

SEQ ID NO: 508614 - DNA, 1164 bp, Stenotrophomonas maltophilia
atggcaaagaccccgaactcgctcggcctcggcacccgtgccatccatgcaggacagcagcccgacccgagcaccggcgccatcatgacgccgatctacgccacttcgacctacgtccaggaaagccccggcaagcacaagggctatgagtattcccgtacccagaacccgacgcgcaacgcctacgaggcctgcgttgccagtcttgaaggtggttcggccggtttcgcgttcgcctccgggcttgcggcggcgtctacgacactggaactgctggacagcggcgaccacgtcattgcgatggacgacttgtacggcggcacctaccgcctgttcgagcgcgtccgccagcgttcggcggggctggaattcacctatgtcgacctgaacgacctcgatgcggtacgtgccgcgatgcggcccaatactcgcatgatctgggcagaaacccccaccaaccccatgctcaaggttgtggacctggccaagctgggcgccttcgcccgcaagcagggcctgctgctggtcgtggataacactttctgctcgccgatggtgcagcgcccgttggagcatggcgccgatctggtcctgcattccgcaaccaagtacctcaacggccattcggacatcgtgggtggcatcgtggtggccggcagtgatgccctggccgaacagatggccttcctgcagaactcgatcggagccgtggccggcccctttgattccttcctcgccctgcgtggcctgaagacgctgcacttgcgcatgcgtgcccacaatgaaagcgcgttggaactggcccgctggctcgaacgcgacagccgtatcgaagctgtgatctatcctggcctgaagagccacccgcagcacgccctggccaaacgccagatggatggtttcggcgggatcatctcggtgcgcgtgaagggcggcaagaccaaggcccgccgcatgctggaacgttgcgaactgttcgcactggccgaatcgctgggtggggtggaaagccttatcgagctgccggcggtgatgacccacgcatcgattccgccggcccagcgcaagcgactgggcatcaccgacaacctgatacgtctgtcggtgggcacggaagatctggccgatctccgccacgaactggacgccgccctgggacgttga

SEQ ID NO: 508615 - DNA, 387 bp, Stenotrophomonas maltophilia
atgatgccgcgcctgttccgtttcctgctttccggtggctccgccgccgccgtcgaatatgcgatcttcctgctgctgcagacccaactgggcgcgaactggctgcttctgaaccaatcggtcagtttcacaggtggctttatcgtgagcttcatgctcaaccgccactgggtgttccgtagtgagggcgcctggggcggggagctggcccggtacgggctcctggctgcgatcaatctggttctgggcaatgttgcgatcagtctgctggcaggtcctctcggcgttccgcccctgctggcgaaactgatcgtgatggtcatggtggcatcctggaactacgtcattttctcccgactggtcttccggcagcgcccgacggcctga

SEQ ID NO: 508616 - DNA, 897 bp, Stenotrophomonas maltophilia
atgggattcgatcaatgccctgcctgcgaggggaagctcaaggctgggctgcagccttggcatctgcaatgcagccggtgcagttacgagggaagctcgcttcgcgtggatatcgacgtgcagggggatcgcgaggtgctggacgaggtgcttcgcgaagaggggctgagtgaccttcggcaacgcaacttcgccgtgctggccgaggatctggcagcgcggtttccgcagcgggcggagaggcgcccgcggctgttggatgtcggttgtgcccatggttggttcctgcaggccaccgagggccatttcgaggtcgtgggcatcgagcccgatgcccgcgtagccgattcggccagcgcgcgcggcttgcccgtccgccgggggttcttcccggacgtgctgcaggcgggtgagaaatttgacgtgatcgtcttcaatgacgtcatggagcacatccccgacatcctttctgcgatgcgggcctgcacggccgttcttcgccccgggggcgtggtggtgatcaatgcaccggcacgcacgggcgtgctctaccgggttgcgcgggtgatggcccggatgggggcacctgccagcttcgagcggttgtggcagaaggggttcccgtcgccacacgtgcattacctggacgacggcagcatgcgcgcgattggtacccgcaccggtttgagcctgcagcacgcccgtacgctgccttcgctgagcgtgaagggtctgtacgcgcgcatccgctatgaccggtcggtgtcggctgccaaggccatggcgctcacggctgcgttgagcgtgcttgcgccggtgatgcggctgctgcctgctgacatcaaggtctggatgctgcaggccgagtccggccctgctggcgggatggccggctag

SEQ ID NO: 508617 - DNA, 870 bp, Stenotrophomonas maltophilia
atggtctgcgcggcgctgctggtgctggtcacgggattgacatggaaggggctgcaggcaggcacgcattccgtgccggaagcttccgacagccagagtgagcctggcagagcgccaccttcgcagtctccgcacccggcggcgcggctgaaccgggccgatgcagactatcagaccgcagtctggttgcttccgcgggcgcaggaactggccagtcgttccgacgcaggtgatgccgaggcgagctatgagctcagcctcatctatggggaatgcgtctcgttcttcgatccaacccaggacgaacccacgggcatgccgcccgatcgcaggccggcgttgtatcgcagtggtgcctggctgtcccagcgctgcgacggcatcgatcgacaggacgcgggtgaagcgtcgttccgctaccgtcgacgggccgccgagcaggggcactttgccgcgcagatcatcgagcgctactttggcggcatgctgcagggcgcatcgaggccttccacggatgaacaggtgtcgatcatcgagaaggcgcttgtccgcaacgatggccaggcctatctcgccttgtcggaaggcctgtcctacgacccgggtggcgtgcatgaggcgctggcgccctatccggccggtaccgatgtggatgctgctgcgtggatgcttgctgcctgcgatgccggtgtgccgtgtggcgcggattcggtgctgctgcacgagctgtgtggcactgcaagcctgtgcggcgaggattcggtcgaggccgcactcggattgaaactgtctccggaggagctcgtcgtggcgcggcagcaggccgatgcgctggccatccggtcacgtgacctgcgcgggcgccgctga

SEQ ID NO: 508618 - DNA, 834 bp, Stenotrophomonas maltophilia
atgtactggggctccgtcatgctgcgatcgcttccccgctggctgccactgctgtcgctgatgatgttggccggttgcgccagcacaccccacagcgcgcgcggccacttcgaaggccgcgccgtgaaggtggacggagagaccgcctactatcaggtcttcattccggccggagtgcggacgggaggccccgcacactccggcaacagcacgggcatcccggtgatcctgttcctgcacggctcgggcgaacgcggccgggacggcgtcaagcagacgtattcgggactggggccgtatctgcgcgagcacgccgacttcccggccctggtcgtcttcccgcaggcagcgaagcactcggaatggagcggccgcaacaaccgcatggccgtggctgcgctggacgcgaccatcgccgaattcggcgccgatccggcgcgccagtacctgaccggcatgtcgatgggcggctacggcagctggaacattgcgctggatgacccgcaccgctttgccgcgatcgtgccggtatgcggtgccgtgttcgcaccgcgcgcgaagcggccgaccctgttcgttgaacaggtggcccaggaatccgatccctatgccgcgatcgccaggcgactgcagcacacccccatctggatcttccacggcgcgcaggatgacgtggttccgccggatgacgaccgcaggctgcacagcgcattccagggcacccacgcacgcgacgtgcgctacaccgagtacccggaaggcaatcacaatgcctgggacgccacctacgccgacccggcgatgtgggcgtggctgttcgcgcagaagcgctga

SEQ ID NO: 508619 - DNA, 378 bp, Stenotrophomonas maltophilia
gtgacgcccggggccctgaagctgggcatcggactgctggtccttgccggcagccacgcaagctgcgcctggctgggatggaccttgcgcgaccgcagcgcggaccttgccgttgccaccacccgggcaacgcagctggcggcccgcaccgaagcagcccagcgcgcgcaccagcaggccctcgccaacagcgccgcaggcgcgcagtccgaatcgcagcgcctggccacacaggcagagcgcacccggcagttcaacaccctgcaacaggacatcgagacccatgccaagacacctggccacgatcgcggcgacgctgatgctgagttcgtgcgcatctggcgcgaagccaacgccggccgcgccctgccgcgttga

SEQ ID NO: 508620 - DNA, 294 bp, Stenotrophomonas maltophilia
atgctgagttcgtgcgcatctggcgcgaagccaacgccggccgcgccctgccgcgttgatctcagcatcgcgcccgcgcagctgcgtgccccgcttgaactgccggacctgcaggcggccagtgacgatgcgctgctgcgcaatcacgttgcagtcgcgcagcagtaccacgctctggccgaccagctgcgcgccctgctgtgcagccttggcagccaacgcggcatcaccatcaacggcatcgcgccggtagtgcctgctggctgcgacaacagtaccaaccacgcgcactga

SEQ ID NO: 508621 - DNA, 423 bp, Stenotrophomonas maltophilia
atggggagcaggatcttccggacgttgggcattgccttggtcctgtggggcgtgctggcgcccggcagaggctcggcagccgaccccatgcgaaccgcgctgcccatcgtgacgttacagatgaaggccgagcagatgctggacagcattcacagtatgccgccgccggagggtgctcagaagcaggacatcagtggctttgtgaaacagcagctgccgccccggatgggcctgttgaacgtcaagtcagccttcgaagatgttcccaccgcgcggatatcccgaccggctgaaggtgtgctggttgtgcgcgacgaaagaagacgctggctgtggtcccgtacccatgtcgtggtgatgacctatcgcttcacctacatgcctgagcaagccaaagtgcacgcagtccgatacacggagtag

SEQ ID NO: 508622 - DNA, 408 bp, Stenotrophomonas maltophilia
atgaccaaacgagccgcatcgtttccacgcctgtacgcattgattgccgacatcgccattcaggttcccgacgacatcgcacgcgagatcgagtgcgcattggacgagcagaacctgcccgtgcagtcacccgcgtttttcgcgtgcctcaatgccatcagcaacgtcgatggcgaggacgggcagccgtgcagcagcctcacccttgccgccagcaatcacgcgtcgctgcgtcgctcgatggcagggctcaccgcagtgctcgatctgctgcaggccgccgaacgcacgcgcaacgaggccggcccggatgaacagctgggcgccttccacaccgacgggttgatcgtggccgcgcgacagctggtgcgcgaagccaaccattgcctggaaggtggaaccgcctga

SEQ ID NO: 508623 - DNA, 1320 bp, Stenotrophomonas maltophilia
atgttccacggaatcaatcagcaggcattgccggccttccaatcgttgcccggcaccatggcatacgcagagatacagcgacgccttgaggccttccggatcgccttgaacgcacctcggatgcgcttttccgcgcatccgttgttgtttgatcgcaacgactacgagcaactggtagacggcttgcagctggttgcatccggcctgcagcgcgtggtcgacgaagcattgcgtcggcatgcgcgtagtgaccttatgcagctgatgggggtcgacgctgcatgggcacccttggtggactgggagcagcttcgcagcggccaacatcgcgtgatgcgtgccgatctgttgccttgcgcagatggcatgcggatatgcgagctcaatttctccgcagcggtgggtggcttcgaattgttcgaacactatcgagcgttcgccgacgtgcttggctgggacgcagagggtagtcaggcggtaccggtaaacaatcttgccagcatgtacgcgcgaagcatcgtgcgtgagggctaccttagcctccatctgctcgactggagcacgcattcggcaatgggttatcccagtggcgatctcagccggcagtggttgcggcgttctctgcctggactggacatttcggtgcatgatgaacgtagctggcgcgatgcgcggcgctcgggcatggatatgagcaggacactggtccatcgtcgctttacctatgacgacgtgctttctgatcacgatgtgtacctggacatcctcgacagcggtgcgaggttctccaatggccttgaagccgaactgctgatgagcaaggcatggctggcattgctgtgggatgagggctaccggcaggtactgacgccgatggaatgggaggcagtacagcgctgggtggtgcccacgcatttcgtcactgtcgacgatgtagccgcattgaacgaatccgacagcaacatcgtgttcaagaaaaagtacggctacggcgggcaggatgtcgttccctccggtagcgccgccgctgccctgttggcgcgccggttgagcacatctggagctggcgactgggtccagcagccgatgctcgatgttccggaactggtccatctggacgatcgcgaccttggcttggcgcctcaccgtacagtggtgggcgtgtacctgcatgagggcgcggccagcggttgcgtcgtgcgctcagcggttggcaatcgggttgtcaatgccagcagtggcgccagcatcggctgggcaccggtactgaaccccgatgagcgcggcgcattcctggagaaattttctgccctggcttga

SEQ ID NO: 508624 - DNA, 639 bp, Stenotrophomonas maltophilia
atgagtatggtattggaagcctctcgactttcccgctatgcggatgagttgaaaacgaccggcagtacgttgatcccgatgggcgttgtgtttgatgcttcgacattgaaggagcttgaaaggctccagtcattgctgcctgaagaagccgtgacgcagggcgacgcgggcgacacgcatgacatctacgtgcgtcgcatcatggttgatcggcaaggcgaggttccgcaggtggtcaatcgcccgcacgcagaccagatcctggacattctcaaccgggaggagtgccggaacgcgattgcagaactgttccagtcacaggatgccttccatatccgtcgggcacagatgaaccgcatgacggcgggttccttcatcggcctgcatctggatgctgccagcaatccggactatgactactcgatgatcatccagttggggcacgatttcgcaggcggtgatttcgtcgtccacgatgatgccggtgcgcgccatgcctatgcggcgacctacggcacggtgctgcttacgacctgcaagttgcggcacgaggtcgcacgggtgacggccggcgagcgcaatgcgctggtctatttctattcgcggcacgatggcgccaatcgtcgccacgacgcctga

SEQ ID NO: 508625 - DNA, 540 bp, Stenotrophomonas maltophilia
atggaacgtcgaatagttacggaacgcctcattctgcagccccactgccgggatgacctcgatgaatgcaccagcatgtggtcagacccggcggtcctgcgcatgatccgcgaccaccctttcagccggcacgagacctggcttcgcatactgcgatatgcaggccactgggcaatgcttggatatggctactggaccatccgtcatcgcaacgatggaagattctacggagagctcggcttcgcgcttaccctgcgtgacctgcctggagaggccgccggcctgcctgagttcggctgcacgttgtcacgtcgtggctggggacgcggcatcgcccaggaggccactgccggcgtgctggaatggatggatcgcgttgctcggatcgaagccacttcagcgattaccgatctccgcaaccgatcggcgctggcgttggccaacgccgtcggctacagcatcgtcgaggaaatggattttgaaggcaatccattcgcagtgctcacacgcacctccagcctctcgacgctcacttcatga

SEQ ID NO: 508626 - DNA, 1290 bp, Stenotrophomonas maltophilia
atggagacactggaccatatccctgatgtgggacttgagcgcgagatcgccatgttgtttctatccggcgagaaggaccgcgcgctgctccgcctgcaggatgaccagcttgcgcaaacccatcccagactggcattccagctggctctgcttctgatcgaaatcggcgactggaaacgagcgaagcaacagcttgatcgggtaatcagccttgagccgcgctttctgccagcactgcgacgtcgcgcagcgctgctggcccgtgatgacgatctcaccgcagcagaggaagacttccagcgcatcgtgaagatcgcgccagatgaaacgtcggctgtcgccaacatcggtgttgttctgttgcggcgcggcaaccacgcggctgcattgccttggctgcaacgggctgcaactcagtcgcctgctgacactcgcatccagcacagcctggccaacgccctcagcggagccggtcagcatgccctggcactggatctgttccaacggcttgcgcagatttctcccggtaacatcgatctggccgcagaccaggccacggcgctgctgcgcggcggtgatgcggcgtcggcccacgcacgttttctgacccttctttcagaacatcccgacgatcagcgctgctgggccgggcgctatctgtccgcatgcgccctgaagctaccggaagcccgcatgttgatggactacccgctcctgctgcggcggatcaggactgatctggacaccgatgcgttgatcaacgcagtgctgcagttgccgtcattgcgctgggagcctgcgggcaaaaccactcttggcggccttcaaagcgcgatgctcgacctgacaccgccaagtccattccacgggttcggccagcaggtgagcaacgcactccacgatcatctgctgcagttgcacggcagcctgttcgacgcccccaccgacgcctggcgactgagcctgccctcacgatggacgctgcaggcctgggcaacggtgctgcatggcgatggaggacaccaggatccacacctgcatcctgccggacgcatcagcggggtgctttacctcgatgccggcaactctgcagagggagacggcgatctcgtgtttggccacgcccccagggacatcgacacagcaggcgaaccgcatgctcatcgtcatgtggcccgcagcggcgaaatgctgatttttccctcctggttcctccatcacacaacgccttaccacggaacgcggccgcgcatcagtctggcattcgacctgctgccagcgtctccgtga

SEQ ID NO: 508627 - DNA, 1773 bp, Stenotrophomonas maltophilia
atgatgcaactcggccacgcagaagaggccacagtactgttccagcagatccatcccgcatccatcgcctggcaaccggcacgcgcccctcttgcgatctgtctgcgcgacagccatcgtgcagaagaggcgcttgaacccgcacgccaggcgatcacgacggcagagccacaagcgtggcaatggatgctgcttggtgacctgcagcaacgcacaggccaacaaatggctgctgtcggcagcctccaacgcgcgctcgcgctggatcccacccttcttgaggcccatcacctgctgggtctcgccctgcaggaagcgggcaggtacgaggaggcgatcaccagttatgaagttgtagccgcccaacttcccatggagctcatcaacatcgctcagtgccttcagcacctcggccgatgggaatccgcacgtgacgcactggcgcagcttcacacgctgcagccagcacgtgtggacgtaatgtgctggctcgcgcatgtccatgcacagctgtgcgaattcgatgcgatggaccggatcgttgcgcggctcatcgcacagttgcgtgtggccgcgcccacagccgacgacataccgcaaccattcaccttcgcgacgctgccattgagcaacgacctgcaccggcagctgctggatcatgcggccgaatcgatccaggccggccggcaaccgttggtacgggcggctacccgtcggggcggccgtccaagaatcggctacctttccaatgacctgcgccaccacaccgtgggcaccctgttgcacggattcttcgcagcccatgatcgaagccgcttcgaagtgcatgtgtacgattccggccgccagccggcgtccatcaacgacgcagaacacatcgagcacgttggcgcgctgagcgacgctgaactggcgaggcgcctgcacgaagcggatctggatattctcatagatctcaatggcccaacgtacggaagtcggtccggagccctggcgtatcgaccggcgcgcatgcaactgggatggctgggctacctctccggacaacaatcgccgtggcttgatggcgtcatcctcgaccacagcctggcaccggcggacaccccgtggccattctccgaccgggtacttcgcctggctggcagcgtatttcccgcagcagagtcccgctctccgcctgggcgagaccgtgcgcgctggaagctaccccacgcatcaccggtagcagccagcttcaacagcagccacaaactgagcaggtcgctgctgcaatgctggacgcaaatcctgcgcgaggtacccgatgcgctcttgctggtctgcttggcaccacaggcacaccgcggttttctgcagtcgtgggaccttctcgggggtgaacgcgaccgacttcgcctgctatcacccatgccggccgagcaatacctggagtgtatggcatcatgcgatctgttccttgatgcattcaactaccaggccggtgcgaccgcgattgatgcagcattggcagggttgccactgctgacctgccccggggagctaccgcttgcacggctggggagcagtgtgaacaggcaactgggaatgcctgacctgatctgcaacggacggcatgattatgtgaagcgcgccgtgacgctgctccgcaacccggctgtgctcgcagaactccgccagcgggtcaccgtccgaaacaaagacagcgcgttgcattcggcagcacgagcggctaccgatcttcaagcgctttatcaaggcctgctgggggagtga

SEQ ID NO: 508628 - DNA, 975 bp, Stenotrophomonas maltophilia
atgagcgcagatccccactccctctcgcaggcagcgcactggacccagctctggcgcaccggcgtgcttcattcgtgcagtcacggcatcgaaggaaactacgatggcgagctgcgtctcttctgggagcgcaacgccgcggttctaccacaaggcgcacgggtgcttgacgtgggcaccggcaacggcgccatcgccctcttgatccatcggttccgccccgatcttcaagtggtgggcaccgacctggccgatgtcgaccctcgctcgaatgtcgccaatggcacggagattttctccgaaatcaccttcctgcctcgtacgccgatgcacgccattccactggcagacggtagcgtggaccttctggcatctcagtatgcattcgaatatgcagcgcaggacccagcacttcaggagttttcccggctgatcgggccgggagggcgaatcgcgtggatcctgcacagcacgaacagcgaaatcgcgcgcatctcagcgcgccaagcccaggccatcaccgatgtacttcggaacgatggcatcttcgatcgggctgaacaggtgatcaaggaactgtacttggccagggcccgcggcccctcctccctttcggggaacgaagctgcggagcgatcccgcctagccttcaacgaggcagcaggcgcacttgtcgagcgtaccctggcggagcgggatctgccggtcctgggcaggagcgtgggcattctgcaagacgcgttgggccccgccgcgcaggatccatcgaccgcgctgcggcgccttcagagtggtcgtgccgtgcttgcagaggaagccgcccgcctgcaggagctcatgcgggcgacccgaagcgaggacgagatgaagtgtctggcggaagcattgcatgcccatggcatgcattcaggatttgaacctctgatgtatcgcggggtgaacatgggctgggccctggaggcagtgcgtgaatga

SEQ ID NO: 508629 - DNA, 2652 bp, Stenotrophomonas maltophilia
atgaacagcaagacctgcaagctgcgcgatgcagttgtcctcgcgttgatcgcaagtgccggtacggcggctaccgccagtgcccaggaagggaagtcggggcaggcgggtacgacccagctcgaccgtatcgaagtaaccggttcgcgcatcaagcgcacggatgttgaaggccccagcccggtcagcgtgatttcccgccaggacatcgaaacttccggcgaaatctcggtcgcggacttcctccgcaacaacatctacaactcgttcggttccacccgtgagtcgtcgggctcggcaaccggttccgcagccaccatcagcctgcgcggcctcggctctgagtacacgctggtcctgctggacggccgtcgcatgacgtcttcgccgaccctcggtggcggtgcgcagaacatcaacctgattccgacggccgccgtcgagcgcattgaaatcctgcgcgaaggcgcaggtgcagtgtacggttcggatgccatcggcggcgtggtcaacgtgatcctgcgtaaggattatgaaggcctgggcttcagcgtcggctatgaaaatcctgaaatcggcccggccggtcgcaccggcagcctgtccggtggcatcagctccgaccgtggcaacctgacgttcgtgatcgaccatcaggaacgcgagttgatgtacaaccgtgacatcaagaaatacgtcactgatgcagggctgacctggggcctcagcccgtacaactcgagcgcgaccttctccggcgcccgcaccggcagcgccagcgtcgccaactgcgacaccttcgagaacagcgtccgcatcagcccgacccgctgcggcttcgaccacggcgcgacctcggccaacgaagcctcgatgtcgcgtgactcgctgctgctgaacggcaactaccagctgaccgacaacacctcgttcttcttccgtgcaattgcgtcggataccaagagcgttggcgtttatgcgtcggccccggtcgacaacgccggcggcggccgtccgctgaccatcgcagccaacaatccattcaatccgtttggcgaggacggcgtcctgtcctaccggttcaccccgctgggtacccgtgatgccgtccgtcgcgatacctatcgcgatttcaacttcggcctgcgcggtacgctggacctgttcggcggcgccgactgggaagtcggtgttggccatggccgtgtccgccagagctcggtgaactacaactacggcatcggcagcatcctgcaggacatggttgattcgggcgagtacaacccgttcgatcccacccatccgagcgtggccgctgcggctccgaagatcgcacacaccgtgtacgtggaatcggaacagcgcacggtctcggccgacggcaacatctccttcgacctgttccagatgccggccggcgccgtcagcttcgtgaccggcttcgagtaccgcgatgaccgcctgtccatggcctacgacgcacagagcgccgcaggcaacgtgttcggctcggcaggtgcaggtacgggtggtgagcgctcctactacgcaggctacttcgaaaccctgatcccgctgttcagcagcctgaccgccactgtggcgggccgctatgacagctacaacgatctgggcagcaagttctcgccgcgcgtatcgctggagttccgtccgatcgactcgctgctggttcgtggctcttggggtaagggcttccgtgctccgaccctggatgacatgtacggctccaactccacgaccaacctgaacagcccggtcctgagtgccatcggccacaacggcggcgacgaactggcatgcaaggccttgtccgccgtccgcgcttcgaccggcaataccggttaccagccgtacccggttgatccctgcagcaccagcagccagtaccagtggctggtttcctcgaaccgcaatctgaagccggaggaatcgaagaactggaatgtcggcttcgtgttcagcccgaccgaagcactgtcgatggcagtcgactactacgatgtgcagatcgacaacgtgatcacttcggtgccgcgtccgctggcatggcgctacggcgacgcaggccagcccggctatggcgttgatcgtggtccggacatcactgcaccgaatggcgcagtactgccgggcatcccgttccagatcaagctgccgatcgacaacggtgcttcgaagaaggtccgtggtatcgacgccgagttgaacttccgccagagcctgggcacctacggggacctgatggcaaggctgaactgggcccaccagatcgaattcaccgaaacctcgatcatcaatgacaaggttgaactgctgggcaccggcggctatccgaaggatcgcgcgcagttcaccctgggctggagctacggcgacgtcagcattgcggcgatcaccaactacatcggcaagagcggttcggaagacacgcgcctgccgagctggatcaccaatgatctgcagttgacctggaatgcgccgtggaagggcaaggtgactctgggcgtccgcaatgtcggcaacaagctgccgccgttcaacgatgcactgaactccttcccgtattacgacaacagcctgtacaacatctggggccgtaccccgtacatgcgttacgaacagaacttctga

SEQ ID NO: 508630 - DNA, 636 bp, Stenotrophomonas maltophilia
atgaatccagaaacgctgctcaacgctttccagaatgcacacaacgaatacttccatctactgatgaagcactacccgtctggcagacagcaggaccaagacgacgatttcgcggctccccggctctacgagctcgcaattgaggttcatgcgtgctcgattgcattgggcccaacgcccttgaaacgattgtgcgcgctggggctggagcagctctatccattcgacaatcccgtggatatctacacgtggcgagtcgaggtaaggcaaaagaacattccgcacaccctgttcgcgtcgattgccattcggatcgattccgaacttgccagaatgcgtcgactactcgcactgacgccagatgcgccgattgacgagcttctgcccgaccggcagttcctgcgtcgcagcggtgaacccttcttccccgaatccaagactgaagtcgccgatacaacacttgcatcaatagacaatccggcctcggcgtcggtgatgtacgtcggcagtattcatgtgaactcagcaccagagcatcaagccgtgagcaagctagaacgcctggagaaaaccacggccatcggctcacactcatcgaccatcatcaatgcgatccggctgttcttcggcacctag

SEQ ID NO: 508631 - DNA, 762 bp, Stenotrophomonas maltophilia
gtgatcgatatcgtgctgggcgtgctgatcggcgcctccgtattgtttggtttcatccgtggcttcgtgggcacggtggttgcgctggtgtcgtggctgctggccggctggatggccttcaccttcggcaacgaggcctcgcactggtgggcggcaccgcagccacccggcaccggccattacctggccgggtacctcggtgtcttcgttctgaccgtcgtggtggttgggttggtcgggctgctgctgaaggccgcgatcaagctgaccctgctgggcggcgtcgaccgcctgctgggcggcaccctgggcctggtgcgcggtttgttcttcgccagcatcctgttgttgctggccggattcactgcgttgccgggcgaaccggcctggcagcagtcgcagctgcggccgctgctgcagcctgcggtggcgtggatgcaggcccagctgccgcatctggacaacgtgctgccgcagtcgctgcccttggaggccctgctgccagagcgcctgcccttgcctctggacgagatcaccccatcttcgcagcaagtgttgggcaagccggcggcgacaggcgataatggcgtcctcaaccaggtagtggcgggcggcggatggccgcggtccgtggagatggagcaggagcccgcacgggcctccacactgcccagcaacatcgagccggcgcccgtgcgcccggcacggcccgcgccagccgcggacggaatccacggccaggtacggccaccttccctgtaa

SEQ ID NO: 508632 - DNA, 390 bp, Stenotrophomonas maltophilia
gtgagcggagccggccggcccgtcgatacggcgctggccgccgagctggaaacgctggagcgcgcgctgcatgcatcaccggtgcgtgtcgaccgtgagcgtcttgctgcattgctggatgaggatttcagcgagatcggaagttccggccagtgctatggccgtgatgcggcgttgcaggagatcccgctggagcgcgcgcaggtgctgatcgagtccgatcagtacgcggtatggctgttggccgagggtctggcccaggtgcgctaccgcagccgccatcacctcgatggccatgcgcaacgctgggtgctgcgcagctcgctgtggcgccgtcacggggacgaatggcgtatggtgttccaccagggcacgccggaagcgcagtag

SEQ ID NO: 508633 - DNA, 414 bp, Stenotrophomonas maltophilia
gtggtaccggaaattcccctgtcccggaccggtgagatcgtgcgcggtctgctgttcggcatggtcggtgtactgatgctcgtcgttgtcgccttcgagttgaaccatcgtcttgaattcctgcaggtcgcgcggagtgccgatggccatgtcgagcgcttgaacgcgggtggctcacatccggaggtggcgttcaccaccgacaagggcgaacaggtctcctatccgcaagggggcatgatcttcggatacaagcccgggcaggcggtacgcgtgttgtatcgacctgcgcaaccggctctggagccggtgatcgataccttcggcgcgctgtgggggatgacgctcatggtggcggtgatcgggctgacgtttgtctgtatatgcgtgcgggcactgatcaagcggaggtga

SEQ ID NO: 508634 - DNA, 963 bp, Stenotrophomonas maltophilia
atgcgcaggtttggagcggcaggtggggggcttacccacgtcagggaatggaagaagtattttcggcagctgacggccctaggtgcctggctttgctgtgcgctgttggtggggctgtccatcgtgccgcccgtaagcgcgcagaccgtcacttacattcataccgatgcgcttggttctgttgttgcagagaccgatgccaatggcaaggtgatcaagcgctatgactatgagccctatggggcggtggtcggtggccacgtcacggatgggcctggatacacaggacatgtgagtgatgcggctaccgggctaagttacatgcagcagcggtatatggatccgcagttgggtgtcttcctgtccgtagacccggtgacggcgtatgagcagcctgtggggcagttcaatcggtatcggtatgcgaacggaaatccatacaaattcaaagatccggacggtcgcatcgtcgaaaccgtgtgggatgttgcgaacataaccttgggggcaaccagcgcctactcaaactttagcgaaggcaatattggtgcaggtgtcgttgattcgattggcgtggccgtggattctctggcggctgctgtcccatttgtgccaggaggcgccggggcaacgatcaaggccgtcaggatggccgagaacgcggcgcaaggcgctcgggctgaaaaggccgtagcccaggcgtttggtgaaaaggtggcaggccagcgcgttacactggaagcatctaccggtcaacgaagcgtggcggacatcgtgacgaaggataagggtgttgtggaggtaaaaagcggtaatgctcaattgagctccggtcaaaaagcggtcaaggcggacattgatgcaggccgtccggtgacgcctaggggagcgaacgcggaaaaagcggggcttgagccaggaaagccgacgcaaatgaagtgctatgacgtgaagcgttgctga

SEQ ID NO: 508635 - DNA, 606 bp, Stenotrophomonas maltophilia
atgagtgctactggacattgcgatgcggccttcaggaaggctgttctactcaagtgctatgaggcgcttgaggtggaaggatttacgcgctatcgaatgcaggatgtggactggccgatggaacatggcttccattgctgggttgggctcaatactggcttggaaagagagtatctcgatattaatccattcgtcggcgttcatgtggtgccgatcatgaaactttatacctcccttgaggggcggaaatacagccgaagcacatccacctatgcggttcacatgggagagctggcacccaaggagcaggcttttcgttttactcgggaaactgatgttgcagcgcaagcggctcggttggcgcgtttgtattcggatgccggcttgtcatatgcgttgtccatcggcacctatgaacgactacttcccttgttgcaagagcgtgtgcctatgctcggtgcttatccggaacgggtggcatcttgcctgtatctgatgggccgtaaggaagaagcgaggctgttcgctgaagagttcttgcaggatcatcgagattactttgaaggctttgcagttccgttcttgaggattttgaacggccaatga

SEQ ID NO: 508636 - DNA, 888 bp, Stenotrophomonas maltophilia
gtgaacccagcaacctacatctctatgtcgactgtccggctactgtgtgggagcaacggtgtgtcagtgtcggtgggcaccggattcttctatctagtcgaaattgatacgccggaagggaaagggaacttccccctagttttcacgaataagcatgtcgtaaacgggcacaacgagatccgtataactgtgacaacccgtagttcatcggacgatgttagcgagctggtggttgcgccgggcgatgtgcaccggacattcctcattccaaactgccagcaacgaatagtgttccacccagatgcagacgtcgatctgtgtgcattttatgtcggtgatgtcttcgaggccgtacagaatagtgggttattcatcaggaatacatttctgcacaagaatttccttgttccgcatgatgaaaggaaaaacgttcgcgcaatcgagcccattatgatgattggctaccctaacggactttgggatgaacataacaatcgcccgctagcgaggcgaggaagtacggcgtcacatccatttttgaaatggaatggaaggcaagaatttgttattgatgcggcctgctttccaggatcgagcgggtcgcccgtttttcttttcgaagacataatgttcagaacaaaagacaattcatacacgcctggggcgcgcgctcagttgctcggcgtattggcctcaggaccgctctttaccaacgagggcacactcgttcaacgggacatccctacggcgacggcaatagttccagtggttccgtcgatgatgagtttgggtaacgtagtgcatgcggatgcactccagaaagttattgatttggcttccgcggcctcagtggaaggtcggacctttgcgcgggccatcagtgtttag

SEQ ID NO: 508637 - DNA, 294 bp, Stenotrophomonas maltophilia
atgtcccgtattacccgccgtagctataccgatgagttcaagcaccaggccgtggagttggccgaatcgcttggcccagccgcagcggcccgccagctggaaatgtccgtcaagacgctggcaaattggattgacgcggtccgtgctgggcgctcgttgacgtctgaggctcgcaggccggccactgacctggaaagcgagatcagccgccttcgggccgagaacgccaatctgaggatggagcgagaaatcctaaaaaaagcggcggcgttctttgccaaagagtccaagtga

SEQ ID NO: 508638 - DNA, 729 bp, Stenotrophomonas maltophilia
atgagcgacatccagaccatcaccaccactacctccgaaccggctattcaacccgtcgacggggccgaggttgcggcggtgtcggagaataggcggcggctgaacgagctggcgcagcagttggccagcgtgatgcagcgcaagcgcgccctggtgggcaaggtcgatacgatgcagcgcgccaaacaggctgcacagggtgatgccgccgctgcccgtcagcagtggggggcgaagctgcgcgagagcgatggcacgctgacccgtgacattcagaagctacgcgctaacgagcgctcggcactgtctctggccgaggaatatgaggcgatgcagggcgagattgcggccgagctgccgcgcctggagctggaattggccgaggtggcgggctactgtctgaacgcaagaagcaccgtcacttgggaattggccgatcaggcctacgagcagttgctggcacaggccggggatagcctggccttcgcatttgcgttgttctcgagagcgacaaactccgacgatgcagatgcactggccagccgattctttggtcgcctcggcaatgcggtgcgccgtcgcctggacgatgccgcggtgacggaacaggtgacgcaagtgttggcgctgccgtcgatggacctgagcgcggtggatatgcagctggggcgtagcccgattcgtctttcacagttgcgagagaagatcagtgctggggaggcagcgtga

SEQ ID NO: 508639 - DNA, 1038 bp, Stenotrophomonas maltophilia
atgcattcccctgccgatgctgctatcggtgaggtcgtgcccgcgcgtagcgtgggcactgccggagctgtcacaagcttttcctttggcgatccaacgcccgtgttggactcgcgcgggttgttcgactacctggaatgctggcgcaacggtcgctattacgagccgccgatcaccctcagtggtctgtcgcgcacaacgcgttccaatccgttcctgcacagtggtttgatcttcaagcgcaacatgctggtgcgcacctttgtgccgcatcgactgctggaccgcaccgcgttctcgcagttggcgctggattacctggtcttcggcatggcatacctggggcggcaagtctcgcactccgggcggctgttgcagctacacccattgatggcgcagtacatgcgtcgtggtgtgcaacctggtgagttctttcaggtccgagctggcagggccgaacacgagtttgcccccggttcggtgcaccagctccgtgaggccgataccgatcaggaaatctacggcatgccggagtggctggccgtcgtgcagtcggcgttgcttaatgaatcggcgacgttgttccgccgcaggtactacaccaacggttcgcatgcgggctttattctttacatgaccgacccgcaaccggagggcatggacgtggacgccttgcgtgaagccctgcgagactcgcgcgggccgggcaatttccgcaacctgttcgtgcattcgcccaatggcaagaaggatgggttgcagctgatcccgatcagcgaagtggccgccaaggatgaattcaccggtatcaagcgcgtgactcgcgatgacattctggccgcgctgcgcataccgccgcagctgctcggcatcgtgcctcagaatgctggcggcttcggctcgattcgggatgcggctaccgtgtgggcgtcgatggaactggcaccactgcaatcgcggctggccatggtcaacgaatggatcggggaacaggtcatcacttttgcccccttcgaaatagaacgttcagcgaactga

SEQ ID NO: 508640 - DNA, 333 bp, Stenotrophomonas maltophilia
atgatcgaccaccaggcggaaaccctccggccattgatcgggaaaaatgtgaaactgcgaatggaagacggcatggccaccatcggtacggacgatggctgggaactgcatatctacaactccttcagccttcactgcgatggcattgcggagccccccccgccctcaacgctgagcttggtgctgcaggattgccggttcgatcgccagacaatggttgcgcagttttctagcggggcctcactcacggtcgacttaagtgacgacggctactctggtccagaggcgatgcagttgaatagtccagatggaaccatcgtgatctggaattaa

SEQ ID NO: 508641 - DNA, 1056 bp, Stenotrophomonas maltophilia
atgaaggcaaggccttgctggaaggctctttcagggattggaaggatggaacggcttgagagaattgcgtgccgcgcgtcggcccgccgaaaggggatgagaacgcatttcggcaagctgagcgccttgggcgtctggctctgctggctgctgttggtgggcttggcactgccgccaatcgcaactgctcagacggtcacctacatccacactgatgcacttggctcggtcgttgccgaaaccgatgaaagtggcaacgtgatcaaacggtatgactacgagccctacgggggcgtcgtggacggaccggttacggatgggcctggctacacggggcacgtgagcgatgctgccacggggctgagctacatgcagcagcgctactacgacccccaactaggactctttctctctgtagatcccgtctcaccaaacgacaaaccgggctccgccttcaaccgctatcgttacgctgcgggcaatccctataggttcgtcgatcctgatggtcgccaggaacgggcggcggaaagacatgccgactcggtggcgaacacaccctcggcatatgatacgttcggccccgcagcacttgccgtaacaacagcgattgtgcgcgcgacgccagttgttgggcctgctgctgcatcagcaatatctggctccattaattcggcgcaaccactggccctgccagcaccagcaccagcagcgccctctgcgccaactcctgccgctgccccgacgacaccttctggcccgagctacgtcatctcgtcgaacgggacagcatttccggtgcccacaggggcgagcggaccaactccggtcatcaaccccgcaggaaaacagaccggcgtcgcatttactgggggtgccggaggcagtaatgggcaagtagccaccatgcggatgatggacccaacccctcccaggggaaacagtcctggatatccagctggctatatcaagtacgagaatgctggaaagcaaggcgtagatccgctctccgggaaaacgctccctaattcgaagtctcacttcccagtcagatag

SEQ ID NO: 508642 - DNA, 195 bp, Stenotrophomonas maltophilia
atgcacgttcacccaagcaaatcccttcgcccgacccaagctgccgagttccttggcatcgccgtttccacactctggcgcttccacaaggaacggcctgacttcccgcgctcacgcaagatcggaccacgttgcaccgtgttcgatcaaatggagctgttgaagtggtgtgactctctgatcaccaagagctga

SEQ ID NO: 508643 - DNA, 162 bp, Stenotrophomonas maltophilia
atgcgagacggcgcgcagggcatcgagaacatgattgacggaggtggtgtcgggctggaaatcgccaccgaaaactcctcgctctcctcgctgccgtcatcctcatcgttcaagcgcgcggccagcgcatcgaccttcgaggtgacatcaaagacgaggtga

SEQ ID NO: 508644 - DNA, 426 bp, Stenotrophomonas maltophilia
atgctcaaggccgccacgcgccgcgaggtggacatggtcgcggtgacggcgctggatcggctgggccgtagcctgccgcacctcgtttcgctggtcgccgagttggaagccctccgggtcggcctgttcgtccgcaacctcgcgatggacacctccacgcccgccgggcgactgatgttcaacgtcatgggctcgctcgccgagttcgagcgggagctgatccgggaacgcacgctactgggcctagaacgtgcccggcggcaagggaagaagctcggcaggccgaaggtgccacccggggtcgaacaccgcatagcggcactcctagaggcagggacaccggccaaccgcgtcgcccgcatgacctgcgtggggaacgccgccgtctatcgcatcaagcgggagctggaagcatgtcgcgcctga

SEQ ID NO: 508645 - DNA, 420 bp, Stenotrophomonas maltophilia
atgtcgcgcctgactttgcccgacctcacgaccaaggccctcgacgcggcgcgcctcctcgcgcaggagggatgccgggaacacaccatccgccgcgccctgggcctgaccctgccgcagtggaaggcgctcaaggaggacaccgaggcgggcgagctgtcgccgctcgcactggccttggaggaaggccgcgccgaaggtgccggggacatcatcgccttcatgaagaagcgcatgggcgaaggcagcgagcgcgccgccgagttcctcgccgaccgggtgtatcagcttggccgcggcgacggcaacgccgacgtgccgcgggtcgcgatcttcatccaatccgccatgtcacccgatgagtacgcgcgtgtgatcgcggtccagcagcagccgggagtcctgacccatgaacgttga

SEQ ID NO: 508646 - DNA, 1389 bp, Stenotrophomonas maltophilia
atgaacgttgagattcgcccgacgccgttccagtcgcaggtcctgactgtgcccgaggatcacttcatgttcttgggcggtggccgcggtggcgggaagtcgatggccgtgcagttcctgatcctgcgtcactgcgaccaatacaagaaccgcgcccgggtcctcgtgacgcgccgcaggttgaggtctctgggccagttcgccgaggagctgcgcgcgctgcttcgctccgcttacgggcgcgacattgcctacaaccagaacgatgcgatgttccgcttgccgaacggggcgacgatccagctcacgcatgtcgagtcggcgtcggcactgtccgacgtggcgcaaggcatgtcctacacgttgatcgcgtgcgatgaggcgggcgaaggcccctccatcgaagtgatcgaccagctcggcatgagcttgcgcgggaacggcacgccactccggcttgtgctcgccggaaatccgggagggcaaaatcacggtgcgctcgcggaacggtacgtcacgggccgcgagccgtgggtgccgttcgagttcgagggaaatacgtgggtctatgcgccctcgcgtctcgatgacaatccgtaccttcctgacgcctaccgcaagaacttcgagattctcgctcgcagtgatccggcgctttatcgcgcgatgcgcttgggcgactggtccgcgttggtcggcgatttcttccaaggaatatggagcgccgacaagatggtcatcgaccatcacgacgtgccgctggattgcttcgcctcgctcaagctctccatcgactggggcagcgccgcgccgtgcgcaacggttcttgttgggcagctcgcttatgccgtgcgcctgccggatgatcgagtgatgccgcgtggcgcgtgggtggtgttcgatgaacacgccgaatgcgatccgcggaacatttcccgcggtacgggccgcactccgggccagattgcgccgtcgctgcacgcgatggccgcgcgcaacggcgtccgggcgcggggcgtgatcgactccgccgccgaggcgcgccagatgggccgggcggaggcgtccatcgctgacctgttccgcgaggccggggtgcgcgtctcgcccgccaagaaaggtgcgcgcgtcccacgtttcgagcatctaaagcagctcatggtaaacggcgagttctttgttgcctcgcggtgtcgcatgtggctggcaacggtcccgagcctgccgcgcgattcgcgcgtgccggatgactgcgacagctcggccaatgaccacttcctcgacgcgaccagctacgggatcgcaggcgaatcgagcgggcgcgtccagcagcgcgggttcctgcccgaggcgcggatgccgcgcgaggaacggattgtttgggtttga

SEQ ID NO: 508647 - DNA, 303 bp, Stenotrophomonas maltophilia
atgcgacattcctacaagtacctgatgctggccctcgtgatcgccgacgcgcaagcggcgcagcgcgagttgttcaacgcccgcgagatgttggagcgggcgaaggtcggcacctactcgccgcgcgcgcagccgccggtgcgggtcgaagtggagaagcccgcgcggtttcgcgcgaacggccacggaaaccgccagattcaacaacaattcgagcggatggactgccgttgggaggacgccacgaactccatgcgttgcgcgccgtttcttgccgaagaagtaaagcgacccaagaaataa

SEQ ID NO: 508648 - DNA, 1026 bp, Stenotrophomonas maltophilia
atgagacggccagcaggtagaatcctgacacgaatccgagccggtttgcctagccctaagcatgcccgccgcgtagactcgccattagcaacaagaatccgttttgaaacgcagaagagacgcatggcaaagaagctcccacatccgattccgtatcaaggcagcaagcgaatgcttgctccgatgatctacccccttcttccgtccggaatcgccacattttatgagcccttcgcaggttctgccgcgatgacgttgttcgctgcacatcacggcgtcgccaagcggtatgtcctgggcgatacacttgagccgatcatcgacctttgggcgtcgattatcgagcggccgtccaaaacatcaaaacagtatgcgcaaatctggcagggtcaggcgaccgcctcagcagactacttcaatcgtgttcgcgagcgatacaacgcagagaaagaccctgtagatctgttgtacctgatttgccgttgcgtcaagaacgcggtgcgcttcaacggcggagggcgattcactcaatcgcacgacaagcgtaggctggggatggcacccgacaagatggaggccgcaatcgctggcgcctcaactctgcttcgcggaaagacagagttccggaaaggggattggacgaaaacgacggctgatgcgacgccaaatgactttgtctacatggatccaccctacatgggtacaagcattgggcgcgacaagcggtatcaccagcagctgctacccgacgatttgatcgtaggcctcaacgcactcaactcgcgctcgattcgctttgcgctttcctacgatgggatgactggtgaaaaggagtatggccccgaacttccgtcatcactcggcatgacgcgcttgctgcttcacgcaggcaggtcgagccaagcgactttgcagggcaaatccgaccaaacaatcgagagtttgtacctctcggggaacttgaaggccccctccgaaaaggtctttcgtcaaccaaaagacatgcaggcagctttagccctgtag

SEQ ID NO: 508649 - DNA, 720 bp, Stenotrophomonas maltophilia
atgcccaagaaaaacatcgatccccgcatcctcgcgctatgcgagaaggtcacaaacaagcgcccgaaaacggcgattgaccacatcatcaagcatggccatatcacgacggaggagctgcaggaggtatatggatatgaccaccctccgcgcgttgccggtgatgtccgggacgaaggaatcccactggagactttcaagctagtaagcggcagaaccgggcggaagatcgccgcctatcgttttggcgatccagctgacatcaaagcgggccggatcggcgggcggaaggcgttctcaaaagccttcaagttggcgctggttgaacgctatggcgagttcgacactcttacatcgcaacccgttgcagctcggtatcttcagattgaccaccgcgtcccataccaagttgttggcgatgcgaaccacgacgaaaagaacctcgacgcgtacatgctcctcgatgcgtccagccaacgtgcgaagtcatggtcatgcgagcattgcgaaaactggaatagcatccatgacgagacgatttgccagcgctgctattgggcgtctccggaaagctacacacacgcggcgatgaacgagattcgccgcgtcgatatacagtggggtggcgatgaggtcggcacctatgacgcacttgcggctgaggcggaacagaaggatatttccattgcggcgctgatcaagcagaagctacagggctaa

SEQ ID NO: 508650 - DNA, 360 bp, Stenotrophomonas maltophilia
atggccaatccgcgactgacacccgaccagctcgacctcgcccgtgccctgctcgatgaagtgcgggcgaggctcgcggacttgagcggcggcgacaaggaactgctctttgcctaccgccggaagctcgcgaaggagctgacctatgacgagcgcagcaagccgatggtccggcggcgcttgaagcagctcaagatgaaggagcaggaagggctgtgcccgctctgcaacgagcccttgcccgagcgaggagcagtgctggaccgcgctcgggccgtcgatggctacacgcccgagaacacccgactgattcatgccgcctgcgacgtcgcccatcaggcggcaaagggctacgcctag

SEQ ID NO: 508651 - DNA, 303 bp, Stenotrophomonas maltophilia
atggctaagtgggcggattacggcatttcggctgtccggtacaacgcggcgcatacgcacatcgatagggtacgcatccatcaggacaacggcgacaccttcggagcagccgcggagcatgagcgggctaccatcgtcaaagcgatcaaggatggggtcacgttcatcacgatcccccaagcgaacgggcagtggcagaagggccagccggtctacatcatcaaggtcaacggggtcgagtacatcaagaccgtggacaacggattgccccgggacaacctcgaaaacctgccggagttctga

SEQ ID NO: 508652 - DNA, 1185 bp, Stenotrophomonas maltophilia
atgcccgccttcgattccatcgtcggtctatgccgcttaagccacacctgccagattgcgggtgtggacttggtcgtccgaactgaagcatctcctgaagtttcggccctgatcgaagccatcgaggcgggcggacgacgcgtcacgaccgtttttgaggggaaggagcgtccgcaaggggttgcgggcatcgactatggatctgagattcaacttgtagtgcacggagtatcaaaagctggcgaagtggtcgtacagaacactggcgcgctgctctcgtacaacatggggcgattccaagtcgaggccccggaaaccttttatttgcttcaggaggactacgcacttggcgaaggtcacgtccccaaccttgtggcggcctacctgcgctgcattgagtttgctgaaatcctcaagcgagtggccgacgacttccgcgcaggcatcggcggcccaggcacagccatcattctcactggccgcaagttgagcatcccgctcacctacagccagtggctcctcgatgatgttccttcggcagaggacttatcgcaatcacgtcacgcgatttttgatgaccacctcaagattggtcggctcgacgcgttcaagcgtgttctcgtcaggtttttattcaatgtccccaccgagcagcgcttcgaagttctactgcgatcgtggggcgagatcatgcaggcattcctgtcagacttcgacatctatgcctctggattcaacttcgacaaggcaagagaggagtttgagcgccggaagctcgatttcgtcgtcaagatgaatgctgcaagctccgacgccatgaccaagctcatagccattccggtggggcaaggcttgcttgcgagccagatgaagacggatgcggcttacaccgtagtgaaccacgcccttctcactgcgtcctttgtatttcttctagttgctgcaatgctggttgccgctcacgttctgacacttcgccaggtgggctttgaactgaaagccgaatcggagatgctgcggcaacgcgcactgcccacctacaaccagctgcgcccaatgatcgagcaactgcaaacgcggcttcgtttccatcaatggggagttcccatcgtcatgtcgatccttttgctcgtcaccaccggcatgacgcttattgcctactcggaactgacggcgaccacctga

SEQ ID NO: 508653 - DNA, 1014 bp, Stenotrophomonas maltophilia
atggaaatcctgaatgcggtcgcgcacaaagtaaacaaagacagaggcgtgaagggggcgagccttgctgaggccaagggcgagctcgcacggacggacgagcttaactcgttgatgctcacgctcctcgacagctataacaatcgcagctccagatttgccgggtcatttgaggaggacgaggacaactaccggttcagcgtccatctcagggatcatttggatggaaagacaagcttcatcgatttctcgattcatgctggccgtcgcttggttgtctcgatgaacgacgtcatctttgccggcggcggctacatgctgctgcttcgatatacgcatcagcagagagacatgctgatggtcgcgaagttgaaccctcagtccggcgccatcttttctgacgatctcgacaaggtcgttcgggcaccatacctgaacttggatcgcctccaagtcgccgcccgaatcgatctggcagcttggctggcgggcggacaacgctacctgagcttcgtcctcaagaagaacaaggacgatggcccgtccgactacttccaggatttcgtcggctgcaaggtggatcaggactccaaagtagaatcgaaaaaacttgtgctcgttgtcaaagatttcgccagcagcttggtggatgcagaagcaatgccggccggagacgtgcccgaccttcagcgccgggccttcgattacgttgaaagtttgaggaaaagcgactcacctcgtctcgacgacttcgagggcctggcgaatgcgatctggcccgacgagccgacagctttcctgcacttcctcaatggccacgaaagcgccccatctgcggggttcctccccgatgccacgtcgataaaggcgctgtctgacatcaactacaagagcaaagaactctcgctcaagatgacctacacctttaagcagggtcacgtccacctggacggaaccactgtcatcatcaagcaggctcctgaaaaattgatccaagagctcaacgagtcctga

SEQ ID NO: 508654 - DNA, 408 bp, Stenotrophomonas maltophilia
atgtccttcgatgctgcaaatctcaacttgctggagaagcttcgcgacttccgtgttgcgctttcgctgttggcgtttgcagtgcttttggatgtgctcttggcgctgacgatgggcggcaacctttggtctttcaagtgggatgacctcgcgtcgcgtccagggtctttgctactgttggttcttgcttacagcgtaacaatgaccgtgggcgcgggcttgctttcctggattgccatgacggtcagggaactgttcttgccgaagcttcagcggtggctaggtggtggcgaggtgccgcaaaatcctaacccgcagcgctacgtcacgcgtttggaggcggagaacgcattgggatgctcggccgaaggcggtggaggcgcagctgctcaaccgcaccacgcttga

SEQ ID NO: 508655 - DNA, 969 bp, Stenotrophomonas maltophilia
atgtctgtgaccaatgcagagctggcgcgtgacctgcccaagcttcaagacatccttgtgcgtatcgcttctggagagctgaacgttcttggaggcgtggtgcgatacgccgcggggactggcaaggggggccagatcgccgcgcaccttgtattcccgagcgacccgcagcaggcccagcagagcatttcccaactgcaggccaccatgcaacaaaggatgggcaaccttcagggcggcatggatgtcctccaacagagcatgggttcacttcaagcactacagatggccaacctcgccatggctggcttgaatctggccgtcacgaccgcgggcttcgtcatcgtttgcaagaagctgaacaagatcagcggccagatcgaagcgcagtcagccggcatcgctcaaacacttcaaatggtcagcgaagcccacgaacacagcttgctgatggatgaggcgaggtttcgtggcttggtgctcgcctgcgagcagcactttgaggaggacgatatcgagctcctcaagcacaagattcaggacttccatgagcaataccagttcaccaagctggtgttgcaacgccacgccgtcaaagcagcaagcaacgtggaccgcctgattgacatccaggtgctccaagaccgcttggtgaaccttgggctgttcctcgcccaagttcaaatcaaggtgggtgctcgtaagcgcggccaagaaactcttcagaacctcgcacaagaccttgatgagctcaacggaaaccgcgtcaaggccctgatttctgatcgagacctatccttccgcatcaccgaagaccagctgggccacgtagtttcgttcattgagagcggaaagcagacgatcccagccctgacgtatcaagccgatctcctcggggtcgaacacttcgatatcgatgccgtaaacgacgcctcgatggcaggcgacatcgtggtgatcgcggcatag

SEQ ID NO: 508656 - DNA, 180 bp, Stenotrophomonas maltophilia
gtgacggcgctgcagttggtggtgatcatgctggccgaagggcgccgcatcgagataccccagcgctggctgccgctgtcggccctgctggtaaggccctcgctggcgctgccgcgcgccgacctgctgcgcaagcgctttccgagaacagcaccacgccgtctttccccggcctcctaa

SEQ ID NO: 508657 - DNA, 894 bp, Stenotrophomonas maltophilia
atgaccacttccctttccgctggcgctgccggcgacgcttcgctgcgccaccactacctgcgcatcgatggccagcgcgtgcattgcgtgtccgcgggccacggtgaacccgtgctgctgattcccggctggccgcagacctggtacgcctggcgccacgtactgcacgccctggccgaggccggcttcgaagcgattgccgtggatccgccgggcatcggcgaatccgatcgccccgcccacggctacgacaccggcagcgccgccgccgtcctgcaccagaccatgcaggcgctgggccacgaccgttatcaggtggtcgggcatgacatcggcatgtggatcgcctatgcgctggccagcgaccagccgcaggcggtgcgccagctggccgtcaccgaagcggtgattcccggcctggccccggaaccgggcatctttgctgcacccgccgacaacatcttcctctggcacttcatgttcaaccaggtggccgacctgcccgaggcactgatcagtggccgcgagcgcgcctacctggaattcatgttcgatcgctggtcgtaccgccgcgatgcggtggccgccgacacctacattgccgcctacagccgtccgggcgcattgcgcgcaggtttcgcctggtatcgcgcgattccggagacgatccgccagaacaagcagcgtgcgcagcgccgcctgccaatgccggtactggccatcggcgccgagcacgccaccggcgatgcgccgatgctgaccctgcagccacatgccgacgatgtacgcggcagcatcgtgccgggctgcggccacttcatcatggaagaagcaccgcaggcgttcctggcgcagttgctgcccttcctgctggaggcacgccatgctgcttga

SEQ ID NO: 508658 - DNA, 1392 bp, Stenotrophomonas maltophilia
atggcccaggccggtctggccggctggcagtgcctcctgcagcagtggccggaagccctccagctatgcgtgctggccggtgccggcaacaacggtggcgacggttacgtgctggcccgccatgccgtgcggtcagggcggcaggtacaggtggtcacgctgcccggcacggcgcccgccacggcgctggcggcgcaggctgcagcggaatttgccgcggcaggcggctgcatcgttgcgttcgacggtcagttgccggctgctgaggtctatgtagacgcactgttcgggcttggcctggaccgggcgccagccggcatggcccagtcgctgatcgaggccctcaatgcggcgcaacggccggtgctggcgatggatgtgccgagtggcgttgatgccgacagcggttgtgtgcccggcgtggcggtgaaggccactgtcacgttgcagttcatcgcgtgtcaccgcggcctgtacaccggtgatgccctggaacaggtgggccagcgtcggctggcgccacttgaactgcctgatcaggcctgggacggtgtccacgccagcgcgcagcgctggacgggcgaccgcttgccggtgctgctgccaccgcgacgcgccaatacccacaagggagaatcgggccacgttctctgcatcggtggaaaccacggcagtggcggcgcggtcgtgatggctgccgaggcggcgctgcgtgctggcgcgggcctgctcagcgttggcacccgtcgcgatcacgtcggccccttgctggcgcgcctgcccgaggccatggcccacgcgctggaagatggtgacgcgctgccggcgctgctggacagggccggagtggtggcgatcggccccgggctgggccaggacgagtgggcgcgcgcactctttgcacgggtgctggcgtgtgacaagccgctggtggttgatgccgatgcactgaatctgctggcgaaggatccgcgcgcactgccgcacgcgatcctcacgccacacccgggcgaggccgcgcgcctgctcgggtgcagcaccgctgacatccaggctgatcgctatggcagtgcacaggcattggccgagcgcttccacgccgtggtggtgctgaagggcgcgggcagcatcgtggcggcacccgcgcagacgccacggctgattgctgcgggcaatcccggcatggccgtggggggcatgggcgacctgctcaccggcatcatcgccagcctgcgtgcgcagggcctgaccgccttcgacgccgctgcggctggcgcgttgctgcacgcgctcgccggcgatgctgcggccgccgacggcgcgcgtggcctgcttcccactgacctgctggcgccgctgcggcgactggccaacccggacctctctccatga

SEQ ID NO: 508659 - DNA, 603 bp, Stenotrophomonas maltophilia
atgaagctgtactacgcgccctacacctgctcgctgtcgccccatatcgtgctgcgtgagcttggcctgcccttcgagctggtcaaggtcgacaacgccagcaaacagaccgccgatggtcgcgatttccgcaccatcaaccgcaaaggctatgtcgcggcgctggagctggatgacgggcaggtgctgaccgaaggcccggccatcgtccagtacctggccgatctgaaacccggatgcacgctggccccacccgtcggcagctgggagcgggtacgactgcaggaatggctgaacttcgtgaccagcgagttccacgccggctcggcgccgctgttcaacgccgatctgccggaagcggccaaggccttcttccggcagaagctgttcaagcgtttcgacctgctgcaggagacgttggcaacgcaggactttctcatgggaccagacttcagcgtcgccgatgcctaccttttcacggtgcttggctggtgccgcttcttctccatcgatctggcggcgtggccggcgctgcctgcctatgcccgcaggatcaacgcacgaccggccgtgcaggcggcgctacgcgcagaggccgcgtga

SEQ ID NO: 508660 - DNA, 900 bp, Stenotrophomonas maltophilia
atgatgaatcttgcccactggcgcctgctggttgcggtggccgacgagggaaccatctcgcgcggcgctgaccgggtcggcatcagccagtccggtgccagccaggccctggcccagctggagtcctcattggggtttgcggtgttcgtgcgcgagcggcgccaggtggggatcaccgcgctcgggcagcgggtgatcgaacacgcacgcatcatgctgggcggcctgcaggcgatccgtgcgctggccgatgacagccaggggttcagtggtgcacgcatccgcctggcgaccttcccgtcactcgtttccagcgtgctgccagcgctgctgcgggatttccagcgccgccacccgggcatcgaggtggtgatcgtggagggtacggacgaggaggttgagcgctggctcgaatcgggcacggtcgacgccggcgtggtgatgaaccccgctgcagatcgcgcgccgttgatgctgggcagcgacgggtggatggcggtgctcgcgcagacgcatccgctggggcgccgcgccaccgaaagcggggtggccttgagcgagctggcgggcgaacccttcatcctcgcaacagggggttgtgcggtgaacggtcagcgcctgatggcggacgctggtctacagctgagcgacgtacgggtgaccgtgcgcgactgggccagcgcgtgcgtgctggcgcgcgagggactgggcgtctcgctggtgccggaatcgacgttgccggacgatctccacggcctgcgcgtgctgccggtgcagccggggatccgccgcgtgtttggtctggtctgttcgccggcgggtcgcgcatcgcgtgcaacgcaggtcttcatgcgggagctggccacggccgttgcgggcagtgcgtcaggatcagcgtga

SEQ ID NO: 508661 - DNA, 810 bp, Stenotrophomonas maltophilia
ttgccccttctcactcatcacgatatcggcaccggctttcccatcgtccttggcggcagctatctctggggccgcagcatgtgggcgccccagatccagctgctgtcgcgacgctaccgcctgatcattccggaactgcccggacacgacaacgatctgcccctgtcagccgccctcaccacaccggcgtgcctcgcacgcgaagtcggccgtttgctggatgcgttggacatccggcagtacgcggtggccgggctctcggtgggcggcatgtgggcagcggaactggcactgcagcgccccgaacaggtccgctcgatgatcctgatggacacctacctcggtgcggaaccggaggcgtcacggcagcgctatttcggcatgctcgacctgatcgaacagctgggctgcatccccgaagcgatggccgaacagatcgtgccactgttcttccgcccgggcatcgccaccgacgatccgatccggttgctgttccggcaacggctgctgtcctggccccgcgagcgcctgttgaatgcggtagtgccgctcggccgcctgattttcggccgcccggatcgattgtcggcattgaaggatctggacccggaaacaacactgatcctgagcggcgaactggatctgccgcgccccctcaccgaggcgcggcagatggcggaaaggatcggctgccgcctgcaatcgatacctgacgccggccacatctccacgttggagaatccgaccttcgtcagcgtccagctcgatgcctggctgcagcgctcactctcgctggcaccgtcctgctga

SEQ ID NO: 508662 - DNA, 741 bp, Stenotrophomonas maltophilia
atgacgatcatgcgttccaccctgtgcctggccgcctgcctgctggccgccaatgcctcggccatcgacctgaagggcctgaccagcaccggcatgaaggccggcaaggcgctgaccctgtccgacgctgaggtctcggccgcggccgatcaggcctgcgcctacatggacaaggacaaccagttggtggccggcaacgatccgtatgcccagcgcctggccaagatcacccagggcctggccaacgaggacggcctgaacctgaacttcaaggtgtaccgcaccgccgatgtcaacgcctgggcgatggccaacggttgcgtccgcgtctataccggcctgatggacatggccagcgacgacgaagtgcgtggcgtgatcggccacgaaatcggccacgtgaagctgggccacagcaagaccaagatgcgcaccgccctgctcgcctcggctggccgcgagggcctggccgcttcgggcaacggcaacctgacccagctcagccagggccagctcggcgaactggccgaaggcttcgtcaacgcccagttctcgcagaaggaagagagcgcggcggacgagtacggctaccagttcatgaagcgccacagctatgacccggcggccctggccagcatgttccgcaaattgtccagtgaaggcggcctgatgtcctcgcacccgggctcggaagcccgcgctgcgcgcatcgacgcgatgatcaagaaggacaagaagtaa

SEQ ID NO: 508663 - DNA, 699 bp, Stenotrophomonas maltophilia
atgcgaaacattgatgatcaagaattcaagatggtgttcgatcaaggtggtagcgtcttcgaggcggtacggatagcaaacagtagttttgacaactgcggaatgtcgttgtccaagcgcccttcaaggatgagttccgttcgcgatgtagtagtgtcgaactgtaaggtgatcaactctgagatcgggccgacagtgttcgaggatgtccaggtcgaagggttggatgtgaatccaattctcctgctctggtcctgcttctataagagggtgtgtctcgtcgggaagattgggaagatcagagtcaatatcgagccctccgcgttctgcacagatgccggagttctcgcggaatttgcggaacggcgcgcggcgttctattcaagcgtagactgggctctggacatcagtcgggcgaggtttgtcgactttgcctgcaaaggtgttcctctcgctttgatccggagagatccggagactcaggtgatagtccggaagcaggacttctccggggtcgatatgctgggaactcagttcgcgagtgcgttccctgagacgcacacaagactaggcatcttcggtgagtcgattgctgaggaggcgttgcttgtggtgcctttggccgcaccaaggaagcgacgcgaagactgggtaggtgggatcgcagagttgaggcgtttgggtattgtctcgggttag

SEQ ID NO: 508664 - DNA, 342 bp, Stenotrophomonas maltophilia
ttggctctgcccgtttcctacaaggcttggcttggtgagtttggcaacctgtttgtaggtccagatcccgtgttcggtctcgccgatgcggagaaccgtgacgtggctgatgacgatctggtctacaacgctcgcttggtcgaggagaacgggtttcctcccgtaggcctgattccgattttcgttccggactcggatgaagccttctacttcgatacatgtgaaggattgaaggatggggagtatccaattcttcggtacgactacaataccggggagttcgagttctcttctccatcattctttgatttcctgatggacctcgttcgtcactcagggtaa

SEQ ID NO: 508665 - DNA, 399 bp, Stenotrophomonas maltophilia
atggaagtgacgttgagcggaaggttgggcgggccagaggtggggatgaagtatcaacctgggatcgtccaggcacgcgctagattgaagtctgctttcgcagagctgtctattgatggtctggagacgatcgatgttgaactgtggatcagtggcagtttgacagagtattgcccggaagggatttcatcgtcggttagattctatgccaagaaaaagagtgttctgcttgctgtctgcgttggaaaggacgaggcaacgtccgtcgatgatgattgtgctgcatcggcaattggaggttggctgacgcgcggtttcgaaagtgcaaagctgccgcgcagtgccggtaggattgatttctcgggcgttgctggcgccgtgaatctctgtttcgcttga

SEQ ID NO: 508666 - DNA, 624 bp, Stenotrophomonas maltophilia
atgcagaagctgatttctccctgttcgtctgtcttctcatacgatccccgatgggcagaggtgcgccttggggctgagcccgcgctctactacatgggcgccagttcaagcttctttgtcgatcagaatccaatgggagaccgcattctggctcctgctgcagacattgaggttgatcagtcggtcggcgctctgagattgacgtcgaccgataagggcgagcccgtcgagtacgtggtgtccgcggggtgtgacttcgaccgtctcatctttgagcttgtgcatgcgctgaaggattcgggtctagcaccaggcgagaccgatgacaaaattgatgtggcctgtgagggcggtctgataaagacgtgttacatcactcgcgtgtttgagggggatgcgcctagatcgctgcgtattgtccgtaaagatgagggtattcatgtcgtcattcctagtccgcgatatcaagctcgcgtcacttccttgatgatgagtggtgctgagctgttcattgggaccgatgacggagcaaccatgaagcgtaagctcactcttcaccagtccattctaatgttcttcacaggtgtggttgacgaattgagagaaacttcaggttgtgactaa

SEQ ID NO: 508667 - DNA, 447 bp, Stenotrophomonas maltophilia
atgtttgataatctggaggcgctggtggcgcagcacccgcgagtcaaggtgtttcctgggcggcaggttgaacctggccttatccgggaggcagaagctgagctggggattccattgcctgattcgtacaaggagtggttgctcaagtatgggaatctgagggtcggcgcttatcctgttctgacccttgcacctcgcgatgtgcgtgaaatttcggatagtgatctgatctacaattttagactggattcacgtgatggcgacctgccgggcgggtatatctcaattcatttgccggatgcggatgaatcattctatttcgataccaataatgggctggttggtggagagtatccagttgtcaggcgggattggtctgacggatcttatgagccgtttgccgatagttttatgggctttctagaggagattgttcggcagtcttga

SEQ ID NO: 508668 - DNA, 4587 bp, Stenotrophomonas maltophilia
gtgagcatcgccgccaagcatttcgatccgcagctgggcatcgacatccacatgtacgcggtgccgccgtgcccgctgccgacgccgcatatcggcctggtgctggatccgttcgactacattccgttcatcggctcgaccatcaaggtcaacggtgtgcatcgcggtactgccggtaccggcggcctggacatccacattccactgggcgtgtggggcccgccgctggccgcgccgatggggccgcagttcgacggcgaagaaatcttcatgggcagccgcacggtgtcggccgatggcgagccgttctcgcggctggcgatgccggtgctggactgcaacctggccgggatgatcaacccgttccgggtgaagaagccgaagaagccgctgcgtgcgatgtcactgccgaccggcctgaacgtggccattcccaccagcgtcaaggtgggaggaccgccgacggtgtcatggaccgcgctggcgttccgcgccgcattcgccggactgggcaagctgcgcaagagtgcgttcttccgcaagaagatggatgcgtttgccaactggcggcgcggcaagtggggccatctgccctccggcttcctgaagtgcaaggtgctgcgtgccgagccggtggatatccgcgatggcagcgtggtagtcagccaccaggacttcgacattcccgggcggcttgccttcgcctggcagcgcagttatggctcgcgccgggcgggtgagccgggactgtgcggtgctggctggcagacgccggccgacatccgcctggagctgctggacgacggcagcgtgtggctgtccgggccggaccaggtcgccttctttcctgagctgccgccggccgatggcgacgccggagcgatcctcgatttcgtcgatggcgcgcgcctgctgcgtcggcgcgggcagtggcaggtgcgcttcaagagtggcctgaagtatgtgttcggcggcgaactgccggcaggcgtgagcgcgctgccgaatccacagtcctggccgatcgagcgcatcgaggacgcgcacggcaaccactggcggttcgagcgtcgcgacggccatctggtgcgcatcgtcgagagtggcatcggtgacctgcagggccgtttcatcgaggtggaggcgcgccacggccgcatcgaccgcatggcgctgcatgacccggccaccggcctggtgcatccgctggtgagctatcgctacagcggcgagggtgatctgttggcggccgtcgatgcgctgggcgcgccgcgcaccttcgcctacgagcagcaccgcatggtgcggcacaccgaccgcgttggcctgtccttccattacgcgttcgacgcgcagggcagggtggtgcactcatggggcgacggcggcctgtacgactaccacttcgagtacgacgcgctgctgcgcgagacccgggtaaccgactcgctgggccacctgagcgtggtcaagtttgacgagaaccagctgccgctgtgcgagatcgatccgctcgatggcgtgacgctgttcgagtacgacgatttcgggcggaccgtggcggtgaccgacccggaggggctgcgcacggcgtttgcctatgatgcgcatggcaacctgatctgcctgacccgcgccgatggcacgacgatccagatggagtacgacctggacgaccgcatggtgtcgttgcggacgccggatggtgtcgactggcagcaggcatacaatggtcagggcctgctggtcagccagaccgatccactgggtgcaaccacccgcttcgagtacgaccctcaaggccagttggagtcgcagaccaacgcgcgccaggcggtcacacgcctgcgctatgaccgtcatgggctggtggctgccgtcattgatgcgctcggccatgagaaccgcttcgagcacgatccgctcggcaacctgctgcgccaggtggatccgttggggcaggtcagtcgctacgagtacgacgccaaggggcgcctgctggccactgctggccccgatgggaacggtgtgcgctgcgagtacgatgccgaagatcagctggtgcgctacaccgatgaagcgggcgcgcagacgcggctgcagtacgtgggcatcggacagatcggcaagcgccttcaggccgatggccacagtgtggagtaccgctacgacaccgaggagcagctggtcgcggtcatcaaccagcgcggcgaaacctaccagctggtgcgcgatgcgctgggacgcatcgtcgaggaggtcgactactggggccagtcgcggcgctacagctacgatgctgccgggcgactgacggcgaccctggatccattgggtcagcgcatcgccttcaccaccgacaagcttgggcgcatcacccgcaagacgctgccggatgtgcgccatcctggccagcaggtacaggagcactttgtctacgacgtgcaggggcagattgtcgagctgcgcaatccggcacgcacggtgaagcgcgtgtatgacccgctgggccagctgctggaagagctgcaggatggcttccgtgtcggctatgcctatgacgaagtgggcaaccgcgtactgcgcgagacttcagccggtaaccgcgtagcgtttggctacgacctgcgcgaccagaccgtatcggtagccatcaatgacgaatcgccgatatcgatggagcgcgacgcgctgggccgcaccacgcgcgagcagttaagcccgcacttgcagcgcgagttcacctacgacagccgcaacctgctgacctcgcagtcgatactgaaggatgctgcaccgctgttcgagacgcgttacgactacgaccgcagtggcaacctcaccaagcgcagcgacagcgcacagggcgtggacgagtaccgctacgacgcgatcgggcgcctgctgcagcacatcgacccgatgggaagggtcgagcgctacttcaacgacccggccggcgaccggctgcgcactgaagtgaagcaggtgcaggcgcggaagttggtaggcggcgacgatgacgacctgaccacctggacgcgtgaaggcacctatcagggcgtgcactacgtcttcgaccgggcaggcgatctggtgcgcaagggcgcaccgcaaggggatgcgccggatgacctgacgcttatctgggatgccaaccatcggttggcggagagccgccgcaatgggcaatcaacgtactacggctatgacccgctggggcggcgggtgttcaagcgcaacccggcgcagacgacgtggttcttctgggatggagacgcgttgctgggtgaggtgcagcaggcgaatgacgccgaagaggcggcgccggtgtgggtggggaatgtagccagcctggtagagatgaggcggcggcagcggaggcttgaacgggtgcatgaccgggtgcgggagtatgtgtactacccggggacgtttgtgccgttggtgtgggtcagacctctcgatctagagaagatatctggtccaatttcggaggtatcagaagccctcgatcctctgcacgaggctgcatcgtttgtcgcccctcttgatccgccaagtgcagtagggcgtgaggtagagcaaaggacaacgtctcgctcgtttggtggtggacttgggcagttgggtgcatcttccttgggattcagggggtctgcgcgtaccgacaagcttgaatcgactgcttctccgacatccgggcagctcaatcgttcggcagagagcaggaagggctccagtttgaccttcccgaccggaaaggcgccggctaactccgcgtcgctggcggatcagtccgcatgcagtactgctcgggcgggcctatttgtggtggatccgaatggagcggcagttcgagcgctggatgtgtcaggagtagaggagtgggcaataagatacgggtcatggggcgccgatgagaacagcacccagggggggatggagttctttgttcgcctgcaagggcagtatcgggacattgagacaggtctctactacaatagaaaccgatactttgatccgctggtcggtagcttcatatctccggatccgctcggcctcgatgcgggagagtgcatatacgaatactctctaaacgcgattacgtactgcgatccgctgggtctgaagtaccggaagactacggcgagtgatggtagaaccgtttatcagaatgatgatgcattcaatcctcatagaaaggtgtcgtgggaagatgcagagacgggtgagttcaggcgtggtacgaatcttgatcgaatgtccgagggcttggcgcccattggcaaggatgggcggccagttcagttgcaccatctgaccatgaccgaggcgcccgggatgaatgggcggagaggttccttggctgaggtgaaggcatccatccattcgaagtatacatcaattctccatattcctttcccgaggaatccaaacaacaagaggcagaccttgcctcgatatccgagttttagaagaaataacgatggaagcgcgtccctgctggcaagtcaattcgatagcttcagggagtcatattggaaggcgagagcgcaatcaataattgctggctgccgacaatga

SEQ ID NO: 508669 - DNA, 129 bp, Stenotrophomonas maltophilia
atgaagtcgaacaagaccgtggtgatgctggtggccatcgtgctgggcatcatcgtcgtgacctggatcagcgccgagtaccgtgacgaagtaaaggcgttcctgcgcgcgttgttccgcgccttgtaa

SEQ ID NO: 508670 - DNA, 1617 bp, Stenotrophomonas maltophilia
atgcaggatacccccatgctgcgcggcctgaacgcattgcgcgatgcttggttggaggcaagtgccgacagcagccggcgcttgctggtctggcgcctgcctgccgccgccagccggctgctggccgcgtttttcgagatgcagcgccacgacgccggccgcgatacgccggactacttcctgcgcatcgataccgcctatgagcttggcttccgctacagccggcagctcaagcaggacctgctggaccgttacctggccagccaggaggatctgcgtgcgcagcaggtgacgctcggctggcgtggcccgcacgaagggcatccggacagcgcacagggtgtcgtcgaggtgctggagagcttcatcgagcatcatggcgaacacctgcgcctgctggcggcggtgctggaaccggagcgctgtgtgccgggcgagggattcgaacgctgggtggacgctgcgctggccgccggccctggccagcgcctgcgtctggtactggtggataccgaggaggatccgcgctggcagtcgttgctggaacggcacggcaggatcgcgcgcgtggtcagtgcgccgatcgatatgttcggcatcgcccgcgataccgccgcacagtctggcggccgcggcccggaagtgctgtaccggcagctgctggccgacctgatgctgctgctcgaacgcggcagcccttcccaggtggttgcccgcgcagagcgcgcacaagggctggcgcagcggcaggggtggcaggaccagcaatcggtggtgcagatgatggtggccggtgcatggttgaagcacggcgatcacggccaggcgatcaacagctaccgcaaggcgcgcagcgcggccgagggcgcgcgcgcgagcggcaatccagccgcgccggaactggtgatgcagagctggttcggcgaggccggttgctggttggccgccaaacagcccgagcgtgccgcgcagacctacctgcaggcctcgacgtcggcggccagcattccgcatccgatgttcgcgttggagggccagcgcatggctggctggtgccagttgcagtcgggccagcgcgaagcggcgcgcacccagttgctggaggcgatccgcatcgccaagccgctggcaccggccgaccgcaaggccaccacgctgccgcaggcgctgtgggacctgctgcaattgcaggacgcgcgccgctgcgaatcgctgcagcaggtggccgcggagtacctgcaggccagtaccggcctgctggaaaaggccgatgcacagggccgcgcgctcggcccgcgacccgcacggccggcattggacgccatcgacgcagcgctggatgccgcgctggagcgtggtttccaccgcgcccagcaggagcgcgagcggttgatccagggcggcgacgaattcttccgcaagatcgtggccgtcggccgcgatttcctcgacccgggctggaacggcctgccggccatcgaacacccgctcgatcacgagataccggtgtggagcgagccgccggcgatgcagccgttgcccgatcccagtggcctgctgcaggcgtccgcggcggcgccgaccgggcctgccgttacaggagtggctgttgcatga

SEQ ID NO: 508671 - DNA, 2244 bp, Stenotrophomonas maltophilia
atgtacgccgaatcactgctccccggcgctgtgctgcagcgcctgcaccaggaccgacgcctgatccgcgttgaaaccgccttggacccggacacgttcctggtcaaacgcttcgagggaagcgaggcggtgtcgaacccgttcacctaccgtatcgacctgctctcgatccagccacggctggagctgaagcagttggtcgggcagccgctgcgcttgcagctgggcgacgagttcggcaatcgcagcgtgcacggctacgtgcgcgagttcgccagcaccgggcagcaggcacagttcagtgcctaccgcgctgagctggcgccctggttcgccttcctcgactacacctgcaactgccgcatcttccaggaccggaacgtgctgcagatcatcgaagaggtgttcgccagctacgcgcagctggcgaagttccgctacgacctcaacgccggcaagctgccgccgttgccgtactgcgtgcagtacaacgaatcggatttcgcctttgtcagccgcctgctggaggacgccgggctgtactacagcttcgtgcacgatgacgaaggccacaccctggtgatcagtgatgattcgacgctgagcaccgtgcacggtgaaccacgcccgatcgccttcgtgtccgaccagggcacgctggccagcaccgggctgcaccgctggggcgcgcgtcgacgggtcgggcccagcgtgcagaccctgcgcagtttcgatttcaagcagcccagccagtcgctggacggcaaccagggcaaccaggtgccgctgggcctgctgccgccgctggagcagtaccgctacgatggcgcggcacgcttcaccaacagccgcatcggccaggcattggcggccgtgcgcaatgaagaggtggcgtggccgaccaagctgttcgaatgcgccggcaatgccggtgagctcgacgccgggtcctgcttcgaactgcagcggcatccggatttcatcggccgtgacgacaccgaccgcagcttcttcgtggtcagcgtgcagcgcgaaggccacaacaatttcgccgccgactttggcagcgccgaagcgcccagcgttgaagtgcaggcggaagtcctgcgccggcgcatcccgtaccgcccgctgcggcgcacgccctggccgcgcatgccgggcccgcagaccgcgaccgtggtcggcccgccgggagaagagctgcatgccgatcgctatggccgggtcaaggttcagttccactgggaccggcaactggatcgccgcgagaatgcctcgtgctggatccgcagcgccagcccctgggccggtgccgacatgggcggtgtctcgccaccgcgcgtcggccaggaggtcatcgtcgatttcctcgatggtgacccggaccggccgatcatcaccggccgcgtctacaacgaagacaacatgccaccgttcggcatggaggtcagtggcctgaagtcgaagacggtcaagggcgccggctggaacgagatcaccatgcacgatggcgccggtggcgagctgctgaacatgcgcgcgcagcgcgacatggtcaccaccgtgctcaacgatcagaacgccagcgtcaagaacaacaaatccacctccgtctcggtcaatcaccgcatggacgtgggctccaaccaggacatcagcgttggtggcaatcgcggcatcaccgtcaccggtaccgacaccctgggcgtcaccggcacccgcaccaccaacgtgaccggtgcagtcaccgagaagtacgagagcggcgaaaccaagacgatcgtggcgtctggctacaccgaaaccatcaccggcgatttcaagaccacgctgaccggcaactacaccagccagcgcaccggcacctggaccgagacggtgacctccacctccagccgcaccgtcggcgggctggtcacggagacgctgaaggcagcacgtgaagtgaccatcaccggccaggacaagcgcaaggtgcagggcaaggtggacgacagcaacgtcggtgagcgcgtcatcgatgtcaccggcaacttcagccaggatgccagcggaacccatagccagggctcagacggcgtgatgagcctggagtcggcagtcaagctcaccagcaaggtcggcggctcggtcatcgagatcaccgacagcgcgatcaagatcaccgccggtggttcggaagtggtgatcgacgcgggcggtgtctcggtcaatggcagcgagatcaagctcaactgctga

SEQ ID NO: 508672 - DNA, 666 bp, Stenotrophomonas maltophilia
atgaaattcaacgcactggccagcaaggcggccaaggggcctgcgccgctggaacatggcggcgccatcgaagtagaggacctgatccgcttcgtgcttgaacacggcagcgacggtgcggccgagatcgagcgcctgtgtgcgctgcacggctggcgcgaggcattccagtacaacgccgatggcacgcacttcgcgccgatggcgccgtgggcgcgggcgtgtgcggccttcgggtacggtggggtggcggggctgcgcccgctgctgaatgacctgccgatggcgacctatgccatcgcggtgctggaagaagtgcgtagcgaagcatcggtagacgcgcttctggcgttctgccaacgggccgatttcaaccaagctgatccgatgttggcgccttggcgggcgctggcggcgcttaacgtgctgctgtcgttcgacaatggcgtcgtagtgccggcccctacccagcagtcgctgctgcaggtggttcggcgcgcatgcgagcaggcgccgacggcgcatgggcggagcctggcgctgtatgccgcgcgcggtgcgtctgtggctggagcgctggactggctgcagtcgctggcactggaggatgcggagctgatggctgcgcgcaaggtggtgctgaagcggctgcggcagcgcctgtga

SEQ ID NO: 508673 - DNA, 393 bp, Stenotrophomonas maltophilia
atgccacttgtcctgcacatcgaaggcacgtccatcaacgacatcgccagcctgtacgtggaaatcaaccgtgtattcatggccagcgaggactggcgactggggcccagcctggacgcgctggatgatctgctgtggggcggctatggcgcgctcgccggtcatcccgtcgcaacggtggtgtggcgggatatcgcgcacagccgcgcggcgctgggctacgagaccacgcgggcatggctgcaggcaaagcttgagcaggccggccggttcaatcatgcggccatccgcgacacgctggcagcattggagcagggccgtggccagacctacttcgagatcgtgatggaaatcttcagtgggcatccgcagatcaccctgataccggcatga

SEQ ID NO: 508674 - DNA, 729 bp, Stenotrophomonas maltophilia
atggatgatgcgtttgccccgttgatcgatgcgacctggcgcggcatgttctccgggcagcgcacgctgcaggacgattcacaactgcagttggcgtgcagcgatgacctcgatgagggggaggacggcatgctgctgcagccggtttccggccctgcgcgcttgctgctgcgccccgccctggccgctcgcctgcaactgcacgcgcaatcgcactggacgctcccgcagctgcaacagcgcctgcagcagctcggccagcgcacgcacggcgcggatcgcgtcttctacttccctagcgccgaacttgcggccctggccgagcggcctgcatcgccgcatatccgccgtctcggcccggccgacgccgtcgcgttcgatgtgttccaggccagcgcgagcgaggaggacctcgatgctgcctgggtcgagctggaccactggcaggtcttcggcgccttcgacggcgaacaggtggtcgcggccggcagcctgtatccgtggagcctgggtccggcactcgccgacatgggcgtgctgacactgcccggagcccgtggccgtggtcatgcacgcctgctcgtgcaggccatggccgtatccgcccacgccgccgggttgcagccacagtaccgctgccagctcgacaacacggcctcgatcatcaccgctgagcgcagtggtctgcgcgcgttcggtgactgggacatcattctggcggccgcgtga

SEQ ID NO: 508675 - DNA, 1038 bp, Stenotrophomonas maltophilia
gtgtcggatatcctcatctgcggcggcgccggctacatcggcagccacatggcccagtacctggccgaggccggccacgccgtagccgtgctcgacaacctgtccaccggccatcgcgacgcggtccgctggggcgaactgctggaagctgacctgctggaccccgaggcgctcgagcgcgccctccagggccgccatttcgacgccgtcatgcacttcgccgcacgttcgctggtgggcgaatcggtttccgctccttatacctactacgcgaacaacgtcaccggcacattgaacctgctggaggccatgcgccgtcacgacatcgatcgcatcgtgctctcctccaccgctgcggttttcggcaatccacagtcggatgtgatcgatgaggaccaccccaaggcgcccatcaacccctatggcgccagcaagctgatggcagagcggatcctcgccgacgcagccacagcctatggcctgcgttcgacctgcctgcgctacttcaatgcggcaggcgccctgcccgaccacggcatcggcgaggcccatgcctgcgaaacccacctgattcccaatgtcctgcgtgccgcattgggcatcggcaacgccatgaaagtgttcggcaatgactacgcaacacccgatggcacctgcgtgcgcgactatgtacacgtgcaggatctggcccaagcccacgcgctggcacttgagtacatggagcacacgccgggtgcgcacgccttcaatctgggcaatgggcagggtttctccgtccatgaggtgattgcagccgcggcagcggtcagcgggcgcgaaattccgtttgagatggcggaacgccgcccgggcgatccggccagcctggtggcgtcttctgcccgcgctcgcgagatcctgggttggcagccgcgctggaccgagctggcaccgatcatcgccagtgcctggcaatggcatcgcaacccgcccgcgtggtcgccacagccagccgttcctgacaccgcacgcagcccgcaggaagccctgcctgcctga

SEQ ID NO: 508676 - DNA, 2214 bp, Stenotrophomonas maltophilia
atgaccactgaagcccgtacctccgcaccggaagacagcgacgagatcgatctgcgccagctgcttggaaccttgatcgactacaagtggtggatcgtcggcattaccgggctcttcttcgtggttgcggtggcctatgcgttgctggccacgccgatctatcgcgcggatgcaatcgtccaggttgaatcgaaggtgccttcgttgccaggcctgtcggatatcagccagtcgctgggcatgggcaccggatctgcagaggcaaccaccgagatcgcactgattacttcacgtgcggtggtcggcagcgcagtcgatgcgttgaagctggatatcaccatcgagcccaatcgcttcccgctgctgggcggctatatcgcgcgcaaggcggagcgtgccgatccggacgctctggctgatgttcgctttggcatgagccgtttcggctggggcggcgagaggctggagatcttccagctggacgtgccgcgcgcgctgctggcacgaccgatgactctggtggtcggcgagaacagcagctatgaactgttcgacgaagacgacaatcttctgttgaagggacaggtcggcaaggtcgccagcggaaagggggtgaccgcgcaggttgccgagatgcgggcgcatccgggcatgcgcttcgaagtgtcgcgccagcgccatctgacggtcatcaacgacctgcagaaggacattgccgtgagcgagtccggcaaggactctggcatcctcaccctggcctatgagagtgccgacccggtcctggcgcagaacttcctgcagcaggtggcgcaggcttacgtccgccagaacgtcgagcgcaattcggccgaggcctctgcgcagctgaccttcgtcaaggagcagctgcccaatgtccgcaaccaggtggatgcggcgcagaaggcgctgagtgcctaccagacacgtgccaactccgtggatctgaccctgcagaccaagggcctgctggatcaggaagtggccgtggaaaccagcatccagcaacttcgcctgcagcaggcggagatggaccgcaagttcacccgcgaccacccggcctaccaggcgctgatgcgccagatcggcgagcttgaggggcgcaagagcaacttccaggggcaggtcaagcagcttccggaagcgcagcaggagttgctgcgcctgacccgcgacctccaggtcagcaatgagatgtataccggcatgctgaatcaggcgcagcagctggatgtggctcgtgccggcaccgtcggcaatgtgcgcatcgtcgatgctgccgaagtcgatgccactacgccggtcaagccgcgcaaggcggtggtggtgctgatcggtaccgttctgggcgcgttcctgtcggtggcgctggtactgctgaagcagctgctcaatcgcggcgtggaagaccccgcgcagatcgaagagctgggtctcccggtatatgcctcgattccggtgagtacgcagcagcagaccgattcggtccggggcaagttccgcgccgacggcaagttgcatctgctggcggtgaaagacccggccgacctggccatcgaagcggtgcgcagcctgcgcacgagcctgcacttcgcgcgtctggaggccaagaacaacattgtgctgatctctggcgcgagccccaacgccggcaagacattcgtgtcctccaacctcgcggcggtgatcgcgcaggccgggcagcgcgtgctgatcatcgacgccgacatgcgcaagggaaccctgcacaaggcgttgggtgcagcgcagaccccgggcctgtctgaccttctggtgggcaaggttgatcgttctcaggtggtgcgaagccttccgggcttggacaatctgagcttcatcgcgcgtggcgacgttccgccgaatccgtcggaactgctgatgcacgccaacttcaccgcgttgctggaagagctggcaccgcagtacgacctggtcattgtggatacgccgccgatcctggccgttaccgatgctgcgatcattgcccatcacgccggtacctgcctgatggtggcgcgctttggcctcaaccaggcgaaggagctggcgctcgccaagcgccgctttgagcagaacaacgtgcgcatcaagggtgcgatcttcaacgcggtacagcgtcgcgctacgggctattacagctacgggtactacgagtacaagtcgaccgcatcctga

SEQ ID NO: 508677 - DNA, 1281 bp, Stenotrophomonas maltophilia
atgaatcgttccgtcaagcacgcctcagtgatcggcctctttactcttgcaggggccggtcttgcgtttttcacccagatgctggctgcccgcgtcctggggccgcgtgaatacgggatcttcatggcagccttcacgacgatcaacatcgtctcgccactgactgcttttggcttgcaggcattctggcttaaggcctttgggcgggagggctggcatgccatgcgctggatccggccaaccttcgtgttctgcctgctcagcaccgtgctgaccatgcttggcgtggtggcttgggcattgttgggcctgggcatggaagaccgtgtggcgtggtgccttttgatcctgtccaccaacctgctttccgttgcgagcatcgaggtggtgaccactcgtttcctgctggaggaaaagccattgccattgatggtctggcagaccttgccgcaggtggtgcgctttcttgtcgtagttggtgtgctgatggcgactacggcgcctgacgccgtgactgtcgcttggctctacgcatttgtgggcggaggtctcgcactcgcgagcgttcccagcatgatgacgttggcgagggggcgaatgcacatggttggacaccagaagcctggtgccatctccctggatgtccgcccaggtgttctggccgtcgccaaagagacctgggcatttggcctcgggaacctgttctttctcgtctacttccagagtagcgtcattttcatcagtcactatctgggagcggagtctaccggcacgtttggtgttgcagtgacgctgttggcagcgttgtatctgctgcctactaccatctaccagaagctgctgatgcctcggcttcaccgttgggcctatcaggacccagtcgcgtttcgcggtgcctatcacgccggcaacaagtacatgttgttgctgggcctggcagccgccgtctgtacggcgctacttgctcagttccttgtgccgctgctgttcgggaagctctatgagcaagctgcttggctgctggcctggctggctccctgtattcccatgcgattcgtttcgacgagtgcaggtgcagttctgagcacgggtgaccggatgcggataaagatccgcatcatggggctggtcgcggttctcaatctggtcatgaacttcctgttcattggttgggccggtctacgaggcgccgtggttgcggctatcgcgaccgaagcactcttgatggggctgtacctctttaccgccaaacgctctctccgcatggacgctcaggcatga

SEQ ID NO: 508678 - DNA, 1389 bp, Stenotrophomonas maltophilia
atgaataaggctgtaactatcggaaaggtcgttcgtggcggctactgcgttggctgtggtggatgcgcctctgggaagtcgggtgtcacgatgcgcatcaatgacatcggcatgccagagcccgtgcatccgaagctggacgacattgcggctgattcctgcccgtttggcgatgcgccggacgagacgcgattggccaatgcactgttcgcggggattcctggaatcgagcatcacccctccaccggattccattcatcactctatgcagggcacgccgtggttggcccgcaccgtgctgcgggaagttccggcgggctgacgtcctgggtcctggaagaactgttgacccgcggtgaggtggatgcagtcattcatgtcggtcgtgggcccggcgatggcatttttgaatatttgatctccaattcagtcgaggagatgcggccgcgggtgaagtcgctctactacccgaccgggttccatgatgttctggaacaggtacgtagagagcagggccgaactttcgcaatcaccggtgttccttgtcacatcaaggcgctgcgcctggtcgtcgaatcagatccgctcctgcgcggcaagatcaagttcttcgtcgggatcttctgcggccacatgaagtcgcgtggtttcgtcgagtcctttggctggcagttgggaatcgagccggatcaggtcacagacgtggacttccgcgtgaaggacgagacgcggccagccaatgactattccattcaggtgagctcggcgacacgggtcgaacgcacagagaattttcgcctgtatggatcggactgggggctggggctgttcaagcctttggcatgcgatttctgtgatgatgtcgcctgtgaaacggccgatgtcgtgatgggtgatgcctggctgcccgagtacgtgaaggacagtctgggaacgaacgtggttatcgtgcgccatccgttgatcgcgcgtcttctcagcgaagcgcgtgaccgcggtgatatcgctttggatccgatcgaaccggcgaagatccatcaatcccaggccgctaccttccgccatcgtggcgagggcctccaggtcaggctcgcgcacatggacgccatgggcatctggcgcccgagcaagcgtgtgcagccgggagatgcggggctcccccgcctgcggcagcgtctttacataacccgcatgcgtctatcgcaggcttcccatcgtgccttgcgcgatgcaaagaagcgcggtgggttggcgtggtacttcctgcgtctattgccctatgacgtgctctacaactaccagaatcgccagctcctgcgtaggacctaccgtacattgagggcgatgctgcaatcgctcgtcctccgccccttgggaaggaaaccatga

SEQ ID NO: 508679 - DNA, 1110 bp, Stenotrophomonas maltophilia
atgactcaacgaatcgggctgctgacactgcccctgcattccaattacggcggcatcatccagattgcagcgctcagtgctttcgtacgcgcgcttggcttgcagccggttttgctccgcaaggagcaccagaaggcgggctggaagcgaatggtcatcgaggtgctcaagcggctcccgggacagaacattgcgaactatcgcaaccagtatctaaagctgcaacggcacgccgcgttcatgggggcgttcctacctgagcaatccagggtcagccgctcgcctgcagagcttcgcatggagtgtgatcgactcggcctggatgcagtcgtggtgggaagcgatcaggtctggcgcctggactatattgacgatggtgcttacgacgcctatttcctctcgttcctggtggggtctccgattcgccgcgtgtcctacgctgcgtcgttcggaaccgaccggtggcccgatgcgtccagggtggaagatgtgtctcgcctgttggccggattccaggcggtgtcggtccgtgaagacagcggccagaagttgtgcgccgatcgcttcggtcgcagtgacgctgtacacgtgcttgatcctactttgctggtcgatcgcagcttccatgaggaagtgatcgcaacgttggcccccgggcgcggggagagtgggttgtatgcgtacgtgctggatcgttctgcggccaagaaggcgatcatcgacgctgccgggcagtcggagaatctctcgaagatcaccattgccgaaccggagaatgatctggcagggtacgtggacctcggcgagtgggtgcggcgcttccgtgacgcggaattcgtggttaccgactcctatcacggaatgatcttctcgatcatcttcgagaagcagttcgtggctataggcaatgcggggcgcggcctgacccggttcaagtccctgctggcccagttgggtctggaggatcgattggttgaggtgggtaatgagcgggtgcagctgcccggtgcgcagatcgactatagccgggtcaatcgacgcatcgcagagctgaggatgaagtcacgtgccttcctgtccgatgcgctcgacgtggaggctcgctcatga

SEQ ID NO: 508680 - DNA, 645 bp, Stenotrophomonas maltophilia
atgatccccaagatcattcattactgctggtttggtggaaagccgctaccacctctctatcagcgctgcgtcgatagctgggccgagaagctcccagactatagggttgttcgctgggatgaaacgaacacgaagttcgatacgcctttcctgcaggattgcctgcgaaagcagcaatgggcgtttctctccgactacatccggctgcgtgcaatcgccgacgagggcggcatctacctggatgccgatatcgaagtggtgaaatcattcgatcctctgctggcgaatcagtgtttcctgggaatggaagctccggcccgcccgaccacgggtgttatcggctcggttgccgatcactggttcccgcgcgcctgcatgcgtctgatcgacgaacgccacgcagctcgcaagccgtatctgattgctccggaagtggccatggcgtgtgtcgaagctggggaggccggcagcatcgcggttctgtccgaagagcacttctatccctacaacccgtacgatgcgtcgcgtccggtaaaggaactcatgttcagcagcattacgcaggacaccttcgcgatccaccattgggggaagtcctggcgacagggtctcgtctcccgcattttgaagaagctcggtttctga

SEQ ID NO: 508681 - DNA, 774 bp, Stenotrophomonas maltophilia
atgccagccaatgccatcgccaccctgtacgagctcgcaggactgttgggccgctcagcgccggactggcgtgaattccgcgcgggccagcccgaagcgtggctggtaacgttcgccaatccccattcggtgcggttgatgatggaccggcaggactactcctcgacgctggcacagttcgatgtggtgcttcctgatggaaacctgctcgctcaaagtgcgacccggcagctgggtcgcacgattgaacggaagtcgttcgatggcaactccctggcgccggaggtactgtccttctgccagcgcaatcggctccgtgttgcgctggtgggtggagttgaaggcgtcgcgagtgcggctgcatcgttgttccgaaaggaattcggcgtagaggtcgtgttcactcgatctggcttcttcgccaacgcggagcagcggaatcagtgcttccaggcattgcgtgagcagaacgtcgacgtggtcatctgtgggatgggggcgccgcaccaggatcggttcctgttggagctaaaggcctcgggttggagggggcttggcttcacctgcggcgggtatctggaccaggcgcttgcatccggcgtgaagtactacccggactgggtgaatcgcttcaacctgcgggcgccctatcggctgctgcgcgagccgcggcggctgtggcgtcgctatctgatcgagtaccagcccttcttgctcgccgatgttcgccttcgtttgcgcaatgttcgtcatcagcaggaacaccgctcatga

SEQ ID NO: 508682 - DNA, 987 bp, Stenotrophomonas maltophilia
atgacaacactgtcgatcatcgtaccggtctacaacggtgccgcattcctaccgccattcatggcctcggtccaggggctgcttgatgagggtgacgtggaacttgtcatggtcaatgacggctccactgatggcacggcagagatgctggatgcgatttcctcggcgaacccgtcgatccgtgccttgcatgtggagaatggagggcaggggcgtgccaagaatctgggtgctgcggctgccagtggccggtacctgtggttcgtggatgtggatgatcttcttgatgtccgggttccaactgagttccttgttcaattgtccgaagagggcattgatatcctgttgaccggatttgagcgatatgacgcagtttcgggatgctcactcggcgtctataggccgcagattgcaagcgggagagtggcttcttctcatatcagccgatttgacgatctggggcacagcgcttggaataaagttgtctccaagaagatatttttcttgcctggaaatcaatttgtcgaagggcggatccatgaggatcttgcggttgtgccactttggctcacttcttcgaggcatatcttctgtgatccagtaatcagatatcgctacggggtgcgtccagcatcgagtattcatgggaattattcccgtcatgatgaccttatgttcgcactctcccatctcatgttgtatggcgccgttgaggcgaggagactgggaccgtcgatcgtcaaagaactcttcttctacacacttccgcgctttgcgtcgggattggggaaggggtgcacctggcggaactactggcagtgttactcggcatcccgggggttcttcggaagtatcccgcgccagtgccgacgaacgatgtgtgcgcagctctcagtcgcacagcggatttatgttcacgccacctattgtggcgggtggatgatgccaatggttctggcgggcgcaaagcgccttttgaaacgctag

SEQ ID NO: 508683 - DNA, 1146 bp, Stenotrophomonas maltophilia
atgcgtatcgcaagagtccagctggcagcgaaggtctacttctattctttcttgctggtgggggtggcggggctccttagtcccttcgagtacaaccttattcccgcgaactcctactttgaggtcgtacttctgttgtgcgccactcttgccttccgtgtgcccaaaaggccggtagctggcttcttcctggcgtcgattctatatgttggcggatcgtatgtagtaatgagcctttttcggccagcacatttcctcgatttcgcacaggcattcaaggcgttcttctatgtcgcccccttgtgcgtcttcttcaggtcggaggctttttcaagagagagctcggttaagcttctgaagctccttctgataatttttttcttgaagtacgcttactcggttgcgctcaatttgacgcctcggatggggagtcgccctggtctctatgtcgagaataactttgagcttatattcctgatgctcatgttctacttgctgagaagtgacctgggccggagggcgcttgtctggtttggcttgttggtggcaattgtcgggatgtccggttcgcgcagctctgtattggcgctgcttgtcctgttctatggagtcttccttaatcgtctgacgttgcggtcgttcttctacattgcggggttgctgctgctcggtggcgcggcagttgcaatatttgtgcttcgctcggatgggggggggattcagtcgatcgatcgctataactttatgatggtcttcgtggacgaggtccggtactggcctgcctggaagtttctatttggaagcatgcccttgacgccgttgtcgagtgcttcctgcagtagccttgcctactatcacgatttatttagtttttcgggggatgggcgttgctattcggttattcttcattcctattttcttcgtgtaatctttgatcatggaattattggtctggcgtttctgctccttttcatgatgatttcactcaggaagagtggctatgcaaagaatgaagttttcgtattcctcggcatcatctgtagttctgcgctttcggtctctgcgatgaatagtgtatttgtcagcctagccattgcattggcgctcggattgcgagggccggctgcagtcgttggtcggcggtga

SEQ ID NO: 508684 - DNA, 2163 bp, Stenotrophomonas maltophilia
gtgattcgctccaccctctcatccgccggcactacgcgccctaccgccttcgccctgtcgctgctcgccctgtcgctggcagccgaactgcatgcacaacaggctccgcccccgactgccagcgaatggggtggcatcggcttgctgcagacaccgacagcacgcatggccgaggatggggatatcgcgttcactgcatcacacaattctccgtacagtcgatacaacctgacgctgcagccattctcttggctggaaggctcgttccgatacatcaacgtctccaacctgcgatacggggaaaccagcctcagcggtaaccagaactacaaggacaagtcgatcgatttcaaggtgcgattctggcgcgaaacgcgctggacgccagatcttgccttcggcgtgcgtgatctgggcggcacgggcttcttctccagcgagtacctggtcgcgagcaagaatttcggccctattgatgcatccgttggcctggcaaccggctacattggcaatcgcggcgacttttcgaaccctctaggagcaatcgatgatcgcttcaaggagcgccggcctatcgccggaagcaatatcaatgacgccggcaagttcggggtgagcaacatgttcaaaggcccagtaggcatctttggcggcatcacctaccaaacaccgtgggatcccctgctagtcaaggtcgagtatgacggcaatgattacaggcgcgaaccgcgacgcaacaacctcaagcaaagtacgccggtgaacatcggattggtctacgcgccaaatcgaaatgtggaactcacagcggcttgggagcgtggtgaggcggccatgttttcattgaccctgcgcgggaatcccggtcatgccccctctgcacctaagcccttcgatccacctcccacaaggattgaccggagcgcgctagcgagccaaggagcttcaagtgcgacgcaaccggattggaagtccgtcgctggcgacattgacgagaacgctggattccgcgtagacagcatttcccgccgcggcagcgagctggtgatcgacggctatcagaatcgctacgccagcgcagccaagggcatgggccgcgctgcgcgcattcttggcaatacgcttgacgacagctacgactggtacacattccggacgacacgtctgggcatgccaaccgtagacatgtcgatcaagcgagagaccatcgaggcgtatctgcaaggggctgcaagcgaagatgaccttcgacgcagtaccgagatcagcgcgcccaccgccatccggaccgataccctctatcaggcaggaagccgcccctggggaggcggcttcagctttgggtatcgacagaatctcggcggcccggatgggttcatcctgtatcaggtttctgccaatgcaagcgggagcatattcttccgtccaaacgtatggctgacaggttcgctgagcgcgaacgtcatcaacaattacgacaaattccgctacgacgccccgagcaatgtcccgcgagtacgaactgatatccgcaggtacttgaatacatccgacctaacaatgcccaacctgcagttcaacattgcaggccgacttggcaaagacctctacggtatcgcgtacgccggctatcttgagtggatgtacgccggcgtgggaggcgagcttctctatcgaccgatgggtgaatcatgggcagttggcgccaatttgaaccacctgcgccagcgtgatttcaatcagcattttggtttgcgtgattaccgaattaccacgggccacgccacactttactactcgtttgacgcacaggaacgagtcgttggctccctctcggtaggacggtacctggccggcgactacggcgccacgatcaatgtcgcgcgtgttttcgacaatggcatgagcatgggagcctatgttacgaaaaccgacatgtctgccagggacttcggggagggcagcttcgacaagggaatctacttcagcataccgtttgacagcattcttcctcgctccacccgcggcagcgcaaccatcaactgggcccctcttatcagggatggcggcgcaatgatggggcggaaatactcgctctatagcattaccggcgagcgtgaagaccgacttttctacgacaacatccggtcgattgcggattga

SEQ ID NO: 508685 - DNA, 774 bp, Stenotrophomonas maltophilia
atgggatttcgattcttgccgctgctggcagcgttgctggctgctggtcctgccctggccaacaaatcgccggcgcccggcaatcttgaggtcgtcgctgatggagcgctgtctgcaccgggaagctacacggtggctgtcggcacccggctttcccggcttctcgcaaccacgcaacccactgcagacgcctatctgcccgcattggcgctgtatcggccgcatgcacgcctgcagcaggttcgactgcgtgcgggcctgcaacacgacctcgacttacttgaggagcatcaggatccgcagatcgcagacgcagccgccgggctttctcgttggctgcaggaccatccggcatcgggtcgcatacgactgcccgtcaacgacatgcgactgatgcaggttcaggcgggcagcgacccggtcctggaacagggagatgtgctgatcgctcctcgccgacctgccacgatcaccgtagtgggtgcggtggaatcaacctgtgagctgactcatcagccgctgcgtgatgcgcatgaatacctgcgcgaatgtgctgccacacctgccgcagaccctgatgaactctatgtggtacagccagacatgactgtccagaagatcggcatcgcgctatggaaccgcgccgatccgcagccagtcgcccccggcggcgtcatcttcgtgccactgcgccagcacgccgtcgctccagtcgacagcaccttcaatgccgagttcgcggcgttcatcgctacccaggccctgcaaccgtga

SEQ ID NO: 508686 - DNA, 681 bp, Stenotrophomonas maltophilia
atgatgcgcatggatgtgctcttggcgcgccgcagattgcggcgcgccctccattggatgatgaccctctccatgctggctctgctggcaggctgcacaacggccagccgtgcgaccagcgattcctttcgcctgctgctgaagcgacaggtgacagctactcctgaacaggtcgccgcgaaccgcttcccacaggcgcagttgaaagcccccgacctgactgccgtgatggtgttgggttacgtcgacggggggcgccagagctggtacgccggaagcaacgcggtattccaactcgacgacacaggcctggtaacgggcgtttcgagctcagaccggcagattcaggcgcgcatcgcaggagcctcgccttttaccagattgcatgcgctcaacagcaccaccactgtacagcgcgagtacgactggattcctggctaccgtatgggggtcagggccaccggcaccctcacgcgtggcggtatcgagtcggtgagcatcctcggcaaggaacggtcgttgattcgcttcgatgagcgaatcgaaggcggcttccatgcccacaacatctactgggcggatcccagcacaggctttatctggaagagccggcagcagctgggaccctcctacaccgtggagctggtgcagctcaaaccttaccgcgccgcaaaggactga

SEQ ID NO: 508687 - DNA, 1110 bp, Stenotrophomonas maltophilia
atgaccaagaagttgacctgtctcgcggctgctctactggcaaccgccaccctgtccggctgcctgctggcccccggccagcacctgcgccatagcgatgtctcgcgcggccgccagagcgacgaccgccagcttgagctgatcaccatcacgcccaagctcatcgccatggatcgagcaacgcagagtgagcaggtccttccctcggaactgtttgactaccagccaccggaatacacggttggtattggcgacattctgtacatcaccgtctgggatcatccggaactgactgttcccgccggctcgcagcagcagggcaatcttgccggacgactggtgcagagcgacggctcactgttctacccctacatcggtaaggttcaggccaagggcaagactccggttgccctgcgcgaggaaatcagccgacgactggcgcagtacatcgaatcgccccaggtcgacgtttccatccttacctacggtagccagcgcgtatgggtcacgggcgctgccgagcgctcagccccgattgcacttggtacctcgccgctgactttggctgacgccatcagtcagggtggcttgaacgtcaatcaagctgacctgtccggcgtccgcctcagccgcgccggtgccacctatacgatcaatctggaaacactggccacccagcatggcggccgccagttgttcctgaaggacggggattcaatcttcatcccctacttggatcgaaaggaaattttcgtagtcggtgaagtcaatcttcctggcgcctacagcttccgcaccggcgacgtgtcactgaaccaggcactcggccgcgcccgcggactgacccaggagacctcagcgggtaatgcagtctatgtgatccgcggcagcagggatctggagtcagtgccctccactgtctatcagctcgaagctcgttcaccggctgccttcgcgattggcagccagttcatgctggagcccggcgatgtggtttttgttggcgcggccggcgtcacgcgctggaaccgcttcgtgaaccagctgttgccattcacgaacatcctgtacaccgccgcccgcacggagaacgaagtcgggaacaagtga

SEQ ID NO: 508688 - DNA, 585 bp, Stenotrophomonas maltophilia
atgcccgacgtctggcgaagcctctccgccctcggcgacagccgctggctgctgccggtggccctggtgctgctgatcaccctgccccgcgcagacgtacgcctgaaatggcgatggctgctgggcatcgccgtcaccgccggcgtcacgcttgcctcaaagctggccttcatgggctggggaattggcatcaagagcgtgcatttcaccgggttttctgggcacgctgcgatgtccagcgtcatctatccggtcgttggcgcgctgctcgcggggaccggcaagcgcccccggacgatcggcctggtcatcggtgtgctgctggccaccaccattgcctggtcacgaatcccgctgcatgcgcatagcctttcggaggtcattgctgggctgatgcttgggctgggcagcggcgcatgggcgctttccaccacaactccgtgcaaccgccccagcgcgcggatcctggcctctgccctcctcatcggcctcatccttccactctgccttccagatctacgcacacatcagctggtcacagcgcttgccgaggccctggagggcagcctcgagaccaaccactga

SEQ ID NO: 508689 - DNA, 2229 bp, Stenotrophomonas maltophilia
atgcacggaatgcagtacgcatcgacgacgagcatccacgcggtggattcaacccgttcgccctggactcggcctgagaccctgtggctggcaagctggttgttgctgtgcctgccgtggctgatcggtaccaaggtcatcccctacgacgccgtgcagcagttcttcccggcggtcagtttcagtgccgagcagcttcggcacctgcaggcgccctggtggaacccttatctgttcggcggctatccgcaggtcgccgacccgcagatgatgaccctgcagccgaccatggtcctgccaatgatgctggcacctgcctcgctgcatctgttcaccttggtggtgttgctgcatgtgctgatcggcggcctcggcgcgttgcgcctggcgcgttcgttcggtctttcagctcctgcacaatggctcttcgcaatggtgctgatgttcggtggagtggccgcctcccgcctgcagcacaccccgatgattgtcagctacagcctgcttccctggctgtggctgggcttgtcgagggtccggcgccaaggccgcgcgcgcgacgtgctgctggcgggaacggcaggtggcctgtgtgcgctgcagctgacccaggtgacctacttcatcatcctggcctctgcgttgtacgcaatgggcgccgtactgttggcgcccggcaaccgcctccgccttgcatcacagctggcagcggtggcattgatcgccgccgtggcgtgtgccccccaatggctttccacgctggcatggctgggggacaccaatcgcgatggcatgaccctggagacggcactgcgcggcgcgatgcactggcaggggctggcgacactgctctctggaaacctgttctcgcagggacgtggggtcagctggtccttcggcgatatcagcaccgattacctctacttcggctcggtgccactggcgctgtggctggcgtggggggggggcgtgatgcgcaggcaaccgggcgcaacccggctggcgctggcagtactgcttttcaccacgctggtcgcactgggaggagctacccccctgttcgcctggctcttcagctggttgccgggccttgacctgttcagacggccctccgatgcactgttccttggcgtgccggcagctgcctggctgggcgcgcagtcgctgcagtccgcgctgcaggatcgcaccctgtgcccgcatcgggtgtccttggggctggccgtcgtcctgatgttcgttgcctcatggttggccatgagccacgggcacctggaagcctttgcgtggctggtggccagcggcggcatcggtatcgccgcggtgcagctgctgcgccggcatccggctccggtgcgctggctgatcgcactggtcatgttcgacatgctgctgttcaacgtgggagcgcgcttcaacacgtccggcgcccgtccgccggtaatgaccgcggaccgcaatggcgccacgcagcgcgcgtatgccctgcttgccgccgagcggggggctggcctcccggaacgcgccatcatcttcggcatcggcgtactgaccaatggcgcagcggtgcatgcgattccgctagccaatggatacaacccactgttgtccagtgactaccagcagatggtgggcatgccgacggagcccgtggctgccttccagcagaaggcgacgaccccttgggctgcggacatggacgcacccgtgtacgacctgctgggggtccgctggttgctgtcaccggagccgtttgcagggtccgatgaccaaggcagcgacgtgcagctggcgctacgcggaagtgtgctgccgcgtacgctcaacccgcaacgggtgcggcggcacagtgaacgcctgccaccggccgctgagttcaaccagaccgacttcagccaggtggtctggctgcctggcgggcagcacgcggagtgcccagagcacgaagcaggccgactgcggttgctgtcgcaggcctacaagccgggcagtatcgtgcttgaggtggaggctgagcagccggcatggctggtgatcaatgaggtgaccgctcgcggctggcaggcccggctgaatggcggcgtgtctctgccgctgctgcgagccaatgggctgttccatgcggtgtgtgtacctgcggggcggcacagcgtggagctcgggtacagcccgcttcagctgtggcgggacggcctgtggcagcgcttcgcggcggatgcggtcaactga

SEQ ID NO: 508690 - DNA, 384 bp, Stenotrophomonas maltophilia
atgggcctcgtccgccagggaagcacctatctcatcatcgggctcgtgcagctgctgctcgactggctggtgttcgtcgccgccaccgcgctgggcatgccggtggcgccggccaacgtcgccggacgcctggccgggatgctgctgggcttctggctcaacggccgatacaccttcgcccatgcggatggtgcacgcctcggctggcgtcgattcacacgtttcttcggggtgtgggctgcacttaccgctgccagcacggtgctggtggctttgaccagccgccatcttggattggattgggcctggctggccaagccgctgatcgaaggtgggatcgccctgatctccttcctgctgctgcgacatgtggtattccgctga

SEQ ID NO: 508691 - DNA, 387 bp, Stenotrophomonas maltophilia
atgcgtgcgcgctggttgctgttgatgatgctcctgccactgccggctttggccggcggtggcagctcgcagacactggaatggcgccagaacgatgcacggctggcgctgcgctcgaccgagggccaggtgcgcgtggacgcggccagtccggaagcccgcttcggcgtgcgcagcggcgatcgcatcctgcgggtggacgacaccgccgtacggcggatcgagcacctggccgacgccctgcgtcactccaacgcttcgactgcgtatcttctgctgcgccgcgacagacgcgagttcacggtctcggtggatgctgccgcctggcgactggcgctggtcgctccaccgccaccggcaccaccgtctcccccaccgcggcgctga

SEQ ID NO: 508692 - DNA, 330 bp, Stenotrophomonas maltophilia
atgaataataagccatttcgaattgacgctggcagcatcgtgtcacttgtagacgccggcggcgcatgcctggccacggatcggatcaccgttgatggaatgccagttggctattgctaccgagaagaagcggatttccagtcggatagcggatgggggttctttgcgggagacgagagcgaggagtatcttgcagacgccgggaatgttgagatctatgatgtgaacacaattgcgaactatgaccgtgcgatcctgcaagtgctggatcaatcgattggctccgcgttcgttcgggatgcagacgatcagttcaagccggcagagtag

SEQ ID NO: 508693 - DNA, 153 bp, Stenotrophomonas maltophilia
atgttgttaaatgagcatcgcaccgaagcggcaagcgctaaagcagaagggctgactcagaagcaattcaacgacagaatgaacaatcctgacaagtatcaattggaagatcccagctccaatagaagtcatagatttgagaagaagccctga

SEQ ID NO: 508694 - DNA, 378 bp, Stenotrophomonas maltophilia
atgcacccacacctggaacagttcggcaccacccgcctcctgcgcatcgagacccagggccccgcactcgatgtcaacggcctgcgtgatctggtcggcgacgctctcgggcatcaggccgagtggattgccatcccagtgcagcgcctgtcgccggacttcttcgaactgcgctccggcatggctgggcaatggctgcagctgctggtgaactaccgcctgcgcttcgccgtgctgggcgatgtcagtgcctaccgcgcgcagagcgagtcgctggacgcatggatcaccgagtgcaaccgcggccacaacggctgcttcgtcgccgactgggatgccttgctggcatgcctgccggccccggcccgcgccggctga

SEQ ID NO: 508695 - DNA, 1077 bp, Stenotrophomonas maltophilia
atgaagattgtagatacggtactcagctacgcaggcgactaccacccgcaatccaaaggcatgtgccgtctccgcgtgttctccggagatgacggcccccgcgttctcatcacggatcttggcccatgtaacaacgggcggtccgtcaccaatgccattgaaacgatcgtggagcgaatcgaggacagcggactggccctcggtgcgacggtttatatcgaacactatgagagacctgacccagagcatgacacctttgaccaggtgcgagtctctccaggggtgaactggcagtcgatctcgaaaaagacggcgattgcccttctgggttgtagtccggacgagcttgaagaccgtaccgaaaacaacaagcgaatcgtcggcaggaccgaaacgctcagactctccacaaggcgatttgatggttcaccctggcccgagtctcccgaggtcaccaagcgcaagctggagatcgcagacaccatgatctcgcgctcctccgtgcgcgcacttgtcgaggctggaagtggtgaacgcgagctccaacgcttgctcaagagcgatctatcgattgtcgccgaagcgttcacctcgccagatgacgaatacatctgcttttcggaatttccctttggcgacggctatgtggatttcgccgtgttcaccggtcgctcgcgcatggatgtcattctgatcgaggtcaagggagccgacttcaacctcgtcaatagcaaccactacgaggagttcaaccacaaagtactggaagccgcaggccagctccgcaaacgcctcggattgttctatcgcaaccaggagcccatccgctgcgagctgcaccgtatccgcgcagaagccgagcgcgggagttcgctccataatgcatttctcggccccgaagcccctcttgaggtcgatcccgataaggacatcaacatccgcccggtgatcatcggagggagaacccagaacgacctggaagagagccgcaaacgccacgattacgaacgcggaacgtcaccccaagtgcggctcgaatcgtgggacacctggttgcgtcgaatccagcgggactga

SEQ ID NO: 508696 - DNA, 1377 bp, Stenotrophomonas maltophilia
atgaacccctgcaaggccctgctgcccgccgttgttgccgcactgctcgcccctgccatcagccaggccacgccgcccgctcaggccgccacgccacttaccaccggcagcgcgcggctggacattgccagcggccgcgtcgagggcgacgtctgcgtgtccaacgggcctgccgggtcgctcaacaccttcgtgctcaacgcgggcctgaatgtcgcgcgggtgaccgatggcgatggcgcgccgctggtcttcgaaggatggtacgcccccggggtggatggcgaggcacgcgtatacaccgtggccaagccacccgccacgctctgcgtgcagtacgtgggcgccttcccggtctacgcccggcacgatgccccgaccgacttcaagggcctgatcgccttcaacggcgacagcgcccgcttcaccgaacagtccgcctggctgccgcaggcattcgaccccaaggcccgcgtgcgcagcagcgaaagccgctacgacctgcaggtggactgcgccggctgccgcttcctgtatctcaacggcagcccggccatcgaaggcgcgcagggccgtttccgcagcgagaacgcacggccgatcctgctgttcggcggcagcggcccgatcacccgcaccgcgcaggtcacggtcctcaacgagaccctgcccaaggccaaggttgatgcattgtccagcacggtgcagaaggtagccgacgtgcacagccgttacatgggcgtgccgctggccgaccgccccaccttcctgcgcatggtcaccctcaaccagatcgagcgcgaccgcgagggtagcgaatggggctttgccacctggccgaccatcgccatgagcggcagcatcggcaacgtggccgattcactgctggccggtggcgagaaggccgagcggcgcgtgcagtacatcgcacacgaaatgagccattactacttcggcacgctgaaccgtccgcagggcccctacttctgggtgctgctggaatccagcgccgagttcctgtcgatcaaggcgctgcgtgagatcagtggcgatgccgcggcggatcgctacattgcgcgcctgcaatcggccatcgataagacggacaagccgctgcccgcgttcgatgccatcgacgacaactcggacgtgggcgaactgtaccgctatggctacggccccttgctgttgctctcgctggaaaagcaggtgggtgaggcgaagatgcaggccttcatgcgcgagctactggccgcgccttcgccgaagaactgggcggagctgcaggccatcgcactgaaggctggcatcgatgccaaggtctgggagcattggcgggcaagctgtgtggctggcggcaggcagagatgccagtag

SEQ ID NO: 508697 - DNA, 3447 bp, Stenotrophomonas maltophilia
atgcagcaatctgggacattcgctgatcgctatctgcttttagacgagcagattcaaggcggcaccgcaatacttcacaaggcctatgaccagcagaaaaagacggttgtcgctctaaagactttcactgagcaaggccgagaccctgcaattgtgaacgaaatctggtatcgcgagcacagcgctctgagccaactgaaccacgacgggatcgtgaaaatgcttgatgcggggcgctgcgcgctgaccggccagcgttatatcgcgcttgagtggatcgatgggcagactctggaggatcatcttgccacgatggctccaatggactgggcaacattctatgaacgctacggcgaacctcttctcgccgcattgatttatgcagccgagcgcaatgtcacccaccgcgacctatcgactgagaacatccttattacaccagcaggcacgctcaagataatcgacttcgggcaagcaaagctgaacactgtaagtataggtcggaccttaataggatggcgtaccgttccgtactgcctacctgaagaggataccggaacgtacaccatgacacgggatccatatgcgtactgcgccatcgcggtacgcgcgatggccggccattcattagggaaccatgaagaactttatgcagcattacccatggtcaccttgccaccgaacgagcgctcagcaatatcacgggcgctcagccgcatccccggcgagcgcttcggcacgctcgttgaattctcccaatctcttttgcaattcgatacgatcaaggccgatagcatatcggaacgaccccgtatcgcactgcgattcaccgctagtgttagcgagcaactctccgtattcggtgatgccgaagcacgtccgctggagcagctactagcagagctaagcgatgtcgttgccgtatcgcccgcaggtgccaacgccgactccactatcgcattggagacatcttcatttcgaatttctgcctcgccggatcgcagtttcgagcacctagtcgtgaccagtctcgtgcgaaagcgattccgacttgaagcgttgttccgatcagatcgctggctactgcaggcagatttcacagatcaactaccacgatctccgtcgactcgacacaccgctcgcagagacttgcaagcgatttacgccgggctcgaatcccatctcagcgagcttgaccaagctcagcgtcacgacccgaatcgctcattctcggaatggtccaatctactcgaggcgctaagacatatcgcgcggaatggcattccagcactgcgctataacgccgttgagaaggacggcgctcgtcttatcgctgtggtcgaaaacccagagcacgcgaccgaggaacagttgcgcgttatctcggtaaaagggacctgggtatttcgtggcgaggtagaaacggtacgaggagaccagtgcgtactgctatcaactcgtccttacgtcaatctggagctcattccgagaagcggaacgcttgagattgattgggcccagacgcgaattgcccttgaccggcaagctcgcgctcttgatagattcaaaagcggtgaaacccctggagttcgcctgcgcgccctgctcacaggggctgacctaggaccaagcgaaccttcgtatgagccggtcgcgcgattctttgatcacacccttgacgacgccaagaagatcgtggtgtcccgatttgcagctggcgccgacctcatcgtgacacatggccctcctggcaccggaaagacaaaactcattgtggagcttattcgacaggagctcgagcggaatcccgatgcaagaatactgctcgcatctcagactcacgtagctctcgacaacgctctcgagcgcctattaagcgccaatcgcgatatcccatgtgtccggataggcagcgggtcgaaggaggcagatccgcgcgtggaggcttgctgtatcgatcagcgcagcttggctctgcgcaatcaggtcacgctatcgtctcagcgctttcttcaggagcgggcctcggagagggggatcgatcaacacgaagtcgaactcggactggctgtgcttgatcttattggcgctagtgaacaccttgctcaggttcaagtttcccgagaaaaactggaggaggaagcccaagcattggaagctcgagtgggtgcagagtcaacgtctacaacccgcgagcttgatgacggcctgctccgcgcaggagtacttgagagcgagttggaacggattggcagtgatgacgtccttgcgcgtagcgctgtggatgccgctcgacagaaactcacatcactcggcaaggacggcgcgcagttggcgaacaactccgaagctgagctgcgtgagtggtcacagcttcttcttggcgaccccaaacgcgaggctctaggccagttaatgaggctatctgaagaatggcgcatgcgtttcggccaatctgaagactttaaagccgcaattattgcgtcgtcttcagtcgttgccggcacctgtgtcggattctgtcgcgaggaggctgcgctgcgcacagtgtttgatctgtgcatcattgacgaagccggcaaggccacaactaccgaacttctggtgccgcttgcacaatctcgccgtgccgtactgctcggcgaccatcaccaactccctgccgtaatcgatcattccctacaatcgggagagctgcaagagcgatttggcctagcgcagcagcaacttgatgaacagctatttgagcgattgactaaggatctgggtgaaggatgcaaagccgcattgactgaacagcatcggatgcggggcgagattggccgattggtcagctggtgtttctacgataagaagctagaagagggagcatccactgcaggacgcgacatcgcaaacctcgccgtggccggtctcgaccgcgaggtaacatggctggatccttacgccggatccgatagtgtttactacgaacgcgcacgcggcaccagctacgagaacacccgagaggcgatagctatcgttgcgttgctaaagcgactgcagtttgctcttgtgagcagtggccgcccagcctccctttggccgactgtcggagtgatagctggctacgcacctcaagtagcgttgattcgaaatgaaattcgcaaggagcaggaccttgatcgtttgtctatcgactgtgcgtccgtacacgcattccagggccgcgaggttgatgtctgcatatactcgatcacaagaaagaacgaccacggaaagattggaatgctgtctgattggcgacaccttaacgttgcactttctcgcgctcgcgactacttggtaatcgttggagatctagatttctgccgcacggtgaaatctccaaatccattttcccgtctaatccgcttcattgaagaagagtccagcgaatgcgcgataagggagtggaatcatgagtga

SEQ ID NO: 508698 - DNA, 1419 bp, Stenotrophomonas maltophilia
atgagtgacctagagagtatcgcgcagcgccttgatcgtcgcgatgagtatcgcttgatcgcctatcgcgagattggtctacccgtttttcgagcaaattgcgccattaccttccaagaggccagccaactcggcgccattgaggagttcatgttgaagtcaattgcgcggggcgttgattcaataggtgacttggagagatttcttggccttccttctaaggtggtaatttcccagcttggccaactagtcttcgagaacgcagtagcatcatgcactggcgaacccattcgctactcgctcacagcggagggatcgcgccggctggccacagcggcttcctacgccttagaacggcagcgaatccccgtctacgttgacggcatcactcgccaactggtggctttagaccatcgggagctttggacaagcaaacagctggatccagtaggagtcatacctccagtggagcgtcgcttgccacgggctacggacattgacttagcgcaggtcaaccgaatggcggccctagtggcaagaatcggaagtcccactaggcgagctgtgcgcttggatgcaatcattggaaagccgaccatgctatttcgtcgcgccttagcggtggccttcaaatcgcacgacggacgccgcatatcgatcgcttttgcaattgatgggcgcgcatctatggaacatgagattgcctatcaacgtagcggcgcggcatccagatctcctttattctccaccttgcttgatgctgacaagcgtcggcgcgaagtacaagtagtcgcacgggaattccgtagagacgtccaggtggtggaggctacgcattctgagcagcatcagcagcgcccacttttaacgctgacaagcacagaagcggtaagcgtctcctcagcaaaggtgcggacacttggcgtctatgatcacccgccactacttcgtaatgccatggatcgcgcacagtcacggctactgataatttcgccatggatccgtgccgctgttgtagacgaagccttcatcaagcgcctgacggcgtgcctagatcgcgatgtagaggtgactgtggcctatggcctgggccgggaagacccaggcgaacgaaccgctgatcgacaagcgcgggaatcactggaagccctggcgaagacgttccagaacttccgtctaattcgaaagggcaacacccacgccaaggtactgttggtcgacagcgcctactttgtcaccaccagctttaactggctgtctttccgcggcgacctaaatcaaccaatgcgcgaggaggaaggaactatggtcgaagatgagtcggctgtggccgattactatgcctcgctcattaaacgcctgtcagttgacccaccagcgaatgccagattggatcgaaagagaggctctaagctctga

SEQ ID NO: 508699 - DNA, 231 bp, Stenotrophomonas maltophilia
atgctggggcaggccgatgacccgctcctggtaggtgccaaccttggttggcacatccatcggggccatcggcccatctggggcaccggtgccggacggatcgtgccaaccaaggttggcacccaccaaaggcggtatgccgtcggccccgacggcccccctgaaccaatcaccgcccgcgcgacactgcgtcgcatctaccccctgccacagggcgcgaaaaaggggtaa

SEQ ID NO: 508700 - DNA, 1008 bp, Stenotrophomonas maltophilia
atggcggtagaagcagcgaccagcgagctggtcaaggtcgtggccctgttgggcgcggcggtggtgatggtgcctttgttccgccgggccggcctgggctcggtgctgggctacttcgctgccggcctggcgatcggaccgttcgggctgggctggttctcagatccgcaggcgatcctgcataccgccgagctcggcgtggtgatgttcctgttcgtgatcggcctggaaatgcggccctcgcacctgtggagcctgcgcaaggaaatcttcgggctgggcacgctgcagatcgtcacctgtgcggtggtgctgaccagcatcgccaagctgttcggcctgccgtggcaggtggccttcatcggcgccacgggcttcgtgctcacctccaccgcggtggtgatgcagctgctggccgagcgcggtgacatcgcgctgccgtcggggcagaagatcgtttccatcctgctgtttgaagacctgctgatcgtgccgctgctggcgctggtggcgtggatgggcccgagcgcgggcagtgccgacggcgagggttcgcgctggctgtcggtggcgatcggtgtcggtgccatcgtcggcctggtgctggtcggccgcttcctgctcaacccgctgttccgcgtgctggccgagtcgaaggcgcgcgaggtgatgaccgccgccgcgctgctggtggtgctgggtgcggcgctgctgatgcagctgtccggcctgtcgatggcgatgggcgcgttcctggccggtgtgctgctgagcgagtcgaccttccgccaccagatcgaggcggacattgaaccgttccgcggcatcctgctcggcctgttcttcctcagcgtcggtatggcgctggacctgagcgtggtggccgcgcactggcagctgatcctcggcctggtgctggcgttgatggcggccaaggcgctgtgcatctacgtggtgcgcgcatcatgggcagcgaccacgcgcaggcgctggaccgtggtgtgctga

SEQ ID NO: 508701 - DNA, 960 bp, Stenotrophomonas maltophilia
ttgagggtcgggataacgttgccgatgcgtggacgggggcctgtctctgatttcgcggcaggagagtcttttctttacagggacgcggataatacgaaaacgacattaataccgctaagctggctgcgacatatctgcgaggggagcgttagcgtgtaccttttctatactgacgaaaccaaccttgatccagcccagtccgatttcttcgtttacggcggcctaaccgtaccctcagaccgggcgaggcagctaagcgaggcgatggatgcccttcgcaccaggttcggacttcctcccggcgcgatgctgaagttcaatccagctccagcggggctggatcacgatcaatttaaggctctaaaacaagccgtggttgagttggcgatcgagcatggctgccagttcatcgcaacgctcaccctacacagtatcgctagaaactctgacgaggcgagaaggtttgcgatcaacactatcgcgtatcacttcgatggcttcctcaatgcgcggggaacccacggattggtcttgatagataggttcacagacgcgcaactcgatgaacaactccgcgacaggttcgcggttggcgtccgtggactgccttactcaccgacaatgcgattgcagaacatcgttggcttccactacgcggcaatcggccaggggcatttcggatcgctcatcgatatcgtgctcggttcctttcgctttgcagtcaacgcattcactaggggtgatgaggccaggagacaatcaggtgacacaatcctccgcctgctggcgccactcttcatcaggaatgatgacggaagagtctcgggcatcgggttgcacttcagccccgttgctgttcgtgccgcaatctacagaacacagtatgaggcgttgcggacgtatctcgctgagtgcggcatagaggcaagccagcagatacgtgccgagcaagtttactga

SEQ ID NO: 508702 - DNA, 438 bp, Stenotrophomonas maltophilia
gtgaagctgcaagaaatgcccaccaacgaactgctggccctgcacaaccggatcgccgacaagtccgcaggctccaagaccttcgcgacccggaccaagctcgtcgcccggatcgaacaggtcgcggccgacaagaacatcgacctgagctcgttcgggcggccgaagaagcccaaggcggccgagcagcgcacacagccgaaggccgaggccaccgaagcgccggatgcgaccgagaagaagtcacgcggccttggcgtaggcgcactcgcccgcgcgatcctgatggaccccgcaggttacccgcacgcgctggtggcagacatggtcaacgcgcagatcgagggcgcggcggcgacggcgaagtcggttcggtggtatgccagcgacatgcgcaagaagggcatcgaggtgccgccccgtcagaaacaccactag

SEQ ID NO: 508703 - DNA, 813 bp, Stenotrophomonas maltophilia
atgcttactcacacgccccgcgaccagctccttgccctgcccaaatacgaccgcatcgccatctacctcttccgggagctcaccgaaggcatgggggcggacgccttgccgctggggagggagctagagttcgaccaggaggacgtccggaaggccatgcgaaaggccgtggctgacaaggtgatcgacactgaggtcgcgaacgtccccgatatcaagtacacctacgacgcccgtcgggagctccccgctgagatcgagcagtgcgggcccatgacctggctccagcgtggcaagggcaagtaccggcttcggcggacccgtcgcaagaacgtcatcgattttccgggcgtgctggagcaggagcccccgctggagatcgagctggaccagaccccacccttcatcaaggcgcttctcgggaacgacgagcaggccgtgttcacgcgggtgcggaacgtcggcctgctcagcaaggtcctcggctttatggcgtggccgatccaaggccaccatcgcacgacggtcagctacggacagattgaggtggacgaggtccaagcgggactggacggcggcgagggcacgctcgttcccatctcgggcaagggcggacaggacaagctgtcctggtcgcaggccctgaacctcaatacctacgcgtcggagaagcctccgatgccgggtatcaaggtccgcagcatcggcctgtggcgggatgcgctcaacaccatctggatcgtcgagttctccccgcataccgacatcgacgagatcgagatcgtcaacgtgcgccgcttcaagttccagtaa

SEQ ID NO: 508704 - DNA, 1458 bp, Stenotrophomonas maltophilia
gtgaagcaacgagacaccataaggccgggctccggcacacttgagacccaattcgggggttcggaggaaaccccaaatcggctatcctcgtgcgtccagcccgaggcgataaaccggaaagaacgtaaacagatggcaagaccaattgggatcgatctgttcgctggggcaggtggcctcagcctggggttcgagcaggccggattcgacgtggttgccgcagtggagatcgaccctgttcactccgcgatccacgagtacaacttccccaactgcaaggtcatcgcgcagtcggtcacggagctcacgggcgaaaagattagggccaaggcagggatcggcgaccgtcaggtcgacgtggtcttcggcggggccccatgccaagggttctcactcatcgggcagcgtgcgctggacgatccgcgtaactccctagtgaaggacttcgttcgcatcgtgcgcgagcttgatgcgagctacttcgtgttcgagaacgtgaagggcctcactgtgggcaggcatcgcaagttccttgacgagctgatcgcggagttcggtaagaaggggtactcggtcaggaaggagtggcgggtcctcaacgcctataactacggcgttccgcaggaccggcagcgcctcttcctcgtcggggcgaagaagggcctaaccgtgccggaataccccgaagcactgacctcgcggccgggtaggccaaacggcgggcaccctgccggcccgacatgctcggacgcgctgggagacctgcccgacgctgaggggttcaagaggctgctcgacacagacgaagtcgagacgaagaagtggggggagccaagcgactacgcgaggctcatgcgttgcgtcgacggcgacggctggcacttcggctatcagcgagagtggaacccatcgatcctgacagcaagcctgcggaccgatcacaccgacatctcgcggcggaggttctccgagaccacgccgggggctgtggagcccatctcgcgctttctgaagctggcccctgacggcgtatccaataccctgcgcgccggcaccgactcggcccgcggcgcgttcaccagcccgcgtccgatccactacaagtacgaccgctgcatcaccgtccgggagatggcgcgcctgcatggcttcccggactggttccgcttcaacgagaccaagtggcacggtgcccgccagatcgggaacgccgtgccgcccccactcgcgcgtgccgtggccgggcaggtcctctcggctatgggaaccaagcccgcgaagccgcgcaagaagctgaagctgggcgacccaaagctgcttcgcatgggcatggcggaggcctctgagtactggggcatcgagacccccatcggtcggcgcgaccgcaagagcggcgtcaagaagaggtcgcagcacgaggtcgaggcgcagcgcctcgcactcgttactggaacttga

SEQ ID NO: 508705 - DNA, 2214 bp, Stenotrophomonas maltophilia
atggacatggaagaaaacgcccgcgggcaaggcgggcgtaagggtacaactgatgaggagacggagctgtccagggctcacggaatcaatgatgtcgccggctcaccctcactgaagccattgttcgcacccatgcgggcctacgtcgaggcaggtcattgcctgatcctcctgcatcgcggcgacaagcggccgatctcaacaggctggactcgcacccaggcgaaacctgccgaagtgttggcacatgcggaacgcgagggactgaacgtgggcgtgcgcctccgccccatggacctcgtcatcgatgccgacccgcgcaactatcctgcaggtcgcgatagcttggccgaactgaccagcgacattggcttggatttgggtacgtgcccgcacgtcatcactggcgggggtggccaccactattacctacgcaagcctgcagacatacccatccttggcacgctgcagaagtaccccggtgtcgagttcaagacggcaggtcagcaggtcgtcgcggcaggttccgtgcaccccagtggcaagcgctatgagtccgaattcttcctgcttggcctggatgagatgccacccgcgtcagattcgctcttggagctgattcgcaggcccgaactgcaacaggagactgacgcagaactgtggggcgaactcacccccgagatgctggctgccaccctggaacatctcgatccaagcgacttccgcgagcacgacgaatggctcaacctgatgatggcgtgccatcacgccaccgcaggtgagggtcgcgaacagttcatcgactggagcaccagcgaccccgattacacagatgatcgccacatcatcgggcgccgctgggattcgctgcactcggcagggcgtggggggaagcccatcactgtgaagtacctgcacaaggtggtgcaggcagcaggtggggccgtgccccattccgcgcccgaagacgacttcgacattgtgccgttcgacggcgaaatgttgcctgcaatgaggcgcactgacgcaggcaagatcgtcagcaacttccccaactgcctgaagctgatgcgtcacatccgcgaccagcttggcttggcgtatgacgagttcggcgggtcaacacacctcacggcagcagagttgccatggacagttgacgttggccgcaggctggacgatgacgtggtacgccgcatccgccagtatttcgtcgaggctaccgacgcaaactggaccaaggacgacgtcctggaggcagcgctcaccattgctcgcgagaacaccgtgcatccagtccgcgactacttggacggcttgacctgggatggcgtgcctcgcatcgacaagctgctggtgacgtatgcaggagcgatggacaatgcctatgttcgcgccatcggtgccaaaacgttgattgctggcgtgaggcgcgttcgacagcctggttgcaagttcgacaacgtcatcgtcctcgaaggaagtcagggctgtggcaagagctcgttcgtcaagctgttgtcgccgcacgtcgagtggttctcagactcacccatcggcaacactgaatctaaggatgcaccactgtcattgcagggacgctggatcatcgagctgggggagatgtccgtcctgtccaagtcaggtgtcgaggcactcaaggcgttcgtttcgagcagcatcgaccacgtccgtcgaccgtatggtcgcctgcatgaagaattgcggcgtcagtgcatcttcatcggcaccaccaaccaggcgacgtacctgaaggaccagacaggcaacaggcgcttctggccagtgaaggtcggcgttatcgacctggatgccatggtggccgatcgcgaccagctctgggcagaagctgctgccagggaagcagagggagaatcgctgttcctgccgcaagaactgtgggcgatggcagccatcgagcagaaggaacgcgtggccgaagatccatgggctgacatcatccgcaagtacctggatggctcaaccacggaagatggacctgtcgagcccttggatcgcgtgcatacaaccacgctgctgagcgaagcgctgaatattcgccctggtgaccagcgccctgagcacacgcagcgcctgaaaatcgtgatggagaagtccctgggctgggaacacaagaacaacgtgcgcgtgggacatgaaggcaagcaggggcgcggatacctgaggccatga

SEQ ID NO: 508706 - DNA, 258 bp, Stenotrophomonas maltophilia
atggcaaccgccaatgagccgaagcggctcaacccccaagaactatctgaactgcatgccctgccggacgacgcagtcgtcaccagcatcgaggccgctgccttcctgcgcctgacaccccgcaccctggcctggactcgtagccagcgtcccgaaagccatccgccgcacttggtggtcggctcgcgcaccatccgctatcgcatgggtgatctgcgggctcacatgaagcgccgtggcgccaacgtggagggctga

SEQ ID NO: 508707 - DNA, 1674 bp, Stenotrophomonas maltophilia
atgagccgttcgcctgattcgctgcgcgcggtgttcctgcgccaccggccgcgcctgttgctgaccatgctgctgctgtggaccacgatgctggccggcacggcgctgctcggcctgtccggtggtttcctcacggcggccgcgctggccggtgcagccggcctcggccagggcttcaacttcttctcaccctcggccggcatccgtggcctgaccatggcgcgcatcgtgtcgcgctacttcgaaaagctggtcggccacgatgccaccctgcgcatcgcccgcgacctgcgcgtgtggttcttccgccgcgcgctgccactggcaccggcgcggctgggggccacgcgtaccggcgagctgctggcgcggctgctgggggacatcggcgaggtggatggcctgctggtgcgtgcgattgggccgctggtggcgctgggtgcgctgtcactggtggcggtcgcctcggcagcgctgatcctgccctcggcagcggtactgctggcggtgctggcgctgctgatcgccttcggtgtgccctggctgggcgtgcgtggccatgacgacgaagaggccgatcgtgccgcgcaccgcgctgcgttgcgcaccgctgcattcgaagggctggaaggggccggtgatctggctgcgctgcatgccgatgcggcctggcagctgaaggtgcgtgtggccgccaagcagctggcttcgcgggatcgtcgtcggcgctggcgcctgatcgcggcctcgaccctgcatggcctggtcgccgggctgggcctggtggcgatgctggcattggccctgcatgcggccgaacagcagcgcatcgcgccggagatggccgcgggcctggtgttcctgaccgtggcgttgatcgagctgtgggccggcatgggcctggcctggcagtcgctgcagtccgggcgcattgccgccgatcggttgcaggccatcgtcgagcaaccgccgacggtggaggacccgcaggtgccgcaggcagtgccgcaggccgcgcgcgtgcactgggatgacgtgcacttccagtggcccggtgcggcgcggccggtgttgtccggtctgcagctgaccctggcgccgggcgagcgtatcgcgattcgcggcgacagcggcagtggcaagaccacgctgtcgagcctgctgctgcggctatgggatccgcagcagggacggctgacctacggtggccgcgacctgcgtgatttcgcccaggccgactggcaccggcaactggcgtggctgccgcagaacgcgccggtgtttgccggcagcgtggccgagaacctgcgattgggtgatcccgacgccagtgacgccgcgttgtgggcggtgttgcgtcgcgtgcgcctgggtgactgggccgagcgcaacggtggcctgcagacctgggtgggcgagaacggcgcgacgatgtcggccggccaggcacgacgtctggcgctggcgcgcgcgctgctgcgcaatgcgccgatcctgctgctggacgaaccgaccgaaggcctcgacgtggataccgcacgtgcgttgctgcaggacctttccgggttgctggacgggcgcagcctgctgatgatcacccatgacgacctgcccgacggcgtggtcgatgcgcagtaccggttgcgtgatggggtgttggagcgcgaagcgtga

SEQ ID NO: 508708 - DNA, 750 bp, Stenotrophomonas maltophilia
atgattctgagttcccaggccaacctttggacgacgcctgtcgcgcgatcgcccgaggaagtcataagcttggcgaagagtctgacccgatatttgtcacagcagcatcctttaatgaagcaatggtatgcgctcccttcaagccgttcagagaaagcaattcccttggaagacagtgatgcactgtttagccggatcagtgggaaggttgagaaggatcgcaggaaatttggtgactatcccgaacttggcgcttctttgtcgcttgccaacgtcgataacgaccgtgactggtgcaagccaggagttgcagtgctcgaactggatccgacaacaggcttcaactgcttcagcctggagggaatcgagccgtttggagcatccacttcctcgttgatgctcaatgcgttgatcagaatggtggcggcaatagagcccacattcgcgagcacggatgtcaatgctagaacgcctgagaagggtctcgtgacctaccagctagacaggcgcctgtatcaacaccgccggtactttggctggatgggtttcgtccccgcgcagatcacccacgcgcagatccccgacgcacatgcggtccacgcggtcgatggccggggcacggtgatcgtctcggtgccgggcgtgttcgaccccaccgacgacgcgcaggtggacaaggtacaccgcgtcgaaatggaactggccagctatgacctgttgccggtaacggacccgagcctcaagggctag

SEQ ID NO: 508709 - DNA, 801 bp, Stenotrophomonas maltophilia
atgggcaccagaatcatcggaccccggccctggctggggccaggcgtgggaggcggtaccggcaccgtcgacgaagacggcaacccggtggatccctacggcgggccgaccaccggcgatgtggtcgatggcatccgcgatgccgtgtacggaatccagcagcgggtgcgtggtgaagccaagcccgatgcgcgcgccgagccgacggccaaggcgcgggaggtggactgctcgcagatgcccgacgagaccgcgtgcaacgagtgcctgctgaaggaggggttcatcggtccgcctctcaccccgcgctatgtcacccaaagcaacctgatcaattacgaatatcagttgtacatcgccaacctgcgctcggcgccgctgcgctttggtttcatggtcgccgacaaggcggatcctgatcggcggctattctcggtggatacgttgtttgactaccttgagcgcgatgggttctcacgcaccgtgcaggagtggcatttcaacgcctgcgagtttgatgggttctggttgaaggactgtacggtggtggaagcgaaggggaggtatgagcagtttctggatgaaaatggtcgggccaagtacagttttgtgcggcttggaatatttaactcgtggcgaaagcagatgctcagacagcgcgctgctatcgcgattgccgagccgcaaggcaggcttatctggtgcttcatgcaacgacgcacgatggcggcggccgtatcgacaggcggaatcgattcttcgctctgcagatacgagcctttccttggagaagaaagatga

SEQ ID NO: 508710 - DNA, 336 bp, Stenotrophomonas maltophilia
atgtttgagatcaacgaggatcaggaggccctgctgcgcctgcctgacccctccacttttttcccgttgttgtgccgggagattcgcgaggagtaccccggcagggtcggtcatctgagcgatggcgcgctgatggatgaggtggtgcgaagccatgaccatgcagcctatgtgctgcgcatcacccacctgccggtgctggtgcgctgggtgaaggcggacgtggcatgggcgtgcggtttgcgggccgtccctgcggtggacctgtggatacgtaacgcggagaacccgaatctggcggcggcggatctgttgtcgaatctggcagggtactag

SEQ ID NO: 508711 - DNA, 471 bp, Stenotrophomonas maltophilia
atgaaccgatacgtcattgtcgatgcagcggcctatgccgacacggccaaggcgctggcctggtacgcccaggacctgccgcaccggcccctgttggcacgccagcccgaggctgcgcatgccagcctcgggccctggttgatccagttgcccgcgcagcaccagaccccggtggatggatggttgcgcgcgctggaaatgaacaagccggtcgtggcctggctcagcagcgaagctggatttgaagcagtgttccagcacctggaagcctgcctggacctgcgccgccccagcggcaagctggcgctgctgcgctactgggatggtcgcgtgttcctgcgcttgcagcgggcgttcacgctgcagcagcgcagggagctgatgggcccgctgcggcagtggcgcttccagatgctgggccagcactacgccctggaacgtgacgcgttgtatgcagcggagaccggttga

SEQ ID NO: 508712 - DNA, 423 bp, Stenotrophomonas maltophilia
gtggcaaggacgttgattgtggtgggtgacgcaaccacgggcggtggcagggtcatcaccggctccccggttaccgacatcgagggcatggccgttgcgcgggtgggcgacaaagccacctgccccaagcaccagcgcgtgaccaccatcgtcagcggcgacatcacgctgacgtttgaaggccagcccgtcgcgcgccacggcgacaggctctcatgcggctgctcgctgattgccggcaagcaatcccgggtctatttggacatgggcggggaaggcggcgtggctgacggcgtcagccacgtcgctgctgcttcggatctggccccgttgcccgtactgccgcaggccggcaagccgcccgtgtgcgaagcatgcctgctggccgcctcgcgctccggcgcgaccttcctggggcgctga

SEQ ID NO: 508713 - DNA, 1206 bp, Stenotrophomonas maltophilia
atgagttcctccacctccgattcgccgtcgctgctgcacggtcgcgtcctcgcgttcgccgcgatcctgctggccgcgatcaacctgcgcaccgcggtcacctcgatcaccccgctgctggacgtgctcggccagcagttcggtttcggcaccaccatgaccggcgtgctgggcatgctgccgaccgcctcgttcgcgctgttcggtgtggccacgccggcactggcgcggcgcctcgggctggagcgcaccacgctgctggcgatggtgatggcaatggccggcctgctgctgcgttccagcgccggcaatgtcggcacgctgctgttcggttcagtggtggcactggctggcatgggcatcggcaacgtggtggtgccgccgctggtgaagcgctatttcgccaacaaggtcggcaccatgagcacgctctacatcagcgtgctgcagctgggcacgatgctgccggcgctgctggcggtgccggtggccaacgccgcgggctggcgcgtgtcgctgggcatgtgggcgctgctggcgctggccgctgcgctgccgtggctgctgctggccaagcgcgcgccgaagccgcaggccgacgccaccgatccaaccgcgcagccgcacggcaaggtctggcgcacgtcgctgggctggagcatgacgctgatgttcggcatgacctcgctgatgacgtactcgatgttcacctggctgccgcgcatcgtggtcgaggccggtggcacgcccgcgttcggtggcgtgatggtggccgtgttctcggccctgggcctgctgccgtcgctggttattccatcgatggcggtacgcatgcagaacccgttcccgctggtgctgatcggcttcttctcgttcgtgatcgccttcaccgggctgctgctggcaccgatgaaggcgccactgctgtgggcctgcctgctcggcgttggcccgtccaccttcccgctggcgctgaccctgatcaacctgcgcacccgcacccccaccggctcggcagcgctgtccggcttcatgcagggcgtgggttacagcttcagctgtctgggcccgttcctggtcggctggctgcacacggtcagcgacggctggactctcccgttcagcttcctgttcggctgcgccaccctgatgctgtgcgcctcgtgggtggcctgcaagccacgcaagctggaagatctctggtga

SEQ ID NO: 508714 - DNA, 1887 bp, Stenotrophomonas maltophilia
atggcccgcatcctgcgactgatcgtgctcctgctgctggccagcgtgccgccggcgttcgcgcagcaacccctgcatcttgatgcgatcgacaacggcctgctgatcctcagctaccacgacatccgcgaccaggtggccgccaagggtgatgccgatacctatgcggtgagcacgcagaacttcgccgcgcacctggactggctgggcgcacatggctaccacccggtatcgctgtcgcagctgatcgaggcctcgcagggccgcgccacgctgccgcccaagccggtgctgctgaccttcgatgatggcctgcgcagtgtctacgacaaggcttttccgctgctgcaggcctatcgctacccggccctggtggcggtgatcaccgactacgtcgacatggcgccagggcgcaccatcgattacggctaccgcccgttcgggcatgacgacttcgtcacctgggcgcagctgaagcagatgcacgacagcggcctgatcgaagtggccagccataccgatgacctgcaccacggcgtgctcgccaatccgcagggcaattccacgccggcggtggtcacccgcatctacagtccggccacgcacagctacgaaagcgaggcgcagtacgagcagcgcctgcgtgccgacctgtcgcgcagcgtgcaacgcatccagcagcatctgggcgtgcgcccgcgcgccatcgtctggccatatgcggcctacaaccagctgagcaacgacatcgccgagcagctgggcatgccggtctcgttcgacctggagggccgcagcacgccggtggccagcgacctgcatggactggcgcggttgctggtgagcgacaacccgacggtggaaggcctggcctatgaacttcgccgtgatgtcgcactcgacggtatccgcgccctgcagatcgatctggacgatgtgtatgaccccgatccggcgcagcaggcgcgcaatctcgatgcattgatcgagcgggtcaagcgcatcgcgccgacccacgtctacctgcaggccttcgcggatccggacggcaacaacactgccgatgcgctgtacttccccaaccgccacatgccgatgcgggcggacctgttcagccgcgtcgcctggcagctgaaatcccgcgcgggcgtgaaggtctacgcgtggctgcccgtgctcggcttcgagctgcccgacccggtgcagcgccaggcgttggcgatccacaacggtgatgcagatggcatgtaccggctggacttcaccaacccgaaggcgcgccagatcatgctcgacatctacgaggacctggcggtcaactcgtacttcgagggcctgctgttccatgacgatggctacctgcgcgacaccgagttgcccaggctggcggccggcgatggtggcagcgcccgcacgcaggcattgatcgacttcaccctggccctgcgtgacagcgcgcagcgctggcgaccgaagctggccacggtgcgcaacctgtatgctgagccggtactccgcccgcagagcgaagcctggttcgcgcagcgcctggacctgttcaacaaggcctacgaccagaccgcactgatggcgatgccgtggatggaaggcagcaagcaccccgaacgctggctcgaccagttgctggctgcggtacgcgcgcacgacccgcagcttcagcacacgctgttcgagctgcagaccgtcgattggcgcagcgggcagccgattcccgccgagcgcctgcgtgcgcagatccgccagctgcaggcgcagggcgtgcaccacttcgcctggtacccggacgatttcatcgccgaccagccctccacccgtgatgcccgcgcggcaatgtccgccggcaacttcccgtacccggagaagtga

SEQ ID NO: 508715 - DNA, 822 bp, Stenotrophomonas maltophilia
atggacgatatccacccgatcgcgccggacaagcgcgccgccatcctttccaccctcgccgcgatcgaacagcgccacgatgtgcgtgtgctgctggcctgcgaatcgggcagccgcggctggggcttctcctcgccggacagtgactacgacgcgcgcttcatctacgtgcatcgccagccgtggtacctcagcgtcaacgagagcaccggtcccggcgaagcgcagcgtgatgtgatcgagctgccgatcgatgaggagctcgacgtcagtggctgggacctgcgcaaggcactgcggctggtctccaagtccaatccaacgctgatcgagtggctgcgttcgccgatcgtgtaccagcaggatgacgctgcggtggcgcagctgtgggaggcagcgaaggggttctattcgccgctgggcagctggtggcactacatgagcatggcgaagaccacgtacagccgccatctgggcgagcccaccgtcagtaccaagaagtacctgtatgtgctgcgtgccctgcttgcctgccagtggatcgaaagcgaatccacgccgccgccgatggccttcgaggacctgctggaccggctgctgcctgacggtcccgtgcgcaacgccatcgacgccctgctggtggtcaagcgagccagcgccgaagtcaccgcccgtccgcgcgtcgtcatcatcagcgactacatcgaccatgcaatggccgtgcgcaccgcgcaggtcccgcagctggcggccggacagggtgacaacggctggctggacgcactgttccggaagatgctggccgaactcgcgcctgcatag

SEQ ID NO: 508716 - DNA, 1266 bp, Stenotrophomonas maltophilia
atgccggatctccggcaatccttcccatacacggcgttgaacgcgcagccctcgccacggcacctctatgccgccggccacttcgcccgcactctggtctggtcgttcgtggacctggcactcggcttctacctgcacgcgcggctgggactgtcggctgcccacaccggccagctgctggcgatctccctggcctacagcagcgttctcgacctgctgctggccgtcgtattcacccgcctgcacgaccagcgtcgcctcgccttgcgcctgcagctggtcggcggcctcggtaccgcggccagcgcctgcctgctgttcagtccgagcaccgcgaccgagcccgccttcctgccgctgctggccgcctcgctgttgttccgtacctgctacgcggtttacgacgtggcccagaatgcattgacttcgctgttgccccgcgacgagaacgaggccatgcgctacgtttccgctcgcgcggtagtggtaccgatctccaagctgtgcatcgctgcagcactgttcggcgtggtcggtgcacctgaatctgcaggcagtggcagcgcactgctgatctgcatgatcatcggcatcctgatcgcggccgccgcgcttcccctgacctgcgtcgccacgcccgcacagcccgccacaaccagcaggcccgttgccggtgccctgccgctgacggcactgctgccggttctgctggccgcagcggcagagacggcgctggtgggcctggccgggcgcctgtttccctttgccgaccagggcgcagcgctgaccttcgccatggtcgcgggcatggtggtcgcgccttggctccatctgcgcctgcgccccccgctgtgcagcgagacaggcctgatcgcgctgatgtcggtgctggccatcgctgccgtctgcgtctaccaggccaagccctccctgcctgtagcgattgcgtgtgccgctgtccatggggcggcggtggccagtgtcggcctggtactgtggcggcgcaccgcgctgatcgcccgtcgtcatgccgcccgcagcgggcgcgaggatgacctcagttgttttgcgctgctcactggaaccatgaaactgtccatcgcggcttcttcattgctgctgggcgaggtgctacccggcatacaggcaggcgatctggacacctcggtcgcgctggtttcgctggtcgccgtcggcagcctgctttcgctggccgcattggcgtggcccatgccagcggcacgcaccgagggcctgcgcccgtga

SEQ ID NO: 508717 - DNA, 939 bp, Stenotrophomonas maltophilia
atgcacagcctcaccctggccgacctcgaccgcctgggccgcagcagcggctttcgctatcggctgcctgcgcgggcggcttccgatctgtcgggcgaggattgcgtggtgcagggcagggtcgagcagcgtcgcctgcgtccgggcgtccatctggcgctgtcggacgtgatcgcacgccagccgttcgaggccacgtccgagtcgccgcctgccttctcggcaatcgtgatgctggagggccgcgcaggtgcgcgcctggcggggcaggcggtgatcggcatgggtccgggcgctggcgcgatggtgcgggccgacgccacgccgatgaccgcgatacacccagcgggccaacggatgcgcagcctgaatgtctcgctggacgcaccggccgagctggacgatccgatcatcactgaactgctatccgccgcgcatcgcagcggtggccagcagctgcgcggctggcaggtgcccgggcatctcgagcacgccgccgaccaggtgttgtcgggtacctggcagggcgcaatgcatgcacttttgtgcgaaggcattggcctgcagatgctggccatggcgttgggcgcgccggcaccggaggcatcgcccgacctgcgcgtttcagcacgtgatcgccgcatgctgcagcgggtgatcgactgcctgcaggcggcgccggccgccgaccacagcctggaggatctggcgcgcctggcctgcatgagctcgagcagcctgcggctgaagttccagcaggtgtaccggtgttcggtgttcgcctggctgcgcgagcggcgcctgcagttggcctgtgagcagctgcggcagggctgcagcgtgcagcaggccgcacatttcgtcggctaccggcacgccaccaatttcgcgaccgcattccgcgcgcgctacggcgttgcacccagcgagcttcgctga

SEQ ID NO: 508718 - DNA, 483 bp, Stenotrophomonas maltophilia
atgaacacctcactgcgctaccgccgccgcctgctggcaggtgcgctgctggtgctgccgctgctgggcggtgtctccattgccagcgcagaacgccggcccgaaggagggccgcacatgtccgcgccacgcgaagagcccctgcgggcgccgtggggctacccgcggatggagcgcccgcgcgaactgggtaatgcgcgcccagcgttccgcgaagactaccggcacaatttccgtgccgaccatgccttccgcatcggcccctatcatccgccggtcggctacgcctaccagcgttggcactacggacagatcctgccgcgcccctactgggtcggcgactatatcctcaacgatttctggctgttcggcctggacatgccgccgatgggctttgaatgggtgcgctatgggcccgatgcactgctgataaacacgggcaacggcgagatcgtgcaggtcgtctacgggcgattcttctga

SEQ ID NO: 508719 - DNA, 702 bp, Stenotrophomonas maltophilia
atgcaggcgccactgccgtcaccgatgctgccggacaccgccgaggtggccgtgctggccgattacggtgcaccgctgctgcaggcgctggcgcgctgcgagaccgcgttgccaccgggtgcgggtgagggcctggtggcggcactggcacgcatcgcgctggccctgcaggccgacaacccgacgcgtatccggcagcaggagagctggtgggggcgcctgctggggcgtgatgtcgatcgcgaggcggaagggcgtgcgctgcagtcgcagctgggcgtgctggccctgcaggcacgcgagcaggcacagcacctgcagcagcacgtgcagctgcgggccatggccatcgccgaacattcagcggcggccacggcgctggacgcctgggccgagctggcgacgtcgcggctgacgcagctggatgccgccggccaggccgcgctgtcacaacggcgggatcacctgcgacggctggcgacgctgcgtcgtctggaagccggtcaatggcagctgctgcaggaccaggacgacgtgctgctgcaacgcttcgcgcgcatccatgatgtcctgctgccggcctggcgacaggccgcattggccgaccaggccgccgcgggcgctgcattggccggcaaggctgccacgctgcacgcccagatcgatgacgaggttgcggccgctcaggctagactgcgctga

SEQ ID NO: 508720 - DNA, 840 bp, Stenotrophomonas maltophilia
gtgaccgcggcgacggccgccgccggtgacggcagcggtgtccgccgcttcgtgccgccgccgcgtgcggcggtcgatccgcaggtgttcgcgcacccggtgttcgccgggttgcgcgacgttcgtgatctgttggaaggcccggagtggccggccgtcgccgcgctcgatgcgcgcctgtcactgcccggcaagcacttgatcgagcaggatgccacgctgctggcagacggcctgcactatgaagcccgcatcgcgcagggccgcatcgccacccgcgccgacaactggcatgacctgttcaatgcactggtgtgggcccgctacccgcagctcaagctggcgctcaatgcgcagcaatgccggcatatcgaggccatgccgcccggccagcgcaaccgcgcgcaggcggcactgacccagttcgacgaaaccggtgtgatcgtgcgcgtgcgcgacaacacgttgctgcgcgcgtgggacctgcacgactggcgtgtgctgttcgaaccggcatgctggcagagcggtgacatcgccatcgctgcggtattcggtcatgcgctgatggagcaggcgctgctgccggggcgtttgctggttggcaagtgcgtggtggtgcagggcaaggacgatgaggccagcattgccgaggtggctgccgccatcgccgagcacagggctgtgaccgatcccctgcagttgcgtccgctgccgctggctggcatcccgggttggtacgaaggacaggatgccgccttctacgccagtaccgattacttccgaccgctgcgtgccggccgccagtacccgttgccgctggcgcggtggccgttgtag

SEQ ID NO: 508721 - DNA, 573 bp, Stenotrophomonas maltophilia
atgagcatcaagagtgaccgttggatccgccgcatgtccgagcagcacggcatgatcgagccgttcgaggccgggcaggtcaagcaggccaacggcgaacgcatcgtcagctacggcacgtccagctatggctatgacgtgcgctgctcgcgcgagttcaaggtgttcaccaacatcaactcgacgatcgtcgatcccaagcacttcgatccgggcagtttcgtggatatcgtcggcgatgaatgcatcatcccgccgaacagtttcgcgctggcgcgtaccgtcgagtacttccgcattccgcgcgataccctggtggtgtgcctgggcaagagcacctacgcgcgctgcggcatcatcgtcaacgtgaccccgctggaaccggagtgggaaggccacgtcaccctggaattcagcaacaccacgccgctgcctgcgcgcatctacgccaacgaaggtgtggcgcagatgctgttcttccaggcggccgccgatgacatctgcgagacgtcgtaccgcgatcgtggcggcaagtaccagggccagaccggcgtgaccctgccgcggacctga

SEQ ID NO: 508722 - DNA, 819 bp, Stenotrophomonas maltophilia
atgcacgtgatcaatggccgccccctgtgcgccgccctctcgctggccctggcctgcacggccgcttatgccggccccatcccgatcgaggatctggcacgccagccagccctgcagtccgtgtcgatgagcccagatggcaagcatctggtcgccctgatcccctcaccgggcaatccagaggagaccgccctggccagctgggacaccgatgcgctgggcggcgccccgaaggtcgtcacgccgtccggcgaacgaatgaagttcatcgccgctggcgcactgaagtccgaccagattcttgccgttggccgccaggaatggacggggccactgggtgggtgcggtgaaggcagtgtatcgggtgcaaccaagaccttcgtggtcaaaacctacctgaccgatcagtcacagaagactttcaacgaggcgttcaccgacaacacacgcaagctcggcgtgagcgagcagacccagcgctgcctggaactgggcggcagcgcgtcactggtcaacatgctgccactggaccccgatcgggtcatcatccgccagctcagcgagatctcactgaccgccaactattacctctacaacctcaagaccaaggaaacggagctcctgttccgcggcggtacgcgtgcccagccagcactgttcgacccgcgtaccggcaaggtggacgtacgcgatgagcgtgccggagcacggtggtggcgagcagttctcggcatcgatcgccaatggctggaacttcgacaagggcagcatcgtggctgccgtgcaatgggatcgcctgaacgcgctgactgttggtga

SEQ ID NO: 508723 - DNA, 2184 bp, Stenotrophomonas maltophilia
gtggctgccgtgcaatgggatcgcctgaacgcgctgactgttggtgatcgcgacttcttcagctgtgcccaggaccgggtatggggcacggatggcaagcgcatcgatcgcgaagaccggtcgattctggctggcaccaatcttgccggctgcaactctgccaatctgtatgcaaacaccatcatccagctgagcaactcagcaatccgttatgtaccttcgccggatggcagcacggtcggccccttcccgggctatcgtccgcgcccgcgcccgaccccgacctacgccaatggcggcaccgcgtactatcaggacgtgctgaactacccgttcttccatgaccaggaagtgatcaaccagcgtgaacgcgcatcgttctacggggcaaccgacttcagctttgacagtttcaactggaagacccagttcctgtacaaccgtcgcgaaaccaaggcacacagctggcgccagttctatccgaccgtgtacaacgaagcggaggacgactacttccagaccatcatgccgttcccgagcgaccagaaagtcacggtcgactacttctacggcaccaccaagttcgatggccagttcaagtccaccgacagctggtcctgggaagtcaatgcgggctacagccgttcgcgcggcaagtacagcgcgctctcgatcgacgtcgatcgtgccggcgatctgaactacaccgaagatgacatgccggtgaattacttcgaccccggcttcctgagcggcgcccgcatgaacgagctgatcgctgcggtcggccaatggcataccggcaagacgacctatgaacaggccagcgccaacgccatcttcagcggcaacctgttcaaactgcctgctggtgatgttgcttctgcgttcggtgtcgaattccgtcactacaagatcaacgacaccccgtctgactttgcgctggctgaccgctcctggaactcgacctcggccggcgtgacccgtggcacggacaaggtcaaggaagctttcgccgaggtggatgtgccgctgctgaaaggcattcccggcatcgagtcgctctcgctcaacctgtccggtcgcgtattcgagtacgactcggtaccgggttcggaccatgtctggaaaaccggcctgaactggcagatcgtcccgtcactgcgcatgcgaggcaccattggcacctcgttccgcgcccctgggctgtatgagctgtacctgggtgaccagaccggcttcaaggcacagaaccagatcgatccgtgcatccagtgggccgacagcaacaactcctttatccgtgccaattgcgctgccgccggcattcccgaaacgtatgtcggtggcggcaccggcgcgaccatctattcgggtggtggcggcaagaacaacctgaagccggagacctccaaggccaagactctgggcctggtctggagcccgacatttgccaacctcaacgtcgcactggactatttcgattacgacgtccgcggcgaaatcacccagcttgacgaatatgacatcgtcgccggctgctacggctcggcggtcttcccgaacgcgttctgcagccagctggtccgcaacagccccacggatccaacgtcgccgaacaacatcaccacgatctacaacaagtacatcaaccgcgagcgcacccgcggctacgacctgcagatcaattacgacaacgacttcgcgttcggcaagctttccgcggaagcacaggtgacctataccctggaggacacctatcagttgttcgattcggctgctgaaagcggaatcagcacctctgaccaggtcggctacatcggccgtccgaagaccgttggcctggccagcgtcagcctggaacgcggtgattggacgttcaactggcagggaacctacgtcagcagcacgcagaacaaggacctgagcccgaacttcacctactccggctaccagaacgccacccgcgacatcaaggccagctggcagttccgccacagtgtctcggtgggttacgacatggatgactggaacatcatggtcggcgtgcgcaacctgttcgacaaggctccggacctgatctcggccggtgccggtgatcgctacggcaacgtgccgatctacgcctcgcagtacgactggtacggccggacgttcttcgcgcgcgtgtcctacaagttctga

SEQ ID NO: 508724 - DNA, 477 bp, Stenotrophomonas maltophilia
atgcgcaccctgcccctgcttgccctgctgtgcatgccagcccttgcgggcgcggcgacctcgcgtcatgcgtcggcacaggtgaaggatcagcaaggcacgccctgcgtgacggtgggcgatgagcgtgcgccagtgaccgtggaccacgtgcagctgttcgagcgcagcgctggtcgcgaacgaccgttggctaccgccgagcttggcggcgacggccagacactggcaccgggccactgcctgcgcctggacgagcagcctgcgctgcgcggcgtcgcgctgtcgcccggccaagcctatggcgtggtgctggtatcgtccgtacccggcccggagggtccgtcacggcgctggtaccgcggcctgttctgcgttgtgggtgaaggcgcgcagcgccacgtgctgcccctgcgggataccccacgcgagcgccagaaggaccttgccgcctgccagctgcggcaggccccctga

SEQ ID NO: 508725 - DNA, 1209 bp, Stenotrophomonas maltophilia
atggcaagaaactggattgtgctgggtgatcccctgagcagcggcggccaggtgctgcagggatccccgatgacggatatcgacggcaagccggtcgcgcgcatcggcgatccagcgctctgcaagcgtcatggccccacccgcatcgcctccggcgacagcacggtgatcattgatggacagcccgtcgcacgtcacggcgatctctgcgcatgcggatgctcgctgatgtccagccaacagacccacgtgttcctcgaacagggcggtggcggtggcgcggcagcgggaggttcggctgcggcaacactggacaaggccgcgagcgtggccggtatcgccacgcgcctgatgggcaagcgtgaaagcggcctgttcgaccaggcactgcgcttcctgacgcgctccagggaacccctctcaaacgtgccctataccctggagctggacaacggcgagcaggtcagcgggaccaccgacagcaacggtgccaccgcgcgcgtgcagactgacagtgcggtgcgcatcgtgcgcgcgacgttgagcgagcccagtggttcggccacctgctgcagcagcgtcaccggcgccgaagacaaggtcagctttgcggtggacggcgccgcaacgaccgaagaggcctatggacagtccgtggtggaggtcgaggccaagggccacgaacgcagcctgaccgccggagaaatcgacatcgcgcgcaaggtgttcggcaccagtgtcgactatgcccgggtcaaggtacataaccatgggtactggttgttcttcgggttccaggataagaacaccgcggtcacgcccaacggtgagatgtacttcccgaagggcgttcacgaggacgactattcagcattgggtgtggacaagcagcactggttcatccacgagatggtgcatgtgtggcaataccagctgggctactccatcaaatgggtccgcatgttccgtcccaacatgaaatatgactacgcgccatcgaacgacaagcgcctgtgcgacttcaacatggagcagcagggcgacatccttgcagactacttcgtggcagcattcaccagcgaggcgtaccaggccaccatcgccgcacgtgtaggagcctccaacgtggccgcaacactggccccgatgctgtccgatttcctggccgatccggctgcagcgtccaacctgcccaacaccaaggaatga

SEQ ID NO: 508726 - DNA, 264 bp, Stenotrophomonas maltophilia
atgattgatggcagaggggatacccaacgcatgttgttcggtgatccgggcccgcccggagcggggctttcggtggccgtagtggtgctgctggtgttggcgacgatggccgcggcgatcggcttcgcgcgcctgccggatccactggtggggctggggctgatcggcatcgccgtgttcctcgccatcggcgcccgcatctgccaggcgcgcaaccagcaccaggcgctgtaccggttgttgtcgaagcggccgccgccgtag

SEQ ID NO: 508727 - DNA, 234 bp, Stenotrophomonas maltophilia
atgaaactgcaactggcctcgatggccgcactggccgtggccctcgccggaatggtgtcgaccaccgcaaccgccgccgaagtcgtcgaggttctggaagagtgcgtgcccttccgcatcagtggcaacgtgttccaccagcgctgcacgtcgtacgtggtctacgacgatggcacccgcgaagtcaccagtcactacaaccgggacgagaacgggatgatctacgatccctga

SEQ ID NO: 508728 - DNA, 984 bp, Stenotrophomonas maltophilia
atgcatatcaaggacatcatcggcctgatcggcctgcgcggttccgatccggcgctggccgcctggttcgcgcagcacggactggcatctccacctgccacgatcaccgccaaccagggccagaagtcggccagggacaaggcacatggcatggagtaccactttgccttcgacatcatccatgatcgcttctacccaccgcgggaggccaagcgcgggagctgggcgagccatctgaagtcggtcaccctgtattcccatcggccgcggaacgctcctgccctgcccgcgggattctggagtggatacgtcggaccggaggcatcgcttcaggagtgcctggacgggttcgacggccagatgcaggacttcggtgacacggcctactttgagaaagtgctcgctgacgatgtgcagatgaagctctggttcgatcagcgccaccggcacgtgcaggagctgcagatcaatctggtcgaggaccgccagttcatcggccatcacgatttcgacccggacaacgaacacaacacgttcaagcaggcctcgaccctgctggtgcgctggctgttcgaacgcgggcatctgaagctcaccgatgccctccgggccgcaggaccgggtgaggaccatgaagccatcctccatttcaccaagcagcgcctccacaatcacgtctggaagagccaggtgcaggatgacccttccctgcatgctgtgctggcacattcgcagaccacgcgcccgctgatcctcaacgacggtacccggttgccgctgtatgcgccgtggatgctgctgaaagccgctgattgctgggacgcacaccagtcgctgtacagcgacgacgccctgccggactggagcgaacgcctgacggccttcgaacgctcggtgacgttgaatgcggcgcagcagcaggcgttcctgtccgcgctggatgaagcctaccgctgcgtgaagtcggcacagggggccgcctga

SEQ ID NO: 508729 - DNA, 270 bp, Stenotrophomonas maltophilia
atgcgggctcgcctgcctggccatggtcgcctcgcatcatggcaacactctcgcagcgccttgacggggaaccagaaggacggcgacacgaagcagtctctatatcgagtcctggtctcgttggatcagcagggagtgctggcatacgggaggatggagccgcttcgccctggcatgcaactcgaggcagatatcatgggggagcgtcgcaagctttatgaatggctgctggaaccgctctattctgtgtccggaaggctgaagggctag

SEQ ID NO: 508730 - DNA, 678 bp, Stenotrophomonas maltophilia
atgggaacaacatttgtgatcaacaagatagcgctctggaagcctcgccccatcgcagaaaacaaaatattcgcggcggcgatcgcaatagtcagcgtcggcgcggcgcaaggaattctaaaccatttcgacgttttcggatcgaaagccatgaccgaacttctagccttccttgtctgcgtttggcttttccccaatgagccggggagaaagtggacattcccccttggattgagcttggtgactatcgggctattgggaggggcaatttgggtttttttcattggattcccccagaggcacgaaaccaacttccccctcctatcggacgtgcccttgaagttctatatcctcggtctagtgacaagctgcatcgtagctccactatttgaggagaagactgtgaggcatctcctttgggatggagcctcccattactttgggaaactggcagccaccatcggcgtaagcgcgctatttgcagcggttcatgtcgatggaatgatttcggccttcctcgtctcggtaaccctctgcatcggaacgcaattcttcaatctcaactcagcgcagcgatcaataattcacggcatcatcaatttatctatgctgcattgggttcttctgtatccgacactccgtgaatttattcagtcaacctttggttcgtcatcgtaa

SEQ ID NO: 508731 - DNA, 150 bp, Stenotrophomonas maltophilia
atgtcggagatcatgaattttagcgacattgtccggccagtctgggccaaagacgtcactttcgagctgaactatgccgtggtgtgcaacgacggggtcgggtactggatctccccggctaacgaagtgcagacctcccgccgggcgtga

SEQ ID NO: 508732 - DNA, 156 bp, Stenotrophomonas maltophilia
atgcctctgaccgacgcagccatcaggcgcgccaagccgcagaagatcaccgacggcggcggcctgtacctctacctcaccccgcccgatgcacgcagcgggcgctggaagtaccgcatcgcgggcaaggagaagctgctgtcgattggcctgtag

SEQ ID NO: 508733 - DNA, 912 bp, Stenotrophomonas maltophilia
atgaagaagaagctaattggaatctttgtagccgcagcagcaggggctgtcgtgattggtgcagttttcggccaccgactgcaagcaaatgatgcgcagcgaaaatctgaggagaaggaggtccaagagaatgcaccaattggaaggggcgattcacccgcctttcccgcaacaagcgcacgtaaattggaactggagaaaaagatcccgcccggatcatataaggctctgggccctaaagcctacgagatcatccgtggtcgtgaattccgtcctcccggcgacgcactggcccatgttaagcagttgattcaacgatccgaatcgggcgacgccacggcaacctacgaaatatatctaaccattgatcagtgccgaaccttcacatcagatcgggccgacgagttggccgattctgcctcgagtctcggatcaggcggttggttccttgaaagatcagagcggcttctcaaggagtgtgaatcattggtgctggatcaaaaaatttaccgggccgattggctctcaaaggccgcggccatggggtcgcaggaggcgatgctcgcttattcagtatcgccacaggaagttatcggatcgctcgatgacgttattcatgatccagagaagcttgctcaatggaaagagaattcatctagatatctcaatgagatggaaagccaaggaaattttgccgcgctgggaagtttaaaaagagcctacacctatgggcggacccgagaaagagacccggtcgcagcaacggcctatacccgtgtgcttagtcgcatcaatcctcgactttacaccagcgacgacgttatcaaagcggagagcgatctcagcagtagggagcgagccgatgcgctagcgttgtctgaaaaaatcttccataactgttgtgtcccatga

SEQ ID NO: 508734 - DNA, 537 bp, Stenotrophomonas maltophilia
atgcgcaggttcctgttgctgatttcgccactggtgttgctgggctgttcccggccagcagcgcaatcggatccaacaccggccccgccccccgcagccgccagcgcggaggtacaggccaacgcggaaaccgccacatccgccctgcaatcaccgacggtcgatccgctgtttgctgcagtggacaccgacgccgcccccccttcggtgatgctcaaccgctacgtgatcgcgctgctcaaccgcgaccgcagcaccagcgacgccgcctgggcattcccgcccgccgatccgcggcacgcagacgatgccgtcctgcgccagctgcaggacctgcgcacgctgcgcctggacagcgagcccccgatcgcacgcgacgaccagcagcccccccggctgctggaggtaccggtgcggatccgcgcggtcaccacacaaggcaccttccgctttggcggctggtaccgcgtgcaacccagccgcgacggtcgcgcctggcagatccagtcggcgcaactgcgcccgtcgctggactga

SEQ ID NO: 508735 - DNA, 480 bp, Stenotrophomonas maltophilia
atgaccgagaaggatcgggacgccctgctgagagcgttggccggaaccattgaccgctggaccggcaacatcgagctgcccaacggcaccaaactgactgacctccaggtcaatggccaggatgatgcccaagcactgctccacaccatcaatggcttgtcctccacccaatttgcaactcgcggcgccgcactgccctcgatcatcgagccagtcccaaacgacagcctcgctacgcgaattgacttgtatctgcaggatctgaggaatgcgaagacctctagcggcaacctgctggacagcgaaaatacgctgacaatcttcaaggaaattgctggcccagatgttccaatgtcgcagctgagccagacgcatgtgcgtgcgtttcttagtgggcttcacgactggcccagcaacgcaaggaaaaagacagcctacaaggacctgtcagcgcttcaaatcatcgccatggtcaagtga

SEQ ID NO: 508736 - DNA, 3252 bp, Stenotrophomonas maltophilia
atggagctccgttcgacaagtgcgtctgttaccgcccttctgttgatcccattgatggtgacaagtacctgttgggtccctgtcgcttctgcgaggaaggcaactcacgtctatctccagaataacaatggcagttccgacgccaaggacatggacaggatcaccgtcacccatacacgtggcccggcgatcggatcatcgggtgtaatctccatcggccgaggcgtcacctaccactccgatatctccatgcctgccaaaacggcgctggaacagcaaacggatgatcgccgtgacgactgcagtgagcgcaagggcaatcctgtagtgctctataccggcaacaaggtagagatcgagcgcgacttcaccgtcaatggggaaatgggcctgttcctcgagcgcacctacaatcaccactggagcgctgcgggcctgttcggcaatcactggatcagcaacttcgactacagtctggcgttctccaacgcgcagaagacggcgtgggcacagcgcccggatggccgacgcatcaagctgatctggaatgaggcccaagcgcgatggaacgaggatcgtgccaagccgatcgcgtacctggtgaagaacagcgatggaagtttcacgctgaacaacgaagagcttggaatcgagcgctacaacacagacggctacataaccgaactccgtaacgagcaaggtgtgtactggagctttgcctacatcaacaagtatctgcagacggtcacccactcgtcaggtcgcagcatccagttcacgtggaacaatggtctgctgactcaggccaaggacccggctgggaatgtctaccagtatggctataccgccgacgtgttcggagcgggccgcgcccgccttgccagcgtaacgttgccaggtgcgccgcagacgaccattacctatcactatgaagacgcgcgctatctggggggattcaccggaaaatcctataacggcgtgcggtactccaccttcgcatacgatgccaacaagcgagcgacgctgtcggagcatgccggtgggatagagcggcataccttcagctacctggtcgagagcagtgcgccggtggcagcacctcctgcgcctgcccggccgggcggtgtccgcggcagcgaagagaccgggtggtgtgagtacaacccacgccagggtcagatctgcattcaaccccgctcgctgccgggtggtccgatccaacttgctgcacgtagcgggtcacagagcacgcttctggcggcaacggatgaccggacacgtccggtcaagctgaaagtcagcgagaccaacccactgggacgtaccaccacgtatgcctacgaggatggtcgtcaggtgtcggtgaccggaagccggtcatcgacctgccctgcgagctacaaggagcgaacgtacgatgccaacggaaacccggacatcgttcatgacttcgtcgacaacatcaccgacttcgactacagccccgaaggcaacctgttgaagaaaagcgaggccgttggaagctcggccgaacgcgccacgctctatcaatgggacgcggcaggacgtcatttgctgaaagaaacgcttgtcggcgatggcgaaaccaccttcacctacgatggcagaggcaacgtcagctctgcgacgatacgaaatttgacggcggtgggtgtaaacggccaagcaagaaccacacattacacctacacctatcacgctaacgggctgacggcttccatcaaagaggatggtcctctggcacaggacgacatcacgtccacattcgatgcgaagggagatctgtccagcgtcaccaatgcattgggacacaaggtgacgtactcggcctacaacgaactgggcttgccgggtcgcattaccggtatcaatggtgacgtccgtgaaattacctatgacgctcgtgggcgtgtgttgacggatcgaatcaatacgggctcgggttgggccacgacgacgacgacctacaacgcgaccggcgacatcgccagcgtaaccacacctgttggaatcaggacccagtacagctacgacgcaggacgtcgactgctgaccgaagtgtatccactgggcaatggcacctggtcatggacgcgccatagctacgatacggcttcaaaccgcacccgcactgagaaagccttcaccgactatgccggtgacagcatggtcaagggcgtcgtcgatggcgtcatccacgatacacagtggaactggttcgtcagcggttgggcgtgttcaacgggttcacggagctccattctggtagacgcgtatgcagatggtggtgtgtaccttggaggttcgcaggcaaacctggcgagtgagcctggcgtcgcagcggagtgcggtaccagtggaacgagctatcggttcgagattccactgacgctggccaaccggcagaagctgggggatcgcaagatcgtggtgtacggcgtctcgccgcttggcagcagcagcaatcgttcgctgggcaactcgggagtatttgcaatacccagcgcaaacatcaccggagatatcggaggtgttgtgcaggatgccggttggaactacaccgtcgaaggctgggcatgttcgatcggtgtggatgcgtcgatcgacgtgcacgtatacgcgggtggagcagcgggcggcggtacctacgtggcgagtgcacgcgcgaatcatgcctctgatgcgaacattgccaacgcgtgtcaagcgcagggccgtgcttactacttccgtgtacccctggatgcaggcatgcgcgcttcccatgggggaaagagcatctacatccatggcatctcccccgtcggcggccacaatctcaccatcaatcgatcaggtgccttctccattccggccatcacacggaccgccgacctcgtcactgcttctgctgcgcccacgcatatcttcaatggccagtcatcgagcgtgaccttccagttccgcaataccggcaatgtcatctggactcctggcgacacctacatggtgctcaagactctgcgcaccagcgatgccatcgggctttcaggtccggtagcgcctggcgcggtcgcaacgttcaccgtgaatgttgcgccggtgaacagtggtagtggcgtggctcagttccagtacctgggtcagctggcgtcggggcctactgcctggggcccacaaggccaggtagccgtgagagcagagaacgacaagggcagttgcaacccgaaattctgtgaagaaccgcgctaa
